United States Patent Application Publication US 2025/0333808 A1 - sequence listing, part 2

SEQ ID NO: 13016 - DNA, 80 bp, synthetic construct
  misc_feature 1..80: note = Synthetic: >HCV.A10-cand-7300-7379
  source 1..80: mol_type = other DNA
tgagaagaaattggctcgaactattttagatttacagttgaagaaagctgaaccccaccagaaatctggtcgtgttaatg

SEQ ID NO: 13017 - DNA, 80 bp, synthetic construct
  misc_feature 1..80: note = Synthetic: >HCV.A11-cand-10-89
  source 1..80: mol_type = other DNA
gggttgttcccaccccagaggcccacgtggcggctagtactccggtatcacggtacccttgtacgcctgttttatactcc

SEQ ID NO: 13018 - DNA, 80 bp, synthetic construct
  misc_feature 1..80: note = Synthetic: >HCV.A11-cand-50-129
  source 1..80: mol_type = other DNA
tccggtatcacggtacccttgtacgcctgttttatactccctcccccctgtaaccttagaagcaatcaaatcaagttcaa

SEQ ID NO: 13019 - DNA, 80 bp, synthetic construct
  misc_feature 1..80: note = Synthetic: >HCV.A11-cand-160-239
  source 1..80: mol_type = other DNA
aacaagcacttctgtttccccggtgaagttgcatagactgtttaccacggttgaaagcgaccgatccgttatccgctcat

SEQ ID NO: 13020 - DNA, 80 bp, synthetic construct
  misc_feature 1..80: note = Synthetic: >HCV.A11-cand-480-559
  source 1..80: mol_type = other DNA
ggagcaggcgatcgcaaaccagcaattagcctgtcgtaacgcgaaagtctgtggcggaaccgactactttgggtgaccgt

SEQ ID NO: 13021 - DNA, 80 bp, synthetic construct
  misc_feature 1..80: note = Synthetic: >HCV.A11-cand-560-639
  source 1..80: mol_type = other DNA
gtttcccttaattttattcatggctgcttatggtgacaatcatagattgttatcataaagcgagttggattggccatccg

SEQ ID NO: 13022 - DNA, 80 bp, synthetic construct
  misc_feature 1..80: note = Synthetic: >HCV.A11-cand-640-719
  source 1..80: mol_type = other DNA
gtaaaagtcaagtatatcatttacttgtttgtaggatttactcctttgaacgtccatacactcaatcttatcagagtcac

SEQ ID NO: 13023 - DNA, 80 bp, synthetic construct
  misc_feature 1..80: note = Synthetic: >HCV.A11-cand-720-799
  source 1..80: mol_type = other DNA
attactagtaagatatcactatcacaatgggagctcaagtatcatctcagaaagtgggtgcccatgaaaacaccaatgtg

SEQ ID NO: 13024 - DNA, 80 bp, synthetic construct
  misc_feature 1..80: note = Synthetic: >HCV.A11-cand-800-879
  source 1..80: mol_type = other DNA
gccaccggtgggtcaactgtaaactacactactattaattactacaaagactcagctagtaacgctgcttctaaacagga

SEQ ID NO: 13025 - DNA, 80 bp, synthetic construct
  misc_feature 1..80: note = Synthetic: >HCV.A11-cand-880-959
  source 1..80: mol_type = other DNA
cttctcccaagacccatcaaaatttactgagccagttaaagacatcatgctcaagtcagcccctgctctaaactcaccca

SEQ ID NO: 13026 - DNA, 80 bp, synthetic construct
  misc_feature 1..80: note = Synthetic: >HCV.A11-cand-960-1039
  source 1..80: mol_type = other DNA
atattgaggcatgcgggtacagtgatagagtgatgcagttgactcttgggaattccaccattactacacaagaagcagcc

SEQ ID NO: 13027 - DNA, 80 bp, synthetic construct
  misc_feature 1..80: note = Synthetic: >HCV.A11-cand-1040-1119
  source 1..80: mol_type = other DNA
aattcagtggtagcatacggtgagtggccgtcttatttgtcagacaaagaggctaacccggttgaccagccaacggagcc

SEQ ID NO: 13028 - DNA, 80 bp, synthetic construct
  misc_feature 1..80: note = Synthetic: >HCV.A4-cand-5970-6049
  source 1..80: mol_type = other DNA
gaacaaggagagatccaatgggttaaacctaataaagaaacagggaggcttaacatcaatgggccaacccgcactaagct

SEQ ID NO: 13029 - DNA, 80 bp, synthetic construct
  misc_feature 1..80: note = Synthetic: >HCV.A4-cand-6050-6129
  source 1..80: mol_type = other DNA
tgaacccagtgtgttccatgatgtctttgagggcaacaaagagccagcagtcttacacagtaaagacccccgccttgagg

SEQ ID NO: 13030 - DNA, 80 bp, synthetic construct
  misc_feature 1..80: note = Synthetic: >HCV.A4-cand-6170-6249
  source 1..80: mol_type = other DNA
cacactccatgagcctgatgagtacatcagagaggcagcccttcactatgcaaatcagttgaaacagctagacatagaca

SEQ ID NO: 13031 - DNA, 80 bp, synthetic construct
  misc_feature 1..80: note = Synthetic: >HCV.A4-cand-6210-6289
  source 1..80: mol_type = other DNA
cttcactatgcaaatcagttgaaacagctagacatagacaccacccagatgagcatggaggaagcttgttatggcacaga

SEQ ID NO: 13032 - DNA, 80 bp, synthetic construct
  misc_feature 1..80: note = Synthetic: >HCV.A4-cand-6290-6369
  source 1..80: mol_type = other DNA
caaccttgaagccattgaccttcacactagtgcaggttacccctacagtgccctgggaataaagaagagagatattttag

SEQ ID NO: 13033 - DNA, 80 bp, synthetic construct
  misc_feature 1..80: note = Synthetic: >HCV.A4-cand-6350-6429
  source 1..80: mol_type = other DNA
aaagaagagagatattttagaccctaccaccagagatgtgagcaagatgaagttttacatggacaagtatggccttgacc

SEQ ID NO: 13034 - DNA, 80 bp, synthetic construct
  misc_feature 1..80: note = Synthetic: >HCV.A4-cand-6430-6509
  source 1..80: mol_type = other DNA
tcccttactccacctatgtcaaagacgagcttcgctcgatagacaagatcaagaaagggaaatctcgcctgattgaagcc

SEQ ID NO: 13035 - DNA, 80 bp, synthetic construct
  misc_feature 1..80: note = Synthetic: >HCV.A4-cand-6510-6589
  source 1..80: mol_type = other DNA
agcagcttgaatgactcagtctacctcagaatggcctttgggcacctctatgaaactttccatgcaaaccctgggactgt

SEQ ID NO: 13036 - DNA, 80 bp, synthetic construct
  misc_feature 1..80: note = Synthetic: >HCV.A4-cand-6610-6689
  source 1..80: mol_type = other DNA
gcaacccagatgtgttttggagcaagctaccaatcctgctccctggttccctctttgcctttgactactcaggctatgat

SEQ ID NO: 13037 - DNA, 80 bp, synthetic construct
  misc_feature 1..80: note = Synthetic: >HCV.A4-cand-6670-6749
  source 1..80: mol_type = other DNA
ttgactactcaggctatgatgctagtctcagcccagtttggtttagagcactggagctagtcctcagagagataggctat

SEQ ID NO: 13038 - DNA, 80 bp, synthetic construct
  misc_feature 1..80: note = Synthetic: >HCV.A4-cand-6750-6829
  source 1..80: mol_type = other DNA
agtgaggaggcggtttcgctcattgaaggaatcaaccacacacaccatgtgtaccgcaacaaaacttattgtgtacttgg

SEQ ID NO: 13039 - DNA, 80 bp, synthetic construct
  misc_feature 1..80: note = Synthetic: >HCV.A4-cand-6880-6959
  source 1..80: mol_type = other DNA
ataacatcatcatcagagcactacttattaagacattcaagggtattgatttggatgaactcaacatggttgcctacggg

SEQ ID NO: 13040 - DNA, 80 bp, synthetic construct
  misc_feature 1..80: note = Synthetic: >HCV.A4-cand-6990-7069
  source 1..80: mol_type = other DNA
attgactgcctagaactagcaagaacaggtaaggagtatggtctaaccatgacccctgcagataagtccccttgcttcaa

SEQ ID NO: 13041 - DNA, 80 bp, synthetic construct
  misc_feature 1..80: note = Synthetic: >HCV.A4-cand-7110-7189
  source 1..80: mol_type = other DNA
ttcctgcctgatgatcaattcccattcttgattcaccctaccatgccaatgaaggagatccatgaatccattcgatggac

SEQ ID NO: 13042 - DNA, 80 bp, synthetic construct
  misc_feature 1..80: note = Synthetic: >HCV.A4-cand-7150-7229
  source 1..80: mol_type = other DNA
ccatgccaatgaaggagatccatgaatccattcgatggaccaaggatgcgcgcaatactcaagatcacgtgcgatcctta

SEQ ID NO: 13043 - DNA, 80 bp, synthetic construct
  misc_feature 1..80: note = Synthetic: >HCV.A4-cand-7310-7389
  source 1..80: mol_type = other DNA
attggcaattcccaattatgagaatctgagacgcaattggctcgaattattttagatttacggttaaacacacctcaacc

SEQ ID NO: 13044 - DNA, 80 bp, synthetic construct
  misc_feature 1..80: note = Synthetic: >HCV.A5-cand-6690-6769
  source 1..80: mol_type = other DNA
tacgggacattggttatccagaggaggcagtgtcactcatagaagggataaaccacacacaccatgtataccggaacaag

SEQ ID NO: 13045 - DNA, 80 bp, synthetic construct
  misc_feature 1..80: note = Synthetic: >HCV.A5-cand-6770-6849
  source 1..80: mol_type = other DNA
acatactgcgtcctcggtgggatgccatcagggtgctcaggcacttccatctttaattcaatgattaacaacattataat

SEQ ID NO: 13046 - DNA, 80 bp, synthetic construct
  misc_feature 1..80: note = Synthetic: >HCV.A5-cand-6850-6929
  source 1..80: mol_type = other DNA
caggaccctcttgatcaaaactttcaaagggattgatttagatgagctaaatatggtggcctatggagatgatgtgttag

SEQ ID NO: 13047 - DNA, 80 bp, synthetic construct
  misc_feature 1..80: note = Synthetic: >HCV.A5-cand-6910-6989
  source 1..80: mol_type = other DNA
ctatggagatgatgtgttagccagctaccccttccccattgactgtttagaactagccaagactggtaaagagtatggcc

SEQ ID NO: 13048 - DNA, 80 bp, synthetic construct
  misc_feature 1..80: note = Synthetic: >HCV.A5-cand-6980-7059
  source 1..80: mol_type = other DNA
gagtatggcctgaccatgacacctgcagacaaatcaccttgcttcaatgaagtgacgtgggagaacgccacctttttgaa

SEQ ID NO: 13049 - DNA, 80 bp, synthetic construct
  misc_feature 1..80: note = Synthetic: >HCV.A5-cand-7070-7149
  source 1..80: mol_type = other DNA
ttgccagaccaccagttcccgttcttgatccaccccacaatgcccatgaaagaaatccacgaatccatacggtggactaa

SEQ ID NO: 13050 - DNA, 80 bp, synthetic construct
  misc_feature 1..80: note = Synthetic: >HCV.A5-cand-7150-7229
  source 1..80: mol_type = other DNA
ggatgcgcgcaatactcaagatcatgtgcgctctctgtgcttattggcttggcacaatggtaaggatgagtatgaaaact

SEQ ID NO: 13051 - DNA, 80 bp, synthetic construct
  misc_feature 1..80: note = Synthetic: >HCV.A5-cand-7230-7309
  source 1..80: mol_type = other DNA
tcgtgagcacaattagatcgattccagttggaaaagcattggcaattccaaactttgagaatttgaggaggaattggctt

SEQ ID NO: 13052 - DNA, 80 bp, synthetic construct
  misc_feature 1..80: note = Synthetic: >HCV.A5-cand-7290-7369
  source 1..80: mol_type = other DNA
atttgaggaggaattggcttgaattgttttaaatttacagtttgtaactgaaccccaccagaaatctggtcgtgttaatg

SEQ ID NO: 13053 - DNA, 80 bp, synthetic construct
  misc_feature 1..80: note = Synthetic: >HCV.A6-cand-0-79
  source 1..80: mol_type = other DNA
aacagcctgtgggttgcacccacccacagggcccactgggcgctagcacactgattctatggaatctttgtgcgcctttt

SEQ ID NO: 13054 - DNA, 80 bp, synthetic construct
  misc_feature 1..80: note = Synthetic: >HCV.A6-cand-80-159
  source 1..80: mol_type = other DNA
tataaccccttcccccaaaactgtaacttagaagaatagcactctatcgatcaatagcaggcatggcgcgccagtcatgt

SEQ ID NO: 13055 - DNA, 80 bp, synthetic construct
  misc_feature 1..80: note = Synthetic: >HCV.A6-cand-160-239
  source 1..80: mol_type = other DNA
ctagatcaagcacttctgtctccccggatcgagtatcaatagactgctagcgcggttgaaggagaaaacgtccgttaccc

SEQ ID NO: 13056 - DNA, 80 bp, synthetic construct
  misc_feature 1..80: note = Synthetic: >HCV.A6-cand-240-319
  source 1..80: mol_type = other DNA
ggctaactacttcgagaaacttagtagcaccattgaagctgcggagtgtttcgctcagcactcccccagtgtagatcagg

SEQ ID NO: 13057 - DNA, 80 bp, synthetic construct
  misc_feature 1..80: note = Synthetic: >HCV.A6-cand-300-379
  source 1..80: mol_type = other DNA
ctcccccagtgtagatcaggtcgatgagtcactgcactccccacgggcgaccgtggcagtggctgcgttggcggcctgcc

SEQ ID NO: 13058 - DNA, 80 bp, synthetic construct
  misc_feature 1..80: note = Synthetic: >HCV.A6-cand-510-589
  source 1..80: mol_type = other DNA
gtgtgtcgtaacgggcaactctgcagcggaaccgactactttgggtgtccgtgtttccttttaattcttatattggctgc

SEQ ID NO: 13059 - DNA, 80 bp, synthetic construct
  misc_feature 1..80: note = Synthetic: >HCV.A6-cand-560-639
  source 1..80: mol_type = other DNA
gtgtttccttttaattcttatattggctgcttatggtgacaattgagagattgttaccatatagctattggattggccat

SEQ ID NO: 13060 - DNA, 80 bp, synthetic construct
  misc_feature 1..80: note = Synthetic: >HQ537729.1-cand-6610-6689
  source 1..80: mol_type = other DNA
aatatgtctgtgtgttctgctgtgtcttctagtgacagtacatataaaaatgacaattttaaggaatatttaaggcatgg

SEQ ID NO: 13061 - DNA, 80 bp, synthetic construct
  misc_feature 1..80: note = Synthetic: >HQ537729.1-cand-6700-6779
  source 1..80: mol_type = other DNA
gatttacagtttatttttcagttatgtaaaataacactaacagcagatgttatgacatatattcatagtatgaacccgtc

SEQ ID NO: 13062 - DNA, 80 bp, synthetic construct
  misc_feature 1..80: note = Synthetic: >HQ537729.1-cand-6780-6859
  source 1..80: mol_type = other DNA
cattttagaggattggaattttggccttacaccaccgccttctggtaccttagaggacacatatcgctatgtaacatcac

SEQ ID NO: 13063 - DNA, 80 bp, synthetic construct
  misc_feature 1..80: note = Synthetic: >HQ537729.1-cand-6860-6939
  source 1..80: mol_type = other DNA
aggctgtaacttgtcaaaaacccagtgcaccaaaacctaaagatgatccattaaaaaattatactttttgggaggttgat

SEQ ID NO: 13064 - DNA, 80 bp, synthetic construct
  misc_feature 1..80: note = Synthetic: >HQ537729.1-cand-6940-7019
  source 1..80: mol_type = other DNA
ttaaaggaaaagttttctgcagacttagatcaatttccgttgggccgtaaatttttgttacaggcaggactaaaggccag

SEQ ID NO: 13065 - DNA, 80 bp, synthetic construct
  misc_feature 1..80: note = Synthetic: >HQ537729.1-cand-7020-7099
  source 1..80: mol_type = other DNA
gcctaattttagattaggcaagcgtgcagctccagcatctacatctaaaaaatcttctactaaacgtagaaaagtaaaaa

SEQ ID NO: 13066 - DNA, 80 bp, synthetic construct
  misc_feature 1..80: note = Synthetic: >HQ537729.1-cand-7100-7179
  source 1..80: mol_type = other DNA
gttaatgtgtaaatgtgtatgcatgtatactgtgtgttatgtgttgtagtgattgtatatatattatgtgttgtggtgcc

SEQ ID NO: 13067 - DNA, 80 bp, synthetic construct
  misc_feature 1..80: note = Synthetic: >HQ537729.1-cand-7180-7259
  source 1..80: mol_type = other DNA
tgtttgtgttgtacatggcgtgtaaatgtgtgtataatattgtgcaatgtgttgtacgtgggtgttttttgtatgtatgt

SEQ ID NO: 13068 - DNA, 80 bp, synthetic construct
  misc_feature 1..80: note = Synthetic: >HQ537729.1-cand-7260-7339
  source 1..80: mol_type = other DNA
tgttgtatgtatgtcagtacgcaataaaagtgatgtgtgtgtttataattaacactgtattgttgtatgactatgggtgc

SEQ ID NO: 13069 - DNA, 80 bp, synthetic construct
  misc_feature 1..80: note = Synthetic: >HQ537729.1-cand-7330-7409
  source 1..80: mol_type = other DNA
ctatgggtgcacccatatgacttacataattacagtacacgctatatgttgtatataacaattctacctccattttgtgt

SEQ ID NO: 13070 - DNA, 80 bp, synthetic construct
  misc_feature 1..80: note = Synthetic: >HQ537729.1-cand-7410-7489
  source 1..80: mol_type = other DNA
gttagtgtcattctacctccattttgtgtgttagtgtcctttacattacctttcaaccgatttcggttgctgttggcaag

SEQ ID NO: 13071 - DNA, 80 bp, synthetic construct
  misc_feature 1..80: note = Synthetic: >HQ537729.1-cand-7490-7569
  source 1..80: mol_type = other DNA
ctttatatgttttttacaaaaacattcctacctcagcagaacacttaatccttgtgttcctgatatatactgtttgccaa

SEQ ID NO: 13072 - DNA, 80 bp, synthetic construct
  misc_feature 1..80: note = Synthetic: >HQ537729.1-cand-7570-7649
  source 1..80: mol_type = other DNA
ctttatattggcttttgccaatctttaaacttgattcatcttgcagtattagtcatttttcatacttgtggtccacccac

SEQ ID NO: 13073 - DNA, 80 bp, synthetic construct
  misc_feature 1..80: note = Synthetic: >HQ537729.1-cand-7640-7719
  source 1..80: mol_type = other DNA
gtccacccacacttgtaacacttgtaacagtgcttttaggcacatattttttgcatttctaaagggctttaattgcacac

SEQ ID NO: 13074 - DNA, 80 bp, synthetic construct
  misc_feature 1..80: note = Synthetic: >HQ537729.1-cand-7720-7799
  source 1..80: mol_type = other DNA
ttggctttacatattatgtgtgtttgccaacaccaccctacacatcctgccaactttaagttaaaacatgcatgtaaaac

SEQ ID NO: 13075 - DNA, 80 bp, synthetic construct
  misc_feature 1..80: note = Synthetic: >HQ537729.1-cand-7800-7879
  source 1..80: mol_type = other DNA
attactcactgtattacacattgttatatgcacacaggtgtgtccaaccgatttggattacagttttataagcatttctt

SEQ ID NO: 13076 - DNA, 80 bp, synthetic construct
  misc_feature 1..80: note = Synthetic: >KC470236.1-cand-2240-2319
  source 1..80: mol_type = other DNA
gtacaattcttaagatatcaaggaatagaatttatatcttttttatgtgcattaaaggaatttttaaagggtactcccaa

SEQ ID NO: 13077 - DNA, 80 bp, synthetic construct
  misc_feature 1..80: note = Synthetic: >KC470236.1-cand-2320-2399
  source 1..80: mol_type = other DNA
aaaaaactgtatagttatatatggacctgcgaatacaggaaagtcacatttttgtatgagccttatgcattttttacagg

SEQ ID NO: 13078 - DNA, 80 bp, synthetic construct
  misc_feature 1..80: note = Synthetic: >KC470236.1-cand-2400-2479
  source 1..80: mol_type = other DNA
gcacagttatttcatatgtaaactccaccagccacttttggctagaaccacttgcagatgcaaaactagcaatgttagat

SEQ ID NO: 13079 - DNA, 80 bp, synthetic construct
  misc_feature 1..80: note = Synthetic: >KC470236.1-cand-2480-2559
  source 1..80: mol_type = other DNA
gatgcaaccggtacctgctggtcatatttcgataattatatgagaaatgcattagatgggtatgcaataagtttagatag

SEQ ID NO: 13080 - DNA, 80 bp, synthetic construct
  misc_feature 1..80: note = Synthetic: >KC470236.1-cand-2570-2649
  source 1..80: mol_type = other DNA
agtttactacaaatgaaatgtccaccattattaataacctccaataccaatcctgtggaagacgataggtggccatattt

SEQ ID NO: 13081 - DNA, 80 bp, synthetic construct
  misc_feature 1..80: note = Synthetic: >KC470236.1-cand-2650-2729
  source 1..80: mol_type = other DNA
acgtagtaggctaacagtgtttaaatttcctaatgcatttccatttgaccaaaacaggaatccagtgtacacaatcaatg

SEQ ID NO: 13082 - DNA, 80 bp, synthetic construct
  misc_feature 1..80: note = Synthetic: >KC470236.1-cand-2810-2889
  source 1..80: mol_type = other DNA
gaaaacactttcacaacgtttaaatgtgttacaggacaaaatactagaatactatgaacaagacagtaaatcaatatatg

SEQ ID NO: 13083 - DNA, 80 bp, synthetic construct
  misc_feature 1..80: note = Synthetic: >KC470236.1-cand-2900-2979
  source 1..80: mol_type = other DNA
ttattggaaatgtgtgcgaatggaaaatgcaatattttatgcagcacgagaacgtggcatgcatactattgaccaccagg

SEQ ID NO: 13084 - DNA, 80 bp, synthetic construct
  misc_feature 1..80: note = Synthetic: >KC470236.1-cand-2980-3059
  source 1..80: mol_type = other DNA
tggtgccaaccataaacatttcaaaatgtaaagcatatcaagctattgaactgcagatggcactagaaagtgttgcacaa

SEQ ID NO: 13085 - DNA, 80 bp, synthetic construct
  misc_feature 1..80: note = Synthetic: >KC470236.1-cand-3060-3139
  source 1..80: mol_type = other DNA
actgaatacaatacagaggagtggacattaaaagacactagtaatgaactgtggcatacacagcccaaacaatgttttaa

SEQ ID NO: 13086 - DNA, 80 bp, synthetic construct
  misc_feature 1..80: note = Synthetic: >KC470236.1-cand-3090-3169
  source 1..80: mol_type = other DNA
aaagacactagtaatgaactgtggcatacacagcccaaacaatgttttaaaaaacaaggaactacagtggaggtgtggta

SEQ ID NO: 13087 - DNA, 80 bp, synthetic construct
  misc_feature 1..80: note = Synthetic: >KC470236.1-cand-3280-3359
  source 1..80: mol_type = other DNA
tatattatatgaacgagcacctaaaagtatactatgaagtgtttattcaagatgcggaaaggtatgggactagtggcaaa

SEQ ID NO: 13088 - DNA, 80 bp, synthetic construct
  misc_feature 1..80: note = Synthetic: >KC470236.1-cand-3300-3379
  source 1..80: mol_type = other DNA
ctaaaagtatactatgaagtgtttattcaagatgcggaaaggtatgggactagtggcaaatgggaagtgcattataatgg

SEQ ID NO: 13089 - DNA, 80 bp, synthetic construct
  misc_feature 1..80: note = Synthetic: >KC470236.1-cand-3380-3459
  source 1..80: mol_type = other DNA
caacataattcattgtcctgactctatgtgcagtaccagtgacggatcggtacccactactgaacttactaccgaattat

SEQ ID NO: 13090 - DNA, 80 bp, synthetic construct
  misc_feature 1..80: note = Synthetic: >KC470236.1-cand-3460-3539
  source 1..80: mol_type = other DNA
caaacaccaccgcgacccatcccaccgcaacaaccccatgcacccaaaaaacaatcccgccgccgtctcgaaagcgacct

SEQ ID NO: 13091 - DNA, 80 bp, synthetic construct
  misc_feature 1..80: note = Synthetic: >KC470236.1-cand-3540-3619
  source 1..80: mol_type = other DNA
cgacagtgtgcagtcacagagcccactgagcccgacggagtgtccctggaccatcttaacaacccactccacagtaacag

SEQ ID NO: 13092 - DNA, 80 bp, synthetic construct
  misc_feature 1..80: note = Synthetic: >NC_001477.1-cand-10460-10539
  source 1..80: mol_type = other DNA
ccgggaggctgcaaaccatggaagctgtacgcatggggtagcagactagtggttagaggagacccctcccaagacacaac

SEQ ID NO: 13093 - DNA, 80 bp, synthetic construct
  misc_feature 1..80: note = Synthetic: >NC_001477.1-cand-10570-10649
  source 1..80: mol_type = other DNA
tgtaccctggtggtaaggactagaggttagaggagaccccccgcacaacaacaaacagcatattgacgctgggagagacc

SEQ ID NO: 13094 - DNA, 80 bp, synthetic construct
  misc_feature 1..80: note = Synthetic: >NC_001477.1-cand-10620-10699
  source 1..80: mol_type = other DNA
acaaacagcatattgacgctgggagagaccagagatcctgctgtctctacagcatcattccaggcacagaacgccaaaaa

SEQ ID NO: 13095 - DNA, 80 bp, synthetic construct
  misc_feature 1..80: note = Synthetic: >NC_001489.1-cand-50-129
  source 1..80: mol_type = other DNA
gggacttgatacctcaccgccgtttgcctaggctataggctaaattttccctttcccttttccctttcctattccctttg

SEQ ID NO: 13096 - DNA, 80 bp, synthetic construct
  misc_feature 1..80: note = Synthetic: >NC_001489.1-cand-80-159
  source 1..80: mol_type = other DNA
ggctataggctaaattttccctttcccttttccctttcctattccctttgttttgcttgtaaatattaattcctgcaggt

SEQ ID NO: 13097 - DNA, 80 bp, synthetic construct
  misc_feature 1..80: note = Synthetic: >NC_001489.1-cand-160-239
  source 1..80: mol_type = other DNA
tcagggttcttaaatctgtttctctataagaacactcatttttcacgctttctgtcttctttcttccagggctctcccct

SEQ ID NO: 13098 - DNA, 80 bp, synthetic construct
  misc_feature 1..80: note = Synthetic: >NC_001489.1-cand-190-269
  source 1..80: mol_type = other DNA
aacactcatttttcacgctttctgtcttctttcttccagggctctccccttgccctaggctctggccgttgcgcccggcg

SEQ ID NO: 13099 - DNA, 80 bp, synthetic construct
  misc_feature 1..80: note = Synthetic: >NC_001489.1-cand-390-469
  source 1..80: mol_type = other DNA
taggctacgggtgaaacctcttaggctaatacttctatgaagagatgccttggatagggtaacagcggcggatattggtg

SEQ ID NO: 13100 - DNA, 80 bp, synthetic construct
  misc_feature 1..80: note = Synthetic: >NC_001489.1-cand-400-479
  source 1..80: mol_type = other DNA
gtgaaacctcttaggctaatacttctatgaagagatgccttggatagggtaacagcggcggatattggtgagttgttaag

SEQ ID NO: 13101 - DNA, 80 bp, synthetic construct
  misc_feature 1..80: note = Synthetic: >NC_001489.1-cand-470-549
  source 1..80: mol_type = other DNA
agttgttaagacaaaaaccattcaacgccggaggactgactctcatccagtggatgcattgagtggattgactgtcaggg

SEQ ID NO: 13102 - DNA, 80 bp, synthetic construct
  misc_feature 1..80: note = Synthetic: >NC_001489.1-cand-540-619
  source 1..80: mol_type = other DNA
actgtcagggctgtctttaggcttaattccagacctctctgtgcttagggcaaacatcatttggccttaaatgggattct

SEQ ID NO: 13103 - DNA, 80 bp, synthetic construct
  misc_feature 1..80: note = Synthetic: >NC_001489.1-cand-700-779
  source 1..80: mol_type = other DNA
atttaggtttttcctcattcttaaataataatgaacatgtctagacaaggtattttccagactgttgggagtggtcttga

SEQ ID NO: 13104 - DNA, 80 bp, synthetic construct
  misc_feature 1..80: note = Synthetic: >NC_001489.1-cand-710-789
  source 1..80: mol_type = other DNA
ttcctcattcttaaataataatgaacatgtctagacaaggtattttccagactgttgggagtggtcttgaccacatcctg

SEQ ID NO: 13105 - DNA, 80 bp, synthetic construct
  misc_feature 1..80: note = Synthetic: >NC_001489.1-cand-790-869
  source 1..80: mol_type = other DNA
tctttggcagacattgaggaagagcaaatgattcaatcagttgataggactgcagtgactggtgcttcttattttacttc

SEQ ID NO: 13106 - DNA, 80 bp, synthetic construct
  misc_feature 1..80: note = Synthetic: >NC_001489.1-cand-860-939
  source 1..80: mol_type = other DNA
attttacttctgtggatcaatcttcagttcatacagctgaggttggatcacaccaggttgaacctttgagaacctctgtt

SEQ ID NO: 13107 - DNA, 80 bp, synthetic construct
  misc_feature 1..80: note = Synthetic: >NC_001489.1-cand-940-1019
  source 1..80: mol_type = other DNA
gataaacccggttcaaagaagactcagggagagaaatttttcttgattcattctgcagattggcttactacacatgctct

SEQ ID NO: 13108 - DNA, 80 bp, synthetic construct
  misc_feature 1..80: note = Synthetic: >NC_001611.1-cand-164860-164939
  source 1..80: mol_type = other DNA
aatttctatgtcatcgttagtatattgtgaacaacaagagcagatatctataggaaagggtggaatgcgatacattgatc

SEQ ID NO: 13109 - DNA, 80 bp, synthetic construct
  misc_feature 1..80: note = Synthetic: >NC_001611.1-cand-164940-165019
  source 1..80: mol_type = other DNA
tatgtagttttaaaacacacgagaactttgaagaatttatataaattattccatcgatacatccttctatgttaatatgt

SEQ ID NO: 13110 - DNA, 80 bp, synthetic construct
  misc_feature 1..80: note = Synthetic: >NC_001611.1-cand-165020-165099
  source 1..80: mol_type = other DNA
atatatccaggaattcttttatgaatatcaggaaatgtataaactaaaacattgcccggatacggtgcttctattggcat

SEQ ID NO: 13111 - DNA, 80 bp, synthetic construct
  misc_feature 1..80: note = Synthetic: >NC_001611.1-cand-165100-165179
  source 1..80: mol_type = other DNA
tatatccgttcttaacttgcaaaatgtaaccaatacctttgcatggcttgttttgttcggtaacgttagtttaaacttga

SEQ ID NO: 13112 - DNA, 80 bp, synthetic construct
  misc_feature 1..80: note = Synthetic: >NC_001611.1-cand-165180-165259
  source 1..80: mol_type = other DNA
cgaatggattaattacaatagcatgatctgcgcatctattaagtttttttactttaacgcccttgtatgtttttacagag

SEQ ID NO: 13113 - DNA, 80 bp, synthetic construct
  misc_feature 1..80: note = Synthetic: >NC_001611.1-cand-165260-165339
  source 1..80: mol_type = other DNA
actttatctaaatttctagtgcttgtatgtgttataaatataactggatatagaactgaatcacctaccttagataccca

SEQ ID NO: 13114 - DNA, 80 bp, synthetic construct
  misc_feature 1..80: note = Synthetic: >NC_001611.1-cand-165340-165419
  source 1..80: mol_type = other DNA
attacattttatcagatccagataataaacaaattttgtcgccctaactaattctatattgttatatattttacaattgg

SEQ ID NO: 13115 - DNA, 80 bp, synthetic construct
  misc_feature 1..80: note = Synthetic: >NC_001611.1-cand-165420-165499
  source 1..80: mol_type = other DNA
ttatgatatcatgtaataacttggaatctaacgcgcatcgtcgtacgtttacacaattgtgatttagtatagtatatcta

SEQ ID NO: 13116 - DNA, 80 bp, synthetic construct
  misc_feature 1..80: note = Synthetic: >NC_001611.1-cand-165500-165579
  source 1..80: mol_type = other DNA
cacatatatttttccgcgctatagtattctggactagcgataaaactatcgttatatctgtcttcgatgaactcatcaag

SEQ ID NO: 13117 - DNA, 80 bp, synthetic construct
  misc_feature 1..80: note = Synthetic: >NC_001611.1-cand-165580-165659
  source 1..80: mol_type = other DNA
atattgctctctgtcatattcatacacctgcataaactttctagacattgtacaatatgtgttattttaggatcatattt

SEQ ID NO: 13118 - DNA, 80 bp, synthetic construct
  misc_feature 1..80: note = Synthetic: >NC_001611.1-cand-165660-165739
  source 1..80: mol_type = other DNA
acatatttacggtatatcaaagatgttagatatagttaataggacacatataataatgaatattaaacactagtatagca

SEQ ID NO: 13119 - DNA, 80 bp, synthetic construct
  misc_feature 1..80: note = Synthetic: >NC_001611.1-cand-165740-165819
  source 1..80: mol_type = other DNA
gaagtttatactcacaaaacatcataaaatgagtcgtcgtctgatttatgttttaaatatcaaccgcaaatcaactcata

SEQ ID NO: 13120 - DNA, 80 bp, synthetic construct
  misc_feature 1..80: note = Synthetic: >NC_001611.1-cand-165820-165899
  source 1..80: mol_type = other DNA
aaatacaagagaatgaaatatatacatattttagttattgcaatatagaccatacttctacagaacttgattttgtagtt

SEQ ID NO: 13121 - DNA, 80 bp, synthetic construct
  misc_feature 1..80: note = Synthetic: >NC_001611.1-cand-165900-165979
  source 1..80: mol_type = other DNA
aaaaactatgatctaaacagacgacagcctgtaactgggtataccgcactacactgctatttgtataataattactttac

SEQ ID NO: 13122 - DNA, 80 bp, synthetic construct
  misc_feature 1..80: note = Synthetic: >NC_001611.1-cand-165980-166059
  source 1..80: mol_type = other DNA
aaacgatgtactgaaggtattattaaatcatggagtggatgtaacgataaaacccagtagcggacatatgcctatttata

SEQ ID NO: 13123 - DNA, 80 bp, synthetic construct
  misc_feature 1..80: note = Synthetic: >NC_001611.1-cand-166060-166139
  source 1..80: mol_type = other DNA
tattgcttactagatgttgcaatatttcacacaatgtagtgatagatatgataaacaaagataaaacccacttatcgcat

SEQ ID NO: 13124 - DNA, 80 bp, synthetic construct
  misc_feature 1..80: note = Synthetic: >NC_001611.1-cand-169510-169589
  source 1..80: mol_type = other DNA
actttctaacggcgcatctctaacaatcaaggatagcagtaataaggatccaattgctgtttattttagaagaacgataa

SEQ ID NO: 13125 - DNA, 80 bp, synthetic construct
  misc_feature 1..80: note = Synthetic: >NC_001611.1-cand-169670-169749
  source 1..80: mol_type = other DNA
aattatagaaattttgattatccatttttcaggaagttagttttgactaataaacattgtctcgataattattataatac

SEQ ID NO: 13126 - DNA, 80 bp, synthetic construct
  misc_feature 1..80: note = Synthetic: >NC_001611.1-cand-169750-169829
  source 1..80: mol_type = other DNA
aggtgaccgcagacatggaacgccgctacatatattggcgactaataaaaaattaataacacctaattacatgaagttat

SEQ ID NO: 13127 - DNA, 80 bp, synthetic construct
  misc_feature 1..80: note = Synthetic: >NC_001611.1-cand-169830-169909
  source 1..80: mol_type = other DNA
tagtgtataacggaaatgatataaacgcacgcggcgaaaatacacaaatgcaaactccattacacaaatatttgtgtaaa

SEQ ID NO: 13128 - DNA, 80 bp, synthetic construct
  misc_feature 1..80: note = Synthetic: >NC_001611.1-cand-169980-170059
  source 1..80: mol_type = other DNA
taggagccgatctaactattccaaatgatgatgaaatgataccagtaatttactgcatacacgtaaatgctgaatatggt

SEQ ID NO: 13129 - DNA, 80 bp, synthetic construct
  misc_feature 1..80: note = Synthetic: >NC_001611.1-cand-170060-170139
  source 1..80: mol_type = other DNA
tataacaatattactaacataaggataatacgtaaactacttaatcttagcagacatgctccacataatctatttagaga

SEQ ID NO: 13130 - DNA, 80 bp, synthetic construct
  misc_feature 1..80: note = Synthetic: >NC_001611.1-cand-170220-170299
  source 1..80: mol_type = other DNA
atattaattgttactttgaaggacgtacacctcttcattgcgctatacagtataacttcactcatattgcggaatactta

SEQ ID NO: 13131 - DNA, 80 bp, synthetic construct
  misc_feature 1..80: note = Synthetic: >NC_001611.1-cand-170380-170459
  source 1..80: mol_type = other DNA
tcttaaatggactagttttttgattagtcgtctaccgcctaaaagtgtcatgagctcactgactaaccatataatagatt

SEQ ID NO: 13132 - DNA, 80 bp, synthetic construct
  misc_feature 1..80: note = Synthetic: >NC_001611.1-cand-170460-170539
  source 1..80: mol_type = other DNA
atgttcttacagacaataaaaatattatttggcaaagtcaaatgattaataagtatgtgttgttacttgatccatccttt

SEQ ID NO: 13133 - DNA, 80 bp, synthetic construct
  misc_feature 1..80: note = Synthetic: >NC_001611.1-cand-170540-170619
  source 1..80: mol_type = other DNA
tattctagattcagaaatgctattaaaagcaaattaaatcaatacgattatcgttgcttcaattacaatagatatcgtgt

SEQ ID NO: 13134 - DNA, 80 bp, synthetic construct
  misc_feature 1..80: note = Synthetic: >NC_001611.1-cand-170620-170699
  source 1..80: mol_type = other DNA
taataaaaagtatcgcaaagttttacatgacattgatatatatattaaggatgtacaagtattaaaatctattctcatcg

SEQ ID NO: 13135 - DNA, 80 bp, synthetic construct
  misc_feature 1..80: note = Synthetic: >NC_001611.1-cand-170700-170779
  source 1..80: mol_type = other DNA
ccaataatgtaacactatacgacactattgtaaataatacatcagagtttcctgtacatcgtctaaacaacaaacaatta

SEQ ID NO: 13136 - DNA, 80 bp, synthetic construct
  misc_feature 1..80: note = Synthetic: >NC_001611.1-cand-170780-170859
  source 1..80: mol_type = other DNA
attaatacagtaaattccaatatatatcatgatcttatcgaaaaagttattaaaaaatcattagagaaatgtactctaac

SEQ ID NO: 13137 - DNA, 80 bp, synthetic construct
  misc_feature 1..80: note = Synthetic: >NC_001611.1-cand-170860-170939
  source 1..80: mol_type = other DNA
taatgccgtcctcgagtatatgatcgcatctcgatctcaatcatcttatttaagtcgtattcctaatgagatattactca

SEQ ID NO: 13138 - DNA, 80 bp, synthetic construct
  misc_feature 1..80: note = Synthetic: >NC_001611.1-cand-170940-171019
  source 1..80: mol_type = other DNA
aaatactatataacctcagcgtctacgatttacgcaaactatatgcaagatacatgctagagaatgagacagattatcat

SEQ ID NO: 13139 - DNA, 80 bp, synthetic construct
  misc_feature 1..80: note = Synthetic: >NC_001611.1-cand-171020-171099
  source 1..80: mol_type = other DNA
atagagtcaaggtcaatttctacgcagactgaataatgttatatacactacatatttttatgtcattataactacttgta

SEQ ID NO: 13140 - DNA, 80 bp, synthetic construct
  misc_feature 1..80: note = Synthetic: >NC_002017.1-cand-1260-1339
  source 1..80: mol_type = other DNA
taaagaattcaacaaattagaaaaaaggatggaaaatttaaataaaaaagttgatgatggatttctggacatttggacat

SEQ ID NO: 13141 - DNA, 80 bp, synthetic construct
  misc_feature 1..80: note = Synthetic: >NC_002017.1-cand-1340-1419
  source 1..80: mol_type = other DNA
ataatgcagaattgttagttctactggaaaatgaaaggactctggatttccatgactcaaatgtgaagaatctgtatgag

SEQ ID NO: 13142 - DNA, 80 bp, synthetic construct
  misc_feature 1..80: note = Synthetic: >NC_002017.1-cand-1420-1499
  source 1..80: mol_type = other DNA
aaagtaaaaagccaattaaagaataatgccaaagaaatcggaaatggatgttttgagttctaccacaagtgtgacaatga

SEQ ID NO: 13143 - DNA, 80 bp, synthetic construct
  misc_feature 1..80: note = Synthetic: >NC_002017.1-cand-1500-1579
  source 1..80: mol_type = other DNA
atgcatggaaagtgtaagaaatgggacttatgattatcccaaatattcagaagagtcaaagttgaacagggaaaaggtag

SEQ ID NO: 13144 - DNA, 80 bp, synthetic construct
  misc_feature 1..80: note = Synthetic: >NC_002017.1-cand-1520-1599
  source 1..80: mol_type = other DNA
atgggacttatgattatcccaaatattcagaagagtcaaagttgaacagggaaaaggtagatggagtgaaattggaatca

SEQ ID NO: 13145 - DNA, 80 bp, synthetic construct
  misc_feature 1..80: note = Synthetic: >NC_002017.1-cand-1670-1749
  source 1..80: mol_type = other DNA
gggcaatcagtttctggatgtgttctaatggatctttgcagtgcagaatatgcatctgagattagaatttcagaaatatg

SEQ ID NO: 13146 - DNA, 80 bp, synthetic construct
  misc_feature 1..80: note = Synthetic: >NC_002018.1-cand-10-89
  source 1..80: mol_type = other DNA
tttaaaatgaatccaaatcagaaaataataaccattggatcaatctgtctggtagtcggactaattagcctaatattgca

SEQ ID NO: 13147 - DNA, 80 bp, synthetic construct
  misc_feature 1..80: note = Synthetic: >NC_002018.1-cand-40-119
  source 1..80: mol_type = other DNA
accattggatcaatctgtctggtagtcggactaattagcctaatattgcaaatagggaatataatctcaatatggattag

SEQ ID NO: 13148 - DNA, 80 bp, synthetic construct
  misc_feature 1..80: note = Synthetic: >NC_002018.1-cand-130-209
  source 1..80: mol_type = other DNA
caaactggaagtcaaaaccatactggaatatgcaaccaaaacatcattacctataaaaatagcacctgggtaaaggacac

SEQ ID NO: 13149 - DNA, 80 bp, synthetic construct
  misc_feature 1..80: note = Synthetic: >NC_002018.1-cand-210-289
  source 1..80: mol_type = other DNA
aacttcagtgatattaaccggcaattcatctctttgtcccatccgtgggtgggctatatacagcaaagacaatagcataa

SEQ ID NO: 13150 - DNA, 80 bp, synthetic construct
  misc_feature 1..80: note = Synthetic: >NC_002018.1-cand-300-379
  source 1..80: mol_type = other DNA
caaaggagacgtttttgtcataagagagccctttatttcatgttctcacttggaatgcaggaccttttttctgacccaag

SEQ ID NO: 13151 - DNA, 80 bp, synthetic construct
  misc_feature 1..80: note = Synthetic: >NC_002018.1-cand-390-469
  source 1..80: mol_type = other DNA
gaatgacaggcattcaaatgggactgttaaggacagaagcccttatagggccttaatgagctgccctgtcggtgaagctc

SEQ ID NO: 13152 - DNA, 80 bp, synthetic construct
  misc_feature 1..80: note = Synthetic: >NC_002018.1-cand-480-559
  source 1..80: mol_type = other DNA
caattcaagatttgaatcggttgcttggtcagcaagtgcatgtcatgatggcatgggctggctaacaatcggaatttcag

SEQ ID NO: 13153 - DNA, 80 bp, synthetic construct
  misc_feature 1..80: note = Synthetic: >NC_002018.1-cand-550-629
  source 1..80: mol_type = other DNA
ggaatttcaggtccagataatggagcagtggctgtattaaaatacaacggcataataactgaaaccataaaaagttggag

SEQ ID NO: 13154 - DNA, 80 bp, synthetic construct
  misc_feature 1..80: note = Synthetic: >NC_002018.1-cand-630-709
  source 1..80: mol_type = other DNA
gaagaaaatattgaggacacaagagtctgaatgtgcctgtgtaaatggttcatgttttactataatgactgatggcccga

SEQ ID NO: 13155 - DNA, 80 bp, synthetic construct
  misc_feature 1..80: note = Synthetic: >NC_002018.1-cand-670-749
  source 1..80: mol_type = other DNA
gtaaatggttcatgttttactataatgactgatggcccgagtgatgggctggcctcgtacaaaattttcaagatcgaaaa

SEQ ID NO: 13156 - DNA, 80 bp, synthetic construct
  misc_feature 1..80: note = Synthetic: >NC_003310.1-cand-48010-48089
  source 1..80: mol_type = other DNA
aactaaactactaactgttattgataactagaatcagaatctaatgatgacataactaagaagtttatctacagccaatt

SEQ ID NO: 13157 - DNA, 80 bp, synthetic construct
  misc_feature 1..80: note = Synthetic: >NC_003310.1-cand-48250-48329
  source 1..80: mol_type = other DNA
aataacggtgacagggttaacacctttccaataaataatttttttaaccggaataacatcatcaaaagacttattatcct

SEQ ID NO: 13158 - DNA, 80 bp, synthetic construct
  misc_feature 1..80: note = Synthetic: >NC_003310.1-cand-48330-48409
  source 1..80: mol_type = other DNA
ctctcattgatttttcgcgggatacatcatctattatagcatcagcatcagaatctgtaggccgtgtatcagcatccatt

SEQ ID NO: 13159 - DNA, 80 bp, synthetic construct
  misc_feature 1..80: note = Synthetic: >NC_003310.1-cand-48410-48489
  source 1..80: mol_type = other DNA
gtcgtagaccaacgaggaggagtatcgtcggaactgtacaccatagtactacgttgaagatcatacagagctttattaac

SEQ ID NO: 13160 - DNA, 80 bp, synthetic construct
  misc_feature 1..80: note = Synthetic: >NC_003310.1-cand-48490-48569
  source 1..80: mol_type = other DNA
ttctcgcttctccatattaagttgtttagttagttgtgcagtagctccttagtccaatgtttttaataaccgcacacaat

SEQ ID NO: 13161 - DNA, 80 bp, synthetic construct
  misc_feature 1..80: note = Synthetic: >NC_003310.1-cand-48570-48649
  source 1..80: mol_type = other DNA
ctctgtgtcagaacgctcgtcaatatagatcgtagaaattttttagagagaactaacacaactagcaataaaactgatct

SEQ ID NO: 13162 - DNA, 80 bp, synthetic construct
  misc_feature 1..80: note = Synthetic: >NC_003310.1-cand-48650-48729
  source 1..80: mol_type = other DNA
tattttatcatttttttattcatcatcctctggtggttcgtcgttcctatcgaatgtagctctgattaacccgtcatcta

SEQ ID NO: 13163 - DNA, 80 bp, synthetic construct
  misc_feature 1..80: note = Synthetic: >NC_003310.1-cand-48960-49039
  source 1..80: mol_type = other DNA
cagttaggacacggtgtattgtatttctcgtcgagaacgttaaaataatcgttgtaactcacatcctttattttatctat

SEQ ID NO: 13164 - DNA, 80 bp, synthetic construct
  misc_feature 1..80: note = Synthetic: >NC_003310.1-cand-49110-49189
  source 1..80: mol_type = other DNA
ccgctagtacccttaatcatatcacatagtgttttatattctaaatttgtggcaatggacggtttatttctatacgatag

SEQ ID NO: 13165 - DNA, 80 bp, synthetic construct
  misc_feature 1..80: note = Synthetic: >NC_003310.1-cand-49340-49419
  source 1..80: mol_type = other DNA
ggcatcatccacatattgtgatagtaattctcggatatcagtagtgactaccgccattgatatttgttcatttgatgagt

SEQ ID NO: 13166 - DNA, 80 bp, synthetic construct
  misc_feature 1..80: note = Synthetic: >NC_003310.1-cand-49420-49499
  source 1..80: mol_type = other DNA
aactactaatgtatacattttccatttataacacttatgtattaactttgtttatttatattttttcattattatgttga

SEQ ID NO: 13167 - DNA, 80 bp, synthetic construct
  misc_feature 1..80: note = Synthetic: >NC_003310.1-cand-49500-49579
  source 1..80: mol_type = other DNA
tattaataatcgtattgtggttatatggctacaatttcataatgagttgaagtcagtgtcctatgatcaatgacgatagc

SEQ ID NO: 13168 - DNA, 80 bp, synthetic construct
  misc_feature 1..80: note = Synthetic: >NC_003310.1-cand-49570-49649
  source 1..80: mol_type = other DNA
tgacgatagctttactctgaaagaaagtatcaaatcgatagtgcagagtcaacaatgaaaatggataagacgatgacaaa

SEQ ID NO: 13169 - DNA, 80 bp, synthetic construct
  misc_feature 1..80: note = Synthetic: >NC_003310.1-cand-49650-49729
  source 1..80: mol_type = other DNA
gtttcagaatagagtcaaaatggtaaaagaaataaatcagacgataagagcagcacaaactcattgagacattgaaacta

SEQ ID NO: 13170 - DNA, 80 bp, synthetic construct
  misc_feature 1..80: note = Synthetic: >NC_003310.1-cand-49730-49809
  source 1..80: mol_type = other DNA
ggatatataaaatttaagtgaatgattaggacaggactactactctagaagatatagcaccatctattattccaaataat

SEQ ID NO: 13171 - DNA, 80 bp, synthetic construct
  misc_feature 1..80: note = Synthetic: >NC_003310.1-cand-49810-49889
  source 1..80: mol_type = other DNA
cagaaaacttataaactattctcggacatttcagtcattggcaaagcatcacagaatccgagtaagatgatatatgctcg

SEQ ID NO: 13172 - DNA, 80 bp, synthetic construct
  misc_feature 1..80: note = Synthetic: >NC_003310.1-cand-60400-60479
  source 1..80: mol_type = other DNA
agatgatatgtatgtccattaaagttaaattgtgtagcgcttctttttagcctagcagccaatactttaacatcactaat

SEQ ID NO: 13173 - DNA, 80 bp, synthetic construct
  misc_feature 1..80: note = Synthetic: >NC_003310.1-cand-60480-60559
  source 1..80: mol_type = other DNA
atcgatatacaaaggagatgatttatcgatggtattaagaattcgtttttcgacatccgtcaaaaccaattcctttttgc

SEQ ID NO: 13174 - DNA, 80 bp, synthetic construct
  misc_feature 1..80: note = Synthetic: >NC_003310.1-cand-60560-60639
  source 1..80: mol_type = other DNA
ctgtatcatccagtttgccattctttgtaaagaaattattttctactagactattaataagactgataaggattcctcca

SEQ ID NO: 13175 - DNA, 80 bp, synthetic construct
  misc_feature 1..80: note = Synthetic: >NC_003310.1-cand-60640-60719
  source 1..80: mol_type = other DNA
taattgcacaatccaaactttttcacaaaactagactttacgagatctacaggaatgcgtacttcaggtttcttagcttg

SEQ ID NO: 13176 - DNA, 80 bp, synthetic construct
  misc_feature 1..80: note = Synthetic: >NC_003310.1-cand-60720-60799
  source 1..80: mol_type = other DNA
tgattttttcttttgcggacattttctagtgaccaactcatctaccatttcattgattttagcagtgaaataagctttca

SEQ ID NO: 13177 - DNA, 80 bp, synthetic construct
  misc_feature 1..80: note = Synthetic: >NC_003310.1-cand-60800-60879
  source 1..80: mol_type = other DNA
atgcacgggcactgatactattgaaaacgagttgatcttcaaattccgccatttaagttcaccaaacaacttttaaatac

SEQ ID NO: 13178 - DNA, 80 bp, synthetic construct
  misc_feature 1..80: note = Synthetic: >NC_003310.1-cand-60880-60959
  source 1..80: mol_type = other DNA
aaatatatcaatagtagtagaataagaactataaaaaaaataataattaaccaataccaaccccaacaacctgtattatt

SEQ ID NO: 13179 - DNA, 80 bp, synthetic construct
  misc_feature 1..80: note = Synthetic: >NC_003310.1-cand-60960-61039
  source 1..80: mol_type = other DNA
agttgatgtgacagttttctcatcacttagaacagatttaacaatttctataaagtctgtcaaatcatcttcctgagaac

SEQ ID NO: 13180 - DNA, 80 bp, synthetic construct
  misc_feature 1..80: note = Synthetic: >NC_003310.1-cand-61040-61119
  source 1..80: mol_type = other DNA
ccataaatacaccaaatatagcagcgtacaacttatccatttatacattgaatattggcttttctttatcgctatcttca

SEQ ID NO: 13181 - DNA, 80 bp, synthetic construct
  misc_feature 1..80: note = Synthetic: >NC_003310.1-cand-61120-61199
  source 1..80: mol_type = other DNA
tcatattcatcatcaatatcgacaagtcccagattacgaaccagatcttcttctacattttcagtcattgatacgcgttc

SEQ ID NO: 13182 - DNA, 80 bp, synthetic construct
  misc_feature 1..80: note = Synthetic: >NC_003310.1-cand-61200-61279
  source 1..80: mol_type = other DNA
actatctccagagagtccgataacgttagccaccacttctctatcaatgattagtttcttgagcgcgaatgtaatttttg

SEQ ID NO: 13183 - DNA, 80 bp, synthetic construct
  misc_feature 1..80: note = Synthetic: >NC_003310.1-cand-61360-61439
  source 1..80: mol_type = other DNA
agttcaccttctatagatctgagaatggatgattctccagtcgaaacatattctaccatggctccgtttaatttgttgat

SEQ ID NO: 13184 - DNA, 80 bp, synthetic construct
  misc_feature 1..80: note = Synthetic: >NC_003310.1-cand-61840-61919
  source 1..80: mol_type = other DNA
gctgtaggtcttggtgaagtttcaactctcttcttgattaccttactcatgattaaacctaaataattgtactttgcaat

SEQ ID NO: 13185 - DNA, 80 bp, synthetic construct
  misc_feature 1..80: note = Synthetic: >NC_003310.1-cand-61920-61999
  source 1..80: mol_type = other DNA
ataatgatatatattttcactttatctcatttgagaataaaaatgtttttgttaaccgctgcatgatgtacagatttcgg

SEQ ID NO: 13186 - DNA, 80 bp, synthetic construct
  misc_feature 1..80: note = Synthetic: >NC_003310.1-cand-62560-62639
  source 1..80: mol_type = other DNA
tccgacggtacaacattccaaagatcatattgtagaataccgttactggcgtacgatcctacatatgtatcatatggtcc

SEQ ID NO: 13187 - DNA, 80 bp, synthetic construct
  misc_feature 1..80: note = Synthetic: >NC_003310.1-cand-62640-62719
  source 1..80: mol_type = other DNA
ttccttctcagctagtttacaactcgcctctaatgcaccgtaataaatggtttcaaagatcttcttatttagatcttgtg

SEQ ID NO: 13188 - DNA, 80 bp, synthetic construct
  misc_feature 1..80: note = Synthetic: >NC_003310.1-cand-70500-70579
  source 1..80: mol_type = other DNA
gggaaaaattatctttgagttttccattagaaaagaaccacgaaactaatgttctgattgcgtctgtctccgtcgctgaa

SEQ ID NO: 13189 - DNA, 80 bp, synthetic construct
  misc_feature 1..80: note = Synthetic: >NC_003310.1-cand-70670-70749
  source 1..80: mol_type = other DNA
tccaacaagtgagcaattcccaagatttcatctatatcattctcgaatccgaaattagaaattcccaagtagatatcctt

SEQ ID NO: 13190 - DNA, 80 bp, synthetic construct
  misc_feature 1..80: note = Synthetic: >NC_003310.1-cand-70750-70829
  source 1..80: mol_type = other DNA
tttcatccgatcattgatgaaaatacgaactttattcggtaagacgatcatttactaaggagtaaaataggaagtaacgt

SEQ ID NO: 13191 - DNA, 80 bp, synthetic construct
  misc_feature 1..80: note = Synthetic: >NC_003310.1-cand-70830-70909
  source 1..80: mol_type = other DNA
tcgtatatcgttatcgtcgtataaattaaaggtgtgttttttgccattaagagacattataattttaccaatattggaat

SEQ ID NO: 13192 - DNA, 80 bp, synthetic construct
  misc_feature 1..80: note = Synthetic: >NC_003310.1-cand-70990-71069
  source 1..80: mol_type = other DNA
tcttcatttcgctgtctaatgatagcgttttctctatctgtttccattacagctgcctgaagtttattggtcgggtaata

SEQ ID NO: 13193 - DNA, 80 bp, synthetic construct
  misc_feature 1..80: note = Synthetic: >NC_003310.1-cand-71230-71309
  source 1..80: mol_type = other DNA
atcttacgatgacttaatatcgtactttccagataggaaataccataaatatatttctaaggtatttgaacatgtagatt

SEQ ID NO: 13194 - DNA, 80 bp, synthetic construct
  misc_feature 1..80: note = Synthetic: >NC_003310.1-cand-71550-71629
  source 1..80: mol_type = other DNA
tagctggttcaaaattaattctttgtggattttctcaagttacatttatggcgtatacaacgtcgcatataacaacaaat

SEQ ID NO: 13195 - DNA, 80 bp, synthetic construct
  misc_feature 1..80: note = Synthetic: >NC_003310.1-cand-71790-71869
  source 1..80: mol_type = other DNA
tagctttttctatttcggattttagaatttccaaattcaccagcgatttatcggttttggtgaaatccaaggatttatta

SEQ ID NO: 13196 - DNA, 80 bp, synthetic construct
  misc_feature 1..80: note = Synthetic: >NC_003310.1-cand-71950-72029
  source 1..80: mol_type = other DNA
gtttcctattagggttccgcgcttcacgtcacccaacatacttgaatcaccatcctttaaaaaaaatgataagatatcaa

SEQ ID NO: 13197 - DNA, 80 bp, synthetic construct
  misc_feature 1..80: note = Synthetic: >NC_003310.1-cand-72430-72509
  source 1..80: mol_type = other DNA
aaatgttagaattagaaaagtgtacatccgaaatacaaaatgttaccggatttatggaagaagaaataaaggcagaaatg

SEQ ID NO: 13198 - DNA, 80 bp, synthetic construct
  misc_feature 1..80: note = Synthetic: >NC_003310.1-cand-72660-72739
  source 1..80: mol_type = other DNA
tgtctagaggctaaaacacagttctctaccacaggagaatggccgttaataataagtaccgatcaggatactatgctatt

SEQ ID NO: 13199 - DNA, 80 bp, synthetic construct
  misc_feature 1..80: note = Synthetic: >NC_003310.1-cand-72740-72819
  source 1..80: mol_type = other DNA
cgcgtctgctgataatcatcctaagatgataataaacttaactcaactgtttaaatttgttccctcggcagaggataact

SEQ ID NO: 13200 - DNA, 80 bp, synthetic construct
  misc_feature 1..80: note = Synthetic: >NC_003310.1-cand-72790-72869
  source 1..80: mol_type = other DNA
ttaaatttgttccctcggcagaggataactatttagcaaaattaactgcattagtgaatggatgtgatttctttcctgga

SEQ ID NO: 13201 - DNA, 80 bp, synthetic construct
  misc_feature 1..80: note = Synthetic: >NC_003310.1-cand-73140-73219
  source 1..80: mol_type = other DNA
ttagagagcgtgccgttaccctgccaattaatgtacgcattagaaccacgtaaggagattgatgtttcagaagttaaaac

SEQ ID NO: 13202 - DNA, 80 bp, synthetic construct
  misc_feature 1..80: note = Synthetic: >NC_003310.1-cand-73300-73379
  source 1..80: mol_type = other DNA
ctaatgaaaactgtaacaccatagtgttcggcatctataaggataatttactactgagtataaataattcattttacttt

SEQ ID NO: 13203 - DNA, 80 bp, synthetic construct
  misc_feature 1..80: note = Synthetic: >NC_003310.1-cand-73620-73699
  source 1..80: mol_type = other DNA
tctattggatataaactaatggatccggttaattttatcaagacatatgcgcctagaggttctattatttctattaatta

SEQ ID NO: 13204 - DNA, 80 bp, synthetic construct
  misc_feature 1..80: note = Synthetic: >NC_003461.1-cand-10890-10969
  source 1..80: mol_type = other DNA
agatccttactgtccagtacctgatagaatgcacaaagaactccaagatcatgatgataccggaatctttatccataatc

SEQ ID NO: 13205 - DNA, 80 bp, synthetic construct
  misc_feature 1..80: note = Synthetic: >NC_003461.1-cand-10990-11069
  source 1..80: mol_type = other DNA
tattgccagaaattatggacactaatctctattagtgcaatccatcttgcagctgttaaagttggtgtcagagtgtcagc

SEQ ID NO: 13206 - DNA, 80 bp, synthetic construct
  misc_feature 1..80: note = Synthetic: >NC_003461.1-cand-11070-11149
  source 1..80: mol_type = other DNA
aatggtacaaggagacaatcaagctatagcagtgacatccagagttcctgtcacacaaacctataagcaaaaaaagactc

SEQ ID NO: 13207 - DNA, 80 bp, synthetic construct
  misc_feature 1..80: note = Synthetic: >NC_003461.1-cand-11150-11229
  source 1..80: mol_type = other DNA
acgtctatgaagaaatcacaagatatttcggtgccttgagagaagttatgtttgatattggacatgaattaaaattaaat

SEQ ID NO: 13208 - DNA, 80 bp, synthetic construct
  misc_feature 1..80: note = Synthetic: >NC_003461.1-cand-11230-11309
  source 1..80: mol_type = other DNA
gagaccattataagtagcaaaatgtttgtatacagcaaacggatatattatgatgggaaaatcctcccacagtgcctcaa

SEQ ID NO: 13209 - DNA, 80 bp, synthetic construct
  misc_feature 1..80: note = Synthetic: >NC_003461.1-cand-11310-11389
  source 1..80: mol_type = other DNA
agctttaacaagatgtgtattttggtcagagactcttgtagatgaaaacaggtcagcatgctcaaacattgcaacatcta

SEQ ID NO: 13210 - DNA, 80 bp, synthetic construct
  misc_feature 1..80: note = Synthetic: >NC_003461.1-cand-11390-11469
  source 1..80: mol_type = other DNA
tagccaaagctattgagaatggatattcacctatcttaggctattgtattgctctttttaaaacttgccaacaggtatgt

SEQ ID NO: 13211 - DNA, 80 bp, synthetic construct
  misc_feature 1..80: note = Synthetic: >NC_003461.1-cand-11470-11549
  source 1..80: mol_type = other DNA
atatcattaggaatgaccattaatcctactattacgtcaactatcaaagatcaatattttaaagggaaaaattggttaag

SEQ ID NO: 13212 - DNA, 80 bp, synthetic construct
  misc_feature 1..80: note = Synthetic: >NC_003461.1-cand-11550-11629
  source 1..80: mol_type = other DNA
atgtgcaatattgatcccagctaacataggagggttcaactatatgtctacagctagatgttttgtcagaaatataggtg

SEQ ID NO: 13213 - DNA, 80 bp, synthetic construct
  misc_feature 1..80: note = Synthetic: >NC_003461.1-cand-11630-11709
  source 1..80: mol_type = other DNA
atccagcagttgcagctctagcagacttaaagagattcatcaaagcaggtctgttagataaacaggtattatatcgtgtg

SEQ ID NO: 13214 - DNA, 80 bp, synthetic construct
  misc_feature 1..80: note = Synthetic: >NC_003461.1-cand-11710-11789
  source 1..80: mol_type = other DNA
atgaatcaagaaccaggagactcaagcttcttagattgggcatcagacccttattcatgcaatctcccacactcacaaag

SEQ ID NO: 13215 - DNA, 80 bp, synthetic construct
  misc_feature 1..80: note = Synthetic: >NC_003461.1-cand-11790-11869
  source 1..80: mol_type = other DNA
tataacaactataatcaaaaatgtaacagctagatcagtattgcaggaatcacctaatcctctcctatcaggtctctttt

SEQ ID NO: 13216 - DNA, 80 bp, synthetic construct
  misc_feature 1..80: note = Synthetic: >NC_003461.1-cand-11870-11949
  source 1..80: mol_type = other DNA
cagaatcaagtagtgaagaagatctcaacttagcatcatttttgatggataggaaagccatattgcccagagtagctcac

SEQ ID NO: 13217 - DNA, 80 bp, synthetic construct
  misc_feature 1..80: note = Synthetic: >NC_003461.1-cand-11950-12029
  source 1..80: mol_type = other DNA
gagatcttagataactcacttacaggtgtaagagaagctatagccgggatgcttgatacaacgaaatctctagtaagagc

SEQ ID NO: 13218 - DNA, 80 bp, synthetic construct
  misc_feature 1..80: note = Synthetic: >NC_003461.1-cand-12030-12109
  source 1..80: mol_type = other DNA
tagtgtcaggagaggaggattatcatatagtatcttaagaagacttataaattatgatctattacaatatgagaccttaa

SEQ ID NO: 13219 - DNA, 80 bp, synthetic construct
  misc_feature 1..80: note = Synthetic: >NC_003461.1-cand-12110-12189
  source 1..80: mol_type = other DNA
caaggacactcagaaaaccggttaaggataatatagaatatgagtatatgtgttcagtagaattggcaataggattgagg

SEQ ID NO: 13220 - DNA, 80 bp, synthetic construct
  misc_feature 1..80: note = Synthetic: >NC_003461.1-cand-14780-14859
  source 1..80: mol_type = other DNA
gtattaagatagaaaaatggattctagttgagaaagccaaagttcatgattggatagttagagaattaaaggaagggagt

SEQ ID NO: 13221 - DNA, 80 bp, synthetic construct
  misc_feature 1..80: note = Synthetic: >NC_003461.1-cand-14860-14939
  source 1..80: mol_type = other DNA
gcatcgtcaggtatgctaagaccttaccatcaagcattacaaatcttcggatttgagcctaatttaaacaaattatgtag

SEQ ID NO: 13222 - DNA, 80 bp, synthetic construct
  misc_feature 1..80: note = Synthetic: >NC_003461.1-cand-14940-15019
  source 1..80: mol_type = other DNA
agatttcttatctacactaaatatagtagacacaaaaaattgtattatcacatttgatagagtattaagagatacaatct

SEQ ID NO: 13223 - DNA, 80 bp, synthetic construct
  misc_feature 1..80: note = Synthetic: >NC_003461.1-cand-15020-15099
  source 1..80: mol_type = other DNA
ttgagtggactcggataaaagacgcagataagaagctaagacttacaggtaaatatgatctatatcctcttagagattca

SEQ ID NO: 13224 - DNA, 80 bp, synthetic construct
  misc_feature 1..80: note = Synthetic: >NC_003461.1-cand-15100-15179
  source 1..80: mol_type = other DNA
ggtaagttaaaagttatttctagaaggcttgtaatatcttggatagcattgtctatgtctacaagactagtaacagggtc

SEQ ID NO: 13225 - DNA, 80 bp, synthetic construct
  misc_feature 1..80: note = Synthetic: >NC_003461.1-cand-15180-15259
  source 1..80: mol_type = other DNA
atttccagacattaaatttgaatcaagactccaattaggtatagtatcaatatcctctcgtgaaatcaaaaatcttaggg

SEQ ID NO: 13226 - DNA, 80 bp, synthetic construct
  misc_feature 1..80: note = Synthetic: >NC_003461.1-cand-15260-15339
  source 1..80: mol_type = other DNA
ttatatcaaagattgtcattgacaaatttgaagatattatacatagtgtgacctataggttcttgactaaagaaataaaa

SEQ ID NO: 13227 - DNA, 80 bp, synthetic construct
  misc_feature 1..80: note = Synthetic: >NC_003461.1-cand-15380-15459
  source 1..80: mol_type = other DNA
caagacagagcacatctgctgatatcactaatatcgatacatcggactccatacaatgatcttatatcttctcatcttta

SEQ ID NO: 13228 - DNA, 80 bp, synthetic construct
  misc_feature 1..80: note = Synthetic: >NC_003461.1-cand-15420-15499
  source 1..80: mol_type = other DNA
atcggactccatacaatgatcttatatcttctcatctttattatctaatttgtttaaagagatgagttaacaagataaga

SEQ ID NO: 13229 - DNA, 80 bp, synthetic construct
  misc_feature 1..80: note = Synthetic: >NC_003461.1-cand-15500-15579
  source 1..80: mol_type = other DNA
aatccctttaactgactcataaaaacatagtaagaaaaacttacaacagacaagagtattaataatatatcgatatttct

SEQ ID NO: 13230 - DNA, 80 bp, synthetic construct
  misc_feature 1..80: note = Synthetic: >NC_003466.1-cand-190-269
  source 1..80: mol_type = other DNA
gtctacattggagaccaaactcggagaacttaagaggcaacttgcagatttggtggcagctcaaaaattggctacaaaac

SEQ ID NO: 13231 - DNA, 80 bp, synthetic construct
  misc_feature 1..80: note = Synthetic: >NC_003466.1-cand-390-469
  source 1..80: mol_type = other DNA
attggaaggctataggagcatacatcttagggtttgcaattccgatcatcctaaaggccttatacatgctgtcaacccgt

SEQ ID NO: 13232 - DNA, 80 bp, synthetic construct
  misc_feature 1..80: note = Synthetic: >NC_003466.1-cand-470-549
  source 1..80: mol_type = other DNA
gggagacaaactgtgaaagacaacaaagggaccaggataaggtttaaggatgattcttcctttgaagaagtcaatgggat

SEQ ID NO: 13233 - DNA, 80 bp, synthetic construct
  misc_feature 1..80: note = Synthetic: >NC_003466.1-cand-550-629
  source 1..80: mol_type = other DNA
acgtaaaccaaaacacctttacgtctcaatgccaactgcacagtccactatgaaggctgaagaaatcacgccaggacgat

SEQ ID NO: 13234 - DNA, 80 bp, synthetic construct
  misc_feature 1..80: note = Synthetic: >NC_003466.1-cand-630-709
  source 1..80: mol_type = other DNA
ttaggacaattgcttgtggcctttttccagcacaggtcaaagcccgaaatataataagtcctgtaatgggagtaattgga

SEQ ID NO: 13235 - DNA, 80 bp, synthetic construct
  misc_feature 1..80: note = Synthetic: >NC_003466.1-cand-710-789
  source 1..80: mol_type = other DNA
tttggcttctttgtaaaggattggatggatcggatagaagagtttctggctgcagagtgtccattcttacctaagccaaa

SEQ ID NO: 13236 - DNA, 80 bp, synthetic construct
  misc_feature 1..80: note = Synthetic: >NC_003467.2-cand-2860-2939
  source 1..80: mol_type = other DNA
aaacaagcttgaatggatcgacccagatgggaatacaagagaccacgtaaaccttgtcttaaatagagatgtctcatttc

SEQ ID NO: 13237 - DNA, 80 bp, synthetic construct
  misc_feature 1..80: note = Synthetic: >NC_003467.2-cand-2910-2989
  source 1..80: mol_type = other DNA
accttgtcttaaatagagatgtctcatttcaggatttaagtgataacccctgtaaagtagacctacacacacaagcaata

SEQ ID NO: 13238 - DNA, 80 bp, synthetic construct
  misc_feature 1..80: note = Synthetic: >NC_003467.2-cand-3020-3099
  source 1..80: mol_type = other DNA
acactcacatgtactgtcggattaacagagtgcccaagttttatgacatcaattaaggcatgtgacctagctatgtgtta

SEQ ID NO: 13239 - DNA, 80 bp, synthetic construct
  misc_feature 1..80: note = Synthetic: >NC_003467.2-cand-3130-3209
  source 1..80: mol_type = other DNA
ctctaatacagtgaaagtagttggtaaaggaggccattcagggtcctcatttaaatgctgtcatgatacagattgctcct

SEQ ID NO: 13240 - DNA, 80 bp, synthetic construct
  misc_feature 1..80: note = Synthetic: >NC_003467.2-cand-3180-3259
  source 1..80: mol_type = other DNA
ttaaatgctgtcatgatacagattgctcctctgaaggtttacttgcatcagcccctcatcttgagagggtaacaggattc

SEQ ID NO: 13241 - DNA, 80 bp, synthetic construct
  misc_feature 1..80: note = Synthetic: >NC_003467.2-cand-3260-3339
  source 1..80: mol_type = other DNA
aatcaaattgattcagataaggtttatgatgatggtgcaccaccttgcacattcaaatgctggttcactaagtcaggtga

SEQ ID NO: 13242 - DNA, 80 bp, synthetic construct
  misc_feature 1..80: note = Synthetic: >NC_003467.2-cand-3340-3419
  source 1..80: mol_type = other DNA
gtggcttcttgggatcttaaacgggaattggattgttgttgtagtgcttgttgtgatactcattctctctatcataatgt

SEQ ID NO: 13243 - DNA, 80 bp, synthetic construct
  misc_feature 1..80: note = Synthetic: >NC_003467.2-cand-3420-3499
  source 1..80: mol_type = other DNA
tcagtgttttgtgtcccaggagagggcacaagaaaactgtctaagcattgacctcaactcctacattagatcatatacat

SEQ ID NO: 13244 - DNA, 80 bp, synthetic construct
  misc_feature 1..80: note = Synthetic: >NC_003467.2-cand-3500-3579
  source 1..80: mol_type = other DNA
ttatgcacttcctcatatttagctgcactaagatattaataaactctagttattgactttataagattattatggaacta

SEQ ID NO: 13245 - DNA, 80 bp, synthetic construct
  misc_feature 1..80: note = Synthetic: >NC_003467.2-cand-3580-3659
  source 1..80: mol_type = other DNA
acctcacttaaaaaaaacaaatactttactcatatataactccatattctcttaccgaggcttttgttcctgcggagcat

SEQ ID NO: 13246 - DNA, 80 bp, synthetic construct
  misc_feature 1..80: note = Synthetic: >NC_003468.2-cand-0-79
  source 1..80: mol_type = other DNA
agtagactccgggatagaaaaagttagaaaaatggaaaagtatagagagattcatcagagagttagggaccttgcacctg

SEQ ID NO: 13247 - DNA, 80 bp, synthetic construct
  misc_feature 1..80: note = Synthetic: >NC_003468.2-cand-80-159
  source 1..80: mol_type = other DNA
gaacggtatcagcattagaatgcatagatctactggataggctctacgctgtcagacatgacctggttgaccagatgata

SEQ ID NO: 13248 - DNA, 80 bp, synthetic construct
  misc_feature 1..80: note = Synthetic: >NC_003468.2-cand-160-239
  source 1..80: mol_type = other DNA
aaacatgactggtctgataataaagatgtagaaagacctataggtcaagttttactgatggctggcatacctaatgatat

SEQ ID NO: 13249 - DNA, 80 bp, synthetic construct
  misc_feature 1..80: note = Synthetic: >NC_003468.2-cand-240-319
  source 1..80: mol_type = other DNA
tatacaaggcatggagaagaagattataccaaatagcccttctggacaagtattgaaaagctttttccgaatgacaccag

SEQ ID NO: 13250 - DNA, 80 bp, synthetic construct
  misc_feature 1..80: note = Synthetic: >NC_003468.2-cand-320-399
  source 1..80: mol_type = other DNA
ataattataaaattacaggtaacttgattgagtttattgaagtgactgtaacagctgatgtgtcacgaggtattagggag

SEQ ID NO: 13251 - DNA, 80 bp, synthetic construct
  misc_feature 1..80: note = Synthetic: >NC_003468.2-cand-400-479
  source 1..80: mol_type = other DNA
aagaaaataaagtatgaaggaggcctccaatttgttgagcacttactggaaactgaatcaaggaagggtaatataccgca

SEQ ID NO: 13252 - DNA, 80 bp, synthetic construct
  misc_feature 1..80: note = Synthetic: >NC_003468.2-cand-3100-3179
  source 1..80: mol_type = other DNA
ttacaccgatatattgatagtatggaaaatcattcagatgcggttgaagatttcttggcatttttctcaaatggagtctc

SEQ ID NO: 13253 - DNA, 80 bp, synthetic construct
  misc_feature 1..80: note = Synthetic: >NC_003468.2-cand-3180-3259
  source 1..80: mol_type = other DNA
agccaatgtaaagggaaactggcttcaagggaacttaaataaatgctcatcattatttggtgctgctgtctcattacttt

SEQ ID NO: 13254 - DNA, 80 bp, synthetic construct
  misc_feature 1..80: note = Synthetic: >NC_003468.2-cand-3260-3339
  source 1..80: mol_type = other DNA
ttcgggaggtctggaaacaattgtttccagaattagagtgtttttttgaatttgcacatcattcagatgatgcattgttc

SEQ ID NO: 13255 - DNA, 80 bp, synthetic construct
  misc_feature 1..80: note = Synthetic: >NC_003468.2-cand-3340-3419
  source 1..80: mol_type = other DNA
atttatggctatctggagcctgaagatgatggaacagattggtttttgtatgtatcacagcagatacaggcaggaaactt

SEQ ID NO: 13256 - DNA, 80 bp, synthetic construct
  misc_feature 1..80: note = Synthetic: >NC_003468.2-cand-3420-3499
  source 1..80: mol_type = other DNA
tcattggcatgctataaatcaagagatgtggaagagcatgtttaatctacatgagcacttactattaatgggttctatta

SEQ ID NO: 13257 - DNA, 80 bp, synthetic construct
  misc_feature 1..80: note = Synthetic: >NC_003468.2-cand-3500-3579
  source 1..80: mol_type = other DNA
aagtgtcacctaagaagacaacagtatcacctactaatgcagaatttctttctactttttttgaaggttgtgctgtgtca

SEQ ID NO: 13258 - DNA, 80 bp, synthetic construct
  misc_feature 1..80: note = Synthetic: >NC_003468.2-cand-3580-3659
  source 1..80: mol_type = other DNA
atcccttttgttaaaatcttactgggttcattatcagatcttcctgggttaggtttctttgatgatttagcagcagcaca

SEQ ID NO: 13259 - DNA, 80 bp, synthetic construct
  misc_feature 1..80: note = Synthetic: >NC_003468.2-cand-3660-3739
  source 1..80: mol_type = other DNA
aagcagatgtgtaaagtcactagatttgggtgcttgcccacaattagctcaactagctatagtattatgcacaagcaaag

SEQ ID NO: 13260 - DNA, 80 bp, synthetic construct
  misc_feature 1..80: note = Synthetic: >NC_003468.2-cand-3740-3819
  source 1..80: mol_type = other DNA
ttgagaggttgtatggtactgctgatggaatggtaaactctccaacagcattccttaaggtgaataaagcacacgtacca

SEQ ID NO: 13261 - DNA, 80 bp, synthetic construct
  misc_feature 1..80: note = Synthetic: >NC_003468.2-cand-3830-3909
  source 1..80: mol_type = other DNA
gtggtgatggctcaatgtctattatggagcttgcaacagctggttttgggatggcagataagaatattttaaaaaatgca

SEQ ID NO: 13262 - DNA, 80 bp, synthetic construct
  misc_feature 1..80: note = Synthetic: >NC_003468.2-cand-3920-3999
  source 1..80: mol_type = other DNA
ataagcatactcgtagagatggtgataggtacgtattgggtttatttaaatttttgatgtcattaagtgaggatgtattc

SEQ ID NO: 13263 - DNA, 80 bp, synthetic construct
  misc_feature 1..80: note = Synthetic: >NC_003468.2-cand-4000-4079
  source 1..80: mol_type = other DNA
cagcacgaccgattgggtgagtttagttttgtaggtaaagttcaatggaaagtgttcactcctaaagctgaatttgaatt

SEQ ID NO: 13264 - DNA, 80 bp, synthetic construct
  misc_feature 1..80: note = Synthetic: >NC_003468.2-cand-4080-4159
  source 1..80: mol_type = other DNA
tcatgatcaattttcacataattatttattagagtggacacgtcaacatcctgtgtatgactatattattcctagaaata

SEQ ID NO: 13265 - DNA, 80 bp, synthetic construct
  misc_feature 1..80: note = Synthetic: >NC_003468.2-cand-4160-4239
  source 1..80: mol_type = other DNA
gagataatttgcttgtataccttgtaagaaagttgaatgatcctagcatcattacagctatgactatgcagtcaccatta

SEQ ID NO: 13266 - DNA, 80 bp, synthetic construct
  misc_feature 1..80: note = Synthetic: >NC_003468.2-cand-4240-4319
  source 1..80: mol_type = other DNA
caacttcgtttccgtatgcaagcaaagcaacatatgaaagtatgccggtatgaaggtgaatgggtcacattcagggaggt

SEQ ID NO: 13267 - DNA, 80 bp, synthetic construct
  misc_feature 1..80: note = Synthetic: >NC_003468.2-cand-4320-4399
  source 1..80: mol_type = other DNA
acttgctgcagctgatagttttgctacgagttaccaacctactgaaagggacatggatctctttaatacacttgtaagtt

SEQ ID NO: 13268 - DNA, 80 bp, synthetic construct
  misc_feature 1..80: note = Synthetic: >NC_005217.1-cand-1770-1849
  source 1..80: mol_type = other DNA
tgctactgccacttggtttcaatattacacagaagaccaagggcattttccattacaacatgcattaaggtctgtgttct

SEQ ID NO: 13269 - DNA, 80 bp, synthetic construct
  misc_feature 1..80: note = Synthetic: >NC_005217.1-cand-1850-1929
  source 1..80: mol_type = other DNA
cttttcattttttattatgtgtttctcagaaaatgaagatatgtgcaatttttgataatttacgctatttgatcccagct

SEQ ID NO: 13270 - DNA, 80 bp, synthetic construct
  misc_feature 1..80: note = Synthetic: >NC_005217.1-cand-1930-2009
  source 1..80: mol_type = other DNA
gtcacatcattatattcaggttatgagctcttaatagaaaaattctttgagcggccgtttaagagtgccttagaagtata

SEQ ID NO: 13271 - DNA, 80 bp, synthetic construct
  misc_feature 1..80: note = Synthetic: >NC_005217.1-cand-2020-2099
  source 1..80: mol_type = other DNA
ataataaaagcattgcttataagcctagcacaaaataataaggtacgattctactctaaagtgcgtcttcttggcctcac

SEQ ID NO: 13272 - DNA, 80 bp, synthetic construct
  misc_feature 1..80: note = Synthetic: >NC_005217.1-cand-2100-2179
  source 1..80: mol_type = other DNA
tgtcgatcactcaactgtaggtgcaagtggagtttatccttcattgatgtctagagttgtttataagcactatcgtagtc

SEQ ID NO: 13273 - DNA, 80 bp, synthetic construct
  misc_feature 1..80: note = Synthetic: >NC_005217.1-cand-2190-2269
  source 1..80: mol_type = other DNA
agcaacaacatgtttctttctttttgaaaagggcctacacggaaatctaaatgaggaggctaaaatacatcttgagactg

SEQ ID NO: 13274 - DNA, 80 bp, synthetic construct
  misc_feature 1..80: note = Synthetic: >NC_005217.1-cand-2270-2349
  source 1..80: mol_type = other DNA
tagagtgggcaagaaaatttgaggcaaaagagagaaaatatggagacatattaatgagggaaggttacacgattgatgct

SEQ ID NO: 13275 - DNA, 80 bp, synthetic construct
  misc_feature 1..80: note = Synthetic: >NC_005217.1-cand-2350-2429
  source 1..80: mol_type = other DNA
atacgtgttggtgatgtgcaggtagaacaacaattattttgtcaagaggttgtggagttaagtgcagaagaactcaacaa

SEQ ID NO: 13276 - DNA, 80 bp, synthetic construct
  misc_feature 1..80: note = Synthetic: >NC_005217.1-cand-2440-2519
  source 1..80: mol_type = other DNA
gcaaaaagtcaggtcttatcatccaatatcatgaataaacattgggataagccgtattttagtcagacaaggaatataag

SEQ ID NO: 13277 - DNA, 80 bp, synthetic construct
  misc_feature 1..80: note = Synthetic: >NC_005217.1-cand-2520-2599
  source 1..80: mol_type = other DNA
tttaaagggtatgtctggagcattgcaagaagatggacatcttgcagcaagtgttacgttaattgaggcaattagatttt

SEQ ID NO: 13278 - DNA, 80 bp, synthetic construct
  misc_feature 1..80: note = Synthetic: >NC_005217.1-cand-2610-2689
  source 1..80: mol_type = other DNA
acagactaatccaaacgttattgacatgtatgaacagacaaagcagcacaaagctcaagcacgtattgtgaggaaatatc

SEQ ID NO: 13279 - DNA, 80 bp, synthetic construct
  misc_feature 1..80: note = Synthetic: >NC_005217.1-cand-2690-2769
  source 1..80: mol_type = other DNA
agcggaccgaagctgatagaggttttttcatcactactctcccgacaagagtcaggttagaaattatagaagattattat

SEQ ID NO: 13280 - DNA, 80 bp, synthetic construct
  misc_feature 1..80: note = Synthetic: >NC_005217.1-cand-2770-2849
  source 1..80: mol_type = other DNA
gatgcaatagctagagttgtcccagaggaatatatatcatacggaggagacaagaaaattctaaatatacagactgcatt

SEQ ID NO: 13281 - DNA, 80 bp, synthetic construct
  misc_feature 1..80: note = Synthetic: >NC_005217.1-cand-2850-2929
  source 1..80: mol_type = other DNA
agagaaggcattacgatgggcttcaggatcatcagaggtcataacaagcacaggaaatgtaattaaattcaagaggaggc

SEQ ID NO: 13282 - DNA, 80 bp, synthetic construct
  misc_feature 1..80: note = Synthetic: >NC_005217.1-cand-2930-3009
  source 1..80: mol_type = other DNA
tgatgtatgtgagtgctgatgccacgaaatggtcaccaggagataattcggcaaagtttaagagattcacacaggcatta

SEQ ID NO: 13283 - DNA, 80 bp, synthetic construct
  misc_feature 1..80: note = Synthetic: >NC_005217.1-cand-3010-3089
  source 1..80: mol_type = other DNA
tatgatggcttgtcagatgagaagttaaaatgttgcgttgttgatgcccttagacatgtttatgaaacagagttctttat

SEQ ID NO: 13284 - DNA, 80 bp, synthetic construct
  misc_feature 1..80: note = Synthetic: >NC_005831.2-cand-24050-24129
  source 1..80: mol_type = other DNA
gtaatgttacttttgttaacatatctcgtgttgagttacatactgtcatacctgactacgttgatgttaataaaacatta

SEQ ID NO: 13285 - DNA, 80 bp, synthetic construct
  misc_feature 1..80: note = Synthetic: >NC_005831.2-cand-24130-24209
  source 1..80: mol_type = other DNA
caagagtttgcacaaaacttaccaaagtatgttaagcctaattttgacttgactccttttaatttaacatatcttaattt

SEQ ID NO: 13286 - DNA, 80 bp, synthetic construct
  misc_feature 1..80: note = Synthetic: >NC_005831.2-cand-24210-24289
  source 1..80: mol_type = other DNA
gagttctgagttgaagcaactcgaagctaaaactgctagtctttttcaaactactgttgaattacaaggtcttattgatc

SEQ ID NO: 13287 - DNA, 80 bp, synthetic construct
  misc_feature 1..80: note = Synthetic: >NC_005831.2-cand-24290-24369
  source 1..80: mol_type = other DNA
agattaacagtacatatgttgatttgaagttgcttaataggtttgaaaattatatcaaatggccttggtgggtttggctc

SEQ ID NO: 13288 - DNA, 80 bp, synthetic construct
  misc_feature 1..80: note = Synthetic: >NC_005831.2-cand-24350-24429
  source 1..80: mol_type = other DNA
ggccttggtgggtttggctcattatttctgttgtttttgttgtattgttgagtcttcttgtgttttgttgtctttctaca

SEQ ID NO: 13289 - DNA, 80 bp, synthetic construct
  misc_feature 1..80: note = Synthetic: >NC_005831.2-cand-24430-24509
  source 1..80: mol_type = other DNA
ggttgttgtggttgttgcaattgtttaacttcatcaatgcgaggctgttgtgattgtggttcaactaaacttccttatta

SEQ ID NO: 13290 - DNA, 80 bp, synthetic construct
  misc_feature 1..80: note = Synthetic: >NC_005831.2-cand-24510-24589
  source 1..80: mol_type = other DNA
cgaatttgaaaaggtccacgttcaataatgccttttggtggcctatttcaacttactcttgaaagtactattaataagag

SEQ ID NO: 13291 - DNA, 80 bp, synthetic construct
  misc_feature 1..80: note = Synthetic: >NC_005831.2-cand-24590-24669
  source 1..80: mol_type = other DNA
tgtggctaatctcaaattaccacctcatgatgttactgtcttgcgtgacaatcttaaacctgttactacacttagtacta

SEQ ID NO: 13292 - DNA, 80 bp, synthetic construct
  misc_feature 1..80: note = Synthetic: >NC_005831.2-cand-24670-24749
  source 1..80: mol_type = other DNA
ttactgcttatttgttagttagtttgtttgtcacttactttgctttattcaaacctcttactgctagaggtcgtgttgct

SEQ ID NO: 13293 - DNA, 80 bp, synthetic construct
  misc_feature 1..80: note = Synthetic: >NC_005831.2-cand-24730-24809
  source 1..80: mol_type = other DNA
ctgctagaggtcgtgttgcttgttttgttttaaaactattgacactatttgtctatgtgcctttattggttctttttggt

SEQ ID NO: 13294 - DNA, 80 bp, synthetic construct
  misc_feature 1..80: note = Synthetic: >NC_005831.2-cand-24810-24889
  source 1..80: mol_type = other DNA
atgtatcttgacagttttataattttttctacgctgttgtttcgattcatacatgttggctattatgcctatctctataa

SEQ ID NO: 13295 - DNA, 80 bp, synthetic construct
  misc_feature 1..80: note = Synthetic: >NC_005831.2-cand-24890-24969
  source 1..80: mol_type = other DNA
aaatttttcatttgttttgttcaatgttactaaactatgcttcgtttcaggcaagtgttggtatcttgaacaatcatttt

SEQ ID NO: 13296 - DNA, 80 bp, synthetic construct
  misc_feature 1..80: note = Synthetic: >NC_005831.2-cand-24970-25049
  source 1..80: mol_type = other DNA
atgaaaatcgttttgctgctatttatggtggtgaccactatgtcgttttaggtggtgaaactattacttttgtttctttt

SEQ ID NO: 13297 - DNA, 80 bp, synthetic construct
  misc_feature 1..80: note = Synthetic: >NC_005831.2-cand-25050-25129
  source 1..80: mol_type = other DNA
gatgacctttatgttgctattagaggttcttgtgaaaagaacctacaacttatgcgtaaggttgacttgtataatggtgc

SEQ ID NO: 13298 - DNA, 80 bp, synthetic construct
  misc_feature 1..80: note = Synthetic: >NC_005831.2-cand-25130-25209
  source 1..80: mol_type = other DNA
tgtcatttacatttttgccgaagagcctgttgttggtatagtctactcttctcaactatacgaagatgttccttcgatta

SEQ ID NO: 13299 - DNA, 80 bp, synthetic construct
  misc_feature 1..80: note = Synthetic: >NC_005831.2-cand-25210-25289
  source 1..80: mol_type = other DNA
attgatgacaatggtattgtcctcaattccattttatggctccttgttatgatatttttctttgtgttggcaatgacctt

SEQ ID NO: 13300 - DNA, 80 bp, synthetic construct
  misc_feature 1..80: note = Synthetic: >NC_006213.1-cand-1580-1659
  source 1..80: mol_type = other DNA
atggccaaactgtagtttattttggaggttgtgtgtattggagtccagcacgtaatatatggattcctatattaaaatcc

SEQ ID NO: 13301 - DNA, 80 bp, synthetic construct
  misc_feature 1..80: note = Synthetic: >NC_006213.1-cand-1660-1739
  source 1..80: mol_type = other DNA
tctgttaagtcatatgacagtttggtttatactggagttttaggttgcaaggctattgtaaaggaaacaaatctcatttg

SEQ ID NO: 13302 - DNA, 80 bp, synthetic construct
  misc_feature 1..80: note = Synthetic: >NC_006213.1-cand-1740-1819
  source 1..80: mol_type = other DNA
caaagctttgtaccttgattatgttcaacacaagtgtggcaatttacaccaacgggagttgctaggtgtttcagatgtgt

SEQ ID NO: 13303 - DNA, 80 bp, synthetic construct
  misc_feature 1..80: note = Synthetic: >NC_006213.1-cand-1820-1899
  source 1..80: mol_type = other DNA
ggcataaacaattgctattaaatagaggtgtttataaacctctgttagagaatattgattattttaatatgcggcgcgct

SEQ ID NO: 13304 - DNA, 80 bp, synthetic construct
  misc_feature 1..80: note = Synthetic: >NC_006213.1-cand-1890-1969
  source 1..80: mol_type = other DNA
gcggcgcgctaaatttagtttagaaacttttactgtttgtgcagatggctttatgccttttcttttagatgatttagttc

SEQ ID NO: 13305 - DNA, 80 bp, synthetic construct
  misc_feature 1..80: note = Synthetic: >NC_006213.1-cand-1970-2049
  source 1..80: mol_type = other DNA
cacgcgcatattatttggcagtaagtggtcaagcattttgtgattatgcagataaactttgccatgccgttgtgtctaag

SEQ ID NO: 13306 - DNA, 80 bp, synthetic construct
  misc_feature 1..80: note = Synthetic: >NC_006213.1-cand-2050-2129
  source 1..80: mol_type = other DNA
agtaaagagttacttgatgtgtctctggattctttaggtgcagctatacattatttgaattctaagattgttgatttggc

SEQ ID NO: 13307 - DNA, 80 bp, synthetic construct
  misc_feature 1..80: note = Synthetic: >NC_006213.1-cand-2130-2209
  source 1..80: mol_type = other DNA
tcaacattttagtgattttggaacaagtttcgtttctaaaattgttcatttctttaagacttttactactagcactgctc

SEQ ID NO: 13308 - DNA, 80 bp, synthetic construct
  misc_feature 1..80: note = Synthetic: >NC_006213.1-cand-2210-2289
  source 1..80: mol_type = other DNA
ttgcatttgcatgggttttatttcatgttttgcatggtgcttatatagtagtggagagtgatatatattttgttaaaaac

SEQ ID NO: 13309 - DNA, 80 bp, synthetic construct
  misc_feature 1..80: note = Synthetic: >NC_006213.1-cand-2290-2369
  source 1..80: mol_type = other DNA
attcctcgttatgctagtgctgttgcacaagcatttcagagtgttgctaaagttgtactggactctttaagagttacttt

SEQ ID NO: 13310 - DNA, 80 bp, synthetic construct
  misc_feature 1..80: note = Synthetic: >NC_006213.1-cand-2370-2449
  source 1..80: mol_type = other DNA
tattgatggcctttcttgttttaagattggacgtagaagaatttgtctttcaggcagaaaaatttatgaagttgagcgtg

SEQ ID NO: 13311 - DNA, 80 bp, synthetic construct
  misc_feature 1..80: note = Synthetic: >NC_006213.1-cand-2450-2529
  source 1..80: mol_type = other DNA
gcttgttacattcatcccaattgccattagatgtttatgatttaaccatgcctagtcaagttcagaaagccaagcaaaaa

SEQ ID NO: 13312 - DNA, 80 bp, synthetic construct
  misc_feature 1..80: note = Synthetic: >NC_006213.1-cand-2530-2609
  source 1..80: mol_type = other DNA
cctatttatttaaaaggttctggttctgatttttcattagcggatagtgtagttgaagttgttacaacttcacttacacc

SEQ ID NO: 13313 - DNA, 80 bp, synthetic construct
  misc_feature 1..80: note = Synthetic: >NC_006213.1-cand-2610-2689
  source 1..80: mol_type = other DNA
atgtggttattctgaaccacctaaagttgcagctaaaatttgcattgtggataatgtttatatggccaaggctggtgaca

SEQ ID NO: 13314 - DNA, 80 bp, synthetic construct
  misc_feature 1..80: note = Synthetic: >NC_006213.1-cand-2690-2769
  source 1..80: mol_type = other DNA
aatattaccctgttgtggttgatgatcatgttggactcttggatcaagcatggagagttccttgtgctggaaggcgtgtt

SEQ ID NO: 13315 - DNA, 80 bp, synthetic construct
  misc_feature 1..80: note = Synthetic: >NC_006213.1-cand-2770-2849
  source 1..80: mol_type = other DNA
acatttaaggaacagcctacagtaaaggagattataagcatgcctaagattattaaggttttttatgagcttgacaacga

SEQ ID NO: 13316 - DNA, 80 bp, synthetic construct
  misc_feature 1..80: note = Synthetic: >NC_006213.1-cand-5430-5509
  source 1..80: mol_type = other DNA
atgtgattttgaaattgcatgtaaatgtggtgtaaagcaggaacagcgtactggtctggacgctgttatgcattttggta

SEQ ID NO: 13317 - DNA, 80 bp, synthetic construct
  misc_feature 1..80: note = Synthetic: >NC_006213.1-cand-5500-5579
  source 1..80: mol_type = other DNA
cattttggtacattgagtcgtgaagatcttgagattggttataccgtggactgttcttgcggtaaaaagctaattcattg

SEQ ID NO: 13318 - DNA, 80 bp, synthetic construct
  misc_feature 1..80: note = Synthetic: >NC_006213.1-cand-5580-5659
  source 1..80: mol_type = other DNA
tgtacgatttgatgtaccatttttaatttgcagtaatacacctgctagtgtaaaattacctaagggtgtaggaagtgcaa

SEQ ID NO: 13319 - DNA, 80 bp, synthetic construct
  misc_feature 1..80: note = Synthetic: >NC_006213.1-cand-5670-5749
  source 1..80: mol_type = other DNA
aggtgataaggttggtcattatgttcatgttaagtgtgaacaatcttatcagctttatgatgcttctaatgttaagaagg

SEQ ID NO: 13320 - DNA, 80 bp, synthetic construct
  misc_feature 1..80: note = Synthetic: >NC_006213.1-cand-5750-5829
  source 1..80: mol_type = other DNA
ttacagatgttactggcaagttgtcagattgtctgtatcttaaaaatttgaaacaaacttttaaatcggtgttaaccacc

SEQ ID NO: 13321 - DNA, 80 bp, synthetic construct
  misc_feature 1..80: note = Synthetic: >NC_006213.1-cand-5830-5909
  source 1..80: mol_type = other DNA
tattatttggatgatgttaagaaaattgagtataaacctgacttgtcacaatattattgtgacggaggtaagtattatac

SEQ ID NO: 13322 - DNA, 80 bp, synthetic construct
  misc_feature 1..80: note = Synthetic: >NC_006213.1-cand-5910-5989
  source 1..80: mol_type = other DNA
tcagcgtattattaaagcccaatttaaaacattcgagaaagtagatggtgtgtatactaattttaaattgataggacaca

SEQ ID NO: 13323 - DNA, 80 bp, synthetic construct
  misc_feature 1..80: note = Synthetic: >NC_006213.1-cand-5990-6069
  source 1..80: mol_type = other DNA
ccgtctgtgacagtcttaatgctaagttgggttttgatagctctaaagagtttgttgaatataagattactgagtggcca

SEQ ID NO: 13324 - DNA, 80 bp, synthetic construct
  misc_feature 1..80: note = Synthetic: >NC_006213.1-cand-6050-6129
  source 1..80: mol_type = other DNA
ataagattactgagtggccaacagctacaggtgatgtggtgttggctactgatgatttgtatgttaagagatatgagagg

SEQ ID NO: 13325 - DNA, 80 bp, synthetic construct
  misc_feature 1..80: note = Synthetic: >NC_006213.1-cand-6150-6229
  source 1..80: mol_type = other DNA
acctgttatatggttaagccatgagaaagcttccctcaattctttaacatattttaatagaccttcattggttgatgata

SEQ ID NO: 13326 - DNA, 80 bp, synthetic construct
  misc_feature 1..80: note = Synthetic: >NC_006213.1-cand-6230-6309
  source 1..80: mol_type = other DNA
ataaatttgatgttttaaaagtggatgatgttgacgatggtggtgacagctcagagagtggtgccaaagaaaccaaagaa

SEQ ID NO: 13327 - DNA, 80 bp, synthetic construct
  misc_feature 1..80: note = Synthetic: >NC_006213.1-cand-6310-6389
  source 1..80: mol_type = other DNA
atcaacattattaagttaagtggtgttaaaaaaccatttaaggttgaagatagtgtcattgttaatgatgatactagtga

SEQ ID NO: 13328 - DNA, 80 bp, synthetic construct
  misc_feature 1..80: note = Synthetic: >NC_006213.1-cand-6390-6469
  source 1..80: mol_type = other DNA
aaccaaatatgttaagagtttgtctattgttgatgtgtatgatatgtggcttacaggttgtaagtatgttgttagaactg

SEQ ID NO: 13329 - DNA, 80 bp, synthetic construct
  misc_feature 1..80: note = Synthetic: >NC_006213.1-cand-6470-6549
  source 1..80: mol_type = other DNA
ctaatgctttgagcagagcagttaacgtacctacaatacgtaagtttataaaatttggtatgactcttgttagtatacca

SEQ ID NO: 13330 - DNA, 80 bp, synthetic construct
  misc_feature 1..80: note = Synthetic: >NC_006213.1-cand-6550-6629
  source 1..80: mol_type = other DNA
attgatttgttaaatttaagagagattaagcctgctgttaatgtggttaaagctgtgcgaaataaaatttctgtatgctt

SEQ ID NO: 13331 - DNA, 80 bp, synthetic construct
  misc_feature 1..80: note = Synthetic: >NC_006213.1-cand-6630-6709
  source 1..80: mol_type = other DNA
taattttattaaatggctttttgtcttattatttggctggattaaaatatccgctgataataaagtaatctacaccacag

SEQ ID NO: 13332 - DNA, 80 bp, synthetic construct
  misc_feature 1..80: note = Synthetic: >NC_006213.1-cand-10590-10669
  source 1..80: mol_type = other DNA
taattggtttgtacaaagtgataagtgttctgtagaagattttaatgtgtgggctctgtccaatggatttagccaagtta

SEQ ID NO: 13333 - DNA, 80 bp, synthetic construct
  misc_feature 1..80: note = Synthetic: >NC_006213.1-cand-10670-10749
  source 1..80: mol_type = other DNA
aatctgaccttgttatagatgctttagcttctatgactggtgtgtctttggaaacactgttggctgctattaagcgtctt

SEQ ID NO: 13334 - DNA, 80 bp, synthetic construct
  misc_feature 1..80: note = Synthetic: >NC_006213.1-cand-10750-10829
  source 1..80: mol_type = other DNA
aagaatggtttccaaggacgtcagattatgggtagttgctcttttgaggatgaattgacacctagcgatgtttatcaaca

SEQ ID NO: 13335 - DNA, 80 bp, synthetic construct
  misc_feature 1..80: note = Synthetic: >NC_006213.1-cand-10830-10909
  source 1..80: mol_type = other DNA
actcgctggtatcaagttacaatcaaaacgcactagattgtttaaaggcactgtttgttggattatggcttctacatttt

SEQ ID NO: 13336 - DNA, 80 bp, synthetic construct
  misc_feature 1..80: note = Synthetic: >NC_006213.1-cand-10910-10989
  source 1..80: mol_type = other DNA
tgtttagttgcataattacagcatttgtgaaatggactatgtttatgtatgtaactactaatatgtttagtattacgttt

SEQ ID NO: 13337 - DNA, 80 bp, synthetic construct
  misc_feature 1..80: note = Synthetic: >NC_006213.1-cand-10990-11069
  source 1..80: mol_type = other DNA
tgtgcactttgtgttataagtttggccatgttgttggttaagcataagcatctttatttgactatgtatataactcctgt

SEQ ID NO: 13338 - DNA, 80 bp, synthetic construct
  misc_feature 1..80: note = Synthetic: >NC_006213.1-cand-11070-11149
  source 1..80: mol_type = other DNA
gctttttacactgttgtataacaactatttggttgtgtacaagcatacatttagaggctatgtctatgcatggctatcat

SEQ ID NO: 13339 - DNA, 80 bp, synthetic construct
  misc_feature 1..80: note = Synthetic: >NC_006213.1-cand-11150-11229
  source 1..80: mol_type = other DNA
attatgttccatcagttgagtacacttatactgatgaagttatttatggcatgttattgcttgtaggaatggtctttgtt

SEQ ID NO: 13340 - DNA, 80 bp, synthetic construct
  misc_feature 1..80: note = Synthetic: >NC_006213.1-cand-11230-11309
  source 1..80: mol_type = other DNA
acattacgtagcattaaccatgatttgttttcttttataatgtttgttggtcgtttgatttctgttttctctttgtggta

SEQ ID NO: 13341 - DNA, 80 bp, synthetic construct
  misc_feature 1..80: note = Synthetic: >NC_006213.1-cand-11310-11389
  source 1..80: mol_type = other DNA
caagggttctaacttagaggaagaaattcttcttatgttggcttccctttttggtacttacacatggacaacagttttat

SEQ ID NO: 13342 - DNA, 80 bp, synthetic construct
  misc_feature 1..80: note = Synthetic: >NC_006213.1-cand-11390-11469
  source 1..80: mol_type = other DNA
ctatggctgtagcaaaggttattgctaagtgggttgctgtgaatgtcttgtatttcacagatatacctcaaattaagata

SEQ ID NO: 13343 - DNA, 80 bp, synthetic construct
  misc_feature 1..80: note = Synthetic: >NC_006213.1-cand-11430-11509
  source 1..80: mol_type = other DNA
gaatgtcttgtatttcacagatatacctcaaattaagatagtgcttttgtgctatttgtttattggttatattattagct

SEQ ID NO: 13344 - DNA, 80 bp, synthetic construct
  misc_feature 1..80: note = Synthetic: >NC_006213.1-cand-11550-11629
  source 1..80: mol_type = other DNA
aatgcctttgggtgtttataattataaaatttcagtacaggaattaagatatatgaatgctaatggattgcgccctccta

SEQ ID NO: 13345 - DNA, 80 bp, synthetic construct
  misc_feature 1..80: note = Synthetic: >NC_006213.1-cand-11630-11709
  source 1..80: mol_type = other DNA
agaatagttttgaagcccttatgcttaattttaagctgttgggtattggaggtgttccaatcattgaagtatctcaattt

SEQ ID NO: 13346 - DNA, 80 bp, synthetic construct
  misc_feature 1..80: note = Synthetic: >NC_006213.1-cand-11710-11789
  source 1..80: mol_type = other DNA
caatcaaaattgactgatgtcaaatgtgctaatgtcgtcttgcttaattgcttgcaacatttgcatgttgcttctaattc

SEQ ID NO: 13347 - DNA, 80 bp, synthetic construct
  misc_feature 1..80: note = Synthetic: >NC_006213.1-cand-11790-11869
  source 1..80: mol_type = other DNA
taagttgtggcattattgtagcactttgcacaatgaaatacttgccacttcggatctgagtgttgcttttgaaaagcttg

SEQ ID NO: 13348 - DNA, 80 bp, synthetic construct
  misc_feature 1..80: note = Synthetic: >NC_007546.1-cand-1520-1599
  source 1..80: mol_type = other DNA
tttactaatgatatcatgacaggcaggatagtgaacttattttcaacaatgttagtggctctatcatctcagcctttcgc

SEQ ID NO: 13349 - DNA, 80 bp, synthetic construct
  misc_feature 1..80: note = Synthetic: >NC_007546.1-cand-1600-1679
  source 1..80: mol_type = other DNA
tacatatcctttagactataaaagatctgtacaaagagcgttacaacttttatcaaatagaacagctcaaatagcagatt

SEQ ID NO: 13350 - DNA, 80 bp, synthetic construct
  misc_feature 1..80: note = Synthetic: >NC_007546.1-cand-1680-1759
  source 1..80: mol_type = other DNA
taaccagattaatagtatacaattatactacattatctgcttgtatagttatgaatatgcatttagtaggaactcttact

SEQ ID NO: 13351 - DNA, 80 bp, synthetic construct
  misc_feature 1..80: note = Synthetic: >NC_007546.1-cand-1760-1839
  source 1..80: mol_type = other DNA
gttgaacgtatacaagccacttctctaacttctttaatgatgttaatctctaataagacagttattccggaaccatcgtc

SEQ ID NO: 13352 - DNA, 80 bp, synthetic construct
  misc_feature 1..80: note = Synthetic: >NC_007546.1-cand-1840-1919
  source 1..80: mol_type = other DNA
tcttttttcatatttctctagtaacattaattttcttacaaattataatgagcaaattgataatgtggtagcagaaataa

SEQ ID NO: 13353 - DNA, 80 bp, synthetic construct
  misc_feature 1..80: note = Synthetic: >NC_007546.1-cand-1920-1999
  source 1..80: mol_type = other DNA
tggccgcatatagattgaatttatatcaacagaaaatgttgatgctcgttaccagatttgtgtcaaagttatacatattt

SEQ ID NO: 13354 - DNA, 80 bp, synthetic construct
  misc_feature 1..80: note = Synthetic: >NC_007546.1-cand-2000-2079
  source 1..80: mol_type = other DNA
gatgctcctaagataccaccagatcagatgtatagattaagaaaccgattaagaaatattccagttgaaagaagaagagc

SEQ ID NO: 13355 - DNA, 80 bp, synthetic construct
  misc_feature 1..80: note = Synthetic: >NC_007546.1-cand-2080-2159
  source 1..80: mol_type = other DNA
tgacgtattcagaattattatgaataatagagatttaatcgaaaaaacatcagaacgtatatgccagggtgtgctgttat

SEQ ID NO: 13356 - DNA, 80 bp, synthetic construct
  misc_feature 1..80: note = Synthetic: >NC_007546.1-cand-2160-2239
  source 1..80: mol_type = other DNA
cttatacaccaatgcctttaacttacgttgaagatgtcgggttaacaaatgtaattaatgacactaatagctttcaaata

SEQ ID NO: 13357 - DNA, 80 bp, synthetic construct
  misc_feature 1..80: note = Synthetic: >NC_007546.1-cand-2240-2319
  source 1..80: mol_type = other DNA
attaatattgaagaaattgagaagaccggtgactattcagctataacgaatgcattacttcgggatactccaatcatatt

SEQ ID NO: 13358 - DNA, 80 bp, synthetic construct
  misc_feature 1..80: note = Synthetic: >NC_007546.1-cand-2320-2399
  source 1..80: mol_type = other DNA
gaaaggtgcgattccatatgttactaactcatcagtaattgatgttttatctaaagtggacaccacagtgttcgcaagca

SEQ ID NO: 13359 - DNA, 80 bp, synthetic construct
  misc_feature 1..80: note = Synthetic: >NC_007546.1-cand-2400-2479
  source 1..80: mol_type = other DNA
ttgtaaaagatagggacatttcaaagttaaaaccaataaaattcataattaattcagattcatccgaatattatttagta

SEQ ID NO: 13360 - DNA, 80 bp, synthetic construct
  misc_feature 1..80: note = Synthetic: >NC_007546.1-cand-2480-2559
  source 1..80: mol_type = other DNA
cataataataaatggacaccaacaacaactacagcagtatataaagctagatctcagcaatttgatatacaacattcagt

SEQ ID NO: 13361 - DNA, 80 bp, synthetic construct
  misc_feature 1..80: note = Synthetic: >NC_007546.1-cand-2560-2639
  source 1..80: mol_type = other DNA
atcaatgctagagtcaaacttattttttgtggtatataatgatttatttaaatacattaaaaccactacagttctgccga

SEQ ID NO: 13362 - DNA, 80 bp, synthetic construct
  misc_feature 1..80: note = Synthetic: >NC_007546.1-cand-2640-2719
  source 1..80: mol_type = other DNA
taaatgctgtctcttatgacggtgcaagaattatgcaagaaacataaatgattgtatagtatcatcttgtgacgacctca

SEQ ID NO: 13363 - DNA, 80 bp, synthetic construct
  misc_feature 1..80: note = Synthetic: >NC_007547.1-cand-40-119
  source 1..80: mol_type = other DNA
gacgctcttgctagtagatatcttaaatttgtttatgattttgaaaatgtaacttatcaaaataattacttcgccacaga

SEQ ID NO: 13364 - DNA, 80 bp, synthetic construct
  misc_feature 1..80: note = Synthetic: >NC_007548.1-cand-1950-2029
  source 1..80: mol_type = other DNA
atggtgtggcctcaggtgagaaaacaacaaagataggaaattcatttgccaatgtagctttaataactacggtattcaat

SEQ ID NO: 13365 - DNA, 80 bp, synthetic construct
  misc_feature 1..80: note = Synthetic: >NC_007548.1-cand-2030-2109
  source 1..80: mol_type = other DNA
aatctaacgaatactatgccttctataagagttaatcatatgagagttgacggtgacgataatgttgtaactatgtacac

SEQ ID NO: 13366 - DNA, 80 bp, synthetic construct
  misc_feature 1..80: note = Synthetic: >NC_007548.1-cand-2110-2189
  source 1..80: mol_type = other DNA
agctaatagaatagatgaagtccaagaaaatataaaagaaaaatacaaacgcatgaatgcgaaagttaaggctttagcat

SEQ ID NO: 13367 - DNA, 80 bp, synthetic construct
  misc_feature 1..80: note = Synthetic: >NC_007548.1-cand-2180-2259
  source 1..80: mol_type = other DNA
gctttagcatcatatacaggattagaaatggctaaaagatttattatatgtggtaaaatatttgaaagaggtgctatatc

SEQ ID NO: 13368 - DNA, 80 bp, synthetic construct
  misc_feature 1..80: note = Synthetic: >NC_007548.1-cand-2260-2339
  source 1..80: mol_type = other DNA
aatattcactgcagaacgtccatatgggactgatttatcagttcaatctaccacgggttcattaatttattcagcagcag

SEQ ID NO: 13369 - DNA, 80 bp, synthetic construct
  misc_feature 1..80: note = Synthetic: >NC_007548.1-cand-2340-2419
  source 1..80: mol_type = other DNA
taaacgcatatcgaggatttggtgataactatttgaattttatgactgatgtactagtgccaccatcagcttcagtaaaa

SEQ ID NO: 13370 - DNA, 80 bp, synthetic construct
  misc_feature 1..80: note = Synthetic: >NC_007548.1-cand-2420-2499
  source 1..80: mol_type = other DNA
ataacaggcagactgaggtccctgttgtcaccagttacactatactccaccggaccattatcctttgaaataacaccata

SEQ ID NO: 13371 - DNA, 80 bp, synthetic construct
  misc_feature 1..80: note = Synthetic: >NC_007548.1-cand-2500-2579
  source 1..80: mol_type = other DNA
tggattaggaggtaggatgagactgttttcgttatctaaagagaatatggagttatataagattttaacatcctccctcg

SEQ ID NO: 13372 - DNA, 80 bp, synthetic construct
  misc_feature 1..80: note = Synthetic: >NC_007548.1-cand-2570-2649
  source 1..80: mol_type = other DNA
tcctccctcgcaatatcagttcaacctgatgaaataaaaaaatattcatctactccacagtttaaagcaagagttgatag

SEQ ID NO: 13373 - DNA, 80 bp, synthetic construct
  misc_feature 1..80: note = Synthetic: >NC_007548.1-cand-2650-2729
  source 1..80: mol_type = other DNA
aatgatatcatcagtgcaaatagcaatgaaatcagaagcaaaaattataacgtctatattgagagataaagaagagcaga

SEQ ID NO: 13374 - DNA, 80 bp, synthetic construct
  misc_feature 1..80: note = Synthetic: >NC_007548.1-cand-2730-2809
  source 1..80: mol_type = other DNA
aaaccttaggtgttccgaatgttgcaacaacaaagaacagacaacaaattgaaaaagctagaaaaactctgtctttacca

SEQ ID NO: 13375 - DNA, 80 bp, synthetic construct
  misc_feature 1..80: note = Synthetic: >NC_007548.1-cand-2810-2889
  source 1..80: mol_type = other DNA
aaagaaacattaccgaaagtaacaaaatattatccagaagaaatatttcatctgatattacgtaactcaacctttaccat

SEQ ID NO: 13376 - DNA, 80 bp, synthetic construct
  misc_feature 1..80: note = Synthetic: >NC_007548.1-cand-2890-2969
  source 1..80: mol_type = other DNA
tcccaagttaaatactatgacaaaagtttacatgaataattctgcaaatataacaaaattgcaacaacagctcggagtca

SEQ ID NO: 13377 - DNA, 80 bp, synthetic construct
  misc_feature 1..80: note = Synthetic: >NC_007548.1-cand-2970-3049
  source 1..80: mol_type = other DNA
gagtatcttcaggaatacaggtgcacaggccagttaataccttactaaaattagttgagaagcattcaccaatcaaaata

SEQ ID NO: 13378 - DNA, 80 bp, synthetic construct
  misc_feature 1..80: note = Synthetic: >NC_007548.1-cand-3050-3129
  source 1..80: mol_type = other DNA
tcaccatctgatctagtattgtattcaaagaaatacgatctaacaaacttaaatggaaaaaaacaatttctaatagactt

SEQ ID NO: 13379 - DNA, 80 bp, synthetic construct
  misc_feature 1..80: note = Synthetic: >NC_007548.1-cand-3130-3209
  source 1..80: mol_type = other DNA
aggtatatcaggcaatgaactacgattttatttaaactcaaaactactctttcatgacttgttactctcaaaatatgata

SEQ ID NO: 13380 - DNA, 80 bp, synthetic construct
  misc_feature 1..80: note = Synthetic: >NC_007550.1-cand-1900-1979
  source 1..80: mol_type = other DNA
caattagatcaagtagacgaccgtcaatcttgtccaacatgttcaatgacgacgaaacttttactgctttgcatacttta

SEQ ID NO: 13381 - DNA, 80 bp, synthetic construct
  misc_feature 1..80: note = Synthetic: >NC_007550.1-cand-1980-2059
  source 1..80: mol_type = other DNA
gcaagtagaacgaattccgttgcaagtgatgtgacatatttacagcctataataacaacaagaatagcaaactcgacacc

SEQ ID NO: 13382 - DNA, 80 bp, synthetic construct
  misc_feature 1..80: note = Synthetic: >NC_007550.1-cand-2060-2139
  source 1..80: mol_type = other DNA
tccagttattgcaccagcatcttccgtaacatatgcaaaactaaaagatatttcaaaaattatcaacgcggaaattgatc

SEQ ID NO: 13383 - DNA, 80 bp, synthetic construct
  misc_feature 1..80: note = Synthetic: >NC_007550.1-cand-2150-2229
  source 1..80: mol_type = other DNA
tatggagtttaaccaaatatctaatactatcagcatattagattcaacaaagaaattagcacaatatgctgttgatccag

SEQ ID NO: 13384 - DNA, 80 bp, synthetic construct
  misc_feature 1..80: note = Synthetic: >NC_007550.1-cand-2240-2319
  source 1..80: mol_type = other DNA
tggtatattgaataaaatggtaggtggacacgctagatcgttattttcacttaaagttaggaaacatttgttagatgccg

SEQ ID NO: 13385 - DNA, 80 bp, synthetic construct
  misc_feature 1..80: note = Synthetic: >NC_007550.1-cand-2320-2399
  source 1..80: mol_type = other DNA
tggaaaaggacgcattcgtgaaatataattatcacgatttgatgggtaaactattaaatgatagagaactgttagatata

SEQ ID NO: 13386 - DNA, 80 bp, synthetic construct
  misc_feature 1..80: note = Synthetic: >NC_007550.1-cand-2410-2489
  source 1..80: mol_type = other DNA
tatcctcgcaaaaacaattcgaattagcaaaagaatttcgcgatctgttaattaacgctcttgcctagatgatatgaaag

SEQ ID NO: 13387 - DNA, 80 bp, synthetic construct
  misc_feature 1..80: note = Synthetic: >NC_007551.1-cand-0-79
  source 1..80: mol_type = other DNA
cttaatggctaagttaattataatcaacagtgagaaaggcgagaaagtagaaacacatgaagacatttttaaattatcaa

SEQ ID NO: 13388 - DNA, 80 bp, synthetic construct
  misc_feature 1..80: note = Synthetic: >NC_007551.1-cand-80-159
  source 1..80: mol_type = other DNA
atttacaacaacgtgaaatatacgcaattacaaatgagaggactaaatcgattctgctgaatcagacattttatactatc

SEQ ID NO: 13389 - DNA, 80 bp, synthetic construct
  misc_feature 1..80: note = Synthetic: >NC_007551.1-cand-160-239
  source 1..80: mol_type = other DNA
ttagatattgaaaatgagccaaaagataaagttgcttttgatagctataatagtctattccctacatcaattttttcata

SEQ ID NO: 13390 - DNA, 80 bp, synthetic construct
  misc_feature 1..80: note = Synthetic: >NC_007551.1-cand-240-319
  source 1..80: mol_type = other DNA
tagcaggcaagaccgcctattcggtacttgtaatcatgttttggataataacattcattattcttttgctctctttgatt

SEQ ID NO: 13391 - DNA, 80 bp, synthetic construct
  misc_feature 1..80: note = Synthetic: >NC_007551.1-cand-320-399
  source 1..80: mol_type = other DNA
ctatggttgataatctttcaacctaccttccaaatgattggaatattattaagatatctgattcaattgattaccccata

SEQ ID NO: 13392 - DNA, 80 bp, synthetic construct
  misc_feature 1..80: note = Synthetic: >NC_007551.1-cand-400-479
  source 1..80: mol_type = other DNA
ggcaatgatttgttattctacgtatttgataatttagtacatatgactatagaccaatttgtcaattctgaggagaaaca

SEQ ID NO: 13393 - DNA, 80 bp, synthetic construct
  misc_feature 1..80: note = Synthetic: >NC_007551.1-cand-480-559
  source 1..80: mol_type = other DNA
aatgaatactgtaccaaaatgcaaagaatcacaggataagattaaagaggtattcacagatataatgtcccatttatata

SEQ ID NO: 13394 - DNA, 80 bp, synthetic construct
  misc_feature 1..80: note = Synthetic: >NC_007551.1-cand-560-639
  source 1..80: mol_type = other DNA
tgcctgctattgattatgatccacagtcgtataattacagagtgtcaagaagagaaattggaaacttagtacgtgatcaa

SEQ ID NO: 13395 - DNA, 80 bp, synthetic construct
  misc_feature 1..80: note = Synthetic: >NC_007551.1-cand-650-729
  source 1..80: mol_type = other DNA
tagtaaagggacacatacatttaataggacctgaaatggaatcattgagaaacataatcatgtttttacacgcaggaaac

SEQ ID NO: 13396 - DNA, 80 bp, synthetic construct
  misc_feature 1..80: note = Synthetic: >NC_007555.1-cand-400-479
  source 1..80: mol_type = other DNA
gcaaaattcatataattcggcttttaagcttccaaaaattccagatggactacttgaaaaaactagatatgaattggagg

SEQ ID NO: 13397 - DNA, 80 bp, synthetic construct
  misc_feature 1..80: note = Synthetic: >NC_007555.1-cand-490-569
  source 1..80: mol_type = other DNA
aaataatgatattttgaagcaaaagatcaaagaactagaaaacacaatttctcaattagaaaactatgaaaatgaagcta

SEQ ID NO: 13398 - DNA, 80 bp, synthetic construct
  misc_feature 1..80: note = Synthetic: >NC_007555.1-cand-580-659
  source 1..80: mol_type = other DNA
atttgttttagaacatcttaaattcacaaatgaatccctaaaaattcaaagagatgaagctcaaatttgcttaattggtc

SEQ ID NO: 13399 - DNA, 80 bp, synthetic construct
  misc_feature 1..80: note = Synthetic: >NC_007555.1-cand-670-749
  source 1..80: mol_type = other DNA
attcggtttacagtgtgaaatcgataattccattcatgttactgaatcagataagaaaggaaaacggaagggcaggaaaa

SEQ ID NO: 13400 - DNA, 80 bp, synthetic construct
  misc_feature 1..80: note = Synthetic: >NC_007555.1-cand-750-829
  source 1..80: mol_type = other DNA
atagaagaattgaagtttcatttggtgctccaggacatgacttgaccgaacaaattagtactttaagtgatgttgaatga

SEQ ID NO: 13401 - DNA, 80 bp, synthetic construct
  misc_feature 1..80: note = Synthetic: >NC_007555.1-cand-840-919
  source 1..80: mol_type = other DNA
aatacaatcaattaagtacaattgaatatacttaaatcacaaataatccgttaattacccaagatctctccttgggctaa

SEQ ID NO: 13402 - DNA, 80 bp, synthetic construct
  misc_feature 1..80: note = Synthetic: >NC_007556.1-cand-0-79
  source 1..80: mol_type = other DNA
atttgaagccatgttgctctttattattctatctgttggcgttgacgccataagttacattcaaaatgatagaagtaatg

SEQ ID NO: 13403 - DNA, 80 bp, synthetic construct
  misc_feature 1..80: note = Synthetic: >NC_007556.1-cand-90-169
  source 1..80: mol_type = other DNA
cgtttatgaaatgactagttttggaacaagttttaacaacgcaaatgactcattagttaagctacataagcatatgggat

SEQ ID NO: 13404 - DNA, 80 bp, synthetic construct
  misc_feature 1..80: note = Synthetic: >NC_007556.1-cand-150-229
  source 1..80: mol_type = other DNA
gctacataagcatatgggattgaaatatgaagtttgtaaaatagaatcgaacgctaatgcattaactcaaatgcaaaagt

SEQ ID NO: 13405 - DNA, 80 bp, synthetic construct
  misc_feature 1..80: note = Synthetic: >NC_007556.1-cand-240-319
  source 1..80: mol_type = other DNA
atatgatgatacaccacaaatagttgtcttcaccaattttaaaaaatctagtttaaaaacgttaattggaactgaaaata

SEQ ID NO: 13406 - DNA, 80 bp, synthetic construct
  misc_feature 1..80: note = Synthetic: >NC_007556.1-cand-330-409
  source 1..80: mol_type = other DNA
actaccacagacaacaatctacactccaaccgttgatattgaatcggaatatttcatatatggaaacgatgtcaaaatat

SEQ ID NO: 13407 - DNA, 80 bp, synthetic construct
  misc_feature 1..80: note = Synthetic: >NC_007556.1-cand-420-499
  source 1..80: mol_type = other DNA
caaaaatttactgggaattggatgtgatgccactgatacaacttcttggcttgatttagacgccggattacctaccaatc

SEQ ID NO: 13408 - DNA, 80 bp, synthetic construct
  misc_feature 1..80: note = Synthetic: >NC_007556.1-cand-510-589
  source 1..80: mol_type = other DNA
tattcctgagattacaagcgatggatttaaactattcgcaaaatacagtgattctttcttatgtcaacgactaatggatg

SEQ ID NO: 13409 - DNA, 80 bp, synthetic construct
  misc_feature 1..80: note = Synthetic: >NC_007556.1-cand-600-679
  source 1..80: mol_type = other DNA
acaaattcaattctacgcagaggtagacaatgtcccatctaatgatgtaatagaaagttcaagatcttgggcttctgttt

SEQ ID NO: 13410 - DNA, 80 bp, synthetic construct
  misc_feature 1..80: note = Synthetic: >NC_007556.1-cand-690-769
  source 1..80: mol_type = other DNA
taaaacagtcttacattttacttaccatatacttgatttgttctatggtaacagacgtgctacagctagaatgattgagc

SEQ ID NO: 13411 - DNA, 80 bp, synthetic construct
  misc_feature 1..80: note = Synthetic: >NC_007556.1-cand-730-809
  source 1..80: mol_type = other DNA
ttctatggtaacagacgtgctacagctagaatgattgagcattcaccactaggttgagaaatcccgaatggtgagcaaat

SEQ ID NO: 13412 - DNA, 80 bp, synthetic construct
  misc_feature 1..80: note = Synthetic: >NC_007570.1-cand-1080-1159
  source 1..80: mol_type = other DNA
ccagctggaactgtttttcaaccgggatttccatgggaacacacactatccaattacactgttgctcaagaagataattt

SEQ ID NO: 13413 - DNA, 80 bp, synthetic construct
  misc_feature 1..80: note = Synthetic: >NC_007570.1-cand-1170-1249
  source 1..80: mol_type = other DNA
ttgttaattgcatctgtgaagagaatggtaatgtagataagctagagggctaaacatcttctatgcggcctacataccat

SEQ ID NO: 13414 - DNA, 80 bp, synthetic construct
  misc_feature 1..80: note = Synthetic: >NC_007570.1-cand-1210-1289
  source 1..80: mol_type = other DNA
gctagagggctaaacatcttctatgcggcctacataccatgtagcatgaatcacgactgggtttagtccatgcttgcata

SEQ ID NO: 13415 - DNA, 80 bp, synthetic construct
  misc_feature 1..80: note = Synthetic: >NC_007571.1-cand-0-79
  source 1..80: mol_type = other DNA
tttaaaaaagaagaagctgtctgacaaactggtcttctttttaaatggtttgtacaacattgtacactgtttgcgccatt

SEQ ID NO: 13416 - DNA, 80 bp, synthetic construct
  misc_feature 1..80: note = Synthetic: >NC_007571.1-cand-80-159
  source 1..80: mol_type = other DNA
ctcttcattcttttcatttatatattattatttagaaaaatgttccacctaataactgatactctaatagtgatacttat

SEQ ID NO: 13417 - DNA, 80 bp, synthetic construct
  misc_feature 1..80: note = Synthetic: >NC_007571.1-cand-170-249
  source 1..80: mol_type = other DNA
tgtgtagagtggtcacaaggtcagatgtttactgatgatatatattataatggtaacgttgagactatcataaattctac

SEQ ID NO: 13418 - DNA, 80 bp, synthetic construct
  misc_feature 1..80: note = Synthetic: >NC_007571.1-cand-250-329
  source 1..80: mol_type = other DNA
tgatccttttaatgttgaatctttatgtatttattttccaaatgcagttgtaggatcacaaggaccaggtaaatctgatg

SEQ ID NO: 13419 - DNA, 80 bp, synthetic construct
  misc_feature 1..80: note = Synthetic: >NC_007571.1-cand-330-409
  source 1..80: mol_type = other DNA
gacatttgaacgatggtaattatgctcagaccatcgccactttatttgaaacaaaaggattcccaaaaggttcaataata

SEQ ID NO: 13420 - DNA, 80 bp, synthetic construct
  misc_feature 1..80: note = Synthetic: >NC_007571.1-cand-420-499
  source 1..80: mol_type = other DNA
acacacagacatcagactttataaattcagtagaaatgacatgctcttacaacatagttattattcctgatagcccaaat

SEQ ID NO: 13421 - DNA, 80 bp, synthetic construct
  misc_feature 1..80: note = Synthetic: >NC_007571.1-cand-510-589
  source 1..80: mol_type = other DNA
ctattgaacagatagcagaatggattttaaatgtttggagatgtgatgacatgaatttggaaatttatacttatgaacaa

SEQ ID NO: 13422 - DNA, 80 bp, synthetic construct
  misc_feature 1..80: note = Synthetic: >NC_007571.1-cand-600-679
  source 1..80: mol_type = other DNA
acaatttatgggctgcatttggtagtgactgcgatatatctgtctgtccattagatactacaagtaatggaatcggatgt

SEQ ID NO: 13423 - DNA, 80 bp, synthetic construct
  misc_feature 1..80: note = Synthetic: >NC_007571.1-cand-680-759
  source 1..80: mol_type = other DNA
tcgccagctagtacagaaacttatgaagttgtatcaaatgacacccaattggcattaattaatgttgtggataatgttag

SEQ ID NO: 13424 - DNA, 80 bp, synthetic construct
  misc_feature 1..80: note = Synthetic: >NC_007571.1-cand-770-849
  source 1..80: mol_type = other DNA
cagatgaacactgctcaatgtaaattaaaaaattgtattaagggtgaggctcgactgaatactgcactaataaggatttc

SEQ ID NO: 13425 - DNA, 80 bp, synthetic construct
  misc_feature 1..80: note = Synthetic: >NC_007571.1-cand-860-939
  source 1..80: mol_type = other DNA
agttttgataattcattgtcaccattaaataatggccaaacaacaagatcgtttaaaataaatgcaaagaaatggtggac

SEQ ID NO: 13426 - DNA, 80 bp, synthetic construct
  misc_feature 1..80: note = Synthetic: >NC_007572.1-cand-0-79
  source 1..80: mol_type = other DNA
taaaaagtagagatcgatggcgtcttcactgtacgcacaattaatctcacaaaattactattctctaggaaatgaaattt

SEQ ID NO: 13427 - DNA, 80 bp, synthetic construct
  misc_feature 1..80: note = Synthetic: >NC_007572.1-cand-80-159
  source 1..80: mol_type = other DNA
tatctgatcaacaaactaataaagtggtatcagactatgtggatgcaggaaactacacctatgctcaattgccacctaca

SEQ ID NO: 13428 - DNA, 80 bp, synthetic construct
  misc_feature 1..80: note = Synthetic: >NC_009238.1-cand-740-819
  source 1..80: mol_type = other DNA
acctgcctccgaacaccccaacaggaagtgcaagtggactccatcccacctcaggatacaatccccagggagcaggactc

SEQ ID NO: 13429 - DNA, 80 bp, synthetic construct
  misc_feature 1..80: note = Synthetic: >NC_009238.1-cand-810-889
  source 1..80: mol_type = other DNA
agcaggactcaatctccagtcagtgcacaaaccaattcacgccccctactcaggaatggcattggtacctatccctgaat

SEQ ID NO: 13430 - DNA, 80 bp, synthetic construct
  misc_feature 1..80: note = Synthetic: >NC_009238.1-cand-890-969
  source 1..80: mol_type = other DNA
accagttggaaactggaattccgggcatcccagactggctcttcaaccttgtcgcgtcatacttgcccgagttgcctagt

SEQ ID NO: 13431 - DNA, 80 bp, synthetic construct
  misc_feature 1..80: note = Synthetic: >NC_009238.1-cand-940-1019
  source 1..80: mol_type = other DNA
gtcgcgtcatacttgcccgagttgcctagtttgcaggacgtgttcaatagaattgcctttggaatctggtcatcatatta

SEQ ID NO: 13432 - DNA, 80 bp, synthetic construct
  misc_feature 1..80: note = Synthetic: >NC_009238.1-cand-1050-1129
  source 1..80: mol_type = other DNA
tcttagtgatgaaattcaaagacttttaagagaccttgaatatggatttagagcaactttagccagcataggagaatcag

SEQ ID NO: 13433 - DNA, 80 bp, synthetic construct
  misc_feature 1..80: note = Synthetic: >NC_009238.1-cand-1130-1209
  source 1..80: mol_type = other DNA
atcctgtaaatgctatagctactcaagttagaagcttagctaccacagcaagggaaagggagctgctacaaattactgca

SEQ ID NO: 13434 - DNA, 80 bp, synthetic construct
  misc_feature 1..80: note = Synthetic: >NC_009238.1-cand-1220-1299
  source 1..80: mol_type = other DNA
ttgacctttctaggcctaccagcgccttgtcagcagcagctggagcattaactgaagcagcttataattttatatatgat

SEQ ID NO: 13435 - DNA, 80 bp, synthetic construct
  misc_feature 1..80: note = Synthetic: >NC_009238.1-cand-1300-1379
  source 1..80: mol_type = other DNA
gcttcaagcctgcccaaagatggctttaatgctttaagtgagggtgtacacagactaggtcagtggatttccttttcagg

SEQ ID NO: 13436 - DNA, 80 bp, synthetic construct
  misc_feature 1..80: note = Synthetic: >NC_009238.1-cand-1380-1459
  source 1..80: mol_type = other DNA
gcctacaggaggtaccccacattatgcaactcctgactggattttgtatgtgctagaacaactaaatgctgatacctata

SEQ ID NO: 13437 - DNA, 80 bp, synthetic construct
  misc_feature 1..80: note = Synthetic: >NC_009238.1-cand-1460-1539
  source 1..80: mol_type = other DNA
aaattcctacacaggcagtaaaaagaaaacaagatgagctgcaccccgtgtcgcccacaaaaaaggctaacaaggccaag

SEQ ID NO: 13438 - DNA, 80 bp, synthetic construct
  misc_feature 1..80: note = Synthetic: >NC_009238.1-cand-1510-1589
  source 1..80: mol_type = other DNA
tcgcccacaaaaaaggctaacaaggccaagaagtcaagttccccgggtacaaactctggcaacagaagtaaaaaaaggag

SEQ ID NO: 13439 - DNA, 80 bp, synthetic construct
  misc_feature 1..80: note = Synthetic: >NC_009238.1-cand-1620-1699
  source 1..80: mol_type = other DNA
cagaagaaacagaatttaaagtggaactatttgtaaagccagtaattggaaatacaacagctgctcaggatgggcgtgag

SEQ ID NO: 13440 - DNA, 80 bp, synthetic construct
  misc_feature 1..80: note = Synthetic: >NC_009238.1-cand-1700-1779
  source 1..80: mol_type = other DNA
cccacccctcattactggtcaattagctctgccattcatgacaaggaaagcggttcaagtatcaaagttgaagaaactcc

SEQ ID NO: 13441 - DNA, 80 bp, synthetic construct
  misc_feature 1..80: note = Synthetic: >NC_009238.1-cand-1780-1859
  source 1..80: mol_type = other DNA
agatgctgacacaactgtatgttacagcctggcagaaattgctccccctgatataccaaatcaagttagtgagtgtgaca

SEQ ID NO: 13442 - DNA, 80 bp, synthetic construct
  misc_feature 1..80: note = Synthetic: >NC_009238.1-cand-1860-1939
  source 1..80: mol_type = other DNA
tgaaagtatgggagctgtacagaatggaaacagagttgcttgttgtacctctagttaatgctctaggaaacaccaatggt

SEQ ID NO: 13443 - DNA, 80 bp, synthetic construct
  misc_feature 1..80: note = Synthetic: >NC_009238.1-cand-1900-1979
  source 1..80: mol_type = other DNA
tgttgtacctctagttaatgctctaggaaacaccaatggtgttgtacatggtctggctggaacccagttgtatttttggg

SEQ ID NO: 13444 - DNA, 80 bp, synthetic construct
  misc_feature 1..80: note = Synthetic: >NC_010563.1-cand-4010-4089
  source 1..80: mol_type = other DNA
ataagcaatagttgttagattttttaacaaaaattcaagtgggacagatttcaaaggttcctctaagaagaattctaact

SEQ ID NO: 13445 - DNA, 80 bp, synthetic construct
  misc_feature 1..80: note = Synthetic: >NC_010563.1-cand-4090-4169
  source 1..80: mol_type = other DNA
tgttactggactgatacacctcgtcacacaacttttttacagtttcgtgttcaataatatcaggatcaaagtctttaatc

SEQ ID NO: 13446 - DNA, 80 bp, synthetic construct
  misc_feature 1..80: note = Synthetic: >NC_010563.1-cand-4170-4249
  source 1..80: mol_type = other DNA
tcatgaattgaaacctcatttttaatagccctaagaacctggtaaggtgaccagagtgtttccagcagctcacttttgct

SEQ ID NO: 13447 - DNA, 80 bp, synthetic construct
  misc_feature 1..80: note = Synthetic: >NC_010563.1-cand-4250-4329
  source 1..80: mol_type = other DNA
aaggtgcttattgactttcctagaatttcctaaacctacattattacactttgattctttcattctacttaaagtaagct

SEQ ID NO: 13448 - DNA, 80 bp, synthetic construct
  misc_feature 1..80: note = Synthetic: >NC_010563.1-cand-4330-4409
  source 1..80: mol_type = other DNA
gaacatcttgcttgatctgctcaaatgattccaattgttcttctgataatgtgtcatacaacaaggatagctcttctttc

SEQ ID NO: 13449 - DNA, 80 bp, synthetic construct
  misc_feature 1..80: note = Synthetic: >NC_010563.1-cand-4410-4489
  source 1..80: mol_type = other DNA
atttgaccttttgaaacactcacactaactaaattggaaaggttcttgaggaccaagaaatctaaggaatctgggtccaa

SEQ ID NO: 13450 - DNA, 80 bp, synthetic construct
  misc_feature 1..80: note = Synthetic: >NC_010563.1-cand-4490-4569
  source 1..80: mol_type = other DNA
gttgtaccttcccttcgttttgaacatttcagtaagagttgttacacaagatgagatcatcatttgtttgtcatacttgc

SEQ ID NO: 13451 - DNA, 80 bp, synthetic construct
  misc_feature 1..80: note = Synthetic: >NC_010563.1-cand-4580-4659
  source 1..80: mol_type = other DNA
acccaactcatctaacttagggacaacaacacttttattactagataagtccaaagcagtactagtgaatgatgggcgaa

SEQ ID NO: 13452 - DNA, 80 bp, synthetic construct
  misc_feature 1..80: note = Synthetic: >NC_010563.1-cand-4660-4739
  source 1..80: mol_type = other DNA
aagggtcaacttttagatcaccagacacccttaactttcccctgttaaaaagggaaacacagaaactgattaattcctta

SEQ ID NO: 13453 - DNA, 80 bp, synthetic construct
  misc_feature 1..80: note = Synthetic: >NC_010563.1-cand-4740-4819
  source 1..80: mol_type = other DNA
gagactcccggttctttaacatctgatatgttagtcaaatttttctggaaaaacctgttaacgctagatgtcataatctc

SEQ ID NO: 13454 - DNA, 80 bp, synthetic construct
  misc_feature 1..80: note = Synthetic: >NC_010563.1-cand-4820-4899
  source 1..80: mol_type = other DNA
ttcttgggcttctgttaaaatcccgcttaaagaaggattaactatgacactgttaaaattcagctttggctcaaggaatt

SEQ ID NO: 13455 - DNA, 80 bp, synthetic construct
  misc_feature 1..80: note = Synthetic: >NC_010563.1-cand-4900-4979
  source 1..80: mol_type = other DNA
tctcaaaacacttgatctgatcagttaatctatctggtgtctcctttgtcacaaaatgacacagataactaatattcagt

SEQ ID NO: 13456 - DNA, 80 bp, synthetic construct
  misc_feature 1..80: note = Synthetic: >NC_010563.1-cand-4980-5059
  source 1..80: mol_type = other DNA
aaaaacttaaaccttctggcaaagccaaaatctttatcatcccctgttgataagaccaattcaaacagtgtcactgctaa

SEQ ID NO: 13457 - DNA, 80 bp, synthetic construct
  misc_feature 1..80: note = Synthetic: >NC_010563.1-cand-5060-5139
  source 1..80: mol_type = other DNA
cctttgcaattgaatctctgaactggacttacactcaatctctaattttgacataagatcaacgtgatgagcctgattag

SEQ ID NO: 13458 - DNA, 80 bp, synthetic construct
  misc_feature 1..80: note = Synthetic: >NC_010563.1-cand-5140-5219
  source 1..80: mol_type = other DNA
cgtaagccattataaaatatctcagcccttggataaatgtttggttcctttttgaaggtgagcagagaaggagcagcacc

SEQ ID NO: 13459 - DNA, 80 bp, synthetic construct
  misc_feature 1..80: note = Synthetic: >NC_010563.1-cand-5220-5299
  source 1..80: mol_type = other DNA
aaggatctcagcttaggcttaaccagctcaacaagttgttcatcaaagtccaaccagcataccatttcattgcacatgga

SEQ ID NO: 13460 - DNA, 80 bp, synthetic construct
  misc_feature 1..80: note = Synthetic: >NC_011506.2-cand-560-639
  source 1..80: mol_type = other DNA
attacttaaagatatggctgtagagaataaaaattcaagggatgctggcaaagtagttgattctgaaacagccgcaatat

SEQ ID NO: 13461 - DNA, 80 bp, synthetic construct
  misc_feature 1..80: note = Synthetic: >NC_011506.2-cand-640-719
  source 1..80: mol_type = other DNA
gcgatgctatttttcaagatgaagaaaccgaaggtgcagtaagaagattcatagctgagatgagacaacgagttcaagct

SEQ ID NO: 13462 - DNA, 80 bp, synthetic construct
  misc_feature 1..80: note = Synthetic: >NC_011506.2-cand-720-799
  source 1..80: mol_type = other DNA
gatcgaaatgtagtcaattatccatctatattgcatccaattgaccatgcgtttaacgaatacttcttacaacatcagtt

SEQ ID NO: 13463 - DNA, 80 bp, synthetic construct
  misc_feature 1..80: note = Synthetic: >NC_011506.2-cand-800-879
  source 1..80: mol_type = other DNA
ggtagaaccattaaataatgatatcattttcaattacataccagagagaataagaaatgatgtcaactatatattaaata

SEQ ID NO: 13464 - DNA, 80 bp, synthetic construct
  misc_feature 1..80: note = Synthetic: >NC_011506.2-cand-880-959
  source 1..80: mol_type = other DNA
tggacaggaatttaccgtctactgctagatatatcagaccaaacttgctacaagataggttaaatttacatgataatttt

SEQ ID NO: 13465 - DNA, 80 bp, synthetic construct
  misc_feature 1..80: note = Synthetic: >NC_011506.2-cand-960-1039
  source 1..80: mol_type = other DNA
gagtcactctgggatactataactacatctaattatattttagcaagatctgtggtgccagacctaaaagaattagtatc

SEQ ID NO: 13466 - DNA, 80 bp, synthetic construct
  misc_feature 1..80: note = Synthetic: >NC_011506.2-cand-1040-1119
  source 1..80: mol_type = other DNA
tactgaggcacaaatccagaaaatgtcacaagatttgcaattggaagctttgacaatacaatcagagactcagtttttaa

SEQ ID NO: 13467 - DNA, 80 bp, synthetic construct
  misc_feature 1..80: note = Synthetic: >NC_011506.2-cand-1120-1199
  source 1..80: mol_type = other DNA
caggtataaactcacaagccgctaatgattgttttaaaactttgattgctgctatgttgagtcagagaaccatgtcatta

SEQ ID NO: 13468 - DNA, 80 bp, synthetic construct
  misc_feature 1..80: note = Synthetic: >NC_011506.2-cand-1200-1279
  source 1..80: mol_type = other DNA
gatttcgtaacgacaaattacatgtcacttatttcaggcatgtggttactcactgtgattccaaatgatatgtttataag

SEQ ID NO: 13469 - DNA, 80 bp, synthetic construct
  misc_feature 1..80: note = Synthetic: >NC_011506.2-cand-1280-1359
  source 1..80: mol_type = other DNA
agaatcattagtagcatgtcaactagccataataaataccattgtttatccggcattcggaatgcaaagaatgcattata

SEQ ID NO: 13470 - DNA, 80 bp, synthetic construct
  misc_feature 1..80: note = Synthetic: >NC_011506.2-cand-1360-1439
  source 1..80: mol_type = other DNA
ggaatggtgatccacagactccctttcaaattgcagagcaacagattcaaaattttcaggtagctaattggttacatttt

SEQ ID NO: 13471 - DNA, 80 bp, synthetic construct
  misc_feature 1..80: note = Synthetic: >NC_011506.2-cand-1450-1529
  source 1..80: mol_type = other DNA
atcagtttagacaagtagtgattgatggagtgttaaatcaagtcttgaatgataatataagaaatggtcatgtagtcaac

SEQ ID NO: 13472 - DNA, 80 bp, synthetic construct
  misc_feature 1..80: note = Synthetic: >NC_011506.2-cand-1530-1609
  source 1..80: mol_type = other DNA
caattaatggaagctctgatgcaattatctagacaacagtttcccacaatgccagttgattataaaagatctatacagag

SEQ ID NO: 13473 - DNA, 80 bp, synthetic construct
  misc_feature 1..80: note = Synthetic: >NC_011506.2-cand-1610-1689
  source 1..80: mol_type = other DNA
aggaattttgctgctttctaacagacttggtcagcttgtcgatttaacaagattgttatcatacaattatgagacattaa

SEQ ID NO: 13474 - DNA, 80 bp, synthetic construct
  misc_feature 1..80: note = Synthetic: >NC_011506.2-cand-1690-1769
  source 1..80: mol_type = other DNA
tggcatgcataacaatgaatatgcagcatgttcaaacattaacaactgaaaaattgcaattaacatcagtaacatcatta

SEQ ID NO: 13475 - DNA, 80 bp, synthetic construct
  misc_feature 1..80: note = Synthetic: >NC_011506.2-cand-1770-1849
  source 1..80: mol_type = other DNA
tgtatgctaattggaaatgctacggttataccgagtccgcaaacattgttccattactataatgtgaatgtcaattttca

SEQ ID NO: 13476 - DNA, 80 bp, synthetic construct
  misc_feature 1..80: note = Synthetic: >NC_011508.2-cand-1000-1079
  source 1..80: mol_type = other DNA
acaaagaattattttttataaatgatgtgaagaaactgaaggataactcaatattgtatattgatataagaaccgatagg

SEQ ID NO: 13477 - DNA, 80 bp, synthetic construct
  misc_feature 1..80: note = Synthetic: >NC_011508.2-cand-1100-1179
  source 1..80: mol_type = other DNA
atggagaaagacagtagaagaacaaactattaataatttggacatagcttatgaatatttacgaacgggtaaagcgaagg

SEQ ID NO: 13478 - DNA, 80 bp, synthetic construct
  misc_feature 1..80: note = Synthetic: >NC_011508.2-cand-1180-1259
  source 1..80: mol_type = other DNA
tgtgttgtgttaagatgacagctatggatttggaactgccaatttcagctaaattactgcaccacccaactacggaaata

SEQ ID NO: 13479 - DNA, 80 bp, synthetic construct
  misc_feature 1..80: note = Synthetic: >NC_011508.2-cand-1260-1339
  source 1..80: mol_type = other DNA
agatcagaattttatttattactagatacttgggatttaactaacattaggaggttcattcctaaaggcgtgttatattc

SEQ ID NO: 13480 - DNA, 80 bp, synthetic construct
  misc_feature 1..80: note = Synthetic: >NC_011508.2-cand-1350-1429
  source 1..80: mol_type = other DNA
aatataataactgaaaatgtgtttattcaacaaccatttaaagtaaaagtactgaatgatagttatattgtagcgttata

SEQ ID NO: 13481 - DNA, 80 bp, synthetic construct
  misc_feature 1..80: note = Synthetic: >NC_011508.2-cand-1430-1509
  source 1..80: mol_type = other DNA
tgcattatcaaatgattttaataatagatcagaagtaattaaattaattaataatcagaaacaatctctaataactgtta

SEQ ID NO: 13482 - DNA, 80 bp, synthetic construct
  misc_feature 1..80: note = Synthetic: >NC_011508.2-cand-1520-1599
  source 1..80: mol_type = other DNA
tacgtttaaggatgaaccaaaagttgggttcaaaaatatctatgattggacctttcttccaaccgactttgataccaaag

SEQ ID NO: 13483 - DNA, 80 bp, synthetic construct
  misc_feature 1..80: note = Synthetic: >NC_011508.2-cand-1600-1679
  source 1..80: mol_type = other DNA
aagctataattacttcatacgacggttgtttaggactctttggtttgtctatatcgttagcatcaaaaccaacagggaat

SEQ ID NO: 13484 - DNA, 80 bp, synthetic construct
  misc_feature 1..80: note = Synthetic: >NC_011508.2-cand-1690-1769
  source 1..80: mol_type = other DNA
tcattttaagtggtacagataagtattataaattggatcaatttgctaatcacaccagtatatcgagaagatcacaccaa

SEQ ID NO: 13485 - DNA, 80 bp, synthetic construct
  misc_feature 1..80: note = Synthetic: >NC_011508.2-cand-1770-1849
  source 1..80: mol_type = other DNA
attaggttttcggaatctgctacttcatattcaggttatatatttagagatttgtccaataataattttaatctaattgg

SEQ ID NO: 13486 - DNA, 80 bp, synthetic construct
  misc_feature 1..80: note = Synthetic: >NC_011508.2-cand-1850-1929
  source 1..80: mol_type = other DNA
tactaatatagagaattcagtatcaggtcatgtatataatgctttaatttattatagatataattattcatttgatctta

SEQ ID NO: 13487 - DNA, 80 bp, synthetic construct
  misc_feature 1..80: note = Synthetic: >NC_011508.2-cand-1930-2009
  source 1..80: mol_type = other DNA
aacgctggatttatttacattctatagataaagttgatatagaaggaggaaagtattatgaactcgcaccaatagaatta

SEQ ID NO: 13488 - DNA, 80 bp, synthetic construct
  misc_feature 1..80: note = Synthetic: >NC_011508.2-cand-2010-2089
  source 1..80: mol_type = other DNA
atttatgcatgtagatcagcaaaagaatttgctacattgcaggatgacttaactgtattgagatattcaaacgaaataga

SEQ ID NO: 13489 - DNA, 80 bp, synthetic construct
  misc_feature 1..80: note = Synthetic: >NC_011508.2-cand-2090-2169
  source 1..80: mol_type = other DNA
gaattatattaatacagtatatagtataacatacgctgatgatccgaattactttatcggaatacaatttagaaatatac

SEQ ID NO: 13490 - DNA, 80 bp, synthetic construct
  misc_feature 1..80: note = Synthetic: >NC_011508.2-cand-2170-2249
  source 1..80: mol_type = other DNA
catataaatatgatgttaaaataccgcatttaaccttcggagtattacatatttctgataacatggtgccagacgtgatt

SEQ ID NO: 13491 - DNA, 80 bp, synthetic construct
  misc_feature 1..80: note = Synthetic: >NC_011508.2-cand-2250-2329
  source 1..80: mol_type = other DNA
gacatactaaagataatgaagaatgaattatttaaaatggatattacgaccagttatacatatatgttatcagatggaat

SEQ ID NO: 13492 - DNA, 80 bp, synthetic construct
  misc_feature 1..80: note = Synthetic: >NC_012532.1-cand-1650-1729
  source 1..80: mol_type = other DNA
accggaactccacactggaacaacaaagaggcattggtagaattcaaggatgcccacgccaagaggcaaaccgtcgtcgt

SEQ ID NO: 13493 - DNA, 80 bp, synthetic construct
  misc_feature 1..80: note = Synthetic: >NC_012532.1-cand-1740-1819
  source 1..80: mol_type = other DNA
caggaaggagccgttcacacggctctcgctggagctctagaggctgagatggatggtgcaaagggaaggctgttctctgg

SEQ ID NO: 13494 - DNA, 80 bp, synthetic construct
  misc_feature 1..80: note = Synthetic: >NC_012532.1-cand-1780-1859
  source 1..80: mol_type = other DNA
aggctgagatggatggtgcaaagggaaggctgttctctggccatttgaaatgccgcctaaaaatggacaagcttagattg

SEQ ID NO: 13495 - DNA, 80 bp, synthetic construct
  misc_feature 1..80: note = Synthetic: >NC_012532.1-cand-1860-1939
  source 1..80: mol_type = other DNA
aagggcgtgtcatattccttgtgcactgcggcattcacattcaccaaggtcccagctgaaacactgcatggaacagtcac

SEQ ID NO: 13496 - DNA, 80 bp, synthetic construct
  misc_feature 1..80: note = Synthetic: >NC_012532.1-cand-1940-2019
  source 1..80: mol_type = other DNA
agtggaggtgcagtatgcagggacagatggaccctgcaagatcccagtccagatggcggtggacatgcagaccctgaccc

SEQ ID NO: 13497 - DNA, 80 bp, synthetic construct
  misc_feature 1..80: note = Synthetic: >NC_012532.1-cand-2020-2099
  source 1..80: mol_type = other DNA
cagttggaaggctgataaccgccaaccccgtgattactgaaagcactgagaactcaaagatgatgttggagcttgaccca

SEQ ID NO: 13498 - DNA, 80 bp, synthetic construct
  misc_feature 1..80: note = Synthetic: >NC_012532.1-cand-2140-2219
  source 1..80: mol_type = other DNA
agaaaatcacccaccactggcataggagtggtagcaccatcggaaaggcatttgaggccactgtgagaggcgccaagaga

SEQ ID NO: 13499 - DNA, 80 bp, synthetic construct
  misc_feature 1..80: note = Synthetic: >NC_012532.1-cand-2150-2229
  source 1..80: mol_type = other DNA
ccaccactggcataggagtggtagcaccatcggaaaggcatttgaggccactgtgagaggcgccaagagaatggcagtcc

SEQ ID NO: 13500 - DNA, 80 bp, synthetic construct
  misc_feature 1..80: note = Synthetic: >NC_012532.1-cand-2270-2349
  source 1..80: mol_type = other DNA
gttcaactcactgggtaagggcattcaccagatttttggagcagccttcaaatcactgtttggaggaatgtcctggttct

SEQ ID NO: 13501 - DNA, 80 bp, synthetic construct
  misc_feature 1..80: note = Synthetic: >NC_012532.1-cand-2340-2419
  source 1..80: mol_type = other DNA
tcctggttctcacagatcctcataggcacgctgctagtgtggttaggtttgaacacaaagaatggatctatctccctcac

SEQ ID NO: 13502 - DNA, 80 bp, synthetic construct
  misc_feature 1..80: note = Synthetic: >NC_012532.1-cand-2350-2429
  source 1..80: mol_type = other DNA
cacagatcctcataggcacgctgctagtgtggttaggtttgaacacaaagaatggatctatctccctcacatgcttggcc

SEQ ID NO: 13503 - DNA, 80 bp, synthetic construct
  misc_feature 1..80: note = Synthetic: >NC_012532.1-cand-2530-2609
  source 1..80: mol_type = other DNA
tcatctataatgatgttgaagcctggagggaccggtacaagtaccatcctgactccccccgcagattggcagcagcagtc

SEQ ID NO: 13504 - DNA, 80 bp, synthetic construct
  misc_feature 1..80: note = Synthetic: >NC_012532.1-cand-2550-2629
  source 1..80: mol_type = other DNA
gcctggagggaccggtacaagtaccatcctgactccccccgcagattggcagcagcagtcaagcaggcctgggaagaggg

SEQ ID NO: 13505 - DNA, 80 bp, synthetic construct
  misc_feature 1..80: note = Synthetic: >NC_012532.1-cand-2690-2769
  source 1..80: mol_type = other DNA
ggagctcaatgctatcctagaggagaatggagttcaactgacagttgttgtgggatctgtaaaaaaccccatgtggagag

SEQ ID NO: 13506 - DNA, 80 bp, synthetic construct
  misc_feature 1..80: note = Synthetic: >NC_012532.1-cand-2740-2819
  source 1..80: mol_type = other DNA
tgggatctgtaaaaaaccccatgtggagaggtccacaaagattgccagtgcctgtgaatgagctgccccatggctggaaa

SEQ ID NO: 13507 - DNA, 80 bp, synthetic construct
  misc_feature 1..80: note = Synthetic: >NC_012532.1-cand-2830-2909
  source 1..80: mol_type = other DNA
aatcgtattttgttagggcggcaaagaccaacaacagttttgttgtcgacggtgacacactgaaggaatgtccgcttgag

SEQ ID NO: 13508 - DNA, 80 bp, synthetic construct
  misc_feature 1..80: note = Synthetic: >NC_025114.1-cand-2400-2479
  source 1..80: mol_type = other DNA
gggacccagaccaacactgctttcgtcctttccctctactcccaatggcgtggttctctccaaatctctcttatcttcac

SEQ ID NO: 13509 - DNA, 80 bp, synthetic construct
  misc_feature 1..80: note = Synthetic: >NC_025114.1-cand-2480-2559
  source 1..80: mol_type = other DNA
cggcccagctcagtgctatggccggctcctactagcctacactcctccttccgccaatcctcccacgaccatcgaggaag

SEQ ID NO: 13510 - DNA, 80 bp, synthetic construct
  misc_feature 1..80: note = Synthetic: >NC_025114.1-cand-2560-2639
  source 1..80: mol_type = other DNA
ccaacaacggcacctacgatgtctgggatgtgaatggcgattctacctacaccttcactgtccctttctgctcccagtcc

SEQ ID NO: 13511 - DNA, 80 bp, synthetic construct
  misc_feature 1..80: note = Synthetic: >NC_025114.1-cand-2640-2719
  source 1..80: mol_type = other DNA
tactggaagaccgtcgacatcggttcttcctctggcctggtctctaacaatggctacttcactgtctttgttatgaaccc

SEQ ID NO: 13512 - DNA, 80 bp, synthetic construct
  misc_feature 1..80: note = Synthetic: >NC_025114.1-cand-2720-2799
  source 1..80: mol_type = other DNA
tcttgtcactcctggtccctctcccccctccgcgaccgtggctgccttcctccacgttgcggaggactttgatgtccgtc

SEQ ID NO: 13513 - DNA, 80 bp, synthetic construct
  misc_feature 1..80: note = Synthetic: >NC_025114.1-cand-2800-2879
  source 1..80: mol_type = other DNA
tcccccaggcccctgcccttgggtttcagtccggcgccgacggcgctgaagtgcaacccgctcccaccagcgacctgtct

SEQ ID NO: 13514 - DNA, 80 bp, synthetic construct
  misc_feature 1..80: note = Synthetic: >NC_025114.1-cand-2880-2959
  source 1..80: mol_type = other DNA
gatggcaatcctgaaactgacccagctccccgtgacaactttgattacccccaccaccctgttgacccctcaactgactt

SEQ ID NO: 13515 - DNA, 80 bp, synthetic construct
  misc_feature 1..80: note = Synthetic: >NC_025114.1-cand-2960-3039
  source 1..80: mol_type = other DNA
agctttctacttctcacagtaccgttggtttggcctcaacgaggacctcactcctctggtcatgaccggtggtctcttct

SEQ ID NO: 13516 - DNA, 80 bp, synthetic construct
  misc_feature 1..80: note = Synthetic: >NC_025114.1-cand-3040-3119
  source 1..80: mol_type = other DNA
atcatgtcagtcttaaccctattaactttcaacagtcttctcttctcagcgtccttggcgctttcacctatatctatgct

SEQ ID NO: 13517 - DNA, 80 bp, synthetic construct
  misc_feature 1..80: note = Synthetic: >NC_025114.1-cand-3120-3199
  source 1..80: mol_type = other DNA
aatctgtctcttaacctaacaatttctgcccctaatgagtctgcctccttctacatcttctatgcacctcctggttcatc

SEQ ID NO: 13518 - DNA, 80 bp, synthetic construct
  misc_feature 1..80: note = Synthetic: >NC_025114.1-cand-3200-3279
  source 1..80: mol_type = other DNA
agtccccactgcccaatctgtcgcagaaatgtccttcttcactcacacagtgacccccctcaacctaacctcctccacca

SEQ ID NO: 13519 - DNA, 80 bp, synthetic construct
  misc_feature 1..80: note = Synthetic: >NC_025114.1-cand-3280-3359
  source 1..80: mol_type = other DNA
acgtcactgtgtctatcccctatgcctctccccagtctgtcctctgcacctcctttggcggcttcggcctccagaacggt

SEQ ID NO: 13520 - DNA, 80 bp, synthetic construct
  misc_feature 1..80: note = Synthetic: >NC_025114.1-cand-3400-3479
  source 1..80: mol_type = other DNA
tcgtcttctacgtggacctccccagctctctgtcagtctctgtctctgcttacatttctttccgggatttcgaggcatac

SEQ ID NO: 13521 - DNA, 80 bp, synthetic construct
  misc_feature 1..80: note = Synthetic: >NC_025114.1-cand-3440-3519
  source 1..80: mol_type = other DNA
tgtctctgcttacatttctttccgggatttcgaggcatacatcccacggcagacgcctggtgtcggtactggtaacccca

SEQ ID NO: 13522 - DNA, 80 bp, synthetic construct
  misc_feature 1..80: note = Synthetic: >NC_025114.1-cand-3520-3599
  source 1..80: mol_type = other DNA
gcactggcatcgtgcgcgtcgctcgcccaacgccaaaaccccgcagggttcggcgccagggcggcaaccttgccgacctc

SEQ ID NO: 13523 - DNA, 80 bp, synthetic construct
  misc_feature 1..80: note = Synthetic: >NC_025114.1-cand-3600-3679
  source 1..80: mol_type = other DNA
atcctcacccccgagagccgctgttacatcgtggctcacactactgcccccttctactcactccttcttgtcaaccccga

SEQ ID NO: 13524 - DNA, 80 bp, synthetic construct
  misc_feature 1..80: note = Synthetic: >NC_039199.1-cand-600-679
  source 1..80: mol_type = other DNA
gtgtactaagtgatgcactcaagagataccctagaatggacataccaaagattgccagatccttctatgacttatttgaa

SEQ ID NO: 13525 - DNA, 80 bp, synthetic construct
  misc_feature 1..80: note = Synthetic: >NC_039199.1-cand-680-759
  source 1..80: mol_type = other DNA
caaaaagtgtatcacagaagtttgttcattgagtatggcaaagcattaggctcatcatctacaggcagcaaagcagaaag

SEQ ID NO: 13526 - DNA, 80 bp, synthetic construct
  misc_feature 1..80: note = Synthetic: >NC_039199.1-cand-710-789
  source 1..80: mol_type = other DNA
gagtatggcaaagcattaggctcatcatctacaggcagcaaagcagaaagtctatttgttaatatattcatgcaagctta

SEQ ID NO: 13527 - DNA, 80 bp, synthetic construct
  misc_feature 1..80: note = Synthetic: >NC_039199.1-cand-840-919
  source 1..80: mol_type = other DNA
acaatataatgttaggacatgtatccgtccaagctgagttaaaacaggtcacagaagtctatgacttggtgcgagaaatg

SEQ ID NO: 13528 - DNA, 80 bp, synthetic construct
  misc_feature 1..80: note = Synthetic: >NC_039199.1-cand-920-999
  source 1..80: mol_type = other DNA
ggccctgaatctggacttctacatttaaggcaaagcccaaaagctggactgttatcactagccaactgtcccaactttgc

SEQ ID NO: 13529 - DNA, 80 bp, synthetic construct
  misc_feature 1..80: note = Synthetic: >NC_039199.1-cand-1000-1079
  source 1..80: mol_type = other DNA
aagtgttgttctcggaaatgcctcaggcttaggcataatcggtatgtatcgagggagagtaccaaacacagaattatttt

SEQ ID NO: 13530 - DNA, 80 bp, synthetic construct
  misc_feature 1..80: note = Synthetic: >NC_039199.1-cand-1080-1159
  source 1..80: mol_type = other DNA
cagcagctgaaagttatgccaaaagtttgaaagaaagcaataaaataaatttctcttcattaggacttacagatgaagag

SEQ ID NO: 13531 - DNA, 80 bp, synthetic construct
  misc_feature 1..80: note = Synthetic: >NC_039199.1-cand-1160-1239
  source 1..80: mol_type = other DNA
aaagaggctgcagaacatttcttaaatgtgagtgacgacagtcaaaatgattatgagtaattaaaaaagtgggacaagtc

SEQ ID NO: 13532 - DNA, 80 bp, synthetic construct
  misc_feature 1..80: note = Synthetic: >NC_039199.1-cand-1230-1309
  source 1..80: mol_type = other DNA
gggacaagtcaaaatgtcattccctgaaggaaaagatattcttttcatgggtaatgaagcagcaaaattagcagaagctt

SEQ ID NO: 13533 - DNA, 80 bp, synthetic construct
  misc_feature 1..80: note = Synthetic: >NC_039199.1-cand-1310-1389
  source 1..80: mol_type = other DNA
tccagaaatcattaagaaaaccaggtcataaaagatctcaatctattataggagaaaaagtgaatactgtatcagaaaca

SEQ ID NO: 13534 - DNA, 80 bp, synthetic construct
  misc_feature 1..80: note = Synthetic: >NC_039199.1-cand-1390-1469
  source 1..80: mol_type = other DNA
ttggaattacctactatcagtagacctgcaaaaccaaccataccgtcagaaccaaagttagcatggacagataaaggtgg

SEQ ID NO: 13535 - DNA, 80 bp, synthetic construct
  misc_feature 1..80: note = Synthetic: >NC_039199.1-cand-1470-1549
  source 1..80: mol_type = other DNA
ggcaaccaaaactgaaataaagcaagcaatcaaagtcatggatcccattgaagaagaagagtctaccgagaagaaggtgc

SEQ ID NO: 13536 - DNA, 80 bp, synthetic construct
  misc_feature 1..80: note = Synthetic: >NC_039199.1-cand-1550-1629
  source 1..80: mol_type = other DNA
taccctccagtgatgggaaaacccctgcagaaaagaaactgaaaccatcaactaacaccaaaaagaaggtttcatttaca

SEQ ID NO: 13537 - DNA, 80 bp, synthetic construct
  misc_feature 1..80: note = Synthetic: >NC_039199.1-cand-1630-1709
  source 1..80: mol_type = other DNA
ccaaatgaaccagggaaatatacaaagttggaaaaagatgctctagatttgctctcagataatgaagaagaagatgcaga

SEQ ID NO: 13538 - DNA, 80 bp, synthetic construct
  misc_feature 1..80: note = Synthetic: >NC_039199.1-cand-1710-1789
  source 1..80: mol_type = other DNA
atcttcaatcttaacctttgaagaaagagatacttcatcattaagcattgaggccagattggaatcaatagaggagaaat

SEQ ID NO: 13539 - DNA, 80 bp, synthetic construct
  misc_feature 1..80: note = Synthetic: >NC_039199.1-cand-1790-1869
  source 1..80: mol_type = other DNA
taagcatgatattagggctattaagaacactcaacattgctacagcaggacccacagcagcaagagatgggatcagagat

SEQ ID NO: 13540 - DNA, 80 bp, synthetic construct
  misc_feature 1..80: note = Synthetic: >NC_044856.1-cand-2830-2909
  source 1..80: mol_type = other DNA
gctatggcctatgtgaaagtgaacaggaagaagaggaagatcagactatggaattgcccactgctaataaggaaggcaag

SEQ ID NO: 13541 - DNA, 80 bp, synthetic construct
  misc_feature 1..80: note = Synthetic: >NC_044856.1-cand-2910-2989
  source 1..80: mol_type = other DNA
aataagggtaaaactaaaaagggccgcggccgtaagtctaacttcaatgccttctcaaggcgcggccttagtgatgaaga

SEQ ID NO: 13542 - DNA, 80 bp, synthetic construct
  misc_feature 1..80: note = Synthetic: >NC_044856.1-cand-2990-3069
  source 1..80: mol_type = other DNA
gtatgaggagtataagaaaatcagggaagaaaagagtggcaactacagcatacaggaatatcttgaagaccgccaacgct

SEQ ID NO: 13543 - DNA, 80 bp, synthetic construct
  misc_feature 1..80: note = Synthetic: >NC_044856.1-cand-3070-3149
  source 1..80: mol_type = other DNA
atgaggaggagctcgctgaggtccaggcaggtggagatggtggaatcggcgaaactgaagcggagatccgtcaccgagtt

SEQ ID NO: 13544 - DNA, 80 bp, synthetic construct
  misc_feature 1..80: note = Synthetic: >NC_044856.1-cand-3150-3229
  source 1..80: mol_type = other DNA
ttctacaagtcaaagtctggcatgagaaagcagcgccaagaggaacgacgccagttaggccttgtgagcgggtccgagat

SEQ ID NO: 13545 - DNA, 80 bp, synthetic construct
  misc_feature 1..80: note = Synthetic: >NC_044856.1-cand-3230-3309
  source 1..80: mol_type = other DNA
ccggaaacgcaagcctatagactggactccccccaaaaatgattggtcagaggacaccagaacagttaattatgatgaac

SEQ ID NO: 13546 - DNA, 80 bp, synthetic construct
  misc_feature 1..80: note = Synthetic: >NC_044856.1-cand-3290-3369
  source 1..80: mol_type = other DNA
aacagttaattatgatgaacacattagttttgaagccccaccctcaatctggagtagggtagtaaaatttggcagtggct

SEQ ID NO: 13547 - DNA, 80 bp, synthetic construct
  misc_feature 1..80: note = Synthetic: >NC_044856.1-cand-3390-3469
  source 1..80: mol_type = other DNA
acagtgttcatcaccacaacacatgtcataccacctggcgctaaagagatctttggtgaaagcctcagcaatgtggccat

SEQ ID NO: 13548 - DNA, 80 bp, synthetic construct
  misc_feature 1..80: note = Synthetic: >NC_044856.1-cand-3470-3549
  source 1..80: mol_type = other DNA
tcacagggttggtgaattcactcaatttcgattctccaaaaagatgagacccgacctcaccggtatggttctagaagaag

SEQ ID NO: 13549 - DNA, 80 bp, synthetic construct
  misc_feature 1..80: note = Synthetic: >NC_044856.1-cand-3550-3629
  source 1..80: mol_type = other DNA
gttgcccagaaggcacggtgtgtactataatgataaagagggattctggtgagttgctgccactagctgtccgcatggga

SEQ ID NO: 13550 - DNA, 80 bp, synthetic construct
  misc_feature 1..80: note = Synthetic: >NC_044856.1-cand-3630-3709
  source 1..80: mol_type = other DNA
gcagtggcttcaatgaagatccaagggaagctcatgcatggacaatcaggaatgctgctcactggcgccaatgccaaggg

SEQ ID NO: 13551 - DNA, 80 bp, synthetic construct
  misc_feature 1..80: note = Synthetic: >NC_044856.1-cand-3650-3729
  source 1..80: mol_type = other DNA
ccaagggaagctcatgcatggacaatcaggaatgctgctcactggcgccaatgccaagggcatggatttaggaactatac

SEQ ID NO: 13552 - DNA, 80 bp, synthetic construct
  misc_feature 1..80: note = Synthetic: >NC_044856.1-cand-3790-3869
  source 1..80: mol_type = other DNA
ttcatgcggccgccacgaaatcaggtaatactgtggtgtgtgctattcagggtggtgagggtgaagccacattggagggt

SEQ ID NO: 13553 - DNA, 80 bp, synthetic construct
  misc_feature 1..80: note = Synthetic: >NC_044856.1-cand-3870-3949
  source 1..80: mol_type = other DNA
ggtggccaaaataagggtcattatgcagggcacccaatactgaggtatgggaatggcccttcattgtcaactaagacaaa

SEQ ID NO: 13554 - DNA, 80 bp, synthetic construct
  misc_feature 1..80: note = Synthetic: >NC_044856.1-cand-3950-4029
  source 1..80: mol_type = other DNA
gttctggaagtcaaccccccaaccattgcctccaggcacctatgaaccagcttatcttggtggtagggaccccagggtcg

SEQ ID NO: 13555 - DNA, 80 bp, synthetic construct
  misc_feature 1..80: note = Synthetic: >NC_044856.1-cand-4040-4119
  source 1..80: mol_type = other DNA
gtccctacagcaagtgctaagagaccaactaaaaccatttgctgaaccccgtggcagattgccggaggcaggcttgttag

SEQ ID NO: 13556 - DNA, 80 bp, synthetic construct
  misc_feature 1..80: note = Synthetic: >U31794.1-cand-1890-1969
  source 1..80: mol_type = other DNA
atcaatttgaattgtctaaaatggtacagtgggcatttgataatgaagtaacagatgatagccaaattgcctttttatat

SEQ ID NO: 13557 - DNA, 80 bp, synthetic construct
  misc_feature 1..80: note = Synthetic: >U31794.1-cand-1970-2049
  source 1..80: mol_type = other DNA
gcacaactagcagacatagatagcaatgcacaagcatttttaaaaagtaatatgcaagcaaaatatgtaaaggattgtgg

SEQ ID NO: 13558 - DNA, 80 bp, synthetic construct
  misc_feature 1..80: note = Synthetic: >U31794.1-cand-2050-2129
  source 1..80: mol_type = other DNA
aataatgtgtagacattacaaaagggcacagcaacagcaaatgaatatgtgccagtggataaagcatatatgtagtaaag

SEQ ID NO: 13559 - DNA, 80 bp, synthetic construct
  misc_feature 1..80: note = Synthetic: >U31794.1-cand-2190-2269
  source 1..80: mol_type = other DNA
tcatttcatttttaagttattttaaattatttttacaaggaacgcctaaacataattgtttggtactgtgtggaccacca

SEQ ID NO: 13560 - DNA, 80 bp, synthetic construct
  misc_feature 1..80: note = Synthetic: >U31794.1-cand-2220-2299
  source 1..80: mol_type = other DNA
ttttacaaggaacgcctaaacataattgtttggtactgtgtggaccaccaaatacaggtaaatcatgttttgctatgagc

SEQ ID NO: 13561 - DNA, 80 bp, synthetic construct
  misc_feature 1..80: note = Synthetic: >U31794.1-cand-2310-2389
  source 1..80: mol_type = other DNA
ttttccaagggtcagtcatttcatttgttaattcacaaagccacttttggttacagccactagacaatgccaaattaggt

SEQ ID NO: 13562 - DNA, 80 bp, synthetic construct
  misc_feature 1..80: note = Synthetic: >U31794.1-cand-2390-2469
  source 1..80: mol_type = other DNA
ttgctggatgatgcaacagatacgtgttggagatacatagatgattatctaagaaatttattagatgggaatcccataag

SEQ ID NO: 13563 - DNA, 80 bp, synthetic construct
  misc_feature 1..80: note = Synthetic: >U31794.1-cand-2470-2549
  source 1..80: mol_type = other DNA
tttagataggaaacataaacaattagtacaaataaaatgtcctccagttattattacaactaatgtaaatcctatgcaag

SEQ ID NO: 13564 - DNA, 80 bp, synthetic construct
  misc_feature 1..80: note = Synthetic: >U31794.1-cand-2550-2629
  source 1..80: mol_type = other DNA
atgcaaaattaagatatttacacagtagaatttcagtgtttaagtttgaaaatccatttccattagataacaatggtaat

SEQ ID NO: 13565 - DNA, 80 bp, synthetic construct
  misc_feature 1..80: note = Synthetic: >U31794.1-cand-2630-2709
  source 1..80: mol_type = other DNA
cctgtgtatgaattaagtaatgtaaattggaaatgtttttttgaaaggacatggtccagattaaatttggataacgacga

SEQ ID NO: 13566 - DNA, 80 bp, synthetic construct
  misc_feature 1..80: note = Synthetic: >U31794.1-cand-2710-2789
  source 1..80: mol_type = other DNA
ggacaaagaaaacaatggagactctatcccaacgtttagatgcgtgccagaacaaaatactagactgttatgaaaaagat

SEQ ID NO: 13567 - DNA, 80 bp, synthetic construct
  misc_feature 1..80: note = Synthetic: >U31794.1-cand-2790-2869
  source 1..80: mol_type = other DNA
agtaaatgcattatagatcacatagactattggaaagctgtacgacatgaatatgtattatattataaagcaagagaaaa

SEQ ID NO: 13568 - DNA, 80 bp, synthetic construct
  misc_feature 1..80: note = Synthetic: >U31794.1-cand-2870-2949
  source 1..80: mol_type = other DNA
tgacattaatgtactaaaccaccagatggtgccctctttacaagtgtgtaaagcaaaagcatgtagtgcaatagaattac

SEQ ID NO: 13569 - DNA, 80 bp, synthetic construct
  misc_feature 1..80: note = Synthetic: >U31794.1-cand-2950-3029
  source 1..80: mol_type = other DNA
aaatagcactggaagcaataagtaacacaatatataaaaatgaagagtggacattacgtgatacatgtgatgaactgtgg

SEQ ID NO: 13570 - DNA, 80 bp, synthetic construct
  misc_feature 1..80: note = Synthetic: >U31794.1-cand-3020-3099
  source 1..80: mol_type = other DNA
tgaactgtggcgcacggagcctaaaaactgttttaaaaaagaaggacaacacatagaagtgtggtttgatggtaacaaaa

SEQ ID NO: 13571 - DNA, 80 bp, synthetic construct
  misc_feature 1..80: note = Synthetic: >U31794.1-cand-3090-3169
  source 1..80: mol_type = other DNA
ggtaacaaaaataattgtatggaatatgtggtgtggaaatttatatattataatggagagtgtgggtggtgtaaagtgtc

SEQ ID NO: 13572 - DNA, 80 bp, synthetic construct
  misc_feature 1..80: note = Synthetic: >NC_001430.1-cand-1640-1719
  source 1..80: mol_type = other DNA
tgtgctgaatacaatgggcttagaaatgccattacacaaggagtgcccacttgcctgttgccaggctccaaccaattttt

SEQ ID NO: 13573 - DNA, 80 bp, synthetic construct
  misc_feature 1..80: note = Synthetic: >NC_003310.1-cand-66160-66239
  source 1..80: mol_type = other DNA
agaaataaaaattattataatggtggaattcagttggaatattgcctccggagtcataaaaggatactaaacattgtttt

SEQ ID NO: 13574 - DNA, 80 bp, synthetic construct
  misc_feature 1..80: note = Synthetic: >NC_001611.1-cand-86720-86799
  source 1..80: mol_type = other DNA
aaaaccaagtactacaaatttgactacattcaggaaactattcgatccaatacatttgtatctagtgtcagagaagtatt

SEQ ID NO: 13575 - DNA, 80 bp, synthetic construct
  misc_feature 1..80: note = Synthetic: >NC_001611.1-cand-131290-131369
  source 1..80: mol_type = other DNA
aaaaccgtttcctggataagccacacatctccacttttgctttacatcagaaattgtgtcattgacatcttgaactctcc

SEQ ID NO: 13576 - DNA, 80 bp, synthetic construct
  misc_feature 1..80: note = Synthetic: >NC_003310.1-cand-149010-149089
  source 1..80: mol_type = other DNA
aaaacctcttattggtcagaaattttgtattgtatatactaactctctaatggatgagaacacgtatgctatggagttgc

SEQ ID NO: 13577 - DNA, 80 bp, synthetic construct
  misc_feature 1..80: note = Synthetic: >NC_039476.1-cand-1880-1959
  source 1..80: mol_type = other DNA
aaaacgggactttcctggtcagccagatatgtggaaggacgccttcaagccggacttttcacacatcaagctacagcttg

SEQ ID NO: 13578 - DNA, 80 bp, synthetic construct
  misc_feature 1..80: note = Synthetic: >NC_001611.1-cand-58220-58299
  source 1..80: mol_type = other DNA
aaaattccattggcctcattaactcctaaagcacaacgagagatattttcagcatggatttctcatagacccgtagtttt

SEQ ID NO: 13579 - DNA, 80 bp, synthetic construct
  misc_feature 1..80: note = Synthetic: >NC_003310.1-cand-106630-106709
  source 1..80: mol_type = other DNA
aaaactcgttattaactatgtacgaacataggcctcctagtttggagactaattctttttcatcgactagacgtttattc

SEQ ID NO: 13580 - DNA, 80 bp, synthetic construct
  misc_feature 1..80: note = Synthetic: >HQ537729.1-cand-2640-2719
  source 1..80: mol_type = other DNA
aaaactggaaatcctttttctcaaggacgtggtgcagattaaatttgcacgaggaagaggacaaagaaaatgatggagac

SEQ ID NO: 13581 - DNA, 80 bp, synthetic construct
  misc_feature 1..80: note = Synthetic: >NC_001611.1-cand-85260-85339
  source 1..80: mol_type = other DNA
aaaactttacgatagactttaagctaaaatattttctaggatccggtgcgcagtctaaaagttctttattgcacgctatt

SEQ ID NO: 13582 - DNA, 80 bp, synthetic construct
  misc_feature 1..80: note = Synthetic: >NC_001611.1-cand-81740-81819
  source 1..80: mol_type = other DNA
aaaagaatttttataaatttttccagtattttccaaatatacgtacttgacatctaaaaaatccttaatgataataggaa

SEQ ID NO: 13583 - DNA, 80 bp, synthetic construct
  misc_feature 1..80: note = Synthetic: >NC_001611.1-cand-179460-179539
  source 1..80: mol_type = other DNA
aaaagacattatagaatccgaagaaggtaagagatgttgtataatagatgttaagaacaatcgtgttaaaaagtactatc

SEQ ID NO: 13584 - DNA, 80 bp, synthetic construct
  misc_feature 1..80: note = Synthetic: >NC_001611.1-cand-93250-93329
  source 1..80: mol_type = other DNA
gaagacgctaggaattacatagatgatattgtaaacggtcacttctttgtatcgaataaagtatttgataaatctctttt

SEQ ID NO: 13585 - DNA, 80 bp, synthetic construct
  misc_feature 1..80: note = Synthetic: >AdVB3-cand-20710-20789
  source 1..80: mol_type = other DNA
ttcagatgcttgccaactacaacattggctaccagggcttttacatccctgagggatacaaggatcgcatgtactctttt

SEQ ID NO: 13586 - DNA, 80 bp, synthetic construct
  misc_feature 1..80: note = Synthetic: >NC_001611.1-cand-26400-26479
  source 1..80: mol_type = other DNA
ctctattttggtggaggattatatgatataattcgtggataatcattcttaagacacatttcttcattcgtaaatctttt

SEQ ID NO: 13587 - DNA, 80 bp, synthetic construct
  misc_feature 1..80: note = Synthetic: >NC_003310.1-cand-72270-72349
  source 1..80: mol_type = other DNA
agaaacttagaagagttaactacggtattcataaaatacgtaaacggatgggtaaaaaagggaggacatgtaaccctttt

SEQ ID NO: 13588 - DNA, 80 bp, synthetic construct
  misc_feature 1..80: note = Synthetic: >NC_003310.1-cand-72510-72589
  source 1..80: mol_type = other DNA
caattaaaaatcgataaactcacatttcaaatatatttatctgattatgataacataaaaatatcattgaatgagatact

SEQ ID NO: 13589 - DNA, 80 bp, synthetic construct
  misc_feature 1..80: note = Synthetic: >NC_003310.1-cand-144680-144759
  source 1..80: mol_type = other DNA
agtatgttatatattatatatttgtaggaaaaagatacgtactgtctataatgacaataaaattatcatgacaaaattaa

SEQ ID NO: 13590 - DNA, 80 bp, synthetic construct
  misc_feature 1..80: note = Synthetic: >NC_007574.1-cand-1210-1289
  source 1..80: mol_type = other DNA
gaaaatgacagcaatggatggagagatacctgatggatattgtgtacattctcctacaacataccgaaaaagtgaatact

SEQ ID NO: 13591 - DNA, 80 bp, synthetic construct
  misc_feature 1..80: note = Synthetic: >NC_001611.1-cand-47300-47379
  source 1..80: mol_type = other DNA
taaatggaggaggagccaatgactgatatatttcgtctgtcactacgtaataaaagtaatgaggaaatcgtataaatact

SEQ ID NO: 13592 - DNA, 80 bp, synthetic construct
  misc_feature 1..80: note = Synthetic: >NC_002016.1-cand-410-489
  source 1..80: mol_type = other DNA
catatacaacaggatgggggctgtgaccactgaagtggcatttggcctggtatgtgcaacctgtgaacagattgctgact

SEQ ID NO: 13593 - DNA, 80 bp, synthetic construct
  misc_feature 1..80: note = Synthetic: >NC_001611.1-cand-122730-122809
  source 1..80: mol_type = other DNA
cgatatgcctccagaagttgtctatttagtaaacgcgataatagatagtgctaaacgacttaccgaatctattactgact

SEQ ID NO: 13594 - DNA, 80 bp, synthetic construct
  misc_feature 1..80: note = Synthetic: >NC_003310.1-cand-176770-176849
  source 1..80: mol_type = other DNA
agtcatgcacgattatataagtaatacatatattgatcttgagtgtttagatatcattagatcactggatgggtacgata

SEQ ID NO: 13595 - DNA, 80 bp, synthetic construct
  misc_feature 1..80: note = Synthetic: >NC_001611.1-cand-159570-159649
  source 1..80: mol_type = other DNA
tttccaaagaatgatttcgtatctttctgggttaaatttgaacaaggtgactataaagtggaagagtattgtacaggact

SEQ ID NO: 13596 - DNA, 80 bp, synthetic construct
  misc_feature 1..80: note = Synthetic: >NC_001611.1-cand-44190-44269
  source 1..80: mol_type = other DNA
tatatttaccggtcccgttccaataggtatcaaagatatagatcaccctaatcttagtagagcaagaagtccatccgact

SEQ ID NO: 13597 - DNA, 80 bp, synthetic construct
  misc_feature 1..80: note = Synthetic: >NC_001611.1-cand-81180-81259
  source 1..80: mol_type = other DNA
agtcggttaatgttgtatttcattacccaagtttgagatttcataatattatcaaaagacatgataatattaaagataaa

SEQ ID NO: 13598 - DNA, 80 bp, synthetic construct
  misc_feature 1..80: note = Synthetic: >NC_021542.1-cand-710-789
  source 1..80: mol_type = other DNA
gatctattttttaacagtaagagaaacgttgaaccgcgtgcataaagaggactaggtgaaagggagggaaccaaacgact

SEQ ID NO: 13599 - DNA, 80 bp, synthetic construct
  misc_feature 1..80: note = Synthetic: >NC_007360.1-cand-980-1059
  source 1..80: mol_type = other DNA
agtctaattagaccaaatgagaatccagcacataaaagtcaattggtgtggatggcatgccattctgcagcatttgaaga

SEQ ID NO: 13600 - DNA, 80 bp, synthetic construct
  misc_feature 1..80: note = Synthetic: >NC_001611.1-cand-71100-71179
  source 1..80: mol_type = other DNA
ttcattttttaagtatttggctagtcaagatgatgaatcttcattatctgatatattgcaaatcactcaatatctagact

SEQ ID NO: 13601 - DNA, 80 bp, synthetic construct
  misc_feature 1..80: note = Synthetic: >NC_003310.1-cand-141860-141939
  source 1..80: mol_type = other DNA
agtgacaagtagtggagcaatttacaaattgggatcgtctatcgatagactttctctaaataggactattgttacaaaag

SEQ ID NO: 13602 - DNA, 80 bp, synthetic construct
  misc_feature 1..80: note = Synthetic: >NC_003310.1-cand-63920-63999
  source 1..80: mol_type = other DNA
tatccatggtaatacttgaaataatcggagaatgtttcccatttttaggattaacatagttgaataaatcctccatcact

SEQ ID NO: 13603 - DNA, 80 bp, synthetic construct
  misc_feature 1..80: note = Synthetic: >NC_006573.1-cand-1940-2019
  source 1..80: mol_type = other DNA
agtgcatcaatgacagcactggtcaagcccggttgtgtagcgaagaggtctgtgacatcaatcccatgtgagtacttagc

SEQ ID NO: 13604 - DNA, 80 bp, synthetic construct
  misc_feature 1..80: note = Synthetic: >EVB88-cand-5060-5139
  source 1..80: mol_type = other DNA
ctcttccaaggcccaccagtgtacagagagatcaaaatcagcgttgcaccagaaactccccccccaccagcaatagcaga

SEQ ID NO: 13605 - DNA, 80 bp, synthetic construct
  misc_feature 1..80: note = Synthetic: >NC_012532.1-cand-330-409
  source 1..80: mol_type = other DNA
gctatggaaataataaagaagttcaagaaagatcttgctgccatgttgagaataatcaatgctaggaaagagaggaagag

SEQ ID NO: 13606 - DNA, 80 bp, synthetic construct
  misc_feature 1..80: note = Synthetic: >NC_003310.1-cand-33900-33979
  source 1..80: mol_type = other DNA
ctgaaatccgtagaaacatctagcctcggtaatctgcacttctgtacaaaatcgttctgctaaattttcattcactattc

SEQ ID NO: 13607 - DNA, 80 bp, synthetic construct
  misc_feature 1..80: note = Synthetic: >NC_039476.1-cand-1380-1459
  source 1..80: mol_type = other DNA
gggacaatcaacgccctgctggctcgaatagcagcggccaggtcattagtccacagggccaaggaagagctatctagcag

SEQ ID NO: 13608 - DNA, 80 bp, synthetic construct
  misc_feature 1..80: note = Synthetic: >NC_001357.1-cand-6290-6369
  source 1..80: mol_type = other DNA
tttgtaaatatcctgattatttacaaatgtctgcagatccttatggggattccatgtttttttgcttacggcgtgagcag

SEQ ID NO: 13609 - DNA, 80 bp, synthetic construct
  misc_feature 1..80: note = Synthetic: >AdVB7-cand-6790-6869
  source 1..80: mol_type = other DNA
ctggaatatgttaaaatgggcatgaggtaggcctacagagtcccttatgaagtgggcatatgactcttgcagcttggcta

SEQ ID NO: 13610 - DNA, 80 bp, synthetic construct
  misc_feature 1..80: note = Synthetic: >AdVB7-cand-29600-29679
  source 1..80: mol_type = other DNA
ctggtacaaaattttcatgcaacggaagagacttgaccataattaacataacatcaaatgagcaaggcttctattatgga

SEQ ID NO: 13611 - DNA, 80 bp, synthetic construct
  misc_feature 1..80: note = Synthetic: >NC_001611.1-cand-90390-90469
  source 1..80: mol_type = other DNA
ctggtagacggaatgttttactctggagatgatgctaaaaaatatacgtgtactgtatcaaccggatttaaatttgacga

SEQ ID NO: 13612 - DNA, 80 bp, synthetic construct
  misc_feature 1..80: note = Synthetic: >NC_003310.1-cand-54770-54849
  source 1..80: mol_type = other DNA
ctggtagcctgttttaacatctttttatatctggctctctctgccaaaaatgttcttaatagtctaggaatggttccttc

SEQ ID NO: 13613 - DNA, 80 bp, synthetic construct
  misc_feature 1..80: note = Synthetic: >NC_003310.1-cand-66970-67049
  source 1..80: mol_type = other DNA
ctgtatatctttccatttatcatggaaaagaatttaccagatatcttcttttttccaaactgcgttaatgtattctctta

SEQ ID NO: 13614 - DNA, 80 bp, synthetic construct
  misc_feature 1..80: note = Synthetic: >NC_039476.1-cand-2840-2919
  source 1..80: mol_type = other DNA
gatcaaaatccgtcagagaattttccgtcctaccaggaaacaaagaaaggaagagagggccacattagggctagtaacag

SEQ ID NO: 13615 - DNA, 80 bp, synthetic construct
  misc_feature 1..80: note = Synthetic: >NC_003310.1-cand-78740-78819
  source 1..80: mol_type = other DNA
ctgtttttgaactgttcaaaatatagcatagatccatgagaaatacgtttagccgcctttaatagaggaaatccaaccgc

SEQ ID NO: 13616 - DNA, 80 bp, synthetic construct
  misc_feature 1..80: note = Synthetic: >NC_001611.1-cand-134940-135019
  source 1..80: mol_type = other DNA
ttacgagccagattgcctagaccggatactagacatctaagagtattgtttagtattttttataaagattattgggtaag

SEQ ID NO: 13617 - DNA, 80 bp, synthetic construct
  misc_feature 1..80: note = Synthetic: >NC_000883.2-cand-190-269
  source 1..80: mol_type = other DNA
cttagtggcacgtcaaccccaagcgctggcccagagccaaccctaattccggaagtcccgcccaccggaagtgacgtcac

SEQ ID NO: 13618 - DNA, 80 bp, synthetic construct
  misc_feature 1..80: note = Synthetic: >NC_001611.1-cand-11790-11869
  source 1..80: mol_type = other DNA
gggtggattagaccattctcctcctgaacacaggacaccagagttaccaatcaacgaatatccactattgcaactataag

SEQ ID NO: 13619 - DNA, 80 bp, synthetic construct
  misc_feature 1..80: note = Synthetic: >AdVB3-cand-22780-22859
  source 1..80: mol_type = other DNA
cttcataatcggtgcatccatgagcccacagagcgcacccggtgcactcccaattattgtgggcgatctcggaataataa

SEQ ID NO: 13620 - DNA, 80 bp, synthetic construct
  misc_feature 1..80: note = Synthetic: >NC_003310.1-cand-26570-26649
  source 1..80: mol_type = other DNA
tatataatgggtccctagtcatatgtttaaacgacgccttatctggattaaacatactaggagccatcatttcggctatc

SEQ ID NO: 13621 - DNA, 80 bp, synthetic construct
  misc_feature 1..80: note = Synthetic: >NC_001611.1-cand-14430-14509
  source 1..80: mol_type = other DNA
gatattcttctacgatctcactaactaatgtttctttggttatactagtatagtcacgatcagacaaataaagaaaatca

SEQ ID NO: 13622 - DNA, 80 bp, synthetic construct
  misc_feature 1..80: note = Synthetic: >NC_001611.1-cand-20890-20969
  source 1..80: mol_type = other DNA
gatcaggaaagtctattcgctaccataggaatatgtgctaaaatcactgaacattggggatacaaaaagatttcagaatc

SEQ ID NO: 13623 - DNA, 80 bp, synthetic construct
  misc_feature 1..80: note = Synthetic: >NC_001611.1-cand-54040-54119
  source 1..80: mol_type = other DNA
gatcaggaatccaaagagctataaatagatctctggttctatgttcctcgtttcctgtattctttttaagatcgaggaac

SEQ ID NO: 13624 - DNA, 80 bp, synthetic construct
  misc_feature 1..80: note = Synthetic: >NC_003310.1-cand-138250-138329
  source 1..80: mol_type = other DNA
ttatgatagtcatgtctgggaaatggtggtctaggatgaggatccggtatcggagtgggttttggattataatcatcatc

SEQ ID NO: 13625 - DNA, 80 bp, synthetic construct
  misc_feature 1..80: note = Synthetic: >NC_001611.1-cand-104130-104209
  source 1..80: mol_type = other DNA
tattacttttggaatcgttcaaaacctttgactagttgtagaatttgatctattgccctacgcgtatactcccttgcatc

SEQ ID NO: 13626 - DNA, 80 bp, synthetic construct
  misc_feature 1..80: note = Synthetic: >NC_004296.1-cand-2900-2979
  source 1..80: mol_type = other DNA
ttgaagttggggatggacaagtggaaagttgagattatgctcataagagcgtggtcatagaggttctttttgtgggcatc

SEQ ID NO: 13627 - DNA, 80 bp, synthetic construct
  misc_feature 1..80: note = Synthetic: >AdVB3-cand-15760-15839
  source 1..80: mol_type = other DNA
gatgctcgtaattatactcctactgcgcctacatctactgtggatgcagttattgacagtgtggtggcagacgcccgcgc

SEQ ID NO: 13628 - DNA, 80 bp, synthetic construct
  misc_feature 1..80: note = Synthetic: >NC_039477.1-cand-2310-2389
  source 1..80: mol_type = other DNA
gatggcaagggcaaagttttggtggaaaaggtcaagaacacctctgtgcagaccaacaacgagttggccggggccctgca

SEQ ID NO: 13629 - DNA, 80 bp, synthetic construct
  misc_feature 1..80: note = Synthetic: >AdVB3-cand-2690-2769
  source 1..80: mol_type = other DNA
tttaataatacgtgtgtagaagcttgggggcaagttagtgtaaggggttgtagtttttatgcatgctggattgcaacatc

SEQ ID NO: 13630 - DNA, 80 bp, synthetic construct
  misc_feature 1..80: note = Synthetic: >NC_003310.1-cand-21110-21189
  source 1..80: mol_type = other DNA
tggtgatgtttatcttcttccagcgcatatagtctaatatcgattcaaacgcgtgatagtttataccattcaatataatc

SEQ ID NO: 13631 - DNA, 80 bp, synthetic construct
  misc_feature 1..80: note = Synthetic: >NC_001611.1-cand-148910-148989
  source 1..80: mol_type = other DNA
gattattctcctgtttgacttctctatcaatgcggcacctctcttaagaagtgtaaccgataataatgttgttatatcta

SEQ ID NO: 13632 - DNA, 80 bp, synthetic construct
  misc_feature 1..80: note = Synthetic: >NC_001611.1-cand-130410-130489
  source 1..80: mol_type = other DNA
gattcattatcatacgctagcatggtcttgtaatattcattctttaaaatataatattgtgttagccattgcattggagc

SEQ ID NO: 13633 - DNA, 80 bp, synthetic construct
  misc_feature 1..80: note = Synthetic: >NC_001611.1-cand-60790-60869
  source 1..80: mol_type = other DNA
taaaggataccgttaaatataactggttgccgattgtctcatagtctattaagtggtaagtttcgtacaaatacagaatc

SEQ ID NO: 13634 - DNA, 80 bp, synthetic construct
  misc_feature 1..80: note = Synthetic: >NC_007544.1-cand-570-649
  source 1..80: mol_type = other DNA
tatatccaatcattaaatgttgacagatgtgccaaattgatagctaccaaaggaatgtttgcaacaaattcctttaaatc

SEQ ID NO: 13635 - DNA, 80 bp, synthetic construct
  misc_feature 1..80: note = Synthetic: >NC_003310.1-cand-161470-161549
  source 1..80: mol_type = other DNA
tattggagcactactgcctatgtttgagtgcaatgaatatctacaaattggagatccaatccatgatctagaaggaaatc

SEQ ID NO: 13636 - DNA, 80 bp, synthetic construct
  misc_feature 1..80: note = Synthetic: >AdVB7-cand-27000-27079
  source 1..80: mol_type = other DNA
ttggcagcaggcgcctcccaggactactccacccgcatgaattggcttagcgccgggccctcaatgatatcacgggttaa

SEQ ID NO: 13637 - DNA, 80 bp, synthetic construct
  misc_feature 1..80: note = Synthetic: >AdVB7-cand-27140-27219
  source 1..80: mol_type = other DNA
ccgccaacaccttaatccccgaaattggcccgccgccctggtgtaccaggaaactcccgctcccaccaccgtactacttc

SEQ ID NO: 13638 - DNA, 80 bp, synthetic construct
  misc_feature 1..80: note = Synthetic: >AdVB7-cand-27380-27459
  source 1..80: mol_type = other DNA
tctgcgaccagacggagtcttccagatcgccggctgtgggagatcttccttcacccctcgtcaggctgtactgactttgg

SEQ ID NO: 13639 - DNA, 80 bp, synthetic construct
  misc_feature 1..80: note = Synthetic: >AdVB7-cand-27460-27539
  source 1..80: mol_type = other DNA
agagttcgtcctcgcagccacgctcgggcggcatcggaactctccagttcgtggaggagtttactccctctgtctacttc

SEQ ID NO: 13640 - DNA, 80 bp, synthetic construct
  misc_feature 1..80: note = Synthetic: >AdVB7-cand-27790-27869
  source 1..80: mol_type = other DNA
gggaatagactctcgcctgcatcgaatcttctcccagcgacccgtgctgattgagcgcgaccagggaaatacaaccatct

SEQ ID NO: 13641 - DNA, 80 bp, synthetic construct
  misc_feature 1..80: note = Synthetic: >AdVB7-cand-28020-28099
  source 1..80: mol_type = other DNA
acccagacccttcctcctctgatccaggactctaactctaccctaccagcaccatccactactaaccttcccgaaactaa

SEQ ID NO: 13642 - DNA, 80 bp, synthetic construct
  misc_feature 1..80: note = Synthetic: >AdVB7-cand-28250-28329
  source 1..80: mol_type = other DNA
tgggcttgtgctaatcctttgctacctatacataccttgctgtgcatatttagtcatattgcgctgttggtttaaaaaat

SEQ ID NO: 13643 - DNA, 80 bp, synthetic construct
  misc_feature 1..80: note = Synthetic: >AdVB7-cand-28800-28879
  source 1..80: mol_type = other DNA
ttattcgccctagacaaagcaataaggaaaaagagaaaatgccttaacctttttactcataccttttctttacagcatgg

SEQ ID NO: 13644 - DNA, 80 bp, synthetic construct
  misc_feature 1..80: note = Synthetic: >AdVB7-cand-28880-28959
  source 1..80: mol_type = other DNA
cttttgttacagctctaattattgccaacattgtcactgtcgctcacgggcaaacaattatccatattaccttaggacat

SEQ ID NO: 13645 - DNA, 80 bp, synthetic construct
  misc_feature 1..80: note = Synthetic: >AdVB7-cand-29680-29759
  source 1..80: mol_type = other DNA
accaactataaagatagtttagattacaacattattgtagtgccagccaccacttctgctccccgcaaaaccactttctc

SEQ ID NO: 13646 - DNA, 80 bp, synthetic construct
  misc_feature 1..80: note = Synthetic: >AdVB7-cand-30020-30099
  source 1..80: mol_type = other DNA
gtttcaatcaaataccactaacactatcaatgtgcagactactttaaatcatgacatggaaaaccacactacctcctatg

SEQ ID NO: 13647 - DNA, 80 bp, synthetic construct
  misc_feature 1..80: note = Synthetic: >AdVB7-cand-30100-30179
  source 1..80: mol_type = other DNA
catacacaaacattcagcctaaatacgctatgcaatagaaattctaaaagacgtcccatctattctcctatgattagtcg

SEQ ID NO: 13648 - DNA, 80 bp, synthetic construct
  misc_feature 1..80: note = Synthetic: >AdVB7-cand-30180-30259
  source 1..80: mol_type = other DNA
tccccatatggctttgaatgaaatctaagatcttttttttttttctcttacagtatggtgaacaccaatcatgatcccta

SEQ ID NO: 13649 - DNA, 80 bp, synthetic construct
  misc_feature 1..80: note = Synthetic: >AdVB7-cand-30820-30899
  source 1..80: mol_type = other DNA
tatcccactacaacacatacaacaaccactagcactggtagagtatgaaaatgagccacaaccttcactacctcctgcca

SEQ ID NO: 13650 - DNA, 80 bp, synthetic construct
  misc_feature 1..80: note = Synthetic: >AdVB7-cand-30900-30979
  source 1..80: mol_type = other DNA
ttagttacttcaacctaaccggcggagatgactgaaatactcaccacctccaattccgccgaggatctgcttgatatgga

SEQ ID NO: 13651 - DNA, 80 bp, synthetic construct
  misc_feature 1..80: note = Synthetic: >AdVB7-cand-31030-31109
  source 1..80: mol_type = other DNA
aggaacgcgtgaccaaagagctcagagatgtcatccaaattcaccaatgcaaaaaaggcatattttgcttggtaaaacaa

SEQ ID NO: 13652 - DNA, 80 bp, synthetic construct
  misc_feature 1..80: note = Synthetic: >EVA89-cand-2660-2739
  source 1..80: mol_type = other DNA
aaacacagtgttgctgagaccagtgtggaacatttcttttccagagccgctctagtgggtatggtagaattgcttacttc

SEQ ID NO: 13653 - DNA, 80 bp, synthetic construct
  misc_feature 1..80: note = Synthetic: >EVA89-cand-2740-2819
  source 1..80: mol_type = other DNA
tgacaccaccacaattggttacacaaattgggatattgatgtgatgggatatgttcaaatcagacgcaaactggagatgt

SEQ ID NO: 13654 - DNA, 80 bp, synthetic construct
  misc_feature 1..80: note = Synthetic: >EVA89-cand-2790-2869
  source 1..80: mol_type = other DNA
atgttcaaatcagacgcaaactggagatgttcacttacatgagatttaatgctgaatttacttttgtcaccaccaatgcc

SEQ ID NO: 13655 - DNA, 80 bp, synthetic construct
  misc_feature 1..80: note = Synthetic: >EVA89-cand-2900-2979
  source 1..80: mol_type = other DNA
tatatgtatattcctccaggagcacccaaaccaactgctagagattcattccagtggcaaacgtccacaaatccatcaat

SEQ ID NO: 13656 - DNA, 80 bp, synthetic construct
  misc_feature 1..80: note = Synthetic: >EVA89-cand-2980-3059
  source 1..80: mol_type = other DNA
atttgtgaaaatgtcagacccaccggcccaagtttcagtgcctttcatgtcaccagccagtgcttaccagtggttttacg

SEQ ID NO: 13657 - DNA, 80 bp, synthetic construct
  misc_feature 1..80: note = Synthetic: >EVA89-cand-3050-3129
  source 1..80: mol_type = other DNA
tggttttacgatgggtatcccacttttggctcacacccagtagcacaagatgtgcaatatggaattgccccgaacaactt

SEQ ID NO: 13658 - DNA, 80 bp, synthetic construct
  misc_feature 1..80: note = Synthetic: >EVA89-cand-3150-3229
  source 1..80: mol_type = other DNA
gggttgtgggttcagagcagataacagataagatcactgtgagaatcttcatgagactcaaacacgttaaagcatgggtg

SEQ ID NO: 13659 - DNA, 80 bp, synthetic construct
  misc_feature 1..80: note = Synthetic: >EVA89-cand-3250-3329
  source 1..80: mol_type = other DNA
aaaataccttttgaagaactacccaaactttgacggcgcgaatctcactatgtctagcgccagtcgagctgacatcaaaa

SEQ ID NO: 13660 - DNA, 80 bp, synthetic construct
  misc_feature 1..80: note = Synthetic: >EVA89-cand-3330-3409
  source 1..80: mol_type = other DNA
atcttggtaaatttggacaacaatcaggagcggtttatgtgggaaactacagaatagttaacagacacttagccatacct

SEQ ID NO: 13661 - DNA, 80 bp, synthetic construct
  misc_feature 1..80: note = Synthetic: >EVA89-cand-3410-3489
  source 1..80: mol_type = other DNA
caagattggacaaatctagtgtgggaagatgtaaatagggacctactaatctcaagcaccacagcgcacggttgcgacac

SEQ ID NO: 13662 - DNA, 80 bp, synthetic construct
  misc_feature 1..80: note = Synthetic: >EVA89-cand-3490-3569
  source 1..80: mol_type = other DNA
catcgctagatgccagtgcacaaccggcgtttacttctgtaaatccagatcaaaacactacccagtcagtttttctaaac

SEQ ID NO: 13663 - DNA, 80 bp, synthetic construct
  misc_feature 1..80: note = Synthetic: >EVA89-cand-3560-3639
  source 1..80: mol_type = other DNA
ttttctaaaccaggccttgtctttgtaaatgagagcatgtattaccctgctagataccaatcacacgtgctcctggcacc

SEQ ID NO: 13664 - DNA, 80 bp, synthetic construct
  misc_feature 1..80: note = Synthetic: >EVA89-cand-3610-3689
  source 1..80: mol_type = other DNA
tagataccaatcacacgtgctcctggcaccaggacacgctgaaccaggcgattgtggtggaatactccgttgccaacatg

SEQ ID NO: 13665 - DNA, 80 bp, synthetic construct
  misc_feature 1..80: note = Synthetic: >EVA89-cand-3720-3799
  source 1..80: mol_type = other DNA
atggcttagtgggttttgcagacttgcgggacattctgtggcttgatgatgaggtcatggagcagggtgtcactgattac

SEQ ID NO: 13666 - DNA, 80 bp, synthetic construct
  misc_feature 1..80: note = Synthetic: >EVA89-cand-3800-3879
  source 1..80: mol_type = other DNA
atcaagggtttaggtgatgcctttggcacaggattcacagactcaatctcccgagaaattaaccagcttaagaattatct

SEQ ID NO: 13667 - DNA, 80 bp, synthetic construct
  misc_feature 1..80: note = Synthetic: >EVA89-cand-3880-3959
  source 1..80: mol_type = other DNA
attaggctcagagaatctggtagaaaagatattgaaagctttaatcaaagttgtatcagcattggtgattgtggttagaa

SEQ ID NO: 13668 - DNA, 80 bp, synthetic construct
  misc_feature 1..80: note = Synthetic: >EVB69-cand-1830-1909
  source 1..80: mol_type = other DNA
tgcacataccaggtgctgtgtcgaaccttatggaaattgcagaggtagattcagtggtcccagtcaataacgtgccagat

SEQ ID NO: 13669 - DNA, 80 bp, synthetic construct
  misc_feature 1..80: note = Synthetic: >EVB69-cand-1910-1989
  source 1..80: mol_type = other DNA
gctgtgaactcgatggacgcgtacaggatccccgtcatgacctcgaaagcaggagaacaggtttttggcttccaattgga

SEQ ID NO: 13670 - DNA, 80 bp, synthetic construct
  misc_feature 1..80: note = Synthetic: >EVB69-cand-1990-2069
  source 1..80: mol_type = other DNA
ccctggacatggcactgttatgtgtaggacactgttaggtgagatcctaaactattacacgcactggagtggaagtataa

SEQ ID NO: 13671 - DNA, 80 bp, synthetic construct
  misc_feature 1..80: note = Synthetic: >EVB69-cand-2070-2149
  source 1..80: mol_type = other DNA
agctcactttcatgttctgtggctcagcaatggcaactggtaaattcttgttggcttatgcgccaccaggtgctggcttt

SEQ ID NO: 13672 - DNA, 80 bp, synthetic construct
  misc_feature 1..80: note = Synthetic: >EVB69-cand-2120-2199
  source 1..80: mol_type = other DNA
ttggcttatgcgccaccaggtgctggctttcccaccaccaggaaggatgcaatgctgggaacacatgttgtgtgggatgt

SEQ ID NO: 13673 - DNA, 80 bp, synthetic construct
  misc_feature 1..80: note = Synthetic: >EVB69-cand-2230-2309
  source 1..80: mol_type = other DNA
gccttggattagtcaaacacactacagatttgtgcaagatgacatatacaccagtgcaggttttatcacatgttggtatc

SEQ ID NO: 13674 - DNA, 80 bp, synthetic construct
  misc_feature 1..80: note = Synthetic: >EVB69-cand-2310-2389
  source 1..80: mol_type = other DNA
aaaccagtattgttgtcccagcaagcacaccacagcagagcaccatcttgtgctttgtctccgcatgcaacgacttctct

SEQ ID NO: 13675 - DNA, 80 bp, synthetic construct
  misc_feature 1..80: note = Synthetic: >EVB69-cand-2370-2449
  source 1..80: mol_type = other DNA
ccgcatgcaacgacttctctgtgaggctattgaaggatacaccattcataacccagcaagcattttatcaaaatgaccag

SEQ ID NO: 13676 - DNA, 80 bp, synthetic construct
  misc_feature 1..80: note = Synthetic: >EVB69-cand-2470-2549
  source 1..80: mol_type = other DNA
caacacaacagctagcggaccttctaattcggaaagcataccggcacttactgcggctgagactggccacacatcgcagg

SEQ ID NO: 13677 - DNA, 80 bp, synthetic construct
  misc_feature 1..80: note = Synthetic: >EVB69-cand-2550-2629
  source 1..80: mol_type = other DNA
ttgtccctagcgacaccatccagacaagacatgtgaaaaactaccactcgcgttcagagtccaccatagagaacttcctg

SEQ ID NO: 13678 - DNA, 80 bp, synthetic construct
  misc_feature 1..80: note = Synthetic: >EVB69-cand-2630-2709
  source 1..80: mol_type = other DNA
tgtagatctgcctgtgtgtactacaccacgtacaacactcagggcgagcaagcacatgataaatacgcaagttggccaat

SEQ ID NO: 13679 - DNA, 80 bp, synthetic construct
  misc_feature 1..80: note = Synthetic: >EVB69-cand-2710-2789
  source 1..80: mol_type = other DNA
cacgactagaaaagttgcccaactgcgcaggaagctggagttctttacctacctgcggtttgatctcgagatcacgttcg

SEQ ID NO: 13680 - DNA, 80 bp, synthetic construct
  misc_feature 1..80: note = Synthetic: >EVB69-cand-2790-2869
  source 1..80: mol_type = other DNA
tgatcacgagcgcccagatcacatccacgaaccaaaaccaggatgccccagtactcacacatcaggtgatgtatgtaccc

SEQ ID NO: 13681 - DNA, 80 bp, synthetic construct
  misc_feature 1..80: note = Synthetic: >EVB69-cand-2880-2959
  source 1..80: mol_type = other DNA
tggtaccgcgcagtgtggatgactatagttggcagacttccaccaatcccagcatcttctggacagaagggaacgcacct

SEQ ID NO: 13682 - DNA, 80 bp, synthetic construct
  misc_feature 1..80: note = Synthetic: >EVB69-cand-2950-3029
  source 1..80: mol_type = other DNA
gaacgcacctcctcgtatgtcaataccattcattagtgtgggcaacgcctacagcagcttttacgacgggtggtcacact

SEQ ID NO: 13683 - DNA, 80 bp, synthetic construct
  misc_feature 1..80: note = Synthetic: >EVB69-cand-3080-3159
  source 1..80: mol_type = other DNA
ttgtacgccaggcacgttaacggtgctagtcccgggccagtcaagagcaccattaggatatatatgaaacctaaacatgt

SEQ ID NO: 13684 - DNA, 80 bp, synthetic construct
  misc_feature 1..80: note = Synthetic: >EVB79-cand-630-709
  source 1..80: mol_type = other DNA
attggccatccggtgacaaacagagctattgtttacctatttgttggattcgtaccactaaattacaaagttttaagaac

SEQ ID NO: 13685 - DNA, 80 bp, synthetic construct
  misc_feature 1..80: note = Synthetic: >EVB79-cand-710-789
  source 1..80: mol_type = other DNA
actcaactttatattaacacttaacacaacaaaatgggagctcaggtgtcgacccaaaaaaccggagcgcacgaaactag

SEQ ID NO: 13686 - DNA, 80 bp, synthetic construct
  misc_feature 1..80: note = Synthetic: >EVB79-cand-790-869
  source 1..80: mol_type = other DNA
tgtgaatgcgaccgggaactctatagtccactacaccaacataaatttttacaaggacgctgcctccaactcagcaaatc

SEQ ID NO: 13687 - DNA, 80 bp, synthetic construct
  misc_feature 1..80: note = Synthetic: >EVB79-cand-870-949
  source 1..80: mol_type = other DNA
gtcaagattttagacaagacccaagtaagttcaccgaacccataaaagatgttatggtgaaaactctcccagcactgaac

SEQ ID NO: 13688 - DNA, 80 bp, synthetic construct
  misc_feature 1..80: note = Synthetic: >EVB79-cand-960-1039
  source 1..80: mol_type = other DNA
cagaagagtgtggatatagtgatagggtacgatcacttacactgggcaactcaaccatcaccacacaggaaagtgctaat

SEQ ID NO: 13689 - DNA, 80 bp, synthetic construct
  misc_feature 1..80: note = Synthetic: >EVB79-cand-1040-1119
  source 1..80: mol_type = other DNA
gtggtggtggcgtatggacagtggccacagtacctggcagatgaccaggccacagcagaggaccaacccacacaacctga

SEQ ID NO: 13690 - DNA, 80 bp, synthetic construct
  misc_feature 1..80: note = Synthetic: >EVB79-cand-1120-1199
  source 1..80: mol_type = other DNA
cgtagccacctgtcggttttacaccctagattcgatacagtggcagaaaacatcgccaggatggtggtggaagtttccag

SEQ ID NO: 13691 - DNA, 80 bp, synthetic construct
  misc_feature 1..80: note = Synthetic: >EVB79-cand-1200-1279
  source 1..80: mol_type = other DNA
acgccctgaaagacatgggcttgttcggacaaaacatgtattaccattacttaggcagggccgggtacaccatacacgtc

SEQ ID NO: 13692 - DNA, 80 bp, synthetic construct
  misc_feature 1..80: note = Synthetic: >EVB79-cand-1310-1389
  source 1..80: mol_type = other DNA
tgcttgttggttgtgtgtgtgcctgaggcggaaatgggaggacgacccacgggacaagcatttctgaatgaggagttaac

SEQ ID NO: 13693 - DNA, 80 bp, synthetic construct
  misc_feature 1..80: note = Synthetic: >EVB79-cand-1350-1429
  source 1..80: mol_type = other DNA
gacgacccacgggacaagcatttctgaatgaggagttaaccaaaggagaggtagcctgtaccttcactgcaaacaaagaa

SEQ ID NO: 13694 - DNA, 80 bp, synthetic construct
  misc_feature 1..80: note = Synthetic: >EVB79-cand-1440-1519
  source 1..80: mol_type = other DNA
gtaagactgtgcaggctgcagtttgcaatgctgggatgggagtaggagttggcaacctgacaatatacccacaccagtgg

SEQ ID NO: 13695 - DNA, 80 bp, synthetic construct
  misc_feature 1..80: note = Synthetic: >EVB79-cand-1520-1599
  source 1..80: mol_type = other DNA
ataaacttgcgcaccaacaattgtgccacgatagtgatgccatatatcaattgtgtgccaatggataacatgaacaggca

SEQ ID NO: 13696 - DNA, 80 bp, synthetic construct
  misc_feature 1..80: note = Synthetic: >EVB79-cand-1600-1679
  source 1..80: mol_type = other DNA
ttacaacttcaccttgatggtaataccctttgtacccctagatagtaatggtggcaccacttacgtcccaataacagtca

SEQ ID NO: 13697 - DNA, 80 bp, synthetic construct
  misc_feature 1..80: note = Synthetic: >EVB79-cand-1680-1759
  source 1..80: mol_type = other DNA
cggtggcaccaatgtgcgcagagtacaacggcttacgactatctgcacaccatcaagggctccccgtcttgaacacacca

SEQ ID NO: 13698 - DNA, 80 bp, synthetic construct
  misc_feature 1..80: note = Synthetic: >EVB79-cand-1760-1839
  source 1..80: mol_type = other DNA
ggtagcacacaattccttacatcagatgactatcaatcccctagtgcaatgcccgagtatgatgttacacccgtcctccg

SEQ ID NO: 13699 - DNA, 80 bp, synthetic construct
  misc_feature 1..80: note = Synthetic: >EVB79-cand-1850-1929
  source 1..80: mol_type = other DNA
gaagtacacaatctgatggagatagctgaggttgattcagtggtacccgtgaacaatttagcagacactatcaacaccat

SEQ ID NO: 13700 - DNA, 80 bp, synthetic construct
  misc_feature 1..80: note = Synthetic: >EVB83-cand-5410-5489
  source 1..80: mol_type = other DNA
aaacagaatatggcgagttcaccatgttaggcatctatgatagatgggccgtcttaccgcgacacgccaagcccggaccg

SEQ ID NO: 13701 - DNA, 80 bp, synthetic construct
  misc_feature 1..80: note = Synthetic: >EVB83-cand-5490-5569
  source 1..80: mol_type = other DNA
accattctcatgaatgaccaagaagttggcgtgctggatgcaaaagagttagtggacagggatggcacaaatcttgaact

SEQ ID NO: 13702 - DNA, 80 bp, synthetic construct
  misc_feature 1..80: note = Synthetic: >EVB83-cand-5570-5649
  source 1..80: mol_type = other DNA
aacactgctgaaactcaaccgcaatgagaagtttagggacattagaggctttcttgccaaagaagaggtggaggttaacg

SEQ ID NO: 13703 - DNA, 80 bp, synthetic construct
  misc_feature 1..80: note = Synthetic: >EVB83-cand-5650-5729
  source 1..80: mol_type = other DNA
aagctgtcctggccataaacactagtaagtttccaaacatgtacatccctgtagggcaagttacggactatggttttttg

SEQ ID NO: 13704 - DNA, 80 bp, synthetic construct
  misc_feature 1..80: note = Synthetic: >EVB83-cand-5710-5789
  source 1..80: mol_type = other DNA
ttacggactatggttttttgaacctaggaggtacccctacaaagaggatgctcatgtacaattttccaaccagagccgga

SEQ ID NO: 13705 - DNA, 80 bp, synthetic construct
  misc_feature 1..80: note = Synthetic: >EVB83-cand-5800-5879
  source 1..80: mol_type = other DNA
gtgtcctcatgtcaactgggaaggttctaggcatacatgttggtggcaatgggcaccagggcttttcagcagccctcctc

SEQ ID NO: 13706 - DNA, 80 bp, synthetic construct
  misc_feature 1..80: note = Synthetic: >EVB83-cand-5870-5949
  source 1..80: mol_type = other DNA
agccctcctcaagcactacttcaacgacgaacaaggtgaaattgaatttatcgagagttcaagagatgcaggattcccag

SEQ ID NO: 13707 - DNA, 80 bp, synthetic construct
  misc_feature 1..80: note = Synthetic: >EVB83-cand-5930-6009
  source 1..80: mol_type = other DNA
aagagatgcaggattcccagtcatcaacacacctaacaaaaccaaactggagccaagtgtcttccatcaggtgttcgagg

SEQ ID NO: 13708 - DNA, 80 bp, synthetic construct
  misc_feature 1..80: note = Synthetic: >EVB83-cand-6030-6109
  source 1..80: mol_type = other DNA
ctcaggaacggcgacccacgccttaaagccaattttgaggaggccatattctcaaaatatatagggaatgttaacacaca

SEQ ID NO: 13709 - DNA, 80 bp, synthetic construct
  misc_feature 1..80: note = Synthetic: >EVB83-cand-6110-6189
  source 1..80: mol_type = other DNA
tgtggatgaatatatgctggaagcagtggaccattacgcgggtcagctagctaccctcgacatcagcactgagccaatga

SEQ ID NO: 13710 - DNA, 80 bp, synthetic construct
  misc_feature 1..80: note = Synthetic: >EVB83-cand-6190-6269
  source 1..80: mol_type = other DNA
agctagaggatgctgtatacggcactgagggactagaagctctcgatttgacaacgagtgcaggttacccgtatgttaca

SEQ ID NO: 13711 - DNA, 80 bp, synthetic construct
  misc_feature 1..80: note = Synthetic: >EVB83-cand-6270-6349
  source 1..80: mol_type = other DNA
ctaggcattaagaagagagacatattatcaaaaaagaccagggacctaaccaaattgaaggaatgcatggacaaatatgg

SEQ ID NO: 13712 - DNA, 80 bp, synthetic construct
  misc_feature 1..80: note = Synthetic: >EVB83-cand-6350-6429
  source 1..80: mol_type = other DNA
tttaaacttaccaatggtaacctatgtaaaggatgagctcagatcagcagagaaggtggctaaagggaaatccaggctta

SEQ ID NO: 13713 - DNA, 80 bp, synthetic construct
  misc_feature 1..80: note = Synthetic: >EVB83-cand-6430-6509
  source 1..80: mol_type = other DNA
ttgaagcatccagcttgaatgattctgttgcaatgaggcagacgtttggcaacctgtacaagacattccacctgaatcca

SEQ ID NO: 13714 - DNA, 80 bp, synthetic construct
  misc_feature 1..80: note = Synthetic: >EVB83-cand-6510-6589
  source 1..80: mol_type = other DNA
gggatagtgacaggtagcgcggttgggtgtgaccctgacctcttctggagcaaaataccagtaatgctagatggacatct

SEQ ID NO: 13715 - DNA, 80 bp, synthetic construct
  misc_feature 1..80: note = Synthetic: >EVB83-cand-6580-6659
  source 1..80: mol_type = other DNA
atggacatctcatagcctttgattactccggatatgatgctagcttgagccctgtgtggtttgcttgtctgaaactgcta

SEQ ID NO: 13716 - DNA, 80 bp, synthetic construct
  misc_feature 1..80: note = Synthetic: >GU997097.1-cand-4400-4479
  source 1..80: mol_type = other DNA
gtaccttttctaaagagtatgcatggaaagacttcttgaatgaggtacggtgtgaggtcacaacagctcgacacgtgcat

SEQ ID NO: 13717 - DNA, 80 bp, synthetic construct
  misc_feature 1..80: note = Synthetic: >GU997097.1-cand-4480-4559
  source 1..80: mol_type = other DNA
agacctaaagtagcaagaacatttactgtacgagaaaaggatcaagtaatacaaaatcctataacctcagttattggtta

SEQ ID NO: 13718 - DNA, 80 bp, synthetic construct
  misc_feature 1..80: note = Synthetic: >GU997097.1-cand-4560-4639
  source 1..80: mol_type = other DNA
taaatatgcatcaacagtagatgaaataagtgatgtgctagacagtgcattcttccctgattcattatcggcagatttac

SEQ ID NO: 13719 - DNA, 80 bp, synthetic construct
  misc_feature 1..80: note = Synthetic: >GU997097.1-cand-4660-4739
  source 1..80: mol_type = other DNA
tatagggaattgggtttagatataggcttaccagaggttcttaagagaatagcaccactactctataaggctggtaaatc

SEQ ID NO: 13720 - DNA, 80 bp, synthetic construct
  misc_feature 1..80: note = Synthetic: >GU997097.1-cand-4720-4799
  source 1..80: mol_type = other DNA
ctctataaggctggtaaatcaagaatcgtgattgttgagggaaacatcgagggcactgccgagtctatatgtagttattg

SEQ ID NO: 13721 - DNA, 80 bp, synthetic construct
  misc_feature 1..80: note = Synthetic: >GU997097.1-cand-4800-4879
  source 1..80: mol_type = other DNA
gttgaaaaatatgtccctaattaagaccattaaagtaaagcctaggaaagaggttctcaaggctgtgtctctttacggga

SEQ ID NO: 13722 - DNA, 80 bp, synthetic construct
  misc_feature 1..80: note = Synthetic: >GU997097.1-cand-4880-4959
  source 1..80: mol_type = other DNA
caaaggataatctaagtttacaggatgatttagcagctactagaatatgtatagaggtgtggagatggtgcaaggcaaac

SEQ ID NO: 13723 - DNA, 80 bp, synthetic construct
  misc_feature 1..80: note = Synthetic: >GU997097.1-cand-4960-5039
  source 1..80: mol_type = other DNA
aaccagaacgtacaggagtggtttactgccctgtatttcgagaatcaaacattatatgattggattgaacgattcaggcg

SEQ ID NO: 13724 - DNA, 80 bp, synthetic construct
  misc_feature 1..80: note = Synthetic: >GU997097.1-cand-5050-5129
  source 1..80: mol_type = other DNA
gtgcctgtcgaccctgaaatacaatgtatggctttattactgtatgatgtattagggtttaagaatgtgttgcagatgca

SEQ ID NO: 13725 - DNA, 80 bp, synthetic construct
  misc_feature 1..80: note = Synthetic: >GU997097.1-cand-5120-5199
  source 1..80: mol_type = other DNA
tgcagatgcaagcaaatagaagggcttattcaggaaaacagtatgatgcatattgtgtacagacttacaacgaggaaaca

SEQ ID NO: 13726 - DNA, 80 bp, synthetic construct
  misc_feature 1..80: note = Synthetic: >GU997097.1-cand-5200-5279
  source 1..80: mol_type = other DNA
aagctgtatgaaggtgatcttagagtcacattcaattttggtttagactgtgcaaggcttgaggttttctgggataaaaa

SEQ ID NO: 13727 - DNA, 80 bp, synthetic construct
  misc_feature 1..80: note = Synthetic: >GU997097.1-cand-5280-5359
  source 1..80: mol_type = other DNA
agagtacgttcttgagacatctataactcaaaaacatgtattacgcctcatgatggaagaagtctctaaagaactagtta

SEQ ID NO: 13728 - DNA, 80 bp, synthetic construct
  misc_feature 1..80: note = Synthetic: >GU997097.1-cand-5360-5439
  source 1..80: mol_type = other DNA
gatgtggaatgagatttaagactgaacaagttagtcatacaagaagtcttgtcttatttaaaacagaatcaggctttgaa

SEQ ID NO: 13729 - DNA, 80 bp, synthetic construct
  misc_feature 1..80: note = Synthetic: >GU997097.1-cand-5450-5529
  source 1..80: mol_type = other DNA
ctaatattccatgtatagtctataaacattgtgcactgcggactggattaaggacaaaacatccaattaataaagagttc

SEQ ID NO: 13730 - DNA, 80 bp, synthetic construct
  misc_feature 1..80: note = Synthetic: >GU997097.1-cand-5530-5609
  source 1..80: mol_type = other DNA
atgattaatattcaatcagacgggtttcgagcaattgctcagatggatatagaaagtcctaggtttttattggcccatgc

SEQ ID NO: 13731 - DNA, 80 bp, synthetic construct
  misc_feature 1..80: note = Synthetic: >GU997097.1-cand-5610-5689
  source 1..80: mol_type = other DNA
ttatcatacattgagggatgttagataccaagcagttcaggctgtaggtaatgtctggttcaggacagaacaacataaac

SEQ ID NO: 13732 - DNA, 80 bp, synthetic construct
  misc_feature 1..80: note = Synthetic: >HCV.A12-cand-2970-3049
  source 1..80: mol_type = other DNA
tgaagatgacagacccccctgctcaagtggcaattcctttcatgtcaccagcaagtgcataccaatggttttatgatggc

SEQ ID NO: 13733 - DNA, 80 bp, synthetic construct
  misc_feature 1..80: note = Synthetic: >HCV.A12-cand-3040-3119
  source 1..80: mol_type = other DNA
ttatgatggctaccccacctttggtgagaggccagttacaactaacatgaattacggacagtgtccgaacaacaaaatgg

SEQ ID NO: 13734 - DNA, 80 bp, synthetic construct
  misc_feature 1..80: note = Synthetic: >HCV.A12-cand-3130-3209
  source 1..80: mol_type = other DNA
tatgcgtactgtctcaggcgaagcgtcaggaaagaacatcaccgtccgcattttcatgaggttgaagcacgtgagagctt

SEQ ID NO: 13735 - DNA, 80 bp, synthetic construct
  misc_feature 1..80: note = Synthetic: >HCV.A12-cand-3210-3289
  source 1..80: mol_type = other DNA
gggttccacgaccaattcggagtcagctatacctcctgaagaactatccaaatttcgataacaccaagattctgaatgct

SEQ ID NO: 13736 - DNA, 80 bp, synthetic construct
  misc_feature 1..80: note = Synthetic: >HCV.A12-cand-3290-3369
  source 1..80: mol_type = other DNA
tctcataacagaacttctattacggcaaacacgggcaagtttgggcaacagtccggtgctatatatgtgggaaattacag

SEQ ID NO: 13737 - DNA, 80 bp, synthetic construct
  misc_feature 1..80: note = Synthetic: >HCV.A12-cand-3370-3449
  source 1..80: mol_type = other DNA
agtggtgaatagacaccttgctacccataatgattgggccaacttggtttgggaggatagctcaagggaccttctagtgt

SEQ ID NO: 13738 - DNA, 80 bp, synthetic construct
  misc_feature 1..80: note = Synthetic: >HCV.A12-cand-3450-3529
  source 1..80: mol_type = other DNA
catccacgacagctcaaggttgtgacgtcatcgcccgttgcaaatgccagactggagtgtactattgtaattctcagagg

SEQ ID NO: 13739 - DNA, 80 bp, synthetic construct
  misc_feature 1..80: note = Synthetic: >HCV.A12-cand-3530-3609
  source 1..80: mol_type = other DNA
aagcactatccagttagcttcacaaaacccagcctcatctttgtagaggctagtgagtactaccctgccagataccaatc

SEQ ID NO: 13740 - DNA, 80 bp, synthetic construct
  misc_feature 1..80: note = Synthetic: >HCV.A12-cand-3650-3729
  source 1..80: mol_type = other DNA
tgtggaggcattctcaggtgccaacatggtgttgttggtatagtgtccactggtggcaacggactcgtcggttttgctga

SEQ ID NO: 13741 - DNA, 80 bp, synthetic construct
  misc_feature 1..80: note = Synthetic: >HCV.A12-cand-3690-3769
  source 1..80: mol_type = other DNA
tagtgtccactggtggcaacggactcgtcggttttgctgatgtcagggaccttctttggttggatgaggaagccatggag

SEQ ID NO: 13742 - DNA, 80 bp, synthetic construct
  misc_feature 1..80: note = Synthetic: >HCV.A12-cand-3800-3879
  source 1..80: mol_type = other DNA
ggagatgcatttggaatgggtttcactgatgcagtatccagagaagtggaggccctaaagaatcaccttatagggtccga

SEQ ID NO: 13743 - DNA, 80 bp, synthetic construct
  misc_feature 1..80: note = Synthetic: >HCV.A12-cand-3890-3969
  source 1..80: mol_type = other DNA
gagaagattttgaagaacctaatcaagttaatctcagcactagtgatagtgattaggagtgactatgacatggtcaccct

SEQ ID NO: 13744 - DNA, 80 bp, synthetic construct
  misc_feature 1..80: note = Synthetic: >HCV.A12-cand-3930-4009
  source 1..80: mol_type = other DNA
tagtgatagtgattaggagtgactatgacatggtcaccctaacggcaactttggccctaattgggtgtcatggaagccct

SEQ ID NO: 13745 - DNA, 80 bp, synthetic construct
  misc_feature 1..80: note = Synthetic: >HCV.A12-cand-4010-4089
  source 1..80: mol_type = other DNA
tgggcctggatcaaagccaagacggcctctgttttaggcatccccatcgctcagaagcaaagcgcatcctggctcaagaa

SEQ ID NO: 13746 - DNA, 80 bp, synthetic construct
  misc_feature 1..80: note = Synthetic: >HCV.A12-cand-4120-4199
  source 1..80: mol_type = other DNA
gttggaatggatatccaacaaaatcagtaaatttatcgattggctcaaggaaaagattgtaccagcagccaaggagaaag

SEQ ID NO: 13747 - DNA, 80 bp, synthetic construct
  misc_feature 1..80: note = Synthetic: >HCV.A12-cand-4170-4249
  source 1..80: mol_type = other DNA
aaaagattgtaccagcagccaaggagaaagtggagtttctgaacaacctgaaacagttgccactattggaaaaccaaatt

SEQ ID NO: 13748 - DNA, 80 bp, synthetic construct
  misc_feature 1..80: note = Synthetic: >HCV.A24-cand-6940-7019
  source 1..80: mol_type = other DNA
tcttactgaaaacctacaagggcatagatttagaccacctaaagatgatcgcctatggtgatgatgtaattgcttcctac

SEQ ID NO: 13749 - DNA, 80 bp, synthetic construct
  misc_feature 1..80: note = Synthetic: >HCV.A24-cand-7100-7179
  source 1..80: mol_type = other DNA
tacctttgaaacagtcacatgggagaatgtaacattcctgaagagattctttagagcagatgagaagtatccatttctaa

SEQ ID NO: 13750 - DNA, 80 bp, synthetic construct
  misc_feature 1..80: note = Synthetic: >HCV.A24-cand-7260-7339
  source 1..80: mol_type = other DNA
cgttcattgtgcctattggcttggcacaatggagaagaagaatacaacaaatttctagctaaaataaggagtgtgccaat

SEQ ID NO: 13751 - DNA, 80 bp, synthetic construct
  misc_feature 1..80: note = Synthetic: >HCV.A24-cand-7340-7419
  source 1..80: mol_type = other DNA
tggaagagcattattgcttccagagtactcgacattgtatcgccgttggctcgactctttttagtaaccctacctcagtc

SEQ ID NO: 13752 - DNA, 80 bp, synthetic construct
  misc_feature 1..80: note = Synthetic: >HCV.A3-cand-80-159
  source 1..80: mol_type = other DNA
ttataccccccccaacctcgaaacttagaagtaaagcaaacccgatcaatagcaggtgcggcgcaccagtcgcatcttga

SEQ ID NO: 13753 - DNA, 80 bp, synthetic construct
  misc_feature 1..80: note = Synthetic: >HCV.A3-cand-240-319
  source 1..80: mol_type = other DNA
actacttcgagaaacccagtagcatcatgaaagttgcagagtgtttcgctcagcactacccccgtgtagatcaggccgat

SEQ ID NO: 13754 - DNA, 80 bp, synthetic construct
  misc_feature 1..80: note = Synthetic: >HCV.A3-cand-300-379
  source 1..80: mol_type = other DNA
cccgtgtagatcaggccgatgagtcaccgcacttccccacgggcgaccgtggcggtggctgcgttggcggcctgcctatg

SEQ ID NO: 13755 - DNA, 80 bp, synthetic construct
  misc_feature 1..80: note = Synthetic: >HCV.A3-cand-480-559
  source 1..80: mol_type = other DNA
agcacatacccttaatccaaagggcagtgtgtcgtaacgggtaactctgcagcggaaccgactactttgggtgtccgtgt

SEQ ID NO: 13756 - DNA, 80 bp, synthetic construct
  misc_feature 1..80: note = Synthetic: >HCV.A3-cand-560-639
  source 1..80: mol_type = other DNA
ttccttttaatttttactggctgcttatggtgacaattgaggaattgttgccatatagctattggattggccatccggtg

SEQ ID NO: 13757 - DNA, 80 bp, synthetic construct
  misc_feature 1..80: note = Synthetic: >HCV.A3-cand-640-719
  source 1..80: mol_type = other DNA
actaacagagctattgtgttccaatttgttggatttaccccgctcacactcacagtcgtaagaacccttcattacgtgtt

SEQ ID NO: 13758 - DNA, 80 bp, synthetic construct
  misc_feature 1..80: note = Synthetic: >HCV.A3-cand-720-799
  source 1..80: mol_type = other DNA
atttctcaactcaagaaaatgggcgcccaagtgtccacccagaagacaggatctcatgagaccggaaacatagctacaga

SEQ ID NO: 13759 - DNA, 80 bp, synthetic construct
  misc_feature 1..80: note = Synthetic: >HCV.A3-cand-800-879
  source 1..80: mol_type = other DNA
aggttccaccatcaacttcactaatatcaactattatagagattcctatgccgcatctgcatcgcgacaagagttctcac

SEQ ID NO: 13760 - DNA, 80 bp, synthetic construct
  misc_feature 1..80: note = Synthetic: >HCV.A3-cand-880-959
  source 1..80: mol_type = other DNA
aagaccccacaaaattcacaagcccggtgttagacgttttgagggaagcagccccacccttgaaatcaccatctgttgag

SEQ ID NO: 13761 - DNA, 80 bp, synthetic construct
  misc_feature 1..80: note = Synthetic: >HCV.A3-cand-970-1049
  source 1..80: mol_type = other DNA
atagtgatagagtagcacagttgaccgtgggcaattcaacaataactacacaagaggcagcgaatatagttcttggatat

SEQ ID NO: 13762 - DNA, 80 bp, synthetic construct
  misc_feature 1..80: note = Synthetic: >HCV.A3-cand-1050-1129
  source 1..80: mol_type = other DNA
ggtgagtggcccgactactgcccagacacagatgctactgctgttgacaaacccactaggccagatgtttctgtcaatcg

SEQ ID NO: 13763 - DNA, 80 bp, synthetic construct
  misc_feature 1..80: note = Synthetic: >HCV.A3-cand-1130-1209
  source 1..80: mol_type = other DNA
gttttacaccatgtcgacgcaaatgtggcaggaatcatcgaaagggtggtattggaaattccctgatgtgttgaacaaaa

SEQ ID NO: 13764 - DNA, 80 bp, synthetic construct
  misc_feature 1..80: note = Synthetic: >HCV.A7-cand-1440-1519
  source 1..80: mol_type = other DNA
ttacattctggatgctgggatcccgttaagtcaactgttagtgtgcccccaccaatggattaaccttcggaccaacaact

SEQ ID NO: 13765 - DNA, 80 bp, synthetic construct
  misc_feature 1..80: note = Synthetic: >HCV.A7-cand-1520-1599
  source 1..80: mol_type = other DNA
gcgccaccatagtggtaccatacattaacagtgtccctttcgactctgccctgaaccactgcaatttcggtttggtagtg

SEQ ID NO: 13766 - DNA, 80 bp, synthetic construct
  misc_feature 1..80: note = Synthetic: >HCV.A7-cand-1640-1719
  source 1..80: mol_type = other DNA
caacaattcccataaccatcaccgtggcccccatgaactcagagttctccggattgagacaagctgtcacacaaggattg

SEQ ID NO: 13767 - DNA, 80 bp, synthetic construct
  misc_feature 1..80: note = Synthetic: >HCV.A7-cand-1680-1759
  source 1..80: mol_type = other DNA
agagttctccggattgagacaagctgtcacacaaggattgcccatggagttgaaacctggcaccaatcaatttctcacca

SEQ ID NO: 13768 - DNA, 80 bp, synthetic construct
  misc_feature 1..80: note = Synthetic: >HCV.A7-cand-1740-1819
  source 1..80: mol_type = other DNA
caccaatcaatttctcaccactgatgatggtgtgtcagcccctatactgcctgggtttcatccaacaccagtaatacaca

SEQ ID NO: 13769 - DNA, 80 bp, synthetic construct
  misc_feature 1..80: note = Synthetic: >HCV.A7-cand-1840-1919
  source 1..80: mol_type = other DNA
ctcttggagttgtgtcaaattgacacaataatggaggttaacaatcttaccactaatgaggccacccccatggagcgctt

SEQ ID NO: 13770 - DNA, 80 bp, synthetic construct
  misc_feature 1..80: note = Synthetic: >HCV.A7-cand-1930-2009
  source 1..80: mol_type = other DNA
gtgcaagtccaaacacaatcaggtgagctgtgcgcagcattcaaagctgatcccgggcttgatggcccgtggcaatccac

SEQ ID NO: 13771 - DNA, 80 bp, synthetic construct
  misc_feature 1..80: note = Synthetic: >HCV.A7-cand-2010-2089
  source 1..80: mol_type = other DNA
catggttgggcagctctgtaggtattacacccagtggtcagggtctttaaagataactttcatgttcaccgggtcattta

SEQ ID NO: 13772 - DNA, 80 bp, synthetic construct
  misc_feature 1..80: note = Synthetic: >HCV.A7-cand-2090-2169
  source 1..80: mol_type = other DNA
tggccactgggaagatgctgatagcctacaccccccctggaggctccctacccgccaacagaatgcaggcaatgctgggc

SEQ ID NO: 13773 - DNA, 80 bp, synthetic construct
  misc_feature 1..80: note = Synthetic: >HCV.A7-cand-2170-2249
  source 1..80: mol_type = other DNA
acccacgtcatctgggattttggtttgcaatcatctgtcacactagtggtgccatggattagcaacacccattaccgctc

SEQ ID NO: 13774 - DNA, 80 bp, synthetic construct
  misc_feature 1..80: note = Synthetic: >HCV.A7-cand-2250-2329
  source 1..80: mol_type = other DNA
gcaagccactggaaacttcttcgactactatgccactggcatagtgtctctgtggtaccagacaaattttgttgtcccaa

SEQ ID NO: 13775 - DNA, 80 bp, synthetic construct
  misc_feature 1..80: note = Synthetic: >HCV.A7-cand-2330-2409
  source 1..80: mol_type = other DNA
taggtgctccaactactgcttacatagtggttttaggtagcgcacaaaagaatttcaccatgcggttgtgcagggacact

SEQ ID NO: 13776 - DNA, 80 bp, synthetic construct
  misc_feature 1..80: note = Synthetic: >HCV.A7-cand-2410-2489
  source 1..80: mol_type = other DNA
agtgaactaacccaatctgcagagtaccagggtgatgagatagttgacctcatcgagagtgctgtgcaaaacaccactaa

SEQ ID NO: 13777 - DNA, 80 bp, synthetic construct
  misc_feature 1..80: note = Synthetic: >HCV.A7-cand-2490-2569
  source 1..80: mol_type = other DNA
agcaattaccagctcaattgacaccaagactggtgcgaacactcaagctagccagcatcgcataggcttgggagaagtcc

SEQ ID NO: 13778 - DNA, 80 bp, synthetic construct
  misc_feature 1..80: note = Synthetic: >HCV.A7-cand-2580-2659
  source 1..80: mol_type = other DNA
agctgctgagacaggatcgtcttcgctagtctcggacaagaacatgatagagacaagatgtgtcgtaaacaaacacagca

SEQ ID NO: 13779 - DNA, 80 bp, synthetic construct
  misc_feature 1..80: note = Synthetic: >HCV.A7-cand-2620-2699
  source 1..80: mol_type = other DNA
aacatgatagagacaagatgtgtcgtaaacaaacacagcacagaggagaccagcatcacaaacttctactccagggcagg

SEQ ID NO: 13780 - DNA, 80 bp, synthetic construct
  misc_feature 1..80: note = Synthetic: >HCV.A7-cand-4030-4109
  source 1..80: mol_type = other DNA
tcaaaaacagcatccattttgggcattccaatggcccagaagcagagtgcgtcctggttgaagaaattcaatgacatggc

SEQ ID NO: 13781 - DNA, 80 bp, synthetic construct
  misc_feature 1..80: note = Synthetic: >HCV.A7-cand-4130-4209
  source 1..80: mol_type = other DNA
aatggatctctaacaagatcagcaagttcatcgattggctcaaggaaaagataatcccagctgctaaagaaaaggttgag

SEQ ID NO: 13782 - DNA, 80 bp, synthetic construct
  misc_feature 1..80: note = Synthetic: >HCV.A7-cand-4190-4269
  source 1..80: mol_type = other DNA
ctgctaaagaaaaggttgagtttctgaacaacctcaagcaattgcccttactggaaaaccaaatctccaacctagaacaa

SEQ ID NO: 13783 - DNA, 80 bp, synthetic construct
  misc_feature 1..80: note = Synthetic: >HCV.A7-cand-4270-4349
  source 1..80: mol_type = other DNA
tctgccgcctcacaagaagaccttgaggccatgtttggcaatgtgtcatacctagcccacttctgccgcaaatttcaacc

SEQ ID NO: 13784 - DNA, 80 bp, synthetic construct
  misc_feature 1..80: note = Synthetic: >HCV.A7-cand-4430-4509
  source 1..80: mol_type = other DNA
gtattgaacctgtatgtttgatcatcagaggctcaccaggaacgggtaaatcacttgccacaggcatcattgctagggct

SEQ ID NO: 13785 - DNA, 80 bp, synthetic construct
  misc_feature 1..80: note = Synthetic: >HCV.A7-cand-4510-4589
  source 1..80: mol_type = other DNA
attgctgataagtaccactctagtgtatactccctcccaccagatccagatcactttgacgggtacaaacagcaagtggt

SEQ ID NO: 13786 - DNA, 80 bp, synthetic construct
  misc_feature 1..80: note = Synthetic: >HCV.A7-cand-4670-4749
  source 1..80: mol_type = other DNA
tcatcccgccaatggcctccttagaagagaaaggagtgtctttcacttccaaatttgtcatcgcatcaactaatgccagc

SEQ ID NO: 13787 - DNA, 80 bp, synthetic construct
  misc_feature 1..80: note = Synthetic: >HCV.A7-cand-4750-4829
  source 1..80: mol_type = other DNA
aacatcatagtccccacagtttcagattccgatgccatccgcaggagattctacatggactgtgacatcgaagtgactga

SEQ ID NO: 13788 - DNA, 80 bp, synthetic construct
  misc_feature 1..80: note = Synthetic: >HCV.A7-cand-4830-4909
  source 1..80: mol_type = other DNA
ctcttataaaacagacctgggccgtttagatgcgggaagggctgccaaactgtgctcagaaaacaacaccgctaacttta

SEQ ID NO: 13789 - DNA, 80 bp, synthetic construct
  misc_feature 1..80: note = Synthetic: >HCV.A7-cand-4910-4989
  source 1..80: mol_type = other DNA
aaagatgcagcccgctggtgtgtgggaaagctattcaactgagagataggaagtccaaagttaggtatagtgtggacact

SEQ ID NO: 13790 - DNA, 80 bp, synthetic construct
  misc_feature 1..80: note = Synthetic: >HCV.A7-cand-4990-5069
  source 1..80: mol_type = other DNA
gtagtgtcagaattgatcagagagtacaacaatagatcagccattgggaacaccatagaagccctgtttcagggaccacc

SEQ ID NO: 13791 - DNA, 80 bp, synthetic construct
  misc_feature 1..80: note = Synthetic: >HCV.A7-cand-5070-5149
  source 1..80: mol_type = other DNA
caagtttagacccataaggatcagccttgaggagaaacctgctccagatgccattagtgatttacttgctagtgttgata

SEQ ID NO: 13792 - DNA, 80 bp, synthetic construct
  misc_feature 1..80: note = Synthetic: >HCV.A7-cand-5150-5229
  source 1..80: mol_type = other DNA
gtgaggaggtgcggcagtattgcagggaccaagggtggataatacctgaaacaccaaccaatgtggagcgacacctaaat

SEQ ID NO: 13793 - DNA, 80 bp, synthetic construct
  misc_feature 1..80: note = Synthetic: >HCV.A7-cand-5240-5319
  source 1..80: mol_type = other DNA
tagtaatgcagtccattgccactgtggttgcagttgtctctcttgtctatgttatctacaagctgtttgctggcttccaa

SEQ ID NO: 13794 - DNA, 80 bp, synthetic construct
  misc_feature 1..80: note = Synthetic: >HCV.A7-cand-5320-5399
  source 1..80: mol_type = other DNA
ggtgcatactctggagcgcccaagcaagtgctcaagaaaccggtactgaggacagcaactgtgcaagggcctagtctaga

SEQ ID NO: 13795 - DNA, 80 bp, synthetic construct
  misc_feature 1..80: note = Synthetic: >HCV.A7-cand-5400-5479
  source 1..80: mol_type = other DNA
ctttgccctgtcccttctgcgacgcaacatcaggcaggtgcagactgaccaagggcacttcaccatgctgggagtgcgcg

SEQ ID NO: 13796 - DNA, 80 bp, synthetic construct
  misc_feature 1..80: note = Synthetic: >HCV.A7-cand-6880-6959
  source 1..80: mol_type = other DNA
gggatagacctagatgagttgaacatggtggcctacggagatgatgtactagctagttacccttttcccattgactgctt

SEQ ID NO: 13797 - DNA, 80 bp, synthetic construct
  misc_feature 1..80: note = Synthetic: >HCV.A7-cand-6930-7009
  source 1..80: mol_type = other DNA
agctagttacccttttcccattgactgcttagaactagcaaaaacaggtaaagagtatgggttaactatgacacctgctg

SEQ ID NO: 13798 - DNA, 80 bp, synthetic construct
  misc_feature 1..80: note = Synthetic: >HCV.A7-cand-7010-7089
  source 1..80: mol_type = other DNA
ataaatcaccctgtttcaatgaagtgacctgggaaaatgccaccttcctgaagagagggttcctaccagatcatcagttc

SEQ ID NO: 13799 - DNA, 80 bp, synthetic construct
  misc_feature 1..80: note = Synthetic: >HCV.A7-cand-7090-7169
  source 1..80: mol_type = other DNA
ccattcctcatccaccccacaatgcctatgagagaaatccatgagtccattcgatggaccaaagatgcacgcaacaccca

SEQ ID NO: 13800 - DNA, 80 bp, synthetic construct
  misc_feature 1..80: note = Synthetic: >HCV.A7-cand-7170-7249
  source 1..80: mol_type = other DNA
agaccacgtgcgctctctgtgtctgttggcatggcacaatgggaaggatgagtacgaaaaatttgtgagcacaattagat

SEQ ID NO: 13801 - DNA, 80 bp, synthetic construct
  misc_feature 1..80: note = Synthetic: >HCV.A7-cand-7220-7299
  source 1..80: mol_type = other DNA
agtacgaaaaatttgtgagcacaattagatcagtcccaattggaaaagcattggccattccaaattttgagaatttgaga

SEQ ID NO: 13802 - DNA, 80 bp, synthetic construct
  misc_feature 1..80: note = Synthetic: >HCV.A8-cand-0-79
  source 1..80: mol_type = other DNA
aacagcctgtgggttgtacccactcacagggcccactgggcgctagcactctggtactacggtacctttgtgcgcctgtt

SEQ ID NO: 13803 - DNA, 80 bp, synthetic construct
  misc_feature 1..80: note = Synthetic: >HCV.A8-cand-80-159
  source 1..80: mol_type = other DNA
ttacctccccctcccctgaagttagcaatttagaagcaaagcaccctaatgatcaatagaaggtgtggcgaaccagccac

SEQ ID NO: 13804 - DNA, 80 bp, synthetic construct
  misc_feature 1..80: note = Synthetic: >HCV.A8-cand-300-379
  source 1..80: mol_type = other DNA
cacttcccccgtgtagatcaggtcgatgagtcaccgcgttccccacgggcgaccgtggcggtggctgcgttggcggcctg

SEQ ID NO: 13805 - DNA, 80 bp, synthetic construct
  misc_feature 1..80: note = Synthetic: >HCV.A8-cand-560-639
  source 1..80: mol_type = other DNA
ccgtgtttccttttattttctctattggctgcttatggtgacaattaaagaattgttaccatatagctattggattggcc

SEQ ID NO: 13806 - DNA, 80 bp, synthetic construct
  misc_feature 1..80: note = Synthetic: >HCV.A8-cand-640-719
  source 1..80: mol_type = other DNA
atccggtgactaacagagcaattatatatctctttgttggatttatcccattgacgctcacttcttttaacacactacat

SEQ ID NO: 13807 - DNA, 80 bp, synthetic construct
  misc_feature 1..80: note = Synthetic: >HCV.A8-cand-720-799
  source 1..80: mol_type = other DNA
tatatattgactctcaatacaagaaaatgggagcacaggtgtcaacacaaaagtccggtaggcatgagactggcaatgta

SEQ ID NO: 13808 - DNA, 80 bp, synthetic construct
  misc_feature 1..80: note = Synthetic: >HCV.A8-cand-810-889
  source 1..80: mol_type = other DNA
ggtccactataaacttcacaaatatcaattattacaaggactcctatgccgcctctgcgagcaagcaagacttcactcag

SEQ ID NO: 13809 - DNA, 80 bp, synthetic construct
  misc_feature 1..80: note = Synthetic: >HCV.A8-cand-890-969
  source 1..80: mol_type = other DNA
gaccctaccaggtttactagcccggtgcttgatgcactgagggaagtggcgccaccattgaagtcaccttcagtggaggc

SEQ ID NO: 13810 - DNA, 80 bp, synthetic construct
  misc_feature 1..80: note = Synthetic: >HCV.A8-cand-980-1059
  source 1..80: mol_type = other DNA
agtgacagggtggcacagttgactgtgggtaattcaacaataaccacgcaagaggctgcgaatatagttcttgcctatgg

SEQ ID NO: 13811 - DNA, 80 bp, synthetic construct
  misc_feature 1..80: note = Synthetic: >HCV.A8-cand-1060-1139
  source 1..80: mol_type = other DNA
agagtggcctgagtattgccccgataaggatgccactgcagtagataaacccacacgccctgatgtgtcggttaacagat

SEQ ID NO: 13812 - DNA, 80 bp, synthetic construct
  misc_feature 1..80: note = Synthetic: >HQ537689.1-cand-4000-4079
  source 1..80: mol_type = other DNA
tttgctatttgttgtttttatatttaccaatgatgtgtattaattttcatgcacagcatatgacacaacaagagtaatgt

SEQ ID NO: 13813 - DNA, 80 bp, synthetic construct
  misc_feature 1..80: note = Synthetic: >HQ537689.1-cand-4080-4159
  source 1..80: mol_type = other DNA
atatacatgtatatattgtttgtatatatgtgcacatggtggtgttttaacattgttgttgttattttagtttttttttt

SEQ ID NO: 13814 - DNA, 80 bp, synthetic construct
  misc_feature 1..80: note = Synthetic: >HQ537689.1-cand-4170-4249
  source 1..80: mol_type = other DNA
tactaataaatacctttatattttagcagtgtattattatgagacacaaacgatctacaaggcgcaagcgtgcatctgca

SEQ ID NO: 13815 - DNA, 80 bp, synthetic construct
  misc_feature 1..80: note = Synthetic: >HQ537689.1-cand-4250-4329
  source 1..80: mol_type = other DNA
acacaactataccaaacatgcaaggccacaggcacctgcccacccgatgttattcctaaagtggaaggaagtaccatagc

SEQ ID NO: 13816 - DNA, 80 bp, synthetic construct
  misc_feature 1..80: note = Synthetic: >HQ537689.1-cand-4360-4439
  source 1..80: mol_type = other DNA
ggttttttttggtggtttaggtattggcacaggctctggttcaggtggaaggactggctatgtacctattggtactgacc

SEQ ID NO: 13817 - DNA, 80 bp, synthetic construct
  misc_feature 1..80: note = Synthetic: >HQ537689.1-cand-4410-4489
  source 1..80: mol_type = other DNA
ggactggctatgtacctattggtactgacccacctacagctgcaatccccttgcagcctatacgtcctccggttactgta

SEQ ID NO: 13818 - DNA, 80 bp, synthetic construct
  misc_feature 1..80: note = Synthetic: >HQ537689.1-cand-4490-4569
  source 1..80: mol_type = other DNA
gacactgttggacctttagactcgtctatagtgtcattaatagaagaaacaagttttatagaggcaggtgcaccagcccc

SEQ ID NO: 13819 - DNA, 80 bp, synthetic construct
  misc_feature 1..80: note = Synthetic: >HQ537689.1-cand-4570-4649
  source 1..80: mol_type = other DNA
atctattcctacaccatcaggttttgatgttactacatctgcagatactacacctgcaattattaatgtttcatctgttg

SEQ ID NO: 13820 - DNA, 80 bp, synthetic construct
  misc_feature 1..80: note = Synthetic: >HQ537689.1-cand-4650-4729
  source 1..80: mol_type = other DNA
gggagtcatctattcaaactatttctacacatttaaatcccacatttactgaaccatctgtactacaccctccagcgcct

SEQ ID NO: 13821 - DNA, 80 bp, synthetic construct
  misc_feature 1..80: note = Synthetic: >HQ537689.1-cand-4730-4809
  source 1..80: mol_type = other DNA
gcagaagcctctggacattttatattttcttcccctactgttagcacacaaagttatgaaaacataccaatggatacctt

SEQ ID NO: 13822 - DNA, 80 bp, synthetic construct
  misc_feature 1..80: note = Synthetic: >HQ537689.1-cand-4810-4889
  source 1..80: mol_type = other DNA
tgttgtttccacagacagtagtaatgtaacatcaagcacgcccattccagggtctcgccctgtggcacgccttggtttat

SEQ ID NO: 13823 - DNA, 80 bp, synthetic construct
  misc_feature 1..80: note = Synthetic: >HQ537689.1-cand-4890-4969
  source 1..80: mol_type = other DNA
atagtcgcaatacccaacaggttaaggttgttgaccctgcttttttaacatcgcctcataaacttataacatatgataat

SEQ ID NO: 13824 - DNA, 80 bp, synthetic construct
  misc_feature 1..80: note = Synthetic: >HQ537689.1-cand-4970-5049
  source 1..80: mol_type = other DNA
cctgcatttgaaagctttgaccctgaagacacattacaatttcaacatagtgatatatcacctgctcctgatcctgactt

SEQ ID NO: 13825 - DNA, 80 bp, synthetic construct
  misc_feature 1..80: note = Synthetic: >HQ537689.1-cand-5050-5129
  source 1..80: mol_type = other DNA
tctagatattattgcattacataggcctgctattacatctcgtagacatactgtgcgttttagtagagtaggtcaaaaag

SEQ ID NO: 13826 - DNA, 80 bp, synthetic construct
  misc_feature 1..80: note = Synthetic: >HQ537689.1-cand-5130-5209
  source 1..80: mol_type = other DNA
ccacacttaaaactcgcagtggtaaacaaattggagctagaatacattattatcaggatttaagtcctattgtgccttta

SEQ ID NO: 13827 - DNA, 80 bp, synthetic construct
  misc_feature 1..80: note = Synthetic: >HQ537689.1-cand-5210-5289
  source 1..80: mol_type = other DNA
gaccacactgtgccaaataaacaatatgaattacagcctttacatgatacttctacatcgtcttatagtattaatgatgg

SEQ ID NO: 13828 - DNA, 80 bp, synthetic construct
  misc_feature 1..80: note = Synthetic: >KC470281.1-cand-7580-7659
  source 1..80: mol_type = other DNA
ctgtttttacttgcctaatagcatagttggcctgtataactacttttgcattcaagaatctgtctagtagtgtaagttat

SEQ ID NO: 13829 - DNA, 80 bp, synthetic construct
  misc_feature 1..80: note = Synthetic: >KC470281.1-cand-7660-7739
  source 1..80: mol_type = other DNA
acagtgactaataccacatccataaatttgtgcaaccgaaataggttgggcacacataccaatacttttacttataacat

SEQ ID NO: 13830 - DNA, 80 bp, synthetic construct
  misc_feature 1..80: note = Synthetic: >KC470281.1-cand-7740-7819
  source 1..80: mol_type = other DNA
tttacaatcattttatattagaaagggagtgaccgaaaacggtcacgaccgaaaacggtgtatataaagctgaacacagc

SEQ ID NO: 13831 - DNA, 80 bp, synthetic construct
  misc_feature 1..80: note = Synthetic: >KF436887.1-cand-20-99
  source 1..80: mol_type = other DNA
gtgtaaccgaaaagggttatgaccgaaaacggtgcatataaaagtggagtggtaaaagtatagaagaacaccatgtttga

SEQ ID NO: 13832 - DNA, 80 bp, synthetic construct
  misc_feature 1..80: note = Synthetic: >KF436887.1-cand-100-179
  source 1..80: mol_type = other DNA
agacaagagggaaagaccacgaacgctgcatgaattatgtgaagctttgaacgtttctatgcacaatatacaggtagtgt

SEQ ID NO: 13833 - DNA, 80 bp, synthetic construct
  misc_feature 1..80: note = Synthetic: >KF436887.1-cand-180-259
  source 1..80: mol_type = other DNA
gtgtgtattgtaaaaaggaattatgtagagcagatgtatataatgtagcatttaccgaaattaggattgtatatagggat

SEQ ID NO: 13834 - DNA, 80 bp, synthetic construct
  misc_feature 1..80: note = Synthetic: >KF436887.1-cand-270-349
  source 1..80: mol_type = other DNA
atgcagtatgcaaacaatgtttactgttttattcaaaaattagagagtatagacgttatagcaggtctgtgtatggtact

SEQ ID NO: 13835 - DNA, 80 bp, synthetic construct
  misc_feature 1..80: note = Synthetic: >KF436887.1-cand-350-429
  source 1..80: mol_type = other DNA
acattagaggcaattactaaaaaaagcttatatgatttattgataaggtgtcatagatgtcaaagaccacttgggcctga

SEQ ID NO: 13836 - DNA, 80 bp, synthetic construct
  misc_feature 1..80: note = Synthetic: >KF436887.1-cand-410-489
  source 1..80: mol_type = other DNA
caaagaccacttgggcctgaagaaaagcaaaaattggtggacgaaaaaaaaaggttccatgaaatagcgggacgttggac

SEQ ID NO: 13837 - DNA, 80 bp, synthetic construct
  misc_feature 1..80: note = Synthetic: >KF436887.1-cand-510-589
  source 1..80: mol_type = other DNA
ggcaacgtacacgacaacgtaacgaaacccaagtgtaataaagccatgcgtggtaatgtaccacaattaaaagaggtagt

SEQ ID NO: 13838 - DNA, 80 bp, synthetic construct
  misc_feature 1..80: note = Synthetic: >KF436887.1-cand-590-669
  source 1..80: mol_type = other DNA
attgcatttaacaccacagactgaaattgacttgcaatgctacgagcaatttgacagctcagaggaggaggatgaagtag

SEQ ID NO: 13839 - DNA, 80 bp, synthetic construct
  misc_feature 1..80: note = Synthetic: >KF436887.1-cand-670-749
  source 1..80: mol_type = other DNA
ataatatgcgtgaccagctaccagaaagacgggctggacaggctacgtgttacagaattgaagctccgtgttgcaggtgt

SEQ ID NO: 13840 - DNA, 80 bp, synthetic construct
  misc_feature 1..80: note = Synthetic: >KF436887.1-cand-750-829
  source 1..80: mol_type = other DNA
tcaagtgtagtacaactggcagtggaaagcagtgaagacaaccttcgcgttgtacagcagatgttaatgggcgaactgag

SEQ ID NO: 13841 - DNA, 80 bp, synthetic construct
  misc_feature 1..80: note = Synthetic: >KF436887.1-cand-810-889
  source 1..80: mol_type = other DNA
atgttaatgggcgaactgagcctggtttgcccgtgttgtgcgaacaactagcaacggcgatggactgtgaaggtacagag

SEQ ID NO: 13842 - DNA, 80 bp, synthetic construct
  misc_feature 1..80: note = Synthetic: >KF436887.1-cand-910-989
  source 1..80: mol_type = other DNA
tgggtggttttttgttgaagcaatagtagaaaaaaaaacaggagataatgtttcggatgatgaggatgaaaatgcagatg

SEQ ID NO: 13843 - DNA, 80 bp, synthetic construct
  misc_feature 1..80: note = Synthetic: >KF436887.1-cand-990-1069
  source 1..80: mol_type = other DNA
atacaggatctgatttaataaactttatagatagtgaaactagtatttgcagtcaggcggaacaggagacagcacgggcg

SEQ ID NO: 13844 - DNA, 80 bp, synthetic construct
  misc_feature 1..80: note = Synthetic: >KF436887.1-cand-2380-2459
  source 1..80: mol_type = other DNA
agcattgttagatgatgctacgtatgggtgttggacatatattgatcagtatttaagaaactttttagatggtaatccat

SEQ ID NO: 13845 - DNA, 80 bp, synthetic construct
  misc_feature 1..80: note = Synthetic: >KF436887.1-cand-2460-2539
  source 1..80: mol_type = other DNA
gtagtatagatagaaaacataggagtttaatacaattagtatgtccaccattactaataacgtcaaacataaatccacaa

SEQ ID NO: 13846 - DNA, 80 bp, synthetic construct
  misc_feature 1..80: note = Synthetic: >KF436887.1-cand-2540-2619
  source 1..80: mol_type = other DNA
gaagatgcaaacctaatgtatttacatacaagggtaacagtattaaagtttttaaatacatttccatttgataacaatgg

SEQ ID NO: 13847 - DNA, 80 bp, synthetic construct
  misc_feature 1..80: note = Synthetic: >KF436887.1-cand-2620-2699
  source 1..80: mol_type = other DNA
gaatgctgtgtatacattgaatgatgaaaattggaaaaattttttttccactacatggtccagattagatttggaggagg

SEQ ID NO: 13848 - DNA, 80 bp, synthetic construct
  misc_feature 1..80: note = Synthetic: >KF436887.1-cand-2700-2779
  source 1..80: mol_type = other DNA
aagaggacaaagaaaatggagaccctatgccaccgtttaaatgtgtgccaggagaaaatactagactgttatgaactgga

SEQ ID NO: 13849 - DNA, 80 bp, synthetic construct
  misc_feature 1..80: note = Synthetic: >KF436887.1-cand-2780-2859
  source 1..80: mol_type = other DNA
cagtgataaattagtagatcaaattaactattggacattgttacgatatgaagctgctatgttttatgcagcacgggaaa

SEQ ID NO: 13850 - DNA, 80 bp, synthetic construct
  misc_feature 1..80: note = Synthetic: >KF436887.1-cand-2860-2939
  source 1..80: mol_type = other DNA
gaaacttacagacaatcaatcaccaggtagtaccagcaacaacagtatcaaaacaaaaggcctgtcaagcaattgaaatg

SEQ ID NO: 13851 - DNA, 80 bp, synthetic construct
  misc_feature 1..80: note = Synthetic: >KF436887.1-cand-2940-3019
  source 1..80: mol_type = other DNA
cacatggccttacaatcgcttaacaaatcagactataacatggaaccatggacaatgcgggaaacatgttatgaactatg

SEQ ID NO: 13852 - DNA, 80 bp, synthetic construct
  misc_feature 1..80: note = Synthetic: >KF436887.1-cand-3020-3099
  source 1..80: mol_type = other DNA
gtgtgtggctcccaagcaatgtttcaaaaaggagggcataactgtaacagttatatttgatggaaataaggacaatgcaa

SEQ ID NO: 13853 - DNA, 80 bp, synthetic construct
  misc_feature 1..80: note = Synthetic: >KF436887.1-cand-3100-3179
  source 1..80: mol_type = other DNA
tggactatacaagctggaaatttgtatatatatatgataatgataagtgggtaaagacagatggaaatgtggactatacg

SEQ ID NO: 13854 - DNA, 80 bp, synthetic construct
  misc_feature 1..80: note = Synthetic: >KF436887.1-cand-3170-3249
  source 1..80: mol_type = other DNA
ggactatacgggtatatattacactgtaaattcaaaaaaagagtattatgtacagtttaaagatgaagccaaaatatatg

SEQ ID NO: 13855 - DNA, 80 bp, synthetic construct
  misc_feature 1..80: note = Synthetic: >KF436887.1-cand-3270-3349
  source 1..80: mol_type = other DNA
tataagtgtggtactgtaataacatgtcctgaatatgtatctagtacctgcagtgacgcgttatccactactacaactgt

SEQ ID NO: 13856 - DNA, 80 bp, synthetic construct
  misc_feature 1..80: note = Synthetic: >KF436887.1-cand-3350-3429
  source 1..80: mol_type = other DNA
tgaacaactatcaaacaccccaacgaccaatccccttaccacctgcgtgggcgccaaagaagcccagacacaacagcgaa

SEQ ID NO: 13857 - DNA, 80 bp, synthetic construct
  misc_feature 1..80: note = Synthetic: >KF436887.1-cand-3440-3519
  source 1..80: mol_type = other DNA
acttactgagcccgactcctccacaatctccccactgtccgtggacaatacaaacaaccaaatacactgtggaagtggaa

SEQ ID NO: 13858 - DNA, 80 bp, synthetic construct
  misc_feature 1..80: note = Synthetic: >KF436887.1-cand-3520-3599
  source 1..80: mol_type = other DNA
gcactaacgctggagggcacccaagtgcaactcagactgcgtttatagtacatttaaaaggtgatacaaattgtttaaaa

SEQ ID NO: 13859 - DNA, 80 bp, synthetic construct
  misc_feature 1..80: note = Synthetic: >KF436887.1-cand-3600-3679
  source 1..80: mol_type = other DNA
tgttttagatacagatttacaaaacacaaagggttatatacaaacgtatcctcaacctggcattggaccagtaatactaa

SEQ ID NO: 13860 - DNA, 80 bp, synthetic construct
  misc_feature 1..80: note = Synthetic: >NC_001357.1-cand-5310-5389
  source 1..80: mol_type = other DNA
gcagtgcctgtaccatcgcgttctactacctcctttgcattttttaaatattcgcccactatatcttctgcctcttccta

SEQ ID NO: 13861 - DNA, 80 bp, synthetic construct
  misc_feature 1..80: note = Synthetic: >NC_001357.1-cand-5390-5469
  source 1..80: mol_type = other DNA
tagtaatgtaacggtccctttaacctcctcttgggatgtgcctgtatacacgggtcctgatattacattaccatctacta

SEQ ID NO: 13862 - DNA, 80 bp, synthetic construct
  misc_feature 1..80: note = Synthetic: >NC_001357.1-cand-5470-5549
  source 1..80: mol_type = other DNA
cctctgtatggcccattgtatcacccacggcccctgcctctacacagtatattggtatacatggtacacattattatttg

SEQ ID NO: 13863 - DNA, 80 bp, synthetic construct
  misc_feature 1..80: note = Synthetic: >NC_001357.1-cand-5630-5709
  source 1..80: mol_type = other DNA
acaataccgtatatcttccacctccttctgtggcaagagttgtaaataccgatgattatgtgactcccacaagcatattt

SEQ ID NO: 13864 - DNA, 80 bp, synthetic construct
  misc_feature 1..80: note = Synthetic: >NC_001357.1-cand-5710-5789
  source 1..80: mol_type = other DNA
tatcatgctggcagctctagattattaactgttggtaatccatattttagggttcctgcaggtggtggcaataagcagga

SEQ ID NO: 13865 - DNA, 80 bp, synthetic construct
  misc_feature 1..80: note = Synthetic: >NC_001357.1-cand-5790-5869
  source 1..80: mol_type = other DNA
tattcctaaggtttctgcataccaatatagagtatttagggtgcagttacctgacccaaataaatttggtttacctgata

SEQ ID NO: 13866 - DNA, 80 bp, synthetic construct
  misc_feature 1..80: note = Synthetic: >NC_001357.1-cand-5870-5949
  source 1..80: mol_type = other DNA
ctagtatttataatcctgaaacacaacgtttagtgtgggcctgtgctggagtggaaattggccgtggtcagcctttaggt

SEQ ID NO: 13867 - DNA, 80 bp, synthetic construct
  misc_feature 1..80: note = Synthetic: >NC_001357.1-cand-5950-6029
  source 1..80: mol_type = other DNA
gttggccttagtgggcatccattttataataaattagatgacactgaaagttcccatgccgccacgtctaatgtttctga

SEQ ID NO: 13868 - DNA, 80 bp, synthetic construct
  misc_feature 1..80: note = Synthetic: >NC_001357.1-cand-6020-6099
  source 1..80: mol_type = other DNA
atgtttctgaggacgttagggacaatgtgtctgtagattataagcagacacagttatgtattttgggctgtgcccctgct

SEQ ID NO: 13869 - DNA, 80 bp, synthetic construct
  misc_feature 1..80: note = Synthetic: >NC_001357.1-cand-6130-6209
  source 1..80: mol_type = other DNA
tgtaaatcgcgtcctttatcacagggcgattgcccccctttagaacttaaaaacacagttttggaagatggtgatatggt

SEQ ID NO: 13870 - DNA, 80 bp, synthetic construct
  misc_feature 1..80: note = Synthetic: >NC_001357.1-cand-6210-6289
  source 1..80: mol_type = other DNA
agatactggatatggtgccatggactttagtacattgcaagatactaaatgtgaggtaccattggatatttgtcagtcta

SEQ ID NO: 13871 - DNA, 80 bp, synthetic construct
  misc_feature 1..80: note = Synthetic: >NC_001357.1-cand-6250-6329
  source 1..80: mol_type = other DNA
gatactaaatgtgaggtaccattggatatttgtcagtctatttgtaaatatcctgattatttacaaatgtctgcagatcc

SEQ ID NO: 13872 - DNA, 80 bp, synthetic construct
  misc_feature 1..80: note = Synthetic: >NC_001357.1-cand-6370-6449
  source 1..80: mol_type = other DNA
ctttttgctaggcatttttggaatagagcaggtactatgggtgacactgtgcctcaatccttatatattaaaggcacagg

SEQ ID NO: 13873 - DNA, 80 bp, synthetic construct
  misc_feature 1..80: note = Synthetic: >NC_001357.1-cand-6460-6539
  source 1..80: mol_type = other DNA
tcacctggcagctgtgtgtattctccctctccaagtggctctattgttacctctgactcccagttgtttaataaaccata

SEQ ID NO: 13874 - DNA, 80 bp, synthetic construct
  misc_feature 1..80: note = Synthetic: >NC_001357.1-cand-6540-6619
  source 1..80: mol_type = other DNA
ttggttacataaggcacagggtcataacaatggtgtttgctggcataatcaattatttgttactgtggtagataccactc

SEQ ID NO: 13875 - DNA, 80 bp, synthetic construct
  misc_feature 1..80: note = Synthetic: >NC_001357.1-cand-6620-6699
  source 1..80: mol_type = other DNA
ccagtaccaatttaacaatatgtgcttctacacagtctcctgtacctgggcaatatgatgctaccaaatttaagcagtat

SEQ ID NO: 13876 - DNA, 80 bp, synthetic construct
  misc_feature 1..80: note = Synthetic: >NC_001545.2-cand-0-79
  source 1..80: mol_type = other DNA
ggaagctatcggacctcgcttaggactcccattcccatggagaaactcctagatgaggttcttgcccccggtgggcctta

SEQ ID NO: 13877 - DNA, 80 bp, synthetic construct
  misc_feature 1..80: note = Synthetic: >NC_001545.2-cand-80-159
  source 1..80: mol_type = other DNA
taacttaaccgtcggcagttgggtaagagaccacgtccgatcaattgtcgagggcgcgtgggaagtgcgcgatgttgtta

SEQ ID NO: 13878 - DNA, 80 bp, synthetic construct
  misc_feature 1..80: note = Synthetic: >NC_001545.2-cand-160-239
  source 1..80: mol_type = other DNA
ccgctgcccaaaagcgggccatcgtagccgtgatacccagacctgtgttcacgcagatgcaggtcagtgatcacccagca

SEQ ID NO: 13879 - DNA, 80 bp, synthetic construct
  misc_feature 1..80: note = Synthetic: >NC_001545.2-cand-200-279
  source 1..80: mol_type = other DNA
acctgtgttcacgcagatgcaggtcagtgatcacccagcactccacgcaatttcgcggtatacccgccgccattggatcg

SEQ ID NO: 13880 - DNA, 80 bp, synthetic construct
  misc_feature 1..80: note = Synthetic: >NC_001545.2-cand-320-399
  source 1..80: mol_type = other DNA
aagcccgggcctgctccgcgaggtcgctcgcgttgagcgccgctgggtcgcactgtgcctccacaggacggcacgcaaac

SEQ ID NO: 13881 - DNA, 80 bp, synthetic construct
  misc_feature 1..80: note = Synthetic: >NC_001545.2-cand-400-479
  source 1..80: mol_type = other DNA
tcgccaccgccctggccgagacggccagcgaggcgtggcacgctgactacgtgtgcgcgctgcgtggcgcaccgagcggc

SEQ ID NO: 13882 - DNA, 80 bp, synthetic construct
  misc_feature 1..80: note = Synthetic: >NC_001545.2-cand-480-559
  source 1..80: mol_type = other DNA
cccttctacgtccaccctgaggacgtcccgcacggcggtcgcgccgtggcggacagatgcttgctctactacacacccat

SEQ ID NO: 13883 - DNA, 80 bp, synthetic construct
  misc_feature 1..80: note = Synthetic: >NC_001545.2-cand-560-639
  source 1..80: mol_type = other DNA
gcagatgtgcgagctgatgcgtaccattgacgccaccctgctcgtggcggttgacttgtggccggtcgcccttgcggccc

SEQ ID NO: 13884 - DNA, 80 bp, synthetic construct
  misc_feature 1..80: note = Synthetic: >NC_001545.2-cand-640-719
  source 1..80: mol_type = other DNA
acgtcggcgacgactgggacgacctgggcattgcctggcatctcgaccatgacggcggttgccccgccgattgccgcgga

SEQ ID NO: 13885 - DNA, 80 bp, synthetic construct
  misc_feature 1..80: note = Synthetic: >NC_001545.2-cand-720-799
  source 1..80: mol_type = other DNA
gccggcgctgggcccacgcccggctacacccgcccctgcaccacacgcatctaccaagtcctgccggacaccgcccaccc

SEQ ID NO: 13886 - DNA, 80 bp, synthetic construct
  misc_feature 1..80: note = Synthetic: >NC_001545.2-cand-800-879
  source 1..80: mol_type = other DNA
cgggcgcctctaccggtgcgggccccgcctgtggacgcgcgattgcgccgtggccgaactctcatgggaggttgcccaac

SEQ ID NO: 13887 - DNA, 80 bp, synthetic construct
  misc_feature 1..80: note = Synthetic: >NC_001545.2-cand-880-959
  source 1..80: mol_type = other DNA
actgcgggcaccaggcgcgcgtgcgcgccgtgcgatgcaccctccctatccgccacgtgcgcagcctccaacccagcgcg

SEQ ID NO: 13888 - DNA, 80 bp, synthetic construct
  misc_feature 1..80: note = Synthetic: >NC_001545.2-cand-960-1039
  source 1..80: mol_type = other DNA
cgggtccgactcccggacctcgtccatctcgccgaggtgggccggtggcggtggttcagcctcccccgccccgtgttcca

SEQ ID NO: 13889 - DNA, 80 bp, synthetic construct
  misc_feature 1..80: note = Synthetic: >NC_001545.2-cand-1040-1119
  source 1..80: mol_type = other DNA
gcgcatgctgtcctactgcaagaccctgagccccgacgcgtactacagcgagcgcgtgttcaagttcaagaacgccctgt

SEQ ID NO: 13890 - DNA, 80 bp, synthetic construct
  misc_feature 1..80: note = Synthetic: >NC_001545.2-cand-1080-1159
  source 1..80: mol_type = other DNA
tactacagcgagcgcgtgttcaagttcaagaacgccctgtgccacagcatcacgctcgcgggcaatgtgctgcaagaggg

SEQ ID NO: 13891 - DNA, 80 bp, synthetic construct
  misc_feature 1..80: note = Synthetic: >NC_001545.2-cand-1160-1239
  source 1..80: mol_type = other DNA
gtggaagggcacgtgcgccgaggaagacgcgctgtgcgcatacgtagccttccgcgcgtggcagtctaacgccaggttgg

SEQ ID NO: 13892 - DNA, 80 bp, synthetic construct
  misc_feature 1..80: note = Synthetic: >NC_001611.1-cand-139690-139769
  source 1..80: mol_type = other DNA
caaacctaagacaaattatgctggttatgcttgctgcgtaatatgcggtctaattgttggaattatttttacagcgacac

SEQ ID NO: 13893 - DNA, 80 bp, synthetic construct
  misc_feature 1..80: note = Synthetic: >NC_001611.1-cand-139770-139849
  source 1..80: mol_type = other DNA
tattaaaagctgtagaacgtaaattaattcatacaccattaatagataaaacgataaaagatgcatatattagagaagat

SEQ ID NO: 13894 - DNA, 80 bp, synthetic construct
  misc_feature 1..80: note = Synthetic: >NC_001611.1-cand-139850-139929
  source 1..80: mol_type = other DNA
tgtcctactgactgaataagctatataataaatgtatacatttatcgactaatcaaaaaacctgggaggaaggacgtaat

SEQ ID NO: 13895 - DNA, 80 bp, synthetic construct
  misc_feature 1..80: note = Synthetic: >NC_001611.1-cand-139930-140009
  source 1..80: mol_type = other DNA
gcatgcaaagctctaaatccaaattcggatctaattaatatagagactctaaacgagttaagttttttaagaagccttag

SEQ ID NO: 13896 - DNA, 80 bp, synthetic construct
  misc_feature 1..80: note = Synthetic: >NC_001611.1-cand-140000-140079
  source 1..80: mol_type = other DNA
gaagccttagaagaggctattgggtaggagaattcaaaatattaaaccagacaaccacgtataattttatagctaaaaat

SEQ ID NO: 13897 - DNA, 80 bp, synthetic construct
  misc_feature 1..80: note = Synthetic: >NC_001611.1-cand-140080-140159
  source 1..80: mol_type = other DNA
gtcacgaagaatggaactaaaaaacgaaatatatttgtagtacaacgaatactcccaaactgcattcatgttacactata

SEQ ID NO: 13898 - DNA, 80 bp, synthetic construct
  misc_feature 1..80: note = Synthetic: >NC_001611.1-cand-140160-140239
  source 1..80: mol_type = other DNA
taacaattacactacatttttatcataacactactttggttagatgttttagaaaaaaaatatcgccgtaccgttcttgt

SEQ ID NO: 13899 - DNA, 80 bp, synthetic construct
  misc_feature 1..80: note = Synthetic: >NC_001611.1-cand-140240-140319
  source 1..80: mol_type = other DNA
ttttataaaaataacaattaacaattatcaaattttttctttaatattttacgtggttgaccattcgtggtggtaaaata

SEQ ID NO: 13900 - DNA, 80 bp, synthetic construct
  misc_feature 1..80: note = Synthetic: >NC_001611.1-cand-140400-140479
  source 1..80: mol_type = other DNA
cgcaatagtcagactgtagttctattatgcttcctacattaggaggaacagttttaaagtctcttggttttaatctatta

SEQ ID NO: 13901 - DNA, 80 bp, synthetic construct
  misc_feature 1..80: note = Synthetic: >NC_001611.1-cand-140480-140559
  source 1..80: mol_type = other DNA
ccgttagtttttatgaaatcctttgttttatccacttcacattttaaataaatgtccactatacattcttctgttaattt

SEQ ID NO: 13902 - DNA, 80 bp, synthetic construct
  misc_feature 1..80: note = Synthetic: >NC_001611.1-cand-140560-140639
  source 1..80: mol_type = other DNA
tactagatcgtcatatgtcatagaatttataggttccatagtccatggatccaaactagtaaacttcgcgtatacagtat

SEQ ID NO: 13903 - DNA, 80 bp, synthetic construct
  misc_feature 1..80: note = Synthetic: >NC_001611.1-cand-140690-140769
  source 1..80: mol_type = other DNA
agatcaacagaaatatttaatcctccgtttgatacagatgcaccatatttatggatttcggattcacacgttgtttgtct

SEQ ID NO: 13904 - DNA, 80 bp, synthetic construct
  misc_feature 1..80: note = Synthetic: >NC_001611.1-cand-140800-140879
  source 1..80: mol_type = other DNA
aacttctattcccatatattctttattatcagaatcgcataccgatttatcatcatacactgtttgaaaactaaatggta

SEQ ID NO: 13905 - DNA, 80 bp, synthetic construct
  misc_feature 1..80: note = Synthetic: >NC_001611.1-cand-140880-140959
  source 1..80: mol_type = other DNA
tacacatcaaaataacaaatactaacgagtacattctgcaatattgttatcgtaattggaaaattagtgttcgggtgagt

SEQ ID NO: 13906 - DNA, 80 bp, synthetic construct
  misc_feature 1..80: note = Synthetic: >NC_001611.1-cand-140960-141039
  source 1..80: mol_type = other DNA
tggattatgtgagtactggattgcatattatattttatattttatattttatattttgtaataagaatagaatgctaatg

SEQ ID NO: 13907 - DNA, 80 bp, synthetic construct
  misc_feature 1..80: note = Synthetic: >NC_001611.1-cand-141040-141119
  source 1..80: mol_type = other DNA
tcaagtttattccaataaatgacttattaaaaaacatatataataaataacaatggctgaatggcataaaattatcgagg

SEQ ID NO: 13908 - DNA, 80 bp, synthetic construct
  misc_feature 1..80: note = Synthetic: >NC_001611.1-cand-146900-146979
  source 1..80: mol_type = other DNA
caaattataaaaatatatagtataatatttaaacaatctcagaaagatatgctacaagatttaggatacggatatatagg

SEQ ID NO: 13909 - DNA, 80 bp, synthetic construct
  misc_feature 1..80: note = Synthetic: >NC_001611.1-cand-146980-147059
  source 1..80: mol_type = other DNA
agacactattagtacattcttcaaagagaacacagaaatccgtccaagaaataaaagcattttaactttagaagacgtgg

SEQ ID NO: 13910 - DNA, 80 bp, synthetic construct
  misc_feature 1..80: note = Synthetic: >NC_001611.1-cand-147060-147139
  source 1..80: mol_type = other DNA
atagtttcttaactacattatcatccataactaaagaatcgcatcaaataaaattattgactgacatcgcatccgtttgt

SEQ ID NO: 13911 - DNA, 80 bp, synthetic construct
  misc_feature 1..80: note = Synthetic: >NC_001611.1-cand-147300-147379
  source 1..80: mol_type = other DNA
atctagactctatatctgtttctgttatgactccaattaatcccatgttagcggaatcgtgtgattctgtcaataaggca

SEQ ID NO: 13912 - DNA, 80 bp, synthetic construct
  misc_feature 1..80: note = Synthetic: >NC_001611.1-cand-147390-147469
  source 1..80: mol_type = other DNA
ttccatcaggaatgtttgctgaagtcaaatacgatggcgagagagtacaagttcataaaaataataacgagtttgccttt

SEQ ID NO: 13913 - DNA, 80 bp, synthetic construct
  misc_feature 1..80: note = Synthetic: >NC_001611.1-cand-147710-147789
  source 1..80: mol_type = other DNA
gacattccattgtacaaacgaagatcttttctcaaagatgttatggtcgagatacccaatagaatagtattctcagagtt

SEQ ID NO: 13914 - DNA, 80 bp, synthetic construct
  misc_feature 1..80: note = Synthetic: >NC_001611.1-cand-148030-148109
  source 1..80: mol_type = other DNA
gggttgttacgatgatgaatccggtaaatggaagacggtaactaaatgttcaggacatgatgataatacgttaagggttt

SEQ ID NO: 13915 - DNA, 80 bp, synthetic construct
  misc_feature 1..80: note = Synthetic: >NC_001611.1-cand-148190-148269
  source 1..80: mol_type = other DNA
attcccgattttgtagtagaggatccgaaacaatctcaaatatgggaaatttcaggagcagagtttacatcttccaagtc

SEQ ID NO: 13916 - DNA, 80 bp, synthetic construct
  misc_feature 1..80: note = Synthetic: >NC_001611.1-cand-148350-148429
  source 1..80: mol_type = other DNA
atctaaacgatttagtaaatttgactaaatcttaatagttacatacaaactgaaaattaaaataacactatttagttggt

SEQ ID NO: 13917 - DNA, 80 bp, synthetic construct
  misc_feature 1..80: note = Synthetic: >NC_001611.1-cand-148430-148509
  source 1..80: mol_type = other DNA
gatcgccatggatggtgttattgtatactgtctaaacgcgttagtaaaacatggtgaggaaataaatcatataaaaaatg

SEQ ID NO: 13918 - DNA, 80 bp, synthetic construct
  misc_feature 1..80: note = Synthetic: >NC_001611.1-cand-148670-148749
  source 1..80: mol_type = other DNA
aatatccagatttgctaatttgataaagatagatgatgatgacaagactcctaccggtgtatataattattttaaaccta

SEQ ID NO: 13919 - DNA, 80 bp, synthetic construct
  misc_feature 1..80: note = Synthetic: >NC_001611.1-cand-148750-148829
  source 1..80: mol_type = other DNA
aagatgctatttctgttattatatccataggaaaggataaagatgtctgtgaactattaatcgcatccgataaagcgtgt

SEQ ID NO: 13920 - DNA, 80 bp, synthetic construct
  misc_feature 1..80: note = Synthetic: >NC_001611.1-cand-148830-148909
  source 1..80: mol_type = other DNA
gcgtgtatagagttaaattcatataaagtagccattcttcccatgaatgtttccttctttaccaaaggaaatgcgtcatt

SEQ ID NO: 13921 - DNA, 80 bp, synthetic construct
  misc_feature 1..80: note = Synthetic: >NC_001611.1-cand-148990-149069
  source 1..80: mol_type = other DNA
gacacaaacgtcttcatggcgagattccgagttccaattggttcaagttttatataagtataaagtccaactattgttct

SEQ ID NO: 13922 - DNA, 80 bp, synthetic construct
  misc_feature 1..80: note = Synthetic: >NC_001611.1-cand-149070-149149
  source 1..80: mol_type = other DNA
atattatatatggtagttgatggatctgtgatgtatgcaatagctgataataaaactcacacaattattagcaaaaatat

SEQ ID NO: 13923 - DNA, 80 bp, synthetic construct
  misc_feature 1..80: note = Synthetic: >NC_001611.1-cand-149150-149229
  source 1..80: mol_type = other DNA
attagacaatactacaattaacgatgagtgcagatgctgttattttgaaccacagattaagattctcgatagagatgaga

SEQ ID NO: 13924 - DNA, 80 bp, synthetic construct
  misc_feature 1..80: note = Synthetic: >NC_001672.1-cand-700-779
  source 1..80: mol_type = other DNA
gtacggacgctgtgggaaacaggaaggctcacggacaaggcgctcagtgctgatcccatcccatgctcagggagagctga

SEQ ID NO: 13925 - DNA, 80 bp, synthetic construct
  misc_feature 1..80: note = Synthetic: >NC_001672.1-cand-800-879
  source 1..80: mol_type = other DNA
ctagaaggagactcgctgcgaacacaccttactagagttgagggatgggtctggaagaacaagctacttgccttggcaat

SEQ ID NO: 13926 - DNA, 80 bp, synthetic construct
  misc_feature 1..80: note = Synthetic: >NC_001672.1-cand-880-959
  source 1..80: mol_type = other DNA
ggttaccgttgtgtggttgaccctggagagtgtggtgaccagggttgccgttcttgttgtgctcctgtgtttggcaccgg

SEQ ID NO: 13927 - DNA, 80 bp, synthetic construct
  misc_feature 1..80: note = Synthetic: >NC_001672.1-cand-930-1009
  source 1..80: mol_type = other DNA
ttcttgttgtgctcctgtgtttggcaccggtttacgcttcgcgttgcacacacttggaaaacagggactttgtgactggt

SEQ ID NO: 13928 - DNA, 80 bp, synthetic construct
  misc_feature 1..80: note = Synthetic: >NC_001672.1-cand-1080-1159
  source 1..80: mol_type = other DNA
agccttcaatggatgtgtggcttgacgccatttaccaggagaaccctgctaagacacgtgagtactgtttacacgccaag

SEQ ID NO: 13929 - DNA, 80 bp, synthetic construct
  misc_feature 1..80: note = Synthetic: >NC_001672.1-cand-1120-1199
  source 1..80: mol_type = other DNA
gaaccctgctaagacacgtgagtactgtttacacgccaagttgtcggacactaaggttgcagccagatgcccaacaatgg

SEQ ID NO: 13930 - DNA, 80 bp, synthetic construct
  misc_feature 1..80: note = Synthetic: >NC_001672.1-cand-1190-1269
  source 1..80: mol_type = other DNA
ccaacaatgggaccagccactttggctgaagaacaccagggtggcacagtgtgtaagagagatcagagtgatcgaggctg

SEQ ID NO: 13931 - DNA, 80 bp, synthetic construct
  misc_feature 1..80: note = Synthetic: >NC_001672.1-cand-1280-1359
  source 1..80: mol_type = other DNA
tgtggactgtttggaaagggtagcattgtggcctgtgtcaaggcggcttgtgaggcaaaaaagaaagccacaggacatgt

SEQ ID NO: 13932 - DNA, 80 bp, synthetic construct
  misc_feature 1..80: note = Synthetic: >NC_001672.1-cand-1370-1449
  source 1..80: mol_type = other DNA
aacaaaatagtgtacacggtcaaagtcgaaccacacacgggagactatgttgccgcaaacgagacacatagtgggaggaa

SEQ ID NO: 13933 - DNA, 80 bp, synthetic construct
  misc_feature 1..80: note = Synthetic: >NC_001672.1-cand-1450-1529
  source 1..80: mol_type = other DNA
gacggcatccttcacaatttcttcagagaaaaccattttgactatgggtgagtatggagatgtgtctttgttgtgcaggg

SEQ ID NO: 13934 - DNA, 80 bp, synthetic construct
  misc_feature 1..80: note = Synthetic: >NC_001672.1-cand-1530-1609
  source 1..80: mol_type = other DNA
tcgctagtggcgttgacttggcccagaccgtcatccttgagcttgacaagacagtggaacaccttccaacggcttggcag

SEQ ID NO: 13935 - DNA, 80 bp, synthetic construct
  misc_feature 1..80: note = Synthetic: >NC_001672.1-cand-1610-1689
  source 1..80: mol_type = other DNA
gtccatagggactggttcaatgatctggctctgccatggaaacatgagggagcgcaaaactggaacaacgcagaaagact

SEQ ID NO: 13936 - DNA, 80 bp, synthetic construct
  misc_feature 1..80: note = Synthetic: >NC_001672.1-cand-1620-1699
  source 1..80: mol_type = other DNA
actggttcaatgatctggctctgccatggaaacatgagggagcgcaaaactggaacaacgcagaaagactggttgaattt

SEQ ID NO: 13937 - DNA, 80 bp, synthetic construct
  misc_feature 1..80: note = Synthetic: >NC_001672.1-cand-1780-1859
  source 1..80: mol_type = other DNA
tcctgtggcacacattgagggaaccaagtaccacctgaagagtggccacgtgacctgcgaagtgggactggaaaaactga

SEQ ID NO: 13938 - DNA, 80 bp, synthetic construct
  misc_feature 1..80: note = Synthetic: >NC_001672.1-cand-1850-1929
  source 1..80: mol_type = other DNA
gaaaaactgaagatgaaaggtcttacgtacacaatgtgtgacaaaacaaagttcacatggaagagagctccaacagacag

SEQ ID NO: 13939 - DNA, 80 bp, synthetic construct
  misc_feature 1..80: note = Synthetic: >NC_001672.1-cand-1930-2009
  source 1..80: mol_type = other DNA
tgggcatgatacagtggtcatggaagtcacattctctggaacaaagccctgtaggatcccagtcagggcagtggcacatg

SEQ ID NO: 13940 - DNA, 80 bp, synthetic construct
  misc_feature 1..80: note = Synthetic: >NC_001918.1-cand-6570-6649
  source 1..80: mol_type = other DNA
ggccaaatcactcaatttgccactacccaacaatctctcattgttcccactgctgaagtccggcctggcgtcaacgtcaa

SEQ ID NO: 13941 - DNA, 80 bp, synthetic construct
  misc_feature 1..80: note = Synthetic: >NC_001918.1-cand-6650-6729
  source 1..80: mol_type = other DNA
ccggatgtcccgcttgcacccctctcccgcctacggtgccttccctgtcaagaaacaacccgctcccctcaagcgcaacg

SEQ ID NO: 13942 - DNA, 80 bp, synthetic construct
  misc_feature 1..80: note = Synthetic: >NC_001918.1-cand-6730-6809
  source 1..80: mol_type = other DNA
acaagcgcctgcaggagggcgtcgatcttgacacccagctcttcctcaaacacggcaaaggcgacgtcaccgggccctgg

SEQ ID NO: 13943 - DNA, 80 bp, synthetic construct
  misc_feature 1..80: note = Synthetic: >NC_001918.1-cand-6810-6889
  source 1..80: mol_type = other DNA
cccggtctcgaagctgctgctgacctctacttctccaccttccccacttcccttccagtcctcacccaggaacaggccat

SEQ ID NO: 13944 - DNA, 80 bp, synthetic construct
  misc_feature 1..80: note = Synthetic: >NC_001918.1-cand-6890-6969
  source 1..80: mol_type = other DNA
ccatggaacaccaaacatggagggcctggacatgggccaggcggctggatacccctggaacacccttgggcgctcccggc

SEQ ID NO: 13945 - DNA, 80 bp, synthetic construct
  misc_feature 1..80: note = Synthetic: >NC_001918.1-cand-6970-7049
  source 1..80: mol_type = other DNA
gatccctctttgacgaggttgaaccgggagtgttcgtccccaaacccgaactccaagctgaaatcaaccagacacttgaa

SEQ ID NO: 13946 - DNA, 80 bp, synthetic construct
  misc_feature 1..80: note = Synthetic: >NC_001918.1-cand-7050-7129
  source 1..80: mol_type = other DNA
gacccggactacgtgtactccaccttcctcaaggatgaactcagaccaacggctaaggttgaacagggactgaccagaat

SEQ ID NO: 13947 - DNA, 80 bp, synthetic construct
  misc_feature 1..80: note = Synthetic: >NC_001918.1-cand-7120-7199
  source 1..80: mol_type = other DNA
tgaccagaatcgtcgaagctgctcccatccatgctatcgtcgctggccggatgctcctcggtggtctcatcgactacatg

SEQ ID NO: 13948 - DNA, 80 bp, synthetic construct
  misc_feature 1..80: note = Synthetic: >NC_001918.1-cand-7210-7289
  source 1..80: mol_type = other DNA
ccggcgagcacggtagtgcggttggttgcaacccagacgttcactggacttccttcttttacgccttcagcgagttctct

SEQ ID NO: 13949 - DNA, 80 bp, synthetic construct
  misc_feature 1..80: note = Synthetic: >NC_001918.1-cand-7290-7369
  source 1..80: mol_type = other DNA
caggtatacgatctggactacaagtgttttgatgctacccttccttctgctgtcttcacccttgttgctgaccatcttac

SEQ ID NO: 13950 - DNA, 80 bp, synthetic construct
  misc_feature 1..80: note = Synthetic: >NC_001918.1-cand-7370-7449
  source 1..80: mol_type = other DNA
ccgcatcaccggagatccccgcgtcggtcgctacatccactccatccgccattcacaccacatttatggcaaccggatgt

SEQ ID NO: 13951 - DNA, 80 bp, synthetic construct
  misc_feature 1..80: note = Synthetic: >NC_001918.1-cand-7470-7549
  source 1..80: mol_type = other DNA
ccctccggttgtgtggccacctccatcctcaacaccatcatcaacaacatctgtgtcctctctgccctcatccaacaccc

SEQ ID NO: 13952 - DNA, 80 bp, synthetic construct
  misc_feature 1..80: note = Synthetic: >NC_001918.1-cand-7530-7609
  source 1..80: mol_type = other DNA
tctgccctcatccaacaccctgatttctctccctcccgcttccacatcctggcgtacggtgacgacgtcatctacgctac

SEQ ID NO: 13953 - DNA, 80 bp, synthetic construct
  misc_feature 1..80: note = Synthetic: >NC_001918.1-cand-7610-7689
  source 1..80: mol_type = other DNA
ggaaccccccatccatccttccttccttcgggagttctaccagaaacacacccctctggtggtcacccccgcaaacaaag

SEQ ID NO: 13954 - DNA, 80 bp, synthetic construct
  misc_feature 1..80: note = Synthetic: >NC_001918.1-cand-7690-7769
  source 1..80: mol_type = other DNA
gccaggatttcccacccacgtctacgatctatgaagtcaccttcctcaaacgctggttcgttccggacgatgttagaccc

SEQ ID NO: 13955 - DNA, 80 bp, synthetic construct
  misc_feature 1..80: note = Synthetic: >NC_001918.1-cand-7770-7849
  source 1..80: mol_type = other DNA
atctacattcaccctgtgatggaccccgacacgtacgagcaatcggtaatgtggttgcgtgatggagatttccaagatgt

SEQ ID NO: 13956 - DNA, 80 bp, synthetic construct
  misc_feature 1..80: note = Synthetic: >NC_002031.1-cand-680-759
  source 1..80: mol_type = other DNA
ggaaaacgttagagtcgcatatggtaagtgtgactcagcaggcaggtctaggaggtcaagaagggccattgacttgccta

SEQ ID NO: 13957 - DNA, 80 bp, synthetic construct
  misc_feature 1..80: note = Synthetic: >NC_002031.1-cand-720-799
  source 1..80: mol_type = other DNA
ggcaggtctaggaggtcaagaagggccattgacttgcctacgcatgaaaaccatggtttgaagacccggcaagaaaaatg

SEQ ID NO: 13958 - DNA, 80 bp, synthetic construct
  misc_feature 1..80: note = Synthetic: >NC_002031.1-cand-800-879
  source 1..80: mol_type = other DNA
gatgactggaagaatgggtgaaaggcaactccaaaagattgagagatggttcgtgaggaaccccttttttgcagtgacgg

SEQ ID NO: 13959 - DNA, 80 bp, synthetic construct
  misc_feature 1..80: note = Synthetic: >NC_002031.1-cand-880-959
  source 1..80: mol_type = other DNA
ctctgaccattgcctaccttgtgggaagcaacatgacgcaacgagtcgtgattgccctactggtcttggctgttggtccg

SEQ ID NO: 13960 - DNA, 80 bp, synthetic construct
  misc_feature 1..80: note = Synthetic: >NC_002031.1-cand-930-1009
  source 1..80: mol_type = other DNA
attgccctactggtcttggctgttggtccggcctactcagctcactgcattggaattactgacagggatttcattgaggg

SEQ ID NO: 13961 - DNA, 80 bp, synthetic construct
  misc_feature 1..80: note = Synthetic: >NC_002031.1-cand-1040-1119
  source 1..80: mol_type = other DNA
cctggagcaagacaagtgtgtcactgttatggcccctgacaagccttcattggacatctcactagagacagtagccattg

SEQ ID NO: 13962 - DNA, 80 bp, synthetic construct
  misc_feature 1..80: note = Synthetic: >NC_002031.1-cand-1120-1199
  source 1..80: mol_type = other DNA
atagacctgctgaggtgaggaaagtgtgttacaatgcagttctcactcatgtgaagattaatgacaagtgccccagcact

SEQ ID NO: 13963 - DNA, 80 bp, synthetic construct
  misc_feature 1..80: note = Synthetic: >NC_002031.1-cand-1150-1229
  source 1..80: mol_type = other DNA
acaatgcagttctcactcatgtgaagattaatgacaagtgccccagcactggagaggcccacctagctgaagagaacgaa

SEQ ID NO: 13964 - DNA, 80 bp, synthetic construct
  misc_feature 1..80: note = Synthetic: >NC_002031.1-cand-1290-1369
  source 1..80: mol_type = other DNA
tttgggaaagggagcattgtggcatgcgccaaattcacttgtgccaaatccatgagtttgtttgaggttgatcagaccaa

SEQ ID NO: 13965 - DNA, 80 bp, synthetic construct
  misc_feature 1..80: note = Synthetic: >NC_002031.1-cand-1410-1489
  source 1..80: mol_type = other DNA
aagcaggaaaattggaataccgacattaagactctcaagtttgatgccctgtcaggctcccaggaagtcgagttcattgg

SEQ ID NO: 13966 - DNA, 80 bp, synthetic construct
  misc_feature 1..80: note = Synthetic: >NC_002031.1-cand-1450-1529
  source 1..80: mol_type = other DNA
ttgatgccctgtcaggctcccaggaagtcgagttcattgggtatggaaaagctacactggaatgccaggtgcaaactgcg

SEQ ID NO: 13967 - DNA, 80 bp, synthetic construct
  misc_feature 1..80: note = Synthetic: >NC_002031.1-cand-1530-1609
  source 1..80: mol_type = other DNA
gtggactttggtaacagttacatcgctgagatggaaacagagagctggatagtggacagacagtgggcccaggacttgac

SEQ ID NO: 13968 - DNA, 80 bp, synthetic construct
  misc_feature 1..80: note = Synthetic: >NC_002031.1-cand-1640-1719
  source 1..80: mol_type = other DNA
gtggagagagatgcatcatcttgtcgaatttgaacctccgcatgccgccactatcagagtactggccctgggaaaccagg

SEQ ID NO: 13969 - DNA, 80 bp, synthetic construct
  misc_feature 1..80: note = Synthetic: >NC_002031.1-cand-1690-1769
  source 1..80: mol_type = other DNA
ctatcagagtactggccctgggaaaccaggaaggctccttgaaaacagctcttactggcgcaatgagggttacaaaggac

SEQ ID NO: 13970 - DNA, 80 bp, synthetic construct
  misc_feature 1..80: note = Synthetic: >NC_002031.1-cand-1770-1849
  source 1..80: mol_type = other DNA
acaaatgacaacaacctttacaaactacatggtggacatgtttcttgcagagtgaaattgtcagctttgacactcaaggg

SEQ ID NO: 13971 - DNA, 80 bp, synthetic construct
  misc_feature 1..80: note = Synthetic: >NC_002031.1-cand-1850-1929
  source 1..80: mol_type = other DNA
gacatcctacaaaatatgcactgacaaaatgttttttgtcaagaacccaactgacactggccatggcactgttgtgatgc

SEQ ID NO: 13972 - DNA, 80 bp, synthetic construct
  misc_feature 1..80: note = Synthetic: >NC_003310.1-cand-28880-28959
  source 1..80: mol_type = other DNA
tttattgacggctactctaactcttactcctcttttgggtaattgtacaatctcgtttaatattaccgtgccgaaattcg

SEQ ID NO: 13973 - DNA, 80 bp, synthetic construct
  misc_feature 1..80: note = Synthetic: >NC_003310.1-cand-28960-29039
  source 1..80: mol_type = other DNA
tacccacttcatccgataaactccaataaaaagatgatatatctagtgtttttatggtattggatagaatttccctccac

SEQ ID NO: 13974 - DNA, 80 bp, synthetic construct
  misc_feature 1..80: note = Synthetic: >NC_003310.1-cand-29040-29119
  source 1..80: mol_type = other DNA
atgttaaatgtagtcaaatatactttatcaaattgcatacctataggaatagtctctgtaatcactgcgattgtattatc

SEQ ID NO: 13975 - DNA, 80 bp, synthetic construct
  misc_feature 1..80: note = Synthetic: >NC_003310.1-cand-29120-29199
  source 1..80: mol_type = other DNA
cggattcattttatttgttaaaaaataatcctatatcacttcactctattaaaaatccaagtttctatttctttcatgac

SEQ ID NO: 13976 - DNA, 80 bp, synthetic construct
  misc_feature 1..80: note = Synthetic: >NC_003310.1-cand-29200-29279
  source 1..80: mol_type = other DNA
tgattttttaacttcatccgtttccttatgaagatgatgtttggcaccttcataaatttttatttccctattacaatttg

SEQ ID NO: 13977 - DNA, 80 bp, synthetic construct
  misc_feature 1..80: note = Synthetic: >NC_003310.1-cand-29270-29349
  source 1..80: mol_type = other DNA
ttacaatttgcatgttgcatgaaataatatgcacctgaaacatcgctaatctcattgtttgttccctggagtatgagagt

SEQ ID NO: 13978 - DNA, 80 bp, synthetic construct
  misc_feature 1..80: note = Synthetic: >NC_003310.1-cand-29360-29439
  source 1..80: mol_type = other DNA
atcttgggaattatttttctaaccttgttggtagccttcaagacctgactagcaaatccagccttaattttttcatgatt

SEQ ID NO: 13979 - DNA, 80 bp, synthetic construct
  misc_feature 1..80: note = Synthetic: >NC_003310.1-cand-29440-29519
  source 1..80: mol_type = other DNA
gactaatggatcgtattggtatttataaacttcatccatatctctagatactgattctggacatagctttccgactgacg

SEQ ID NO: 13980 - DNA, 80 bp, synthetic construct
  misc_feature 1..80: note = Synthetic: >NC_003310.1-cand-29520-29599
  source 1..80: mol_type = other DNA
catttggtgtaatggttcccataagttttgcagctagcagattcagtcttggaacagcgtctgcattaactagaggagac

SEQ ID NO: 13981 - DNA, 80 bp, synthetic construct
  misc_feature 1..80: note = Synthetic: >NC_003310.1-cand-29600-29679
  source 1..80: mol_type = other DNA
attagaatcattgctgtaaacaagtttggattatcgcaagcagccagtatagaaattgttgctcccatggaatgacccaa

SEQ ID NO: 13982 - DNA, 80 bp, synthetic construct
  misc_feature 1..80: note = Synthetic: >NC_003310.1-cand-29680-29759
  source 1..80: mol_type = other DNA
taagaagactggaactcctggataagtagatttaatagtcactacgtgctgtaccacatctctaacatacttaccaaagt

SEQ ID NO: 13983 - DNA, 80 bp, synthetic construct
  misc_feature 1..80: note = Synthetic: >NC_003310.1-cand-29760-29839
  source 1..80: mol_type = other DNA
catcaatcatcattttttcaccattacttcttccatggccaatatgatcatgtgagaatactaaaattcctaacgatgat

SEQ ID NO: 13984 - DNA, 80 bp, synthetic construct
  misc_feature 1..80: note = Synthetic: >NC_003310.1-cand-29840-29919
  source 1..80: mol_type = other DNA
atgttttcagctagttcgtcataacgtccagaatgttcaccagctccatgacttatgaatactaatgccttaggatatgt

SEQ ID NO: 13985 - DNA, 80 bp, synthetic construct
  misc_feature 1..80: note = Synthetic: >NC_003310.1-cand-29920-29999
  source 1..80: mol_type = other DNA
aataggtttccaatatttacaatatatgtaatcattgtccagattgaacatacagtttgcactcatgattcactatataa

SEQ ID NO: 13986 - DNA, 80 bp, synthetic construct
  misc_feature 1..80: note = Synthetic: >NC_003310.1-cand-30000-30079
  source 1..80: mol_type = other DNA
ctatcaatattaacagttcgtttaatgatcatattatttttatgttttattgataattgtaaaaatatacaattaaatca

SEQ ID NO: 13987 - DNA, 80 bp, synthetic construct
  misc_feature 1..80: note = Synthetic: >NC_003310.1-cand-30080-30159
  source 1..80: mol_type = other DNA
atatagaggaaggagacggtactgtattttgtgagatagtcatggagactaaatcagattatgaggatgctgttttttac

SEQ ID NO: 13988 - DNA, 80 bp, synthetic construct
  misc_feature 1..80: note = Synthetic: >NC_003310.1-cand-34300-34379
  source 1..80: mol_type = other DNA
tgatagcattgttattactactatcataattaaattatcgacattcgtgggtgctgaataatcgttatcatcattttgta

SEQ ID NO: 13989 - DNA, 80 bp, synthetic construct
  misc_feature 1..80: note = Synthetic: >NC_003310.1-cand-34380-34459
  source 1..80: mol_type = other DNA
attgtgacatcatactagataaatcatttgtgagattgttgtgggaagcgggcacggaagatgcattatcattattattt

SEQ ID NO: 13990 - DNA, 80 bp, synthetic construct
  misc_feature 1..80: note = Synthetic: >NC_003310.1-cand-34460-34539
  source 1..80: mol_type = other DNA
aacgcctcccattcggattcacaaatgttacgcacgttcaacgttttatggaaactataattttgtgaaaacagataaca

SEQ ID NO: 13991 - DNA, 80 bp, synthetic construct
  misc_feature 1..80: note = Synthetic: >NC_003310.1-cand-34540-34619
  source 1..80: mol_type = other DNA
agaaaactcgtcatcgttcaaatttttaacgatagtaaaccgattaaacgtcgagctaatttctaacgctagcgactctg

SEQ ID NO: 13992 - DNA, 80 bp, synthetic construct
  misc_feature 1..80: note = Synthetic: >NC_003310.1-cand-34620-34699
  source 1..80: mol_type = other DNA
ttggatatgggtttccagatatatatcttttcagttcccctacgtatctataatcatctgtaggaaatggaagatatttc

SEQ ID NO: 13993 - DNA, 80 bp, synthetic construct
  misc_feature 1..80: note = Synthetic: >NC_003310.1-cand-34700-34779
  source 1..80: mol_type = other DNA
catttatctactgttcctaatatcatatgcggtggtgtagaaccattaagcgcgaaagatgttatttcgcatcgtatttt

SEQ ID NO: 13994 - DNA, 80 bp, synthetic construct
  misc_feature 1..80: note = Synthetic: >NC_003310.1-cand-34780-34859
  source 1..80: mol_type = other DNA
aacttcgcaataatttctggttagataacgcactctaccagtcaagtcaatgatattagcctttacagatatattcatag

SEQ ID NO: 13995 - DNA, 80 bp, synthetic construct
  misc_feature 1..80: note = Synthetic: >NC_003310.1-cand-34940-35019
  source 1..80: mol_type = other DNA
tttaaacaagttaatgatatattaacgcgttttatgaatgatgatatataaccagaagttttatcctctgtggctagcgc

SEQ ID NO: 13996 - DNA, 80 bp, synthetic construct
  misc_feature 1..80: note = Synthetic: >NC_003310.1-cand-35020-35099
  source 1..80: mol_type = other DNA
tataaccttatcattataataccaactagtgtaattaatatgtgacacgacagtgtgggtacaaatatgtacattatcgt

SEQ ID NO: 13997 - DNA, 80 bp, synthetic construct
  misc_feature 1..80: note = Synthetic: >NC_003310.1-cand-35100-35179
  source 1..80: mol_type = other DNA
ctacgtcgtatttgatacatccgcatacagccaacaaatataaaattacaaaaactctaacgacgttcgtacacatcttg

SEQ ID NO: 13998 - DNA, 80 bp, synthetic construct
  misc_feature 1..80: note = Synthetic: >NC_003310.1-cand-35180-35259
  source 1..80: mol_type = other DNA
atgcggtttaataaatgttttgatttcaatttattgtaaaaaagattcggttttatactgttcgatattctcattgctta

SEQ ID NO: 13999 - DNA, 80 bp, synthetic construct
  misc_feature 1..80: note = Synthetic: >NC_003310.1-cand-35260-35339
  source 1..80: mol_type = other DNA
tattctcatctatcatctccacacagtcaaatccatggttaacatgtacctcatcaaccggtaaaagactatcggattct

SEQ ID NO: 14000 - DNA, 80 bp, synthetic construct
  misc_feature 1..80: note = Synthetic: >NC_003310.1-cand-35340-35419
  source 1..80: mol_type = other DNA
tctatcatcataactcgagaatatttaatttggtggtcattattaatcaagtcaattatcttatttttaacaaacgtaag

SEQ ID NO: 14001 - DNA, 80 bp, synthetic construct
  misc_feature 1..80: note = Synthetic: >NC_003310.1-cand-35420-35499
  source 1..80: mol_type = other DNA
tattttactcattttttataaaaacttttagaaatatacagactctatcgtgtgtctatatcttctttttatatccaatg

SEQ ID NO: 14002 - DNA, 80 bp, synthetic construct
  misc_feature 1..80: note = Synthetic: >NC_003310.1-cand-35500-35579
  source 1..80: mol_type = other DNA
tatttatgtctgatttttcttcatttatcatatataatggtccaaattctacacgtgcttcggattcatccagatcatta

SEQ ID NO: 14003 - DNA, 80 bp, synthetic construct
  misc_feature 1..80: note = Synthetic: >NC_003310.1-cand-35580-35659
  source 1..80: mol_type = other DNA
aggttcttataatcgcaacatccttctcttccatcttctacatcttccttcttattcttagcgtcacagaatctaccaca

SEQ ID NO: 14004 - DNA, 80 bp, synthetic construct
  misc_feature 1..80: note = Synthetic: >NC_003310.1-cand-84850-84929
  source 1..80: mol_type = other DNA
atggaagagagttcgatcctaaaggtaaatgtaaattcagcggtaaagatatctatactgacttgataggtgaaaagatt

SEQ ID NO: 14005 - DNA, 80 bp, synthetic construct
  misc_feature 1..80: note = Synthetic: >NC_003310.1-cand-84990-85069
  source 1..80: mol_type = other DNA
gttgtagctatgaggcatctgtcattggctggactcttatccgatcataaatcgaacgtggaaggtatcaactttattat

SEQ ID NO: 14006 - DNA, 80 bp, synthetic construct
  misc_feature 1..80: note = Synthetic: >NC_003310.1-cand-85030-85109
  source 1..80: mol_type = other DNA
ccgatcataaatcgaacgtggaaggtatcaactttattatcaagtcatcttatgtttttaagagatatctatctatttac

SEQ ID NO: 14007 - DNA, 80 bp, synthetic construct
  misc_feature 1..80: note = Synthetic: >NC_003310.1-cand-85230-85309
  source 1..80: mol_type = other DNA
gtaagagacgggaaaatagttccattatctaaagctttagaggcggactacttggaatccatgttatccaacttgacaaa

SEQ ID NO: 14008 - DNA, 80 bp, synthetic construct
  misc_feature 1..80: note = Synthetic: >NC_003310.1-cand-85560-85639
  source 1..80: mol_type = other DNA
acaaaaggattaacgggttctcaatattacttttcgatgctggttgcaagatctcaatctactgatatcgtctgtgaaac

SEQ ID NO: 14009 - DNA, 80 bp, synthetic construct
  misc_feature 1..80: note = Synthetic: >NC_003310.1-cand-85800-85879
  source 1..80: mol_type = other DNA
ccagatgagtccatgacttggtatttggaaattagtgctttgtggaataaaataaaacagggattcgtttactctcagaa

SEQ ID NO: 14010 - DNA, 80 bp, synthetic construct
  misc_feature 1..80: note = Synthetic: >NC_003310.1-cand-86190-86269
  source 1..80: mol_type = other DNA
gtattgtctgagaagtttacacaacaagccctgttcagttttcacactactgaaaagagtggtgctgtaaaacaaaaact

SEQ ID NO: 14011 - DNA, 80 bp, synthetic construct
  misc_feature 1..80: note = Synthetic: >NC_003310.1-cand-86350-86429
  source 1..80: mol_type = other DNA
ctaaacttcaatctgttaagattaatttcgaatttgtatgtttgggagaattaaatccagacatcactcttcgaaaagaa

SEQ ID NO: 14012 - DNA, 80 bp, synthetic construct
  misc_feature 1..80: note = Synthetic: >NC_003310.1-cand-86430-86509
  source 1..80: mol_type = other DNA
acagatagatatgtagtagacataatagtcaatagattatacatcaagagagcagaaataaccgaattagtcgtcgaata

SEQ ID NO: 14013 - DNA, 80 bp, synthetic construct
  misc_feature 1..80: note = Synthetic: >NC_003310.1-cand-86470-86549
  source 1..80: mol_type = other DNA
acatcaagagagcagaaataaccgaattagtcgtcgaatatatgattgaacgatttatctcctttagcgtcattgtaaag

SEQ ID NO: 14014 - DNA, 80 bp, synthetic construct
  misc_feature 1..80: note = Synthetic: >NC_003310.1-cand-86590-86669
  source 1..80: mol_type = other DNA
ttagatttactgtctacctaaatttcgttgaaccggaggaattgaatcttagtaagtttatgatggttcttccgggtgcc

SEQ ID NO: 14015 - DNA, 80 bp, synthetic construct
  misc_feature 1..80: note = Synthetic: >NC_003310.1-cand-86670-86749
  source 1..80: mol_type = other DNA
gccaacaagggcaagattagtaaattcaagattcctatctctgactatacgggatataacgacttcaatcaaacaaaaaa

SEQ ID NO: 14016 - DNA, 80 bp, synthetic construct
  misc_feature 1..80: note = Synthetic: >NC_003310.1-cand-86750-86829
  source 1..80: mol_type = other DNA
gctcaataagatgactgtagaactcatgaatctaaaagaattgggttctttcgatttggagaacgtcaacgtgtatcctg

SEQ ID NO: 14017 - DNA, 80 bp, synthetic construct
  misc_feature 1..80: note = Synthetic: >NC_003310.1-cand-86830-86909
  source 1..80: mol_type = other DNA
gagtatggaatacatacgatatcttcggtattgaggccgctcgtggatacttgtgcgaagccatgttaaacacctatgga

SEQ ID NO: 14018 - DNA, 80 bp, synthetic construct
  misc_feature 1..80: note = Synthetic: >NC_003310.1-cand-86910-86989
  source 1..80: mol_type = other DNA
gaaggtttcgattatctgtaccagccttgtgatcttctcgctagtttactatgtgctagttacgaaccagaatcagttaa

SEQ ID NO: 14019 - DNA, 80 bp, synthetic construct
  misc_feature 1..80: note = Synthetic: >NC_003310.1-cand-86990-87069
  source 1..80: mol_type = other DNA
taaattcaagttcggtgcagctagtactcttaagagagctacgttcggagataataaagcattgttaaacgcggctcttc

SEQ ID NO: 14020 - DNA, 80 bp, synthetic construct
  misc_feature 1..80: note = Synthetic: >NC_003461.1-cand-7070-7149
  source 1..80: mol_type = other DNA
taattataaaacaagacacttgtatgaagacaaacatcatgacagtatcctccatgaacgaaagtgccaaaataatcaaa

SEQ ID NO: 14021 - DNA, 80 bp, synthetic construct
  misc_feature 1..80: note = Synthetic: >NC_003461.1-cand-7150-7229
  source 1..80: mol_type = other DNA
gagacaatcacagaattaatcagacaagaagtaatatcaaggaccataaacatacaaagttcagtacaaagcgggatccc

SEQ ID NO: 14022 - DNA, 80 bp, synthetic construct
  misc_feature 1..80: note = Synthetic: >NC_003461.1-cand-7230-7309
  source 1..80: mol_type = other DNA
aatattgttaaacaagcaaagcagagatctcacacaattaatagagaagtcatgcaacagacaggaattggctcagatat

SEQ ID NO: 14023 - DNA, 80 bp, synthetic construct
  misc_feature 1..80: note = Synthetic: >NC_003461.1-cand-7310-7389
  source 1..80: mol_type = other DNA
gcgaaaacaccattgctattcaccatgcagacggcatatctcctctggacccacacgatttctggagatgtcccgtaggg

SEQ ID NO: 14024 - DNA, 80 bp, synthetic construct
  misc_feature 1..80: note = Synthetic: >NC_003461.1-cand-7390-7469
  source 1..80: mol_type = other DNA
gaacccctactgagcaacaaccccaatatctcattattacctggaccaagtctactttctggatccaccacaatttcagg

SEQ ID NO: 14025 - DNA, 80 bp, synthetic construct
  misc_feature 1..80: note = Synthetic: >NC_003461.1-cand-7470-7549
  source 1..80: mol_type = other DNA
atgtgttagactaccttcattatcaattggtgatgcaatatatgcgtattcatcaaacttaatcactcaaggatgtgcag

SEQ ID NO: 14026 - DNA, 80 bp, synthetic construct
  misc_feature 1..80: note = Synthetic: >NC_003461.1-cand-7550-7629
  source 1..80: mol_type = other DNA
atatagggaagtcatatcaggttttacaattaggttacatatccttaaattcagatatgtatcctgatttaaacccggta

SEQ ID NO: 14027 - DNA, 80 bp, synthetic construct
  misc_feature 1..80: note = Synthetic: >NC_003461.1-cand-7610-7689
  source 1..80: mol_type = other DNA
atcctgatttaaacccggtaatttctcatacctatgacatcaacgacaacaggaaatcatgttctgtaatagctgcagga

SEQ ID NO: 14028 - DNA, 80 bp, synthetic construct
  misc_feature 1..80: note = Synthetic: >NC_003461.1-cand-7710-7789
  source 1..80: mol_type = other DNA
ctccttgcccactgtgaatgagactacagactactcgagtgaaggtatagaagatttagtatttgacatattagatctca

SEQ ID NO: 14029 - DNA, 80 bp, synthetic construct
  misc_feature 1..80: note = Synthetic: >NC_003461.1-cand-7790-7869
  source 1..80: mol_type = other DNA
agggaaagaccaaatctcatcgatacaaaaatgaagatataacttttgaccatcctttttctgcaatgtatccgagtgta

SEQ ID NO: 14030 - DNA, 80 bp, synthetic construct
  misc_feature 1..80: note = Synthetic: >NC_003461.1-cand-7870-7949
  source 1..80: mol_type = other DNA
ggaagtgggataaaaattgaaaatacactcattttcctagggtacggtggcttaacaactccgctccaaggcgacactaa

SEQ ID NO: 14031 - DNA, 80 bp, synthetic construct
  misc_feature 1..80: note = Synthetic: >NC_003461.1-cand-7950-8029
  source 1..80: mol_type = other DNA
gtgtgtgataaacagatgtaccaatgttaatcagagtgtttgcaatgatgctcttaagataacttggctaaagaaaagac

SEQ ID NO: 14032 - DNA, 80 bp, synthetic construct
  misc_feature 1..80: note = Synthetic: >NC_003461.1-cand-8030-8109
  source 1..80: mol_type = other DNA
aagttgtcaatgtcttaattcgtatcaataattatttatctgataggccaaagattgttgtcgagacaattccaataact

SEQ ID NO: 14033 - DNA, 80 bp, synthetic construct
  misc_feature 1..80: note = Synthetic: >NC_003461.1-cand-8110-8189
  source 1..80: mol_type = other DNA
caaaattacttaggtgccgaaggtaggctacttaaactaggtaaaaagatctacatatatactagatcttcaggttggca

SEQ ID NO: 14034 - DNA, 80 bp, synthetic construct
  misc_feature 1..80: note = Synthetic: >NC_003461.1-cand-8190-8269
  source 1..80: mol_type = other DNA
ctccaacctgcaaataggatcattagatatcaacaaccccatgaccattaaatgggcgcctcatgaagtcctgtctcgac

SEQ ID NO: 14035 - DNA, 80 bp, synthetic construct
  misc_feature 1..80: note = Synthetic: >NC_003461.1-cand-8270-8349
  source 1..80: mol_type = other DNA
caggaaaccaagactgcaactggtacaacagatgtccgagagaatgcatatcaggtgtatatactgatgcatatccacta

SEQ ID NO: 14036 - DNA, 80 bp, synthetic construct
  misc_feature 1..80: note = Synthetic: >NC_003908.1-cand-330-409
  source 1..80: mol_type = other DNA
acattaccgacaagaacatagcctctaaggcggcagacctgctggaagtcatgtcaacaccagacgcagagactccatct

SEQ ID NO: 14037 - DNA, 80 bp, synthetic construct
  misc_feature 1..80: note = Synthetic: >NC_003908.1-cand-410-489
  source 1..80: mol_type = other DNA
ctgtgtatgcacacagacgccacgtgtaggtactttggaagtgtagcagtataccaagatgtgtacgcagtccatgcacc

SEQ ID NO: 14038 - DNA, 80 bp, synthetic construct
  misc_feature 1..80: note = Synthetic: >NC_003908.1-cand-490-569
  source 1..80: mol_type = other DNA
gacatcaatctaccaccaggcgcttaaaggagttaggacaatttactggataggctttgacacgaccccttttatgtaca

SEQ ID NO: 14039 - DNA, 80 bp, synthetic construct
  misc_feature 1..80: note = Synthetic: >NC_003908.1-cand-570-649
  source 1..80: mol_type = other DNA
aaaacatggcaggttcctaccctacttacaacacgaactgggctgacgagagagtattggaagcacgtaacattggcctc

SEQ ID NO: 14040 - DNA, 80 bp, synthetic construct
  misc_feature 1..80: note = Synthetic: >NC_003908.1-cand-650-729
  source 1..80: mol_type = other DNA
ggtaactcagatcttcaggagagcaggcttggaaaactctcaatccttaggaagaagaggctccaacctactaataagat

SEQ ID NO: 14041 - DNA, 80 bp, synthetic construct
  misc_feature 1..80: note = Synthetic: >NC_003908.1-cand-730-809
  source 1..80: mol_type = other DNA
catattctcggttggttcaacaatctacacagaagatagatcactgttacgtagctggcatcttccaaacgtgttccact

SEQ ID NO: 14042 - DNA, 80 bp, synthetic construct
  misc_feature 1..80: note = Synthetic: >NC_003908.1-cand-810-889
  source 1..80: mol_type = other DNA
tgaaaggaaagtctaacttcacaggtagatgtgggaccattgtcagctgtgaagggtacgtcatcaaaaagataacgatc

SEQ ID NO: 14043 - DNA, 80 bp, synthetic construct
  misc_feature 1..80: note = Synthetic: >NC_003908.1-cand-890-969
  source 1..80: mol_type = other DNA
agcccaggactatacggtaaagttgagaacttggcgtccacaatgcatcgcgagggtttcttgagttgcaaagtcacaga

SEQ ID NO: 14044 - DNA, 80 bp, synthetic construct
  misc_feature 1..80: note = Synthetic: >NC_003908.1-cand-970-1049
  source 1..80: mol_type = other DNA
tacgctgcgcggcgagagggtttcttttgctgtgtgtacgtatgtaccagccacactttgcgatcagatgacagggattc

SEQ ID NO: 14045 - DNA, 80 bp, synthetic construct
  misc_feature 1..80: note = Synthetic: >NC_003908.1-cand-1050-1129
  source 1..80: mol_type = other DNA
tggcaactgacgttagtgtggatgacgcacaaaaactattggttgggctcaaccaaaggattgtcgtcaatggtaggacg

SEQ ID NO: 14046 - DNA, 80 bp, synthetic construct
  misc_feature 1..80: note = Synthetic: >NC_003908.1-cand-1130-1209
  source 1..80: mol_type = other DNA
caaagaaatactaacacaatgcagaactatctattaccagtggtcgcccaggcgttttccaggtgggcgcgtgaacatcg

SEQ ID NO: 14047 - DNA, 80 bp, synthetic construct
  misc_feature 1..80: note = Synthetic: >NC_003908.1-cand-1240-1319
  source 1..80: mol_type = other DNA
ggtgcgggagcgcactcttactatgggctgctgctgggctttcaagacccagaaaatcacatccatctacaagaagcctg

SEQ ID NO: 14048 - DNA, 80 bp, synthetic construct
  misc_feature 1..80: note = Synthetic: >NC_003908.1-cand-1290-1369
  source 1..80: mol_type = other DNA
agaaaatcacatccatctacaagaagcctggtacgcaaacaattaagaaagtacctgccgtctttgactcatttgtgatt

SEQ ID NO: 14049 - DNA, 80 bp, synthetic construct
  misc_feature 1..80: note = Synthetic: >NC_003908.1-cand-1370-1449
  source 1..80: mol_type = other DNA
ccacgccttaccagccacgggctcgatatgggcttccgccgtaggctcaagctgctgcttgaaccaactgtcaaacccgc

SEQ ID NO: 14050 - DNA, 80 bp, synthetic construct
  misc_feature 1..80: note = Synthetic: >NC_003908.1-cand-1450-1529
  source 1..80: mol_type = other DNA
accggctattacaatggccgatgtggagcatctgcgtggcttacagcaagaagctgaagaagtggctgcagcggaagaga

SEQ ID NO: 14051 - DNA, 80 bp, synthetic construct
  misc_feature 1..80: note = Synthetic: >NC_003908.1-cand-1530-1609
  source 1..80: mol_type = other DNA
tcagagaagccctgccacccttgctccctgaaatagaaaaagagaccgtagaggcagaagtagacctcattatgcaagag

SEQ ID NO: 14052 - DNA, 80 bp, synthetic construct
  misc_feature 1..80: note = Synthetic: >NC_005082.1-cand-5240-5319
  source 1..80: mol_type = other DNA
tctcatcaaaatctaaccagcttaacatctctgcgcatgtagctagaagcacaaattcagagaatatgggcaaaaagaat

SEQ ID NO: 14053 - DNA, 80 bp, synthetic construct
  misc_feature 1..80: note = Synthetic: >NC_005082.1-cand-5320-5399
  source 1..80: mol_type = other DNA
cgtttaggatcagaataaaaagatccaagttctacaaggttccctttatcagaaaggtaaagggagtaacaacgtgattt

SEQ ID NO: 14054 - DNA, 80 bp, synthetic construct
  misc_feature 1..80: note = Synthetic: >NC_005082.1-cand-5400-5479
  source 1..80: mol_type = other DNA
ctcacctgttttttggtaaaataaaagcccatacaagcctactcttaaaaagaacctctgcacatagcattcttttaatc

SEQ ID NO: 14055 - DNA, 80 bp, synthetic construct
  misc_feature 1..80: note = Synthetic: >NC_005082.1-cand-5480-5559
  source 1..80: mol_type = other DNA
taactgtgccatagtatctcttataatccttttcatttactagaagtctggaagagaatgatgtcttcattgaatttacg

SEQ ID NO: 14056 - DNA, 80 bp, synthetic construct
  misc_feature 1..80: note = Synthetic: >NC_005082.1-cand-5560-5639
  source 1..80: mol_type = other DNA
agagaaagtgatatatgcgacagacatttaaataaactctcaaactctccatctgacattgacatcaggtccttatgggc

SEQ ID NO: 14057 - DNA, 80 bp, synthetic construct
  misc_feature 1..80: note = Synthetic: >NC_005082.1-cand-5640-5719
  source 1..80: mol_type = other DNA
acaatcgccaatcaatgaacttggaggtttgtagtgcataacaggcttctctgaacagagctcctcagctaaagatagca

SEQ ID NO: 14058 - DNA, 80 bp, synthetic construct
  misc_feature 1..80: note = Synthetic: >NC_005082.1-cand-5720-5799
  source 1..80: mol_type = other DNA
acaactcaaagtctggaacatttgtgaactctgacacacagtcccatagaacaggctcttctttccttaacaaatgtcta

SEQ ID NO: 14059 - DNA, 80 bp, synthetic construct
  misc_feature 1..80: note = Synthetic: >NC_005082.1-cand-5800-5879
  source 1..80: mol_type = other DNA
cacctgtccaaccaattgcagcaggactcaactttcttcaatagaagcctccttgcaaccaaaatatctaaaaccctgtc

SEQ ID NO: 14060 - DNA, 80 bp, synthetic construct
  misc_feature 1..80: note = Synthetic: >NC_005082.1-cand-5880-5959
  source 1..80: mol_type = other DNA
gttgggaagtaataacatctcaccgataatcagacctgcttttttcaaggtttccatttcagaaggttgtgtcttataaa

SEQ ID NO: 14061 - DNA, 80 bp, synthetic construct
  misc_feature 1..80: note = Synthetic: >NC_005082.1-cand-5960-6039
  source 1..80: mol_type = other DNA
catgtgccacaaagttcaaaatgattaagtccaaaaatagaagtgtgtttcttctggtgttaaacactttctttcctttt

SEQ ID NO: 14062 - DNA, 80 bp, synthetic construct
  misc_feature 1..80: note = Synthetic: >NC_005082.1-cand-6040-6119
  source 1..80: mol_type = other DNA
atcttattgcacgctgataacaatgacagataaactttttctatctgggttgtgggaagaggaggttcatcaaaattatt

SEQ ID NO: 14063 - DNA, 80 bp, synthetic construct
  misc_feature 1..80: note = Synthetic: >NC_005082.1-cand-6120-6199
  source 1..80: mol_type = other DNA
ctccagtgatgtttggtttgcaattctcattgagagttgataacataagtcaaggattttactacagcacatgggacact

SEQ ID NO: 14064 - DNA, 80 bp, synthetic construct
  misc_feature 1..80: note = Synthetic: >NC_005082.1-cand-6210-6289
  source 1..80: mol_type = other DNA
tgagtcagagtgggcactcgacaacaccaaagtctgtagtagggactttctatctgtctgaacaaaattcccaaggcctt

SEQ ID NO: 14065 - DNA, 80 bp, synthetic construct
  misc_feature 1..80: note = Synthetic: >NC_005082.1-cand-6280-6359
  source 1..80: mol_type = other DNA
ccaaggcctttcctgtagatttcttctctgtaccaagttttcaatttgatcaactcttccctaatcttggattccctaac

SEQ ID NO: 14066 - DNA, 80 bp, synthetic construct
  misc_feature 1..80: note = Synthetic: >NC_005082.1-cand-6350-6429
  source 1..80: mol_type = other DNA
attccctaacttctcccacaatgtctttaagcaattgctcattgagtctttcctcataattcagatgaaccctttttaag

SEQ ID NO: 14067 - DNA, 80 bp, synthetic construct
  misc_feature 1..80: note = Synthetic: >NC_005082.1-cand-6430-6509
  source 1..80: mol_type = other DNA
cattctatattttcaaacccgaggctctgattacttgttttagagaggctatgaatcaacctatggtactcctgatcctc

SEQ ID NO: 14068 - DNA, 80 bp, synthetic construct
  misc_feature 1..80: note = Synthetic: >NC_005218.1-cand-380-459
  source 1..80: mol_type = other DNA
gcagactggctgagcatcatcgtctatcttacatcctttgtcgtcccgatacttctgaaagctctgtatatgttgacaac

SEQ ID NO: 14069 - DNA, 80 bp, synthetic construct
  misc_feature 1..80: note = Synthetic: >NC_005218.1-cand-480-559
  source 1..80: mol_type = other DNA
aggataataaagggacccggattcgatttaaggatgatagctcgttcgaggatgttaacggtatccggaaaccaaaacat

SEQ ID NO: 14070 - DNA, 80 bp, synthetic construct
  misc_feature 1..80: note = Synthetic: >NC_005218.1-cand-560-639
  source 1..80: mol_type = other DNA
ctttacgtgtccttgccaaatgcacagtcaagcatgaaggcagaagagattacacctggtagatatagaacagcagtctg

SEQ ID NO: 14071 - DNA, 80 bp, synthetic construct
  misc_feature 1..80: note = Synthetic: >NC_005218.1-cand-640-719
  source 1..80: mol_type = other DNA
tgggctctaccctgcacagattaaggcacggcagatgatcagtccagttatgagtgtaattggttttctagcattagcaa

SEQ ID NO: 14072 - DNA, 80 bp, synthetic construct
  misc_feature 1..80: note = Synthetic: >NC_005218.1-cand-720-799
  source 1..80: mol_type = other DNA
aggactggagtgatcgtatcgaacaatggttaattgaaccttgcaagcttcttccagatacagcagcagttagcctcctt

SEQ ID NO: 14073 - DNA, 80 bp, synthetic construct
  misc_feature 1..80: note = Synthetic: >NC_005218.1-cand-810-889
  source 1..80: mol_type = other DNA
caacaaacagggactacttacggcagcggcaagtggcattaggcaatatggagacaaaggagtcaaaggctatacgccag

SEQ ID NO: 14074 - DNA, 80 bp, synthetic construct
  misc_feature 1..80: note = Synthetic: >NC_005218.1-cand-890-969
  source 1..80: mol_type = other DNA
catgcagaagcagctggctgtagcatgattgaagatattgagtcaccatcatcaatatgggtttttgctggagcaccaga

SEQ ID NO: 14075 - DNA, 80 bp, synthetic construct
  misc_feature 1..80: note = Synthetic: >NC_005218.1-cand-1020-1099
  source 1..80: mol_type = other DNA
catttttttccatcctgcaggacatgcgaaatacaatcatggcatctaagacagttggaacatctgaggagaagctacgg

SEQ ID NO: 14076 - DNA, 80 bp, synthetic construct
  misc_feature 1..80: note = Synthetic: >NC_005218.1-cand-1060-1139
  source 1..80: mol_type = other DNA
ggcatctaagacagttggaacatctgaggagaagctacggaagaaatcatcattttatcagtcctacctcagaaggacac

SEQ ID NO: 14077 - DNA, 80 bp, synthetic construct
  misc_feature 1..80: note = Synthetic: >NC_005218.1-cand-1070-1149
  source 1..80: mol_type = other DNA
acagttggaacatctgaggagaagctacggaagaaatcatcattttatcagtcctacctcagaaggacacaatcaatggg

SEQ ID NO: 14078 - DNA, 80 bp, synthetic construct
  misc_feature 1..80: note = Synthetic: >NC_005218.1-cand-1230-1309
  source 1..80: mol_type = other DNA
atgatatggatcctgagctaaggacactggcacagagcttgattgatgtcaaagtgaaggaaatctccaaccaagagcct

SEQ ID NO: 14079 - DNA, 80 bp, synthetic construct
  misc_feature 1..80: note = Synthetic: >NC_005218.1-cand-1300-1379
  source 1..80: mol_type = other DNA
ccaagagcctttgaaactctaattaatgaatgtattaatccttttatgtgattatcatatactactgaatcattatcaat

SEQ ID NO: 14080 - DNA, 80 bp, synthetic construct
  misc_feature 1..80: note = Synthetic: >NC_005218.1-cand-1320-1399
  source 1..80: mol_type = other DNA
aattaatgaatgtattaatccttttatgtgattatcatatactactgaatcattatcaatcatatttgcactattattat

SEQ ID NO: 14081 - DNA, 80 bp, synthetic construct
  misc_feature 1..80: note = Synthetic: >NC_005218.1-cand-1460-1539
  source 1..80: mol_type = other DNA
tgggtcagttaatccgttgtgggtgggtttagctccaggctaccttaagtagcctttttttgtatatatggatgtagatt

SEQ ID NO: 14082 - DNA, 80 bp, synthetic construct
  misc_feature 1..80: note = Synthetic: >NC_005218.1-cand-1540-1619
  source 1..80: mol_type = other DNA
tcatttgatccttaactaatcttgttttctttccctttctttctgctttctctgcttactaacaacaacattctacctca

SEQ ID NO: 14083 - DNA, 80 bp, synthetic construct
  misc_feature 1..80: note = Synthetic: >NC_005218.1-cand-1600-1679
  source 1..80: mol_type = other DNA
aacaacaacattctacctcaacacaaaactacctcaacttaactacctcatttgattgctccttgattgtctttttaggg

SEQ ID NO: 14084 - DNA, 80 bp, synthetic construct
  misc_feature 1..80: note = Synthetic: >NC_005222.1-cand-1550-1629
  source 1..80: mol_type = other DNA
caatgtcatattatttattctcccatcaaagtcgcttgaagtagcaggttcctttattaggttcattacagttttcagaa

SEQ ID NO: 14085 - DNA, 80 bp, synthetic construct
  misc_feature 1..80: note = Synthetic: >NC_005222.1-cand-1610-1689
  source 1..80: mol_type = other DNA
gttcattacagttttcagaataggacctggtttagtagataaagataacttggatacaatattaattgatggtgactctc

SEQ ID NO: 14086 - DNA, 80 bp, synthetic construct
  misc_feature 1..80: note = Synthetic: >NC_005222.1-cand-1710-1789
  source 1..80: mol_type = other DNA
atgagcattgatttaaataggctgctagcattaaatatagcttttgaaaaggctttaattgcaacagccacatggttcca

SEQ ID NO: 14087 - DNA, 80 bp, synthetic construct
  misc_feature 1..80: note = Synthetic: >NC_005222.1-cand-1790-1869
  source 1..80: mol_type = other DNA
atactatacagaagaccaagggcaattcccattacaatatgcaattagatctgtgtttgcaaatcattttctgttagcta

SEQ ID NO: 14088 - DNA, 80 bp, synthetic construct
  misc_feature 1..80: note = Synthetic: >NC_005222.1-cand-1870-1949
  source 1..80: mol_type = other DNA
tatgccaaaagatgaaactctgtgccatctttgacaatttacgttatcttatacctgcagtaacatcattatactctggg

SEQ ID NO: 14089 - DNA, 80 bp, synthetic construct
  misc_feature 1..80: note = Synthetic: >NC_005222.1-cand-1950-2029
  source 1..80: mol_type = other DNA
tttccatcactgatagaaaaattatttgaacgtccatttaagtcttcattagaggtatatatatattataatattaagag

SEQ ID NO: 14090 - DNA, 80 bp, synthetic construct
  misc_feature 1..80: note = Synthetic: >NC_005222.1-cand-2030-2109
  source 1..80: mol_type = other DNA
cctgttagttgcacttgctcaaaataataaagccagattctattctaaggtaaagttactaggcttaacagttgaccaat

SEQ ID NO: 14091 - DNA, 80 bp, synthetic construct
  misc_feature 1..80: note = Synthetic: >NC_005222.1-cand-2110-2189
  source 1..80: mol_type = other DNA
caactgttggtgcaagtggagtttatccttcattcatgtcacgtatagtatacaaacattacaggagcttaatatctgaa

SEQ ID NO: 14092 - DNA, 80 bp, synthetic construct
  misc_feature 1..80: note = Synthetic: >NC_005222.1-cand-2190-2269
  source 1..80: mol_type = other DNA
gtaacaacctgtttctttttatttgaaaagggtcttcatggaaatatgaatgaagaagcaaaaattcatcttgagacagt

SEQ ID NO: 14093 - DNA, 80 bp, synthetic construct
  misc_feature 1..80: note = Synthetic: >NC_005222.1-cand-2230-2309
  source 1..80: mol_type = other DNA
gaaatatgaatgaagaagcaaaaattcatcttgagacagttgaatgggcacttaaattcagagagaaggaagaaaagtat

SEQ ID NO: 14094 - DNA, 80 bp, synthetic construct
  misc_feature 1..80: note = Synthetic: >NC_005222.1-cand-2350-2429
  source 1..80: mol_type = other DNA
tgcgagcaaatgcagagttggcagaacaacaattgtactgtcaagatgctattgagttggcagcaatagaattaaataaa

SEQ ID NO: 14095 - DNA, 80 bp, synthetic construct
  misc_feature 1..80: note = Synthetic: >NC_005222.1-cand-2430-2509
  source 1..80: mol_type = other DNA
gtcttggctacaaagtctagtgttgttgctaatagtatattgagtaagaactgggaagaaccatattttagtcaaacaag

SEQ ID NO: 14096 - DNA, 80 bp, synthetic construct
  misc_feature 1..80: note = Synthetic: >NC_005222.1-cand-2500-2579
  source 1..80: mol_type = other DNA
gtcaaacaagaaatatcagcctgaaaggcatgtcagggcaggttcaggaagatggccatttatcatcatctgtaacaatt

SEQ ID NO: 14097 - DNA, 80 bp, synthetic construct
  misc_feature 1..80: note = Synthetic: >NC_005222.1-cand-2580-2659
  source 1..80: mol_type = other DNA
atagaggccatccgctatttatcaaattcaagacataatcctagcctcctaaaattatatgaggaaacaagggagcagaa

SEQ ID NO: 14098 - DNA, 80 bp, synthetic construct
  misc_feature 1..80: note = Synthetic: >NC_005222.1-cand-2630-2709
  source 1..80: mol_type = other DNA
aaaattatatgaggaaacaagggagcagaaagcaatggcaagaattgtgagaaaatatcaaaggacagaggcagataggg

SEQ ID NO: 14099 - DNA, 80 bp, synthetic construct
  misc_feature 1..80: note = Synthetic: >NC_005222.1-cand-2740-2819
  source 1..80: mol_type = other DNA
gcaggcttgaaattattgaggactactatgatgccattgccaagaatatttctgaagagtacatatcatatggaggtgaa

SEQ ID NO: 14100 - DNA, 80 bp, synthetic construct
  misc_feature 1..80: note = Synthetic: >NC_005223.1-cand-1460-1539
  source 1..80: mol_type = other DNA
aattgcacattctcttgctgttgagctatgtgtgccaggtcttcatggttgggctacagtattgcttttattaacatttt

SEQ ID NO: 14101 - DNA, 80 bp, synthetic construct
  misc_feature 1..80: note = Synthetic: >NC_005223.1-cand-1540-1619
  source 1..80: mol_type = other DNA
gctttggctgggttctgataccaactattacaatgatcttgttaaaaatattaattgcatttgcatatctttgctctaag

SEQ ID NO: 14102 - DNA, 80 bp, synthetic construct
  misc_feature 1..80: note = Synthetic: >NC_005223.1-cand-1630-1709
  source 1..80: mol_type = other DNA
attccaaatttagaattttggttgagaaagtaaaaaaggaatatcagaaaaccatgggctcaatggtttgtgaggtatgt

SEQ ID NO: 14103 - DNA, 80 bp, synthetic construct
  misc_feature 1..80: note = Synthetic: >NC_005223.1-cand-1710-1789
  source 1..80: mol_type = other DNA
cagtatgagtgtgaaactgctaaggagttagaatcacatagaaagagctgttcaattggttcatgcccttattgccttaa

SEQ ID NO: 14104 - DNA, 80 bp, synthetic construct
  misc_feature 1..80: note = Synthetic: >NC_005223.1-cand-1790-1869
  source 1..80: mol_type = other DNA
tccatctgaggctacaccgtctgctcttcaagctcattttaaagtttgtaaactaacatcacggtttcaggaaaatttga

SEQ ID NO: 14105 - DNA, 80 bp, synthetic construct
  misc_feature 1..80: note = Synthetic: >NC_005223.1-cand-1870-1949
  source 1..80: mol_type = other DNA
agaagtcactaacaatgtatgagccaatgcagggttgttatcgaacattatctctatttaggtaccgcagtagatttttt

SEQ ID NO: 14106 - DNA, 80 bp, synthetic construct
  misc_feature 1..80: note = Synthetic: >NC_005223.1-cand-1950-2029
  source 1..80: mol_type = other DNA
gtaggtttagtgtggtgtatgttgcttgttttagagctaattgtatgggctgctagtgctgagacacaaaacttaaatga

SEQ ID NO: 14107 - DNA, 80 bp, synthetic construct
  misc_feature 1..80: note = Synthetic: >NC_005223.1-cand-2030-2109
  source 1..80: mol_type = other DNA
tggttggactgatactgcacatggatcaggaataatacctatgaaggctgatcttgaactggatttctcattaccttcat

SEQ ID NO: 14108 - DNA, 80 bp, synthetic construct
  misc_feature 1..80: note = Synthetic: >NC_005223.1-cand-2110-2189
  source 1..80: mol_type = other DNA
ctgctagctatacttaccgaagacaattacaaaacccggcaaatgaacaagaaaaaataccatttcatttacagataagt

SEQ ID NO: 14109 - DNA, 80 bp, synthetic construct
  misc_feature 1..80: note = Synthetic: >NC_005223.1-cand-2190-2269
  source 1..80: mol_type = other DNA
aaacaggtgattcatgctgaaattcaacatctaggccactggatggatgctacatttaacttaaaaactgcttttcactg

SEQ ID NO: 14110 - DNA, 80 bp, synthetic construct
  misc_feature 1..80: note = Synthetic: >NC_005223.1-cand-2270-2349
  source 1..80: mol_type = other DNA
ttatggttcatgtgaaaaatatgcctacccctggcaaacagcaggatgtttcgttgaaaaagattatgaatatgaaactg

SEQ ID NO: 14111 - DNA, 80 bp, synthetic construct
  misc_feature 1..80: note = Synthetic: >NC_005223.1-cand-2360-2439
  source 1..80: mol_type = other DNA
taatccccctgattgtcctggtgtagggacaggctgcactgcttgcggtgtatatctggataagttaaaatcagttggaa

SEQ ID NO: 14112 - DNA, 80 bp, synthetic construct
  misc_feature 1..80: note = Synthetic: >NC_005223.1-cand-2440-2519
  source 1..80: mol_type = other DNA
aggtatttaagattgtgtctttaagatatacaaggaaagtatgcattcagttgggtaccgggcaaacctgtaaaactgtt

SEQ ID NO: 14113 - DNA, 80 bp, synthetic construct
  misc_feature 1..80: note = Synthetic: >NC_005223.1-cand-2520-2599
  source 1..80: mol_type = other DNA
gacagtaatgattgtttaataactacatcagttaaagtgtgcttgataggtaccatttcaaagttccaaccttctgatac

SEQ ID NO: 14114 - DNA, 80 bp, synthetic construct
  misc_feature 1..80: note = Synthetic: >NC_005223.1-cand-2600-2679
  source 1..80: mol_type = other DNA
cctcttattcctcggtcctctccaacaaggtggtttaatttttaagcaatggtgtactactacatgtcaatttggtgatc

SEQ ID NO: 14115 - DNA, 80 bp, synthetic construct
  misc_feature 1..80: note = Synthetic: >NC_005223.1-cand-2680-2759
  source 1..80: mol_type = other DNA
ccggagatataatgagtacacccacagggatgaagtgtccagaacttaatggttcattcagaaaaaaatgtgcatttgca

SEQ ID NO: 14116 - DNA, 80 bp, synthetic construct
  misc_feature 1..80: note = Synthetic: >NC_005831.2-cand-12540-12619
  source 1..80: mol_type = other DNA
gtaagtgtttgaagatgaactgtgttcgttttaaaaatgctgatcttaaggatggttattttgttataaagaggtgtact

SEQ ID NO: 14117 - DNA, 80 bp, synthetic construct
  misc_feature 1..80: note = Synthetic: >NC_005831.2-cand-12620-12699
  source 1..80: mol_type = other DNA
aagtcggttatggaacacgagcaatccatgtataacctacttaacttttctggtgctttggctgagcatgatttctttac

SEQ ID NO: 14118 - DNA, 80 bp, synthetic construct
  misc_feature 1..80: note = Synthetic: >NC_005831.2-cand-12700-12779
  source 1..80: mol_type = other DNA
ttggaaagatggcagagtcatttatggtaatgttagtagacataatcttactaaatatactatgatggacttggtctatg

SEQ ID NO: 14119 - DNA, 80 bp, synthetic construct
  misc_feature 1..80: note = Synthetic: >NC_005831.2-cand-12770-12849
  source 1..80: mol_type = other DNA
ttggtctatgctatgcgtaactttgatgaacaaaattgtgatgttctaaaagaagtattagttttaactggttgttgtga

SEQ ID NO: 14120 - DNA, 80 bp, synthetic construct
  misc_feature 1..80: note = Synthetic: >NC_005831.2-cand-12850-12929
  source 1..80: mol_type = other DNA
caattcttattttgatagtaagggttggtatgacccagttgaaaatgaagatatacatagagtttatgcatctcttggca

SEQ ID NO: 14121 - DNA, 80 bp, synthetic construct
  misc_feature 1..80: note = Synthetic: >NC_005831.2-cand-12930-13009
  source 1..80: mol_type = other DNA
aaattgtagctagagctatgcttaaatgcgttgctctatgcgatgcgatggttgctaaaggtgttgttggtgttttaaca

SEQ ID NO: 14122 - DNA, 80 bp, synthetic construct
  misc_feature 1..80: note = Synthetic: >NC_005831.2-cand-13010-13089
  source 1..80: mol_type = other DNA
ttagataaccaagatcttaatggtaacttttatgattttggtgattttgttgttagcttacctaatatgggtgttccctg

SEQ ID NO: 14123 - DNA, 80 bp, synthetic construct
  misc_feature 1..80: note = Synthetic: >NC_005831.2-cand-13090-13169
  source 1..80: mol_type = other DNA
ttgtacatcatattattcttatatgatgcctattatgggtttaactaattgtttagctagtgagtgttttgtcaagagtg

SEQ ID NO: 14124 - DNA, 80 bp, synthetic construct
  misc_feature 1..80: note = Synthetic: >NC_005831.2-cand-13170-13249
  source 1..80: mol_type = other DNA
atatttttggtagtgattttaaaacttttgatttgcttaagtatgatttcactgaacataaagaaaatttattcaataag

SEQ ID NO: 14125 - DNA, 80 bp, synthetic construct
  misc_feature 1..80: note = Synthetic: >NC_005831.2-cand-13250-13329
  source 1..80: mol_type = other DNA
tactttaagcattggagttttgattatcatcctaattgtagtgactgttatgatgatatgtgtgttatacattgtgctaa

SEQ ID NO: 14126 - DNA, 80 bp, synthetic construct
  misc_feature 1..80: note = Synthetic: >NC_005831.2-cand-13330-13409
  source 1..80: mol_type = other DNA
ttttaatacactatttgccacaactataccaggtactgcttttggtccactatgtcgtaaagtttttatagatggtgttc

SEQ ID NO: 14127 - DNA, 80 bp, synthetic construct
  misc_feature 1..80: note = Synthetic: >NC_005831.2-cand-13410-13489
  source 1..80: mol_type = other DNA
cacttgttacaactgctggttatcattttaagcaattaggtttggtttggaataaagatgttaacacacactcagttagg

SEQ ID NO: 14128 - DNA, 80 bp, synthetic construct
  misc_feature 1..80: note = Synthetic: >NC_005831.2-cand-13490-13569
  source 1..80: mol_type = other DNA
ttgacaattactgaacttttgcaatttgtcaccgacccttccttgataatagcttcttccccagcactcgttgatcaacg

SEQ ID NO: 14129 - DNA, 80 bp, synthetic construct
  misc_feature 1..80: note = Synthetic: >NC_005831.2-cand-13570-13649
  source 1..80: mol_type = other DNA
cactatttgtttttctgttgcagcattgagtactggtttgacaaatcaagttgttaagccaggtcattttaatgaagagt

SEQ ID NO: 14130 - DNA, 80 bp, synthetic construct
  misc_feature 1..80: note = Synthetic: >NC_005831.2-cand-13650-13729
  source 1..80: mol_type = other DNA
tttataactttcttcgtttaagaggtttctttgatgaaggttctgaacttacattaaaacatttcttcttcgcacagaat

SEQ ID NO: 14131 - DNA, 80 bp, synthetic construct
  misc_feature 1..80: note = Synthetic: >NC_005831.2-cand-13730-13809
  source 1..80: mol_type = other DNA
ggtgatgctgctgttaaagattttgacttttaccgttataataagcctaccattttagatatttgtcaagctagagttac

SEQ ID NO: 14132 - DNA, 80 bp, synthetic construct
  misc_feature 1..80: note = Synthetic: >NC_006213.1-cand-11870-11949
  source 1..80: mol_type = other DNA
ctcagttattaattgttttgtttgctaatccagctgctgtggatagcaagtgcctgactagtattgaagaagtttgcgat

SEQ ID NO: 14133 - DNA, 80 bp, synthetic construct
  misc_feature 1..80: note = Synthetic: >NC_006213.1-cand-11950-12029
  source 1..80: mol_type = other DNA
gattacgcaaaggacaatactgttttgcaggctttacagagtgaatttgttaatatggctagcttcgttgaatatgaagt

SEQ ID NO: 14134 - DNA, 80 bp, synthetic construct
  misc_feature 1..80: note = Synthetic: >NC_006213.1-cand-12030-12109
  source 1..80: mol_type = other DNA
tgctaagaaaaatcttgatgaggcgcgttttagtggttctgctaatcaacagcagttaaaacagctagagaaagcctgta

SEQ ID NO: 14135 - DNA, 80 bp, synthetic construct
  misc_feature 1..80: note = Synthetic: >NC_006213.1-cand-12110-12189
  source 1..80: mol_type = other DNA
atattgctaaatctgcttatgaacgcgaccgtgctgtagcaaaaaagttggagcgtatggctgatttggctctcactaat

SEQ ID NO: 14136 - DNA, 80 bp, synthetic construct
  misc_feature 1..80: note = Synthetic: >NC_006213.1-cand-12190-12269
  source 1..80: mol_type = other DNA
atgtataaagaagctagaattaatgataagaagagtaaggttgtttctgccttgcaaactatgctttttagtatggtgcg

SEQ ID NO: 14137 - DNA, 80 bp, synthetic construct
  misc_feature 1..80: note = Synthetic: >NC_006213.1-cand-12260-12339
  source 1..80: mol_type = other DNA
gtatggtgcgtaagttagataatcaagctctgaattcaatattagataacgctgtgaagggttgtgtaccattgaatgca

SEQ ID NO: 14138 - DNA, 80 bp, synthetic construct
  misc_feature 1..80: note = Synthetic: >NC_006213.1-cand-12340-12419
  source 1..80: mol_type = other DNA
ataccttcattggcagcaaatactctgaatataattgtaccagataaaagtgtttatgaccaggtagttgataatgtcta

SEQ ID NO: 14139 - DNA, 80 bp, synthetic construct
  misc_feature 1..80: note = Synthetic: >NC_006213.1-cand-12420-12499
  source 1..80: mol_type = other DNA
tgttacctatgcgggtaatgtatggcagattcaaactatccaggattcagatggtacaaataagcagttgaatgagatat

SEQ ID NO: 14140 - DNA, 80 bp, synthetic construct
  misc_feature 1..80: note = Synthetic: >NC_006213.1-cand-12500-12579
  source 1..80: mol_type = other DNA
ctgatgattgtaactggccactagttattattgcaaatcggtataatgaggtatctgctactgttttgcaaaataatgaa

SEQ ID NO: 14141 - DNA, 80 bp, synthetic construct
  misc_feature 1..80: note = Synthetic: >NC_006213.1-cand-12580-12659
  source 1..80: mol_type = other DNA
ttaatgcctgctaagttgaaaattcaggttgttaatagtggtccagatcagacttgtaatacacctactcaatgttacta

SEQ ID NO: 14142 - DNA, 80 bp, synthetic construct
  misc_feature 1..80: note = Synthetic: >NC_006213.1-cand-12660-12739
  source 1..80: mol_type = other DNA
taataatagtaacaatgggaagattgtttatgctatacttagtgatgttgatggtcttaagtatacaaaaattcttaaag

SEQ ID NO: 14143 - DNA, 80 bp, synthetic construct
  misc_feature 1..80: note = Synthetic: >NC_006213.1-cand-12740-12819
  source 1..80: mol_type = other DNA
atgatggcaattttgttgttttggagttagatcctccttgtaaatttactgttcaagatgctaaaggtcttaaaattaag

SEQ ID NO: 14144 - DNA, 80 bp, synthetic construct
  misc_feature 1..80: note = Synthetic: >NC_006213.1-cand-12820-12899
  source 1..80: mol_type = other DNA
tacctttattttgtaaaaggttgtaacacactagcaagaggctgggttgttggtacaatttcttctacagttagattgca

SEQ ID NO: 14145 - DNA, 80 bp, synthetic construct
  misc_feature 1..80: note = Synthetic: >NC_006213.1-cand-12900-12979
  source 1..80: mol_type = other DNA
agctggaactgctactgaatatgcttccaactcatctatattgtctttatgtgcgttttctgtagatcctaagaaaacgt

SEQ ID NO: 14146 - DNA, 80 bp, synthetic construct
  misc_feature 1..80: note = Synthetic: >NC_006213.1-cand-12980-13059
  source 1..80: mol_type = other DNA
atttagattttatacaacaaggaggaacacctattgccaattgtgttaaaatgttgtgtgaccatgctggtaccggtatg

SEQ ID NO: 14147 - DNA, 80 bp, synthetic construct
  misc_feature 1..80: note = Synthetic: >NC_006213.1-cand-13070-13149
  source 1..80: mol_type = other DNA
ttaaacccgatgctaccactagtcaggattcatatggtggtgcgtctgtttgtatatattgccgcgcacgagttgaacac

SEQ ID NO: 14148 - DNA, 80 bp, synthetic construct
  misc_feature 1..80: note = Synthetic: >NC_006213.1-cand-17010-17089
  source 1..80: mol_type = other DNA
acagcggccagccatgcagctgttgacgcattgtgtgaaaaagcatataaatttttgaatataaatgattgcactcgtat

SEQ ID NO: 14149 - DNA, 80 bp, synthetic construct
  misc_feature 1..80: note = Synthetic: >NC_006213.1-cand-17090-17169
  source 1..80: mol_type = other DNA
tgttccggccaaggtcagggtggagtgctatgataagtttaaaattaatgacaccactcgtaagtatgtgtttactacca

SEQ ID NO: 14150 - DNA, 80 bp, synthetic construct
  misc_feature 1..80: note = Synthetic: >NC_006213.1-cand-17170-17249
  source 1..80: mol_type = other DNA
taaatgcattacctgagatggtgactgatattgttgttgtagatgaagttagtatgcttaccaattatgagctttctgtt

SEQ ID NO: 14151 - DNA, 80 bp, synthetic construct
  misc_feature 1..80: note = Synthetic: >NC_006213.1-cand-17250-17329
  source 1..80: mol_type = other DNA
attaatgctcgtattcgcgctaagcattatgtttatattggtgatcctgctcaattgccagcaccacgtgtgttattgag

SEQ ID NO: 14152 - DNA, 80 bp, synthetic construct
  misc_feature 1..80: note = Synthetic: >NC_006213.1-cand-17330-17409
  source 1..80: mol_type = other DNA
caagggtacacttgaacctaaatattttaacactgttactaagctcatgtgttgcttagggccagacatttttcttggta

SEQ ID NO: 14153 - DNA, 80 bp, synthetic construct
  misc_feature 1..80: note = Synthetic: >NC_006213.1-cand-17410-17489
  source 1..80: mol_type = other DNA
catgttatagatgtcctaaggaaatcgttgatacagtgtccgccttggtttatgaaaataagcttaaggctaagaatgag

SEQ ID NO: 14154 - DNA, 80 bp, synthetic construct
  misc_feature 1..80: note = Synthetic: >NC_006213.1-cand-17490-17569
  source 1..80: mol_type = other DNA
agtagttcattgtgttttaaggtctattataagggcgttacaacacatgaaagttctagtgctgtaaatatgcagcagat

SEQ ID NO: 14155 - DNA, 80 bp, synthetic construct
  misc_feature 1..80: note = Synthetic: >NC_006213.1-cand-17590-17669
  source 1..80: mol_type = other DNA
tgaaggctaaccctttgtggcataaagctgtttttattagcccatataatagtcagaactttgcagctaagcgtgttttg

SEQ ID NO: 14156 - DNA, 80 bp, synthetic construct
  misc_feature 1..80: note = Synthetic: >NC_006213.1-cand-17670-17749
  source 1..80: mol_type = other DNA
ggtttacaaacccaaaccgtggattctgctcaaggttctgaatatgattatgttatatattcacagactgcagaaacagc

SEQ ID NO: 14157 - DNA, 80 bp, synthetic construct
  misc_feature 1..80: note = Synthetic: >NC_006213.1-cand-17750-17829
  source 1..80: mol_type = other DNA
gcattctgtaaatgttaatcgcttcaatgttgctattactcgagccaagaaaggtattctttgtgttatgagtaatatgc

SEQ ID NO: 14158 - DNA, 80 bp, synthetic construct
  misc_feature 1..80: note = Synthetic: >NC_006213.1-cand-17830-17909
  source 1..80: mol_type = other DNA
agttgtttgaagcattacagtttactacattgaccttagataaagtgccacaggccgtcgaaactaaagttcaatgtagt

SEQ ID NO: 14159 - DNA, 80 bp, synthetic construct
  misc_feature 1..80: note = Synthetic: >NC_006213.1-cand-17920-17999
  source 1..80: mol_type = other DNA
ttaaagattgtagcaagagttatagcggttatcacccagctcatgctccttcatttttggcagtagatgacaaatataag

SEQ ID NO: 14160 - DNA, 80 bp, synthetic construct
  misc_feature 1..80: note = Synthetic: >NC_006213.1-cand-18000-18079
  source 1..80: mol_type = other DNA
gcaactggcgatttagccgtgtgtcttggtattggtgattctgctgttacatattcaagattaatatcactcatgggttt

SEQ ID NO: 14161 - DNA, 80 bp, synthetic construct
  misc_feature 1..80: note = Synthetic: >NC_006213.1-cand-18080-18159
  source 1..80: mol_type = other DNA
taaattggatgttacccttgatgggtattgtaagctttttataactaaagaagaagctgttaaacgcgtgcgtgcctggg

SEQ ID NO: 14162 - DNA, 80 bp, synthetic construct
  misc_feature 1..80: note = Synthetic: >NC_006213.1-cand-18160-18239
  source 1..80: mol_type = other DNA
ttggctttgatgctgaaggtgctcatgccacgcgtgatagcattgggacaaatttcccacttcaattaggattttccaca

SEQ ID NO: 14163 - DNA, 80 bp, synthetic construct
  misc_feature 1..80: note = Synthetic: >NC_006213.1-cand-18240-18319
  source 1..80: mol_type = other DNA
ggaattgattttgttgtggaagccactggtttgtttgctgatagagatggttacagctttaaaaaggctgtggcgaaagc

SEQ ID NO: 14164 - DNA, 80 bp, synthetic construct
  misc_feature 1..80: note = Synthetic: >NC_007382.1-cand-780-859
  source 1..80: mol_type = other DNA
ttgtccatattagcccattgtcaggaagtgctcagcatgtagaggagtgttcctgttatcctcgatatcctgacgtcaga

SEQ ID NO: 14165 - DNA, 80 bp, synthetic construct
  misc_feature 1..80: note = Synthetic: >NC_007382.1-cand-970-1049
  source 1..80: mol_type = other DNA
acccagaaacgacgacagatctagcaatagtaattgcaggaatcctaacaatgagagagggaatccaggagtgaaaggct

SEQ ID NO: 14166 - DNA, 80 bp, synthetic construct
  misc_feature 1..80: note = Synthetic: >NC_007382.1-cand-1060-1139
  source 1..80: mol_type = other DNA
caatggagatgacgtgtggatgggaagaacgatcagcaaggatttacgctcaggttatgaaactttcaaagtcattggtg

SEQ ID NO: 14167 - DNA, 80 bp, synthetic construct
  misc_feature 1..80: note = Synthetic: >NC_007382.1-cand-1150-1229
  source 1..80: mol_type = other DNA
acctaattccaaatcgcagatcaatagacaggtcatagttgacagcaataattggtcaggttactctggtattttctctg

SEQ ID NO: 14168 - DNA, 80 bp, synthetic construct
  misc_feature 1..80: note = Synthetic: >NC_007382.1-cand-1200-1279
  source 1..80: mol_type = other DNA
attggtcaggttactctggtattttctctgttgagggcaaaagatgcatcaataggtgcttttatgtggagttgataagg

SEQ ID NO: 14169 - DNA, 80 bp, synthetic construct
  misc_feature 1..80: note = Synthetic: >NC_007382.1-cand-1290-1369
  source 1..80: mol_type = other DNA
aggagactagagtatggtggacctcaaacagtattgttgtgttttgtggcacttcaggtacttatggaacaggctcatgg

SEQ ID NO: 14170 - DNA, 80 bp, synthetic construct
  misc_feature 1..80: note = Synthetic: >NC_007543.1-cand-0-79
  source 1..80: mol_type = other DNA
tttaaaagcacttgctggaaatggcgactcaggcttccgttgaatggatctttaacgtagctggatcagctgcttcatct

SEQ ID NO: 14171 - DNA, 80 bp, synthetic construct
  misc_feature 1..80: note = Synthetic: >NC_007543.1-cand-90-169
  source 1..80: mol_type = other DNA
aagcgatcaaggatgcaggagggagtgaaaacttctcaaaatatgttatcacaaaattttatgataattataaagattgc

SEQ ID NO: 14172 - DNA, 80 bp, synthetic construct
  misc_feature 1..80: note = Synthetic: >NC_007543.1-cand-180-259
  source 1..80: mol_type = other DNA
ctggtgtgtataatgcatgtataggtagagctaaaactatagataaagcattaaatgatccaaaagtagcagagagaaat

SEQ ID NO: 14173 - DNA, 80 bp, synthetic construct
  misc_feature 1..80: note = Synthetic: >NC_007543.1-cand-270-349
  source 1..80: mol_type = other DNA
atacaaatgtagcaacaatcagtagacttgatttagaattagcagaattaaaattgatgttatctaatctaggaattaaa

SEQ ID NO: 14174 - DNA, 80 bp, synthetic construct
  misc_feature 1..80: note = Synthetic: >NC_007543.1-cand-360-439
  source 1..80: mol_type = other DNA
gagtgttaaattcaatgttctctgtggtgagagaaaaaggtagatcatcaaacgtaattatgatgaaacaaaatgcagtg

SEQ ID NO: 14175 - DNA, 80 bp, synthetic construct
  misc_feature 1..80: note = Synthetic: >NC_007543.1-cand-450-529
  source 1..80: mol_type = other DNA
aagaaggaaagttaaaaattaaagtagaaagaaatgaaacatatactgaatcacttaaaaataaaatagaagaattggaa

SEQ ID NO: 14176 - DNA, 80 bp, synthetic construct
  misc_feature 1..80: note = Synthetic: >NC_007543.1-cand-540-619
  source 1..80: mol_type = other DNA
atgcatttgaaaaaggaaaagatatcaccattgatttagacgctatgaacggtgaagttaaattagatggaaattcatgt

SEQ ID NO: 14177 - DNA, 80 bp, synthetic construct
  misc_feature 1..80: note = Synthetic: >NC_007543.1-cand-630-709
  source 1..80: mol_type = other DNA
caactgctgctcttgtttcgactattttgggtacacctattaaaatgtataatgaatctggacaacctttgtttgatgtg

SEQ ID NO: 14178 - DNA, 80 bp, synthetic construct
  misc_feature 1..80: note = Synthetic: >NC_007543.1-cand-720-799
  source 1..80: mol_type = other DNA
tgaatccaaaaaacattatcgaaaaaatgattgaattagaaattccaatttttaaatcagattataggaataatgaatct

SEQ ID NO: 14179 - DNA, 80 bp, synthetic construct
  misc_feature 1..80: note = Synthetic: >NC_007543.1-cand-800-879
  source 1..80: mol_type = other DNA
ccagattttgatagttggaatgaaaggagcaatttaaaaattgtaagtgtgaatgactgtcatgcaatatgcatatttaa

SEQ ID NO: 14180 - DNA, 80 bp, synthetic construct
  misc_feature 1..80: note = Synthetic: >NC_007546.1-cand-230-309
  source 1..80: mol_type = other DNA
gatttggttaaagaagtcatgaatatacagaatcaaacattaaatacagtagttactgagaataaagttgaaatagaaga

SEQ ID NO: 14181 - DNA, 80 bp, synthetic construct
  misc_feature 1..80: note = Synthetic: >NC_007546.1-cand-310-389
  source 1..80: mol_type = other DNA
aatagttaaaaaatacattccatcatataatactgatagcctcattgttaaaaagttaactgaaatccaggaatcaagtg

SEQ ID NO: 14182 - DNA, 80 bp, synthetic construct
  misc_feature 1..80: note = Synthetic: >NC_007546.1-cand-390-469
  source 1..80: mol_type = other DNA
ctaaaacatataatacattgtttagattatttactccagttaaaagttatttatatgatataaatggtgagaaaaaatta

SEQ ID NO: 14183 - DNA, 80 bp, synthetic construct
  misc_feature 1..80: note = Synthetic: >NC_007546.1-cand-470-549
  source 1..80: mol_type = other DNA
tcgactagatggtattggaaattgctcaaagatgatttacctgctggtgattactcagttagacaattcttcctgtcact

SEQ ID NO: 14184 - DNA, 80 bp, synthetic construct
  misc_feature 1..80: note = Synthetic: >NC_007546.1-cand-550-629
  source 1..80: mol_type = other DNA
atatttaaatgttttagaggaaatgcccgattacataatgcttcgtgatatggcagtggataacccatattcagcagaag

SEQ ID NO: 14185 - DNA, 80 bp, synthetic construct
  misc_feature 1..80: note = Synthetic: >NC_007546.1-cand-630-709
  source 1..80: mol_type = other DNA
caggtaaaatcgtagatggaaagtctaaagaaattttgattgaactatatcaagaccagatgacagaaggatatattaga

SEQ ID NO: 14186 - DNA, 80 bp, synthetic construct
  misc_feature 1..80: note = Synthetic: >NC_007546.1-cand-710-789
  source 1..80: mol_type = other DNA
agatatatgtctgaattaagacataaaatatctggagagacaaatactgcaaaatacccagctattctacatcccgtgga

SEQ ID NO: 14187 - DNA, 80 bp, synthetic construct
  misc_feature 1..80: note = Synthetic: >NC_007546.1-cand-780-859
  source 1..80: mol_type = other DNA
atcccgtggataatgaacttaatcaatactttcttgagcatcagttaattcaaccattaactacaaggaacattgcagaa

SEQ ID NO: 14188 - DNA, 80 bp, synthetic construct
  misc_feature 1..80: note = Synthetic: >NC_007546.1-cand-860-939
  source 1..80: mol_type = other DNA
ttgattccaactcaattatatcatgatccaaattacgtttttaatattgatgcagcctttttaacaaattcaagatttgt

SEQ ID NO: 14189 - DNA, 80 bp, synthetic construct
  misc_feature 1..80: note = Synthetic: >NC_007546.1-cand-940-1019
  source 1..80: mol_type = other DNA
tccaccatacttaacacaggataggattggattacatgatggatttgaatcaatatgggattcaaaaactcatgctgatt

SEQ ID NO: 14190 - DNA, 80 bp, synthetic construct
  misc_feature 1..80: note = Synthetic: >NC_007546.1-cand-1020-1099
  source 1..80: mol_type = other DNA
acgtttcagctagaagatttatacctgatttaactgaactggtggatgctgaaaagcaaataaaagaaatggctgcacat

SEQ ID NO: 14191 - DNA, 80 bp, synthetic construct
  misc_feature 1..80: note = Synthetic: >NC_007546.1-cand-1100-1179
  source 1..80: mol_type = other DNA
ttacaactagaggctattacggtacaggttgaatcacaatttttagcaggaattagtgctgctgcagctaatgaagcgtt

SEQ ID NO: 14192 - DNA, 80 bp, synthetic construct
  misc_feature 1..80: note = Synthetic: >NC_007546.1-cand-1190-1269
  source 1..80: mol_type = other DNA
attggctcagttttatctaccagaacaatagctgtagaattcataacctcaaactatatgtcactagcatcatgtatgta

SEQ ID NO: 14193 - DNA, 80 bp, synthetic construct
  misc_feature 1..80: note = Synthetic: >NC_007546.1-cand-1280-1359
  source 1..80: mol_type = other DNA
attatgccatcagagattttcttaagagaatcattagttgctatgcaattagcaataataaatacccttatttatccagc

SEQ ID NO: 14194 - DNA, 80 bp, synthetic construct
  misc_feature 1..80: note = Synthetic: >NC_007546.1-cand-1360-1439
  source 1..80: mol_type = other DNA
tctaggtttagcgcaaatgcattatcaagcaggtgaagtgaggactccattcgaattagctgaaatgcaagtagctaata

SEQ ID NO: 14195 - DNA, 80 bp, synthetic construct
  misc_feature 1..80: note = Synthetic: >NC_007546.1-cand-1440-1519
  source 1..80: mol_type = other DNA
gatctattagacaatggttacatcattgtaatacacttcaatttggtagacagataacggaagggataattcatctacga

SEQ ID NO: 14196 - DNA, 80 bp, synthetic construct
  misc_feature 1..80: note = Synthetic: >NC_007572.1-cand-170-249
  source 1..80: mol_type = other DNA
ctgggtcaatacttaaatcggcattctctacacctgaaataactggaccacatacgaatacagtaattgaatggagtaac

SEQ ID NO: 14197 - DNA, 80 bp, synthetic construct
  misc_feature 1..80: note = Synthetic: >NC_007572.1-cand-240-319
  source 1..80: mol_type = other DNA
atggagtaacttaataaatactaatacttggctgttatatcagaaaccattaaattcagttagattattaaagcatggtc

SEQ ID NO: 14198 - DNA, 80 bp, synthetic construct
  misc_feature 1..80: note = Synthetic: >NC_007572.1-cand-320-399
  source 1..80: mol_type = other DNA
cagacacttataacagcaatctagcagcatttgagctatggtatggaaaatctggaactactataacatccgtatattat

SEQ ID NO: 14199 - DNA, 80 bp, synthetic construct
  misc_feature 1..80: note = Synthetic: >NC_007572.1-cand-400-479
  source 1..80: mol_type = other DNA
aacactatcaataaccaaaataagacgcatgatgctaattcagattgtttaattttattttggaacgagggatctacaca

SEQ ID NO: 14200 - DNA, 80 bp, synthetic construct
  misc_feature 1..80: note = Synthetic: >NC_007572.1-cand-490-569
  source 1..80: mol_type = other DNA
caagtcgtaacattcaactggaacgtgggtggtatactaattaaaccaataaattcaagtagaatgagaatttgcatgtc

SEQ ID NO: 14201 - DNA, 80 bp, synthetic construct
  misc_feature 1..80: note = Synthetic: >NC_007572.1-cand-570-649
  source 1..80: mol_type = other DNA
aggaatggaaaattttaataatgattcatttaattgggaaaattggaatcacgagtttccaagaagtaatcctggtatta

SEQ ID NO: 14202 - DNA, 80 bp, synthetic construct
  misc_feature 1..80: note = Synthetic: >NC_007572.1-cand-660-739
  source 1..80: mol_type = other DNA
gtatactgagtattttctggcaagtagtgatccatatacatatcttaaaaatttacaacagccaacagctaaaactgtag

SEQ ID NO: 14203 - DNA, 80 bp, synthetic construct
  misc_feature 1..80: note = Synthetic: >NC_007572.1-cand-790-869
  source 1..80: mol_type = other DNA
cctattaatgttagtaatattattagtaaggactcattgtggcaagaagttcaatacgtacgtgatataactttgcaatg

SEQ ID NO: 14204 - DNA, 80 bp, synthetic construct
  misc_feature 1..80: note = Synthetic: >NC_007572.1-cand-820-899
  source 1..80: mol_type = other DNA
gactcattgtggcaagaagttcaatacgtacgtgatataactttgcaatgtaaaatattatctgaaattgtgaaaggtgg

SEQ ID NO: 14205 - DNA, 80 bp, synthetic construct
  misc_feature 1..80: note = Synthetic: >NC_007572.1-cand-910-989
  source 1..80: mol_type = other DNA
tatgactatactagtgtaacgtttaaaacagttaatcatacatattcatacactagagcaggagaaaatgttaatgctca

SEQ ID NO: 14206 - DNA, 80 bp, synthetic construct
  misc_feature 1..80: note = Synthetic: >NC_007572.1-cand-970-1049
  source 1..80: mol_type = other DNA
ggagaaaatgttaatgctcatgtgactataagtttcaataatgtaaaagaacgagcatatggaggatcactgcctactga

SEQ ID NO: 14207 - DNA, 80 bp, synthetic construct
  misc_feature 1..80: note = Synthetic: >NC_007572.1-cand-1060-1139
  source 1..80: mol_type = other DNA
ggtagatttgatatactcgatactgattcatatgtatatattgattattgggatgattcagaaatatttaaaaatatggt

SEQ ID NO: 14208 - DNA, 80 bp, synthetic construct
  misc_feature 1..80: note = Synthetic: >NC_007572.1-cand-1140-1219
  source 1..80: mol_type = other DNA
atatgttcgcgatgtacgagcggatataggaggatttcagtattcttattcgtcagagatgtcatattattttcagatac

SEQ ID NO: 14209 - DNA, 80 bp, synthetic construct
  misc_feature 1..80: note = Synthetic: >NC_007572.1-cand-1220-1299
  source 1..80: mol_type = other DNA
ctgtaggatcatatcctggattacattcatcaaggttgcaacttgtttatgatagatgtttattatctcaacaatttact

SEQ ID NO: 14210 - DNA, 80 bp, synthetic construct
  misc_feature 1..80: note = Synthetic: >NC_007572.1-cand-1300-1379
  source 1..80: mol_type = other DNA
gattatgcagctttgaattcgttaagattcgtattcagagtagtttcgactagtggatggttcattacaacaggagatat

SEQ ID NO: 14211 - DNA, 80 bp, synthetic construct
  misc_feature 1..80: note = Synthetic: >NC_007572.1-cand-1380-1459
  source 1..80: mol_type = other DNA
aaatactagaagagtagcatcagggacaggatttgcttattcagacggtcatgtagctaatacagttggaactatttcat

SEQ ID NO: 14212 - DNA, 80 bp, synthetic construct
  misc_feature 1..80: note = Synthetic: >NC_010563.1-cand-6580-6659
  source 1..80: mol_type = other DNA
atctcaacctctcagtagcccattccggaagataacttgtgttgtaacttcctcttccatcaacaacaggaaccatggtg

SEQ ID NO: 14213 - DNA, 80 bp, synthetic construct
  misc_feature 1..80: note = Synthetic: >NC_010563.1-cand-6660-6739
  source 1..80: mol_type = other DNA
atgccaactctagcaaggtcatcttttaatgacatgagtttgctcatatcagctttccacttccgttcaaagtcatttgg

SEQ ID NO: 14214 - DNA, 80 bp, synthetic construct
  misc_feature 1..80: note = Synthetic: >NC_010563.1-cand-6740-6819
  source 1..80: mol_type = other DNA
gttgactcttacaaaagtttccaataagatgagagtcttacccatgagattgaaaccatcgggcgtcactttgggaagag

SEQ ID NO: 14215 - DNA, 80 bp, synthetic construct
  misc_feature 1..80: note = Synthetic: >NC_010563.1-cand-6820-6899
  source 1..80: mol_type = other DNA
tgggacagatcacaccatgatcagagaggatgacatccacaaacttttgctcaaagttgtgtctgcaggcattgaccttg

SEQ ID NO: 14216 - DNA, 80 bp, synthetic construct
  misc_feature 1..80: note = Synthetic: >NC_010563.1-cand-6880-6959
  source 1..80: mol_type = other DNA
gtctgcaggcattgaccttgcaagactccagttcaactaaaagtgacaacaatttgaagccctcaacaaggaccagtctg

SEQ ID NO: 14217 - DNA, 80 bp, synthetic construct
  misc_feature 1..80: note = Synthetic: >NC_010563.1-cand-6980-7059
  source 1..80: mol_type = other DNA
tgcgtctttctggaaagatagctctactaattctgggacatactttcttacaagatccttcaattccagtaaaaaagtgt

SEQ ID NO: 14218 - DNA, 80 bp, synthetic construct
  misc_feature 1..80: note = Synthetic: >NC_011500.2-cand-0-79
  source 1..80: mol_type = other DNA
tttttttgaaaagtcttgtgttagccatggctacttttaaagatgcatgctttcattatcgtagattaactgctttaaat

SEQ ID NO: 14219 - DNA, 80 bp, synthetic construct
  misc_feature 1..80: note = Synthetic: >NC_011500.2-cand-60-139
  source 1..80: mol_type = other DNA
gtagattaactgctttaaatcggagattatgcaacattggtgcaaattctatttgcatgccagttcctgatgcgaaaatt

SEQ ID NO: 14220 - DNA, 80 bp, synthetic construct
  misc_feature 1..80: note = Synthetic: >NC_011500.2-cand-160-239
  source 1..80: mol_type = other DNA
ttgtcaaatagctgatttaacccattgttatggttgctcattgccgcatgtttgcaaatggtgtgttcagaacagaagat

SEQ ID NO: 14221 - DNA, 80 bp, synthetic construct
  misc_feature 1..80: note = Synthetic: >NC_011500.2-cand-240-319
  source 1..80: mol_type = other DNA
gcttccttgacaatgaacctcatttgcttaagcttagaactgtgaaacatccaattaccaaagacaaattacagtgtatc

SEQ ID NO: 14222 - DNA, 80 bp, synthetic construct
  misc_feature 1..80: note = Synthetic: >NC_011500.2-cand-320-399
  source 1..80: mol_type = other DNA
atagacttgtacaatataatatttccaattaatgataaagtaattagaaaatttgaaagaatgataaagcaaagaaaatg

SEQ ID NO: 14223 - DNA, 80 bp, synthetic construct
  misc_feature 1..80: note = Synthetic: >NC_011500.2-cand-400-479
  source 1..80: mol_type = other DNA
taggaatcaatataaaattgaatggtataatcatttgctgctcccaattacattaaatgctgctgcatttaagtttgatg

SEQ ID NO: 14224 - DNA, 80 bp, synthetic construct
  misc_feature 1..80: note = Synthetic: >NC_011500.2-cand-490-569
  source 1..80: mol_type = other DNA
ttattatgtttttgggttatatgagaaatcagtcagtgatatatatgctccatatagaattgttaactttataaatgaat

SEQ ID NO: 14225 - DNA, 80 bp, synthetic construct
  misc_feature 1..80: note = Synthetic: >NC_011500.2-cand-580-659
  source 1..80: mol_type = other DNA
attgcttgatgatattaactttacaagaatgtccaatctaccaatagagttgagaaaccattatgcaaagaaatacttcc

SEQ ID NO: 14226 - DNA, 80 bp, synthetic construct
  misc_feature 1..80: note = Synthetic: >NC_011500.2-cand-660-739
  source 1..80: mol_type = other DNA
aattatcaagactgccatcatcaaaactaaagcaaatttacttttcagattttactaaagaaactgtgatttttaatact

SEQ ID NO: 14227 - DNA, 80 bp, synthetic construct
  misc_feature 1..80: note = Synthetic: >NC_011500.2-cand-740-819
  source 1..80: mol_type = other DNA
tatacaaaaacgccaggaagatcaatatacagaaatgtaactgaatttaattggagagatgaattggagctttattctga

SEQ ID NO: 14228 - DNA, 80 bp, synthetic construct
  misc_feature 1..80: note = Synthetic: >NC_012777.1-cand-4610-4689
  source 1..80: mol_type = other DNA
ttatcatcagtctttgggattacaacactcttattgctagacagatcaagtgcagtcgaacaacgtgcatctttcaatgg

SEQ ID NO: 14229 - DNA, 80 bp, synthetic construct
  misc_feature 1..80: note = Synthetic: >NC_012777.1-cand-4720-4799
  source 1..80: mol_type = other DNA
ggtgaagccactggttgaattaacgaaagataacatcagcgatagcatctgttttgaaacaccaggtgccttgacatcaa

SEQ ID NO: 14230 - DNA, 80 bp, synthetic construct
  misc_feature 1..80: note = Synthetic: >NC_012777.1-cand-4770-4849
  source 1..80: mol_type = other DNA
gttttgaaacaccaggtgccttgacatcaaattcatctttgttcagaaaccttgagccactctctagtaacagtgacgac

SEQ ID NO: 14231 - DNA, 80 bp, synthetic construct
  misc_feature 1..80: note = Synthetic: >NC_012777.1-cand-4880-4959
  source 1..80: mol_type = other DNA
acaaaaacgcttttaaatttcaactttggttccaagaatttttcaaagcattttatctgatctgttaccctgtccggcgt

SEQ ID NO: 14232 - DNA, 80 bp, synthetic construct
  misc_feature 1..80: note = Synthetic: >NC_012777.1-cand-4930-5009
  source 1..80: mol_type = other DNA
ttttatctgatctgttaccctgtccggcgtctctttagttatgaaatggcaaatgtaggacaggttgagaagaaatttga

SEQ ID NO: 14233 - DNA, 80 bp, synthetic construct
  misc_feature 1..80: note = Synthetic: >NC_012777.1-cand-5010-5089
  source 1..80: mol_type = other DNA
accgactagtgagcatagtttcaacactgtcacccaatacaagaatcatcacttttcttacacatctatagattagatac

SEQ ID NO: 14234 - DNA, 80 bp, synthetic construct
  misc_feature 1..80: note = Synthetic: >NC_012777.1-cand-5090-5169
  source 1..80: mol_type = other DNA
tcactctttgtgattaaatcttccttcaccttttccatcaaatcaacatgatgtgcaaggccaaagaaagccatgatgaa

SEQ ID NO: 14235 - DNA, 80 bp, synthetic construct
  misc_feature 1..80: note = Synthetic: >NC_012777.1-cand-5170-5249
  source 1..80: mol_type = other DNA
gtatctaaggttttgtaagaacttttggctccttttgctaggattcaaaagtactgacatgaaaattatcttcaatagaa

SEQ ID NO: 14236 - DNA, 80 bp, synthetic construct
  misc_feature 1..80: note = Synthetic: >NC_012777.1-cand-5250-5329
  source 1..80: mol_type = other DNA
ttttaatttcatcaatgcagccttccagctcctttacatcagaaagccactgcaccattgtatcgatgacacccttgatc

SEQ ID NO: 14237 - DNA, 80 bp, synthetic construct
  misc_feature 1..80: note = Synthetic: >NC_012777.1-cand-5370-5449
  source 1..80: mol_type = other DNA
cagcataaaaagaacagatgtgctcaccatccctatttatagaatagcattttgaagactcaccagttttctggtaaatg

SEQ ID NO: 14238 - DNA, 80 bp, synthetic construct
  misc_feature 1..80: note = Synthetic: >NC_012777.1-cand-5410-5489
  source 1..80: mol_type = other DNA
agaatagcattttgaagactcaccagttttctggtaaatgagagtaaatgtacctttgggagactttatttcttggaaaa

SEQ ID NO: 14239 - DNA, 80 bp, synthetic construct
  misc_feature 1..80: note = Synthetic: >NC_012777.1-cand-5490-5569
  source 1..80: mol_type = other DNA
aacactcttcacaactcactcttccatatctgttctttccactagcattttgtcttatcttagatactgatgatgtcttc

SEQ ID NO: 14240 - DNA, 80 bp, synthetic construct
  misc_feature 1..80: note = Synthetic: >NC_012777.1-cand-5580-5659
  source 1..80: mol_type = other DNA
ccaaactcaaagataacgaagaaatcatgcggaggtcagttatgtcctcactaaaactggtttcatccaagtgcatttgg

SEQ ID NO: 14241 - DNA, 80 bp, synthetic construct
  misc_feature 1..80: note = Synthetic: >NC_012777.1-cand-5660-5739
  source 1..80: mol_type = other DNA
ggtctgaagttatctctctcataattcataactgggatgcttcctgactttttaaaagacataaaatcttcaagagacgg

SEQ ID NO: 14242 - DNA, 80 bp, synthetic construct
  misc_feature 1..80: note = Synthetic: >NC_012777.1-cand-5740-5819
  source 1..80: mol_type = other DNA
ccaattctcgaaatcagaggcctcaagtccataactgtgagcggtaagcccatgagcatttagactattgaagactttgt

SEQ ID NO: 14243 - DNA, 80 bp, synthetic construct
  misc_feature 1..80: note = Synthetic: >NC_012777.1-cand-5820-5899
  source 1..80: mol_type = other DNA
taagaatcaaccttctatagtctagaaagatttcattaagcgctttggtcttacccttacttttgttttttggcattcta

SEQ ID NO: 14244 - DNA, 80 bp, synthetic construct
  misc_feature 1..80: note = Synthetic: >NC_021928.1-cand-5360-5439
  source 1..80: mol_type = other DNA
ttgcaattactcaagcttaaactactacaacaaaactgcactaagcctaattcaaccaattgcagataacatcaatcgcc

SEQ ID NO: 14245 - DNA, 80 bp, synthetic construct
  misc_feature 1..80: note = Synthetic: >NC_021928.1-cand-5400-5479
  source 1..80: mol_type = other DNA
ctaagcctaattcaaccaattgcagataacatcaatcgccttacaaagcccatcacaagctcagaaattcaaagtcgttt

SEQ ID NO: 14246 - DNA, 80 bp, synthetic construct
  misc_feature 1..80: note = Synthetic: >NC_021928.1-cand-5520-5599
  source 1..80: mol_type = other DNA
accgctgcacaagttacagcagcaatcggtctagcaaaagctcaagaaaatgcaaaacttatactaactctcaaaaaagc

SEQ ID NO: 14247 - DNA, 80 bp, synthetic construct
  misc_feature 1..80: note = Synthetic: >NC_021928.1-cand-5600-5679
  source 1..80: mol_type = other DNA
tgcgacagaaacaaatgaggcagttcgagatcttgcaaactctaataaaattgtagtaaaaatgatatcagcaattcaaa

SEQ ID NO: 14248 - DNA, 80 bp, synthetic construct
  misc_feature 1..80: note = Synthetic: >NC_021928.1-cand-5680-5759
  source 1..80: mol_type = other DNA
atcaaataaacactattattcaacctgctatagatcagattaattgtcaaattaaagacctacaagttgccaatatttta

SEQ ID NO: 14249 - DNA, 80 bp, synthetic construct
  misc_feature 1..80: note = Synthetic: >NC_021928.1-cand-5760-5839
  source 1..80: mol_type = other DNA
aatttgtacctaacagagataacgactgttttccacaaccaattgaccaatcctgcattagagtcaattagcattcaagc

SEQ ID NO: 14250 - DNA, 80 bp, synthetic construct
  misc_feature 1..80: note = Synthetic: >NC_021928.1-cand-5840-5919
  source 1..80: mol_type = other DNA
cctcaaaagcctcttaggacctaccctaccagaagtgctatctaaattagatttaaacaacatctcggcagcttcagtga

SEQ ID NO: 14251 - DNA, 80 bp, synthetic construct
  misc_feature 1..80: note = Synthetic: >NC_021928.1-cand-5920-5999
  source 1..80: mol_type = other DNA
tggcatccggcttaattaaaggacagataattgcagttgatataccgactatgacactagtattgatggtccaaataccg

SEQ ID NO: 14252 - DNA, 80 bp, synthetic construct
  misc_feature 1..80: note = Synthetic: >NC_021928.1-cand-6010-6089
  source 1..80: mol_type = other DNA
ctttaagacaagcaaagataatagatctaacttctataacaattcacacaaatagccaagaagtacaggctgtagtaccg

SEQ ID NO: 14253 - DNA, 80 bp, synthetic construct
  misc_feature 1..80: note = Synthetic: >NC_021928.1-cand-6090-6169
  source 1..80: mol_type = other DNA
gctaggtttctcgagattggctcagaaatattaggattcgatggctcagtgtgccaaatcacaaaagatacaatcttttg

SEQ ID NO: 14254 - DNA, 80 bp, synthetic construct
  misc_feature 1..80: note = Synthetic: >NC_021928.1-cand-6170-6249
  source 1..80: mol_type = other DNA
tccttataatgatgcttatgaattacccatccagcagaagagatgcctacaaggtcaaacaagggattgcgtgttcaccc

SEQ ID NO: 14255 - DNA, 80 bp, synthetic construct
  misc_feature 1..80: note = Synthetic: >NC_021928.1-cand-6250-6329
  source 1..80: mol_type = other DNA
cagttgctggcactttccctcggagatttctcactacatatggtactatagtagctaattgtagagatttagtatgttct

SEQ ID NO: 14256 - DNA, 80 bp, synthetic construct
  misc_feature 1..80: note = Synthetic: >NC_021928.1-cand-6330-6409
  source 1..80: mol_type = other DNA
tgtctgcgacctcctcaaataatctaccaacctgatgaaaatccagttacaatcatagacaaagacctgtgtacaacatt

SEQ ID NO: 14257 - DNA, 80 bp, synthetic construct
  misc_feature 1..80: note = Synthetic: >NC_021928.1-cand-6410-6489
  source 1..80: mol_type = other DNA
gactctagactccatcactatagagatccagaagtccataaatagtacttttcgacgtgaagtagttttagaatctactc

SEQ ID NO: 14258 - DNA, 80 bp, synthetic construct
  misc_feature 1..80: note = Synthetic: >NC_021928.1-cand-6490-6569
  source 1..80: mol_type = other DNA
aagtcagatctttgactcctcttgatttatcaactgatttaaatcaatacaatcaattactcaagagtgctgaagatcac

SEQ ID NO: 14259 - DNA, 80 bp, synthetic construct
  misc_feature 1..80: note = Synthetic: >NC_021928.1-cand-6570-6649
  source 1..80: mol_type = other DNA
atccaacgatcaactgattacttaaactcaattaatcctagtatagtcaataataacgcaataataatattgattatact

SEQ ID NO: 14260 - DNA, 80 bp, synthetic construct
  misc_feature 1..80: note = Synthetic: >NC_026426.1-cand-1110-1189
  source 1..80: mol_type = other DNA
aagcaatggactccaatactcttgaactgagaagtagatattgggctataagaaccagaagcggagggaacaccaaccaa

SEQ ID NO: 14261 - DNA, 80 bp, synthetic construct
  misc_feature 1..80: note = Synthetic: >NC_026426.1-cand-1200-1279
  source 1..80: mol_type = other DNA
ctgcaggacaggtcagcgttcaacccactttctcagtacagagaaaccttcctttcgaaagagcaaccattatggcagca

SEQ ID NO: 14262 - DNA, 80 bp, synthetic construct
  misc_feature 1..80: note = Synthetic: >NC_026426.1-cand-1290-1369
  source 1..80: mol_type = other DNA
atactgagggtagaacgtctgacatgaggactgaaatcataagaatgatggaaagtgccagaccagaagatgtgtcattc

SEQ ID NO: 14263 - DNA, 80 bp, synthetic construct
  misc_feature 1..80: note = Synthetic: >NC_026427.1-cand-80-159
  source 1..80: mol_type = other DNA
gaggatgtttttgcagggaagaacgcagatctcgaggctctcatggagtggataaagacaagaccaatcctgtcacctct

SEQ ID NO: 14264 - DNA, 80 bp, synthetic construct
  misc_feature 1..80: note = Synthetic: >NC_026427.1-cand-320-399
  source 1..80: mol_type = other DNA
tttcatggagcaaaggaagttgcactcagttactcaactggtgcgcttgccagctgcatgggtctcatatacaacagaat

SEQ ID NO: 14265 - DNA, 80 bp, synthetic construct
  misc_feature 1..80: note = Synthetic: >NC_026427.1-cand-550-629
  source 1..80: mol_type = other DNA
ggctaaggctatggagcagatggctggatcaagtgaacaggcagcggaagccatggaagttgcaagtcaggctaggcaaa

SEQ ID NO: 14266 - DNA, 80 bp, synthetic construct
  misc_feature 1..80: note = Synthetic: >NC_026427.1-cand-640-719
  source 1..80: mol_type = other DNA
tatgagaacagttgggactcaccctaactccagtacaggtctaaaagatgatcttattgaaaatttgcaggcctaccaga

SEQ ID NO: 14267 - DNA, 80 bp, synthetic construct
  misc_feature 1..80: note = Synthetic: >NC_026427.1-cand-730-809
  source 1..80: mol_type = other DNA
agtgcaactgcagcggttcaagtgagcctctagtcgttgcagctaacattattgggatattgcacttgatattgtggatt

SEQ ID NO: 14268 - DNA, 80 bp, synthetic construct
  misc_feature 1..80: note = Synthetic: >NC_026428.1-cand-90-169
  source 1..80: mol_type = other DNA
ttctagaccggcttcgccgagatcagaagtccctgagaggaagaagcagcactcttggtctggacatcagaactgccacg

SEQ ID NO: 14269 - DNA, 80 bp, synthetic construct
  misc_feature 1..80: note = Synthetic: >NC_026428.1-cand-300-379
  source 1..80: mol_type = other DNA
ggttaatgctcattcccaaacagaaaataacagggtccctatgcattagaatggaccaagcaatagtggacaaaaacatc

SEQ ID NO: 14270 - DNA, 80 bp, synthetic construct
  misc_feature 1..80: note = Synthetic: >NC_026428.1-cand-390-469
  source 1..80: mol_type = other DNA
caaatttcagtgtgattttcaatcggcttgaagccctgatactacttagagcttttacggaagaaggagcaattgtaggc

SEQ ID NO: 14271 - DNA, 80 bp, synthetic construct
  misc_feature 1..80: note = Synthetic: >NC_026428.1-cand-480-559
  source 1..80: mol_type = other DNA
cattaccttctcttccaggacatactgacaaggatgtcaaaaatgcaattgagatcctcatcggaggatttgaatggaat

SEQ ID NO: 14272 - DNA, 80 bp, synthetic construct
  misc_feature 1..80: note = Synthetic: >NC_026428.1-cand-570-649
  source 1..80: mol_type = other DNA
ttcgagtctctgaaactctacagagattcgcttggagaagcagcgatgaggatgggagatctccactctctacaaagtag

SEQ ID NO: 14273 - DNA, 80 bp, synthetic construct
  misc_feature 1..80: note = Synthetic: >NC_026428.1-cand-660-739
  source 1..80: mol_type = other DNA
tggagagaacagttaagccagaagttcgaagaaataagatggttgattgaagaagtacgacatagattaaaaattacgga

SEQ ID NO: 14274 - DNA, 80 bp, synthetic construct
  misc_feature 1..80: note = Synthetic: >NC_026429.1-cand-0-79
  source 1..80: mol_type = other DNA
atccaaatcagaagattctatgcacttcagccactgctatcataataggcgcaatcgcagtactcattggaatggcaaac

SEQ ID NO: 14275 - DNA, 80 bp, synthetic construct
  misc_feature 1..80: note = Synthetic: >NC_026429.1-cand-90-169
  source 1..80: mol_type = other DNA
acataggactgcatctaaaaccgggctgcaattgctcacactcacaacctgaaacaaccaacacaagccaaacaataata

SEQ ID NO: 14276 - DNA, 80 bp, synthetic construct
  misc_feature 1..80: note = Synthetic: >NC_038311.1-cand-1350-1429
  source 1..80: mol_type = other DNA
ttttgatggcacccttcttggaaatttattaattttcccacatcaatttataaaccttaggagtaataattctgcaactc

SEQ ID NO: 14277 - DNA, 80 bp, synthetic construct
  misc_feature 1..80: note = Synthetic: >NC_038311.1-cand-1430-1509
  source 1..80: mol_type = other DNA
taatagtaccatatgtaaatgctgtgccaatggattcaatgcttcgacataataactggagcctggtcatcataccaatt

SEQ ID NO: 14278 - DNA, 80 bp, synthetic construct
  misc_feature 1..80: note = Synthetic: >NC_038311.1-cand-1510-1589
  source 1..80: mol_type = other DNA
agtccattacgtagtgaaactacatcttctaatatagtgccaatcactgtatcaataagtcccatgtgtgctgaattttc

SEQ ID NO: 14279 - DNA, 80 bp, synthetic construct
  misc_feature 1..80: note = Synthetic: >NC_038311.1-cand-1590-1669
  source 1..80: mol_type = other DNA
tggtgcaagagcaaaaaacattaaacaaggattacctgtatatataactccaggatctgggcaattcatgactactgatg

SEQ ID NO: 14280 - DNA, 80 bp, synthetic construct
  misc_feature 1..80: note = Synthetic: >NC_038311.1-cand-1670-1749
  source 1..80: mol_type = other DNA
atatgcaatcaccttgtgcactaccctggtaccatcctactaaagaaatatctattccgggtgaagttaaaaaccttata

SEQ ID NO: 14281 - DNA, 80 bp, synthetic construct
  misc_feature 1..80: note = Synthetic: >NC_038311.1-cand-1750-1829
  source 1..80: mol_type = other DNA
gaaatgtgtcaagttgataccttgattccagtcaataatgtgggtaacaatgttggaaatgtcagtatgtacactgtaca

SEQ ID NO: 14282 - DNA, 80 bp, synthetic construct
  misc_feature 1..80: note = Synthetic: >NC_038311.1-cand-1830-1909
  source 1..80: mol_type = other DNA
actagggaaccaaacaggcatggcacaaaaagtcttttcaataaaagtagacattacatcacagcctttggctacaactt

SEQ ID NO: 14283 - DNA, 80 bp, synthetic construct
  misc_feature 1..80: note = Synthetic: >NC_038311.1-cand-1920-1999
  source 1..80: mol_type = other DNA
gattgcaagctattacacccattggactggcagtctgcgatttagttttatgttttgtgggactgcaaacacaacactta

SEQ ID NO: 14284 - DNA, 80 bp, synthetic construct
  misc_feature 1..80: note = Synthetic: >NC_038311.1-cand-1990-2069
  source 1..80: mol_type = other DNA
acaacacttaaattattacttgcatacacaccacctggtattgatgaaccaacaactagaaaggatgcaatgctagggac

SEQ ID NO: 14285 - DNA, 80 bp, synthetic construct
  misc_feature 1..80: note = Synthetic: >NC_038311.1-cand-2070-2149
  source 1..80: mol_type = other DNA
acatgttgtgtgggatgttggattgcagtctactatatctcttgttgtaccatgggtgagtgccagccacttcaggttaa

SEQ ID NO: 14286 - DNA, 80 bp, synthetic construct
  misc_feature 1..80: note = Synthetic: >NC_038311.1-cand-2150-2229
  source 1..80: mol_type = other DNA
ctgcagataataaatactccatggctggttatatcacatgttggtaccaaactaatttagtagtgcccccaagtacgcca

SEQ ID NO: 14287 - DNA, 80 bp, synthetic construct
  misc_feature 1..80: note = Synthetic: >NC_038311.1-cand-2230-2309
  source 1..80: mol_type = other DNA
cagactgctgatatgctgtgttttgtttctgcatgtaaagatttttgtctacgaatggcaagggatacagatttacacat

SEQ ID NO: 14288 - DNA, 80 bp, synthetic construct
  misc_feature 1..80: note = Synthetic: >NC_038311.1-cand-2310-2389
  source 1..80: mol_type = other DNA
acaaagtggtccaatagagcaaaatccagtagaaaactacattgatgaagttttaaatgaagttttagtagtgccgaata

SEQ ID NO: 14289 - DNA, 80 bp, synthetic construct
  misc_feature 1..80: note = Synthetic: >NC_038311.1-cand-2390-2469
  source 1..80: mol_type = other DNA
taaaagaaagtcatcacactacatcaaactctgccccacttttagatgctgcagagacgggacacaccagtaatgttcaa

SEQ ID NO: 14290 - DNA, 80 bp, synthetic construct
  misc_feature 1..80: note = Synthetic: >NC_038311.1-cand-2470-2549
  source 1..80: mol_type = other DNA
ccagaagatgctatagagacaaggtatgttataacatcacaaacaagagatgagatgagtatagaaagtttccttggtag

SEQ ID NO: 14291 - DNA, 80 bp, synthetic construct
  misc_feature 1..80: note = Synthetic: >NC_038311.1-cand-2540-2619
  source 1..80: mol_type = other DNA
tccttggtagatctggttgtgtccacatctcaagaataaaggttgattacactgactataatggacaggacataaatttc

SEQ ID NO: 14292 - DNA, 80 bp, synthetic construct
  misc_feature 1..80: note = Synthetic: >NC_039199.1-cand-7040-7119
  source 1..80: mol_type = other DNA
caacaacaccatattagctctgcccaaatctccctggaaaaaacactcgcccatataccaaaaataccacaaccacccca

SEQ ID NO: 14293 - DNA, 80 bp, synthetic construct
  misc_feature 1..80: note = Synthetic: >NC_039199.1-cand-7120-7199
  source 1..80: mol_type = other DNA
agaaaaaaactgggcaaaacaacacccaagagacaaataacaatggatcctctcaatgaatccactgttaatgtctatct

SEQ ID NO: 14294 - DNA, 80 bp, synthetic construct
  misc_feature 1..80: note = Synthetic: >NC_039199.1-cand-7200-7279
  source 1..80: mol_type = other DNA
tcctgactcatatcttaaaggagtgatttcctttagtgagactaatgcaattggttcatgtctcttaaaaagaccttacc

SEQ ID NO: 14295 - DNA, 80 bp, synthetic construct
  misc_feature 1..80: note = Synthetic: >NC_039199.1-cand-7280-7359
  source 1..80: mol_type = other DNA
taaaaaatgacaacactgcaaaagttgccatagagaatcctgttatcgagcatgttagactcaaaaatgcagtcaattct

SEQ ID NO: 14296 - DNA, 80 bp, synthetic construct
  misc_feature 1..80: note = Synthetic: >NC_039199.1-cand-7360-7439
  source 1..80: mol_type = other DNA
aagatgaaaatatcagattacaagatagtagagccagtaaacatgcaacatgaaattatgaagaatgtacacagttgtga

SEQ ID NO: 14297 - DNA, 80 bp, synthetic construct
  misc_feature 1..80: note = Synthetic: >NC_039199.1-cand-7440-7519
  source 1..80: mol_type = other DNA
gctcacattattaaaacagtttttaacaaggagtaaaaatattagcactctcaaattaaatatgatatgtgattggctgc

SEQ ID NO: 14298 - DNA, 80 bp, synthetic construct
  misc_feature 1..80: note = Synthetic: >NC_039199.1-cand-7520-7599
  source 1..80: mol_type = other DNA
agttaaagtctacatcagatgatacctcaatcctaagttttatagatgtagaatttatacctagctgggtaagcaattgg

SEQ ID NO: 14299 - DNA, 80 bp, synthetic construct
  misc_feature 1..80: note = Synthetic: >NC_039199.1-cand-7600-7679
  source 1..80: mol_type = other DNA
tttagtaattggtacaatctcaacaagttgattctggaattcaggaaagaagaagtaataagaactggttcaatcttgtg

SEQ ID NO: 14300 - DNA, 80 bp, synthetic construct
  misc_feature 1..80: note = Synthetic: >NC_039199.1-cand-7680-7759
  source 1..80: mol_type = other DNA
taggtcattgggtaaattagtttttgttgtatcatcatatggatgtatagtcaagagcaacaaaagcaaaagagtgagct

SEQ ID NO: 14301 - DNA, 80 bp, synthetic construct
  misc_feature 1..80: note = Synthetic: >NC_039199.1-cand-7760-7839
  source 1..80: mol_type = other DNA
tcttcacatacaatcaactgttaacatggaaagatgtgatgttaagtagattcaatgcaaatttttgtatatgggtaagc

SEQ ID NO: 14302 - DNA, 80 bp, synthetic construct
  misc_feature 1..80: note = Synthetic: >NC_039199.1-cand-7840-7919
  source 1..80: mol_type = other DNA
aacagtctgaatgaaaatcaagaagggctagggttgagaagtaatctgcaaggcatattaactaataagctatatgaaac

SEQ ID NO: 14303 - DNA, 80 bp, synthetic construct
  misc_feature 1..80: note = Synthetic: >NC_039199.1-cand-7920-7999
  source 1..80: mol_type = other DNA
tgtagattatatgcttagtttatgttgcaatgaaggtttctcacttgtgaaagagttcgaaggctttattatgagtgaaa

SEQ ID NO: 14304 - DNA, 80 bp, synthetic construct
  misc_feature 1..80: note = Synthetic: >NC_039199.1-cand-8000-8079
  source 1..80: mol_type = other DNA
ttcttaggattactgaacatgctcaattcagtactagatttagaaatactttattaaatggattaactgatcaattaaca

SEQ ID NO: 14305 - DNA, 80 bp, synthetic construct
  misc_feature 1..80: note = Synthetic: >NC_039199.1-cand-8080-8159
  source 1..80: mol_type = other DNA
aaattaaaaaataaaaacagactcagagttcatggtaccgtgttagaaaataatgattatccaatgtacgaagttgtact

SEQ ID NO: 14306 - DNA, 80 bp, synthetic construct
  misc_feature 1..80: note = Synthetic: >NC_039199.1-cand-8160-8239
  source 1..80: mol_type = other DNA
taagttattaggagatactttgagatgtattaaattattaatcaataaaaacttagagaatgctgctgaattatactata

SEQ ID NO: 14307 - DNA, 80 bp, synthetic construct
  misc_feature 1..80: note = Synthetic: >NC_039199.1-cand-8240-8319
  source 1..80: mol_type = other DNA
tatttagaatattcggtcacccaatggtagatgaaagagatgcaatggatgctgtcaaattaaacaatgaaatcacaaaa

SEQ ID NO: 14308 - DNA, 80 bp, synthetic construct
  misc_feature 1..80: note = Synthetic: >NC_039475.1-cand-1270-1349
  source 1..80: mol_type = other DNA
tgaccacccttctcaaggataaagacagcctggccacatacatgaggactcttgacttggaagaagagaaagcaaggaaa

SEQ ID NO: 14309 - DNA, 80 bp, synthetic construct
  misc_feature 1..80: note = Synthetic: >NC_039475.1-cand-1350-1429
  source 1..80: mol_type = other DNA
ctgtcaaccaaatcggcgtcacctgacatcgtgggtacaataaacgcattattggctaggatagcagccgccaggtcact

SEQ ID NO: 14310 - DNA, 80 bp, synthetic construct
  misc_feature 1..80: note = Synthetic: >NC_039475.1-cand-1430-1509
  source 1..80: mol_type = other DNA
ggtccacaaggctaaggaggagctctcgagcagacagagacctgttgttgtaatgatatcaggtagaccaggtataggaa

SEQ ID NO: 14311 - DNA, 80 bp, synthetic construct
  misc_feature 1..80: note = Synthetic: >NC_039475.1-cand-1510-1589
  source 1..80: mol_type = other DNA
agacccatctggccagagagctagccaagaaagttgcgtcaacactgtcaggcgaccaaaggattggactggtacctaga

SEQ ID NO: 14312 - DNA, 80 bp, synthetic construct
  misc_feature 1..80: note = Synthetic: >NC_039475.1-cand-1590-1669
  source 1..80: mol_type = other DNA
aatggcgtcgaccattgggacgcctacaagggagaaagggtggttctgtgggatgattatggtatgagcaaccctataca

SEQ ID NO: 14313 - DNA, 80 bp, synthetic construct
  misc_feature 1..80: note = Synthetic: >NC_039475.1-cand-1670-1749
  source 1..80: mol_type = other DNA
ggacgcactgaggctccaagaattggctgacacctgtcctctgaccctaaattgtgataggattgaaaacaaaggaaaag

SEQ ID NO: 14314 - DNA, 80 bp, synthetic construct
  misc_feature 1..80: note = Synthetic: >NC_039475.1-cand-1750-1829
  source 1..80: mol_type = other DNA
tgttcgacagtgatgccataattataacaaccaaccttgcaaacccagcaccactagactatgtcaactttgaggcctgc

SEQ ID NO: 14315 - DNA, 80 bp, synthetic construct
  misc_feature 1..80: note = Synthetic: >NC_039475.1-cand-1830-1909
  source 1..80: mol_type = other DNA
tctagacgcatagacttcttggtgtatgcagacgcacctgacattgagaaggctaagcgtgacttccctggccaaccaga

SEQ ID NO: 14316 - DNA, 80 bp, synthetic construct
  misc_feature 1..80: note = Synthetic: >NC_039475.1-cand-1910-1989
  source 1..80: mol_type = other DNA
tatgtggaaagaccatttcagaccagacttctcacacattaaacttcagctggcaccacagggaggttttgacaaaaatg

SEQ ID NO: 14317 - DNA, 80 bp, synthetic construct
  misc_feature 1..80: note = Synthetic: >NC_039475.1-cand-1990-2069
  source 1..80: mol_type = other DNA
gcaacaccccacatggcaaaggtgtggtgaagtccctgacgattggttctctgatcgccagggcctccggcttgctccac

SEQ ID NO: 14318 - DNA, 80 bp, synthetic construct
  misc_feature 1..80: note = Synthetic: >NC_039475.1-cand-2070-2149
  source 1..80: mol_type = other DNA
gagagaatggatgaattcgagctccaaggctctgacctgccaaccttcaattttgaccgcaacaaagtcgccgccttcag

SEQ ID NO: 14319 - DNA, 80 bp, synthetic construct
  misc_feature 1..80: note = Synthetic: >NC_039475.1-cand-2150-2229
  source 1..80: mol_type = other DNA
acaattagcagctgaaaacaaatatggtcttatggacacactgagggtcggcaaccaactgaaaagtgttaagaccctgg

SEQ ID NO: 14320 - DNA, 80 bp, synthetic construct
  misc_feature 1..80: note = Synthetic: >NC_039475.1-cand-2230-2309
  source 1..80: mol_type = other DNA
atgagctgaagcaggccataaagaacatcagtatcaagaagtgtcagatagtgtataatggatgcacctataccatggaa

SEQ ID NO: 14321 - DNA, 80 bp, synthetic construct
  misc_feature 1..80: note = Synthetic: >NC_039475.1-cand-2240-2319
  source 1..80: mol_type = other DNA
gcaggccataaagaacatcagtatcaagaagtgtcagatagtgtataatggatgcacctataccatggaatctgatggga

SEQ ID NO: 14322 - DNA, 80 bp, synthetic construct
  misc_feature 1..80: note = Synthetic: >NC_039475.1-cand-2390-2469
  source 1..80: mol_type = other DNA
ccaccacctgagatctgcaaggataagatactatgttaaatgtttccaagaagccatttactctctactccaaattgctg

SEQ ID NO: 14323 - DNA, 80 bp, synthetic construct
  misc_feature 1..80: note = Synthetic: >NC_039475.1-cand-2470-2549
  source 1..80: mol_type = other DNA
gtgcagccttcgtcacctcacgcatcgtgaggcgcatgaacatatcaaacctctggtcgaagccacccatcgaggagggt

SEQ ID NO: 14324 - DNA, 80 bp, synthetic construct
  misc_feature 1..80: note = Synthetic: >NC_044046.1-cand-5740-5819
  source 1..80: mol_type = other DNA
cctttcactctgcccaggttgccaatatctgagatgacaaactctagattccctcttgtgataaagggtatggtcgtgga

SEQ ID NO: 14325 - DNA, 80 bp, synthetic construct
  misc_feature 1..80: note = Synthetic: >NC_044046.1-cand-5790-5869
  source 1..80: mol_type = other DNA
ccctcttgtgataaagggtatggtcgtggatcctaatcttccattgcaagctaacttccaaaatggtaggatcacactgg

SEQ ID NO: 14326 - DNA, 80 bp, synthetic construct
  misc_feature 1..80: note = Synthetic: >NC_044046.1-cand-5900-5979
  source 1..80: mol_type = other DNA
cttcaaccagcattggcaggatctctggcacccacatgtccagcaccccaagtaggattatacagcatgaggactccggt

SEQ ID NO: 14327 - DNA, 80 bp, synthetic construct
  misc_feature 1..80: note = Synthetic: >NC_044046.1-cand-5980-6059
  source 1..80: mol_type = other DNA
gattccacccagcccagagtcttcaatccagtgtggatggatttaactgagaacaactggactgaattccagccattcaa

SEQ ID NO: 14328 - DNA, 80 bp, synthetic construct
  misc_feature 1..80: note = Synthetic: >NC_044046.1-cand-6060-6139
  source 1..80: mol_type = other DNA
tgaccaacccgccccacttgggtgcccagacttcaaagccaaaatattgggcacattgattcgccagcctaataatggtt

SEQ ID NO: 14329 - DNA, 80 bp, synthetic construct
  misc_feature 1..80: note = Synthetic: >NC_044046.1-cand-6140-6219
  source 1..80: mol_type = other DNA
cctattattttgatgcatatctagataccagacaacatggcacttttgcaccatacaccgggcacgccgctgtccactct

SEQ ID NO: 14330 - DNA, 80 bp, synthetic construct
  misc_feature 1..80: note = Synthetic: >NC_044046.1-cand-6220-6299
  source 1..80: mol_type = other DNA
gaccaacaggcaggccatttagcccaaggctacaaaattcaattctccccaacaggcattgagagtgaccaaaacactga

SEQ ID NO: 14331 - DNA, 80 bp, synthetic construct
  misc_feature 1..80: note = Synthetic: >NC_044046.1-cand-6350-6429
  source 1..80: mol_type = other DNA
tggctccagcggccgcgcccgatttccccggtgagatgatcctttactttgtctctgacatgccagtccgtaacccaaat

SEQ ID NO: 14332 - DNA, 80 bp, synthetic construct
  misc_feature 1..80: note = Synthetic: >NC_044046.1-cand-6460-6539
  source 1..80: mol_type = other DNA
ttgctgccgcaggagatggtcacccacttctacgaacagcaagccccctcccagggtgatgtcgcgcttgtgcgttacat

SEQ ID NO: 14333 - DNA, 80 bp, synthetic construct
  misc_feature 1..80: note = Synthetic: >NC_044046.1-cand-6540-6619
  source 1..80: mol_type = other DNA
caatgccgagactggtagagtcatgttcgagggaaagctgcatagaaatggattcttcacagtttctgccactgcaagaa

SEQ ID NO: 14334 - DNA, 80 bp, synthetic construct
  misc_feature 1..80: note = Synthetic: >NC_044046.1-cand-6620-6699
  source 1..80: mol_type = other DNA
ctttaattgtacctgatggatatttcagatttgactcttgggttaataggttttacacattaagccccatgggaacaggc

SEQ ID NO: 14335 - DNA, 80 bp, synthetic construct
  misc_feature 1..80: note = Synthetic: >NC_044046.1-cand-6700-6779
  source 1..80: mol_type = other DNA
aatggccgcagaagggctcgcatgcttgagtaatggctggagcgttctttgcaggtttgggtgctgaccttttaacaaca

SEQ ID NO: 14336 - DNA, 80 bp, synthetic construct
  misc_feature 1..80: note = Synthetic: >NC_044046.1-cand-6770-6849
  source 1..80: mol_type = other DNA
tttaacaacaggtgtcagctctttagtttctgctggagccacagcaatcaaccagagggcagaatttgagtataacaagg

SEQ ID NO: 14337 - DNA, 80 bp, synthetic construct
  misc_feature 1..80: note = Synthetic: >NC_044046.1-cand-6850-6929
  source 1..80: mol_type = other DNA
cactacaacagagctcattccaacatgataaagaaatgctgcaagcccagatagctgccactgccaacttgcaaaaacag

SEQ ID NO: 14338 - DNA, 80 bp, synthetic construct
  misc_feature 1..80: note = Synthetic: >NC_044046.1-cand-6930-7009
  source 1..80: mol_type = other DNA
atgatagatatcaaaagggagatcctcacacaaggtggcttttcccccacggacgctgctagaggttctgtgggtgcaaa

SEQ ID NO: 14339 - DNA, 80 bp, synthetic construct
  misc_feature 1..80: note = Synthetic: >NC_003310.1-cand-170850-170929
  source 1..80: mol_type = other DNA
agaacatggataaggttagcgctcagaatatctcattcaaatccatgaataaagtatatgggcgatattctgccgtgttt

SEQ ID NO: 14340 - DNA, 80 bp, synthetic construct
  misc_feature 1..80: note = Synthetic: >NC_001611.1-cand-80140-80219
  source 1..80: mol_type = other DNA
tattttcgtctatccattgtttcacattgacatatttcgacaaaaagatataaaatgcgtattccaatgcttctctgttt

SEQ ID NO: 14341 - DNA, 80 bp, synthetic construct
  misc_feature 1..80: note = Synthetic: >AdVB7-cand-1730-1809
  source 1..80: mol_type = other DNA
aaacaggactacagcgtagaatttgaaaagttattggacgacagtccaggactttttgaagctcttaacttgggtcatca

SEQ ID NO: 14342 - DNA, 80 bp, synthetic construct
  misc_feature 1..80: note = Synthetic: >NC_001611.1-cand-118880-118959
  source 1..80: mol_type = other DNA
aaacagtctatcatcgacacaaatgaaatttttgtttaaacgtttgtagtttacgtatgcggctcgttctcgtctcattt

SEQ ID NO: 14343 - DNA, 80 bp, synthetic construct
  misc_feature 1..80: note = Synthetic: >HCV.B3-cand-5690-5769
  source 1..80: mol_type = other DNA
aaacatgtacatcccagtaggacaggtcacagactatggcttcctaaacctgggtggcactcccaccaagagaatgctta

SEQ ID NO: 14344 - DNA, 80 bp, synthetic construct
  misc_feature 1..80: note = Synthetic: >NC_003310.1-cand-63200-63279
  source 1..80: mol_type = other DNA
aaacattgtccaatctaggacattcatccggacacatcaacgaccactctccgtcatccttcactcgtttcataaagaga

SEQ ID NO: 14345 - DNA, 80 bp, synthetic construct
  misc_feature 1..80: note = Synthetic: >NC_039476.1-cand-3640-3719
  source 1..80: mol_type = other DNA
aaaccaaattttggaggtcatcgaacacgccccttccaccagggacatatgagcctgcctacctcggtggccgtgatccg

SEQ ID NO: 14346 - DNA, 80 bp, synthetic construct
  misc_feature 1..80: note = Synthetic: >EVD70-cand-6580-6659
  source 1..80: mol_type = other DNA
aaatcccagttatgttagatggaaaaatttttgcatttgactacacaggttatgatgccagtctctcaccagtctggttt

SEQ ID NO: 14347 - DNA, 80 bp, synthetic construct
  misc_feature 1..80: note = Synthetic: >NC_001611.1-cand-78610-78689
  source 1..80: mol_type = other DNA
taggcgtacaagcagccaagacatcaacacttatattctttgttattatattggcaattagtgcgctattactctggttt

SEQ ID NO: 14348 - DNA, 80 bp, synthetic construct
  misc_feature 1..80: note = Synthetic: >NC_001611.1-cand-87200-87279
  source 1..80: mol_type = other DNA
ggtgcatctacaatggaagatagaccgtctacaagaaactttttcgaactaaatagaggagccattaaatgtgaaggttt

SEQ ID NO: 14349 - DNA, 80 bp, synthetic construct
  misc_feature 1..80: note = Synthetic: >NC_003310.1-cand-116380-116459
  source 1..80: mol_type = other DNA
aaacgaactatatcatcaccagcacaacatctaactatatgatatccactagtttcctttagccgtttattatcttgttc

SEQ ID NO: 14350 - DNA, 80 bp, synthetic construct
  misc_feature 1..80: note = Synthetic: >NC_003310.1-cand-196300-196379
  source 1..80: mol_type = other DNA
aaacgataacgtccaacaatatattctcgtagagcttatcaatatccttatgccaatctaggttgtcagacaattgcatc

SEQ ID NO: 14351 - DNA, 80 bp, synthetic construct
  misc_feature 1..80: note = Synthetic: >NC_001430.1-cand-3930-4009
  source 1..80: mol_type = other DNA
tgattaggaattcagaagatctagttacagtcactgcaacacttgccctcctagggtgcaatgactcaccatgggcgttt

SEQ ID NO: 14352 - DNA, 80 bp, synthetic construct
  misc_feature 1..80: note = Synthetic: >NC_001611.1-cand-140640-140719
  source 1..80: mol_type = other DNA
cgcgattagtgtatacaccaactgtatgaaaattaagaaaacagtttaatagatcaacagaaatatttaatcctccgttt

SEQ ID NO: 14353 - DNA, 80 bp, synthetic construct
  misc_feature 1..80: note = Synthetic: >NC_003310.1-cand-90090-90169
  source 1..80: mol_type = other DNA
ctcgcaaattctagtcttaaccaagaaatcgtatataactacggagatggcgtatttaagagtggattcttctaccgttt

SEQ ID NO: 14354 - DNA, 80 bp, synthetic construct
  misc_feature 1..80: note = Synthetic: >AdVB7-cand-34640-34719
  source 1..80: mol_type = other DNA
aaattttccaaaaaaacattcaaaacctctgggatgcaaatgcaataggttaccgcgctgcgctccaacattgttagttt

SEQ ID NO: 14355 - DNA, 80 bp, synthetic construct
  misc_feature 1..80: note = Synthetic: >NC_003310.1-cand-51860-51939
  source 1..80: mol_type = other DNA
agacggacaattggctcgtctaggtcttgtgttagatgattataaaggagacttattagttaaaatgataaaccatctca

SEQ ID NO: 14356 - DNA, 80 bp, synthetic construct
  misc_feature 1..80: note = Synthetic: >NC_001611.1-cand-169110-169189
  source 1..80: mol_type = other DNA
tctatggctatgatagatcagtgggtgtccatgattatatagataaatcaattaataaagtagtatatggaagagagtct

SEQ ID NO: 14357 - DNA, 80 bp, synthetic construct
  misc_feature 1..80: note = Synthetic: >NC_026437.1-cand-1680-1759
  source 1..80: mol_type = other DNA
tcctatatgtgagaaccaatggaacctccaagatcaagatgaaatggggcatggaaatgaggcgctgccttcttcagtct

SEQ ID NO: 14358 - DNA, 80 bp, synthetic construct
  misc_feature 1..80: note = Synthetic: >NC_039476.1-cand-4110-4189
  source 1..80: mol_type = other DNA
agactgctctggggctctgacttgtccaccatgatccggtgcgctaggtcatttggtgggcttatggacgagatgaaggc

SEQ ID NO: 14359 - DNA, 80 bp, synthetic construct
  misc_feature 1..80: note = Synthetic: >NC_039477.1-cand-410-489
  source 1..80: mol_type = other DNA
agagatataccactatggcctgtacgtggagaaaggcttagtgttgggtgtgcacaaaccacctgcagccataagcatgg

SEQ ID NO: 14360 - DNA, 80 bp, synthetic construct
  misc_feature 1..80: note = Synthetic: >HCV.A21-cand-5690-5769
  source 1..80: mol_type = other DNA
agagatatcagaccacatattcccactcaaatcactgaaactaatgatggagtattgatcgtgaacactagtaagtaccc

SEQ ID NO: 14361 - DNA, 80 bp, synthetic construct
  misc_feature 1..80: note = Synthetic: >NC_001611.1-cand-130000-130079
  source 1..80: mol_type = other DNA
ttaatagtgcgaaatcattcaaaaatctatcacttatagatagatagtacatgaatgcgtatagtagtctaccgatctct

SEQ ID NO: 14362 - DNA, 80 bp, synthetic construct
  misc_feature 1..80: note = Synthetic: >NC_004296.1-cand-730-809
  source 1..80: mol_type = other DNA
agtatcccaacacttcagacttagacaggctgactcaaagtcatcccatcctaaatatgattgacaccaagaaaagctct

SEQ ID NO: 14363 - DNA, 80 bp, synthetic construct
  misc_feature 1..80: note = Synthetic: >NC_003310.1-cand-176930-177009
  source 1..80: mol_type = other DNA
gatcgaggagctgatatatcattaaagacagacgatggtaaaactgtatttgatttatcgttatgtagttacattcctct

SEQ ID NO: 14364 - DNA, 80 bp, synthetic construct
  misc_feature 1..80: note = Synthetic: >NC_001611.1-cand-63570-63649
  source 1..80: mol_type = other DNA
agaggataactatttagcaaaattaacggcgttagtgaatggatgtgatttctttcctggactctatggggcatctataa

SEQ ID NO: 14365 - DNA, 80 bp, synthetic construct
  misc_feature 1..80: note = Synthetic: >NC_003310.1-cand-103170-103249
  source 1..80: mol_type = other DNA
taaatacgaatactatggcaataattgcgaatgttttattcccttcgatatatttttgataatatgaaaaacatgcctct

SEQ ID NO: 14366 - DNA, 80 bp, synthetic construct
  misc_feature 1..80: note = Synthetic: >EVA71-cand-7330-7409
  source 1..80: mol_type = other DNA
agaggttacagtacacacctcaaccccaccagaaatctggtcgtgaatatgactggtgggggtaaatttgttataaccag

SEQ ID NO: 14367 - DNA, 80 bp, synthetic construct
  misc_feature 1..80: note = Synthetic: >NC_003310.1-cand-46080-46159
  source 1..80: mol_type = other DNA
gattttgatattctatgaattcctctgaaaataaatccaaaataactagacattctattttttgtggattagtgtactct

SEQ ID NO: 14368 - DNA, 80 bp, synthetic construct
  misc_feature 1..80: note = Synthetic: >NC_001611.1-cand-72380-72459
  source 1..80: mol_type = other DNA
ttaggagtgatcatcaaatggatgctaattgacggccgtcatcatgatcctattctaaatggattacgtgatgtgactct

SEQ ID NO: 14369 - DNA, 80 bp, synthetic construct
  misc_feature 1..80: note = Synthetic: >NC_003310.1-cand-113970-114049
  source 1..80: mol_type = other DNA
gttgggtaggctgtctgctggcgaccatcatattatctctagctagttgttctcgcaactgtctttgataatacgactct

SEQ ID NO: 14370 - DNA, 80 bp, synthetic construct
  misc_feature 1..80: note = Synthetic: >NC_003310.1-cand-55800-55879
  source 1..80: mol_type = other DNA
ttctctcataaatacagagatgtacagcttcctttttgtctggagatctaaagataatcttctctcctgttaataactct

SEQ ID NO: 14371 - DNA, 80 bp, synthetic construct
  misc_feature 1..80: note = Synthetic: >NC_003310.1-cand-92150-92229
  source 1..80: mol_type = other DNA
tagaggaatatcatcaaacaactgaagaaaattctccacctccgtcatcatctcctggagtcggcgacattgtagaaagc

SEQ ID NO: 14372 - DNA, 80 bp, synthetic construct
  misc_feature 1..80: note = Synthetic: >NC_001611.1-cand-16090-16169
  source 1..80: mol_type = other DNA
ttgtctaatagatatttgatgcatcttatggatcccacttcgacagccatcttaaaatcggtagaatcatattgctttcc

SEQ ID NO: 14373 - DNA, 80 bp, synthetic construct
  misc_feature 1..80: note = Synthetic: >NC_039477.1-cand-1750-1829
  source 1..80: mol_type = other DNA
ttgacagtgaagtcataataattacaacaaaccttgccaatccagccccacttgattatgtcaactttgaggcctgttcc

SEQ ID NO: 14374 - DNA, 80 bp, synthetic construct
  misc_feature 1..80: note = Synthetic: >NC_001611.1-cand-94830-94909
  source 1..80: mol_type = other DNA
taaaaatgaaatgataactgtttagaaatagctcttagtatgggaattacaatggatgaggaagtgatatttgaaactcc

SEQ ID NO: 14375 - DNA, 80 bp, synthetic construct
  misc_feature 1..80: note = Synthetic: >NC_003310.1-cand-117020-117099
  source 1..80: mol_type = other DNA
tgatagatatttttttatccgatgatagcaaaatattattagtcgccgtctctataaaaatgaagctagtctcgatatcc

SEQ ID NO: 14376 - DNA, 80 bp, synthetic construct
  misc_feature 1..80: note = Synthetic: >AdVB3-cand-28120-28199
  source 1..80: mol_type = other DNA
ggggccatactagtcgtgcttgctttactttcgcttttgggtctgggctctgctaatctcaatcctcttgatcacgatcc

SEQ ID NO: 14377 - DNA, 80 bp, synthetic construct
  misc_feature 1..80: note = Synthetic: >HCV.A9-cand-4830-4909
  source 1..80: mol_type = other DNA
tgaggttatttcaatgtacagccagaatggcaagatcaacatgcccatgtcagtgaaaacatgtgatgaggagtgctgcc

SEQ ID NO: 14378 - DNA, 80 bp, synthetic construct
  misc_feature 1..80: note = Synthetic: >AdVB7-cand-14880-14959
  source 1..80: mol_type = other DNA
ggcattccatcctgacattgtattgctgcctggttgcggggtagactttactgaaagccgacttagcaacttgcttggca

SEQ ID NO: 14379 - DNA, 80 bp, synthetic construct
  misc_feature 1..80: note = Synthetic: >NC_001611.1-cand-124170-124249
  source 1..80: mol_type = other DNA
ggctaattgcttcggacaacatgttactatagcattaatgtcgtacaaaggtatcaatcaagaggatggaattatcatca

SEQ ID NO: 14380 - DNA, 80 bp, synthetic construct
  misc_feature 1..80: note = Synthetic: >HCV.B3-cand-6430-6509
  source 1..80: mol_type = other DNA
ggctgattgaggcatccagtttgaatgactcagtggcaatgagacagacatttggtaacctgtacaaaactttccaccta

SEQ ID NO: 14381 - DNA, 80 bp, synthetic construct
  misc_feature 1..80: note = Synthetic: >AdVB7-cand-18050-18129
  source 1..80: mol_type = other DNA
gggatcgcctctggtattaacggcgtagtggatttggccaaccaggctgtacaaaaacagataaacagccgcctggaccc

SEQ ID NO: 14382 - DNA, 80 bp, synthetic construct
  misc_feature 1..80: note = Synthetic: >NC_007360.1-cand-210-289
  source 1..80: mol_type = other DNA
ttcagaacagcataacaatagagagaatggttctctctgcatttgatgaaaggaggaacaaatacctggaagaacatccc

SEQ ID NO: 14383 - DNA, 80 bp, synthetic construct
  misc_feature 1..80: note = Synthetic: >NC_001611.1-cand-104290-104369
  source 1..80: mol_type = other DNA
gggccatattgtctagattttgttgagatgttgctcctggatttggattttgttgtgctgttgtacatactgtaccacca

SEQ ID NO: 14384 - DNA, 80 bp, synthetic construct
  misc_feature 1..80: note = Synthetic: >NC_006573.1-cand-240-319
  source 1..80: mol_type = other DNA
ggggtttatgagcttcagactctggaactaaacatggagacactcaatatgaccatgcctctctcctgcacaaagaacaa

SEQ ID NO: 14385 - DNA, 80 bp, synthetic construct
  misc_feature 1..80: note = Synthetic: >NC_001611.1-cand-107010-107089
  source 1..80: mol_type = other DNA
tcattacctcatgaactatttcttgaatgagtatatgtattttctttcctatatcggacgcgttcattggaaaatatacc

SEQ ID NO: 14386 - DNA, 80 bp, synthetic construct
  misc_feature 1..80: note = Synthetic: >NC_001611.1-cand-92050-92129
  source 1..80: mol_type = other DNA
ggtcatattatagatttaatgtccgaagagacgatagattttggtgagattattagtcgtggtaagaaagtaattcagac

SEQ ID NO: 14387 - DNA, 80 bp, synthetic construct
  misc_feature 1..80: note = Synthetic: >AdVB3-cand-22230-22309
  source 1..80: mol_type = other DNA
ttctggacacgggagttgcggtacactgggttgcaacactggaacaccatcaacgctgggtgtcttacgcttgccaacac

SEQ ID NO: 14388 - DNA, 80 bp, synthetic construct
  misc_feature 1..80: note = Synthetic: >AdVB3-cand-22280-22359
  source 1..80: mol_type = other DNA
caacgctgggtgtcttacgcttgccaacacggttgggtcactgatggtagtcacatccaagtcttcagcattggccatcc

SEQ ID NO: 14389 - DNA, 80 bp, synthetic construct
  misc_feature 1..80: note = Synthetic: >AdVB3-cand-22440-22519
  source 1..80: mol_type = other DNA
atcagcatcatcctggcttggttgggagttatccctgggtacacagccttcatgaaggcttcgtactgcttaaaagcttc

SEQ ID NO: 14390 - DNA, 80 bp, synthetic construct
  misc_feature 1..80: note = Synthetic: >AdVB3-cand-22460-22539
  source 1..80: mol_type = other DNA
gttgggagttatccctgggtacacagccttcatgaaggcttcgtactgcttaaaagcttcctgggccttacttccctcgg

SEQ ID NO: 14391 - DNA, 80 bp, synthetic construct
  misc_feature 1..80: note = Synthetic: >AdVB3-cand-22540-22619
  source 1..80: mol_type = other DNA
tgtagaacatcccacaggacttactggaaaattgattagtagtacagttggcatcattcacacagcagcgggcatcgttg

SEQ ID NO: 14392 - DNA, 80 bp, synthetic construct
  misc_feature 1..80: note = Synthetic: >AdVB3-cand-22620-22699
  source 1..80: mol_type = other DNA
ttggccaactgaaccacatttctgccccagcggttttgggtgatcttggctctgtctggattctccttcatagcgcgctg

SEQ ID NO: 14393 - DNA, 80 bp, synthetic construct
  misc_feature 1..80: note = Synthetic: >AdVB3-cand-22850-22929
  source 1..80: mol_type = other DNA
ggaataataatgtaccaatccctgcatgaatcttcccatcattgttgtcaaggtcttcatgctggtaaatgtcagcggga

SEQ ID NO: 14394 - DNA, 80 bp, synthetic construct
  misc_feature 1..80: note = Synthetic: >AdVB3-cand-23210-23289
  source 1..80: mol_type = other DNA
gctgaagcccacggccaccaactgagcctgttctctttcttcttcactatcctgactgatgtcttgcagagggacatgct

SEQ ID NO: 14395 - DNA, 80 bp, synthetic construct
  misc_feature 1..80: note = Synthetic: >AdVB3-cand-23240-23319
  source 1..80: mol_type = other DNA
ttctctttcttcttcactatcctgactgatgtcttgcagagggacatgcttggtcttcctgggcttcttcttgggaggga

SEQ ID NO: 14396 - DNA, 80 bp, synthetic construct
  misc_feature 1..80: note = Synthetic: >AdVB3-cand-23330-23409
  source 1..80: mol_type = other DNA
actgttgctccgctccggagacagggatgactgcgacgtttcgcttaccaataccacctggctctcggtagaagaaccgg

SEQ ID NO: 14397 - DNA, 80 bp, synthetic construct
  misc_feature 1..80: note = Synthetic: >AdVB3-cand-23360-23439
  source 1..80: mol_type = other DNA
ctgcgacgtttcgcttaccaataccacctggctctcggtagaagaaccggaccccacgcgacggtaggtgttcctcttcg

SEQ ID NO: 14398 - DNA, 80 bp, synthetic construct
  misc_feature 1..80: note = Synthetic: >AdVB3-cand-23530-23609
  source 1..80: mol_type = other DNA
cccggtggcggtcgcttgactgatttcctccgcggctggccattgtgttctcctaggcagagaaacaacagacatggaaa

SEQ ID NO: 14399 - DNA, 80 bp, synthetic construct
  misc_feature 1..80: note = Synthetic: >AdVB3-cand-23810-23889
  source 1..80: mol_type = other DNA
caggacccgggctatgtgacgccggcggagcacgaggaggagctgaaacgctttctagacagagaggatgacgaccgccc

SEQ ID NO: 14400 - DNA, 80 bp, synthetic construct
  misc_feature 1..80: note = Synthetic: >AdVB3-cand-23880-23959
  source 1..80: mol_type = other DNA
acgaccgcccagagcatcaagcagatggcgtttaccaggaggctgggatcagggatcatgtcgccgactacctcaccggc

SEQ ID NO: 14401 - DNA, 80 bp, synthetic construct
  misc_feature 1..80: note = Synthetic: >AdVB3-cand-23970-24049
  source 1..80: mol_type = other DNA
aggacgtgctcctcaaacatctagcaaggcagtcgatcatagttaaagacgcattgctcaatctcactgaagtgcccatc

SEQ ID NO: 14402 - DNA, 80 bp, synthetic construct
  misc_feature 1..80: note = Synthetic: >AdVB3-cand-24130-24209
  source 1..80: mol_type = other DNA
ctgcgaggccaaccctcgactcaacttctatccagcttttactatccccgaagtgttggccacctaccacatctttttta

SEQ ID NO: 14403 - DNA, 80 bp, synthetic construct
  misc_feature 1..80: note = Synthetic: >AdVB7-cand-14920-14999
  source 1..80: mol_type = other DNA
gtagactttactgaaagccgacttagcaacttgcttggcatcaggaaaagacatccattccaggagggtttcaaaatcat

SEQ ID NO: 14404 - DNA, 80 bp, synthetic construct
  misc_feature 1..80: note = Synthetic: >AdVB7-cand-14930-15009
  source 1..80: mol_type = other DNA
ctgaaagccgacttagcaacttgcttggcatcaggaaaagacatccattccaggagggtttcaaaatcatgtatgaagat

SEQ ID NO: 14405 - DNA, 80 bp, synthetic construct
  misc_feature 1..80: note = Synthetic: >AdVB7-cand-15750-15829
  source 1..80: mol_type = other DNA
agtcgcgccgcgcgttctttcaagccgcactttctaaaaaaaaaaaaaaatgtccattctcatctcgcccagtaataata

SEQ ID NO: 14406 - DNA, 80 bp, synthetic construct
  misc_feature 1..80: note = Synthetic: >AdVB7-cand-15930-16009
  source 1..80: mol_type = other DNA
gggcgcactcaagggtcgtacccgcactcggaccacggtcgatgatgtgatcgaccaggtggtcgccgatgctcgtaatt

SEQ ID NO: 14407 - DNA, 80 bp, synthetic construct
  misc_feature 1..80: note = Synthetic: >AdVE4-cand-30640-30719
  source 1..80: mol_type = other DNA
ctgcgccaccacccccagtaccgcgaccaaagagtggcgcagctgcttaggcttatttgacaatcatgcgggctttgcta

SEQ ID NO: 14408 - DNA, 80 bp, synthetic construct
  misc_feature 1..80: note = Synthetic: >AdVE4-cand-30720-30799
  source 1..80: mol_type = other DNA
cttctcacgcttttgctattgctagctcccctggttgccccctttcccctcaaatcccccacccagtcccccaaagaggt

SEQ ID NO: 14409 - DNA, 80 bp, synthetic construct
  misc_feature 1..80: note = Synthetic: >AdVE4-cand-30800-30879
  source 1..80: mol_type = other DNA
tcgaaaatgtaaattccaagaaccctggaaattcctcaaatgctaccagctcaaatcagacatgcaccccagctggataa

SEQ ID NO: 14410 - DNA, 80 bp, synthetic construct
  misc_feature 1..80: note = Synthetic: >AdVE4-cand-30880-30959
  source 1..80: mol_type = other DNA
ttatcatgggaatcgtgaacatccttgcctgcaccctcttttcctttgtgatttacccccgctttgattttggttggaac

SEQ ID NO: 14411 - DNA, 80 bp, synthetic construct
  misc_feature 1..80: note = Synthetic: >AdVE4-cand-30960-31039
  source 1..80: mol_type = other DNA
gcacccaaggcgctttggcttccgcctgctcccgacacaccaccacagcagcagcaaaatcaggcacacgcaccaccacc

SEQ ID NO: 14412 - DNA, 80 bp, synthetic construct
  misc_feature 1..80: note = Synthetic: >AdVE4-cand-31040-31119
  source 1..80: mol_type = other DNA
acagcctaggccgcaatacatgcccatcttagattatgaggccgagccacagcaagccatgcttcctgctattagctact

SEQ ID NO: 14413 - DNA, 80 bp, synthetic construct
  misc_feature 1..80: note = Synthetic: >AdVE4-cand-31120-31199
  source 1..80: mol_type = other DNA
tcaatctaaccggtgaagatgactgacccactgaacaacaccgtcaacgacctcctggacatggacggccgcggctcgga

SEQ ID NO: 14414 - DNA, 80 bp, synthetic construct
  misc_feature 1..80: note = Synthetic: >AdVE4-cand-31200-31279
  source 1..80: mol_type = other DNA
gcagcgcctcgcccaactccgtattcgccagcagcaggagagagccgtcaaggagctgcaggacgcagtggccatccacc

SEQ ID NO: 14415 - DNA, 80 bp, synthetic construct
  misc_feature 1..80: note = Synthetic: >AdVE4-cand-31280-31359
  source 1..80: mol_type = other DNA
agtgcaagaaaggcatcttctgcctggtgaagcaggccaagatatccttcgaggtcacttccaccgaccatcgcctttcc

SEQ ID NO: 14416 - DNA, 80 bp, synthetic construct
  misc_feature 1..80: note = Synthetic: >AdVE4-cand-31360-31439
  source 1..80: mol_type = other DNA
tacgagctcctgcagcagcgccagaagttcacctgcctggtcggagttaaccccatcgtcatcacccagcagtctggcga

SEQ ID NO: 14417 - DNA, 80 bp, synthetic construct
  misc_feature 1..80: note = Synthetic: >AdVE4-cand-31440-31519
  source 1..80: mol_type = other DNA
taccaagggttgcatccactgttcctgcaactcctccgagtgcgtttacaccctgatcaagaccctctgcggcctccgcg

SEQ ID NO: 14418 - DNA, 80 bp, synthetic construct
  misc_feature 1..80: note = Synthetic: >AdVE4-cand-31520-31599
  source 1..80: mol_type = other DNA
acctcctccccataaactaatcaactaaccccttaccccattacccatccagtaaaaaaaataaggattaaagagacgat

SEQ ID NO: 14419 - DNA, 80 bp, synthetic construct
  misc_feature 1..80: note = Synthetic: >AdVE4-cand-31610-31689
  source 1..80: mol_type = other DNA
tgatcaataaagaattacttacttgaaatctgaaaccaagtctctgtccatgttttctgtcagcagcacttcactcccct

SEQ ID NO: 14420 - DNA, 80 bp, synthetic construct
  misc_feature 1..80: note = Synthetic: >AdVE4-cand-31670-31749
  source 1..80: mol_type = other DNA
cagcagcacttcactcccctcttcccagctctggtactgcaggccccggcgggctgcaaacttcctccacactctgaagg

SEQ ID NO: 14421 - DNA, 80 bp, synthetic construct
  misc_feature 1..80: note = Synthetic: >AdVE4-cand-31770-31849
  source 1..80: mol_type = other DNA
ccctcaatcttcatttttattttttattagatgtccaaaaagcgcgcgcgggtggatgatggcttcgaccccgtgtaccc

SEQ ID NO: 14422 - DNA, 80 bp, synthetic construct
  misc_feature 1..80: note = Synthetic: >AdVE4-cand-31850-31929
  source 1..80: mol_type = other DNA
ctacgatgcagacaacgcaccgaccatgcccttcatcaaccctcccttcgtctcttcaaatggattccaagaaaagcccc

SEQ ID NO: 14423 - DNA, 80 bp, synthetic construct
  misc_feature 1..80: note = Synthetic: >EF571895.1-cand-510-589
  source 1..80: mol_type = other DNA
ggttcaaggatgattcatcctttgaagaagtgaatggaattcggaaaccaaagcatctttatatctctatgccaacagca

SEQ ID NO: 14424 - DNA, 80 bp, synthetic construct
  misc_feature 1..80: note = Synthetic: >EF571895.1-cand-590-669
  source 1..80: mol_type = other DNA
caatccaccatgaaagctgaagagataacacctggaaggttcaggactattgcatgtgggttattccctgcacaagtgaa

SEQ ID NO: 14425 - DNA, 80 bp, synthetic construct
  misc_feature 1..80: note = Synthetic: >EF571895.1-cand-700-779
  source 1..80: mol_type = other DNA
ggtgattggttttggcttctttgtgaaagattggatggaaaggatagaagattttctagcctctgagtgcccttttttac

SEQ ID NO: 14426 - DNA, 80 bp, synthetic construct
  misc_feature 1..80: note = Synthetic: >EF571895.1-cand-750-829
  source 1..80: mol_type = other DNA
attttctagcctctgagtgcccttttttacctaaacccaagaatccttcagaggcatttatggcaactaacaaagcttac

SEQ ID NO: 14427 - DNA, 80 bp, synthetic construct
  misc_feature 1..80: note = Synthetic: >EF571895.1-cand-830-909
  source 1..80: mol_type = other DNA
ttcctcaacagacaaaagcaagttgatgagtctcaagttcccgatatagtagatttaattgaccatgctgaagctgagtc

SEQ ID NO: 14428 - DNA, 80 bp, synthetic construct
  misc_feature 1..80: note = Synthetic: >EF571895.1-cand-910-989
  source 1..80: mol_type = other DNA
agcaaccttattcaaagagattgccagtccacattctgtatgggtatttgcatgtgctcctgacaggtgcccaccaactg

SEQ ID NO: 14429 - DNA, 80 bp, synthetic construct
  misc_feature 1..80: note = Synthetic: >EF571895.1-cand-990-1069
  source 1..80: mol_type = other DNA
cattatatgtagctgggttacctgaattgggtgccttctttgcgattttgcaggacatgaggaataccatcatggcatcc

SEQ ID NO: 14430 - DNA, 80 bp, synthetic construct
  misc_feature 1..80: note = Synthetic: >EF571895.1-cand-1070-1149
  source 1..80: mol_type = other DNA
aagtcagttgggactgcagaagaaaaattaaagaaaaaatctgccttctatcaatcttacttaagacggacacaatccat

SEQ ID NO: 14431 - DNA, 80 bp, synthetic construct
  misc_feature 1..80: note = Synthetic: >EF571895.1-cand-1120-1199
  source 1..80: mol_type = other DNA
tcaatcttacttaagacggacacaatccatgggaatacaattggaccaaaaaatcataattttgtacatgctgtcctggg

SEQ ID NO: 14432 - DNA, 80 bp, synthetic construct
  misc_feature 1..80: note = Synthetic: >EF571895.1-cand-1230-1309
  source 1..80: mol_type = other DNA
gtgatgatatggatccagagcttcgtcagcttgctcagtcattgattgataccaaggttaaggagatttcaaaccaagga

SEQ ID NO: 14433 - DNA, 80 bp, synthetic construct
  misc_feature 1..80: note = Synthetic: >EF571895.1-cand-1310-1389
  source 1..80: mol_type = other DNA
cccttaaagctgtgaacagctattgggtgatcccacccacgtagcccccgcggccaatcccatgcccacccccgagcctc

SEQ ID NO: 14434 - DNA, 80 bp, synthetic construct
  misc_feature 1..80: note = Synthetic: >EF571895.1-cand-1390-1469
  source 1..80: mol_type = other DNA
tattttttcactcccagggttatatctcacacgcggtccactcgggctctataataactcccagggtccactgcccctcg

SEQ ID NO: 14435 - DNA, 80 bp, synthetic construct
  misc_feature 1..80: note = Synthetic: >EF571895.1-cand-1500-1579
  source 1..80: mol_type = other DNA
gcggcatgatttcatccccatattgtagtttatgtttaaatagtttaactccgtttacgtgctcacggttccgcctcagc

SEQ ID NO: 14436 - DNA, 80 bp, synthetic construct
  misc_feature 1..80: note = Synthetic: >EF571895.1-cand-1520-1599
  source 1..80: mol_type = other DNA
tattgtagtttatgtttaaatagtttaactccgtttacgtgctcacggttccgcctcagcctgccatgaatccccatgat

SEQ ID NO: 14437 - DNA, 80 bp, synthetic construct
  misc_feature 1..80: note = Synthetic: >EF571895.1-cand-1600-1679
  source 1..80: mol_type = other DNA
tggatcgcaccagactcaggtaatatcactcattatgctgttgcaattttagaaaagtatacctgccatatgtccagatc

SEQ ID NO: 14438 - DNA, 80 bp, synthetic construct
  misc_feature 1..80: note = Synthetic: >EF571895.1-cand-1680-1759
  source 1..80: mol_type = other DNA
tactaaaccatgatattatcatgactcggatgtaaatttcatccctgctttgcagctttgcattgtactaatcttcaaca

SEQ ID NO: 14439 - DNA, 80 bp, synthetic construct
  misc_feature 1..80: note = Synthetic: >EVA91-cand-1670-1749
  source 1..80: mol_type = other DNA
catagctcccttgtgctctgaatttgcaggtctgaggcaggctgtacagcaaggtttgcctacagaatcaaagcctggca

SEQ ID NO: 14440 - DNA, 80 bp, synthetic construct
  misc_feature 1..80: note = Synthetic: >EVA91-cand-1750-1829
  source 1..80: mol_type = other DNA
caaaccagttcctgaccacagacgacggagttgcagcacccatactaccagggtatcaccccacacaagagatacacata

SEQ ID NO: 14441 - DNA, 80 bp, synthetic construct
  misc_feature 1..80: note = Synthetic: >EVA91-cand-1830-1909
  source 1..80: mol_type = other DNA
ccaggtgaggttaaaaacctcttggagatttgtagagtggagagtatccttgaagtcaacaacttaacaaccaatgaagc

SEQ ID NO: 14442 - DNA, 80 bp, synthetic construct
  misc_feature 1..80: note = Synthetic: >EVA91-cand-1910-1989
  source 1..80: mol_type = other DNA
taacccaatggaaaggctgttaatccctgtttcagtacagagcgctgtagattctctctgcgcggcatttagagtagatc

SEQ ID NO: 14443 - DNA, 80 bp, synthetic construct
  misc_feature 1..80: note = Synthetic: >EVA91-cand-1990-2069
  source 1..80: mol_type = other DNA
ctggaagagatggcccctggcaatccacgttgttagggcagctctgcagatattacacacaatggtctggatcattagaa

SEQ ID NO: 14444 - DNA, 80 bp, synthetic construct
  misc_feature 1..80: note = Synthetic: >EVA91-cand-2070-2149
  source 1..80: mol_type = other DNA
atcactttcatgttcactggttcatttatggcaacaggtaaaatgcttatagcatatacaccaccaggaggagcacaacc

SEQ ID NO: 14445 - DNA, 80 bp, synthetic construct
  misc_feature 1..80: note = Synthetic: >EVA91-cand-2150-2229
  source 1..80: mol_type = other DNA
aactagccgctcccttgccatgctaggcacacatgttatttgggattttggccttcaatcttcagtcactttagttatac

SEQ ID NO: 14446 - DNA, 80 bp, synthetic construct
  misc_feature 1..80: note = Synthetic: >EVA91-cand-2270-2349
  source 1..80: mol_type = other DNA
aggctattttgattattactccacaggcatagtcaccatttggtaccagaccaattacgtagtgcctattggagcaccca

SEQ ID NO: 14447 - DNA, 80 bp, synthetic construct
  misc_feature 1..80: note = Synthetic: >EVA91-cand-2310-2389
  source 1..80: mol_type = other DNA
tggtaccagaccaattacgtagtgcctattggagcacccacctcagcttacatcatagcattaggtgctgcccaacccaa

SEQ ID NO: 14448 - DNA, 80 bp, synthetic construct
  misc_feature 1..80: note = Synthetic: >EVA91-cand-2370-2449
  source 1..80: mol_type = other DNA
ttaggtgctgcccaacccaattttaccatgagattgtgcaaagactcaccagaaatatctcaaactgccatattgcaagg

SEQ ID NO: 14449 - DNA, 80 bp, synthetic construct
  misc_feature 1..80: note = Synthetic: >EVA91-cand-2470-2549
  source 1..80: mol_type = other DNA
ttaattcagcagtttccactgcactcaacaatgctatttccagaccaccaacccagactacggctgagaacacaagacct

SEQ ID NO: 14450 - DNA, 80 bp, synthetic construct
  misc_feature 1..80: note = Synthetic: >EVA91-cand-2550-2629
  source 1..80: mol_type = other DNA
agcacccaccagattggtactggtgaggtaccagcactacaagcagcagagacaggagcaacgtccacaaccagtgatga

SEQ ID NO: 14451 - DNA, 80 bp, synthetic construct
  misc_feature 1..80: note = Synthetic: >EVA91-cand-2630-2709
  source 1..80: mol_type = other DNA
gaacatgattgagaccaggtgcgtggtaaataaacatagtgtagctgagaccactgtttcccacttctatggtaaagccg

SEQ ID NO: 14452 - DNA, 80 bp, synthetic construct
  misc_feature 1..80: note = Synthetic: >EVA91-cand-2700-2779
  source 1..80: mol_type = other DNA
ggtaaagccggtttagtcggttggatacaactattgacttcaacaaaaaacaaccacggtttcaaaaactgggatgtgga

SEQ ID NO: 14453 - DNA, 80 bp, synthetic construct
  misc_feature 1..80: note = Synthetic: >EVA91-cand-2790-2869
  source 1..80: mol_type = other DNA
tttgtgcagttgcgcagaaaattagaactattcacttacatgagatttgatgctgagttcacctttgtggcatgtggtct

SEQ ID NO: 14454 - DNA, 80 bp, synthetic construct
  misc_feature 1..80: note = Synthetic: >EVA91-cand-2870-2949
  source 1..80: mol_type = other DNA
gaacggcactgcacctaattcattgcttcagtacatgtatgttcctcctggagcacccaaacccaccactagagattcct

SEQ ID NO: 14455 - DNA, 80 bp, synthetic construct
  misc_feature 1..80: note = Synthetic: >EVB74-cand-780-859
  source 1..80: mol_type = other DNA
caagcaatggcgctagcatacactacaccaatataaattattacagcgactccgcttcaagatcctcaaaccgacaagac

SEQ ID NO: 14456 - DNA, 80 bp, synthetic construct
  misc_feature 1..80: note = Synthetic: >EVB74-cand-860-939
  source 1..80: mol_type = other DNA
tttgcacaggaccccggcaagtttaccgaacctgtcaaggacatcatgataaagtcgttgccggctctaaactctccaag

SEQ ID NO: 14457 - DNA, 80 bp, synthetic construct
  misc_feature 1..80: note = Synthetic: >EVB74-cand-940-1019
  source 1..80: mol_type = other DNA
tgcagaggaatgtggttacagtgatagagtgcgctcaatcacacttggaaactccacaatcaccacacaagaaggtgcaa

SEQ ID NO: 14458 - DNA, 80 bp, synthetic construct
  misc_feature 1..80: note = Synthetic: >EVB74-cand-1020-1099
  source 1..80: mol_type = other DNA
acgtagtggtggcgtacggtgagtggccacaatacctatctgacaaagaagccacggcagaagaccaacccactcaacct

SEQ ID NO: 14459 - DNA, 80 bp, synthetic construct
  misc_feature 1..80: note = Synthetic: >EVB74-cand-1100-1179
  source 1..80: mol_type = other DNA
gatgtggccacctgcaggttttacacactggaatcagtgcaatggcaggaaaattctagagggtggtggtggaagttccc

SEQ ID NO: 14460 - DNA, 80 bp, synthetic construct
  misc_feature 1..80: note = Synthetic: >EVB74-cand-1180-1259
  source 1..80: mol_type = other DNA
ggagatgttgaaagatatgggactgtttggacagaacatgcactaccattacttgggcagggctgggtacaccattcacg

SEQ ID NO: 14461 - DNA, 80 bp, synthetic construct
  misc_feature 1..80: note = Synthetic: >EVB74-cand-1260-1339
  source 1..80: mol_type = other DNA
tgcagtgtaatgcgtctaagtttcatcaagggtgtttgcttgtggtgtgcgtccctgaggcagaaatgggaagtgccact

SEQ ID NO: 14462 - DNA, 80 bp, synthetic construct
  misc_feature 1..80: note = Synthetic: >EVB74-cand-1340-1419
  source 1..80: mol_type = other DNA
gtagggcaagcttttgactttaccgccttaaccaaccaggacacaccacatacattcactgagggagcatccactggaaa

SEQ ID NO: 14463 - DNA, 80 bp, synthetic construct
  misc_feature 1..80: note = Synthetic: >EVB74-cand-1420-1499
  source 1..80: mol_type = other DNA
gcaggtacaaacagctgtgtgcaatgcgggcatgggtgtaggtgtcggtaacctaaccatcttcccccaccagtggataa

SEQ ID NO: 14464 - DNA, 80 bp, synthetic construct
  misc_feature 1..80: note = Synthetic: >EVB74-cand-1500-1579
  source 1..80: mol_type = other DNA
acttgagaacaaacaatagtgcgaccatagtgatgccatacattaacagcgtaccaatggacaacatgtttagacactac

SEQ ID NO: 14465 - DNA, 80 bp, synthetic construct
  misc_feature 1..80: note = Synthetic: >EVB74-cand-1550-1629
  source 1..80: mol_type = other DNA
gtaccaatggacaacatgtttagacactacaacttcactctcatgattatcccatttgcgcccctagccttttccacggg

SEQ ID NO: 14466 - DNA, 80 bp, synthetic construct
  misc_feature 1..80: note = Synthetic: >EVB74-cand-1660-1739
  source 1..80: mol_type = other DNA
catcgccccaatgcatgcagagtacaatggtttgagacttgggtccacccagggtttaccagtgatggcaacaccaggta

SEQ ID NO: 14467 - DNA, 80 bp, synthetic construct
  misc_feature 1..80: note = Synthetic: >EVB74-cand-1740-1819
  source 1..80: mol_type = other DNA
gcaaccagttcttgacctcagacaacttccaatccccatcagcaatgccgcaatttgacgttacccctgagatgcacatt

SEQ ID NO: 14468 - DNA, 80 bp, synthetic construct
  misc_feature 1..80: note = Synthetic: >EVB74-cand-1820-1899
  source 1..80: mol_type = other DNA
cccggtgaggtgagaaacttaatggaaatcgctgaggttgattcagtgatgcccgtcaacaacgtgacaggcaaatgtga

SEQ ID NO: 14469 - DNA, 80 bp, synthetic construct
  misc_feature 1..80: note = Synthetic: >EVB74-cand-1900-1979
  source 1..80: mol_type = other DNA
caaaatggatgcatatcaaattgaggtgaatgcaggcaataccaacaccacaactgcaatcttcagcttccaagtggacc

SEQ ID NO: 14470 - DNA, 80 bp, synthetic construct
  misc_feature 1..80: note = Synthetic: >EVB74-cand-2020-2099
  source 1..80: mol_type = other DNA
aatgctaaattactatgctcattggtcaggtagcatgaagctgacattcttgttttgcgggtcagcaatggccactggca

SEQ ID NO: 14471 - DNA, 80 bp, synthetic construct
  misc_feature 1..80: note = Synthetic: >EVB81-cand-1170-1249
  source 1..80: mol_type = other DNA
gctggttggtggtggaaatttcccattgctctgaaagacatgggcctcttcggacaaaacatgctgtatcactacctggg

SEQ ID NO: 14472 - DNA, 80 bp, synthetic construct
  misc_feature 1..80: note = Synthetic: >EVB81-cand-1260-1339
  source 1..80: mol_type = other DNA
tacacaatccacgttcagtgcaacgcatccaagtttcatcaagggtgcttattggtcgtgtgcgtgcccgaggcagagat

SEQ ID NO: 14473 - DNA, 80 bp, synthetic construct
  misc_feature 1..80: note = Synthetic: >EVB81-cand-1350-1429
  source 1..80: mol_type = other DNA
aaaacggactacaccgttaatgaggatgctttatcaaaaggagaggaaccgtgcctgttcactgacactgagtccggtga

SEQ ID NO: 14474 - DNA, 80 bp, synthetic construct
  misc_feature 1..80: note = Synthetic: >EVB81-cand-1410-1489
  source 1..80: mol_type = other DNA
actgacactgagtccggtgaaacgcatggagtgcagaccgctgtgcacaatgcagccatgggagtcgccgtgggcaacct

SEQ ID NO: 14475 - DNA, 80 bp, synthetic construct
  misc_feature 1..80: note = Synthetic: >EVB81-cand-1490-1569
  source 1..80: mol_type = other DNA
gaccattttcccacatcagtggattaatttgcgtactaacaacagcgctacgattgtggttccgtacataaatagtgttc

SEQ ID NO: 14476 - DNA, 80 bp, synthetic construct
  misc_feature 1..80: note = Synthetic: >EVB81-cand-1570-1649
  source 1..80: mol_type = other DNA
caatggacaatatgtatagacaccaaaatttcactttaatgattatcccatttgcgccactggaggtccaagcaggcacg

SEQ ID NO: 14477 - DNA, 80 bp, synthetic construct
  misc_feature 1..80: note = Synthetic: >EVB81-cand-1650-1729
  source 1..80: mol_type = other DNA
gctacggcagtgcctataacagtgaccgtggcgcctatgcaagcagaatacaatgggttgcgcttagctatggcacaggg

SEQ ID NO: 14478 - DNA, 80 bp, synthetic construct
  misc_feature 1..80: note = Synthetic: >EVB81-cand-1730-1809
  source 1..80: mol_type = other DNA
cctgccagtattatgcactcccggcagcaaccagtttctcacatcagatgatttccagtcaccatctgcgatgccgcagt

SEQ ID NO: 14479 - DNA, 80 bp, synthetic construct
  misc_feature 1..80: note = Synthetic: >EVB81-cand-1840-1919
  source 1..80: mol_type = other DNA
gggaggtcaaaaacctgatggaggttgccgaggttgattccgtggtgccagtaaacaacaatccaagagatgtgaattcc

SEQ ID NO: 14480 - DNA, 80 bp, synthetic construct
  misc_feature 1..80: note = Synthetic: >EVB81-cand-1890-1969
  source 1..80: mol_type = other DNA
gtaaacaacaatccaagagatgtgaattccatcagagcataccaaatcccagtctcaactggaacgcatgcgtcgagtaa

SEQ ID NO: 14481 - DNA, 80 bp, synthetic construct
  misc_feature 1..80: note = Synthetic: >EVB81-cand-1970-2049
  source 1..80: mol_type = other DNA
agccatattcagttttgagctagaccccgggaatggtactgtcttgagtaaaaccctactgggtgagatcttaaattact

SEQ ID NO: 14482 - DNA, 80 bp, synthetic construct
  misc_feature 1..80: note = Synthetic: >EVB81-cand-2040-2119
  source 1..80: mol_type = other DNA
ttaaattactatgctcactggtcaggcagtgtcaagttcacgttcctgttttgcggttcggcaatggcaactggcaaaat

SEQ ID NO: 14483 - DNA, 80 bp, synthetic construct
  misc_feature 1..80: note = Synthetic: >EVB81-cand-2120-2199
  source 1..80: mol_type = other DNA
actattagcttactcaccaccaggcgcttccgtgccaaaggataggaagcaagctatgttaggcacccacgtaatttggg

SEQ ID NO: 14484 - DNA, 80 bp, synthetic construct
  misc_feature 1..80: note = Synthetic: >EVB81-cand-2200-2279
  source 1..80: mol_type = other DNA
atcttgggctacagtctagctgtgtgttgtgtgtaccatggataagtcaaacgcattaccggttcgtgcatgataaccca

SEQ ID NO: 14485 - DNA, 80 bp, synthetic construct
  misc_feature 1..80: note = Synthetic: >EVB81-cand-2280-2359
  source 1..80: mol_type = other DNA
tacactagtgcaggctacatcacagcctggtaccagacgacgatggtagtgccgccaaaaaccccaacctcgtgttatat

SEQ ID NO: 14486 - DNA, 80 bp, synthetic construct
  misc_feature 1..80: note = Synthetic: >EVB81-cand-2350-2429
  source 1..80: mol_type = other DNA
cgtgttatatcctgtgcttcgtgtccgcttgcaacgacttctcggtgcgcatgttgagggacaccccacatattgatcag

SEQ ID NO: 14487 - DNA, 80 bp, synthetic construct
  misc_feature 1..80: note = Synthetic: >EVB85-cand-5820-5899
  source 1..80: mol_type = other DNA
gcggcggcgtcttgatgtcaacaggcaaagtccttggaatacacgttggtggcaacggtcaccagggcttctcagcggcc

SEQ ID NO: 14488 - DNA, 80 bp, synthetic construct
  misc_feature 1..80: note = Synthetic: >EVB85-cand-5900-5979
  source 1..80: mol_type = other DNA
ctgttacgccactatttcaatgatgaacagggcgaaattgagttcattgagagctccaaggaagccggtttcccgatcat

SEQ ID NO: 14489 - DNA, 80 bp, synthetic construct
  misc_feature 1..80: note = Synthetic: >EVB85-cand-5980-6059
  source 1..80: mol_type = other DNA
caacactcccagcagaacaaaactcgagcccagtgttttccatcaagtgtttgaagggaataaggaacctgcagtgttga

SEQ ID NO: 14490 - DNA, 80 bp, synthetic construct
  misc_feature 1..80: note = Synthetic: >EVB85-cand-6070-6149
  source 1..80: mol_type = other DNA
ccctagattgaaggcaaattttgaggaggccattttttctaagtacattggaaacgtgaacacacatgtggatgagtaca

SEQ ID NO: 14491 - DNA, 80 bp, synthetic construct
  misc_feature 1..80: note = Synthetic: >EVB85-cand-6140-6219
  source 1..80: mol_type = other DNA
gatgagtacatgatggaggccgttgaccattatgccggacagctagcaaccttagacatcagtacagaacccatgaaact

SEQ ID NO: 14492 - DNA, 80 bp, synthetic construct
  misc_feature 1..80: note = Synthetic: >EVB85-cand-6220-6299
  source 1..80: mol_type = other DNA
tgaggacgccgtctatggcactgaaggtttggaagcattggatctgaccactagtgcagggtacccatacgttgcacttg

SEQ ID NO: 14493 - DNA, 80 bp, synthetic construct
  misc_feature 1..80: note = Synthetic: >EVB85-cand-6380-6459
  source 1..80: mol_type = other DNA
aacctccccatggtcacttatgtgaaggatgagctacgatcagctgaaaaggtggctaaaggcaagtccagactaattga

SEQ ID NO: 14494 - DNA, 80 bp, synthetic construct
  misc_feature 1..80: note = Synthetic: >EVB85-cand-6460-6539
  source 1..80: mol_type = other DNA
ggcgtcaagcctcaatgactcagtagctatgagacaaacttttgggaacctgtacaaaacattccacctaaacccaggca

SEQ ID NO: 14495 - DNA, 80 bp, synthetic construct
  misc_feature 1..80: note = Synthetic: >EVB85-cand-6540-6619
  source 1..80: mol_type = other DNA
tagtgacaggcagcgcagtcggttgtgaccctgatttattttggagtaagattccagttatgcttgacggccatctcatt

SEQ ID NO: 14496 - DNA, 80 bp, synthetic construct
  misc_feature 1..80: note = Synthetic: >EVB85-cand-6620-6699
  source 1..80: mol_type = other DNA
gcctttgattacagtggatacgatgccagcttgagcccggtgtggttcgcctgtctgaaactgttactagagaaattggg

SEQ ID NO: 14497 - DNA, 80 bp, synthetic construct
  misc_feature 1..80: note = Synthetic: >EVB85-cand-6700-6779
  source 1..80: mol_type = other DNA
atacacgcacaaagaaaccaactacatagattacctatgcaactctcaccacctgtacagggacaaacactactttgtga

SEQ ID NO: 14498 - DNA, 80 bp, synthetic construct
  misc_feature 1..80: note = Synthetic: >EVB85-cand-6790-6869
  source 1..80: mol_type = other DNA
gccatccgggtgttcaggaaccagtatctttaacaccatgatcaacaacataattattagaacactgatgttgaaagtgt

SEQ ID NO: 14499 - DNA, 80 bp, synthetic construct
  misc_feature 1..80: note = Synthetic: >EVB85-cand-6880-6959
  source 1..80: mol_type = other DNA
agacttagatcagttcaggatgatagcatacggagacgatgtcattgcatcgtacccacatcccatcgatgcctcattgt

SEQ ID NO: 14500 - DNA, 80 bp, synthetic construct
  misc_feature 1..80: note = Synthetic: >EVB85-cand-7020-7099
  source 1..80: mol_type = other DNA
ttaatgaggtgacatggactaacgtcaccttcttgaaaagatactttagggctgatgagcaataccccttcctcgttcac

SEQ ID NO: 14501 - DNA, 80 bp, synthetic construct
  misc_feature 1..80: note = Synthetic: >EVB85-cand-7100-7179
  source 1..80: mol_type = other DNA
cctgtgatgccaatgaaagatatacatgaatcaattaggtggactaaagaccccaaaaacacccaggaccatgtgcgatc

SEQ ID NO: 14502 - DNA, 80 bp, synthetic construct
  misc_feature 1..80: note = Synthetic: >EVB85-cand-7180-7259
  source 1..80: mol_type = other DNA
cttgtgcctgttggcctggcacaacggagagcacgaatacgaagaattcgtgtccaagatcaggagcgtcccagtagggc

SEQ ID NO: 14503 - DNA, 80 bp, synthetic construct
  misc_feature 1..80: note = Synthetic: >EVD68-cand-360-439
  source 1..80: mol_type = other DNA
ttggcggcctactcatggtgaaaaccatgagacgctagacatgaacaaggtgtgaagagtctattgagctgctatagagt

SEQ ID NO: 14504 - DNA, 80 bp, synthetic construct
  misc_feature 1..80: note = Synthetic: >EVD68-cand-540-619
  source 1..80: mol_type = other DNA
ctttgggtgtccgtgtttcactttttacttttatgactgctaatggtgacaatttaatattgttaccatttggcttgtcg

SEQ ID NO: 14505 - DNA, 80 bp, synthetic construct
  misc_feature 1..80: note = Synthetic: >EVD68-cand-620-699
  source 1..80: mol_type = other DNA
aattgatcacataagatctatagttttgttcactgatttgctttgaaataatctcacctcaaaacctccagtacataaca

SEQ ID NO: 14506 - DNA, 80 bp, synthetic construct
  misc_feature 1..80: note = Synthetic: >EVD68-cand-720-799
  source 1..80: mol_type = other DNA
ttataacaatgggagctcaagttactagacagcaaactggaactcatgagaatgctaacattgctacaaatggatcccat

SEQ ID NO: 14507 - DNA, 80 bp, synthetic construct
  misc_feature 1..80: note = Synthetic: >EVD68-cand-800-879
  source 1..80: mol_type = other DNA
attacatacaatcagataaatttttacaaggatagttatgcagcttcagccagcaagcaagacttttcacaggatccatc

SEQ ID NO: 14508 - DNA, 80 bp, synthetic construct
  misc_feature 1..80: note = Synthetic: >EVD68-cand-840-919
  source 1..80: mol_type = other DNA
cagcttcagccagcaagcaagacttttcacaggatccatcaaaattcactgaaccagtggtggaaggcttaaaagcaggg

SEQ ID NO: 14509 - DNA, 80 bp, synthetic construct
  misc_feature 1..80: note = Synthetic: >EVD68-cand-960-1039
  source 1..80: mol_type = other DNA
acagtgatagagtactacaactcaaattgggcaactcagctattgtcactcaagaagcagcaaactactgttgcgcttat

SEQ ID NO: 14510 - DNA, 80 bp, synthetic construct
  misc_feature 1..80: note = Synthetic: >EVD68-cand-1040-1119
  source 1..80: mol_type = other DNA
ggtgaatggcctaattatttaccagatcatgaagcagtagctattgataaacctacacaaccagaaacttctacagacag

SEQ ID NO: 14511 - DNA, 80 bp, synthetic construct
  misc_feature 1..80: note = Synthetic: >EVD68-cand-1130-1209
  source 1..80: mol_type = other DNA
ttaagatcagtcaaatgggagagtaatagcacaggatggtggtggaaactacctgatgcattaaacaacataggcatgtt

SEQ ID NO: 14512 - DNA, 80 bp, synthetic construct
  misc_feature 1..80: note = Synthetic: >EVD68-cand-1210-1289
  source 1..80: mol_type = other DNA
tggacaaaatgtacaatatcactacctatacagatctggcttcttaattcatgtgcagtgcaacgctacaaagttccatc

SEQ ID NO: 14513 - DNA, 80 bp, synthetic construct
  misc_feature 1..80: note = Synthetic: >EVD68-cand-1340-1419
  source 1..80: mol_type = other DNA
gacaccaccactagtccagggtttaatgatatcatgaaaggtgaaagaggagggacgtttaaccacccatatgttcttga

SEQ ID NO: 14514 - DNA, 80 bp, synthetic construct
  misc_feature 1..80: note = Synthetic: >EVD68-cand-1380-1459
  source 1..80: mol_type = other DNA
gtgaaagaggagggacgtttaaccacccatatgttcttgatgatggaacatcaatagcttgtgcgacaatatttccacat

SEQ ID NO: 14515 - DNA, 80 bp, synthetic construct
  misc_feature 1..80: note = Synthetic: >EVD68-cand-1460-1539
  source 1..80: mol_type = other DNA
caatggataaatctaagaaccaacaattcagcaacgattgttcttccatggatgaatgttgcaccaatggactttccact

SEQ ID NO: 14516 - DNA, 80 bp, synthetic construct
  misc_feature 1..80: note = Synthetic: >EVD68-cand-1540-1619
  source 1..80: mol_type = other DNA
tagacacaatcagtggacactagcagtaataccagtggttccattgggtacacgcacaatgtcaagtgttgtcccaataa

SEQ ID NO: 14517 - DNA, 80 bp, synthetic construct
  misc_feature 1..80: note = Synthetic: >EVD68-cand-1620-1699
  source 1..80: mol_type = other DNA
cagtttcaattgcccctatgtgttgtgagtttaacggactcaggcacgccatcacccagggtgttccaacatatcttcta

SEQ ID NO: 14518 - DNA, 80 bp, synthetic construct
  misc_feature 1..80: note = Synthetic: >EVD68-cand-1690-1769
  source 1..80: mol_type = other DNA
atatcttctaccaggttcaggacaatttctgactactgatgaccatagctcagcaccagtcctcccgtgtttcaacccaa

SEQ ID NO: 14519 - DNA, 80 bp, synthetic construct
  misc_feature 1..80: note = Synthetic: >EVD68-cand-4320-4399
  source 1..80: mol_type = other DNA
caccactttacgcagtggaatcaaaaagagtggccgctcttgaaaagaaaataaacaattacatccagttcaagtccaaa

SEQ ID NO: 14520 - DNA, 80 bp, synthetic construct
  misc_feature 1..80: note = Synthetic: >EVD68-cand-4400-4479
  source 1..80: mol_type = other DNA
tctcgcattgaaccggtttgtttaataatacacggctccccaggaactggcaaatcagtagcctcaaatttaattgctag

SEQ ID NO: 14521 - DNA, 80 bp, synthetic construct
  misc_feature 1..80: note = Synthetic: >EVD68-cand-4510-4589
  source 1..80: mol_type = other DNA
ttactccctacccccagaccctaaatactttgatggatataaacagcaaacagtagtccttatggatgatttaatgcaaa

SEQ ID NO: 14522 - DNA, 80 bp, synthetic construct
  misc_feature 1..80: note = Synthetic: >EVD68-cand-4560-4639
  source 1..80: mol_type = other DNA
cagtagtccttatggatgatttaatgcaaaatccagatgggaatgatatatctatgttttgccaaatggtttcaactgtg

SEQ ID NO: 14523 - DNA, 80 bp, synthetic construct
  misc_feature 1..80: note = Synthetic: >EVD68-cand-4640-4719
  source 1..80: mol_type = other DNA
gattttattcctccaatggctagtttggaagagaaaggaactctatataccagtccattcttaatagccactactaatgc

SEQ ID NO: 14524 - DNA, 80 bp, synthetic construct
  misc_feature 1..80: note = Synthetic: >EVD68-cand-4720-4799
  source 1..80: mol_type = other DNA
tggttcaatacatgcaccaacagtctcagactcaaaggctttgtcacgcagattcaaatttgatgtggacattgaagtta

SEQ ID NO: 14525 - DNA, 80 bp, synthetic construct
  misc_feature 1..80: note = Synthetic: >EVD68-cand-4800-4879
  source 1..80: mol_type = other DNA
cagattcatacaaagactcaaacaaactagacatgtccagagcagtggaaatgtgcaaaccagataactgtacccctact

SEQ ID NO: 14526 - DNA, 80 bp, synthetic construct
  misc_feature 1..80: note = Synthetic: >EVD68-cand-4880-4959
  source 1..80: mol_type = other DNA
aattataaaagatgctgcccactgatttgcggaaaagctattcaatttagagatcgtagaaccaatgcaagatccacggt

SEQ ID NO: 14527 - DNA, 80 bp, synthetic construct
  misc_feature 1..80: note = Synthetic: >EVD68-cand-4960-5039
  source 1..80: mol_type = other DNA
tgatatgctagtgactgacattattaaggaatacagaaccaggaatagcacacaagacaaattagaagccctatttcaag

SEQ ID NO: 14528 - DNA, 80 bp, synthetic construct
  misc_feature 1..80: note = Synthetic: >EVD68-cand-5040-5119
  source 1..80: mol_type = other DNA
gacctccacaattcaaggagattaaaatctcagtcgctccagacacaccagcccctgatgccataaatgaccttcttagg

SEQ ID NO: 14529 - DNA, 80 bp, synthetic construct
  misc_feature 1..80: note = Synthetic: >EVD68-cand-5080-5159
  source 1..80: mol_type = other DNA
agacacaccagcccctgatgccataaatgaccttcttaggtcagtggactctcaagaagttagagattattgtcaaaaga

SEQ ID NO: 14530 - DNA, 80 bp, synthetic construct
  misc_feature 1..80: note = Synthetic: >EVD68-cand-5200-5279
  source 1..80: mol_type = other DNA
agaaaaacatattagtagagctttcatcactctgcaagctattgccacctttgtatcaatagctggtgtggtctatgtta

SEQ ID NO: 14531 - DNA, 80 bp, synthetic construct
  misc_feature 1..80: note = Synthetic: >EVD68-cand-5280-5359
  source 1..80: mol_type = other DNA
tatacaaactttttgctggtattcagggcccatatacaggaattcctaatcctaaacccaaagtgccctctcttagaaca

SEQ ID NO: 14532 - DNA, 80 bp, synthetic construct
  misc_feature 1..80: note = Synthetic: >EVD68-cand-5360-5439
  source 1..80: mol_type = other DNA
gccaaagtgcaaggaccaggatttgattttgcgcaagccataatgaagaaaaatactgttattgctagaactgaaaaagg

SEQ ID NO: 14533 - DNA, 80 bp, synthetic construct
  misc_feature 1..80: note = Synthetic: >EVD68-cand-5440-5519
  source 1..80: mol_type = other DNA
cgagttcacaatgcttggtgtgtatgatagagtggcagtcattccaacacatgcatctgttggagaaatcatttacatca

SEQ ID NO: 14534 - DNA, 80 bp, synthetic construct
  misc_feature 1..80: note = Synthetic: >EVD68-cand-5520-5599
  source 1..80: mol_type = other DNA
acgatgtagaaaccagagttctagatgcatgtgcacttagagacttgacagacacaaacctagaaataactatagtcaaa

SEQ ID NO: 14535 - DNA, 80 bp, synthetic construct
  misc_feature 1..80: note = Synthetic: >HCV.A15-cand-880-959
  source 1..80: mol_type = other DNA
tcaaaattcacagaaccagttaaagacataatgttgaaatcagccccggctctgaattcgcctaacattgaggcctgtgg

SEQ ID NO: 14536 - DNA, 80 bp, synthetic construct
  misc_feature 1..80: note = Synthetic: >HCV.A15-cand-960-1039
  source 1..80: mol_type = other DNA
gtacagtgatagagtaatgcaattgacacttgggaactccaccattaccacccaggaagcagcgaattcagttgttgctt

SEQ ID NO: 14537 - DNA, 80 bp, synthetic construct
  misc_feature 1..80: note = Synthetic: >HCV.A15-cand-1040-1119
  source 1..80: mol_type = other DNA
acggtgagtggccatcatacctatcagataaggaagctaaccctgttgatcaaccaactgagccggacgtgtccgcatgt

SEQ ID NO: 14538 - DNA, 80 bp, synthetic construct
  misc_feature 1..80: note = Synthetic: >HCV.A15-cand-1080-1159
  source 1..80: mol_type = other DNA
ccctgttgatcaaccaactgagccggacgtgtccgcatgtcgtttttacacattggacacagtcaattggaacaaggctt

SEQ ID NO: 14539 - DNA, 80 bp, synthetic construct
  misc_feature 1..80: note = Synthetic: >HCV.A15-cand-1200-1279
  source 1..80: mol_type = other DNA
catgggactcttcggccaaaacatgtactatcattacttgggccgctcaggatacactgtacatgtgcaatgcaatgcat

SEQ ID NO: 14540 - DNA, 80 bp, synthetic construct
  misc_feature 1..80: note = Synthetic: >HCV.A15-cand-1280-1359
  source 1..80: mol_type = other DNA
ccaaattccatcaaggagcactaggagttttcgccatcccagaatactgcatggcgtgcaacactgaagataagactaat

SEQ ID NO: 14541 - DNA, 80 bp, synthetic construct
  misc_feature 1..80: note = Synthetic: >HCV.A15-cand-1360-1439
  source 1..80: mol_type = other DNA
tacgttagctatgtacaggctaacccaggtgaagctggtggtgttttcaccgacacatataatcccagcaataacatcac

SEQ ID NO: 14542 - DNA, 80 bp, synthetic construct
  misc_feature 1..80: note = Synthetic: >HCV.A15-cand-1450-1529
  source 1..80: mol_type = other DNA
aaatttgcagcagtggactacttattaggttgtggtgttctagccggcaacgcctttgtctttccacaccaaatcattaa

SEQ ID NO: 14543 - DNA, 80 bp, synthetic construct
  misc_feature 1..80: note = Synthetic: >HCV.A15-cand-1520-1599
  source 1..80: mol_type = other DNA
aaatcattaatctccgcaccaacaattgtgctaccctggtcctaccctatgtgaactcaatggcaatagattgtatggcc

SEQ ID NO: 14544 - DNA, 80 bp, synthetic construct
  misc_feature 1..80: note = Synthetic: >HCV.A15-cand-1620-1699
  source 1..80: mol_type = other DNA
tgcaatattaccactagctgagcttgattttgccgaggcttcttcaaccgaggtgcccattacaatcaccattgcgccga

SEQ ID NO: 14545 - DNA, 80 bp, synthetic construct
  misc_feature 1..80: note = Synthetic: >HCV.A15-cand-1680-1759
  source 1..80: mol_type = other DNA
tacaatcaccattgcgccgatgtgctgtgagttcaatgggttgagaaatcttaccacccccgctaagcaagggttacctg

SEQ ID NO: 14546 - DNA, 80 bp, synthetic construct
  misc_feature 1..80: note = Synthetic: >HCV.A15-cand-1760-1839
  source 1..80: mol_type = other DNA
tgatgaatgtacctggtagtaatcagtttttgtcatctgacaactttcagtcaccgtgtgcactaccagaatttgatgtg

SEQ ID NO: 14547 - DNA, 80 bp, synthetic construct
  misc_feature 1..80: note = Synthetic: >HCV.A15-cand-1840-1919
  source 1..80: mol_type = other DNA
acaccacccatccatataccaggtgaagtcaagaacatgatggaacttgcagaaatagacaccctaatcccgatggacct

SEQ ID NO: 14548 - DNA, 80 bp, synthetic construct
  misc_feature 1..80: note = Synthetic: >HCV.A15-cand-1920-1999
  source 1..80: mol_type = other DNA
cagtgaaaccaagaagaacacaatgggaatgtacagagttgagttgggtacttccaaatcacaaacagcacccatattgt

SEQ ID NO: 14549 - DNA, 80 bp, synthetic construct
  misc_feature 1..80: note = Synthetic: >HCV.A15-cand-2040-2119
  source 1..80: mol_type = other DNA
caccatgctaggagagatcttgaactactacacccattggagtgggtcattaaagttcacatttctgttctgcggaagta

SEQ ID NO: 14550 - DNA, 80 bp, synthetic construct
  misc_feature 1..80: note = Synthetic: >HCV.A15-cand-2080-2159
  source 1..80: mol_type = other DNA
agtgggtcattaaagttcacatttctgttctgcggaagtatgatggcaacgggtaagatcctgatttcatatgcaccacc

SEQ ID NO: 14551 - DNA, 80 bp, synthetic construct
  misc_feature 1..80: note = Synthetic: >HCV.A2-cand-4110-4189
  source 1..80: mol_type = other DNA
gggctcgagtgggtctctaacaagattagcaagtttattgattggcttaaggagaagattattccagccgctaaggagaa

SEQ ID NO: 14552 - DNA, 80 bp, synthetic construct
  misc_feature 1..80: note = Synthetic: >HCV.A2-cand-4190-4269
  source 1..80: mol_type = other DNA
agtcgagttcttaaacaacctaaagcaacttcctctgttagaaaatcaaatctccaatcttgagcagtctgctgcctcgc

SEQ ID NO: 14553 - DNA, 80 bp, synthetic construct
  misc_feature 1..80: note = Synthetic: >HCV.A2-cand-4270-4349
  source 1..80: mol_type = other DNA
aagaggacctagaagctatgtttggcaacgtgtcgtacctagctcacttttgccgcaagtttcaaccactctatgcaact

SEQ ID NO: 14554 - DNA, 80 bp, synthetic construct
  misc_feature 1..80: note = Synthetic: >HCV.A2-cand-4450-4529
  source 1..80: mol_type = other DNA
ctccaggaacagggaagtcacttgccacgggtattatagctagagccattgctgacaaataccactccagcgtctactcg

SEQ ID NO: 14555 - DNA, 80 bp, synthetic construct
  misc_feature 1..80: note = Synthetic: >HCV.A2-cand-4500-4579
  source 1..80: mol_type = other DNA
gctgacaaataccactccagcgtctactcgcttcccccagacccagatcacttcgatgggtataaacaacaggtggtcac

SEQ ID NO: 14556 - DNA, 80 bp, synthetic construct
  misc_feature 1..80: note = Synthetic: >HCV.A2-cand-4580-4659
  source 1..80: mol_type = other DNA
agttatggatgatctctgccagaatccagatgggaaagacatgtccctattttgtcaaatggtttctacagtggatttta

SEQ ID NO: 14557 - DNA, 80 bp, synthetic construct
  misc_feature 1..80: note = Synthetic: >HCV.A2-cand-4690-4769
  source 1..80: mol_type = other DNA
gggtgtccttcacatctaagtttgtcattgcatcaactaacgctagtaacatcatagtccccactgtctcagactcagat

SEQ ID NO: 14558 - DNA, 80 bp, synthetic construct
  misc_feature 1..80: note = Synthetic: >HCV.A2-cand-4740-4819
  source 1..80: mol_type = other DNA
atcatagtccccactgtctcagactcagatgcaattcgcaggcgattttacatggactgtgacatagaagtgacagattc

SEQ ID NO: 14559 - DNA, 80 bp, synthetic construct
  misc_feature 1..80: note = Synthetic: >HCV.A2-cand-4820-4899
  source 1..80: mol_type = other DNA
ttacaagacagatctcggccggttggacgcaggcagggctgctaagctttgtacagagaacaacactgccaacttcaaaa

SEQ ID NO: 14560 - DNA, 80 bp, synthetic construct
  misc_feature 1..80: note = Synthetic: >HCV.A2-cand-4890-4969
  source 1..80: mol_type = other DNA
aacttcaaaagatgcagtccactagtgtgcggcaaagccatccagctgagagacaggaagtccaaggtaagatacagtgt

SEQ ID NO: 14561 - DNA, 80 bp, synthetic construct
  misc_feature 1..80: note = Synthetic: >HCV.A2-cand-4970-5049
  source 1..80: mol_type = other DNA
tgatactgtggtgtcagagctagtcagggagtataacagtagatctaccattggaaacaccatagaggcactctttcaag

SEQ ID NO: 14562 - DNA, 80 bp, synthetic construct
  misc_feature 1..80: note = Synthetic: >HCV.A2-cand-5060-5139
  source 1..80: mol_type = other DNA
gttcagacccatacgaatcagcctcgaagagaggccagcaccagatgctattagtgacttgctcgccagtgttgatagtg

SEQ ID NO: 14563 - DNA, 80 bp, synthetic construct
  misc_feature 1..80: note = Synthetic: >HCV.A2-cand-5140-5219
  source 1..80: mol_type = other DNA
aggaggtccgacagtactgcagggaacaagggtggataatcccagagacaccaactaatgtggaacggcacctcaataga

SEQ ID NO: 14564 - DNA, 80 bp, synthetic construct
  misc_feature 1..80: note = Synthetic: >HCV.A2-cand-5220-5299
  source 1..80: mol_type = other DNA
gcagtcttagtgatgcagtccattgccactgtggttgcggttgtgtctcttgtctatgttatttacaagctgtttgccgg

SEQ ID NO: 14565 - DNA, 80 bp, synthetic construct
  misc_feature 1..80: note = Synthetic: >HCV.A2-cand-5300-5379
  source 1..80: mol_type = other DNA
attccaaggtgcttactctggagcacccaagcaagcactcaagaagcctgtgttaagaacagctacagttcaaggaccta

SEQ ID NO: 14566 - DNA, 80 bp, synthetic construct
  misc_feature 1..80: note = Synthetic: >HCV.A2-cand-5440-5519
  source 1..80: mol_type = other DNA
ggcacttcaccatgctaggcgtacgagaccgcttagccatcttgccacgccactcacagccagggaaaaccatctggata

SEQ ID NO: 14567 - DNA, 80 bp, synthetic construct
  misc_feature 1..80: note = Synthetic: >HCV.B1-cand-6340-6419
  source 1..80: mol_type = other DNA
tctaaacctaccaatggtcacttacgtgaaagatgaactgagatctgcagagaaggtggcaaaagggaaatccaggctaa

SEQ ID NO: 14568 - DNA, 80 bp, synthetic construct
  misc_feature 1..80: note = Synthetic: >HCV.B1-cand-6500-6579
  source 1..80: mol_type = other DNA
ggcattgtgacaggcagtgcagtcggatgtgatcctgatctcttctggagcaagataccagtcatgctagatggccacct

SEQ ID NO: 14569 - DNA, 80 bp, synthetic construct
  misc_feature 1..80: note = Synthetic: >HCV.B1-cand-6580-6659
  source 1..80: mol_type = other DNA
catagcttttgattactctggatatgacgctagcttgagtcccgtgtggtttgcctgcctaaagctgttgcttgagaaac

SEQ ID NO: 14570 - DNA, 80 bp, synthetic construct
  misc_feature 1..80: note = Synthetic: >HCV.B1-cand-6650-6729
  source 1..80: mol_type = other DNA
cttgagaaactgggatactcgcacaaggaaaccaattacatagattacttgtgcaactcccaccatctatacagagataa

SEQ ID NO: 14571 - DNA, 80 bp, synthetic construct
  misc_feature 1..80: note = Synthetic: >HCV.B1-cand-6730-6809
  source 1..80: mol_type = other DNA
acactactttgtgagaggtggaatgccatcagggtgttctggcactagcatctttaactcaatgattaacaacatcataa

SEQ ID NO: 14572 - DNA, 80 bp, synthetic construct
  misc_feature 1..80: note = Synthetic: >HCV.B1-cand-6810-6889
  source 1..80: mol_type = other DNA
tcaggacactaatgctgaaggtgtacaaagggatagacctggatcaatttaggatgattgcatatggtgatgatgtgatc

SEQ ID NO: 14573 - DNA, 80 bp, synthetic construct
  misc_feature 1..80: note = Synthetic: >HCV.B1-cand-6860-6939
  source 1..80: mol_type = other DNA
aggatgattgcatatggtgatgatgtgatcgcatcatacccatggcccattgatgcatccctgcttgctgaagctggcaa

SEQ ID NO: 14574 - DNA, 80 bp, synthetic construct
  misc_feature 1..80: note = Synthetic: >HCV.B1-cand-7050-7129
  source 1..80: mol_type = other DNA
ccttcctggtgcaccccgtcatgccaatgaaagacatacatgaatcaatcagatggaccaaagacccaaagaacactcaa

SEQ ID NO: 14575 - DNA, 80 bp, synthetic construct
  misc_feature 1..80: note = Synthetic: >HCV.B1-cand-7130-7209
  source 1..80: mol_type = other DNA
gatcacgtgcgatcgttgtgcttattggcctggcacaacggagagcacgagtatgaggagtttatccgcaaaatcagaag

SEQ ID NO: 14576 - DNA, 80 bp, synthetic construct
  misc_feature 1..80: note = Synthetic: >HCV.B1-cand-7210-7289
  source 1..80: mol_type = other DNA
cgtcccagttggacgctgcttgaccctacctgcgttttcaaccctacgcaggaagtggttggactctttttaaaattaga

SEQ ID NO: 14577 - DNA, 80 bp, synthetic construct
  misc_feature 1..80: note = Synthetic: >HCV.B1-cand-7280-7359
  source 1..80: mol_type = other DNA
taaaattagagcacaatttgaaataatttcaattggcttaaccctaccgcactaaccgaactagataacggtgcagtagg

SEQ ID NO: 14578 - DNA, 80 bp, synthetic construct
  misc_feature 1..80: note = Synthetic: >HCV.B2-cand-50-129
  source 1..80: mol_type = other DNA
ctggtatcacggtacctttgtgcgcctgttttatccaccctcccctaatcgaatttagaagtcaagcacaactggtcaac

SEQ ID NO: 14579 - DNA, 80 bp, synthetic construct
  misc_feature 1..80: note = Synthetic: >HCV.B2-cand-380-459
  source 1..80: mol_type = other DNA
ggtaacccatgggacgcttcaatgctgacatggtgcgaagagtctattgagctaattggtagtcctccggcccctgaatg

SEQ ID NO: 14580 - DNA, 80 bp, synthetic construct
  misc_feature 1..80: note = Synthetic: >HCV.B2-cand-690-769
  source 1..80: mol_type = other DNA
taataactacaatactctgctttatattctccaattgaatacgaaaagatgggagcacaggtgtccacgcagaagactgg

SEQ ID NO: 14581 - DNA, 80 bp, synthetic construct
  misc_feature 1..80: note = Synthetic: >HCV.B2-cand-770-849
  source 1..80: mol_type = other DNA
tgcacacgagaccagtctaagcgctcgtggaaactccatcatccactacacaaacattaattattacaaggatgcagcct

SEQ ID NO: 14582 - DNA, 80 bp, synthetic construct
  misc_feature 1..80: note = Synthetic: >HCV.B2-cand-850-929
  source 1..80: mol_type = other DNA
cgaactccgccaaccgtcaggatttcacacaggaccctgggaaattcacagaaccagtcaaggatataatgattaaatca

SEQ ID NO: 14583 - DNA, 80 bp, synthetic construct
  misc_feature 1..80: note = Synthetic: >HCV.B5-cand-6580-6659
  source 1..80: mol_type = other DNA
gctagatggacacctcatagcctttgattactctgggtatgatgctagcctgagccccgtgtggtttgcttgtctgaaac

SEQ ID NO: 14584 - DNA, 80 bp, synthetic construct
  misc_feature 1..80: note = Synthetic: >HCV.B5-cand-6740-6819
  source 1..80: mol_type = other DNA
gacaaacactactttgtgcgtggtggtatgccatcaggatgttctggaaccagcatctttaactcaatgatcaacaacat

SEQ ID NO: 14585 - DNA, 80 bp, synthetic construct
  misc_feature 1..80: note = Synthetic: >HCV.B5-cand-6820-6899
  source 1..80: mol_type = other DNA
cataattagaacactgatgttgaaggtgtacaaaggcattgacctggatcaattcaggatgattgcatatggtgacgatg

SEQ ID NO: 14586 - DNA, 80 bp, synthetic construct
  misc_feature 1..80: note = Synthetic: >HCV.B5-cand-6870-6949
  source 1..80: mol_type = other DNA
aattcaggatgattgcatatggtgacgatgtaattgcatcttacccatggcccattgatgcctccttgctcgctgaagcg

SEQ ID NO: 14587 - DNA, 80 bp, synthetic construct
  misc_feature 1..80: note = Synthetic: >HCV.B5-cand-6990-7069
  source 1..80: mol_type = other DNA
gggagtgcttcaatgaggtcacctggaccaatgtcaccttcctgaaaaggtacttcagagcagatgagcaataccctttc

SEQ ID NO: 14588 - DNA, 80 bp, synthetic construct
  misc_feature 1..80: note = Synthetic: >HCV.B5-cand-7060-7139
  source 1..80: mol_type = other DNA
ataccctttcctggtccacccagttatgcccatgaaggacattcatgaatctatcaggtggacaaaagacccaaagaaca

SEQ ID NO: 14589 - DNA, 80 bp, synthetic construct
  misc_feature 1..80: note = Synthetic: >HCV.B5-cand-7220-7299
  source 1..80: mol_type = other DNA
agaagcgtcccagttgggcgctgtttgaccttacctgcgttttcaaccctgcgcaggaaatggttggactccttttaaaa

SEQ ID NO: 14590 - DNA, 80 bp, synthetic construct
  misc_feature 1..80: note = Synthetic: >HCV.B6-cand-80-159
  source 1..80: mol_type = other DNA
ttacccaccctcccccactacgtaacttagaagcctgacatatacggtcacaagccagcccagtacgccaactgggtacc

SEQ ID NO: 14591 - DNA, 80 bp, synthetic construct
  misc_feature 1..80: note = Synthetic: >HCV.B6-cand-300-379
  source 1..80: mol_type = other DNA
tcccagtgtagatcaggtcgatgagtcaccgcattccccacaggcgactgtggcggtggctgcgttggcggccctgccca

SEQ ID NO: 14592 - DNA, 80 bp, synthetic construct
  misc_feature 1..80: note = Synthetic: >HCV.B6-cand-480-559
  source 1..80: mol_type = other DNA
cggagcaggcactcgcagaccagcgagcagcttgtcgtaatgggcaactccgcagcggaaccgactactttgggtgtccg

SEQ ID NO: 14593 - DNA, 80 bp, synthetic construct
  misc_feature 1..80: note = Synthetic: >HCV.B6-cand-560-639
  source 1..80: mol_type = other DNA
tgtttcctatttcctttacactggctgcttatggtgacaattgagaaattgttaccatatagctattggagtggccatcc

SEQ ID NO: 14594 - DNA, 80 bp, synthetic construct
  misc_feature 1..80: note = Synthetic: >HCV.B6-cand-640-719
  source 1..80: mol_type = other DNA
ggtgactaacagagcaataatatatttgtttgttggctttgtgccacttaatttgaaggttgttaagacgctcaatctga

SEQ ID NO: 14595 - DNA, 80 bp, synthetic construct
  misc_feature 1..80: note = Synthetic: >HCV.B6-cand-720-799
  source 1..80: mol_type = other DNA
tactacttctaaataaagcaaaatgggagctcaagtctcaacacagaaaacaggagctcacgaaaccgcattaaacgcgc

SEQ ID NO: 14596 - DNA, 80 bp, synthetic construct
  misc_feature 1..80: note = Synthetic: >HCV.B6-cand-800-879
  source 1..80: mol_type = other DNA
agggcaactcggtaattcactacaccaacataaattactacaaggatgcggcttccaactcagcaaataggcaggacttt

SEQ ID NO: 14597 - DNA, 80 bp, synthetic construct
  misc_feature 1..80: note = Synthetic: >HCV.B6-cand-880-959
  source 1..80: mol_type = other DNA
acacaagaccccagcaaattcaccgagccagttaaggatgtgatgataaagtcactgcccgcactcaactcacccactgt

SEQ ID NO: 14598 - DNA, 80 bp, synthetic construct
  misc_feature 1..80: note = Synthetic: >HCV.B6-cand-960-1039
  source 1..80: mol_type = other DNA
tgaagagtgtgggtatagtgatagagttagatctattactctagggaactcgaccattacaacacaggagtgtgcaaacg

SEQ ID NO: 14599 - DNA, 80 bp, synthetic construct
  misc_feature 1..80: note = Synthetic: >LC270039.1-cand-5780-5859
  source 1..80: mol_type = other DNA
aagcatctattattatgcaggcagttctcgattactgacagtaggacatccctatttttctattaaaaacaccagtagtg

SEQ ID NO: 14600 - DNA, 80 bp, synthetic construct
  misc_feature 1..80: note = Synthetic: >LC270039.1-cand-5860-5939
  source 1..80: mol_type = other DNA
gtaatggtaaaaaagttttagttcccaaggtgtctggcctgcaatacagggtatttagaattaaattgccggaccctaat

SEQ ID NO: 14601 - DNA, 80 bp, synthetic construct
  misc_feature 1..80: note = Synthetic: >LC270039.1-cand-5940-6019
  source 1..80: mol_type = other DNA
aaatttggttttccagatacatctttttataacccagaaacccaaaggttggtgtgggcctgtacaggcttggaaatcgg

SEQ ID NO: 14602 - DNA, 80 bp, synthetic construct
  misc_feature 1..80: note = Synthetic: >LC270039.1-cand-6030-6109
  source 1..80: mol_type = other DNA
cctttaggtgtgggtattagtgggcatcctttattaaacaagtttgatgatactgaaaccagtaacaaatatgctggtaa

SEQ ID NO: 14603 - DNA, 80 bp, synthetic construct
  misc_feature 1..80: note = Synthetic: >LC270039.1-cand-6110-6189
  source 1..80: mol_type = other DNA
acctggtatagataatagggaatgtttatctatggattataagcaaactcagttatgcattttaggatgcaaacctccta

SEQ ID NO: 14604 - DNA, 80 bp, synthetic construct
  misc_feature 1..80: note = Synthetic: >LC270039.1-cand-6120-6199
  source 1..80: mol_type = other DNA
gataatagggaatgtttatctatggattataagcaaactcagttatgcattttaggatgcaaacctcctataggtgaaca

SEQ ID NO: 14605 - DNA, 80 bp, synthetic construct
  misc_feature 1..80: note = Synthetic: >LC270039.1-cand-6290-6369
  source 1..80: mol_type = other DNA
ggacatggtagatacaggatttggttgcatggattttaataccttgcaagctagtaaaagtgatgtgcccattgatatat

SEQ ID NO: 14606 - DNA, 80 bp, synthetic construct
  misc_feature 1..80: note = Synthetic: >LC270039.1-cand-6350-6429
  source 1..80: mol_type = other DNA
tgatgtgcccattgatatatgtagcagtgtatgtaagtatccagattatttgcaaatggctagcgagccatatggtgaca

SEQ ID NO: 14607 - DNA, 80 bp, synthetic construct
  misc_feature 1..80: note = Synthetic: >LC270039.1-cand-6510-6589
  source 1..80: mol_type = other DNA
ccaggtgatttatatatacaagggtctaactctggcaatactgccactgtacaaagcagtgctttttttcctactcctag

SEQ ID NO: 14608 - DNA, 80 bp, synthetic construct
  misc_feature 1..80: note = Synthetic: >LC270039.1-cand-6590-6669
  source 1..80: mol_type = other DNA
tggttctatggtaacctcagaatcccaattatttaataaaccgtactggttacaacgtgcgcagggccacaataatggca

SEQ ID NO: 14609 - DNA, 80 bp, synthetic construct
  misc_feature 1..80: note = Synthetic: >LC270039.1-cand-6680-6759
  source 1..80: mol_type = other DNA
caatcagttgtttgtcacagttgtggataccactcgtagcactaacatgactttatgtgctgaggtgaaaaaggaaagca

SEQ ID NO: 14610 - DNA, 80 bp, synthetic construct
  misc_feature 1..80: note = Synthetic: >LC270039.1-cand-6750-6829
  source 1..80: mol_type = other DNA
aaggaaagcacatataaaaatgaaaattttaaggaataccttcgtcatggcgaggaattcgatttacaatttatttttca

SEQ ID NO: 14611 - DNA, 80 bp, synthetic construct
  misc_feature 1..80: note = Synthetic: >LC270039.1-cand-6830-6909
  source 1..80: mol_type = other DNA
attgtgcaagattacattaacagctgatgttatgacatatattcataagatggatgccactattttagaggactggcaat

SEQ ID NO: 14612 - DNA, 80 bp, synthetic construct
  misc_feature 1..80: note = Synthetic: >LC270039.1-cand-6910-6989
  source 1..80: mol_type = other DNA
ttggccttaccccaccaccgtctgcatctttggaggacacatacagatttgtaacttctactgctataacttgtcaaaaa

SEQ ID NO: 14613 - DNA, 80 bp, synthetic construct
  misc_feature 1..80: note = Synthetic: >LC270039.1-cand-6990-7069
  source 1..80: mol_type = other DNA
aacacaccacctaaaggaaaggaagatcctttaaaggactatatgttttgggaggtggatttaaaagaaaagttttctgc

SEQ ID NO: 14614 - DNA, 80 bp, synthetic construct
  misc_feature 1..80: note = Synthetic: >LC270039.1-cand-7070-7149
  source 1..80: mol_type = other DNA
agatttagatcagtttcctttaggtagaaagtttttgttacaggcagggctacaggctaggcccaaactaaaacgccctg

SEQ ID NO: 14615 - DNA, 80 bp, synthetic construct
  misc_feature 1..80: note = Synthetic: >MG717393.1-cand-4240-4319
  source 1..80: mol_type = other DNA
cagcttagattcagaatgcaggctaaacagcacatgaaggtatgtaaacttgatggtgaatgggtaacatttagagaagt

SEQ ID NO: 14616 - DNA, 80 bp, synthetic construct
  misc_feature 1..80: note = Synthetic: >MG717393.1-cand-4320-4399
  source 1..80: mol_type = other DNA
gttagctgctgctgatagttttgcaactaaatatcaccctacagaaaaggacctggatctttttaatactttagttagtt

SEQ ID NO: 14617 - DNA, 80 bp, synthetic construct
  misc_feature 1..80: note = Synthetic: >MG717393.1-cand-4400-4479
  source 1..80: mol_type = other DNA
gtacgttctcaaaagagtatgcatggaaggacttcttgaatgaagttaggtgtgaggtcgttcctacaaagcatgtacat

SEQ ID NO: 14618 - DNA, 80 bp, synthetic construct
  misc_feature 1..80: note = Synthetic: >MG717393.1-cand-4480-4559
  source 1..80: mol_type = other DNA
aggtctaagatagctaggacattcacagtaagagaaaaagaccaggccatccaaaatcctattacggcagtcattggata

SEQ ID NO: 14619 - DNA, 80 bp, synthetic construct
  misc_feature 1..80: note = Synthetic: >MG717393.1-cand-4560-4639
  source 1..80: mol_type = other DNA
taagtatgcttctagtgttgatgagatcagtgatgttctggatagttccttctttccagattcactatctgcagacctac

SEQ ID NO: 14620 - DNA, 80 bp, synthetic construct
  misc_feature 1..80: note = Synthetic: >MG717393.1-cand-4660-4739
  source 1..80: mol_type = other DNA
tatagagagttaggccttgacattgggttaccagaagtgttaaagcgtatagcaccactattatataaagctggacggtc

SEQ ID NO: 14621 - DNA, 80 bp, synthetic construct
  misc_feature 1..80: note = Synthetic: >MG717393.1-cand-4720-4799
  source 1..80: mol_type = other DNA
ttatataaagctggacggtcacgagttgttattgtggaagggaatgtagaaggcacagctgaatcaatttgtagttattg

SEQ ID NO: 14622 - DNA, 80 bp, synthetic construct
  misc_feature 1..80: note = Synthetic: >MG717393.1-cand-4800-4879
  source 1..80: mol_type = other DNA
gcttcgaagtatgtcactggtaaagacaatcaaggtccggcctaaaaaggaagtattaagagctgtttcattatatggtg

SEQ ID NO: 14623 - DNA, 80 bp, synthetic construct
  misc_feature 1..80: note = Synthetic: >MG717393.1-cand-4880-4959
  source 1..80: mol_type = other DNA
ctaaagagaatatagggttacaagatgatgttgcagcaacccgtctttgtattgaggtatggaggtggtgcaaggcaaat

SEQ ID NO: 14624 - DNA, 80 bp, synthetic construct
  misc_feature 1..80: note = Synthetic: >MG717393.1-cand-4960-5039
  source 1..80: mol_type = other DNA
gaacaaaatgttaatgaatggcttagtgcattgtattttgagaagcaaacgcttatggattgggtggaaagatttaggag

SEQ ID NO: 14625 - DNA, 80 bp, synthetic construct
  misc_feature 1..80: note = Synthetic: >MG717393.1-cand-5050-5129
  source 1..80: mol_type = other DNA
gttcctgtagaccctgaaattcaatgtatggcacttttactttatgatgttttaggatacaaaagtgtcttacagatgca

SEQ ID NO: 14626 - DNA, 80 bp, synthetic construct
  misc_feature 1..80: note = Synthetic: >MG717393.1-cand-5120-5199
  source 1..80: mol_type = other DNA
tacagatgcaagccaatagaagggcatattcagggaagcaatatgatgcttattgtgttcaaacatataatgaggaaaca

SEQ ID NO: 14627 - DNA, 80 bp, synthetic construct
  misc_feature 1..80: note = Synthetic: >MG717393.1-cand-5200-5279
  source 1..80: mol_type = other DNA
aagttatatgagggtgatcttagagttacatttaattttggtttagactgtgcaagattagaggtattttgggacaaaaa

SEQ ID NO: 14628 - DNA, 80 bp, synthetic construct
  misc_feature 1..80: note = Synthetic: >MG717393.1-cand-5280-5359
  source 1..80: mol_type = other DNA
agaatatatactagagacttcaataacccagcgtcatgtattgaagctaatgatggaagaggcgacccaggagctcttaa

SEQ ID NO: 14629 - DNA, 80 bp, synthetic construct
  misc_feature 1..80: note = Synthetic: >MG717393.1-cand-5360-5439
  source 1..80: mol_type = other DNA
ggtgtgggatgagatttaaaacagaacaagttagccatacaaagagtctagtgttatttaaaacagaatcgggatttgaa

SEQ ID NO: 14630 - DNA, 80 bp, synthetic construct
  misc_feature 1..80: note = Synthetic: >MG717393.1-cand-5450-5529
  source 1..80: mol_type = other DNA
caaatgttccttgtatagtttttaagcattgtgcactacgtacgggattaagaacaaaacaggctatcaacaaggaattt

SEQ ID NO: 14631 - DNA, 80 bp, synthetic construct
  misc_feature 1..80: note = Synthetic: >MH539865.1-cand-2860-2939
  source 1..80: mol_type = other DNA
ctacggtgggcatctggctcatctgacataacgacaagtactggcaaggtaataaggttcaaaaggcgtttgatgtatgt

SEQ ID NO: 14632 - DNA, 80 bp, synthetic construct
  misc_feature 1..80: note = Synthetic: >MH539865.1-cand-2940-3019
  source 1..80: mol_type = other DNA
gagcgctgatgcaacaaagtggtcccctggtgataattcagcaaaattcaagagattcactcaggcactatatgatggtc

SEQ ID NO: 14633 - DNA, 80 bp, synthetic construct
  misc_feature 1..80: note = Synthetic: >MH539865.1-cand-3020-3099
  source 1..80: mol_type = other DNA
tctcggatgaaaagttgaagtgttgtgtagtagatgctctcaggcatgtctatgaaactgagttttttatgtcaaggaaa

SEQ ID NO: 14634 - DNA, 80 bp, synthetic construct
  misc_feature 1..80: note = Synthetic: >MH539865.1-cand-3100-3179
  source 1..80: mol_type = other DNA
ctacatcgttatatcgactctatggctgatcgttcagcagctgtccaagattttcttgatttttttaagggaggtgtatc

SEQ ID NO: 14635 - DNA, 80 bp, synthetic construct
  misc_feature 1..80: note = Synthetic: >MH539865.1-cand-3160-3239
  source 1..80: mol_type = other DNA
ttttttaagggaggtgtatctgctatggttcgaggtaactggctccaaggtaacttaaacaagtgttcatcactctttgg

SEQ ID NO: 14636 - DNA, 80 bp, synthetic construct
  misc_feature 1..80: note = Synthetic: >MH539865.1-cand-3260-3339
  source 1..80: mol_type = other DNA
ttagacgggtttgggctgaactgttccctgaactagaatgtttttttgaatttgcacatcattctgatgatgcactattt

SEQ ID NO: 14637 - DNA, 80 bp, synthetic construct
  misc_feature 1..80: note = Synthetic: >MH539865.1-cand-3350-3429
  source 1..80: mol_type = other DNA
acttagaaccggaggatgatgggactgattggtttttatatgtatctcaacagattcaagcaggtaattaccactggcat

SEQ ID NO: 14638 - DNA, 80 bp, synthetic construct
  misc_feature 1..80: note = Synthetic: >MH539865.1-cand-3430-3509
  source 1..80: mol_type = other DNA
gctgtgaatcaagaaatgtggaagagcatgttcaatcttcatgaacatcttttactgatgggttctatcaaagtgtcacc

SEQ ID NO: 14639 - DNA, 80 bp, synthetic construct
  misc_feature 1..80: note = Synthetic: >MH539865.1-cand-3510-3589
  source 1..80: mol_type = other DNA
gaaaaagactactgtttctcccactaatgcagagtttctttctacattcttcgagggttgtgctgtctcaattccattta

SEQ ID NO: 14640 - DNA, 80 bp, synthetic construct
  misc_feature 1..80: note = Synthetic: >MH539865.1-cand-3590-3669
  source 1..80: mol_type = other DNA
ttaaaatactattaggttcattatctgatttaccaggcttgggtttttttgatgatttggctgcagcacaaagcagatgt

SEQ ID NO: 14641 - DNA, 80 bp, synthetic construct
  misc_feature 1..80: note = Synthetic: >MH539865.1-cand-3690-3769
  source 1..80: mol_type = other DNA
ggcttccccacagttagcgcaacttgcagttgttatctgtactagtaaggtagaacggttatatggcacagcagatggga

SEQ ID NO: 14642 - DNA, 80 bp, synthetic construct
  misc_feature 1..80: note = Synthetic: >MH539865.1-cand-3750-3829
  source 1..80: mol_type = other DNA
atatggcacagcagatgggatggtaaatagcccagtggcctttctcaaagtgactaaagcatatgttcctatcccattag

SEQ ID NO: 14643 - DNA, 80 bp, synthetic construct
  misc_feature 1..80: note = Synthetic: >MH539865.1-cand-3830-3909
  source 1..80: mol_type = other DNA
gaggagatgggtctatgtcaataatggagttagcaactgctggaataggaatggcagataaaaatatactcaaacaggca

SEQ ID NO: 14644 - DNA, 80 bp, synthetic construct
  misc_feature 1..80: note = Synthetic: >MH539865.1-cand-3920-3999
  source 1..80: mol_type = other DNA
ataaacataccaggcgcgatagtgatagatatgtcttgggtctctttaagtttttgatgtctctcagtgaggacgttttt

SEQ ID NO: 14645 - DNA, 80 bp, synthetic construct
  misc_feature 1..80: note = Synthetic: >MH539865.1-cand-4000-4079
  source 1..80: mol_type = other DNA
cagcatgaccgacttggagagtttagttttgtaggcaaagttcagtggaaagtttttacacctaaaaacgagtttgaatt

SEQ ID NO: 14646 - DNA, 80 bp, synthetic construct
  misc_feature 1..80: note = Synthetic: >MH539865.1-cand-4080-4159
  source 1..80: mol_type = other DNA
ctatgatcagttctcacaatcatacttaaagggatggaccaaccagcatcctgtatatgattatattataccaagaggta

SEQ ID NO: 14647 - DNA, 80 bp, synthetic construct
  misc_feature 1..80: note = Synthetic: >NC_001563.2-cand-5930-6009
  source 1..80: mol_type = other DNA
gaaccctcagccatcacggctgccagcgctgctcagcggagaggacgcataggaagaaacccatcacaagttggtgatga

SEQ ID NO: 14648 - DNA, 80 bp, synthetic construct
  misc_feature 1..80: note = Synthetic: >NC_001563.2-cand-5980-6059
  source 1..80: mol_type = other DNA
aggaagaaacccatcacaagttggtgatgagtattgctatggagggcacacaaatgaggatgattccaactttgctcact

SEQ ID NO: 14649 - DNA, 80 bp, synthetic construct
  misc_feature 1..80: note = Synthetic: >NC_001563.2-cand-6060-6139
  source 1..80: mol_type = other DNA
ggacagaggctcgcatcatgctagacaacatcaacatgccgaatggtctggtggctcaactatatcagcctgagcgcgag

SEQ ID NO: 14650 - DNA, 80 bp, synthetic construct
  misc_feature 1..80: note = Synthetic: >NC_001563.2-cand-6180-6259
  source 1..80: mol_type = other DNA
aagaacggaagaacttccttgaattcctgagaacagctgatttaccagtctggctcgcttacaaagtggcagcagcagga

SEQ ID NO: 14651 - DNA, 80 bp, synthetic construct
  misc_feature 1..80: note = Synthetic: >NC_001563.2-cand-6220-6299
  source 1..80: mol_type = other DNA
tttaccagtctggctcgcttacaaagtggcagcagcaggaatatcataccatgaccggaaatggtgctttgatggacctc

SEQ ID NO: 14652 - DNA, 80 bp, synthetic construct
  misc_feature 1..80: note = Synthetic: >NC_001563.2-cand-6300-6379
  source 1..80: mol_type = other DNA
gaaccaacacgattcttgaagacaacaatgaagttgaagtcatcacgaagttgggtgagagaaagatcctaagacccagg

SEQ ID NO: 14653 - DNA, 80 bp, synthetic construct
  misc_feature 1..80: note = Synthetic: >NC_001563.2-cand-6360-6439
  source 1..80: mol_type = other DNA
gaaagatcctaagacccaggtgggcagatgctagagtgtactcagaccatcaagctctaaagtccttcaaagattttgca

SEQ ID NO: 14654 - DNA, 80 bp, synthetic construct
  misc_feature 1..80: note = Synthetic: >NC_001563.2-cand-6460-6539
  source 1..80: mol_type = other DNA
cgggctcgttgaggtgctcgggagaatgcctgaacacttcatggtgaaaacttgggaggcattggacacgatgtatgtgg

SEQ ID NO: 14655 - DNA, 80 bp, synthetic construct
  misc_feature 1..80: note = Synthetic: >NC_001563.2-cand-6550-6629
  source 1..80: mol_type = other DNA
tgaaaaaggaggccgagctcacaggatggctcttgaggagctaccggacgcccttcagacaatagttttgattgcactat

SEQ ID NO: 14656 - DNA, 80 bp, synthetic construct
  misc_feature 1..80: note = Synthetic: >NC_001563.2-cand-6630-6709
  source 1..80: mol_type = other DNA
tgagtgtgatgtccttaggtgtgttttttctactcatgcaaaggaagggcattggtaagattggcttgggaggagtaatc

SEQ ID NO: 14657 - DNA, 80 bp, synthetic construct
  misc_feature 1..80: note = Synthetic: >NC_001563.2-cand-6710-6789
  source 1..80: mol_type = other DNA
ttaggagctgccacattcttctgctggatggctgaagtcccaggaacgaaaatagcaggcatgctcctgctttccctgct

SEQ ID NO: 14658 - DNA, 80 bp, synthetic construct
  misc_feature 1..80: note = Synthetic: >NC_001563.2-cand-6790-6869
  source 1..80: mol_type = other DNA
gctcatgattgttttgattccggagccggaaaagcagcgctcacagactgataaccagctcgccgtgttcttgatctgtg

SEQ ID NO: 14659 - DNA, 80 bp, synthetic construct
  misc_feature 1..80: note = Synthetic: >NC_001563.2-cand-6870-6949
  source 1..80: mol_type = other DNA
tgctcacactggtcggcgccgtggctgccaatgaaatgggctggctggacaagaccaagaatgacattggcagcctgttg

SEQ ID NO: 14660 - DNA, 80 bp, synthetic construct
  misc_feature 1..80: note = Synthetic: >NC_001563.2-cand-6960-7039
  source 1..80: mol_type = other DNA
cagaagctagagagacgaccctgggagttgagagcttcttacttgatctgcggccggccacggcatggtcgctctatgcc

SEQ ID NO: 14661 - DNA, 80 bp, synthetic construct
  misc_feature 1..80: note = Synthetic: >NC_001563.2-cand-7040-7119
  source 1..80: mol_type = other DNA
gtaacgacagccgttctcacccctttgctgaagcatctaatcacgtcagactacatcaacacttcgttgacctcaataaa

SEQ ID NO: 14662 - DNA, 80 bp, synthetic construct
  misc_feature 1..80: note = Synthetic: >NC_001563.2-cand-7120-7199
  source 1..80: mol_type = other DNA
cgtccaagccagcgcgttgttcactttggccagaggcttcccttttgtggacgttggtgtgtcagctctcttgctggcgg

SEQ ID NO: 14663 - DNA, 80 bp, synthetic construct
  misc_feature 1..80: note = Synthetic: >NC_001611.1-cand-96430-96509
  source 1..80: mol_type = other DNA
tattggtaatattttttttagacgatagatcgatggctcttgaaaccaaggttttccaaccggactcgttatcgatcggt

SEQ ID NO: 14664 - DNA, 80 bp, synthetic construct
  misc_feature 1..80: note = Synthetic: >NC_001611.1-cand-96510-96589
  source 1..80: mol_type = other DNA
gaaaagtctttttcattagcatgaatccattctaatgatgtatgtttaaacactctaaacaattggacaaattcttttga

SEQ ID NO: 14665 - DNA, 80 bp, synthetic construct
  misc_feature 1..80: note = Synthetic: >NC_001611.1-cand-96590-96669
  source 1..80: mol_type = other DNA
tttgctttgaataatttcaaataggtcttcgtctacagtaggcataccattagataatctagccattataaagtgcacgt

SEQ ID NO: 14666 - DNA, 80 bp, synthetic construct
  misc_feature 1..80: note = Synthetic: >NC_001611.1-cand-96670-96749
  source 1..80: mol_type = other DNA
ttacatatctacgttctggaggagtaagaacgtgactattaagacgaatggctcttcctactatttgacgaagagatgcc

SEQ ID NO: 14667 - DNA, 80 bp, synthetic construct
  misc_feature 1..80: note = Synthetic: >NC_001611.1-cand-96750-96829
  source 1..80: mol_type = other DNA
tcgttccaagtcatatctagaatgaagatatcattaattgagaaaaaactaataccctcgcctccactagaagagaatac

SEQ ID NO: 14668 - DNA, 80 bp, synthetic construct
  misc_feature 1..80: note = Synthetic: >NC_001611.1-cand-96830-96909
  source 1..80: mol_type = other DNA
acatgttttaatgcattctccgttagtgtttgattcttggttaaactcagccaccgccttgattctagtatcttttgttc

SEQ ID NO: 14669 - DNA, 80 bp, synthetic construct
  misc_feature 1..80: note = Synthetic: >NC_001611.1-cand-96910-96989
  source 1..80: mol_type = other DNA
tagatgagaactctatattagagataccaaagactttgaaatatagtaataaaatttctattcctgactgattaacaaat

SEQ ID NO: 14670 - DNA, 80 bp, synthetic construct
  misc_feature 1..80: note = Synthetic: >NC_001611.1-cand-96990-97069
  source 1..80: mol_type = other DNA
ggttcaaagactagacatttaccatgtgatgctaatattcccaaacatacatctatgaatttggcgcttttctcttttaa

SEQ ID NO: 14671 - DNA, 80 bp, synthetic construct
  misc_feature 1..80: note = Synthetic: >NC_001611.1-cand-97070-97149
  source 1..80: mol_type = other DNA
ttcagtaaatagagagatatcagccgcactagcgtcccctcccaatagttctccctttttaaaggtatctaatgcggatt

SEQ ID NO: 14672 - DNA, 80 bp, synthetic construct
  misc_feature 1..80: note = Synthetic: >NC_001611.1-cand-97150-97229
  source 1..80: mol_type = other DNA
tagaaaactctctatctcttaatgagcgtttaaagtcattatatagggttgctatctcttgcgcgtattcacccggatca

SEQ ID NO: 14673 - DNA, 80 bp, synthetic construct
  misc_feature 1..80: note = Synthetic: >NC_001611.1-cand-97230-97309
  source 1..80: mol_type = other DNA
cgattttgtctttcaggaaagctatcgaacgtaaacgtagtagccatacgtcgcagaattctaaatgatgatatacctgt

SEQ ID NO: 14674 - DNA, 80 bp, synthetic construct
  misc_feature 1..80: note = Synthetic: >NC_001611.1-cand-97310-97389
  source 1..80: mol_type = other DNA
ttttatttcagtaagtttagccttttgataaatctcttcttgcttttttgacatattaacgtatcgcattaatactgttt

SEQ ID NO: 14675 - DNA, 80 bp, synthetic construct
  misc_feature 1..80: note = Synthetic: >NC_001611.1-cand-97390-97469
  source 1..80: mol_type = other DNA
tcttagcgaatgatgcagacccttctacgtcatcaaaaatagaaaactcgttattaactatgtacgaacataggcctcct

SEQ ID NO: 14676 - DNA, 80 bp, synthetic construct
  misc_feature 1..80: note = Synthetic: >NC_001611.1-cand-97540-97619
  source 1..80: mol_type = other DNA
ctggtcgtagtaagttaaccaacatggtgaattcttgcacactattgacgataggtgtagccgataaacaaatcatctta

SEQ ID NO: 14677 - DNA, 80 bp, synthetic construct
  misc_feature 1..80: note = Synthetic: >NC_001611.1-cand-97620-97699
  source 1..80: mol_type = other DNA
tggttttttaacgcaatggtcttagataaaaaattatatactgaacgagtaggacggatcttaccatcttctttgattaa

SEQ ID NO: 14678 - DNA, 80 bp, synthetic construct
  misc_feature 1..80: note = Synthetic: >NC_001611.1-cand-97860-97939
  source 1..80: mol_type = other DNA
gtgttcatccaaggatcttctatcaaagcttttttcactaataagataatagcccaattcgtataaatatccttaagatg

SEQ ID NO: 14679 - DNA, 80 bp, synthetic construct
  misc_feature 1..80: note = Synthetic: >NC_001611.1-cand-110500-110579
  source 1..80: mol_type = other DNA
taatgttatccaacatatcacctatggatacggtacacgtaccagcatttgtaataatcctatctaagatgttgtatggc

SEQ ID NO: 14680 - DNA, 80 bp, synthetic construct
  misc_feature 1..80: note = Synthetic: >NC_001611.1-cand-110580-110659
  source 1..80: mol_type = other DNA
attgcgcagaaaatatcttctcctgtaatatctccactctcgataaatctacttagattattcttaaatgccttattctc

SEQ ID NO: 14681 - DNA, 80 bp, synthetic construct
  misc_feature 1..80: note = Synthetic: >NC_001611.1-cand-110660-110739
  source 1..80: mol_type = other DNA
tggagaaaagatatcagtgtccatcatttcattaatagtatacgcagaaaagataccacgagtatcaattctatccaaga

SEQ ID NO: 14682 - DNA, 80 bp, synthetic construct
  misc_feature 1..80: note = Synthetic: >NC_001611.1-cand-110740-110819
  source 1..80: mol_type = other DNA
tacttattggttccgagtcacaaataatggtttcctctccttcaggagatcctgcatagaaatatctaggacaatagttt

SEQ ID NO: 14683 - DNA, 80 bp, synthetic construct
  misc_feature 1..80: note = Synthetic: >NC_001611.1-cand-110820-110899
  source 1..80: mol_type = other DNA
ctatactgtctgtaactctgataatctctaaagtcactaactgataccatgaaattgagaagatcaaacgctgaagtaat

SEQ ID NO: 14684 - DNA, 80 bp, synthetic construct
  misc_feature 1..80: note = Synthetic: >NC_001611.1-cand-110900-110979
  source 1..80: mol_type = other DNA
caatttttctgcctcgtttttactacaactagttttcatcaatgtagtgacgatgtattgtttagttactcttggtctaa

SEQ ID NO: 14685 - DNA, 80 bp, synthetic construct
  misc_feature 1..80: note = Synthetic: >NC_001611.1-cand-110980-111059
  source 1..80: mol_type = other DNA
tactgatgatagagatattattacttcccataatggatcttctagtagtcaccttaaagcccattgatgcgaatagcaga

SEQ ID NO: 14686 - DNA, 80 bp, synthetic construct
  misc_feature 1..80: note = Synthetic: >NC_001611.1-cand-111060-111139
  source 1..80: mol_type = other DNA
tagataaagtcttggtatgactcctttctaatatagtacggactacctttgtcacccaactttatacccacataagccat

SEQ ID NO: 14687 - DNA, 80 bp, synthetic construct
  misc_feature 1..80: note = Synthetic: >NC_001611.1-cand-111140-111219
  source 1..80: mol_type = other DNA
aacaacctctttaatagccgtttcatgaggtttatcagccatgagcctaagtagttggaagaatctcatgaatcccgtct

SEQ ID NO: 14688 - DNA, 80 bp, synthetic construct
  misc_feature 1..80: note = Synthetic: >NC_001611.1-cand-111220-111299
  source 1..80: mol_type = other DNA
cagaaagtcctatatgcatgatagaagatttatctttcttgggaaactctcgtatagtcatagatgaaatactctttaaa

SEQ ID NO: 14689 - DNA, 80 bp, synthetic construct
  misc_feature 1..80: note = Synthetic: >NC_001611.1-cand-111300-111379
  source 1..80: mol_type = other DNA
gtttctgaaataagatcagtaacagtcttacctccgactactctgggtaacaaacatactctaataggtgttttctctgc

SEQ ID NO: 14690 - DNA, 80 bp, synthetic construct
  misc_feature 1..80: note = Synthetic: >NC_001611.1-cand-111380-111459
  source 1..80: mol_type = other DNA
ggagataatatcagaaaggatagagcaataagtagtattattgtgattataaagaccgaatacataacaggtagaattta

SEQ ID NO: 14691 - DNA, 80 bp, synthetic construct
  misc_feature 1..80: note = Synthetic: >NC_001611.1-cand-111460-111539
  source 1..80: mol_type = other DNA
taaacatcatgtcctgaaggtttttagacttgtattcctcgtaatccataccgtcccaaaacatggatttggtaactttg

SEQ ID NO: 14692 - DNA, 80 bp, synthetic construct
  misc_feature 1..80: note = Synthetic: >NC_001611.1-cand-111540-111619
  source 1..80: mol_type = other DNA
atagccgtagatctttgttccttcgccaacaggttaaagaaattaataaagaatttgttgtttctatttatgtccacaaa

SEQ ID NO: 14693 - DNA, 80 bp, synthetic construct
  misc_feature 1..80: note = Synthetic: >NC_001611.1-cand-111620-111699
  source 1..80: mol_type = other DNA
ttgcatatttggaagtcccaccgttacgttcactgcagcattttgaggatctcgagtatgaagtacgatgttattgttta

SEQ ID NO: 14694 - DNA, 80 bp, synthetic construct
  misc_feature 1..80: note = Synthetic: >NC_001611.1-cand-111700-111779
  source 1..80: mol_type = other DNA
ctggtatatctggaaagaattctaccagtctaggaataagagattgatatcgcatagaaatacaaaagttaataatctca

SEQ ID NO: 14695 - DNA, 80 bp, synthetic construct
  misc_feature 1..80: note = Synthetic: >NC_001611.1-cand-122440-122519
  source 1..80: mol_type = other DNA
atcaataaacaatctgtcgaaaaagtaggaattaatctagtagaaaagattacaacatggccaaaatttagggttgttaa

SEQ ID NO: 14696 - DNA, 80 bp, synthetic construct
  misc_feature 1..80: note = Synthetic: >NC_001611.1-cand-122650-122729
  source 1..80: mol_type = other DNA
tttataacggtcaatattgttttactgtctcaatatttatctagagtgagtttaggattcattagacgtagtttatcata

SEQ ID NO: 14697 - DNA, 80 bp, synthetic construct
  misc_feature 1..80: note = Synthetic: >NC_001611.1-cand-122970-123049
  source 1..80: mol_type = other DNA
actaagaaagtttctttactgtatctactacacttctagatatccagatagagattcaatggtttgtcatcgcatcctaa

SEQ ID NO: 14698 - DNA, 80 bp, synthetic construct
  misc_feature 1..80: note = Synthetic: >NC_001611.1-cand-123050-123129
  source 1..80: mol_type = other DNA
catacggcaaatattttgagacgttggcacatgatgaattagagaattacataggcaacatcagaaacgacatcatgaac

SEQ ID NO: 14699 - DNA, 80 bp, synthetic construct
  misc_feature 1..80: note = Synthetic: >NC_001611.1-cand-123130-123209
  source 1..80: mol_type = other DNA
aatcacaagaatagaggcacttacgcggtaaacattcatgtactaacaactcccggacttaatcacgcgttttctagctt

SEQ ID NO: 14700 - DNA, 80 bp, synthetic construct
  misc_feature 1..80: note = Synthetic: >NC_001611.1-cand-123290-123369
  source 1..80: mol_type = other DNA
ctagaagtgttgggttttatccggatcaagtaaagatttcaaagatgttttctgtcagaaaataccatccaagtcaatat

SEQ ID NO: 14701 - DNA, 80 bp, synthetic construct
  misc_feature 1..80: note = Synthetic: >NC_001611.1-cand-123370-123449
  source 1..80: mol_type = other DNA
ctttacttttgttcatcagatgttccggaaagaggtcctcaggtaggtttagtatctcaattgtctgtcttaagttccat

SEQ ID NO: 14702 - DNA, 80 bp, synthetic construct
  misc_feature 1..80: note = Synthetic: >NC_001611.1-cand-123690-123769
  source 1..80: mol_type = other DNA
catgaatgaaattcgtattaatattggagcaggaagattagtcagaccattcttggtggtggataacggagagctcatga

SEQ ID NO: 14703 - DNA, 80 bp, synthetic construct
  misc_feature 1..80: note = Synthetic: >NC_001611.1-cand-123770-123849
  source 1..80: mol_type = other DNA
tggatgtgtgtccggagttagaaagcagattagatgacatgacattctctgacattcagaaagagttcccacatgtcatc

SEQ ID NO: 14704 - DNA, 80 bp, synthetic construct
  misc_feature 1..80: note = Synthetic: >NC_001611.1-cand-124250-124329
  source 1..80: mol_type = other DNA
aaaaacaatttattcagagaggcggtcttgatattgttacagccaagaaacaccaagtagaaattccattggaaaacttt

SEQ ID NO: 14705 - DNA, 80 bp, synthetic construct
  misc_feature 1..80: note = Synthetic: >NC_001611.1-cand-124490-124569
  source 1..80: mol_type = other DNA
atgtttccgagaaatataccgatatgtacaaatctcgcgttgaacgagtgcaagtagaacttactgacaaagttaaggtg

SEQ ID NO: 14706 - DNA, 80 bp, synthetic construct
  misc_feature 1..80: note = Synthetic: >NC_001611.1-cand-124890-124969
  source 1..80: mol_type = other DNA
gcatttaaatccgaaattgaccgagaaagaattatcggataaaatcttttgtgaaaagattctttatgatcctgaaacgg

SEQ ID NO: 14707 - DNA, 80 bp, synthetic construct
  misc_feature 1..80: note = Synthetic: >NC_001611.1-cand-125450-125529
  source 1..80: mol_type = other DNA
cttttctgaagtaggtttcttatttagtagttgttgtagataatcgttaatattatcaagataatccaaatttaattctt

SEQ ID NO: 14708 - DNA, 80 bp, synthetic construct
  misc_feature 1..80: note = Synthetic: >NC_001611.1-cand-125530-125609
  source 1..80: mol_type = other DNA
caaatgaagtaggatcttctataactactttatcatagtctaaagatgactgatattcaggttttgttggcggttgaggt

SEQ ID NO: 14709 - DNA, 80 bp, synthetic construct
  misc_feature 1..80: note = Synthetic: >NC_001611.1-cand-125610-125689
  source 1..80: mol_type = other DNA
gtaacagctacttgagataccaaagtctgatattcagaaagctgtggatgtttgggttcaacatccactgatggtgttac

SEQ ID NO: 14710 - DNA, 80 bp, synthetic construct
  misc_feature 1..80: note = Synthetic: >NC_001611.1-cand-125690-125769
  source 1..80: mol_type = other DNA
accaatcggttcagtgacgtctgtggatggaggtgctacttttacagaacctgtagccttagttgtcgacggagatacat

SEQ ID NO: 14711 - DNA, 80 bp, synthetic construct
  misc_feature 1..80: note = Synthetic: >NC_001611.1-cand-136670-136749
  source 1..80: mol_type = other DNA
taatgagatcaatagacagatggatgaaatggtacttcttaccaacatcttaagcgtagaagttgtaaataacaatgaga

SEQ ID NO: 14712 - DNA, 80 bp, synthetic construct
  misc_feature 1..80: note = Synthetic: >NC_001611.1-cand-136750-136829
  source 1..80: mol_type = other DNA
tgtatcatcttattccccatagactatcgatgattatactctgtattagttctattggaagatgtgttatctctatagat

SEQ ID NO: 14713 - DNA, 80 bp, synthetic construct
  misc_feature 1..80: note = Synthetic: >NC_001611.1-cand-136830-136909
  source 1..80: mol_type = other DNA
aatgacgttaataacaaaaatattctaacctttcccattgatcatgctgtaatcatatcccactaagtaaatgtgtcgta

SEQ ID NO: 14714 - DNA, 80 bp, synthetic construct
  misc_feature 1..80: note = Synthetic: >NC_001611.1-cand-136910-136989
  source 1..80: mol_type = other DNA
gttagtaagggtcctacaaccatattggttgttaaagcggatatacccagcaaacgacatactatatgtaaataatctgt

SEQ ID NO: 14715 - DNA, 80 bp, synthetic construct
  misc_feature 1..80: note = Synthetic: >NC_001611.1-cand-136990-137069
  source 1..80: mol_type = other DNA
cactgattaattatttgccgttgtctgtattcattattagacgagttacaaactatttggatagacacatatgcgatcag

SEQ ID NO: 14716 - DNA, 80 bp, synthetic construct
  misc_feature 1..80: note = Synthetic: >NC_001611.1-cand-137140-137219
  source 1..80: mol_type = other DNA
gtataggtatgtcctctaccaagtacataaattctagcatcgagcaagatactttaatccatgtttgtaacctcgagcat

SEQ ID NO: 14717 - DNA, 80 bp, synthetic construct
  misc_feature 1..80: note = Synthetic: >NC_001611.1-cand-137220-137299
  source 1..80: mol_type = other DNA
ccattcgactcagtatacaaaaatgcagtcgtacaaattctgtacctatcaaggaacaaatattgtacggtagaattgat

SEQ ID NO: 14718 - DNA, 80 bp, synthetic construct
  misc_feature 1..80: note = Synthetic: >NC_001611.1-cand-137300-137379
  source 1..80: mol_type = other DNA
aatataaatatgagcattagtatttctgtggattaatagatttctagtatgggatcattaatcatttctaatctctaaat

SEQ ID NO: 14719 - DNA, 80 bp, synthetic construct
  misc_feature 1..80: note = Synthetic: >NC_001611.1-cand-137380-137459
  source 1..80: mol_type = other DNA
acctcataaaacaaaaaagctattatcaaatactgtacggaatggattcattctcttctctttttatgaaactctgttgt

SEQ ID NO: 14720 - DNA, 80 bp, synthetic construct
  misc_feature 1..80: note = Synthetic: >NC_001611.1-cand-137460-137539
  source 1..80: mol_type = other DNA
atatctactgataaaactggaagcaaaaaatctgatagaaagaataagaataagatcaaggattatatggaacacgatta

SEQ ID NO: 14721 - DNA, 80 bp, synthetic construct
  misc_feature 1..80: note = Synthetic: >NC_001611.1-cand-137700-137779
  source 1..80: mol_type = other DNA
agagttccatcaacacattcctttagactcaatcccaatcccaaaaccgttaaaatgtatccggccaattgatagtaaat

SEQ ID NO: 14722 - DNA, 80 bp, synthetic construct
  misc_feature 1..80: note = Synthetic: >NC_001611.1-cand-138020-138099
  source 1..80: mol_type = other DNA
gaggaataataagaacaaagtaatgcctgtaaaaataaacatcaacattgtatgatggtcattaaaccaattagtatgac

SEQ ID NO: 14723 - DNA, 80 bp, synthetic construct
  misc_feature 1..80: note = Synthetic: >NC_001611.1-cand-138100-138179
  source 1..80: mol_type = other DNA
gttgaactaatttcacagtagattttattccggtgttatcctcgcatgtataagtaccgggtaatatatctttatacttt

SEQ ID NO: 14724 - DNA, 80 bp, synthetic construct
  misc_feature 1..80: note = Synthetic: >NC_001611.1-cand-138180-138259
  source 1..80: mol_type = other DNA
ataattaatgaaacatcgttatcagataacgaatggagtttggcactagtatgccatttacttaatatgatcgtcttgga

SEQ ID NO: 14725 - DNA, 80 bp, synthetic construct
  misc_feature 1..80: note = Synthetic: >NC_001611.1-cand-138260-138339
  source 1..80: mol_type = other DNA
agttttattataagttaaaatattatggttgtccaatttccatctaatatactttgttggattatctatagtacacggaa

SEQ ID NO: 14726 - DNA, 80 bp, synthetic construct
  misc_feature 1..80: note = Synthetic: >NC_001611.1-cand-145290-145369
  source 1..80: mol_type = other DNA
cgcctaagagataaaaatctttggatggttgcatgtgacttttctctaaatgatgatgttgcccaagatcctctcttaaa

SEQ ID NO: 14727 - DNA, 80 bp, synthetic construct
  misc_feature 1..80: note = Synthetic: >NC_001611.1-cand-145370-145449
  source 1..80: mol_type = other DNA
tgaatccatcctatccttgtacaagatggacagtctattttccttagatggtttaatatttttgttacccatgatctata

SEQ ID NO: 14728 - DNA, 80 bp, synthetic construct
  misc_feature 1..80: note = Synthetic: >NC_001611.1-cand-145450-145529
  source 1..80: mol_type = other DNA
aaggtagacctaatcgtcttggatgaccatatatttatttccagttttattatacgcataaattgtaaaaatatgttagg

SEQ ID NO: 14729 - DNA, 80 bp, synthetic construct
  misc_feature 1..80: note = Synthetic: >NC_001611.1-cand-145550-145629
  source 1..80: mol_type = other DNA
ggcattaatcgtttttgaaggattggacaaatctggaaaaacaacacaatgtatgaacatcatggaatctataccgacaa

SEQ ID NO: 14730 - DNA, 80 bp, synthetic construct
  misc_feature 1..80: note = Synthetic: >NC_001611.1-cand-145610-145689
  source 1..80: mol_type = other DNA
catggaatctataccgacaaacacgataaaatatcttaactttccgcagagatccactgtcactggaaagatgatagatg

SEQ ID NO: 14731 - DNA, 80 bp, synthetic construct
  misc_feature 1..80: note = Synthetic: >NC_001611.1-cand-145770-145849
  source 1..80: mol_type = other DNA
tttatacaagaacaattagaacagggaattactttaatagttgatagatacgcgttctctggagtagcatatgccaccgc

SEQ ID NO: 14732 - DNA, 80 bp, synthetic construct
  misc_feature 1..80: note = Synthetic: >NC_001611.1-cand-146010-146089
  source 1..80: mol_type = other DNA
aaaaaaatgattgaagaaggagaagatattcattggcaaattatttcttctgaattcgaggaagatgtaaagaaggagtt

SEQ ID NO: 14733 - DNA, 80 bp, synthetic construct
  misc_feature 1..80: note = Synthetic: >NC_001611.1-cand-146060-146139
  source 1..80: mol_type = other DNA
tgaattcgaggaagatgtaaagaaggagttgattaagaatatagttatagaggctatacatacggttactggaccagtgg

SEQ ID NO: 14734 - DNA, 80 bp, synthetic construct
  misc_feature 1..80: note = Synthetic: >NC_001611.1-cand-146170-146249
  source 1..80: mol_type = other DNA
catttttataaatagatgttagtgcagtgttaaaaaatggatgaaggatattactctggcaacttggaatcagttctcgg

SEQ ID NO: 14735 - DNA, 80 bp, synthetic construct
  misc_feature 1..80: note = Synthetic: >NC_001611.1-cand-146250-146329
  source 1..80: mol_type = other DNA
atacgtatctgatatgcatactaaactcgcatcaataactcaattagttattgccaagatagaaactatagataatgata

SEQ ID NO: 14736 - DNA, 80 bp, synthetic construct
  misc_feature 1..80: note = Synthetic: >NC_001611.1-cand-146330-146409
  source 1..80: mol_type = other DNA
tattaaacaacgacattgtaaatttcattatgtgtagatcaaacttaaataatccatttatctctttcctagatactgta

SEQ ID NO: 14737 - DNA, 80 bp, synthetic construct
  misc_feature 1..80: note = Synthetic: >NC_001611.1-cand-146410-146489
  source 1..80: mol_type = other DNA
tatactattatagatcaagagatctatcagaacgagttgattaattcattagacgacaataaaattatcgattgtatagt

SEQ ID NO: 14738 - DNA, 80 bp, synthetic construct
  misc_feature 1..80: note = Synthetic: >NC_001611.1-cand-146490-146569
  source 1..80: mol_type = other DNA
taataagtttatgagcttttataaggataacctagaaaatatagtagatgctatcattactctaaaatatataatgaata

SEQ ID NO: 14739 - DNA, 80 bp, synthetic construct
  misc_feature 1..80: note = Synthetic: >NC_001611.1-cand-146570-146649
  source 1..80: mol_type = other DNA
atccagattttaaaactacgtatgcagaagtactcggttccagaatagcggatatagatattaaacaagtaatacgtgag

SEQ ID NO: 14740 - DNA, 80 bp, synthetic construct
  misc_feature 1..80: note = Synthetic: >NC_001611.1-cand-146650-146729
  source 1..80: mol_type = other DNA
aatatactacaattgtctaatgatatccgcgaacgatatttgtgaaaatattaaaaaaaaatactttttttattaaatga

SEQ ID NO: 14741 - DNA, 80 bp, synthetic construct
  misc_feature 1..80: note = Synthetic: >NC_001611.1-cand-146820-146899
  source 1..80: mol_type = other DNA
cagatagggatgataaatatttaatcattaagctattgcttcccggattagacgatagaatttataacatgaacgataaa

SEQ ID NO: 14742 - DNA, 80 bp, synthetic construct
  misc_feature 1..80: note = Synthetic: >NC_001611.1-cand-150590-150669
  source 1..80: mol_type = other DNA
tatcaggaggctacacaatagtagtgtagttaatggaatatcaaatctagtccttagctataatccgatatatgatgaat

SEQ ID NO: 14743 - DNA, 80 bp, synthetic construct
  misc_feature 1..80: note = Synthetic: >NC_001611.1-cand-150670-150749
  source 1..80: mol_type = other DNA
ggaccaaattatcatcattaaatattcctagaattaatcctgctctatggtcagtgcataataaagtatatgtaggagga

SEQ ID NO: 14744 - DNA, 80 bp, synthetic construct
  misc_feature 1..80: note = Synthetic: >NC_001611.1-cand-150750-150829
  source 1..80: mol_type = other DNA
atatctgatgatattcaaactaatacatctgaaacatacaacaaagaaaaagatcgttggacattggataatagtcacgt

SEQ ID NO: 14745 - DNA, 80 bp, synthetic construct
  misc_feature 1..80: note = Synthetic: >NC_001611.1-cand-150830-150909
  source 1..80: mol_type = other DNA
gttaccacgcaattatataatgtataaatgcgaaccgattaaacataaatatccattggaaaaacacagtacacgaatga

SEQ ID NO: 14746 - DNA, 80 bp, synthetic construct
  misc_feature 1..80: note = Synthetic: >NC_001611.1-cand-150910-150989
  source 1..80: mol_type = other DNA
ttttctaaagtacttggaaagttttatatgtagttgatagaacaaaatacatattttttgtaaaaataaatcacttttta

SEQ ID NO: 14747 - DNA, 80 bp, synthetic construct
  misc_feature 1..80: note = Synthetic: >NC_001611.1-cand-150990-151069
  source 1..80: mol_type = other DNA
tactaatatgacacgattgtcaatacttttgttactaatatcattagtatactctacaccttatcctcagacacagatat

SEQ ID NO: 14748 - DNA, 80 bp, synthetic construct
  misc_feature 1..80: note = Synthetic: >NC_001611.1-cand-151070-151149
  source 1..80: mol_type = other DNA
ctaaaaaaataggtgatgatgcaactctatcatgtagtagaaataatataaatgattatgttgttatgagtgcttggtat

SEQ ID NO: 14749 - DNA, 80 bp, synthetic construct
  misc_feature 1..80: note = Synthetic: >NC_001611.1-cand-151150-151229
  source 1..80: mol_type = other DNA
aaggagcccaattccattattcttttagctgccaaaagtgacgtcttgtattttgataattataccaaggataaaatatc

SEQ ID NO: 14750 - DNA, 80 bp, synthetic construct
  misc_feature 1..80: note = Synthetic: >NC_001611.1-cand-151230-151309
  source 1..80: mol_type = other DNA
atacgattctccatacgatgatctagttacaactattacaattaaatcattgactgctaaagatgccggtacttatgtat

SEQ ID NO: 14751 - DNA, 80 bp, synthetic construct
  misc_feature 1..80: note = Synthetic: >NC_001611.1-cand-151470-151549
  source 1..80: mol_type = other DNA
tataaataattttaattgctcgttggtatttgaaatcgcgactccgggaccaattactgataatgtagaaaatcatacag

SEQ ID NO: 14752 - DNA, 80 bp, synthetic construct
  misc_feature 1..80: note = Synthetic: >NC_001611.1-cand-151550-151629
  source 1..80: mol_type = other DNA
acactgtcacatacactagtgatatcattaatacagtaagtacatcatctagagaatccacaacagtcaagacgtcggga

SEQ ID NO: 14753 - DNA, 80 bp, synthetic construct
  misc_feature 1..80: note = Synthetic: >NC_001611.1-cand-151630-151709
  source 1..80: mol_type = other DNA
ccaattactaataaagaagatcatacagtcacagacactgtctcatacactacagtaagtacatcatctgaaattgtcac

SEQ ID NO: 14754 - DNA, 80 bp, synthetic construct
  misc_feature 1..80: note = Synthetic: >NC_001611.1-cand-151710-151789
  source 1..80: mol_type = other DNA
tactaaatcaaccgccaatgatgcgcacaatgataatgaaccatctactgtgtcaccaacaactgtaaaaaacatcacga

SEQ ID NO: 14755 - DNA, 80 bp, synthetic construct
  misc_feature 1..80: note = Synthetic: >NC_001611.1-cand-151790-151869
  source 1..80: mol_type = other DNA
aatctataggtaagtatagtactaaagactatgtcaaagtatttggtattgcagcattaattatattgtcggccgtggca

SEQ ID NO: 14756 - DNA, 80 bp, synthetic construct
  misc_feature 1..80: note = Synthetic: >NC_001611.1-cand-151870-151949
  source 1..80: mol_type = other DNA
attttctgtattacgtattatatatgtaataaacgttcacgtaaatacaaaacagaaaacaaagtctagattttgactta

SEQ ID NO: 14757 - DNA, 80 bp, synthetic construct
  misc_feature 1..80: note = Synthetic: >NC_001611.1-cand-151950-152029
  source 1..80: mol_type = other DNA
cataaatgtctggaatagtaaaatctatcattttgagcgggtcatctggtttaggaaagacagccatagccaaaagacta

SEQ ID NO: 14758 - DNA, 80 bp, synthetic construct
  misc_feature 1..80: note = Synthetic: >NC_001611.1-cand-157330-157409
  source 1..80: mol_type = other DNA
atattattctttggatccaaatgctgtctgtgaaacagataaatggaaatacgaaaatccatgtaaaaaaatgtgtacag

SEQ ID NO: 14759 - DNA, 80 bp, synthetic construct
  misc_feature 1..80: note = Synthetic: >NC_001611.1-cand-157410-157489
  source 1..80: mol_type = other DNA
tttctgattatgtctctgaactatataataaaccgctatacgaagtaaatgccatcataacactaatttgtaaagacgaa

SEQ ID NO: 14760 - DNA, 80 bp, synthetic construct
  misc_feature 1..80: note = Synthetic: >NC_001611.1-cand-157490-157569
  source 1..80: mol_type = other DNA
acaaaatattttcgttgtgaagaaaaaaatggaaatacttcttggaatgatactgttacgtgtcctaatgcggaatgtca

SEQ ID NO: 14761 - DNA, 80 bp, synthetic construct
  misc_feature 1..80: note = Synthetic: >NC_001611.1-cand-157540-157619
  source 1..80: mol_type = other DNA
tactgttacgtgtcctaatgcggaatgtcaatctcttcaattagatcacggatcgtgtcaaccagttaaagaaaaatact

SEQ ID NO: 14762 - DNA, 80 bp, synthetic construct
  misc_feature 1..80: note = Synthetic: >NC_001611.1-cand-157650-157729
  source 1..80: mol_type = other DNA
atgttggatatgaggttattggtgcttcgtacataacttgtacagctaattcttggaatgttattccatcatgtcaacaa

SEQ ID NO: 14763 - DNA, 80 bp, synthetic construct
  misc_feature 1..80: note = Synthetic: >NC_001611.1-cand-157730-157809
  source 1..80: mol_type = other DNA
aaatgtgatataccgtctctatctaatggattaatttccggatctacattttctatcggtggcgttatacatcttagttg

SEQ ID NO: 14764 - DNA, 80 bp, synthetic construct
  misc_feature 1..80: note = Synthetic: >NC_001611.1-cand-157810-157889
  source 1..80: mol_type = other DNA
taaaagtggttttatactaacgggatctccatcatccacatgtatcgacggtaaatggaatcccgtactcccaatatgta

SEQ ID NO: 14765 - DNA, 80 bp, synthetic construct
  misc_feature 1..80: note = Synthetic: >NC_001611.1-cand-157890-157969
  source 1..80: mol_type = other DNA
tacgatctaacgaagaatttgatccagtggaggatggtcccgatgatgagacagatctgagcaaactctcaaaagacgtt

SEQ ID NO: 14766 - DNA, 80 bp, synthetic construct
  misc_feature 1..80: note = Synthetic: >NC_001611.1-cand-157970-158049
  source 1..80: mol_type = other DNA
gtacaatatgaacaagaaatagaatcgttagaagcaacttatcatataatcatagtagcgttgacaattatgggcgtcat

SEQ ID NO: 14767 - DNA, 80 bp, synthetic construct
  misc_feature 1..80: note = Synthetic: >NC_001611.1-cand-158050-158129
  source 1..80: mol_type = other DNA
atttttaatctccgttatagtattagtttgttcctgtaacaaaaataatgaccaatataagttccataaattgttgctgt

SEQ ID NO: 14768 - DNA, 80 bp, synthetic construct
  misc_feature 1..80: note = Synthetic: >NC_001611.1-cand-158130-158209
  source 1..80: mol_type = other DNA
gaatataaatccgttaaaataataaataattaataacgaacaagtatcaaaagattaaagaattatagctagaattaatt

SEQ ID NO: 14769 - DNA, 80 bp, synthetic construct
  misc_feature 1..80: note = Synthetic: >NC_001611.1-cand-158210-158289
  source 1..80: mol_type = other DNA
gagatgtcttcttcagtggatgttgatatctacgatgctgccagagtatttttacttaggcactattataacaagagatt

SEQ ID NO: 14770 - DNA, 80 bp, synthetic construct
  misc_feature 1..80: note = Synthetic: >NC_001611.1-cand-158290-158369
  source 1..80: mol_type = other DNA
tattgtgtatggaagaagtaaccatattacataatatatacaggctatttacaagatgcgccgtaccgttcgatgatata

SEQ ID NO: 14771 - DNA, 80 bp, synthetic construct
  misc_feature 1..80: note = Synthetic: >NC_001611.1-cand-158370-158449
  source 1..80: mol_type = other DNA
gtacgtactatgccaaatgaatcacgtgtttaacaatgggtgatagatacacttaatggcataatgatgaatgaacacaa

SEQ ID NO: 14772 - DNA, 80 bp, synthetic construct
  misc_feature 1..80: note = Synthetic: >NC_001611.1-cand-158450-158529
  source 1..80: mol_type = other DNA
tgttgctgtgtaggtaccggactactgttcatggaaatgtttttcgattataataaaaataattccaaaaatagcatcat

SEQ ID NO: 14773 - DNA, 80 bp, synthetic construct
  misc_feature 1..80: note = Synthetic: >NC_001611.1-cand-158530-158609
  source 1..80: mol_type = other DNA
caactaatgtatgacataattaatagcgtatccataattctagctaatgagagatatagaagcgcgtttaacgacaatgg

SEQ ID NO: 14774 - DNA, 80 bp, synthetic construct
  misc_feature 1..80: note = Synthetic: >NC_001611.1-cand-163580-163659
  source 1..80: mol_type = other DNA
taaaagagtatactacctattatatttcttcctatattttttattcttcattagttacgacttttaacacacctaaatgt

SEQ ID NO: 14775 - DNA, 80 bp, synthetic construct
  misc_feature 1..80: note = Synthetic: >NC_001611.1-cand-163660-163739
  source 1..80: mol_type = other DNA
gtcgacaaagggcaatagtttgcgtcattcatggagttagaaaacgagccagtaatcttaccatgtcctcaaataaatac

SEQ ID NO: 14776 - DNA, 80 bp, synthetic construct
  misc_feature 1..80: note = Synthetic: >NC_001611.1-cand-163740-163819
  source 1..80: mol_type = other DNA
tctatcgtttggatataatatattagatattttatgggaaaacgagaagcggataatgatagaattataccaatagataa

SEQ ID NO: 14777 - DNA, 80 bp, synthetic construct
  misc_feature 1..80: note = Synthetic: >NC_001611.1-cand-163820-163899
  source 1..80: mol_type = other DNA
ttgtaacaatatgctaattctgaacccgacacaatcagactctggtatttatatgtgcattaccaagaacgagacctaca

SEQ ID NO: 14778 - DNA, 80 bp, synthetic construct
  misc_feature 1..80: note = Synthetic: >NC_001611.1-cand-163900-163979
  source 1..80: mol_type = other DNA
gtgatatgatgtcgttaaatttgacaattgtgtctgtctcagaatcaaatatagatcttatttagtatccacaaatagta

SEQ ID NO: 14779 - DNA, 80 bp, synthetic construct
  misc_feature 1..80: note = Synthetic: >NC_001611.1-cand-163980-164059
  source 1..80: mol_type = other DNA
aatgagagatctactggtgaaatgtgacccagtaatgcatttattgctagtaacataaacacagatattatatggagcgg

SEQ ID NO: 14780 - DNA, 80 bp, synthetic construct
  misc_feature 1..80: note = Synthetic: >NC_001611.1-cand-164060-164139
  source 1..80: mol_type = other DNA
acatcaacgccttagaaataagagacttaaacaacggacacctggaattattaccatagaagatgttagaaaaatgatgc

SEQ ID NO: 14781 - DNA, 80 bp, synthetic construct
  misc_feature 1..80: note = Synthetic: >NC_001611.1-cand-164140-164219
  source 1..80: mol_type = other DNA
tggttattacacatgtgttttaatatatatatatatatatatatatatatatgggagtaaagcatataacgtaaccagaa

SEQ ID NO: 14782 - DNA, 80 bp, synthetic construct
  misc_feature 1..80: note = Synthetic: >NC_001611.1-cand-164220-164299
  source 1..80: mol_type = other DNA
ttgtaaaattagaggtatgggataaaataataccttctactatgcaattaccaaaaggccttgtaacttcactaggtagt

SEQ ID NO: 14783 - DNA, 80 bp, synthetic construct
  misc_feature 1..80: note = Synthetic: >NC_001611.1-cand-164300-164379
  source 1..80: mol_type = other DNA
aatttgactattgtgtgtaaagtatcgttgagacctcccacaacggatgcagatgtcttttggataagtaatggtatgta

SEQ ID NO: 14784 - DNA, 80 bp, synthetic construct
  misc_feature 1..80: note = Synthetic: >NC_001611.1-cand-164380-164459
  source 1..80: mol_type = other DNA
ttacgaagaagacaatgaggacggagacggtagaataagtatagcaaataaaatctatacgaccgataagagacgtgtta

SEQ ID NO: 14785 - DNA, 80 bp, synthetic construct
  misc_feature 1..80: note = Synthetic: >NC_001611.1-cand-164460-164539
  source 1..80: mol_type = other DNA
ttacattgtgattaaacattaatcctgtcaaggaaaaagatgctacagcgtttactattcctagcatcagcaaaacagtt

SEQ ID NO: 14786 - DNA, 80 bp, synthetic construct
  misc_feature 1..80: note = Synthetic: >NC_001611.1-cand-164540-164619
  source 1..80: mol_type = other DNA
actattagtataatgtgattgtatgttgttacatttccatgtcaaatagagtttataaaaattttttatacattatcttc

SEQ ID NO: 14787 - DNA, 80 bp, synthetic construct
  misc_feature 1..80: note = Synthetic: >NC_001611.1-cand-164620-164699
  source 1..80: mol_type = other DNA
caacaagcaattgacgaacgtattactatgattaactcccacgatactatgcatattattaatcattaacttgcagacta

SEQ ID NO: 14788 - DNA, 80 bp, synthetic construct
  misc_feature 1..80: note = Synthetic: >NC_001611.1-cand-164700-164779
  source 1..80: mol_type = other DNA
tacctagtgctattttgacatacttgtgttcttgtgtaattgcggtatctatattattaaagtacgtaaatctagctata

SEQ ID NO: 14789 - DNA, 80 bp, synthetic construct
  misc_feature 1..80: note = Synthetic: >NC_001611.1-cand-164780-164859
  source 1..80: mol_type = other DNA
gttttattatttaattttagataatataccatctccttatttttaaaaattaccacatcctttattaaatcatggatggg

SEQ ID NO: 14790 - DNA, 80 bp, synthetic construct
  misc_feature 1..80: note = Synthetic: >NC_001611.1-cand-171100-171179
  source 1..80: mol_type = other DNA
atattgaaatcgtaatttgatatatagtgaaaaatggattttgatgatattaaacataatagacgagtagtaagtaacat

SEQ ID NO: 14791 - DNA, 80 bp, synthetic construct
  misc_feature 1..80: note = Synthetic: >NC_001611.1-cand-171180-171259
  source 1..80: mol_type = other DNA
tagcaatcttttagatgatgatatatattatgcgatgtaatcataactattggtgatggagaagaaattaaagcacataa

SEQ ID NO: 14792 - DNA, 80 bp, synthetic construct
  misc_feature 1..80: note = Synthetic: >NC_001611.1-cand-171260-171339
  source 1..80: mol_type = other DNA
aactatcttggctgctggatctaaatattttagaacactgtttacaacacctatgataataagagatctagtaactagag

SEQ ID NO: 14793 - DNA, 80 bp, synthetic construct
  misc_feature 1..80: note = Synthetic: >NC_001611.1-cand-171340-171419
  source 1..80: mol_type = other DNA
taaaaatctacagatgatcaataaagattccgtcaaaaatattgtacagtacttatacaataggtatataagttctatga

SEQ ID NO: 14794 - DNA, 80 bp, synthetic construct
  misc_feature 1..80: note = Synthetic: >NC_001611.1-cand-171420-171499
  source 1..80: mol_type = other DNA
atataatagatgtattaaaatgcgccaactatcttctaatcgattatctagtcactgactgcgaatcctatattaaagat

SEQ ID NO: 14795 - DNA, 80 bp, synthetic construct
  misc_feature 1..80: note = Synthetic: >NC_001611.1-cand-171500-171579
  source 1..80: mol_type = other DNA
tatactaatcatgatacctgcatatgtatgtaccataggttaatgagatggttcatattccaatagtcaaatatattaaa

SEQ ID NO: 14796 - DNA, 80 bp, synthetic construct
  misc_feature 1..80: note = Synthetic: >NC_001611.1-cand-171580-171659
  source 1..80: mol_type = other DNA
cgtatgctgatgagtaatatatcaacattgataactacggacgcatttaaaaaaacagtatttgaaatattatttgatat

SEQ ID NO: 14797 - DNA, 80 bp, synthetic construct
  misc_feature 1..80: note = Synthetic: >NC_001611.1-cand-171660-171739
  source 1..80: mol_type = other DNA
tctttctactaacgacaatgtatatttatacagagaaggctataaagtaacgatactattgaagtggctagaatacaact

SEQ ID NO: 14798 - DNA, 80 bp, synthetic construct
  misc_feature 1..80: note = Synthetic: >NC_001611.1-cand-171740-171819
  source 1..80: mol_type = other DNA
acatcacaaaagaacagcttttgtatatactgtcctgtatagatatacaatctagatagaagtatagactactactctat

SEQ ID NO: 14799 - DNA, 80 bp, synthetic construct
  misc_feature 1..80: note = Synthetic: >NC_001611.1-cand-171820-171899
  source 1..80: mol_type = other DNA
tcaaataaaactataaatatgcatccctcatgtatacaatttctattagataataaacagaatagaaacattatacccca

SEQ ID NO: 14800 - DNA, 80 bp, synthetic construct
  misc_feature 1..80: note = Synthetic: >NC_001611.1-cand-171900-171979
  source 1..80: mol_type = other DNA
accagttatgtttagcgtgtcatgatactaagtataatgtatgtaacccgtgcatattagtatataacattaatactatg

SEQ ID NO: 14801 - DNA, 80 bp, synthetic construct
  misc_feature 1..80: note = Synthetic: >NC_001611.1-cand-171980-172059
  source 1..80: mol_type = other DNA
gaatatagtgttatttccaccattcctaatcacataattaattacacatccgcgattgtagataatgaaataataatagc

SEQ ID NO: 14802 - DNA, 80 bp, synthetic construct
  misc_feature 1..80: note = Synthetic: >NC_001611.1-cand-172060-172139
  source 1..80: mol_type = other DNA
tggaggatataactttaataatccatcgttaaacaaggtatataaaataaacattgagaacaaaatacatgtcgaactcc

SEQ ID NO: 14803 - DNA, 80 bp, synthetic construct
  misc_feature 1..80: note = Synthetic: >NC_001611.1-cand-172140-172219
  source 1..80: mol_type = other DNA
cacccatgataatgaatagatgtcgtttttctttggctgtaatcgataacacaatttatgctataggtggtcaaaaactg

SEQ ID NO: 14804 - DNA, 80 bp, synthetic construct
  misc_feature 1..80: note = Synthetic: >NC_001611.1-cand-172220-172299
  source 1..80: mol_type = other DNA
aagtttaacattatttatttatgatatatattatatatcggtatcgttattgtttggtctataccatggatatctttaaa

SEQ ID NO: 14805 - DNA, 80 bp, synthetic construct
  misc_feature 1..80: note = Synthetic: >NC_001611.1-cand-172300-172379
  source 1..80: mol_type = other DNA
gaactaatcttaaaataccctgatgaaaatgttttgatttctccagtttccattttatctactttatctattctgaatca

SEQ ID NO: 14806 - DNA, 80 bp, synthetic construct
  misc_feature 1..80: note = Synthetic: >NC_001611.1-cand-178580-178659
  source 1..80: mol_type = other DNA
aacccgaaaatttttggaaagacgctaaaagtaagaaaaggacatatagcgcaatgacaataaaaatcctaccatgtaca

SEQ ID NO: 14807 - DNA, 80 bp, synthetic construct
  misc_feature 1..80: note = Synthetic: >NC_001611.1-cand-178660-178739
  source 1..80: mol_type = other DNA
gtgagaaataaaaatgtagactttggatataactatggacatattatttccaatatggtttatgcacaatctactagtca

SEQ ID NO: 14808 - DNA, 80 bp, synthetic construct
  misc_feature 1..80: note = Synthetic: >NC_001611.1-cand-178740-178819
  source 1..80: mol_type = other DNA
ggattatggagatggtaccaactatacatttaaatctgtaaatagatccgatcatgagtgtgaatctattttagatttga

SEQ ID NO: 14809 - DNA, 80 bp, synthetic construct
  misc_feature 1..80: note = Synthetic: >NC_001611.1-cand-178820-178899
  source 1..80: mol_type = other DNA
aggctaaggaagtaactgtgatgtgtcccgcgtttagtataccaagaaatatatcagcgtatgaaggtctatgctttagt

SEQ ID NO: 14810 - DNA, 80 bp, synthetic construct
  misc_feature 1..80: note = Synthetic: >NC_001611.1-cand-178900-178979
  source 1..80: mol_type = other DNA
gtcactacatctaaagatcattgtgcctcaaataaggaatggttaaaatcttatggttatgggaatacagatgctactaa

SEQ ID NO: 14811 - DNA, 80 bp, synthetic construct
  misc_feature 1..80: note = Synthetic: >NC_001611.1-cand-178980-179059
  source 1..80: mol_type = other DNA
acaacgtgtctgttttcatcattggaattatgtcacaacgtcgttggattattactgttcatacgaagatatttggaaaa

SEQ ID NO: 14812 - DNA, 80 bp, synthetic construct
  misc_feature 1..80: note = Synthetic: >NC_001611.1-cand-179060-179139
  source 1..80: mol_type = other DNA
gcgactggcctgactatgatccatgtaagtcatatatttatatagagtatagagacatatggatagaatctaaagtgttg

SEQ ID NO: 14813 - DNA, 80 bp, synthetic construct
  misc_feature 1..80: note = Synthetic: >NC_001611.1-cand-179140-179219
  source 1..80: mol_type = other DNA
cagcaacctccttatacattcgaattcacacatgacgattctaatgaatacgtgaataaagaaattagtaacaaattgaa

SEQ ID NO: 14814 - DNA, 80 bp, synthetic construct
  misc_feature 1..80: note = Synthetic: >NC_001611.1-cand-179220-179299
  source 1..80: mol_type = other DNA
tgatctgtacaatgaatacaagaacattatggaatatagcgacggatcattgcctgcttctataaacagattagcaaaat

SEQ ID NO: 14815 - DNA, 80 bp, synthetic construct
  misc_feature 1..80: note = Synthetic: >NC_001611.1-cand-179300-179379
  source 1..80: mol_type = other DNA
cattaacttcagagggtagagaaatagcaagtgttaatatagatggtaatctgttagatattgcatatcaagcagataag

SEQ ID NO: 14816 - DNA, 80 bp, synthetic construct
  misc_feature 1..80: note = Synthetic: >NC_001611.1-cand-179380-179459
  source 1..80: mol_type = other DNA
gaaaagatggctgatatacagaacaaaataaatgacatcacaagagatttattcattcacactttatcaaacaaagatat

SEQ ID NO: 14817 - DNA, 80 bp, synthetic construct
  misc_feature 1..80: note = Synthetic: >NC_001611.1-cand-179540-179619
  source 1..80: mol_type = other DNA
ctattgataattatctatgtggtactttagatgattatatatacacttctgtagaatataacaaatcctatgtgttaata

SEQ ID NO: 14818 - DNA, 80 bp, synthetic construct
  misc_feature 1..80: note = Synthetic: >NC_001611.1-cand-179620-179699
  source 1..80: mol_type = other DNA
aacgacacttacatgagctatgactatcttgaatcatcaggtgtagttgttttatcatgttatgaaatgactataatctc

SEQ ID NO: 14819 - DNA, 80 bp, synthetic construct
  misc_feature 1..80: note = Synthetic: >NC_001611.1-cand-179780-179859
  source 1..80: mol_type = other DNA
ttaaggaatttgataaaaacgtaagtgttattataataaaagaagaagataattatctaaacagttctccgaatatatac

SEQ ID NO: 14820 - DNA, 80 bp, synthetic construct
  misc_feature 1..80: note = Synthetic: >NC_001611.1-cand-179860-179939
  source 1..80: mol_type = other DNA
catataatatacatcataggcggcactattctgatactgttagtcattattttaatattggtaatttatatagcatgcaa

SEQ ID NO: 14821 - DNA, 80 bp, synthetic construct
  misc_feature 1..80: note = Synthetic: >NC_001611.1-cand-179940-180019
  source 1..80: mol_type = other DNA
taaatacagaaccaggaaatataaaataatgaaagatgatactatgagcattaaatctgagcatcataatagtcttgaaa

SEQ ID NO: 14822 - DNA, 80 bp, synthetic construct
  misc_feature 1..80: note = Synthetic: >NC_001959.2-cand-1800-1879
  source 1..80: mol_type = other DNA
tatcacggagaggaagtgatgctgtgggacgactatggaatgacaaagatacaggaagactgtaataaactgcaagccat

SEQ ID NO: 14823 - DNA, 80 bp, synthetic construct
  misc_feature 1..80: note = Synthetic: >NC_001959.2-cand-1880-1959
  source 1..80: mol_type = other DNA
agccgactcagcccccctaacactcaattgtgaccgaatagaaaacaagggaatgcaatttgtgtctgatgctatagtca

SEQ ID NO: 14824 - DNA, 80 bp, synthetic construct
  misc_feature 1..80: note = Synthetic: >NC_001959.2-cand-1960-2039
  source 1..80: mol_type = other DNA
tcaccaccaatgctcctggcccagccccagtggactttgtcaacctcgggcctgtttgccgaagggtggacttccttgtg

SEQ ID NO: 14825 - DNA, 80 bp, synthetic construct
  misc_feature 1..80: note = Synthetic: >NC_001959.2-cand-2000-2079
  source 1..80: mol_type = other DNA
caacctcgggcctgtttgccgaagggtggacttccttgtgtattgcacggcacctgaagttgaacacacgaggaaagtca

SEQ ID NO: 14826 - DNA, 80 bp, synthetic construct
  misc_feature 1..80: note = Synthetic: >NC_001959.2-cand-2160-2239
  source 1..80: mol_type = other DNA
ggctttgataaccaagggaataccccgtttggtaagggtgtgatgaagcccaccaccataaacaggctgttaatccaggc

SEQ ID NO: 14827 - DNA, 80 bp, synthetic construct
  misc_feature 1..80: note = Synthetic: >NC_001959.2-cand-2200-2279
  source 1..80: mol_type = other DNA
tgatgaagcccaccaccataaacaggctgttaatccaggctgtagccttgacgatggagagacaggatgagttccaactc

SEQ ID NO: 14828 - DNA, 80 bp, synthetic construct
  misc_feature 1..80: note = Synthetic: >NC_001959.2-cand-2290-2369
  source 1..80: mol_type = other DNA
cgtatgactttgatactgacagagtagctgcgttcacgaggatggcccgagccaacgggttgggtctcatatccatggcc

SEQ ID NO: 14829 - DNA, 80 bp, synthetic construct
  misc_feature 1..80: note = Synthetic: >NC_001959.2-cand-2360-2439
  source 1..80: mol_type = other DNA
atccatggcctccctaggcaaaaagctacgcagtgtcaccactattgaaggattaaagaatgctctatcaggctataaaa

SEQ ID NO: 14830 - DNA, 80 bp, synthetic construct
  misc_feature 1..80: note = Synthetic: >NC_001959.2-cand-2440-2519
  source 1..80: mol_type = other DNA
tatcaaaatgcagtatacaatggcagtcaagggtgtacattatagaatcagatggtgccagtgtacaaatcaaagaagac

SEQ ID NO: 14831 - DNA, 80 bp, synthetic construct
  misc_feature 1..80: note = Synthetic: >NC_001959.2-cand-2520-2599
  source 1..80: mol_type = other DNA
aagcaagctttgacccctctgcagcagacaattaacacggcctcacttgccatcactcgactcaaagcagctagggctgt

SEQ ID NO: 14832 - DNA, 80 bp, synthetic construct
  misc_feature 1..80: note = Synthetic: >NC_001959.2-cand-2600-2679
  source 1..80: mol_type = other DNA
ggcatacgcttcatgtttccagtccgccataactaccatactacaaatggcgggatctgcgctcgttattaatcgagcgg

SEQ ID NO: 14833 - DNA, 80 bp, synthetic construct
  misc_feature 1..80: note = Synthetic: >NC_001959.2-cand-2680-2759
  source 1..80: mol_type = other DNA
tcaagcgtatgtttggtacccgtacagcagccatggcattagaaggacctgggaaagaacataattgcagggtccataag

SEQ ID NO: 14834 - DNA, 80 bp, synthetic construct
  misc_feature 1..80: note = Synthetic: >NC_001959.2-cand-2780-2859
  source 1..80: mol_type = other DNA
gcccataggtcatgatgacatggtagaaaggtttggcctatgtgaaactgaagaggaggagagtgaggaccaaattcaaa

SEQ ID NO: 14835 - DNA, 80 bp, synthetic construct
  misc_feature 1..80: note = Synthetic: >NC_001959.2-cand-2840-2919
  source 1..80: mol_type = other DNA
gagtgaggaccaaattcaaatggtaccaagtgatgccgtcccagaaggaaagaacaaaggcaagaccaaaaagggacgtg

SEQ ID NO: 14836 - DNA, 80 bp, synthetic construct
  misc_feature 1..80: note = Synthetic: >NC_001959.2-cand-2920-2999
  source 1..80: mol_type = other DNA
gtcgcaaaaataactataatgcattctctcgccgtggtctgagtgatgaagaatatgaagagtacaaaaagatcagagaa

SEQ ID NO: 14837 - DNA, 80 bp, synthetic construct
  misc_feature 1..80: note = Synthetic: >NC_001959.2-cand-3000-3079
  source 1..80: mol_type = other DNA
gaaaagaatggcaattatagtatacaagaatacttggaggaccgccaacgatatgaggaagaattagcagaggtacaggc

SEQ ID NO: 14838 - DNA, 80 bp, synthetic construct
  misc_feature 1..80: note = Synthetic: >NC_001959.2-cand-6860-6939
  source 1..80: mol_type = other DNA
ttgtttcatgggtgtccagattttatcaattaaagcctgtgggaactgccagctcggcaagaggtaggcttggtctgcgc

SEQ ID NO: 14839 - DNA, 80 bp, synthetic construct
  misc_feature 1..80: note = Synthetic: >NC_001959.2-cand-6940-7019
  source 1..80: mol_type = other DNA
cgataatggcccaagccataattggtgcaattgctgcttccacagcaggtagtgctctgggagcgggcatacaggttggt

SEQ ID NO: 14840 - DNA, 80 bp, synthetic construct
  misc_feature 1..80: note = Synthetic: >NC_001959.2-cand-7020-7099
  source 1..80: mol_type = other DNA
ggcgaagcggccctccaaagccaaaggtatcaacaaaatttgcaactgcaagaaaattcttttaaacatgacagggaaat

SEQ ID NO: 14841 - DNA, 80 bp, synthetic construct
  misc_feature 1..80: note = Synthetic: >NC_001959.2-cand-7090-7169
  source 1..80: mol_type = other DNA
acagggaaatgattgggtatcaggttgaagcttcaaatcaattattggctaaaaatttggcaactagatattcactcctc

SEQ ID NO: 14842 - DNA, 80 bp, synthetic construct
  misc_feature 1..80: note = Synthetic: >NC_001959.2-cand-7180-7259
  source 1..80: mol_type = other DNA
gtttgaccagtgctgatgcagcaagatctgtggcaggagctccagtcacccgcattgtagattggaatggcgtgagagtg

SEQ ID NO: 14843 - DNA, 80 bp, synthetic construct
  misc_feature 1..80: note = Synthetic: >NC_001959.2-cand-7270-7349
  source 1..80: mol_type = other DNA
agtcctctgctaccacattgagatccggtggcttcatgtcagttcccataccatttgcctctaagcaaaaacaggttcaa

SEQ ID NO: 14844 - DNA, 80 bp, synthetic construct
  misc_feature 1..80: note = Synthetic: >NC_001959.2-cand-7350-7429
  source 1..80: mol_type = other DNA
tcatctggtattagtaatccaaattattccccttcatccatttctcgaaccactagttgggtcgagtcacaaaactcatc

SEQ ID NO: 14845 - DNA, 80 bp, synthetic construct
  misc_feature 1..80: note = Synthetic: >NC_001959.2-cand-7430-7509
  source 1..80: mol_type = other DNA
gagatttggaaatctttctccataccacgcggaggctctcaatacagtgtggttgactccacccggttcaacagcctctt

SEQ ID NO: 14846 - DNA, 80 bp, synthetic construct
  misc_feature 1..80: note = Synthetic: >NC_001959.2-cand-7510-7589
  source 1..80: mol_type = other DNA
ctacactgtcttctgtgccacgtggttatttcaatacagacaggttgccattattcgcaaataataggcgatgatgttgt

SEQ ID NO: 14847 - DNA, 80 bp, synthetic construct
  misc_feature 1..80: note = Synthetic: >NC_002016.1-cand-90-169
  source 1..80: mol_type = other DNA
atcgcacagagacttgaagatgtctttgcagggaagaacaccgatcttgaggttctcatggaatggctaaagacaagacc

SEQ ID NO: 14848 - DNA, 80 bp, synthetic construct
  misc_feature 1..80: note = Synthetic: >NC_002016.1-cand-200-279
  source 1..80: mol_type = other DNA
aggatttgtgttcacgctcaccgtgcccagtgagcgaggactgcagcgtagacgctttgtccaaaatgcccttaatggga

SEQ ID NO: 14849 - DNA, 80 bp, synthetic construct
  misc_feature 1..80: note = Synthetic: >NC_002016.1-cand-430-509
  source 1..80: mol_type = other DNA
ctgtgaccactgaagtggcatttggcctggtatgtgcaacctgtgaacagattgctgactcccagcatcggtctcatagg

SEQ ID NO: 14850 - DNA, 80 bp, synthetic construct
  misc_feature 1..80: note = Synthetic: >NC_002016.1-cand-500-579
  source 1..80: mol_type = other DNA
gtctcataggcaaatggtgacaacaaccaacccactaatcagacatgagaacagaatggttttagccagcactacagcta

SEQ ID NO: 14851 - DNA, 80 bp, synthetic construct
  misc_feature 1..80: note = Synthetic: >NC_002016.1-cand-670-749
  source 1..80: mol_type = other DNA
gaaccattgggactcatcctagctccagtgctggtctgaaaaatgatcttcttgaaaatttgcaggcctatcagaaacga

SEQ ID NO: 14852 - DNA, 80 bp, synthetic construct
  misc_feature 1..80: note = Synthetic: >NC_002016.1-cand-840-919
  source 1..80: mol_type = other DNA
tcgtctttttttcaaatgcatttaccgtcgctttaaatacggactgaaaggagggccttctacggaaggagtgccaaagt

SEQ ID NO: 14853 - DNA, 80 bp, synthetic construct
  misc_feature 1..80: note = Synthetic: >NC_003310.1-cand-49890-49969
  source 1..80: mol_type = other DNA
ctgctttacatgtttcccaatttgtttggagatgaccatagattcatttgttatagaatgcatccaatgagtaaaatcaa

SEQ ID NO: 14854 - DNA, 80 bp, synthetic construct
  misc_feature 1..80: note = Synthetic: >NC_003310.1-cand-49970-50049
  source 1..80: mol_type = other DNA
acacaaaatcttcgttcaaacttaatcttattagaatattagtggaagaaagattctataataatgaatgcagagattat

SEQ ID NO: 14855 - DNA, 80 bp, synthetic construct
  misc_feature 1..80: note = Synthetic: >NC_003310.1-cand-50050-50129
  source 1..80: mol_type = other DNA
aaatggagaataattggaacacaagttgataaaatattgatagctaaatatacaatagatgcaatgtatcgcataagacc

SEQ ID NO: 14856 - DNA, 80 bp, synthetic construct
  misc_feature 1..80: note = Synthetic: >NC_003310.1-cand-50130-50209
  source 1..80: mol_type = other DNA
gatatatataatacaaagcagtacagatacaatgatgatgtagaaaatggattcattggattggataaactaaaattaaa

SEQ ID NO: 14857 - DNA, 80 bp, synthetic construct
  misc_feature 1..80: note = Synthetic: >NC_003310.1-cand-50210-50289
  source 1..80: mol_type = other DNA
cattgttcatgatatagttgaatcatgtatacctgttcgtatgcctgtggctaagatactgtgtaaagaaatggtaaata

SEQ ID NO: 14858 - DNA, 80 bp, synthetic construct
  misc_feature 1..80: note = Synthetic: >NC_003310.1-cand-50290-50369
  source 1..80: mol_type = other DNA
aatactttgagaatctttaagagtgtattgactttgttagtgaatatgcattccatctttctccaatactaattcaaatt

SEQ ID NO: 14859 - DNA, 80 bp, synthetic construct
  misc_feature 1..80: note = Synthetic: >NC_003310.1-cand-50370-50449
  source 1..80: mol_type = other DNA
gttaaattaataatggaatagtataaatagttattagtgataagatagtaaaaataattattagaatagtgtagtatcat

SEQ ID NO: 14860 - DNA, 80 bp, synthetic construct
  misc_feature 1..80: note = Synthetic: >NC_003310.1-cand-50610-50689
  source 1..80: mol_type = other DNA
cctcaacatgttattactaaggatgtattagctaataccaatttttttgtttttatacatatggtacgatgctgtaaagt

SEQ ID NO: 14861 - DNA, 80 bp, synthetic construct
  misc_feature 1..80: note = Synthetic: >NC_003310.1-cand-50770-50849
  source 1..80: mol_type = other DNA
gtaacacaatacagtcgtacaaggaaaccgtgcataaactaacacaagatgaaaaatttttagaggttgccgaatacatg

SEQ ID NO: 14862 - DNA, 80 bp, synthetic construct
  misc_feature 1..80: note = Synthetic: >NC_003310.1-cand-50830-50909
  source 1..80: mol_type = other DNA
tagaggttgccgaatacatggacgaattaggagaacttataggcgtaaattatgacttagttcttaatccattatttcac

SEQ ID NO: 14863 - DNA, 80 bp, synthetic construct
  misc_feature 1..80: note = Synthetic: >NC_003310.1-cand-51170-51249
  source 1..80: mol_type = other DNA
ggtgtggttaaacgaaagtatagctaatgatgcggatatcgttattaatagatccgccattaccatgtatgataaaattc

SEQ ID NO: 14864 - DNA, 80 bp, synthetic construct
  misc_feature 1..80: note = Synthetic: >NC_003310.1-cand-51490-51569
  source 1..80: mol_type = other DNA
acgaggacttattcagagttgttgttcaaatagatcccgaatatttcgataatgaacgaattatgtctttattctatacg

SEQ ID NO: 14865 - DNA, 80 bp, synthetic construct
  misc_feature 1..80: note = Synthetic: >NC_003310.1-cand-51650-51729
  source 1..80: mol_type = other DNA
tatcacattagatacaatggatgatatgaagaagtgtcaaatctttaacgaggatacgttgtattatgttaaggaataca

SEQ ID NO: 14866 - DNA, 80 bp, synthetic construct
  misc_feature 1..80: note = Synthetic: >NC_003310.1-cand-51810-51889
  source 1..80: mol_type = other DNA
aagagtagacggctgaacttgtttagcaaaaacattttaaaatattatttagacggacaattggctcgtctaggtcttgt

SEQ ID NO: 14867 - DNA, 80 bp, synthetic construct
  misc_feature 1..80: note = Synthetic: >NC_003310.1-cand-51940-52019
  source 1..80: mol_type = other DNA
aatctgtggaggatgtatccgcattcgttagattttctacagataaaaaccctagtattcttccatcgctaatcaaaact

SEQ ID NO: 14868 - DNA, 80 bp, synthetic construct
  misc_feature 1..80: note = Synthetic: >NC_003310.1-cand-52020-52099
  source 1..80: mol_type = other DNA
attttagctagttataatatttccatcatcgtcttatttcaaaggtttttaagagataatctatatcatgtagaagaatt

SEQ ID NO: 14869 - DNA, 80 bp, synthetic construct
  misc_feature 1..80: note = Synthetic: >NC_003468.2-cand-480-559
  source 1..80: mol_type = other DNA
accttataaaataacattctcagtggttgcagttaaaacagatggatcaaacatctcgactcagtggcccagtcggagga

SEQ ID NO: 14870 - DNA, 80 bp, synthetic construct
  misc_feature 1..80: note = Synthetic: >NC_003468.2-cand-570-649
  source 1..80: mol_type = other DNA
agttcagcacatgcgtctagtccaagctgatataaattatgtcagagagcatttaataaagttagatgagagagcatctt

SEQ ID NO: 14871 - DNA, 80 bp, synthetic construct
  misc_feature 1..80: note = Synthetic: >NC_003468.2-cand-640-719
  source 1..80: mol_type = other DNA
agagcatctttggaggcaatgtttaacttaaagttccatgtatcaggccctaaactgagatactttaacatccctgatta

SEQ ID NO: 14872 - DNA, 80 bp, synthetic construct
  misc_feature 1..80: note = Synthetic: >NC_003468.2-cand-720-799
  source 1..80: mol_type = other DNA
tagaccacagcagctatgtgaaccacggattgacaacttaatacaatattgcaagaattggttgacaaaagaacataagt

SEQ ID NO: 14873 - DNA, 80 bp, synthetic construct
  misc_feature 1..80: note = Synthetic: >NC_003468.2-cand-800-879
  source 1..80: mol_type = other DNA
ttgtattcaaagaagtcagtggagctaatgtgattcaagcatttgagagtcatgaacagttacatttacagaaatacaac

SEQ ID NO: 14874 - DNA, 80 bp, synthetic construct
  misc_feature 1..80: note = Synthetic: >NC_003468.2-cand-850-929
  source 1..80: mol_type = other DNA
catgaacagttacatttacagaaatacaacgaatcacgaaaaccaagaaattttttactcttgcagcttacagtgcaagg

SEQ ID NO: 14875 - DNA, 80 bp, synthetic construct
  misc_feature 1..80: note = Synthetic: >NC_003468.2-cand-960-1039
  source 1..80: mol_type = other DNA
ccagtgcaatactaggattgggtgtctagaaatatcaaaaaaccaaccagaaacaccagtacagatgcttgcattggata

SEQ ID NO: 14876 - DNA, 80 bp, synthetic construct
  misc_feature 1..80: note = Synthetic: >NC_003468.2-cand-1040-1119
  source 1..80: mol_type = other DNA
tatcttataagtatctgagtcttacaagggatgagttgatcaattattatagccctagagtgcactttcaatcgagccct

SEQ ID NO: 14877 - DNA, 80 bp, synthetic construct
  misc_feature 1..80: note = Synthetic: >NC_003468.2-cand-1120-1199
  source 1..80: mol_type = other DNA
aatgtgaaggaaccagggacactgaagttaggattatcacaattaaatccactctctaaatcaattcttgacaatgttgg

SEQ ID NO: 14878 - DNA, 80 bp, synthetic construct
  misc_feature 1..80: note = Synthetic: >NC_003468.2-cand-1220-1299
  source 1..80: mol_type = other DNA
gattatttggtgagatcatagatagcataaatgtggcaagtcaaatacagatcaatgcatgtgcaaaaataattgagcag

SEQ ID NO: 14879 - DNA, 80 bp, synthetic construct
  misc_feature 1..80: note = Synthetic: >NC_003468.2-cand-1310-1389
  source 1..80: mol_type = other DNA
atcttgaaataaacattggagaaataaatgctagtatgccttctcctaataagacaacaggtgtagatgacctgttaaat

SEQ ID NO: 14880 - DNA, 80 bp, synthetic construct
  misc_feature 1..80: note = Synthetic: >NC_003468.2-cand-1400-1479
  source 1..80: mol_type = other DNA
ataatgagcttggtaaatatatgttatccattctgaggaaaacagcagcatggcatataggccatctagtcagagatatc

SEQ ID NO: 14881 - DNA, 80 bp, synthetic construct
  misc_feature 1..80: note = Synthetic: >NC_003468.2-cand-1480-1559
  source 1..80: mol_type = other DNA
acagaaagtttaattgcacatgctgggctgcgccgttctaaatattggtcagtacatgcatatgaccatgggaatgtaat

SEQ ID NO: 14882 - DNA, 80 bp, synthetic construct
  misc_feature 1..80: note = Synthetic: >NC_003468.2-cand-1560-1639
  source 1..80: mol_type = other DNA
tttgtttatcttgccatcaaagtcactagaggtagtaggttcttatataaggtatttcacagtatttaaagatggtatag

SEQ ID NO: 14883 - DNA, 80 bp, synthetic construct
  misc_feature 1..80: note = Synthetic: >NC_003468.2-cand-1640-1719
  source 1..80: mol_type = other DNA
ggttgatagacgcagataatattgattctaaggccgaaattgatggtgtcacctggtgttattctaaggtcatgagtatt

SEQ ID NO: 14884 - DNA, 80 bp, synthetic construct
  misc_feature 1..80: note = Synthetic: >NC_003468.2-cand-1720-1799
  source 1..80: mol_type = other DNA
gatttaaacaggttattggctttgaacatagcttttgagaagtcacttcttgccacggctacatggttccaatattatac

SEQ ID NO: 14885 - DNA, 80 bp, synthetic construct
  misc_feature 1..80: note = Synthetic: >NC_003899.1-cand-410-489
  source 1..80: mol_type = other DNA
gcctgacgctgagacaccctcgttatgcatgcacactgactcaacttgcaggtaccacggctccgtggccgtatatcagg

SEQ ID NO: 14886 - DNA, 80 bp, synthetic construct
  misc_feature 1..80: note = Synthetic: >NC_003899.1-cand-490-569
  source 1..80: mol_type = other DNA
atgtatatgcagtgcatgcaccgacttccatttactaccaggcgctgaaaggtgtacgaactatctattggatcgggttc

SEQ ID NO: 14887 - DNA, 80 bp, synthetic construct
  misc_feature 1..80: note = Synthetic: >NC_003899.1-cand-570-649
  source 1..80: mol_type = other DNA
gatactacaccgttcatgtataagaacatggcaggcgcctaccctacatacaacacaaattgggccgatgaaagtgtgtt

SEQ ID NO: 14888 - DNA, 80 bp, synthetic construct
  misc_feature 1..80: note = Synthetic: >NC_003899.1-cand-650-729
  source 1..80: mol_type = other DNA
ggaagccagaaatatagggctgggtagttcagacttgcacgaaaagagtttcggaaaagtatccattatgaggaagaaga

SEQ ID NO: 14889 - DNA, 80 bp, synthetic construct
  misc_feature 1..80: note = Synthetic: >NC_003899.1-cand-770-849
  source 1..80: mol_type = other DNA
aactatctatactgaagagagaatactgttacgcagctggcatctacctaatgtctttcatctaaaaggtaaaactagct

SEQ ID NO: 14890 - DNA, 80 bp, synthetic construct
  misc_feature 1..80: note = Synthetic: >NC_003899.1-cand-810-889
  source 1..80: mol_type = other DNA
catctacctaatgtctttcatctaaaaggtaaaactagctttacaggcagatgtaacaccatcgtcagctgcgaaggtta

SEQ ID NO: 14891 - DNA, 80 bp, synthetic construct
  misc_feature 1..80: note = Synthetic: >NC_003899.1-cand-890-969
  source 1..80: mol_type = other DNA
cgttgtcaagaagattacgctcagtcctgggatttacgggaaagtggataatcttgcttcgaccatgcaccgagagggat

SEQ ID NO: 14892 - DNA, 80 bp, synthetic construct
  misc_feature 1..80: note = Synthetic: >NC_003899.1-cand-1010-1089
  source 1..80: mol_type = other DNA
ggtctctttccccgtgtgtacgtacgtgccagcgacactgtgcgaccagatgaccgggatactggcgactgacgtcagtg

SEQ ID NO: 14893 - DNA, 80 bp, synthetic construct
  misc_feature 1..80: note = Synthetic: >NC_003899.1-cand-1050-1129
  source 1..80: mol_type = other DNA
tgcgaccagatgaccgggatactggcgactgacgtcagtgtcgatgacgcccagaagctgctggttgggctcaaccagcg

SEQ ID NO: 14894 - DNA, 80 bp, synthetic construct
  misc_feature 1..80: note = Synthetic: >NC_003899.1-cand-1130-1209
  source 1..80: mol_type = other DNA
aattgtcgtcaatggcagaacacaacgtaacacaaataccatgcagaattacctattaccagtggtagcccaggcgttct

SEQ ID NO: 14895 - DNA, 80 bp, synthetic construct
  misc_feature 1..80: note = Synthetic: >NC_003899.1-cand-1180-1259
  source 1..80: mol_type = other DNA
acctattaccagtggtagcccaggcgttctcgcggtgccgggaataccgcgcagacctggaagacgaaaaagggctaggg

SEQ ID NO: 14896 - DNA, 80 bp, synthetic construct
  misc_feature 1..80: note = Synthetic: >NC_003899.1-cand-1290-1369
  source 1..80: mol_type = other DNA
tgctgggctttcaaaactcacaagatcacatccatttacaagagacctgggactcaaactatcaagaaggtgcccgccgt

SEQ ID NO: 14897 - DNA, 80 bp, synthetic construct
  misc_feature 1..80: note = Synthetic: >NC_003899.1-cand-1370-1449
  source 1..80: mol_type = other DNA
atttaattcctttgtcatcccacaaccaaccagctatgggcctgatataggattgcgtcgccgaattaagatgctattcg

SEQ ID NO: 14898 - DNA, 80 bp, synthetic construct
  misc_feature 1..80: note = Synthetic: >NC_003899.1-cand-1450-1529
  source 1..80: mol_type = other DNA
acgcaaagaaggcacccgctccaattattactgaggccgacgttgcacaccttaaaggcctgcaggatgaagctgaagcc

SEQ ID NO: 14899 - DNA, 80 bp, synthetic construct
  misc_feature 1..80: note = Synthetic: >NC_003899.1-cand-1530-1609
  source 1..80: mol_type = other DNA
gtggctgaggctgaagccgtacgtgcagcattacctccacttctgccggaggtcgataaggagaccgtagaggctgacat

SEQ ID NO: 14900 - DNA, 80 bp, synthetic construct
  misc_feature 1..80: note = Synthetic: >NC_003899.1-cand-1600-1679
  source 1..80: mol_type = other DNA
aggctgacatcgacctgatcatgcaggaggcaggagcaggcagcgtggagacacctagacgacacatcaaggtcacgacg

SEQ ID NO: 14901 - DNA, 80 bp, synthetic construct
  misc_feature 1..80: note = Synthetic: >NC_003899.1-cand-6830-6909
  source 1..80: mol_type = other DNA
cgaggacgatgctatcgccatgtccgctctaatgattcttgaagacctaggagttgatcaggcattgttaaacctaattg

SEQ ID NO: 14902 - DNA, 80 bp, synthetic construct
  misc_feature 1..80: note = Synthetic: >NC_003899.1-cand-6890-6969
  source 1..80: mol_type = other DNA
ggcattgttaaacctaattgaagcagcctttgggaacataacatctgtgcacttaccaacaggcacccgatttaagttcg

SEQ ID NO: 14903 - DNA, 80 bp, synthetic construct
  misc_feature 1..80: note = Synthetic: >NC_003899.1-cand-6990-7069
  source 1..80: mol_type = other DNA
atgtttttgacactctttatcaatactgttgtcaatatcatgatcgctagccgcgtgctccgcgagcggttgaccacttc

SEQ ID NO: 14904 - DNA, 80 bp, synthetic construct
  misc_feature 1..80: note = Synthetic: >NC_003899.1-cand-7030-7109
  source 1..80: mol_type = other DNA
tgatcgctagccgcgtgctccgcgagcggttgaccacttccccctgcgcagcatttatcggcgacgacaacatcgtgaaa

SEQ ID NO: 14905 - DNA, 80 bp, synthetic construct
  misc_feature 1..80: note = Synthetic: >NC_003899.1-cand-7150-7229
  source 1..80: mol_type = other DNA
cgtggttgaacatggaagtgaagatcatcgatgcagtagtcggagtaaaggcaccgtacttttgcggagggttcatcgta

SEQ ID NO: 14906 - DNA, 80 bp, synthetic construct
  misc_feature 1..80: note = Synthetic: >NC_003899.1-cand-7230-7309
  source 1..80: mol_type = other DNA
gtcgatcagattacaggaactgcgtgtagagtcgccgaccccctgaagagactgtttaagctaggtaagccgcttccact

SEQ ID NO: 14907 - DNA, 80 bp, synthetic construct
  misc_feature 1..80: note = Synthetic: >NC_003899.1-cand-7310-7389
  source 1..80: mol_type = other DNA
ggacgatgaccaagacgtcgacaggcgcagagctctgcatgatgaagcggcacgttggaacagaattggcatcactgaag

SEQ ID NO: 14908 - DNA, 80 bp, synthetic construct
  misc_feature 1..80: note = Synthetic: >NC_003899.1-cand-7390-7469
  source 1..80: mol_type = other DNA
agctggtgaaagcagttgaatcacgctacgaggtgaactacgtgtcactaatcatcacagcgttgaccacattagcatct

SEQ ID NO: 14909 - DNA, 80 bp, synthetic construct
  misc_feature 1..80: note = Synthetic: >NC_003899.1-cand-7470-7549
  source 1..80: mol_type = other DNA
tcagttagcaactttaaacacataagaggtcaccccataaccctctacggctgacctaaataggttgtgcattagtatct

SEQ ID NO: 14910 - DNA, 80 bp, synthetic construct
  misc_feature 1..80: note = Synthetic: >NC_003899.1-cand-7550-7629
  source 1..80: mol_type = other DNA
aacctatttatattatattgctatctaaatatcagagatgttcccataccctacacttaactacccgcctatggcgccga

SEQ ID NO: 14911 - DNA, 80 bp, synthetic construct
  misc_feature 1..80: note = Synthetic: >NC_003899.1-cand-7630-7709
  source 1..80: mol_type = other DNA
ttaacccgatggcttaccgggatcctaatccgcctaggcgcaggtggcggccctttaggccaccacttgcagctcaaatt

SEQ ID NO: 14912 - DNA, 80 bp, synthetic construct
  misc_feature 1..80: note = Synthetic: >NC_003899.1-cand-7710-7789
  source 1..80: mol_type = other DNA
gaggacctgagacgttccatcgctaacctgactttgaaacaacgagcacctaaccctccagcaggaccgcccgccaaacg

SEQ ID NO: 14913 - DNA, 80 bp, synthetic construct
  misc_feature 1..80: note = Synthetic: >NC_003899.1-cand-7790-7869
  source 1..80: mol_type = other DNA
caagaagcctgcgccaagcctaagcctgcgcaggaaaaagaagcgaccaccaccacctgccaagaaacaaaaacgtaaac

SEQ ID NO: 14914 - DNA, 80 bp, synthetic construct
  misc_feature 1..80: note = Synthetic: >NC_003899.1-cand-7870-7949
  source 1..80: mol_type = other DNA
ctaaaccaggcaaacgacagcgaatgtgtatgaagctagagtcagataaaacgtttccaatcatgttgaacggacaggtg

SEQ ID NO: 14915 - DNA, 80 bp, synthetic construct
  misc_feature 1..80: note = Synthetic: >NC_003899.1-cand-7950-8029
  source 1..80: mol_type = other DNA
aatggttacgcgtgcgtcgtgggtggacgagtgttcaaaccgctgcacgtagaaggcagaatagacaatgagcaactggc

SEQ ID NO: 14916 - DNA, 80 bp, synthetic construct
  misc_feature 1..80: note = Synthetic: >NC_003899.1-cand-8030-8109
  source 1..80: mol_type = other DNA
cgccatcaagctgaagaaggccagcatatatgaccttgagtatggtgatgtgccacaatgcatgaaatcagataccctcc

SEQ ID NO: 14917 - DNA, 80 bp, synthetic construct
  misc_feature 1..80: note = Synthetic: >NC_003908.1-cand-1610-1689
  source 1..80: mol_type = other DNA
gcaggagcaggtagcgtggagacaccacgaggacacatcagggtgacaagttacccaggcgaagagaagattgggtctta

SEQ ID NO: 14918 - DNA, 80 bp, synthetic construct
  misc_feature 1..80: note = Synthetic: >NC_003908.1-cand-1690-1769
  source 1..80: mol_type = other DNA
cgctatactttcaccccaggcggtattgaatagtgaaaaactggcgtgtatccacccattggcggaacaagtactggtaa

SEQ ID NO: 14919 - DNA, 80 bp, synthetic construct
  misc_feature 1..80: note = Synthetic: >NC_003908.1-cand-1770-1849
  source 1..80: mol_type = other DNA
tgactcacaaaggtagggcagggagatacaaagtcgagccataccacggtaaggtcattgtaccagaagggacggcggtc

SEQ ID NO: 14920 - DNA, 80 bp, synthetic construct
  misc_feature 1..80: note = Synthetic: >NC_003908.1-cand-1850-1929
  source 1..80: mol_type = other DNA
cctgttcaagacttccaggcattgagtgagagcgctacgatcgttttcaacgagagggagttcgtaaacagatacctgca

SEQ ID NO: 14921 - DNA, 80 bp, synthetic construct
  misc_feature 1..80: note = Synthetic: >NC_003908.1-cand-1930-2009
  source 1..80: mol_type = other DNA
ccacatcgcaatcaacggaggagcgctaaacactgacgaagagtactataagactgtaaagactcaggacacagactcag

SEQ ID NO: 14922 - DNA, 80 bp, synthetic construct
  misc_feature 1..80: note = Synthetic: >NC_003908.1-cand-2010-2089
  source 1..80: mol_type = other DNA
aatacgtcttcgatattgacgcacgaaagtgtgttaagcgagaagacgcaggtcccttgtgcctaaccggtgatctggta

SEQ ID NO: 14923 - DNA, 80 bp, synthetic construct
  misc_feature 1..80: note = Synthetic: >NC_003908.1-cand-2090-2169
  source 1..80: mol_type = other DNA
gatccaccatttcacgagtttgcgtacgagagtctcaagacacgaccagcagcacctcacaaagtcccaaccatcggagt

SEQ ID NO: 14924 - DNA, 80 bp, synthetic construct
  misc_feature 1..80: note = Synthetic: >NC_003908.1-cand-2170-2249
  source 1..80: mol_type = other DNA
ctatggagtgccaggttcaggtaaatctggaatcatcaaaagcgctgtgactaagaaagatctggttgtgagtgcgaaga

SEQ ID NO: 14925 - DNA, 80 bp, synthetic construct
  misc_feature 1..80: note = Synthetic: >NC_003908.1-cand-2250-2329
  source 1..80: mol_type = other DNA
aggaaaactgcgcagaaatcatcagggatgtaaggaggatgagacgtatggatgttgctgctaggactgtcgattcagtg

SEQ ID NO: 14926 - DNA, 80 bp, synthetic construct
  misc_feature 1..80: note = Synthetic: >NC_003908.1-cand-2340-2419
  source 1..80: mol_type = other DNA
gggttaagcaccccgttaacactctgtacattgatgaggcatttgcctgccatgcagggacgctgctggcactgattgcc

SEQ ID NO: 14927 - DNA, 80 bp, synthetic construct
  misc_feature 1..80: note = Synthetic: >NC_003908.1-cand-2370-2449
  source 1..80: mol_type = other DNA
ttgatgaggcatttgcctgccatgcagggacgctgctggcactgattgccatcgtcaaacctaagaaagtggtattgtgc

SEQ ID NO: 14928 - DNA, 80 bp, synthetic construct
  misc_feature 1..80: note = Synthetic: >NC_003908.1-cand-2490-2569
  source 1..80: mol_type = other DNA
tgaaagtacattttaaccatgacatatgcactgaagtgtaccataaaagcatctctaggaggtgcacacagactgtaacc

SEQ ID NO: 14929 - DNA, 80 bp, synthetic construct
  misc_feature 1..80: note = Synthetic: >NC_003908.1-cand-2570-2649
  source 1..80: mol_type = other DNA
gccatcgtctccacgctcttctacgacaagcgaatgaagacggttaacccatgtgctgataaaatcatcatagataccac

SEQ ID NO: 14930 - DNA, 80 bp, synthetic construct
  misc_feature 1..80: note = Synthetic: >NC_003908.1-cand-2650-2729
  source 1..80: mol_type = other DNA
agggaccacaaagccgcacaaagatgatctgattctaacctgtttcagaggatgggtgaaacagctacagattgactaca

SEQ ID NO: 14931 - DNA, 80 bp, synthetic construct
  misc_feature 1..80: note = Synthetic: >NC_003908.1-cand-2730-2809
  source 1..80: mol_type = other DNA
aaaatcacgaaatcatgactgcggctgcatcgcaaggacttacgcggaaaggcgtttatgctgtcaggtacaaagtcaac

SEQ ID NO: 14932 - DNA, 80 bp, synthetic construct
  misc_feature 1..80: note = Synthetic: >NC_003908.1-cand-2810-2889
  source 1..80: mol_type = other DNA
gagaatccactctactcgcagacttctgagcacgtgaacgtgttacttacacgcacagaaaaacgcattgtctggaagac

SEQ ID NO: 14933 - DNA, 80 bp, synthetic construct
  misc_feature 1..80: note = Synthetic: >NC_005082.1-cand-2690-2769
  source 1..80: mol_type = other DNA
gtttttcaacagcaagaaagggcgtttgagggtaaccagagtacctaattaacctgttcactctttctgatatttttgtg

SEQ ID NO: 14934 - DNA, 80 bp, synthetic construct
  misc_feature 1..80: note = Synthetic: >NC_005082.1-cand-2770-2849
  source 1..80: mol_type = other DNA
acaatttcaattccgacaccattagccacacattgatcacaaatcgtatcaatagtttcagcaagttgtgttggagtttt

SEQ ID NO: 14935 - DNA, 80 bp, synthetic construct
  misc_feature 1..80: note = Synthetic: >NC_005082.1-cand-2850-2929
  source 1..80: mol_type = other DNA
acacttgacattatgcaatgctgcagatacaaacttggttaacagaggtgtttcctcacccatgacaaagaaccttgatt

SEQ ID NO: 14936 - DNA, 80 bp, synthetic construct
  misc_feature 1..80: note = Synthetic: >NC_005082.1-cand-2970-3049
  source 1..80: mol_type = other DNA
cacaaatttgttgaattttgaggacaaaaaatcgtggaaacataaaagctctaaccaatcaaaaccgtctaacccatctt

SEQ ID NO: 14937 - DNA, 80 bp, synthetic construct
  misc_feature 1..80: note = Synthetic: >NC_005082.1-cand-3010-3089
  source 1..80: mol_type = other DNA
cataaaagctctaaccaatcaaaaccgtctaacccatcttcacttgaagacatagttggcaatttgaacgttgtgatctg

SEQ ID NO: 14938 - DNA, 80 bp, synthetic construct
  misc_feature 1..80: note = Synthetic: >NC_005082.1-cand-3090-3169
  source 1..80: mol_type = other DNA
atcatcactagacgtgtaagacaccggtatcacgtcaaagaggaaatccaaacagtagtttatgaattgctcagtaatca

SEQ ID NO: 14939 - DNA, 80 bp, synthetic construct
  misc_feature 1..80: note = Synthetic: >NC_005082.1-cand-3170-3249
  source 1..80: mol_type = other DNA
aaccataaagatcagatgaattgtgaagtatgccctgtcccatgtctaagacagacataatatgactgggcactccttct

SEQ ID NO: 14940 - DNA, 80 bp, synthetic construct
  misc_feature 1..80: note = Synthetic: >NC_005082.1-cand-3230-3309
  source 1..80: mol_type = other DNA
tatgactgggcactccttcttctaataataatttctggtgaaagaactcttcacacactgattggcagcttaaactcatt

SEQ ID NO: 14941 - DNA, 80 bp, synthetic construct
  misc_feature 1..80: note = Synthetic: >NC_005082.1-cand-3310-3389
  source 1..80: mol_type = other DNA
aaacccaaccttcttttcaacatgcctgtgcaatatgcctcagcaacactgattggtacttctacagctttatgtaaatg

SEQ ID NO: 14942 - DNA, 80 bp, synthetic construct
  misc_feature 1..80: note = Synthetic: >NC_005082.1-cand-3390-3469
  source 1..80: mol_type = other DNA
ccactttaacacatttagaactggcccgagatctacttgttcacctgtcttactaattttaaacttaagagctccaaaga

SEQ ID NO: 14943 - DNA, 80 bp, synthetic construct
  misc_feature 1..80: note = Synthetic: >NC_005082.1-cand-3470-3549
  source 1..80: mol_type = other DNA
atgcatgaaaaagagctggactcatgaaagggccccattttgaatgatctagagaacagcacaggtccccattgttcaca

SEQ ID NO: 14944 - DNA, 80 bp, synthetic construct
  misc_feature 1..80: note = Synthetic: >NC_005082.1-cand-3550-3629
  source 1..80: mol_type = other DNA
gccatcttcatatcacagattgccctctcaaactctttttcagagttaagacatgtgtaattcattgagttagccactgc

SEQ ID NO: 14945 - DNA, 80 bp, synthetic construct
  misc_feature 1..80: note = Synthetic: >NC_005082.1-cand-3630-3709
  source 1..80: mol_type = other DNA
ctcagtaaagtcttcaactaatcttgtcatcatctttgtgtttaagtcacctacgtaaagttctctatttgaaccaactt

SEQ ID NO: 14946 - DNA, 80 bp, synthetic construct
  misc_feature 1..80: note = Synthetic: >NC_005082.1-cand-3690-3769
  source 1..80: mol_type = other DNA
ttctctatttgaaccaacttgctctttgtaactcaaaccaaatttcaaattacccacatttgggctaatacatgtgtact

SEQ ID NO: 14947 - DNA, 80 bp, synthetic construct
  misc_feature 1..80: note = Synthetic: >NC_005082.1-cand-3790-3869
  source 1..80: mol_type = other DNA
taaaagcacaagttccttagagcagcactggtgaagaaactcttgtctagtctgtcagctatggcttctgaattactctg

SEQ ID NO: 14948 - DNA, 80 bp, synthetic construct
  misc_feature 1..80: note = Synthetic: >NC_005082.1-cand-3870-3949
  source 1..80: mol_type = other DNA
tctattgctcactctcacatcctcctttagcctaaaagcttcctctgagagccccaatctggacctatttttatgttcat

SEQ ID NO: 14949 - DNA, 80 bp, synthetic construct
  misc_feature 1..80: note = Synthetic: >NC_005217.1-cand-5690-5769
  source 1..80: mol_type = other DNA
tattcataaatccaataatatcatccgggttgttagaaaactttatgaaaggcttgccagcagcaattcctcctgcagct

SEQ ID NO: 14950 - DNA, 80 bp, synthetic construct
  misc_feature 1..80: note = Synthetic: >NC_005217.1-cand-5760-5839
  source 1..80: mol_type = other DNA
tcctgcagcttattctttaattatgaataaggctaagatatctgtagatttatttatgttcaatgagttgctggctttag

SEQ ID NO: 14951 - DNA, 80 bp, synthetic construct
  misc_feature 1..80: note = Synthetic: >NC_005217.1-cand-5840-5919
  source 1..80: mol_type = other DNA
ttaacccaagaaatgttctcaatttggacggaatagaagagacttcagaaggatatagtacagtaacctctatatctagc

SEQ ID NO: 14952 - DNA, 80 bp, synthetic construct
  misc_feature 1..80: note = Synthetic: >NC_005217.1-cand-5920-5999
  source 1..80: mol_type = other DNA
cgacaatggtctgaagaggtaagtcttatggctgatgatgacattgatgatgaagaagaatttacaatagctcttgatga

SEQ ID NO: 14953 - DNA, 80 bp, synthetic construct
  misc_feature 1..80: note = Synthetic: >NC_005217.1-cand-6000-6079
  source 1..80: mol_type = other DNA
tatagactttgagcagatcaatcttgatgaggacatccaacattttttgcaagatgaatcagcttatactggtgatttaa

SEQ ID NO: 14954 - DNA, 80 bp, synthetic construct
  misc_feature 1..80: note = Synthetic: >NC_005217.1-cand-6120-6199
  source 1..80: mol_type = other DNA
tgtaacgcgcgtgcttgaaccagttaagctaattaagagctgggtttcgaaagggcttgctatcgataaagtgtataacc

SEQ ID NO: 14955 - DNA, 80 bp, synthetic construct
  misc_feature 1..80: note = Synthetic: >NC_005217.1-cand-6160-6239
  source 1..80: mol_type = other DNA
tgggtttcgaaagggcttgctatcgataaagtgtataaccctatagggatagtgctgatggcaaggtacatgtcaaagaa

SEQ ID NO: 14956 - DNA, 80 bp, synthetic construct
  misc_feature 1..80: note = Synthetic: >NC_005217.1-cand-6240-6319
  source 1..80: mol_type = other DNA
ttatgattttagcaaaattcccctagctttattaaacccatatgatttaactgagtttgaaagtgttgtcaaaggctggg

SEQ ID NO: 14957 - DNA, 80 bp, synthetic construct
  misc_feature 1..80: note = Synthetic: >NC_005217.1-cand-6320-6399
  source 1..80: mol_type = other DNA
gtgaaactgttaatgacagatttctagaggttgacaatgatgcacaacggttggtccgagagaaaaacatattgcccgaa

SEQ ID NO: 14958 - DNA, 80 bp, synthetic construct
  misc_feature 1..80: note = Synthetic: >NC_005217.1-cand-6400-6479
  source 1..80: mol_type = other DNA
gacatattaccagattcattattttcttttaggcacgttgatgtgttgttaaagagactattccctcatgaccctgtgtc

SEQ ID NO: 14959 - DNA, 80 bp, synthetic construct
  misc_feature 1..80: note = Synthetic: >NC_005217.1-cand-6470-6549
  source 1..80: mol_type = other DNA
accctgtgtcttcattctattaacaattttctttattccaaaccatgacttgttctctctactgctctgttctcggagca

SEQ ID NO: 14960 - DNA, 80 bp, synthetic construct
  misc_feature 1..80: note = Synthetic: >NC_005218.1-cand-0-79
  source 1..80: mol_type = other DNA
agtagactccctaaagagctactagaacaacgatggcaactatggaggaattacagagggaaatcaatgcccatgagggt

SEQ ID NO: 14961 - DNA, 80 bp, synthetic construct
  misc_feature 1..80: note = Synthetic: >NC_005218.1-cand-80-159
  source 1..80: mol_type = other DNA
caattagtgatagccaggcagaaggtgagggatgcagaaaaacagtatgaaaaggatccagatgagttgaacaagagaac

SEQ ID NO: 14962 - DNA, 80 bp, synthetic construct
  misc_feature 1..80: note = Synthetic: >NC_005218.1-cand-160-239
  source 1..80: mol_type = other DNA
attaactgaccgagagggcgttgcagtatctatccaggcaaaaattgatgagttaaaaaggcaactggcagataggattg

SEQ ID NO: 14963 - DNA, 80 bp, synthetic construct
  misc_feature 1..80: note = Synthetic: >NC_005218.1-cand-280-359
  source 1..80: mol_type = other DNA
ggtggagcctggagaccatctgaaagagaggtcaatgctcagttatggtaatgtgctggatttaaaccatttggatattg

SEQ ID NO: 14964 - DNA, 80 bp, synthetic construct
  misc_feature 1..80: note = Synthetic: >NC_005218.1-cand-320-399
  source 1..80: mol_type = other DNA
agttatggtaatgtgctggatttaaaccatttggatattgatgaacctacaggacagacagcagactggctgagcatcat

SEQ ID NO: 14965 - DNA, 80 bp, synthetic construct
  misc_feature 1..80: note = Synthetic: >NC_005831.2-cand-20190-20269
  source 1..80: mol_type = other DNA
ttaattatttaggtgactttattcaaggtccttttatagctggtaacactgttcatgctaattatatattttggcgtaat

SEQ ID NO: 14966 - DNA, 80 bp, synthetic construct
  misc_feature 1..80: note = Synthetic: >NC_005831.2-cand-20270-20349
  source 1..80: mol_type = other DNA
tctactattatgtctttgtcatacaattcagttttagatttaagtaagtttgaatgtaaacataaagccactgttgttgt

SEQ ID NO: 14967 - DNA, 80 bp, synthetic construct
  misc_feature 1..80: note = Synthetic: >NC_005831.2-cand-20350-20429
  source 1..80: mol_type = other DNA
tacacttaaagatagtgatgtaaatgatatggttttgagtttgattaagagtggtaggttgttgttacgcaataatggtc

SEQ ID NO: 14968 - DNA, 80 bp, synthetic construct
  misc_feature 1..80: note = Synthetic: >NC_005831.2-cand-20430-20509
  source 1..80: mol_type = other DNA
gttttggtggttttagtaatcatttagtctcaactaaatgaaacttttcttgattttgcttgttttgcccctggcctctt

SEQ ID NO: 14969 - DNA, 80 bp, synthetic construct
  misc_feature 1..80: note = Synthetic: >NC_005831.2-cand-20510-20589
  source 1..80: mol_type = other DNA
gctttttcacatgtaatagtaatgctaatctctctatgttacaattaggtgttcctgacaattcttcaactattgttacg

SEQ ID NO: 14970 - DNA, 80 bp, synthetic construct
  misc_feature 1..80: note = Synthetic: >NC_005831.2-cand-20590-20669
  source 1..80: mol_type = other DNA
ggtttattgccaactcattggttttgtgctaatcagagtacatctgtttactcagccaatggtttcttttatattgatgt

SEQ ID NO: 14971 - DNA, 80 bp, synthetic construct
  misc_feature 1..80: note = Synthetic: >NC_005831.2-cand-20670-20749
  source 1..80: mol_type = other DNA
tggtaatcaccgtagtgcttttgcgctccatactggttattatgatgctaatcagtattatatttatgttactaatgaaa

SEQ ID NO: 14972 - DNA, 80 bp, synthetic construct
  misc_feature 1..80: note = Synthetic: >NC_005831.2-cand-20750-20829
  source 1..80: mol_type = other DNA
taggcttaaatgcttctgttactcttaagatttgtaagtttagtagaaacactacttttgattttttaagtaatgcttct

SEQ ID NO: 14973 - DNA, 80 bp, synthetic construct
  misc_feature 1..80: note = Synthetic: >NC_005831.2-cand-20830-20909
  source 1..80: mol_type = other DNA
agttcttttgactgtatagttaatttgttatttacagaacagttaggtgcgcctttgggcataactatatctggtgaaac

SEQ ID NO: 14974 - DNA, 80 bp, synthetic construct
  misc_feature 1..80: note = Synthetic: >NC_005831.2-cand-20910-20989
  source 1..80: mol_type = other DNA
tgtgcgtctgcatttatataatgtaactcgtactttttatgtgccagcagcttataaacttactaaacttagtgttaaat

SEQ ID NO: 14975 - DNA, 80 bp, synthetic construct
  misc_feature 1..80: note = Synthetic: >NC_005831.2-cand-20990-21069
  source 1..80: mol_type = other DNA
gttactttaactattcctgtgtttttagtgttgtcaacgccaccgttactgtgaatgtcaccacacataatggccgtgta

SEQ ID NO: 14976 - DNA, 80 bp, synthetic construct
  misc_feature 1..80: note = Synthetic: >NC_005831.2-cand-21070-21149
  source 1..80: mol_type = other DNA
gttaactacactgtttgtgatgattgtaatggttatactgataacatattttctgttcaacaggatggccgcattcctaa

SEQ ID NO: 14977 - DNA, 80 bp, synthetic construct
  misc_feature 1..80: note = Synthetic: >NC_005831.2-cand-21120-21199
  source 1..80: mol_type = other DNA
ttctgttcaacaggatggccgcattcctaatggtttcccttttaataattggtttttgttaactaatggttccacactag

SEQ ID NO: 14978 - DNA, 80 bp, synthetic construct
  misc_feature 1..80: note = Synthetic: >NC_005831.2-cand-21230-21309
  source 1..80: mol_type = other DNA
tccgtttaacttgtttatggcctgtacctggtcttaaatcttcaactggttttgtttattttaatgccactggttctgat

SEQ ID NO: 14979 - DNA, 80 bp, synthetic construct
  misc_feature 1..80: note = Synthetic: >NC_005831.2-cand-21310-21389
  source 1..80: mol_type = other DNA
gttaattgtaacggctatcaacataattctgttgttgatgttatgcgttacaatcttaacttcagtgctaattctttgga

SEQ ID NO: 14980 - DNA, 80 bp, synthetic construct
  misc_feature 1..80: note = Synthetic: >NC_005831.2-cand-21390-21469
  source 1..80: mol_type = other DNA
caatctcaagagtggtgttatagtttttaaaactttacagtacgatgttttgttttattgtagtaattcttcctcaggtg

SEQ ID NO: 14981 - DNA, 80 bp, synthetic construct
  misc_feature 1..80: note = Synthetic: >NC_006213.1-cand-4130-4209
  source 1..80: mol_type = other DNA
gtgttgcaaaagctattgcagtagcagctggacagcagtttgttaaagagactaccgatatggttaagtctaaaggagtt

SEQ ID NO: 14982 - DNA, 80 bp, synthetic construct
  misc_feature 1..80: note = Synthetic: >NC_006213.1-cand-4250-4329
  source 1..80: mol_type = other DNA
tatgtaaaactgtgcttaatgttgttggacctgatgcgagaacacagggtaaacaaagttatgtattgttagagcgtgtt

SEQ ID NO: 14983 - DNA, 80 bp, synthetic construct
  misc_feature 1..80: note = Synthetic: >NC_006213.1-cand-4290-4369
  source 1..80: mol_type = other DNA
aacacagggtaaacaaagttatgtattgttagagcgtgtttataaacatcttaacaactatgactgtgttgttacaactt

SEQ ID NO: 14984 - DNA, 80 bp, synthetic construct
  misc_feature 1..80: note = Synthetic: >NC_006213.1-cand-4370-4449
  source 1..80: mol_type = other DNA
tgatctcagctggtatatttagtgtgccttctgatgtgtctttaacatatctacttggtactgctaagaaacaagttgtt

SEQ ID NO: 14985 - DNA, 80 bp, synthetic construct
  misc_feature 1..80: note = Synthetic: >NC_006213.1-cand-4450-4529
  source 1..80: mol_type = other DNA
cttgttagcaataatcaagaggattttgatcttatttctaagtgtcagataactgctgttgagggcactaagaaattggc

SEQ ID NO: 14986 - DNA, 80 bp, synthetic construct
  misc_feature 1..80: note = Synthetic: >NC_006213.1-cand-4530-4609
  source 1..80: mol_type = other DNA
agcgcgtctttcttttaatgttggacgttccattgtttacgaaacagatgctaataagttgattttaatcaatgacgttg

SEQ ID NO: 14987 - DNA, 80 bp, synthetic construct
  misc_feature 1..80: note = Synthetic: >NC_006213.1-cand-4610-4689
  source 1..80: mol_type = other DNA
catttgtttcgacatttaatgttttacaggatgttttatccttaagacatgatatagcacttgatgatgatgcacgaacc

SEQ ID NO: 14988 - DNA, 80 bp, synthetic construct
  misc_feature 1..80: note = Synthetic: >NC_006213.1-cand-4690-4769
  source 1..80: mol_type = other DNA
ttcgttcagagcaatgttgatgttgtacctgagggttggcgtgttgtcaataagttttatcaaattaatggtgttagaac

SEQ ID NO: 14989 - DNA, 80 bp, synthetic construct
  misc_feature 1..80: note = Synthetic: >NC_006213.1-cand-4770-4849
  source 1..80: mol_type = other DNA
cgttaagtattttgagtgtactggaggcatagatatatgcagccaggataaagtttttggttatgtacagcagggtattt

SEQ ID NO: 14990 - DNA, 80 bp, synthetic construct
  misc_feature 1..80: note = Synthetic: >NC_006213.1-cand-4850-4929
  source 1..80: mol_type = other DNA
ttaataaggctactgttgctcaaattaaagccttgtttttggataaagtggacatcttgctaactgttgatggtgttaat

SEQ ID NO: 14991 - DNA, 80 bp, synthetic construct
  misc_feature 1..80: note = Synthetic: >NC_006213.1-cand-4930-5009
  source 1..80: mol_type = other DNA
ttcactaataggtttgtgcctgttggtgaaagttttggtaagagtctaggaaatgtgttttgtgatggagttaatgtcac

SEQ ID NO: 14992 - DNA, 80 bp, synthetic construct
  misc_feature 1..80: note = Synthetic: >NC_006213.1-cand-5010-5089
  source 1..80: mol_type = other DNA
gaagcataagtgtgatataaattataaaggtaaagtctttttccagtttgataatctttctagtgaagatttaaaggctg

SEQ ID NO: 14993 - DNA, 80 bp, synthetic construct
  misc_feature 1..80: note = Synthetic: >NC_006213.1-cand-5090-5169
  source 1..80: mol_type = other DNA
taagaagttcctttaattttgatcagaaggaattgcttgcctattacaacatgcttgttaattgttttaagtggcaggtt

SEQ ID NO: 14994 - DNA, 80 bp, synthetic construct
  misc_feature 1..80: note = Synthetic: >NC_006213.1-cand-5180-5259
  source 1..80: mol_type = other DNA
gtaagtatttcacttttaagcaagctaataacaattgttttgttaatgtttcttgcttaatgctccagagtttgcatctg

SEQ ID NO: 14995 - DNA, 80 bp, synthetic construct
  misc_feature 1..80: note = Synthetic: >NC_006213.1-cand-5260-5339
  source 1..80: mol_type = other DNA
acatttaaaattgttcaatggcaagaggcatggcttgaatttcgttctggccgccctgctagatttgtagctttggtttt

SEQ ID NO: 14996 - DNA, 80 bp, synthetic construct
  misc_feature 1..80: note = Synthetic: >NC_006213.1-cand-5340-5419
  source 1..80: mol_type = other DNA
ggccaaaggtgggtttaaatttggagatcctgctgattctagagatttcttgcgtgttgtgtttagtcaagttgatttga

SEQ ID NO: 14997 - DNA, 80 bp, synthetic construct
  misc_feature 1..80: note = Synthetic: >NC_007547.1-cand-2650-2729
  source 1..80: mol_type = other DNA
atatcagggtttatcaagattgattcttcaacagtactaccgaaagaagagaataacacaatgccactattacctgcaat

SEQ ID NO: 14998 - DNA, 80 bp, synthetic construct
  misc_feature 1..80: note = Synthetic: >NC_007547.1-cand-2730-2809
  source 1..80: mol_type = other DNA
tataaaacgtacattgagctatttcggtctgagaacacacgactatgatataaaaggatcctcatcgactgtgtcaaaaa

SEQ ID NO: 14999 - DNA, 80 bp, synthetic construct
  misc_feature 1..80: note = Synthetic: >NC_007547.1-cand-2810-2889
  source 1..80: mol_type = other DNA
taatcaaacagtattctgtatatactcctggaattgaagaactgtatgaaatagttaataaaagcgtagatactataaga

SEQ ID NO: 15000 - DNA, 80 bp, synthetic construct
  misc_feature 1..80: note = Synthetic: >NC_007547.1-cand-2890-2969
  source 1..80: mol_type = other DNA
ggttattttgcatcgtttaatgtaccaaaggctgatgttgatacctatattagtactcagatgtataaacatgacagatt

SEQ ID NO: 15001 - DNA, 80 bp, synthetic construct
  misc_feature 1..80: note = Synthetic: >NC_007547.1-cand-2970-3049
  source 1..80: mol_type = other DNA
taaaatactgcaagcttatatttacaatttattgtcagttaattatggaatgtaccaattggtggatctaaattcagcga

SEQ ID NO: 15002 - DNA, 80 bp, synthetic construct
  misc_feature 1..80: note = Synthetic: >NC_007547.1-cand-3050-3129
  source 1..80: mol_type = other DNA
gattctttgatcatgttattcatacaccaatggctaaaacaccaacagctgtttttatgatagatctagcattaagatta

SEQ ID NO: 15003 - DNA, 80 bp, synthetic construct
  misc_feature 1..80: note = Synthetic: >NC_007547.1-cand-3130-3209
  source 1..80: mol_type = other DNA
aagatcataaatcactgtatagaaaagggtgaaataataactgtgtcagtacacgctaataaaactgactatcttaagct

SEQ ID NO: 15004 - DNA, 80 bp, synthetic construct
  misc_feature 1..80: note = Synthetic: >NC_007547.1-cand-3210-3289
  source 1..80: mol_type = other DNA
gtggcgtatgctatggaatgttaaaacgatgaattcaccatattcgaagaattcaatgtttgatgagtaagagaagtgga

SEQ ID NO: 15005 - DNA, 80 bp, synthetic construct
  misc_feature 1..80: note = Synthetic: >NC_007548.1-cand-0-79
  source 1..80: mol_type = other DNA
ctatggaacctgagaactatctagcttggctagctagagatatagttcgaaatttatcatatacttctctcgtttataat

SEQ ID NO: 15006 - DNA, 80 bp, synthetic construct
  misc_feature 1..80: note = Synthetic: >NC_007548.1-cand-80-159
  source 1..80: mol_type = other DNA
aatccaaaagtcgcaattgtagagttactggataataaagaagcgttctttgcttatgaaaaagagcaaaaaacacctga

SEQ ID NO: 15007 - DNA, 80 bp, synthetic construct
  misc_feature 1..80: note = Synthetic: >NC_007548.1-cand-160-239
  source 1..80: mol_type = other DNA
agcactaattaattatattgactctatagttaaatcctctatatcagtagaagataaaattgaagcattgttgaaaattc

SEQ ID NO: 15008 - DNA, 80 bp, synthetic construct
  misc_feature 1..80: note = Synthetic: >NC_007548.1-cand-240-319
  source 1..80: mol_type = other DNA
gatatatttcggtatacgttgatgataaatctgacaaaagagatatagtattgcagcttttgaatcgtactattaaaaaa

SEQ ID NO: 15009 - DNA, 80 bp, synthetic construct
  misc_feature 1..80: note = Synthetic: >NC_007548.1-cand-330-409
  source 1..80: mol_type = other DNA
aaactaaaatatctgatgaattgaatgatgcaattaatgctataacgattgaatcgaaaaattggaagattcaaaattca

SEQ ID NO: 15010 - DNA, 80 bp, synthetic construct
  misc_feature 1..80: note = Synthetic: >NC_007548.1-cand-420-499
  source 1..80: mol_type = other DNA
aaccatatcattataaccagttagtgtcagactttataaagtataacgagtttgaggtacttgaaggtacggatccttta

SEQ ID NO: 15011 - DNA, 80 bp, synthetic construct
  misc_feature 1..80: note = Synthetic: >NC_007548.1-cand-510-589
  source 1..80: mol_type = other DNA
gtgatactttacaaggattgagtccaaactacaatcataggacacatactttgatttcatcaattatatatgcgacaagc

SEQ ID NO: 15012 - DNA, 80 bp, synthetic construct
  misc_feature 1..80: note = Synthetic: >NC_007548.1-cand-590-669
  source 1..80: mol_type = other DNA
gttaggtttgataattataatgatgaacaattacaagtattattatatttatttagtgtaattagaactaattatgtgaa

SEQ ID NO: 15013 - DNA, 80 bp, synthetic construct
  misc_feature 1..80: note = Synthetic: >NC_007551.1-cand-730-809
  source 1..80: mol_type = other DNA
tcaataacatttcacacgattgatacatcaacgaaatctagttatatcaaagaattagaatttaataaaaaaacaaaatt

SEQ ID NO: 15014 - DNA, 80 bp, synthetic construct
  misc_feature 1..80: note = Synthetic: >NC_007551.1-cand-810-889
  source 1..80: mol_type = other DNA
aaccatggctagtgtgctagtaaatcaaaggaaaaatatgaataatttttttaaaggtcttatcagacattatataacgt

SEQ ID NO: 15015 - DNA, 80 bp, synthetic construct
  misc_feature 1..80: note = Synthetic: >NC_007551.1-cand-890-969
  source 1..80: mol_type = other DNA
atggaattccaagaaaagtttattacattggcgcctatccatcttactggttagaattgattacatgggttccttttaat

SEQ ID NO: 15016 - DNA, 80 bp, synthetic construct
  misc_feature 1..80: note = Synthetic: >NC_007551.1-cand-970-1049
  source 1..80: mol_type = other DNA
atagtagcgtatgatccaaaatatcgccgtgtagataatgacaaaatcatttggtatgataggttatttgatagaaatga

SEQ ID NO: 15017 - DNA, 80 bp, synthetic construct
  misc_feature 1..80: note = Synthetic: >NC_007551.1-cand-1050-1129
  source 1..80: mol_type = other DNA
cattgaaacaattgaatctaaatcatatatttacattgatataagaactgacgtacggaatttagacacgacaaaaaaac

SEQ ID NO: 15018 - DNA, 80 bp, synthetic construct
  misc_feature 1..80: note = Synthetic: >NC_007551.1-cand-1130-1209
  source 1..80: mol_type = other DNA
agcgtatatttaaagaagaagatgatatgatagttgatatggctattaaactagcttctaaacaatgtacagttatgttt

SEQ ID NO: 15019 - DNA, 80 bp, synthetic construct
  misc_feature 1..80: note = Synthetic: >NC_007551.1-cand-1210-1289
  source 1..80: mol_type = other DNA
aaaagaaaaatttttccaggaaataatatgtcattcggtgatccacttttccatccgaaattaacacaattgggtcgtga

SEQ ID NO: 15020 - DNA, 80 bp, synthetic construct
  misc_feature 1..80: note = Synthetic: >NC_007551.1-cand-1300-1379
  source 1..80: mol_type = other DNA
tgcataacaactattgttagtccatctgtttacaaagagtcagagctgtattcattattattatctgcaagatcaaacaa

SEQ ID NO: 15021 - DNA, 80 bp, synthetic construct
  misc_feature 1..80: note = Synthetic: >NC_007551.1-cand-1380-1459
  source 1..80: mol_type = other DNA
tgtatcaaattatgtgtacggtggaagtaaatttgatcaattttcaattgtgaactgtaacagtaccgtggttgccttat

SEQ ID NO: 15022 - DNA, 80 bp, synthetic construct
  misc_feature 1..80: note = Synthetic: >NC_007551.1-cand-1440-1519
  source 1..80: mol_type = other DNA
cagtaccgtggttgccttatattcactttctaacactgttaacagtttaaaaactattgaacacgccattaaatataatc

SEQ ID NO: 15023 - DNA, 80 bp, synthetic construct
  misc_feature 1..80: note = Synthetic: >NC_007551.1-cand-1520-1599
  source 1..80: mol_type = other DNA
atataatcacttttccacatcgtaccgatagaggtgattggaggaatatagaagaattggataactcaagtccatttcaa

SEQ ID NO: 15024 - DNA, 80 bp, synthetic construct
  misc_feature 1..80: note = Synthetic: >NC_007551.1-cand-1610-1689
  source 1..80: mol_type = other DNA
gacagttagagtttgaagattggtctatagatccaaaaaattatgtaatgaagtttagatgtgaaatggtttctgaatca

SEQ ID NO: 15025 - DNA, 80 bp, synthetic construct
  misc_feature 1..80: note = Synthetic: >NC_007551.1-cand-1690-1769
  source 1..80: mol_type = other DNA
gtttttttgcaactaggacattcaagagctttaattcctgatttgtataatcatatgatttcacttagaatggagatgcc

SEQ ID NO: 15026 - DNA, 80 bp, synthetic construct
  misc_feature 1..80: note = Synthetic: >NC_007551.1-cand-1780-1859
  source 1..80: mol_type = other DNA
tctgatcgttttttttcacatattggcattagacaaccgtcaattttcaaaagagatagttatatgacatcacgactgtc

SEQ ID NO: 15027 - DNA, 80 bp, synthetic construct
  misc_feature 1..80: note = Synthetic: >NC_007551.1-cand-1850-1929
  source 1..80: mol_type = other DNA
cacgactgtcagcgtatatttcaagacagttgacacattcgattaacttatcagtgttaaagaggaatcattttgaagga

SEQ ID NO: 15028 - DNA, 80 bp, synthetic construct
  misc_feature 1..80: note = Synthetic: >NC_007551.1-cand-1930-2009
  source 1..80: mol_type = other DNA
tattcaggacatttgatagctattgaaacatcatttagttcattagtatttacaatgtcaccgtatagatggctgattag

SEQ ID NO: 15029 - DNA, 80 bp, synthetic construct
  misc_feature 1..80: note = Synthetic: >NC_011507.2-cand-1780-1859
  source 1..80: mol_type = other DNA
agcatcaggagagaaacaaacgaaagcagcaaattcaatagcaaatttggcactgattaaaacggttttgtcacgtattt

SEQ ID NO: 15030 - DNA, 80 bp, synthetic construct
  misc_feature 1..80: note = Synthetic: >NC_011507.2-cand-1830-1909
  source 1..80: mol_type = other DNA
cactgattaaaacggttttgtcacgtatttctaacaaacattcattcgcaacaaaaataataagagttgatggagatgat

SEQ ID NO: 15031 - DNA, 80 bp, synthetic construct
  misc_feature 1..80: note = Synthetic: >NC_011507.2-cand-1910-1989
  source 1..80: mol_type = other DNA
aactatgcggtgctacaatttaatacagaggtgactaagcagatgatccaagacgtatcgaacgatgtaagagaaactta

SEQ ID NO: 15032 - DNA, 80 bp, synthetic construct
  misc_feature 1..80: note = Synthetic: >NC_011507.2-cand-1990-2069
  source 1..80: mol_type = other DNA
tgcacgcatgaatgctaaagttaaagctctggtatccacagtaggaatagaaattgctaaaaggtacattgcaggtggaa

SEQ ID NO: 15033 - DNA, 80 bp, synthetic construct
  misc_feature 1..80: note = Synthetic: >NC_011507.2-cand-2070-2149
  source 1..80: mol_type = other DNA
aaatattttttcgagctggaataaatctacttaataatgaaaagagagggcagagtacgcagtgggatcaagcagcaatt

SEQ ID NO: 15034 - DNA, 80 bp, synthetic construct
  misc_feature 1..80: note = Synthetic: >NC_011507.2-cand-2150-2229
  source 1..80: mol_type = other DNA
ttatattcaaattatattgtaaatagacttagaggatttgaaactgatagggagtttattttaactaagataatgcagat

SEQ ID NO: 15035 - DNA, 80 bp, synthetic construct
  misc_feature 1..80: note = Synthetic: >NC_011507.2-cand-2230-2309
  source 1..80: mol_type = other DNA
gacgtcagtcgcaattactggatcattaagactatttccttctgaacgcgtattaactacgaattcaacatttaaagtat

SEQ ID NO: 15036 - DNA, 80 bp, synthetic construct
  misc_feature 1..80: note = Synthetic: >NC_011507.2-cand-2310-2389
  source 1..80: mol_type = other DNA
ttgactcggaggattttattatagagtacggaacgactgatgacgaagtatatatacaaagagcgttcatgtctttatca

SEQ ID NO: 15037 - DNA, 80 bp, synthetic construct
  misc_feature 1..80: note = Synthetic: >NC_011507.2-cand-2390-2469
  source 1..80: mol_type = other DNA
agtcagaaatcaggaatagccgatgagatagcggcatcatcaacatttaaaaattacgtcacgagactatctgaacagtt

SEQ ID NO: 15038 - DNA, 80 bp, synthetic construct
  misc_feature 1..80: note = Synthetic: >NC_011507.2-cand-2480-2559
  source 1..80: mol_type = other DNA
aagaataatatagtgtccagaggaatagctttgactgaaaaagcgaaattgaattcatacgctccaatatcgcttgagaa

SEQ ID NO: 15039 - DNA, 80 bp, synthetic construct
  misc_feature 1..80: note = Synthetic: >NC_011507.2-cand-2560-2639
  source 1..80: mol_type = other DNA
aagacgtgcacagatatcagctttattgactatgttgcagaaaccggtcactttcaaatcaagtaaaataacaataaatg

SEQ ID NO: 15040 - DNA, 80 bp, synthetic construct
  misc_feature 1..80: note = Synthetic: >NC_011507.2-cand-2640-2719
  source 1..80: mol_type = other DNA
acatactcagagatataaaaccattttttacagtaagtgatgcacacttacctatacaataccaaaaatttatgccaact

SEQ ID NO: 15041 - DNA, 80 bp, synthetic construct
  misc_feature 1..80: note = Synthetic: >NC_011507.2-cand-2720-2799
  source 1..80: mol_type = other DNA
ttgccagataacgtacagtatataattcaatgtataggatccagaacttatcaaattgaagatgacggttcgaagtcagc

SEQ ID NO: 15042 - DNA, 80 bp, synthetic construct
  misc_feature 1..80: note = Synthetic: >NC_011507.2-cand-2800-2879
  source 1..80: mol_type = other DNA
catatctagactaatatcaaagtattcagtttataagccatcaattgaagaattgtataaagtgatttcattgcatgaaa

SEQ ID NO: 15043 - DNA, 80 bp, synthetic construct
  misc_feature 1..80: note = Synthetic: >NC_011507.2-cand-2880-2959
  source 1..80: mol_type = other DNA
acgaaatacaattatatctgatttcattaggaataccgaaaatagacgctgacacgtatgttggatcaaagatttattct

SEQ ID NO: 15044 - DNA, 80 bp, synthetic construct
  misc_feature 1..80: note = Synthetic: >NC_011507.2-cand-2960-3039
  source 1..80: mol_type = other DNA
caagataagtatagaatactagaatcatacgtgtacaatttattgtccattaattatggatgctatcaattatttgattt

SEQ ID NO: 15045 - DNA, 80 bp, synthetic construct
  misc_feature 1..80: note = Synthetic: >NC_011510.2-cand-1210-1289
  source 1..80: mol_type = other DNA
ttctttacattcagctggtgtaacactatctactcaatttacagatttcgtatcattaaattcattaagatttagattta

SEQ ID NO: 15046 - DNA, 80 bp, synthetic construct
  misc_feature 1..80: note = Synthetic: >NC_011510.2-cand-1280-1359
  source 1..80: mol_type = other DNA
tttagatttagactagctgtcgaagaaccacactttaaactgactagaactagattagatagattgtatggtctgcctgc

SEQ ID NO: 15047 - DNA, 80 bp, synthetic construct
  misc_feature 1..80: note = Synthetic: >NC_011510.2-cand-1350-1429
  source 1..80: mol_type = other DNA
gtctgcctgctgcagatccaaataatggtaaagaatattatgaaattgctggacgattttcacttatatcattagtgcca

SEQ ID NO: 15048 - DNA, 80 bp, synthetic construct
  misc_feature 1..80: note = Synthetic: >NC_011510.2-cand-1440-1519
  source 1..80: mol_type = other DNA
actatcagactcctatagcaaactcagttactgtacgacaagatttagaaaggcagttaggagaactaagagaagagttt

SEQ ID NO: 15049 - DNA, 80 bp, synthetic construct
  misc_feature 1..80: note = Synthetic: >NC_011510.2-cand-1520-1599
  source 1..80: mol_type = other DNA
aacgctttgtctcaagaaattgcaatgtcgcagttaatcgatttagcgcttctaccattagatatgttctcaatgttttc

SEQ ID NO: 15050 - DNA, 80 bp, synthetic construct
  misc_feature 1..80: note = Synthetic: >NC_011510.2-cand-1600-1679
  source 1..80: mol_type = other DNA
tggcattaaaagtactattgatgctgcaaaatcaatggctactaatgttatgaaaaaattcaaaaagtcaggattagcga

SEQ ID NO: 15051 - DNA, 80 bp, synthetic construct
  misc_feature 1..80: note = Synthetic: >NC_011510.2-cand-1680-1759
  source 1..80: mol_type = other DNA
attcagtttcaacactgacagattctttatcagacgcagcatcatcaatatcaagaggttcatctatacgttcgattgga

SEQ ID NO: 15052 - DNA, 80 bp, synthetic construct
  misc_feature 1..80: note = Synthetic: >NC_011510.2-cand-1760-1839
  source 1..80: mol_type = other DNA
tcttcagcatcagcatggacggatgtatcaacacaaataactgatatatcgtcatcagtaagttcagtttcgacacaaac

SEQ ID NO: 15053 - DNA, 80 bp, synthetic construct
  misc_feature 1..80: note = Synthetic: >NC_011510.2-cand-1840-1919
  source 1..80: mol_type = other DNA
gtcaactatcagtagaagattgagactaaaggaaatggcaacacaaactgagggtatgaattttgatgatatatcagcgg

SEQ ID NO: 15054 - DNA, 80 bp, synthetic construct
  misc_feature 1..80: note = Synthetic: >NC_011510.2-cand-1920-1999
  source 1..80: mol_type = other DNA
ctgttttgaagactaagatagataaatcgactcaaatatcaccaaacacaatacctgacattgttactgaagcatcggaa

SEQ ID NO: 15055 - DNA, 80 bp, synthetic construct
  misc_feature 1..80: note = Synthetic: >NC_011510.2-cand-2010-2089
  source 1..80: mol_type = other DNA
caaatagggcttaccgtgttataaacaacgatgatgtgtttgaagctggaattgatggaaaattttttgcttataaagtg

SEQ ID NO: 15056 - DNA, 80 bp, synthetic construct
  misc_feature 1..80: note = Synthetic: >NC_011510.2-cand-2090-2169
  source 1..80: mol_type = other DNA
gatacatttgaggaaataccatttgatgtacaaaaattcgctgacttagttacagattctccagtaatatccgctataat

SEQ ID NO: 15057 - DNA, 80 bp, synthetic construct
  misc_feature 1..80: note = Synthetic: >NC_011510.2-cand-2180-2259
  source 1..80: mol_type = other DNA
acacttaaaaatttgaacgataattacggcattactaagcaacaagcatttaatcttttaagatctgacccaagagtttt

SEQ ID NO: 15058 - DNA, 80 bp, synthetic construct
  misc_feature 1..80: note = Synthetic: >NC_011510.2-cand-2270-2349
  source 1..80: mol_type = other DNA
attaatcaggacaatcctataattagaaatagaattgaacaactgattatgcaatgcaggttgtgagtaatttctagagg

SEQ ID NO: 15059 - DNA, 80 bp, synthetic construct
  misc_feature 1..80: note = Synthetic: >NC_012532.1-cand-0-79
  source 1..80: mol_type = other DNA
gttgatctgtgtgagtcagactgcgacagttcgagtctgaagcgagagctaacaacagtatcaacaggtttaatttggat

SEQ ID NO: 15060 - DNA, 80 bp, synthetic construct
  misc_feature 1..80: note = Synthetic: >NC_012532.1-cand-80-159
  source 1..80: mol_type = other DNA
ttggaaacgagagtttctggtcatgaaaaaccccaaagaagaaatccggaggatccggattgtcaatatgctaaaacgcg

SEQ ID NO: 15061 - DNA, 80 bp, synthetic construct
  misc_feature 1..80: note = Synthetic: >NC_012532.1-cand-6760-6839
  source 1..80: mol_type = other DNA
ttgcatgtgtcctcattgttgtgtttttattactggtggtgctcatacccgagccagagaagcaaagatctccccaagat

SEQ ID NO: 15062 - DNA, 80 bp, synthetic construct
  misc_feature 1..80: note = Synthetic: >NC_012532.1-cand-6840-6919
  source 1..80: mol_type = other DNA
aaccagatggcaattatcatcatggtggcagtgggccttctaggtttgataactgcaaacgaacttggatggctggaaag

SEQ ID NO: 15063 - DNA, 80 bp, synthetic construct
  misc_feature 1..80: note = Synthetic: >NC_012532.1-cand-6920-6999
  source 1..80: mol_type = other DNA
aacaaaaaatgacatagctcatctaatgggaaggagagaagaaggagcaaccatgggattctcaatggacattgatctgc

SEQ ID NO: 15064 - DNA, 80 bp, synthetic construct
  misc_feature 1..80: note = Synthetic: >NC_012532.1-cand-7020-7099
  source 1..80: mol_type = other DNA
atctatgccgcattgacaactctcatcaccccagctgtccaacatgcggtaaccacttcatacaacaactactccttaat

SEQ ID NO: 15065 - DNA, 80 bp, synthetic construct
  misc_feature 1..80: note = Synthetic: >NC_012532.1-cand-7080-7159
  source 1..80: mol_type = other DNA
tacaacaactactccttaatggcgatggccacacaagctggagtgctgtttggcatgggcaaagggatgccatttatgca

SEQ ID NO: 15066 - DNA, 80 bp, synthetic construct
  misc_feature 1..80: note = Synthetic: >NC_012532.1-cand-7190-7269
  source 1..80: mol_type = other DNA
gggttgctattcacaattaacacccctgactctgatagtagctatcattctgcttgtggcgcactacatgtacttgatcc

SEQ ID NO: 15067 - DNA, 80 bp, synthetic construct
  misc_feature 1..80: note = Synthetic: >NC_012532.1-cand-7270-7349
  source 1..80: mol_type = other DNA
caggcctacaagcggcagcagcgcgtgctgcccagaaaaggacagcagctggcatcatgaagaatcccgttgtggatgga

SEQ ID NO: 15068 - DNA, 80 bp, synthetic construct
  misc_feature 1..80: note = Synthetic: >NC_012532.1-cand-7350-7429
  source 1..80: mol_type = other DNA
atagtggtaactgacattgacacaatgacaatagacccccaggtggagaagaagatgggacaagtgttactcatagcagt

SEQ ID NO: 15069 - DNA, 80 bp, synthetic construct
  misc_feature 1..80: note = Synthetic: >NC_012532.1-cand-7480-7559
  source 1..80: mol_type = other DNA
ctggagctctgatcacagcagcgacctccaccttgtgggaaggctctccaaacaaatactggaactcctctacagccacc

SEQ ID NO: 15070 - DNA, 80 bp, synthetic construct
  misc_feature 1..80: note = Synthetic: >NC_012532.1-cand-7510-7589
  source 1..80: mol_type = other DNA
ccttgtgggaaggctctccaaacaaatactggaactcctctacagccacctcactgtgcaacatcttcagaggaagctat

SEQ ID NO: 15071 - DNA, 80 bp, synthetic construct
  misc_feature 1..80: note = Synthetic: >NC_012532.1-cand-7590-7669
  source 1..80: mol_type = other DNA
ctggcaggagcttcccttatctatacagtgacgagaaacgctggcctggttaagagacgtggaggtgggacgggagagac

SEQ ID NO: 15072 - DNA, 80 bp, synthetic construct
  misc_feature 1..80: note = Synthetic: >NC_012532.1-cand-7670-7749
  source 1..80: mol_type = other DNA
tctgggagagaagtggaaagctcgtctgaatcagatgtcggccctggagttctactcttataaaaagtcaggtatcactg

SEQ ID NO: 15073 - DNA, 80 bp, synthetic construct
  misc_feature 1..80: note = Synthetic: >NC_012532.1-cand-7740-7819
  source 1..80: mol_type = other DNA
ggtatcactgaagtgtgtagagaggaggctcgccgtgccctcaaggatggagtggccacaggaggacatgccgtatcccg

SEQ ID NO: 15074 - DNA, 80 bp, synthetic construct
  misc_feature 1..80: note = Synthetic: >NC_012532.1-cand-7820-7899
  source 1..80: mol_type = other DNA
gggaagtgcaaagatcagatggttggaggagagaggatatctgcagccctatgggaaggttgttgacctcggatgtggca

SEQ ID NO: 15075 - DNA, 80 bp, synthetic construct
  misc_feature 1..80: note = Synthetic: >NC_012532.1-cand-7910-7989
  source 1..80: mol_type = other DNA
gagctattatgccgccaccatccgcaaagtgcaggaggtgagaggatacacaaagggaggtcccggtcatgaagaaccca

SEQ ID NO: 15076 - DNA, 80 bp, synthetic construct
  misc_feature 1..80: note = Synthetic: >NC_012532.1-cand-7990-8069
  source 1..80: mol_type = other DNA
tgctggtgcaaagctatgggtggaacatagttcgtctcaagagtggagtggacgtcttccacatggcggctgagccgtgt

SEQ ID NO: 15077 - DNA, 80 bp, synthetic construct
  misc_feature 1..80: note = Synthetic: >NC_021928.1-cand-13060-13139
  source 1..80: mol_type = other DNA
caactatattccttaaacggcatgcccagcagacactgatggaatcaagtgtgaatccgctccttaatgggatattcaat

SEQ ID NO: 15078 - DNA, 80 bp, synthetic construct
  misc_feature 1..80: note = Synthetic: >NC_021928.1-cand-13140-13219
  source 1..80: mol_type = other DNA
ccaaatgcaaaagcggaagagaataatttagctcaatttctgctcgatagagatatagtgttgccaagggtagctcatgt

SEQ ID NO: 15079 - DNA, 80 bp, synthetic construct
  misc_feature 1..80: note = Synthetic: >NC_021928.1-cand-13220-13299
  source 1..80: mol_type = other DNA
tatactagcacaaacaggttgcggaagaaggaagcagattcaaggatatctagattccacacggactatagtaaaattag

SEQ ID NO: 15080 - DNA, 80 bp, synthetic construct
  misc_feature 1..80: note = Synthetic: >NC_021928.1-cand-13300-13379
  source 1..80: mol_type = other DNA
ctttagatataaaacctttatctttcagaaagacaaaccaagtattagattacaatttaaattacttatcttatcaatta

SEQ ID NO: 15081 - DNA, 80 bp, synthetic construct
  misc_feature 1..80: note = Synthetic: >NC_021928.1-cand-13380-13459
  source 1..80: mol_type = other DNA
gatatcatactcaaacccaaaacagggaaagattcttggagcttagataatattaatgattgtagtatagatctagcaag

SEQ ID NO: 15082 - DNA, 80 bp, synthetic construct
  misc_feature 1..80: note = Synthetic: >NC_021928.1-cand-13420-13499
  source 1..80: mol_type = other DNA
gcttagataatattaatgattgtagtatagatctagcaaggaatttaagaaagttatcatgggctcctttgttgcatggt

SEQ ID NO: 15083 - DNA, 80 bp, synthetic construct
  misc_feature 1..80: note = Synthetic: >NC_021928.1-cand-13520-13599
  source 1..80: mol_type = other DNA
aactcctgatcccatagaattgctagatggagtcttgttgacaaataagtctctgtgtcatcaatgtgcatcaggaaatg

SEQ ID NO: 15084 - DNA, 80 bp, synthetic construct
  misc_feature 1..80: note = Synthetic: >NC_021928.1-cand-13600-13679
  source 1..80: mol_type = other DNA
ataaatttacttggctttatttaccgggtggtattcagatagatcttgagccaagcaaaaacccacctatgagagtccca

SEQ ID NO: 15085 - DNA, 80 bp, synthetic construct
  misc_feature 1..80: note = Synthetic: >NC_021928.1-cand-13680-13759
  source 1..80: mol_type = other DNA
tatatcggttcaaagacagatgaacgaagaattgcatcactagcacaaataccaggtgcttctcaaaatctaaaatcagt

SEQ ID NO: 15086 - DNA, 80 bp, synthetic construct
  misc_feature 1..80: note = Synthetic: >NC_021928.1-cand-13760-13839
  source 1..80: mol_type = other DNA
tttaaggttgaccggtgtatatatttgggcttttggtgataatgaacagaattggcaagatgcgtacgaactttctaaga

SEQ ID NO: 15087 - DNA, 80 bp, synthetic construct
  misc_feature 1..80: note = Synthetic: >NC_021928.1-cand-13840-13919
  source 1..80: mol_type = other DNA
cacgcgtgaatataactttagatcagctcagagtactaactcctctacctacttcagcaaatttgacccatcgattagat

SEQ ID NO: 15088 - DNA, 80 bp, synthetic construct
  misc_feature 1..80: note = Synthetic: >NC_021928.1-cand-13920-13999
  source 1..80: mol_type = other DNA
gatggagtaactcagatgaaatttacacctgcaagtctatacactttttcaaattatattcatatttctaatgatcgtca

SEQ ID NO: 15089 - DNA, 80 bp, synthetic construct
  misc_feature 1..80: note = Synthetic: >NC_021928.1-cand-14000-14079
  source 1..80: mol_type = other DNA
ggtgctacaaattgatgaatgcaatgtagattcaaatctaatctaccaacagattatgataacaggattaggcattattg

SEQ ID NO: 15090 - DNA, 80 bp, synthetic construct
  misc_feature 1..80: note = Synthetic: >NC_021928.1-cand-14080-14159
  source 1..80: mol_type = other DNA
agacatggaatgcattgcctattaagcatactgtacatgaggtaactttacatctacacactgcagcttcatgttgtata

SEQ ID NO: 15091 - DNA, 80 bp, synthetic construct
  misc_feature 1..80: note = Synthetic: >NC_021928.1-cand-14160-14239
  source 1..80: mol_type = other DNA
aggccagttgattcttgccttgtaaataattccaggcaagatctgccttacttagaagataccactatcaacaaatttat

SEQ ID NO: 15092 - DNA, 80 bp, synthetic construct
  misc_feature 1..80: note = Synthetic: >NC_021928.1-cand-14240-14319
  source 1..80: mol_type = other DNA
ttatgacgatcaacccatcccagaggagaaatcaagtttaatagaacaatttatagttaatgtcaatgtaggtgattttg

SEQ ID NO: 15093 - DNA, 80 bp, synthetic construct
  misc_feature 1..80: note = Synthetic: >NC_025114.1-cand-3680-3759
  source 1..80: mol_type = other DNA
cgaggagtatgccatcggcatgactcctcacggcgacgagtccattctggcttactccagccgggatggtactcgttacc

SEQ ID NO: 15094 - DNA, 80 bp, synthetic construct
  misc_feature 1..80: note = Synthetic: >NC_025114.1-cand-3760-3839
  source 1..80: mol_type = other DNA
accccactgcccccgccttctttctctgtgccgccgcctgtgttggcacagtcttcccatattccatcgctcagtcacac

SEQ ID NO: 15095 - DNA, 80 bp, synthetic construct
  misc_feature 1..80: note = Synthetic: >NC_025114.1-cand-3830-3909
  source 1..80: mol_type = other DNA
tcagtcacacctctggctcagcgatctcactggagtccctctccgttcctgtcccccccttactctatttctttctgctg

SEQ ID NO: 15096 - DNA, 80 bp, synthetic construct
  misc_feature 1..80: note = Synthetic: >NC_025114.1-cand-3920-3999
  source 1..80: mol_type = other DNA
gtgcgccggcgcgcaaacactgatagccgtcgcacagggtggcgctcttccccctgcccctcctgccccttccactgctc

SEQ ID NO: 15097 - DNA, 80 bp, synthetic construct
  misc_feature 1..80: note = Synthetic: >NC_025114.1-cand-4000-4079
  source 1..80: mol_type = other DNA
ttgccagacgccagggcctgggtgacctcccggatgcggcgaagaacctctccgccgcactcgagaacgttgcccgggta

SEQ ID NO: 15098 - DNA, 80 bp, synthetic construct
  misc_feature 1..80: note = Synthetic: >NC_025114.1-cand-4080-4159
  source 1..80: mol_type = other DNA
gctggtgatgctgacatcgctacatcttcccaagctatcgcttcttccatcagctctctctctaactccattgatggtgc

SEQ ID NO: 15099 - DNA, 80 bp, synthetic construct
  misc_feature 1..80: note = Synthetic: >NC_025114.1-cand-4160-4239
  source 1..80: mol_type = other DNA
taccaccttcatgcagaacttcttctctggccttgctcccaagactcccgtctcgcccctgcaacacctgttctctaagc

SEQ ID NO: 15100 - DNA, 80 bp, synthetic construct
  misc_feature 1..80: note = Synthetic: >NC_025114.1-cand-4240-4319
  source 1..80: mol_type = other DNA
tgatcaaatgggtgaccaaaatcgttggttcactcataatcatctgcaacaaccccaccccttctgctctcattggtgtt

SEQ ID NO: 15101 - DNA, 80 bp, synthetic construct
  misc_feature 1..80: note = Synthetic: >NC_025114.1-cand-4320-4399
  source 1..80: mol_type = other DNA
tctctcatgctgtgtggtgacctagctgaagacctcacctctttcttctcctctcttggtaatccactggccgccgtctt

SEQ ID NO: 15102 - DNA, 80 bp, synthetic construct
  misc_feature 1..80: note = Synthetic: >NC_025114.1-cand-4400-4479
  source 1..80: mol_type = other DNA
ctaccggtgcgccagagctcttggtctctcccccaccccccagtcggccgctcaagccgctggtggacgccagggtgtcc

SEQ ID NO: 15103 - DNA, 80 bp, synthetic construct
  misc_feature 1..80: note = Synthetic: >NC_025114.1-cand-4480-4559
  source 1..80: mol_type = other DNA
gtgactacaacgacatcatgaacgccctgcgcaacaccgactggttctttgagaaggtcatgggccatgtcaagaatctt

SEQ ID NO: 15104 - DNA, 80 bp, synthetic construct
  misc_feature 1..80: note = Synthetic: >NC_025114.1-cand-4580-4659
  source 1..80: mol_type = other DNA
cgtcaaagacgaccctaggaccaagctcgcccaacagcacgataagattcttgagctctacactgattctgtgactgcct

SEQ ID NO: 15105 - DNA, 80 bp, synthetic construct
  misc_feature 1..80: note = Synthetic: >NC_025114.1-cand-4650-4729
  source 1..80: mol_type = other DNA
gtgactgcctcttccacccccgcttctgagctctctgccgacgccattcgctccaatctcgagctggctaagcagctcct

SEQ ID NO: 15106 - DNA, 80 bp, synthetic construct
  misc_feature 1..80: note = Synthetic: >NC_025114.1-cand-4730-4809
  source 1..80: mol_type = other DNA
cactcttgcccacggtgctaactctgtcacccacatcaacctctgctcccgtgctattaccaactattctactgcccttt

SEQ ID NO: 15107 - DNA, 80 bp, synthetic construct
  misc_feature 1..80: note = Synthetic: >NC_025114.1-cand-4840-4919
  source 1..80: mol_type = other DNA
cgcggccagagccactggtcgtgtacctctatggcccaccaggcactggaaaatccctcctggcttccctcctcgcatcc

SEQ ID NO: 15108 - DNA, 80 bp, synthetic construct
  misc_feature 1..80: note = Synthetic: >NC_025114.1-cand-4890-4969
  source 1..80: mol_type = other DNA
aaatccctcctggcttccctcctcgcatccactttagcccaggccctttctggtgatcctaacaactactactccccttc

SEQ ID NO: 15109 - DNA, 80 bp, synthetic construct
  misc_feature 1..80: note = Synthetic: >NC_026423.1-cand-1480-1559
  source 1..80: mol_type = other DNA
tttctaccgctatggattcgtagctaacttcagtatggagttgcccagttttggagtgtccgggattaatgagtcagctg

SEQ ID NO: 15110 - DNA, 80 bp, synthetic construct
  misc_feature 1..80: note = Synthetic: >NC_026423.1-cand-1560-1639
  source 1..80: mol_type = other DNA
acatgagcgttggtgttacagtaataaagaacaatatgataaacaacgatcttggaccagcaacagcccaaatggccctt

SEQ ID NO: 15111 - DNA, 80 bp, synthetic construct
  misc_feature 1..80: note = Synthetic: >NC_026423.1-cand-1600-1679
  source 1..80: mol_type = other DNA
aaacaacgatcttggaccagcaacagcccaaatggcccttcagctatttatcaaagactacagatacacataccgatgtc

SEQ ID NO: 15112 - DNA, 80 bp, synthetic construct
  misc_feature 1..80: note = Synthetic: >NC_026423.1-cand-1720-1799
  source 1..80: mol_type = other DNA
gctgaagaagctgtgggagcagacccgttcgaaggcaggactgttggtttcagatggagggccaaacctgtacaatatcc

SEQ ID NO: 15113 - DNA, 80 bp, synthetic construct
  misc_feature 1..80: note = Synthetic: >NC_026423.1-cand-1810-1889
  source 1..80: mol_type = other DNA
cattccagaggtctgcttgaaatgggaattgatggatgaagactaccaaggcaggttgtgtaatcctatgaacccgtttg

SEQ ID NO: 15114 - DNA, 80 bp, synthetic construct
  misc_feature 1..80: note = Synthetic: >NC_026423.1-cand-1890-1969
  source 1..80: mol_type = other DNA
tcagtcataaggaaattgattcagtcaacaatgctgtggtgatgccagctcatggcccagccaaaagcatggagtatgat

SEQ ID NO: 15115 - DNA, 80 bp, synthetic construct
  misc_feature 1..80: note = Synthetic: >NC_026423.1-cand-1950-2029
  source 1..80: mol_type = other DNA
ccaaaagcatggagtatgatgccgttgcaaccacacattcatggattcctaagaggaatcgctccattctcaacaccagc

SEQ ID NO: 15116 - DNA, 80 bp, synthetic construct
  misc_feature 1..80: note = Synthetic: >NC_026423.1-cand-2060-2139
  source 1..80: mol_type = other DNA
taccagaagtgctgcaacctattcgaaaagttcttccccagcagttcgtacaggaggccagttggaatttccagcatggt

SEQ ID NO: 15117 - DNA, 80 bp, synthetic construct
  misc_feature 1..80: note = Synthetic: >NC_026424.1-cand-70-149
  source 1..80: mol_type = other DNA
ggaagatccgaaaatcgaaacaaacaaattcgcatcaatatgcacacacttagaagtctgcttcatgtactctgatttcc

SEQ ID NO: 15118 - DNA, 80 bp, synthetic construct
  misc_feature 1..80: note = Synthetic: >NC_026424.1-cand-90-169
  source 1..80: mol_type = other DNA
caaacaaattcgcatcaatatgcacacacttagaagtctgcttcatgtactctgatttccacttcatcgacgaacgaggc

SEQ ID NO: 15119 - DNA, 80 bp, synthetic construct
  misc_feature 1..80: note = Synthetic: >NC_026424.1-cand-170-249
  source 1..80: mol_type = other DNA
gaatcaactataatagaatctggcgatccaaatgcgctgctgaaacaccgatttgaaataatcgaagggagagaccgaac

SEQ ID NO: 15120 - DNA, 80 bp, synthetic construct
  misc_feature 1..80: note = Synthetic: >NC_026424.1-cand-250-329
  source 1..80: mol_type = other DNA
aatggcctggacagtggtgaatagtatctgcaacaccacaggagccgaaaaacccaaatttctcccggatctgtatgact

SEQ ID NO: 15121 - DNA, 80 bp, synthetic construct
  misc_feature 1..80: note = Synthetic: >NC_026424.1-cand-410-489
  source 1..80: mol_type = other DNA
aaatccgagaagacacacatccatattttttcattcactggagaagagatggccaccaaagcagattacactcttgacga

SEQ ID NO: 15122 - DNA, 80 bp, synthetic construct
  misc_feature 1..80: note = Synthetic: >NC_026424.1-cand-470-549
  source 1..80: mol_type = other DNA
gcagattacactcttgacgaagaaagcagggcaagaatcaaaaccaggctgttcaccataaggcaggaaatggccagcag

SEQ ID NO: 15123 - DNA, 80 bp, synthetic construct
  misc_feature 1..80: note = Synthetic: >NC_026424.1-cand-570-649
  source 1..80: mol_type = other DNA
gtcagtctgaaagaggcgaagaaacaattgaagaaagatttgaaatcacaggaaccatgcgcaggcttgccgaccaaagt

SEQ ID NO: 15124 - DNA, 80 bp, synthetic construct
  misc_feature 1..80: note = Synthetic: >NC_026424.1-cand-730-809
  source 1..80: mol_type = other DNA
gctttctcagatgtcaaaagaagtgaacgccagaattgagccatttctaagaacaacaccacgccctctcagattgccta

SEQ ID NO: 15125 - DNA, 80 bp, synthetic construct
  misc_feature 1..80: note = Synthetic: >NC_038312.1-cand-3240-3319
  source 1..80: mol_type = other DNA
ttaccaccttatgactccagatgatcacctaaacttagtagccccttacccaaatagagatttagcagtagttgctactg

SEQ ID NO: 15126 - DNA, 80 bp, synthetic construct
  misc_feature 1..80: note = Synthetic: >NC_038312.1-cand-3320-3399
  source 1..80: mol_type = other DNA
gagcacatggagcagaaactatcccccactgcaactgcacatccggtgtttactactccagatattacaggaagttctat

SEQ ID NO: 15127 - DNA, 80 bp, synthetic construct
  misc_feature 1..80: note = Synthetic: >NC_038312.1-cand-3400-3479
  source 1..80: mol_type = other DNA
cccatcatttgtgagagacccactaacatctggattgagggtagctcgtactacccaagtagataccaagctggagtaat

SEQ ID NO: 15128 - DNA, 80 bp, synthetic construct
  misc_feature 1..80: note = Synthetic: >NC_038312.1-cand-3480-3559
  source 1..80: mol_type = other DNA
gaaaggtgttggaccagcagaaccaggagactgtggtgggatacttagatgtatacatggccccatcggattgttaacag

SEQ ID NO: 15129 - DNA, 80 bp, synthetic construct
  misc_feature 1..80: note = Synthetic: >NC_038312.1-cand-3570-3649
  source 1..80: mol_type = other DNA
cggttatgtctgttttgcagacataagacaattggatttcattgctgatgagcagggcctaggtgattacattaccagtt

SEQ ID NO: 15130 - DNA, 80 bp, synthetic construct
  misc_feature 1..80: note = Synthetic: >NC_038312.1-cand-3650-3729
  source 1..80: mol_type = other DNA
tagggagagcatttggcactggttttactgatcaaatctcagcaaaggtttgtgaacttcaggatgttgcaaaagatttt

SEQ ID NO: 15131 - DNA, 80 bp, synthetic construct
  misc_feature 1..80: note = Synthetic: >NC_038312.1-cand-3730-3809
  source 1..80: mol_type = other DNA
ctaacaacaaaggtattatccaaggtagtaaaaatgatttcagccctagtcatcatctgtagaaaccatgatgatctagt

SEQ ID NO: 15132 - DNA, 80 bp, synthetic construct
  misc_feature 1..80: note = Synthetic: >NC_038312.1-cand-3810-3889
  source 1..80: mol_type = other DNA
tactgttactgctaccttagccctactaggatgtgatgggtctccctggaggttcctcaaaatgtacatatcaaaacatt

SEQ ID NO: 15133 - DNA, 80 bp, synthetic construct
  misc_feature 1..80: note = Synthetic: >NC_038312.1-cand-3890-3969
  source 1..80: mol_type = other DNA
ttcaagtaccttacattgaaagacaagcaaatgatggctggttcagaaaatttaatgatgcttgcaacgctgcaaaggga

SEQ ID NO: 15134 - DNA, 80 bp, synthetic construct
  misc_feature 1..80: note = Synthetic: >NC_038312.1-cand-3970-4049
  source 1..80: mol_type = other DNA
ttggaatggattgctaataaaatttcaaaactcatagaatggatcaaaaacaaggttctgccccaagccagggaaaagct

SEQ ID NO: 15135 - DNA, 80 bp, synthetic construct
  misc_feature 1..80: note = Synthetic: >NC_038312.1-cand-4050-4129
  source 1..80: mol_type = other DNA
tgagttttgtagcaaactaaagcaactagacatattagagagacaaatagcatccatacatgactcgaatcccactcaag

SEQ ID NO: 15136 - DNA, 80 bp, synthetic construct
  misc_feature 1..80: note = Synthetic: >NC_038312.1-cand-4130-4209
  source 1..80: mol_type = other DNA
agaaaagagagcagctatttaacaatgttttgtggttagaacaaatgtcacaaaaattctcacccttatatgcctcagaa

SEQ ID NO: 15137 - DNA, 80 bp, synthetic construct
  misc_feature 1..80: note = Synthetic: >NC_038312.1-cand-4210-4289
  source 1..80: mol_type = other DNA
gcaaagagaatcagggacctcaaaaacaagatcactaattacatgcagtttaagagtaagcaaagaactgagccagtgtg

SEQ ID NO: 15138 - DNA, 80 bp, synthetic construct
  misc_feature 1..80: note = Synthetic: >NC_038312.1-cand-4290-4369
  source 1..80: mol_type = other DNA
tgttttaatacacggcacaccaggttctggcaaatcactaactacatccattgtgggccgcgcattggcagaacatttta

SEQ ID NO: 15139 - DNA, 80 bp, synthetic construct
  misc_feature 1..80: note = Synthetic: >NC_038312.1-cand-4370-4449
  source 1..80: mol_type = other DNA
attcatctgtttattctttacctcctgatccaaaacattttgatggttaccagcaacaagaggtggttattatggatgac

SEQ ID NO: 15140 - DNA, 80 bp, synthetic construct
  misc_feature 1..80: note = Synthetic: >NC_038312.1-cand-4450-4529
  source 1..80: mol_type = other DNA
ttgaaccaaaacccagacggacaggatattagtatgttttgtcaaatggtctcatcagtagatttcttaccacccatggc

SEQ ID NO: 15141 - DNA, 80 bp, synthetic construct
  misc_feature 1..80: note = Synthetic: >U31794.1-cand-520-599
  source 1..80: mol_type = other DNA
tgttggagacatacgagtagacaagctacagaatctacagtataaccatgcatggtaaagtaccaacgttgcaagaggtt

SEQ ID NO: 15142 - DNA, 80 bp, synthetic construct
  misc_feature 1..80: note = Synthetic: >U31794.1-cand-680-759
  source 1..80: mol_type = other DNA
tgaaatagaccatttgctggagcggccacagcaagctagacaagctgaacaacataagtgttacctaattcacgtacctt

SEQ ID NO: 15143 - DNA, 80 bp, synthetic construct
  misc_feature 1..80: note = Synthetic: >U31794.1-cand-760-839
  source 1..80: mol_type = other DNA
gttgtaagtgtgagttggtggtgcagttggacattcagagtaccaaagaggagctacgtgtggtacaacagctgcttatg

SEQ ID NO: 15144 - DNA, 80 bp, synthetic construct
  misc_feature 1..80: note = Synthetic: >U31794.1-cand-830-909
  source 1..80: mol_type = other DNA
gctgcttatgggtgcgttaacagtaacgtgcccactctgcgcatcatctaaataactgcaatggcatcacctgaaggtac

SEQ ID NO: 15145 - DNA, 80 bp, synthetic construct
  misc_feature 1..80: note = Synthetic: >U31794.1-cand-980-1059
  source 1..80: mol_type = other DNA
acaatatcagatgatgaaagcgaggaggagaatgaaacagatacagatgtagatggatttatagacaatacacttataaa

SEQ ID NO: 15146 - DNA, 80 bp, synthetic construct
  misc_feature 1..80: note = Synthetic: >U31794.1-cand-1000-1079
  source 1..80: mol_type = other DNA
cgaggaggagaatgaaacagatacagatgtagatggatttatagacaatacacttataaacaatacacaggaagacaggg

SEQ ID NO: 15147 - DNA, 80 bp, synthetic construct
  misc_feature 1..80: note = Synthetic: >U31794.1-cand-1090-1169
  source 1..80: mol_type = other DNA
acaattattgcaagtacaaacagcacatgcagatgcacagacgttgcaaaaactaaaacgaaagtatataggtagtccct

SEQ ID NO: 15148 - DNA, 80 bp, synthetic construct
  misc_feature 1..80: note = Synthetic: >U31794.1-cand-1170-1249
  source 1..80: mol_type = other DNA
taagtgatattagtaatcagcaaactgtgtaccgagaggaagtaaaacgaaggctaatattatcagaagacagcgggtat

SEQ ID NO: 15149 - DNA, 80 bp, synthetic construct
  misc_feature 1..80: note = Synthetic: >U31794.1-cand-1250-1329
  source 1..80: mol_type = other DNA
ggcaatacattggaaacattggaaacatcacaacaggtagaatacgaaaagggaaatgggtgcgggagctcacaaaatgg

SEQ ID NO: 15150 - DNA, 80 bp, synthetic construct
  misc_feature 1..80: note = Synthetic: >U31794.1-cand-1330-1409
  source 1..80: mol_type = other DNA
aggctcgcaaaacagtaattgtagtgagcactcggtatcaaatatggatatagatacaaatatggaaacaccaacacacc

SEQ ID NO: 15151 - DNA, 80 bp, synthetic construct
  misc_feature 1..80: note = Synthetic: >U31794.1-cand-1410-1489
  source 1..80: mol_type = other DNA
aattgcaggaactatttaaaagtagtaacgtacaaggaagattacattttaaatttaaagaagtgtatggagtgccatat

SEQ ID NO: 15152 - DNA, 80 bp, synthetic construct
  misc_feature 1..80: note = Synthetic: >U31794.1-cand-1490-1569
  source 1..80: mol_type = other DNA
acagagttggtgcgaacatttaaaagcgatagtacatgttgtaacgattggatatgtgcaatatttggcgttaatgaaac

SEQ ID NO: 15153 - DNA, 80 bp, synthetic construct
  misc_feature 1..80: note = Synthetic: >U31794.1-cand-1560-1639
  source 1..80: mol_type = other DNA
ttaatgaaacattagcagaggcgttaaaaactatactaaaaccacaatgtgtgtactatcatatgcaatgcttaacatgt

SEQ ID NO: 15154 - DNA, 80 bp, synthetic construct
  misc_feature 1..80: note = Synthetic: >U31794.1-cand-1650-1729
  source 1..80: mol_type = other DNA
taattgtaatgatgctaattagatatatatgtggaaaaaatagaaaaacaattacaaaatcgctaagctcaattttaaat

SEQ ID NO: 15155 - DNA, 80 bp, synthetic construct
  misc_feature 1..80: note = Synthetic: >U31794.1-cand-1730-1809
  source 1..80: mol_type = other DNA
gtaccacaagagcaaatgttaattcaaccaccaaaactacgaagtcctgctgtagcattatatttttataaaacagcaat

SEQ ID NO: 15156 - DNA, 80 bp, synthetic construct
  misc_feature 1..80: note = Synthetic: >U31794.1-cand-1840-1919
  source 1..80: mol_type = other DNA
accagaatggatacaaagacagacacaattgcaacacagtttacaagacaatcaatttgaattgtctaaaatggtacagt

SEQ ID NO: 15157 - DNA, 80 bp, synthetic construct
  misc_feature 1..80: note = Synthetic: >NC_003310.1-cand-117340-117419
  source 1..80: mol_type = other DNA
tcgtatctagataacaacgacttataattaatgtccaagtcttgaactcgctgaatgatcttttttaacccagttagttt

SEQ ID NO: 15158 - DNA, 80 bp, synthetic construct
  misc_feature 1..80: note = Synthetic: >NC_001611.1-cand-42110-42189
  source 1..80: mol_type = other DNA
atcatatatgatattcctggagatatcctatctattattgatgcaaaaaacgacgattggaaaaaatattttattagttt

SEQ ID NO: 15159 - DNA, 80 bp, synthetic construct
  misc_feature 1..80: note = Synthetic: >NC_003310.1-cand-90730-90809
  source 1..80: mol_type = other DNA
tgatgctcacatggcgcgaattctactctaacatcccttttccatgcctcaggttcatcgatctctataatatctagttt

SEQ ID NO: 15160 - DNA, 80 bp, synthetic construct
  misc_feature 1..80: note = Synthetic: >NC_001611.1-cand-21450-21529
  source 1..80: mol_type = other DNA
catgatattcatgtccctattataatcattattaactttatcacaatacgtgttgataatatctatatatgatctagttt

SEQ ID NO: 15161 - DNA, 80 bp, synthetic construct
  misc_feature 1..80: note = Synthetic: >EVD70-cand-5380-5459
  source 1..80: mol_type = other DNA
tgcaaggaccttctcttgatttcgcacaagccataatgaggaagaatacagtaatagctaggactagcaaaggggagttt

SEQ ID NO: 15162 - DNA, 80 bp, synthetic construct
  misc_feature 1..80: note = Synthetic: >NC_001611.1-cand-101470-101549
  source 1..80: mol_type = other DNA
gtgttttcttggcaaaagaataccaagtgcttaaatatttctactacttcattaatcttttcggtactcagattcagttt

SEQ ID NO: 15163 - DNA, 80 bp, synthetic construct
  misc_feature 1..80: note = Synthetic: >NC_001611.1-cand-83900-83979
  source 1..80: mol_type = other DNA
tgacggatgattctagtcccgaagaatttctgttcaacaaactaagtgaacgaaaggtatacgaatgtatcaaacagttt

SEQ ID NO: 15164 - DNA, 80 bp, synthetic construct
  misc_feature 1..80: note = Synthetic: >NC_001611.1-cand-125290-125369
  source 1..80: mol_type = other DNA
aaacttaatctctctcctctcttaacaaaaattgataccacgcacgtatctaaagtatttcttactcaaatgaacgccag

SEQ ID NO: 15165 - DNA, 80 bp, synthetic construct
  misc_feature 1..80: note = Synthetic: >NC_006573.1-cand-1290-1369
  source 1..80: mol_type = other DNA
atgttacagaaggagtatatggagaggcaggggaagacaccattgggtctagttgacctctttgtgttcagcacaagttt

SEQ ID NO: 15166 - DNA, 80 bp, synthetic construct
  misc_feature 1..80: note = Synthetic: >EVD70-cand-3080-3159
  source 1..80: mol_type = other DNA
aaacttgtgcttgagagtggttaattcttaccaaccagtccaatacacactaacagttagggtatatatgaagcctaagc

SEQ ID NO: 15167 - DNA, 80 bp, synthetic construct
  misc_feature 1..80: note = Synthetic: >EVB101-cand-4910-4989
  source 1..80: mol_type = other DNA
aaactttaagaaatgttgcccactggtgtgtggcaaggctattcaattcattgacagaagaacacaggtcagatactcac

SEQ ID NO: 15168 - DNA, 80 bp, synthetic construct
  misc_feature 1..80: note = Synthetic: >NC_039477.1-cand-1670-1749
  source 1..80: mol_type = other DNA
tgctcttcgcatacaagaattggctgatacgtgtccccttaccttaaattgtgacagaattgaaaataagggaaaagttt

SEQ ID NO: 15169 - DNA, 80 bp, synthetic construct
  misc_feature 1..80: note = Synthetic: >NC_021548.1-cand-810-889
  source 1..80: mol_type = other DNA
aaagaaacgctcgagagcatttctaaatcaccacttgcagctcaatgtggtagtaaatttctcgatatgctcgatggaat

SEQ ID NO: 15170 - DNA, 80 bp, synthetic construct
  misc_feature 1..80: note = Synthetic: >NC_001611.1-cand-116080-116159
  source 1..80: mol_type = other DNA
aaagaactacatggttctccatgaattaatacatattgtttagcaaactcaggaactataaaactactacaatgatctat

SEQ ID NO: 15171 - DNA, 80 bp, synthetic construct
  misc_feature 1..80: note = Synthetic: >AdVB7-cand-19170-19249
  source 1..80: mol_type = other DNA
aaagacattactgcagacaacaagcccatttatgccgataaaacatatcagccagagcctcaagttggagaagaatcatg

SEQ ID NO: 15172 - DNA, 80 bp, synthetic construct
  misc_feature 1..80: note = Synthetic: >NC_007360.1-cand-900-979
  source 1..80: mol_type = other DNA
gtggatatgactttgagagagaagggtactctctggtcgggattgatcctttccgtctgctgcaaaacagccaggtcttt

SEQ ID NO: 15173 - DNA, 80 bp, synthetic construct
  misc_feature 1..80: note = Synthetic: >NC_003310.1-cand-80400-80479
  source 1..80: mol_type = other DNA
actttctgttattattattgatccaatcaaaaaataaattagaagctgtgggtcattgttatgaatctctttcagaggaa

SEQ ID NO: 15174 - DNA, 80 bp, synthetic construct
  misc_feature 1..80: note = Synthetic: >NC_003310.1-cand-132040-132119
  source 1..80: mol_type = other DNA
actttgatattgatacatacattaatgacctggtggaagctgaacacattaaacaaaaatctcagttaacgattaacgag

SEQ ID NO: 15175 - DNA, 80 bp, synthetic construct
  misc_feature 1..80: note = Synthetic: >NC_001430.1-cand-5300-5379
  source 1..80: mol_type = other DNA
ctttttgctggaatccaaggtccatacactggtttacccaatcaaaaacccaaggtccctaccttgcgcaccgccaaagt

SEQ ID NO: 15176 - DNA, 80 bp, synthetic construct
  misc_feature 1..80: note = Synthetic: >NC_003310.1-cand-18800-18879
  source 1..80: mol_type = other DNA
acttttaacaagttgaccaattcatttctaatagtatcaaactctccatgattaaatattttaatagtatccattttata

SEQ ID NO: 15177 - DNA, 80 bp, synthetic construct
  misc_feature 1..80: note = Synthetic: >NC_003310.1-cand-92550-92629
  source 1..80: mol_type = other DNA
acttttttataaagatggtaaactgtttaccgataataattttttaaatcctgtatcagacgataatccagcgtatgagg

SEQ ID NO: 15178 - DNA, 80 bp, synthetic construct
  misc_feature 1..80: note = Synthetic: >AdVB3-cand-9500-9579
  source 1..80: mol_type = other DNA
caagatccacgggatctgaaaacctttcgacgaaagcgtctaaccagtcgcaatcgcaaggtaggctgagcactgtttct

SEQ ID NO: 15179 - DNA, 80 bp, synthetic construct
  misc_feature 1..80: note = Synthetic: >AdVB7-cand-21000-21079
  source 1..80: mol_type = other DNA
agaaacttccagcctatgagcaggcaggtggttgatgaggttaattacactgactacaaagccgtcaccttaccatatca

SEQ ID NO: 15180 - DNA, 80 bp, synthetic construct
  misc_feature 1..80: note = Synthetic: >NC_003310.1-cand-155870-155949
  source 1..80: mol_type = other DNA
atggcagattctgccgatttagtagtactaggtgcctactatggtaaaggaggaaagggtggtatcatggcagtctttct

SEQ ID NO: 15181 - DNA, 80 bp, synthetic construct
  misc_feature 1..80: note = Synthetic: >AdVB3-cand-23170-23249
  source 1..80: mol_type = other DNA
ttctcttgccatccttctcaatgatgcgcaccggggggtagctgaagcccacggccaccaactgagcctgttctctttct

SEQ ID NO: 15182 - DNA, 80 bp, synthetic construct
  misc_feature 1..80: note = Synthetic: >NC_003310.1-cand-240-319
  source 1..80: mol_type = other DNA
agaaagagatggttagtcaagatatttttcttagtacaaaagtcaatgttttaaaatatatggacgagaattaatttgtc

SEQ ID NO: 15183 - DNA, 80 bp, synthetic construct
  misc_feature 1..80: note = Synthetic: >AdVB7-cand-20370-20449
  source 1..80: mol_type = other DNA
agaaaggatgtgaacatggtcctgcaaagttcccttggaaatgacctcagaacagatggtgctaccataagtttcaccag

SEQ ID NO: 15184 - DNA, 80 bp, synthetic construct
  misc_feature 1..80: note = Synthetic: >NC_003310.1-cand-81520-81599
  source 1..80: mol_type = other DNA
cggtatattagatggtgccaccgtagtgtatataggatctgctccaggtacacatatacgttatttgagagatcatttct

SEQ ID NO: 15185 - DNA, 80 bp, synthetic construct
  misc_feature 1..80: note = Synthetic: >NC_001611.1-cand-101630-101709
  source 1..80: mol_type = other DNA
tagatacaaaatttgcatctacatcatccgtggatatttgatttttttccatgatatccaaaagttccgagataatttct

SEQ ID NO: 15186 - DNA, 80 bp, synthetic construct
  misc_feature 1..80: note = Synthetic: >AdVB3-cand-30090-30169
  source 1..80: mol_type = other DNA
agaaatttcttcttcaccatactcatctgtgctttcaatgtctgtgctactttcacagcagtagccactgcaagcccaga

SEQ ID NO: 15187 - DNA, 80 bp, synthetic construct
  misc_feature 1..80: note = Synthetic: >NC_001611.1-cand-15230-15309
  source 1..80: mol_type = other DNA
ttgttcaagatagatacaaatccgataacttttttgacaaattctacgggatccactttaaaagtgtcataccgggttct

SEQ ID NO: 15188 - DNA, 80 bp, synthetic construct
  misc_feature 1..80: note = Synthetic: >NC_001538.1-cand-1480-1559
  source 1..80: mol_type = other DNA
agaactgctcctcaatggatgttgcctttacttctaggcctgtacgggactgtaacacctgctcttgaagcatatgaaga

SEQ ID NO: 15189 - DNA, 80 bp, synthetic construct
  misc_feature 1..80: note = Synthetic: >EVD70-cand-3380-3459
  source 1..80: mol_type = other DNA
agctacagatgaagaaaaagaaaggtcagtttatgtagactggcaatcagatgtcctagtgacaacagtagctgcccatg

SEQ ID NO: 15190 - DNA, 80 bp, synthetic construct
  misc_feature 1..80: note = Synthetic: >NC_003310.1-cand-26490-26569
  source 1..80: mol_type = other DNA
agctaccatgatagtagatgcctccgctacagttccttgttcgtctacatctatctttacattctgaaacattttataaa

SEQ ID NO: 15191 - DNA, 80 bp, synthetic construct
  misc_feature 1..80: note = Synthetic: >NC_003310.1-cand-155470-155549
  source 1..80: mol_type = other DNA
agctacgtctatcgtattggattctgaaattgttcttgtagacgaacataatgtaccgctaccgtttggaagtttaggta

SEQ ID NO: 15192 - DNA, 80 bp, synthetic construct
  misc_feature 1..80: note = Synthetic: >EVD70-cand-2050-2129
  source 1..80: mol_type = other DNA
tgaccacaggtaaattgatcatttgctacacaccacctggtggatctagcccaacagataggatgcaagccatgctagct

SEQ ID NO: 15193 - DNA, 80 bp, synthetic construct
  misc_feature 1..80: note = Synthetic: >NC_001611.1-cand-87520-87599
  source 1..80: mol_type = other DNA
gcctgttcataaataaaaacttggcgattctatatatactcttattatcaaatctagccattgtcttatagatgtgagct

SEQ ID NO: 15194 - DNA, 80 bp, synthetic construct
  misc_feature 1..80: note = Synthetic: >NC_001611.1-cand-144410-144489
  source 1..80: mol_type = other DNA
cattgggaattgacaaataaaaagtataggtgtatggcattagccgaacatatagctgatagtattccaatatctgagct

SEQ ID NO: 15195 - DNA, 80 bp, synthetic construct
  misc_feature 1..80: note = Synthetic: >NC_004296.1-cand-3140-3219
  source 1..80: mol_type = other DNA
agctcataaacccctttataaagactggttgtgcaagacctaccacacaacaggaggaaagtgaccaaaccaacaaggcc

SEQ ID NO: 15196 - DNA, 80 bp, synthetic construct
  misc_feature 1..80: note = Synthetic: >NC_001611.1-cand-8730-8809
  source 1..80: mol_type = other DNA
agctcgttctcatcatcagaataaatcaatatctctgtttttttgttatacagatgtattacagcctcatatattacgta

SEQ ID NO: 15197 - DNA, 80 bp, synthetic construct
  misc_feature 1..80: note = Synthetic: >NC_044854.1-cand-5430-5509
  source 1..80: mol_type = other DNA
agctgagcaaatttcaatggaccctgttgcgggtgcttcaacagcagtcgcaacagctgggcaagttaatatgattgacc

SEQ ID NO: 15198 - DNA, 80 bp, synthetic construct
  misc_feature 1..80: note = Synthetic: >EVA91-cand-7010-7089
  source 1..80: mol_type = other DNA
agctgataagtctgcttgctttaatgaagtgaattgggagaatgcaacatttctcaagagaggatttaaaccagatgaac

SEQ ID NO: 15199 - DNA, 80 bp, synthetic construct
  misc_feature 1..80: note = Synthetic: >AdVB7-cand-4310-4389
  source 1..80: mol_type = other DNA
tagatcccgtctcgggttcatattgtgcaggaccactaagacagtgtatccggtgcacttgggaaatttatcatgcagct

SEQ ID NO: 15200 - DNA, 80 bp, synthetic construct
  misc_feature 1..80: note = Synthetic: >HCV.A20-cand-6620-6699
  source 1..80: mol_type = other DNA
agctgtagggtgtgacccagatctgttttggagcaagattccagtgctaatggaggagaagctctttgcatttgactaca

SEQ ID NO: 15201 - DNA, 80 bp, synthetic construct
  misc_feature 1..80: note = Synthetic: >NC_007373.1-cand-940-1019
  source 1..80: mol_type = other DNA
agctgtggatatatgcaaggctgcaatgggattgagaatcagctcatccttcagctttggtgggtttacatttaaaagaa

SEQ ID NO: 15202 - DNA, 80 bp, synthetic construct
  misc_feature 1..80: note = Synthetic: >NC_003310.1-cand-125410-125489
  source 1..80: mol_type = other DNA
tcaaacaaaatttgggtttaatttctcctggagacgtttcataataatacatataactttcttcggcaaacctaacagct

SEQ ID NO: 15203 - DNA, 80 bp, synthetic construct
  misc_feature 1..80: note = Synthetic: >NC_001430.1-cand-7220-7299
  source 1..80: mol_type = other DNA
aggaaaatcagaactgtacctgtaggaagagctttagctttaccagtatattctagtttgaggcgcaagtggttagactc

SEQ ID NO: 15204 - DNA, 80 bp, synthetic construct
  misc_feature 1..80: note = Synthetic: >NC_039477.1-cand-2620-2699
  source 1..80: mol_type = other DNA
aggaaggaaagaagggcaaaaacaaaactggccgtggcaagaaacacactgcattctccagcaagggtttgagcgatgag

SEQ ID NO: 15205 - DNA, 80 bp, synthetic construct
  misc_feature 1..80: note = Synthetic: >NC_003310.1-cand-75450-75529
  source 1..80: mol_type = other DNA
cttccagtgtccaaggtaaaatcgtgtttgtgtagttttcacaatgatgctatcatagatatagaacctgatctggaaaa

SEQ ID NO: 15206 - DNA, 80 bp, synthetic construct
  misc_feature 1..80: note = Synthetic: >NC_001611.1-cand-490-569
  source 1..80: mol_type = other DNA
tctttggcggttttcatggagtcatttctgatgaaacatttaatgatctccacgcaattgtctatattgtcccacggaag

SEQ ID NO: 15207 - DNA, 80 bp, synthetic construct
  misc_feature 1..80: note = Synthetic: >EVD70-cand-4100-4179
  source 1..80: mol_type = other DNA
tgcattgagaggcctggattggctagcacaaaagattgacaagtttatcaactggcttaaaacaaagattctcccagaag

SEQ ID NO: 15208 - DNA, 80 bp, synthetic construct
  misc_feature 1..80: note = Synthetic: >EVA89-cand-6240-6319
  source 1..80: mol_type = other DNA
cttgctatggaacagaattcctagaaggaattgatctggcaacaagtgcaggatacccctataatgcactaggaattaaa

SEQ ID NO: 15209 - DNA, 80 bp, synthetic construct
  misc_feature 1..80: note = Synthetic: >NC_003310.1-cand-71310-71389
  source 1..80: mol_type = other DNA
tatcggaggaattaagtatggaattccatgatacaactctgagagatttagtatatcttagattgtacaagtattccaag

SEQ ID NO: 15210 - DNA, 80 bp, synthetic construct
  misc_feature 1..80: note = Synthetic: >NC_003310.1-cand-47040-47119
  source 1..80: mol_type = other DNA
gttccaactctgtctttgtgatgtctagtttcgtaatatctatagcgtcctcaaaaaatatattcgcatatattcccaag

SEQ ID NO: 15211 - DNA, 80 bp, synthetic construct
  misc_feature 1..80: note = Synthetic: >AdVB7-cand-25050-25129
  source 1..80: mol_type = other DNA
gcttaccaacctggtttcttacatgggcattttgcatgagaaccggctagggcagagcgtcctgcacaccacccttaaag

SEQ ID NO: 15212 - DNA, 80 bp, synthetic construct
  misc_feature 1..80: note = Synthetic: >NC_001611.1-cand-44990-45069
  source 1..80: mol_type = other DNA
ctttattaattctctcaggtacagattttgaattcgatgatgccgagtatttcatcgttgtatatttcttcttcgattgc

SEQ ID NO: 15213 - DNA, 80 bp, synthetic construct
  misc_feature 1..80: note = Synthetic: >AdVB7-cand-8550-8629
  source 1..80: mol_type = other DNA
tgcgacgacgcggcggttgacatcctggatctgacgcctctgggtgaaagctaccggccccgtgagcttgaacctgaaag

SEQ ID NO: 15214 - DNA, 80 bp, synthetic construct
  misc_feature 1..80: note = Synthetic: >NC_003310.1-cand-133090-133169
  source 1..80: mol_type = other DNA
tagatatagaccaatttacttttagtaacgtatgtgaatcggttcaaaaatttagaatgatgtcaaaggatgaaagaaag

SEQ ID NO: 15215 - DNA, 80 bp, synthetic construct
  misc_feature 1..80: note = Synthetic: >NC_001430.1-cand-2260-2339
  source 1..80: mol_type = other DNA
ttttatgcaaaccaaccttgtagcaccagtgggtgctgcagatcaatgttacattgttggaatggttgcggcaaagaaag

SEQ ID NO: 15216 - DNA, 80 bp, synthetic construct
  misc_feature 1..80: note = Synthetic: >NC_003310.1-cand-131800-131879
  source 1..80: mol_type = other DNA
tattaccgacaagatatcgccattacaagatatctctggatatatcacaattggaagcgtctaatatatcatcgacaaag

SEQ ID NO: 15217 - DNA, 80 bp, synthetic construct
  misc_feature 1..80: note = Synthetic: >NC_001611.1-cand-106690-106769
  source 1..80: mol_type = other DNA
gttcatatgtatcataatattaatcatccacgttttgataaatctatctttagcttctgaaataacgtatttaaacaaag

SEQ ID NO: 15218 - DNA, 80 bp, synthetic construct
  misc_feature 1..80: note = Synthetic: >NC_007373.1-cand-1180-1259
  source 1..80: mol_type = other DNA
gagtggaagagacgaacagtcaatagccgaagcaataatcgtggccatggtgttttcacaagaggattgcatgataaaag

SEQ ID NO: 15219 - DNA, 80 bp, synthetic construct
  misc_feature 1..80: note = Synthetic: >NC_003310.1-cand-17130-17209
  source 1..80: mol_type = other DNA
gaaaaatgtttttcgttgtttaagttggatgaatagtatgtcttaataattgttattatttcactaattaatatttagta

SEQ ID NO: 15220 - DNA, 80 bp, synthetic construct
  misc_feature 1..80: note = Synthetic: >NC_001611.1-cand-124810-124889
  source 1..80: mol_type = other DNA
gaaaaccgacctgtctgttttcctagtagtaacgaaacatccatcgatacatatatgcaattcgctaaacaatgttatga

SEQ ID NO: 15221 - DNA, 80 bp, synthetic construct
  misc_feature 1..80: note = Synthetic: >EVD70-cand-4980-5059
  source 1..80: mol_type = other DNA
ttagtaactgaaatgatcaaggaatataggatcagaaacagcacacaagataaattggaggctctgtttcagggaccacc

SEQ ID NO: 15222 - DNA, 80 bp, synthetic construct
  misc_feature 1..80: note = Synthetic: >NC_039476.1-cand-3080-3159
  source 1..80: mol_type = other DNA
ggtgtcaccaagccttttcataacatcaactcatgtaatccccgcaggcataacagaagcatttggagtccccatcaaac

SEQ ID NO: 15223 - DNA, 80 bp, synthetic construct
  misc_feature 1..80: note = Synthetic: >NC_003310.1-cand-196460-196539
  source 1..80: mol_type = other DNA
gtaaaatccatgtaggggacactgctcacgttttttctctagtacataatttcacacaagtttttatacagacaaattaa

SEQ ID NO: 15224 - DNA, 80 bp, synthetic construct
  misc_feature 1..80: note = Synthetic: >NC_001611.1-cand-143780-143859
  source 1..80: mol_type = other DNA
tatctacaattattggaaaggcgttatctatttcaaaaaatgatcagagattagcgtgtggagttattggtatttcttac

SEQ ID NO: 15225 - DNA, 80 bp, synthetic construct
  misc_feature 1..80: note = Synthetic: >NC_003310.1-cand-175820-175899
  source 1..80: mol_type = other DNA
gtaagatggcgggatatatggcaagaacataatgatggcgtatacagtataggaaaggagtgcatagataatatatacga

SEQ ID NO: 15226 - DNA, 80 bp, synthetic construct
  misc_feature 1..80: note = Synthetic: >NC_003310.1-cand-18010-18089
  source 1..80: mol_type = other DNA
gtaatcaaatttggtgttgttaaacttcgcaatattcatcaatttagatagaaacttatactcatcatctgttttaggaa

SEQ ID NO: 15227 - DNA, 80 bp, synthetic construct
  misc_feature 1..80: note = Synthetic: >NC_001611.1-cand-17660-17739
  source 1..80: mol_type = other DNA
gtaatcttgtcgaggaggacatatagtattcttgtattctaccgaatacccaagagatgcaatacaaaagagtaagacta

SEQ ID NO: 15228 - DNA, 80 bp, synthetic construct
  misc_feature 1..80: note = Synthetic: >NC_039477.1-cand-2780-2859
  source 1..80: mol_type = other DNA
gtactatgaggagctcgccattgccaaggccacggaagaggatttctgtgaagaggaggagatcaaaatccgccagagaa

SEQ ID NO: 15229 - DNA, 80 bp, synthetic construct
  misc_feature 1..80: note = Synthetic: >EVD70-cand-4820-4899
  source 1..80: mol_type = other DNA
gtataaggatggtgttagattagatatgtttaaagcagtggagttgtgcaacccagaaaagtgcagaccaaccaactata

SEQ ID NO: 15230 - DNA, 80 bp, synthetic construct
  misc_feature 1..80: note = Synthetic: >NC_003310.1-cand-103490-103569
  source 1..80: mol_type = other DNA
tctgcagagtggttgatagttgttcctagatatgtaaaataatccaacgtactaggtagcaaattgtctagataaaatac

SEQ ID NO: 15231 - DNA, 80 bp, synthetic construct
  misc_feature 1..80: note = Synthetic: >NC_001611.1-cand-99140-99219
  source 1..80: mol_type = other DNA
gtcattacatacaactaccaattgtttttgtacataatagattggatggttgacatccatggtggaataaactactcgaa

SEQ ID NO: 15232 - DNA, 80 bp, synthetic construct
  misc_feature 1..80: note = Synthetic: >NC_003310.1-cand-52580-52659
  source 1..80: mol_type = other DNA
gtccatgggtgacatatttacatataacggatgtaaagacaatgaatggatgctagaacaactctctaccctaaacttta

SEQ ID NO: 15233 - DNA, 80 bp, synthetic construct
  misc_feature 1..80: note = Synthetic: >NC_003310.1-cand-48890-48969
  source 1..80: mol_type = other DNA
gtgtctaactaatggaggttcgtcagcggctctagtttgaatcatcatcggtgtagtattcctacttttacagttaggac

SEQ ID NO: 15234 - DNA, 80 bp, synthetic construct
  misc_feature 1..80: note = Synthetic: >NC_001611.1-cand-93090-93169
  source 1..80: mol_type = other DNA
tcttcaagagatgtctgaaacgtattctcttccaccacatccatcaattgtaaaagttttattgggagaattggtcagac

SEQ ID NO: 15235 - DNA, 80 bp, synthetic construct
  misc_feature 1..80: note = Synthetic: >MH539867.1-cand-190-269
  source 1..80: mol_type = other DNA
gtctgcattggagaccaaactcggagaacttaagcggcaattggctgatcttattgcagctcagaaattggcttcaaaac

SEQ ID NO: 15236 - DNA, 80 bp, synthetic construct
  misc_feature 1..80: note = Synthetic: >NC_001611.1-cand-108770-108849
  source 1..80: mol_type = other DNA
gtgaaaatctactaccgatgatgtaagtcttacaatgtttgaaccagtaccagatcttaatttggaggcctccgtagaac

SEQ ID NO: 15237 - DNA, 80 bp, synthetic construct
  misc_feature 1..80: note = Synthetic: >AJ616854.1-cand-1580-1659
  source 1..80: mol_type = other DNA
actatctacctcaaaacaacaacactacctcaacaactactacctcattgatttgcttcctgaatgtctttttagggagc

SEQ ID NO: 15238 - DNA, 80 bp, synthetic construct
  misc_feature 1..80: note = Synthetic: >AJ616855.1-cand-0-79
  source 1..80: mol_type = other DNA
aaagcacataatttgtcatgtccacaatcacaatgtccatactgctttacacactgtgagctcacagaatcagcattcca

SEQ ID NO: 15239 - DNA, 80 bp, synthetic construct
  misc_feature 1..80: note = Synthetic: >AJ616855.1-cand-100-179
  source 1..80: mol_type = other DNA
aagctacacatagatttagggatgacttaaagaaaacaataacacctcagtcaacaagtcctggctgttaccgtacatta

SEQ ID NO: 15240 - DNA, 80 bp, synthetic construct
  misc_feature 1..80: note = Synthetic: >AJ616855.1-cand-210-289
  source 1..80: mol_type = other DNA
attttcacagtgtgggtggttctccttatcattgagtctgttctatgggctgccagtgcatcagaaatcgtcctagaacc

SEQ ID NO: 15241 - DNA, 80 bp, synthetic construct
  misc_feature 1..80: note = Synthetic: >AJ616855.1-cand-310-389
  source 1..80: mol_type = other DNA
atggtgtcggtgtggtcccgatgcatactgatctggagttagatttttctctcccttctagttctaaatacacatataaa

SEQ ID NO: 15242 - DNA, 80 bp, synthetic construct
  misc_feature 1..80: note = Synthetic: >AdVB3-cand-150-229
  source 1..80: mol_type = other DNA
tatgttgcaagttatcgcggtaaaggtgacgtaaaatgaggtgtggtttaaacacggaagtagacagttttcccacgctt

SEQ ID NO: 15243 - DNA, 80 bp, synthetic construct
  misc_feature 1..80: note = Synthetic: >AdVB3-cand-390-469
  source 1..80: mol_type = other DNA
ttcgattaccgtggtttttacctaaatttccgcgtacggtgtcaaagtcctgtgttttttacgtaggtgtcagctgatcg

SEQ ID NO: 15244 - DNA, 80 bp, synthetic construct
  misc_feature 1..80: note = Synthetic: >AdVB3-cand-770-849
  source 1..80: mol_type = other DNA
ttttttactgattctatgctgctagctgccgatgaaggattggacataaaccctcctcctgagacccttgataccccagg

SEQ ID NO: 15245 - DNA, 80 bp, synthetic construct
  misc_feature 1..80: note = Synthetic: >AdVB3-cand-960-1039
  source 1..80: mol_type = other DNA
gggaaattgagcagtccatccataccgcagtgaataatggagtaagagctgccagcgatgtttttaagttggactgtccg

SEQ ID NO: 15246 - DNA, 80 bp, synthetic construct
  misc_feature 1..80: note = Synthetic: >AdVB3-cand-1190-1269
  source 1..80: mol_type = other DNA
ctgtttaataactgttgaatggtagatttatatttttacttgcaatttttttgtaggtcctgtgtctgatgatgagtcac

SEQ ID NO: 15247 - DNA, 80 bp, synthetic construct
  misc_feature 1..80: note = Synthetic: >AdVB3-cand-1270-1349
  source 1..80: mol_type = other DNA
cttctcctgattcaactacttcacttcctgaaattcaggcgcccgcacctgcaaacgtatgcaagcccattcctgtgaag

SEQ ID NO: 15248 - DNA, 80 bp, synthetic construct
  misc_feature 1..80: note = Synthetic: >AdVB3-cand-1320-1399
  source 1..80: mol_type = other DNA
gcaaacgtatgcaagcccattcctgtgaagcctaagcctgggaaacgccctgctgtggataagcttgaggacttgttgga

SEQ ID NO: 15249 - DNA, 80 bp, synthetic construct
  misc_feature 1..80: note = Synthetic: >AdVB3-cand-1540-1619
  source 1..80: mol_type = other DNA
ttggatatataagtaggagcagatctgtgtggttagctcacagcaacctgctgccatccatggaggtttgggctatcttg

SEQ ID NO: 15250 - DNA, 80 bp, synthetic construct
  misc_feature 1..80: note = Synthetic: >AdVB3-cand-2110-2189
  source 1..80: mol_type = other DNA
gcctggaccctccggtggaggagtagctgacctgtttcctgaactgcgacgggtgcttactaggtctacaaccagtggac

SEQ ID NO: 15251 - DNA, 80 bp, synthetic construct
  misc_feature 1..80: note = Synthetic: >AdVB3-cand-2420-2499
  source 1..80: mol_type = other DNA
aagatatctctgaggcctgataaacaatatagaattactaagaagattaatattagaaatgcatgctacatatcagggaa

SEQ ID NO: 15252 - DNA, 80 bp, synthetic construct
  misc_feature 1..80: note = Synthetic: >AdVB3-cand-2620-2699
  source 1..80: mol_type = other DNA
ggatgggtataatggcattgtatttatggctaacactaagctgattctacatggttgtagcttttttgggtttaataata

SEQ ID NO: 15253 - DNA, 80 bp, synthetic construct
  misc_feature 1..80: note = Synthetic: >AdVE4-cand-13940-14019
  source 1..80: mol_type = other DNA
agcaggcaatggcggcggcggcggcaatacagccaccactggaggctccttacgtgccaccgcggtacctggcgcctaca

SEQ ID NO: 15254 - DNA, 80 bp, synthetic construct
  misc_feature 1..80: note = Synthetic: >AdVE4-cand-14040-14119
  source 1..80: mol_type = other DNA
ttactcggagctgacacccttgtacgataccacccggttgtacctggtggacaacaagtcggcggacatcgcctcgctga

SEQ ID NO: 15255 - DNA, 80 bp, synthetic construct
  misc_feature 1..80: note = Synthetic: >AdVE4-cand-14120-14199
  source 1..80: mol_type = other DNA
actaccagaacgaccacagcaactttctgaccaccgtggtgcagaacaacgatttcacccccacggaggccagcacccag

SEQ ID NO: 15256 - DNA, 80 bp, synthetic construct
  misc_feature 1..80: note = Synthetic: >AdVE4-cand-14230-14309
  source 1..80: mol_type = other DNA
ggcggccagctaaaaactattatgcacaccaacatgcccaacgtgaaccagttcatgtacagcaacaagttcaaggcgcg

SEQ ID NO: 15257 - DNA, 80 bp, synthetic construct
  misc_feature 1..80: note = Synthetic: >AdVE4-cand-14260-14339
  source 1..80: mol_type = other DNA
aacatgcccaacgtgaaccagttcatgtacagcaacaagttcaaggcgcgggtcatggtctctcgcaagacgcccaacgg

SEQ ID NO: 15258 - DNA, 80 bp, synthetic construct
  misc_feature 1..80: note = Synthetic: >AdVE4-cand-14360-14439
  source 1..80: mol_type = other DNA
atgatggtagtcaggatgagctaaaatacgagtgggtggagtttgagctgcccgaaggcaacttctcggtgaccatgacc

SEQ ID NO: 15259 - DNA, 80 bp, synthetic construct
  misc_feature 1..80: note = Synthetic: >AdVE4-cand-14420-14499
  source 1..80: mol_type = other DNA
acttctcggtgaccatgaccattgacctgatgaacaacgccatcatagacaattacttggcagtgggacggcaaaacggg

SEQ ID NO: 15260 - DNA, 80 bp, synthetic construct
  misc_feature 1..80: note = Synthetic: >AdVE4-cand-14500-14579
  source 1..80: mol_type = other DNA
gtgctggagagcgacattggcgtgaagttcgacacccgaaacttcaggctgggctgggaccccgtgaccgagctggtcat

SEQ ID NO: 15261 - DNA, 80 bp, synthetic construct
  misc_feature 1..80: note = Synthetic: >AdVE4-cand-14640-14719
  source 1..80: mol_type = other DNA
ggtggactttaccgagagccgcctgagtaacctgctgggcattcgcaagaggcagcccttccaggagggtttccagatca

SEQ ID NO: 15262 - DNA, 80 bp, synthetic construct
  misc_feature 1..80: note = Synthetic: >AdVE4-cand-14680-14759
  source 1..80: mol_type = other DNA
attcgcaagaggcagcccttccaggagggtttccagatcatgtacgaggacctggatggaggtaacatccccgcgctctt

SEQ ID NO: 15263 - DNA, 80 bp, synthetic construct
  misc_feature 1..80: note = Synthetic: >AdVE4-cand-14760-14839
  source 1..80: mol_type = other DNA
ggatgtcgaggcctatgagaaaagcaaggaggagagcgtcgccgcggcaaccacagccgtagccaccgcctctaccgagg

SEQ ID NO: 15264 - DNA, 80 bp, synthetic construct
  misc_feature 1..80: note = Synthetic: >AdVE4-cand-14840-14919
  source 1..80: mol_type = other DNA
tccgggacgataattttgctagcgccgcagcagtggcggcggttaaggctgatgaaaccaaaagtaagatagtcattcag

SEQ ID NO: 15265 - DNA, 80 bp, synthetic construct
  misc_feature 1..80: note = Synthetic: >AdVE4-cand-14920-14999
  source 1..80: mol_type = other DNA
ccggtggagaaggatagcaaggagaggagctacaacgtgctctcggacaagaaaaacaccgcctaccgcagctggtatct

SEQ ID NO: 15266 - DNA, 80 bp, synthetic construct
  misc_feature 1..80: note = Synthetic: >AdVE4-cand-15000-15079
  source 1..80: mol_type = other DNA
ggcctacaactatggcgaccgcgacaagggcgtgcgctcctggacactgctcaccacctcggacgtcacctgcggcgtgg

SEQ ID NO: 15267 - DNA, 80 bp, synthetic construct
  misc_feature 1..80: note = Synthetic: >AdVE4-cand-15080-15159
  source 1..80: mol_type = other DNA
agcaagtctactggtcgctgcccgacatgatgcaagacccggtcaccttccgctccacgcatcaagttagcaactacccg

SEQ ID NO: 15268 - DNA, 80 bp, synthetic construct
  misc_feature 1..80: note = Synthetic: >AdVE4-cand-15160-15239
  source 1..80: mol_type = other DNA
gtggtgggcgccgagctcctgcccgtctactccaagagcttcttcaacgagcaggccgtctactcgcagcagctgcgcgc

SEQ ID NO: 15269 - DNA, 80 bp, synthetic construct
  misc_feature 1..80: note = Synthetic: >EF177176.1-cand-4280-4359
  source 1..80: mol_type = other DNA
taagttgtctggtacatgtccagaggatgttgttaataaaatagagcaaaaaacatgggctgacaaaatattgcaatggg

SEQ ID NO: 15270 - DNA, 80 bp, synthetic construct
  misc_feature 1..80: note = Synthetic: >EF177176.1-cand-4440-4519
  source 1..80: mol_type = other DNA
gggtctaggccttccacaatagttgatgtaactccggcgcgaccacctattgttgtggaatccgtagggcctacagaccc

SEQ ID NO: 15271 - DNA, 80 bp, synthetic construct
  misc_feature 1..80: note = Synthetic: >EF177176.1-cand-4480-4559
  source 1..80: mol_type = other DNA
gaccacctattgttgtggaatccgtagggcctacagacccttccattgttacattagttgaggagtccagtgttatagaa

SEQ ID NO: 15272 - DNA, 80 bp, synthetic construct
  misc_feature 1..80: note = Synthetic: >EF177176.1-cand-4600-4679
  source 1..80: mol_type = other DNA
ttgaaattacatcatcatcaacaactacacctgccgtgttggatattacaccaacctctagtactgtacatgttagtagt

SEQ ID NO: 15273 - DNA, 80 bp, synthetic construct
  misc_feature 1..80: note = Synthetic: >EF177176.1-cand-4640-4719
  source 1..80: mol_type = other DNA
ggatattacaccaacctctagtactgtacatgttagtagtacccatataaccaatccgttatttattgatccccctgtta

SEQ ID NO: 15274 - DNA, 80 bp, synthetic construct
  misc_feature 1..80: note = Synthetic: >EF177176.1-cand-4720-4799
  source 1..80: mol_type = other DNA
ttgaggccccacaaactggcgaggtgtctggcaatattttaattagcacacccacatctggtatacatagctatgaagaa

SEQ ID NO: 15275 - DNA, 80 bp, synthetic construct
  misc_feature 1..80: note = Synthetic: >EF177176.1-cand-4790-4869
  source 1..80: mol_type = other DNA
ctatgaagaaatacctatgcaaacatttgctgttcacggttctggtacagaacctatcagtagcactcctattccaggct

SEQ ID NO: 15276 - DNA, 80 bp, synthetic construct
  misc_feature 1..80: note = Synthetic: >EF177176.1-cand-4870-4949
  source 1..80: mol_type = other DNA
ttaggcgtattgcagctcctagattatatagaaaagcatttcagcaggttaaggtaactgaccctgcatttcttgataga

SEQ ID NO: 15277 - DNA, 80 bp, synthetic construct
  misc_feature 1..80: note = Synthetic: >EF177176.1-cand-4950-5029
  source 1..80: mol_type = other DNA
cctgcaacattagtatctgctgataatccactttttgaaggtactgacacatctttagctttttctccgtcgggtgtggc

SEQ ID NO: 15278 - DNA, 80 bp, synthetic construct
  misc_feature 1..80: note = Synthetic: >EF177176.1-cand-5010-5089
  source 1..80: mol_type = other DNA
ttttctccgtcgggtgtggctcctgaccctgattttatgaatatagtagcattacataggcctgcatttactacacgtag

SEQ ID NO: 15279 - DNA, 80 bp, synthetic construct
  misc_feature 1..80: note = Synthetic: >EF177176.1-cand-5110-5189
  source 1..80: mol_type = other DNA
ggcttggcagaaaggctactatacaaacacgtagaggcacacaaataggtgcccgtgtgcattattattatgatataagt

SEQ ID NO: 15280 - DNA, 80 bp, synthetic construct
  misc_feature 1..80: note = Synthetic: >EF177176.1-cand-5190-5269
  source 1..80: mol_type = other DNA
cctattgcacaggctgaggaaattgaaatgcagccattattgtctgcaaataattcatttgatggcctatatgatattta

SEQ ID NO: 15281 - DNA, 80 bp, synthetic construct
  misc_feature 1..80: note = Synthetic: >EF177176.1-cand-5270-5349
  source 1..80: mol_type = other DNA
tgcaaatatagatgatgaagcacctggtttgtctagccagtcagttgctacaccttctgcacacttacctataaagcctt

SEQ ID NO: 15282 - DNA, 80 bp, synthetic construct
  misc_feature 1..80: note = Synthetic: >EF177176.1-cand-5350-5429
  source 1..80: mol_type = other DNA
ccacattgtcttttgctagtaacacaactaatgtaactgcccctttaggtaatgtgtgggaaacaccattttattcgggt

SEQ ID NO: 15283 - DNA, 80 bp, synthetic construct
  misc_feature 1..80: note = Synthetic: >EF177176.1-cand-5430-5509
  source 1..80: mol_type = other DNA
cctgacatagtgttgcctacaggccccagtacgtggcccttcgttcctcagtctccttatgatgttacccatgatgtata

SEQ ID NO: 15284 - DNA, 80 bp, synthetic construct
  misc_feature 1..80: note = Synthetic: >EF177176.1-cand-5590-5669
  source 1..80: mol_type = other DNA
cagatggcgacgtggcggcctagtgaaaataaggtgtatctacctccaacacctgtttcaaaggttgtggcaacggattc

SEQ ID NO: 15285 - DNA, 80 bp, synthetic construct
  misc_feature 1..80: note = Synthetic: >EVA90-cand-1690-1769
  source 1..80: mol_type = other DNA
cagaattcagtggtctaaggcaagctgtgtctcaaggtctaccggccgagttgaaacctggcactaaccaattcttaact

SEQ ID NO: 15286 - DNA, 80 bp, synthetic construct
  misc_feature 1..80: note = Synthetic: >EVA90-cand-1770-1849
  source 1..80: mol_type = other DNA
acagatgatggtgtctcagcaccaattctacctggtttccacccaaccccagagatgcacatcccaggtgaagtgaagaa

SEQ ID NO: 15287 - DNA, 80 bp, synthetic construct
  misc_feature 1..80: note = Synthetic: >EVA90-cand-1850-1929
  source 1..80: mol_type = other DNA
cctcttagaaatttgtcaagtggagtccatacttgaggttaacaaccttaccaccaacaaagcagctgaccagctcatga

SEQ ID NO: 15288 - DNA, 80 bp, synthetic construct
  misc_feature 1..80: note = Synthetic: >EVA90-cand-1930-2009
  source 1..80: mol_type = other DNA
cacgactgttgataccagtacaagcacaaactgcagtggacacactctgtgcggctttcaaggttgatcctggtcgtgat

SEQ ID NO: 15289 - DNA, 80 bp, synthetic construct
  misc_feature 1..80: note = Synthetic: >EVA90-cand-2020-2099
  source 1..80: mol_type = other DNA
aatcaacattagtgggccaaatatgcagatactacacccaatggtcaggatcccttgaggtgacattcatgttcactggt

SEQ ID NO: 15290 - DNA, 80 bp, synthetic construct
  misc_feature 1..80: note = Synthetic: >EVA90-cand-2100-2179
  source 1..80: mol_type = other DNA
agcttcatggcaacagggaaaatgcttattgcctacaccccaccaggtgcaccacaacctgccaacagaaggactgcaat

SEQ ID NO: 15291 - DNA, 80 bp, synthetic construct
  misc_feature 1..80: note = Synthetic: >EVA90-cand-2190-2269
  source 1..80: mol_type = other DNA
catgtgatttgggattttggtctacaatcatctgtcaccttggtaatcccctggattagtaacacacattacagagctat

SEQ ID NO: 15292 - DNA, 80 bp, synthetic construct
  misc_feature 1..80: note = Synthetic: >EVA90-cand-2270-2349
  source 1..80: mol_type = other DNA
gggtagtaatgattactttgactactactctgcaggcattgtaacaatttggtatcagaccaactttgtggtgccatcag

SEQ ID NO: 15293 - DNA, 80 bp, synthetic construct
  misc_feature 1..80: note = Synthetic: >EVA90-cand-2360-2439
  source 1..80: mol_type = other DNA
atcagcttacatcattgcccttgctgctgctcagaagaacttcacattaagattgcccaaagacactggcgacatttcac

SEQ ID NO: 15294 - DNA, 80 bp, synthetic construct
  misc_feature 1..80: note = Synthetic: >EVA90-cand-2440-2519
  source 1..80: mol_type = other DNA
aaactgccatcctgcaaggtgaccctattgaagaggccatcaacaacacagtcgctggaacactaaaccgagcactagga

SEQ ID NO: 15295 - DNA, 80 bp, synthetic construct
  misc_feature 1..80: note = Synthetic: >EVA90-cand-2520-2599
  source 1..80: mol_type = other DNA
ggtgcaacacacacaacagcccaaaacacacagcagagtagccatcaaattggaacaggagaagtccccgccctgcaagc

SEQ ID NO: 15296 - DNA, 80 bp, synthetic construct
  misc_feature 1..80: note = Synthetic: >EVA90-cand-2620-2699
  source 1..80: mol_type = other DNA
ccaacacctcagatgagaacatgctagagacccgctgtgtggtcaactcccacagtgtggctgaaactagcatctcgcat

SEQ ID NO: 15297 - DNA, 80 bp, synthetic construct
  misc_feature 1..80: note = Synthetic: >EVA90-cand-2680-2759
  source 1..80: mol_type = other DNA
ctgaaactagcatctcgcatttcttttccagagctggattagttggtatgcttgacctgctaacatcagagaaaaccaat

SEQ ID NO: 15298 - DNA, 80 bp, synthetic construct
  misc_feature 1..80: note = Synthetic: >EVA90-cand-2760-2839
  source 1..80: mol_type = other DNA
atagggttcacaacttgggacattgatatcatgggatttgtgcaacagcgcagaaaactagaaatgttcacatacatgag

SEQ ID NO: 15299 - DNA, 80 bp, synthetic construct
  misc_feature 1..80: note = Synthetic: >EVA90-cand-2840-2919
  source 1..80: mol_type = other DNA
atttgatgcagaattcactttcttaactgtgggagcaactggtgccgcaccagccactgttatccaatacatgtatgtac

SEQ ID NO: 15300 - DNA, 80 bp, synthetic construct
  misc_feature 1..80: note = Synthetic: >EVA90-cand-2930-3009
  source 1..80: mol_type = other DNA
acccaaacccacccagcgtgattccttcgaatggcagactgcaactaatccttccatctttgtcaaaattagtgatcccc

SEQ ID NO: 15301 - DNA, 80 bp, synthetic construct
  misc_feature 1..80: note = Synthetic: >EVB87-cand-6760-6839
  source 1..80: mol_type = other DNA
gacaagcactactttgtaagaggagggatgccatctgggtgttctggaactagtatttttaactcaatgatcaacaacat

SEQ ID NO: 15302 - DNA, 80 bp, synthetic construct
  misc_feature 1..80: note = Synthetic: >EVB87-cand-6880-6959
  source 1..80: mol_type = other DNA
gacctggaccaattcaggatgatagcatatggtgatgatgtcattgcgtcatacccacatcctattgatgccgcgctgct

SEQ ID NO: 15303 - DNA, 80 bp, synthetic construct
  misc_feature 1..80: note = Synthetic: >EVB87-cand-6980-7059
  source 1..80: mol_type = other DNA
acggcctgatcatgacaccagccgacaagggagagtgcttcaacgaagtgacatggaccaacgtcaccttcctaaaaaga

SEQ ID NO: 15304 - DNA, 80 bp, synthetic construct
  misc_feature 1..80: note = Synthetic: >EVB87-cand-7060-7139
  source 1..80: mol_type = other DNA
tacttcagagcagatgagcagtatcccttcctcgtccatcctgtgatgccaatgaaagatatccacgaatcgatcaggtg

SEQ ID NO: 15305 - DNA, 80 bp, synthetic construct
  misc_feature 1..80: note = Synthetic: >EVB87-cand-7140-7219
  source 1..80: mol_type = other DNA
gaccaaagaccccaagaacacccaagaccatgtgcgttccttgtgcttactggcttggcacaatggagagcaagagtacg

SEQ ID NO: 15306 - DNA, 80 bp, synthetic construct
  misc_feature 1..80: note = Synthetic: >EVB87-cand-7220-7299
  source 1..80: mol_type = other DNA
aggagtttgtgtctaaaatcagaagcgtcccagttgggcgctgtttggctttacctgcgttttcaactttacgcaggaaa

SEQ ID NO: 15307 - DNA, 80 bp, synthetic construct
  misc_feature 1..80: note = Synthetic: >EVB87-cand-7300-7379
  source 1..80: mol_type = other DNA
tggctggactccttttaaattagagcacaatttgatacaattcaattggcttaaccctaccacactcaccgaactagata

SEQ ID NO: 15308 - DNA, 80 bp, synthetic construct
  misc_feature 1..80: note = Synthetic: >EVB88-cand-0-79
  source 1..80: mol_type = other DNA
aacagcctgtgctcttccgatctggttgttcccacccacagggcccactgggcgctagcacactggtattacggtaccct

SEQ ID NO: 15309 - DNA, 80 bp, synthetic construct
  misc_feature 1..80: note = Synthetic: >EVB88-cand-80-159
  source 1..80: mol_type = other DNA
tgtgcgcctgttttatccacccttccccttaatgtaacttagaagaaaaacacaagcggtcaataggtggctcagcacac

SEQ ID NO: 15310 - DNA, 80 bp, synthetic construct
  misc_feature 1..80: note = Synthetic: >EVB88-cand-160-239
  source 1..80: mol_type = other DNA
cagctgggtcgcgaccaagcacttctgttaccccggaccgagtatcaataagctgctcgcgcggctgaaggagaaaacgt

SEQ ID NO: 15311 - DNA, 80 bp, synthetic construct
  misc_feature 1..80: note = Synthetic: >EVB88-cand-240-319
  source 1..80: mol_type = other DNA
tcgttatccggccaattacttcgagaaacctagtaccaccatggaggttgcgcagcgtttcgctccgcacaaccccagtg

SEQ ID NO: 15312 - DNA, 80 bp, synthetic construct
  misc_feature 1..80: note = Synthetic: >EVB88-cand-310-389
  source 1..80: mol_type = other DNA
aaccccagtgtagatcaggtcgatgagtcaccgcaatccccacgggcgaccgtggcggtggctgcgttggcggcctgccc

SEQ ID NO: 15313 - DNA, 80 bp, synthetic construct
  misc_feature 1..80: note = Synthetic: >EVB88-cand-560-639
  source 1..80: mol_type = other DNA
tgggtgtccgtgtttccttttattcctatactggctgcttatggtgacaattgacagattgttaccatatagctattgga

SEQ ID NO: 15314 - DNA, 80 bp, synthetic construct
  misc_feature 1..80: note = Synthetic: >EVB88-cand-640-719
  source 1..80: mol_type = other DNA
ttggccatccggtgacaaacagagcgattgtttacttatttgttggtttcataccactcaattacaaagttctaaacacc

SEQ ID NO: 15315 - DNA, 80 bp, synthetic construct
  misc_feature 1..80: note = Synthetic: >EVB88-cand-720-799
  source 1..80: mol_type = other DNA
cttaactttatcataacacttaacacatcaaaatgggagctcaagtgtcaacacaaaaagcaggcacacatgaggcgtcc

SEQ ID NO: 15316 - DNA, 80 bp, synthetic construct
  misc_feature 1..80: note = Synthetic: >EVB88-cand-800-879
  source 1..80: mol_type = other DNA
ttgcgtgcatccggcaactccgtgatccattatactaacatcaattattataaggatgccgcgtccaacacctcaaacag

SEQ ID NO: 15317 - DNA, 80 bp, synthetic construct
  misc_feature 1..80: note = Synthetic: >HCV.A16-cand-7240-7319
  source 1..80: mol_type = other DNA
gcacaattagatcagttcctattggaaaagccttggctataccaaattttgagaacttgagaagaaattggctcgagtta

SEQ ID NO: 15318 - DNA, 80 bp, synthetic construct
  misc_feature 1..80: note = Synthetic: >HCV.A16-cand-7300-7379
  source 1..80: mol_type = other DNA
gaagaaattggctcgagttattttaatatacagtttaaagctgaaccccaccagaaatctggtcgtgttaatgactggtg

SEQ ID NO: 15319 - DNA, 80 bp, synthetic construct
  misc_feature 1..80: note = Synthetic: >HCV.A17-cand-10-89
  source 1..80: mol_type = other DNA
gggttgttcccaccccagaggcccacgtggcggctagtacaccggtatcacggtacccttgtacgcctgttttatactcc

SEQ ID NO: 15320 - DNA, 80 bp, synthetic construct
  misc_feature 1..80: note = Synthetic: >HCV.A17-cand-50-129
  source 1..80: mol_type = other DNA
accggtatcacggtacccttgtacgcctgttttatactcccttcccccgtaacttagaagccaataaaccaagttcaata

SEQ ID NO: 15321 - DNA, 80 bp, synthetic construct
  misc_feature 1..80: note = Synthetic: >HCV.A17-cand-160-239
  source 1..80: mol_type = other DNA
caagcacttctgtttccccggtgaagttgcatagactgtacccacggttgaaagcgattgatccgttatccgctcttgta

SEQ ID NO: 15322 - DNA, 80 bp, synthetic construct
  misc_feature 1..80: note = Synthetic: >HCV.A17-cand-630-709
  source 1..80: mol_type = other DNA
gccatccggtgaaaatcaaacccattatctacctgtttgttggatttactccactcacttcatacactccaaacataatt

SEQ ID NO: 15323 - DNA, 80 bp, synthetic construct
  misc_feature 1..80: note = Synthetic: >HCV.A17-cand-710-789
  source 1..80: mol_type = other DNA
aaaatagtactattgataagacatcatcaccacaatgggtgcacaagtttcatcacagaaagtcggtgctcatgaaaaca

SEQ ID NO: 15324 - DNA, 80 bp, synthetic construct
  misc_feature 1..80: note = Synthetic: >HCV.A17-cand-790-869
  source 1..80: mol_type = other DNA
ccaacattgccactggcggatcaactgtgaattacacgacaatcaattactacaaggactcagccagtaatgcagcctct

SEQ ID NO: 15325 - DNA, 80 bp, synthetic construct
  misc_feature 1..80: note = Synthetic: >HCV.A17-cand-870-949
  source 1..80: mol_type = other DNA
aaacaagacttttcccaggacccctcaaagttcacagaaccagtcaaagacatcatgttgaaatcagctccagcactaaa

SEQ ID NO: 15326 - DNA, 80 bp, synthetic construct
  misc_feature 1..80: note = Synthetic: >HCV.A17-cand-950-1029
  source 1..80: mol_type = other DNA
ctccccaaacatagaggcgtgtgggtacagtgaccgagtgatgcagctcacattgggaaattccacaataactactcaag

SEQ ID NO: 15327 - DNA, 80 bp, synthetic construct
  misc_feature 1..80: note = Synthetic: >HCV.A17-cand-1030-1109
  source 1..80: mol_type = other DNA
aagcagccaattcagtggtggcctatggtagctggccaacatatctgaatgacaaagaagcaaatccagtagaccaaccc

SEQ ID NO: 15328 - DNA, 80 bp, synthetic construct
  misc_feature 1..80: note = Synthetic: >HCV.A17-cand-1110-1189
  source 1..80: mol_type = other DNA
accgaaccggatgtggctgcatgtcggttctacacactagaatcagtgatgtggaataaagaatctagagggtggtggtg

SEQ ID NO: 15329 - DNA, 80 bp, synthetic construct
  misc_feature 1..80: note = Synthetic: >HCV.A17-cand-1190-1269
  source 1..80: mol_type = other DNA
gaagctaccagatgcactcaaagacatgggattatttggacaaaacatgttctaccattaccttgggagaagtggataca

SEQ ID NO: 15330 - DNA, 80 bp, synthetic construct
  misc_feature 1..80: note = Synthetic: >HCV.A17-cand-1230-1309
  source 1..80: mol_type = other DNA
caaaacatgttctaccattaccttgggagaagtggatacaccgtccatgtccaatgcaacgcctcaaagtttcaccaagg

SEQ ID NO: 15331 - DNA, 80 bp, synthetic construct
  misc_feature 1..80: note = Synthetic: >HCV.A17-cand-1350-1429
  source 1..80: mol_type = other DNA
ggagattctgatgtgaaaaactcttacacgtcatatgtcaatgcaaacccaggtgaaagaggcggtgtgtttgtagacaa

SEQ ID NO: 15332 - DNA, 80 bp, synthetic construct
  misc_feature 1..80: note = Synthetic: >HCV.A17-cand-1410-1489
  source 1..80: mol_type = other DNA
ggcggtgtgtttgtagacaaattcacggctagtgcccagacaaaccccacacgcaaattctgtgcagtggattacctact

SEQ ID NO: 15333 - DNA, 80 bp, synthetic construct
  misc_feature 1..80: note = Synthetic: >HCV.A17-cand-2800-2879
  source 1..80: mol_type = other DNA
agaaactatttgccacttggaacattacgtacacagacactgtacaactcagaagcaaattagaaatgttcacttactcc

SEQ ID NO: 15334 - DNA, 80 bp, synthetic construct
  misc_feature 1..80: note = Synthetic: >HCV.A17-cand-2880-2959
  source 1..80: mol_type = other DNA
agatttgacattgaattcacctttgtcaccacagaaaggtactacaccacaaactcagggcatgcaagaaaccaagttta

SEQ ID NO: 15335 - DNA, 80 bp, synthetic construct
  misc_feature 1..80: note = Synthetic: >HCV.A17-cand-2960-3039
  source 1..80: mol_type = other DNA
ccaactaatgtatgtacctccaggtgccccggtgccacagcaatgggatgattacacgtggcaaacttcctccaatccat

SEQ ID NO: 15336 - DNA, 80 bp, synthetic construct
  misc_feature 1..80: note = Synthetic: >HCV.A17-cand-3010-3089
  source 1..80: mol_type = other DNA
attacacgtggcaaacttcctccaatccatcagtgttttacacatatggcgatgcaccggcacgcatctccataccattt

SEQ ID NO: 15337 - DNA, 80 bp, synthetic construct
  misc_feature 1..80: note = Synthetic: >HCV.A17-cand-3120-3199
  source 1..80: mol_type = other DNA
tatgatggatacgcagtggtgccattgaaagactccacccaggattcaggtgctgcttattatggagcaacatcaataaa

SEQ ID NO: 15338 - DNA, 80 bp, synthetic construct
  misc_feature 1..80: note = Synthetic: >HCV.A17-cand-3200-3279
  source 1..80: mol_type = other DNA
tgacttcggaatgcttgctgttagagtggtaaacgaattcaacccagccagaatcacatccaaagtcagagtttacatga

SEQ ID NO: 15339 - DNA, 80 bp, synthetic construct
  misc_feature 1..80: note = Synthetic: >HCV.A17-cand-3280-3359
  source 1..80: mol_type = other DNA
aacccaaacatgtgagagtatggtgtcctagaccaccaagagtggtgccatactacggaccaggagttgattacaaaggg

SEQ ID NO: 15340 - DNA, 80 bp, synthetic construct
  misc_feature 1..80: note = Synthetic: >HCV.A17-cand-3360-3439
  source 1..80: mol_type = other DNA
gaattgactccattgtcaaccaaaaacctgacaacctatgggtttggacaccaaaacaaagcagtctacacggcaggcta

SEQ ID NO: 15341 - DNA, 80 bp, synthetic construct
  misc_feature 1..80: note = Synthetic: >HCV.A17-cand-3440-3519
  source 1..80: mol_type = other DNA
caaaatctgtaactaccatcttgctacacaagaggaccttcaaaatgcagtgagtgtcatgtggaacagagacctaatag

SEQ ID NO: 15342 - DNA, 80 bp, synthetic construct
  misc_feature 1..80: note = Synthetic: >HCV.A17-cand-3490-3569
  source 1..80: mol_type = other DNA
tgagtgtcatgtggaacagagacctaatagtgactgaatccaaagctcaaggaacagactcaatcgctagatgcaattgc

SEQ ID NO: 15343 - DNA, 80 bp, synthetic construct
  misc_feature 1..80: note = Synthetic: >HCV.A17-cand-3600-3679
  source 1..80: mol_type = other DNA
agaaaatattacccagtctcctttgttggccccaccttccagtacatggaggcaaatgattactacccagccaggtatca

SEQ ID NO: 15344 - DNA, 80 bp, synthetic construct
  misc_feature 1..80: note = Synthetic: >HCV.A17-cand-3680-3759
  source 1..80: mol_type = other DNA
atcacacatgttaatcggtcatggctttgcatcaccaggagattgtggaggcatcctcagatgccagcatggagtaatag

SEQ ID NO: 15345 - DNA, 80 bp, synthetic construct
  misc_feature 1..80: note = Synthetic: >HCV.A17-cand-3780-3859
  source 1..80: mol_type = other DNA
gaaggtttagttgccttctcagacatcagagacctctatgcatatgaggaggaagcaatggaacaaggcatttccaacta

SEQ ID NO: 15346 - DNA, 80 bp, synthetic construct
  misc_feature 1..80: note = Synthetic: >HCV.A17-cand-3840-3919
  source 1..80: mol_type = other DNA
gaacaaggcatttccaactacattgaatcccttggagctgcatttgggagtggattcacccaacaaattggagacaaaat

SEQ ID NO: 15347 - DNA, 80 bp, synthetic construct
  misc_feature 1..80: note = Synthetic: >HCV.A17-cand-3920-3999
  source 1..80: mol_type = other DNA
ttcagaactcaccagcatggtcaccagcacaatcacagagaaattactgaaaaacttaataaaaattatctcatctctag

SEQ ID NO: 15348 - DNA, 80 bp, synthetic construct
  misc_feature 1..80: note = Synthetic: >HCV.A17-cand-4000-4079
  source 1..80: mol_type = other DNA
taattataaccagaaattatgaagacaccactacagtactagctactctggcactcctcgggtgtgacgtttccccatgg

SEQ ID NO: 15349 - DNA, 80 bp, synthetic construct
  misc_feature 1..80: note = Synthetic: >HCV.B3-cand-4310-4389
  source 1..80: mol_type = other DNA
cgctccactgtatgctgctgaggcaaagagagtgttctcccttgagaagaaaatgagcaattacatacagttcaagtcca

SEQ ID NO: 15350 - DNA, 80 bp, synthetic construct
  misc_feature 1..80: note = Synthetic: >HCV.B3-cand-4560-4639
  source 1..80: mol_type = other DNA
attatggatgatctgtgccagaacccagatgggaaagacgtgtcactgttctgccaaatggtgtccagtgttgactttgt

SEQ ID NO: 15351 - DNA, 80 bp, synthetic construct
  misc_feature 1..80: note = Synthetic: >HCV.B3-cand-4640-4719
  source 1..80: mol_type = other DNA
accacccatggctgcactagaagagaaaggcattctgttcacctcaccatttgtcctggcatccaccaatgcaggatcca

SEQ ID NO: 15352 - DNA, 80 bp, synthetic construct
  misc_feature 1..80: note = Synthetic: >HCV.B3-cand-4720-4799
  source 1..80: mol_type = other DNA
ttaatgctccaaccgtgtcagacagcagagccttggctagaagatttcactttgacatgaacatcgaggttatctccatg

SEQ ID NO: 15353 - DNA, 80 bp, synthetic construct
  misc_feature 1..80: note = Synthetic: >HCV.B3-cand-4920-4999
  source 1..80: mol_type = other DNA
gacagaagaacacaggtcagatactcactagacatgctagtcactgagatgtttagggagtacaatcatagacatagcgt

SEQ ID NO: 15354 - DNA, 80 bp, synthetic construct
  misc_feature 1..80: note = Synthetic: >HCV.B3-cand-5040-5119
  source 1..80: mol_type = other DNA
tacagagagatcaaaatcagtgttgcaccagaaaccccaccaccgccagcaattgcggacctgctgaaatcagtagatag

SEQ ID NO: 15355 - DNA, 80 bp, synthetic construct
  misc_feature 1..80: note = Synthetic: >HCV.B3-cand-5120-5199
  source 1..80: mol_type = other DNA
tgaggcagtgagggagtactgcaaggaaaagggatggttggttcctgagatcaactccaccctccaaattgagaagcatg

SEQ ID NO: 15356 - DNA, 80 bp, synthetic construct
  misc_feature 1..80: note = Synthetic: >HCV.B3-cand-5200-5279
  source 1..80: mol_type = other DNA
tcagtagggctttcatctgcttacaggcactgaccacatttgtctccgtggctggaataatatacatcatttacaaactg

SEQ ID NO: 15357 - DNA, 80 bp, synthetic construct
  misc_feature 1..80: note = Synthetic: >HCV.B3-cand-5280-5359
  source 1..80: mol_type = other DNA
tttgctggttttcaaggtgcgtacacaggcatgcccaaccaaaagcccaaagtgcctaccctgagacaagccaaagtgca

SEQ ID NO: 15358 - DNA, 80 bp, synthetic construct
  misc_feature 1..80: note = Synthetic: >HCV.B3-cand-5370-5449
  source 1..80: mol_type = other DNA
tttgaatttgccgtggcaatgatgaaaagaaattccagcacggtgaaaactgaatatggcgagtttaccatgctgggcat

SEQ ID NO: 15359 - DNA, 80 bp, synthetic construct
  misc_feature 1..80: note = Synthetic: >HCV.B3-cand-5450-5529
  source 1..80: mol_type = other DNA
ctatgacaggtgggcagtgctgccacgccacgccaaacctggaccaaccatcctaatgaatgaccaagaggttggtgtgc

SEQ ID NO: 15360 - DNA, 80 bp, synthetic construct
  misc_feature 1..80: note = Synthetic: >HCV.B3-cand-5530-5609
  source 1..80: mol_type = other DNA
tggatgccaaggagctagtggacaaggatggcaccaacctagaactgacactactgaaactcaaccggaatgagaagttc

SEQ ID NO: 15361 - DNA, 80 bp, synthetic construct
  misc_feature 1..80: note = Synthetic: >HCV.B3-cand-5610-5689
  source 1..80: mol_type = other DNA
agagacatcagaggcttcctagcaaaggaggaggtggaggttaatgaggctgtgctagcaattaacaccagcaagttccc

SEQ ID NO: 15362 - DNA, 80 bp, synthetic construct
  misc_feature 1..80: note = Synthetic: >HCV.B3-cand-5770-5849
  source 1..80: mol_type = other DNA
tgtacaacttcccaacaagagcaggccaatgtggtggtgttctcatgtcaacaggcaaggtgctgggaatacatgttggt

SEQ ID NO: 15363 - DNA, 80 bp, synthetic construct
  misc_feature 1..80: note = Synthetic: >HCV.B3-cand-5860-5939
  source 1..80: mol_type = other DNA
atcagggcttctcagcagccctcctcaaacactacttcaatgatgagcaaggtgagatagaattcattgagagctcaaag

SEQ ID NO: 15364 - DNA, 80 bp, synthetic construct
  misc_feature 1..80: note = Synthetic: >HCV.B3-cand-5930-6009
  source 1..80: mol_type = other DNA
gagctcaaaggacgcagggtttccagtcatcaacacaccaagcaaaacaaagttggagcctagtgtgttccaccaggtct

SEQ ID NO: 15365 - DNA, 80 bp, synthetic construct
  misc_feature 1..80: note = Synthetic: >HCV.B4-cand-710-789
  source 1..80: mol_type = other DNA
ttaatcttatattactactcaattcagcaaaatgggagctcaggtgtcaacacaaaagacaggcgcacacgagaccagct

SEQ ID NO: 15366 - DNA, 80 bp, synthetic construct
  misc_feature 1..80: note = Synthetic: >HCV.B4-cand-790-869
  source 1..80: mol_type = other DNA
tgagtgctagtggcaactctatcatccactacaccaacatcaactactacaaagatgctgcatccaattcggcaaacagg

SEQ ID NO: 15367 - DNA, 80 bp, synthetic construct
  misc_feature 1..80: note = Synthetic: >HCV.B4-cand-870-949
  source 1..80: mol_type = other DNA
caggacttcacgcaggacccgagcaagttcacagaacctgttaaggatgtgatgataaagtcactaccagcgctcaattc

SEQ ID NO: 15368 - DNA, 80 bp, synthetic construct
  misc_feature 1..80: note = Synthetic: >HCV.B4-cand-950-1029
  source 1..80: mol_type = other DNA
cccaactgtggaggaatgtgggtacagtgacagggttagatcaataacactaggaaactcaactataacaacacaagagt

SEQ ID NO: 15369 - DNA, 80 bp, synthetic construct
  misc_feature 1..80: note = Synthetic: >HCV.B4-cand-1050-1129
  source 1..80: mol_type = other DNA
tacggtgtgtggcccgactaccttagtgatgaagaggcgacagcagaagatcaacccacccaaccagatgtggcaacatg

SEQ ID NO: 15370 - DNA, 80 bp, synthetic construct
  misc_feature 1..80: note = Synthetic: >HCV.B4-cand-1110-1189
  source 1..80: mol_type = other DNA
caaccagatgtggcaacatgcaggttttacacattgaactcagtgaaatgggagatgcaatcagcagggtggtggtggaa

SEQ ID NO: 15371 - DNA, 80 bp, synthetic construct
  misc_feature 1..80: note = Synthetic: >HCV.B4-cand-1130-1209
  source 1..80: mol_type = other DNA
caggttttacacattgaactcagtgaaatgggagatgcaatcagcagggtggtggtggaaattcccagatgcattgtcag

SEQ ID NO: 15372 - DNA, 80 bp, synthetic construct
  misc_feature 1..80: note = Synthetic: >HCV.B4-cand-1260-1339
  source 1..80: mol_type = other DNA
gggtacacaatccacgtgcaatgcaacgcatctaaattccaccaaggctgtctcctggtggtgtgtgtgccagaggccga

SEQ ID NO: 15373 - DNA, 80 bp, synthetic construct
  misc_feature 1..80: note = Synthetic: >HCV.B4-cand-1400-1479
  source 1..80: mol_type = other DNA
agcaaagcaatttgagcagaatgcagccacaggtgaaactgctgtgcagacggctgtgtgcaatgcaggtatgggtgtgg

SEQ ID NO: 15374 - DNA, 80 bp, synthetic construct
  misc_feature 1..80: note = Synthetic: >HCV.B4-cand-1430-1509
  source 1..80: mol_type = other DNA
aggtgaaactgctgtgcagacggctgtgtgcaatgcaggtatgggtgtgggagttggtaacctgactatatacccccacc

SEQ ID NO: 15375 - DNA, 80 bp, synthetic construct
  misc_feature 1..80: note = Synthetic: >HCV.B4-cand-1510-1589
  source 1..80: mol_type = other DNA
aatggattaacctgaggaccaacaacagtgccaccattgtgatgccatatatcaacagtgtcccaatggacaatatgttc

SEQ ID NO: 15376 - DNA, 80 bp, synthetic construct
  misc_feature 1..80: note = Synthetic: >HCV.B4-cand-1590-1669
  source 1..80: mol_type = other DNA
aggcacaacaactttacattgatgataataccatttgcaccattggattatgtcactggagcatcctcctacatcccaat

SEQ ID NO: 15377 - DNA, 80 bp, synthetic construct
  misc_feature 1..80: note = Synthetic: >HCV.B4-cand-1670-1749
  source 1..80: mol_type = other DNA
caccgtgacagttgcccccatgagcgctgagtacaatggtttgcgtctagccggtcaccaaggcctaccaaccatgctca

SEQ ID NO: 15378 - DNA, 80 bp, synthetic construct
  misc_feature 1..80: note = Synthetic: >HCV.B4-cand-1750-1829
  source 1..80: mol_type = other DNA
caccaggtagcacacagtttttgacatcagatgacttccaatcaccttcagctatgccacaatttgatgtgacccctgaa

SEQ ID NO: 15379 - DNA, 80 bp, synthetic construct
  misc_feature 1..80: note = Synthetic: >HCV.B4-cand-1830-1909
  source 1..80: mol_type = other DNA
atgaacataccagggcaagttaggaacttgatggaaatagcggaagttgattccgtggtgccacttaacaacttgaaagc

SEQ ID NO: 15380 - DNA, 80 bp, synthetic construct
  misc_feature 1..80: note = Synthetic: >HCV.B4-cand-1910-1989
  source 1..80: mol_type = other DNA
taacctgatgactatggaagcttacagagtgcaggtgaggtctacggatgaaatgggtggacagatatttggcttccctt

SEQ ID NO: 15381 - DNA, 80 bp, synthetic construct
  misc_feature 1..80: note = Synthetic: >LR862007.1-cand-3240-3319
  source 1..80: mol_type = other DNA
ggtgtactatgtaaaatttatacatgatgccaaaaaatatgggactacagacaagtgggaagtgcattataatggcaagg

SEQ ID NO: 15382 - DNA, 80 bp, synthetic construct
  misc_feature 1..80: note = Synthetic: >LR862007.1-cand-3320-3399
  source 1..80: mol_type = other DNA
ttattgattgttatgactctatgtgcagtaccagtgacgagcaagtatccactgctggatcttctgagcaactatcatac

SEQ ID NO: 15383 - DNA, 80 bp, synthetic construct
  misc_feature 1..80: note = Synthetic: >LR862007.1-cand-3410-3489
  source 1..80: mol_type = other DNA
cgccccccgaagccacgtacttgggcccccaaacgtccaaccgtcagacgaagactggaaagcgaccaagacagtgtgga

SEQ ID NO: 15384 - DNA, 80 bp, synthetic construct
  misc_feature 1..80: note = Synthetic: >LR862007.1-cand-3490-3569
  source 1..80: mol_type = other DNA
cacacacagcaccctcagtctaccagcgtgtcagtggactactgtgacaacccagtcgtccgtttgcatccaggcaacaa

SEQ ID NO: 15385 - DNA, 80 bp, synthetic construct
  misc_feature 1..80: note = Synthetic: >LR862007.1-cand-3570-3649
  source 1..80: mol_type = other DNA
cccgcgacggcacatcccttgcagtaacactacgcctataatacacttaaaaggtgacaaaaatggccttaagtgtttaa

SEQ ID NO: 15386 - DNA, 80 bp, synthetic construct
  misc_feature 1..80: note = Synthetic: >LR862007.1-cand-3650-3729
  source 1..80: mol_type = other DNA
ggtatagattaagaaaagtacactggttatttgaaaatatttcctctacctggcattggacaggaaacagaggatcagcc

SEQ ID NO: 15387 - DNA, 80 bp, synthetic construct
  misc_feature 1..80: note = Synthetic: >LR862007.1-cand-3720-3799
  source 1..80: mol_type = other DNA
aggatcagccaaaacaggcattttaacattaacatatacaagcgaaacacaacgcaatgaatttttagatactgtaaaaa

SEQ ID NO: 15388 - DNA, 80 bp, synthetic construct
  misc_feature 1..80: note = Synthetic: >LR862007.1-cand-3800-3879
  source 1..80: mol_type = other DNA
ttcctaatagtgtacaaatacatgttgggtatatgagtgtgtaatggttgttatgcaaatgtaacacaagccaatactaa

SEQ ID NO: 15389 - DNA, 80 bp, synthetic construct
  misc_feature 1..80: note = Synthetic: >LR862007.1-cand-3880-3959
  source 1..80: mol_type = other DNA
cacaagccaatactgctgctatattgtatagctgaggaaatgataacccttgtatttgtgtgttgtgtttgtgtttgctt

SEQ ID NO: 15390 - DNA, 80 bp, synthetic construct
  misc_feature 1..80: note = Synthetic: >LR862007.1-cand-3960-4039
  source 1..80: mol_type = other DNA
gtgtgtgtgttgcaatgtcccgcttctgcaatctgtctatatgtgtgcatatacatggttactagtatttgtgtatattg

SEQ ID NO: 15391 - DNA, 80 bp, synthetic construct
  misc_feature 1..80: note = Synthetic: >LR862007.1-cand-4040-4119
  source 1..80: mol_type = other DNA
tggttatcacctcctcatatgagtgttttctactatatatattgttttttataattccactgttactactatatgcccat

SEQ ID NO: 15392 - DNA, 80 bp, synthetic construct
  misc_feature 1..80: note = Synthetic: >LR862007.1-cand-4120-4199
  source 1..80: mol_type = other DNA
gcaatactgtccatacaataattgttgtatattgtaaattacattgcactgtattgtacagtatattttaaacacattat

SEQ ID NO: 15393 - DNA, 80 bp, synthetic construct
  misc_feature 1..80: note = Synthetic: >LR862007.1-cand-4200-4279
  source 1..80: mol_type = other DNA
tatttttgttaggtgttggttttgttacatttataataaaacatggtttcccatcgtgctgctcgtcgtaaacgtgcctc

SEQ ID NO: 15394 - DNA, 80 bp, synthetic construct
  misc_feature 1..80: note = Synthetic: >LR862007.1-cand-4280-4359
  source 1..80: mol_type = other DNA
agcaacagacttatataaaacctgcaagcaggcaggtacatgcccttctgatgttattaataaagttgaaggtacaactt

SEQ ID NO: 15395 - DNA, 80 bp, synthetic construct
  misc_feature 1..80: note = Synthetic: >LR862007.1-cand-4360-4439
  source 1..80: mol_type = other DNA
tagctgataaaatattgcagtggaccagcctaggaatatttttaggtggactaggtattggtactggatctggtaccggt

SEQ ID NO: 15396 - DNA, 80 bp, synthetic construct
  misc_feature 1..80: note = Synthetic: >LR862007.1-cand-4470-4549
  source 1..80: mol_type = other DNA
cgtacaaacactatagtagatgtatcgcctgctaaaccaccagtagttattgaacctgttggacctacagatccatctat

SEQ ID NO: 15397 - DNA, 80 bp, synthetic construct
  misc_feature 1..80: note = Synthetic: >NC_001611.1-cand-33530-33609
  source 1..80: mol_type = other DNA
tgttgaaaatgaaacggtgaatacaatagttcagataatgtaaaatcatgattccgtattctgatgatattagaactact

SEQ ID NO: 15398 - DNA, 80 bp, synthetic construct
  misc_feature 1..80: note = Synthetic: >NC_001611.1-cand-33610-33689
  source 1..80: mol_type = other DNA
aatggatgtcaatggtatgtatctaggagtatctattttaacaaagcatctatttgctaatatacaattatccttttgat

SEQ ID NO: 15399 - DNA, 80 bp, synthetic construct
  misc_feature 1..80: note = Synthetic: >NC_001611.1-cand-33770-33849
  source 1..80: mol_type = other DNA
tgtagcccgcaatactcctcattacgtttcattttttgtctataatatccattttgtttatctcagtacatagattatcc

SEQ ID NO: 15400 - DNA, 80 bp, synthetic construct
  misc_feature 1..80: note = Synthetic: >NC_001611.1-cand-33930-34009
  source 1..80: mol_type = other DNA
attatttgataccctgatattaatacccctaccgttactattatttataactgatgtaacccacgtaacattagaattaa

SEQ ID NO: 15401 - DNA, 80 bp, synthetic construct
  misc_feature 1..80: note = Synthetic: >NC_001611.1-cand-34010-34089
  source 1..80: mol_type = other DNA
ttatcgatagtaatgcattcacgcttccaaaattgtctattataaactcaccaataatttttttattgcatgttttcata

SEQ ID NO: 15402 - DNA, 80 bp, synthetic construct
  misc_feature 1..80: note = Synthetic: >NC_001611.1-cand-34170-34249
  source 1..80: mol_type = other DNA
atctccatcaaatgccagacaatcacgtacaaagaacatggaaataggttttgttctattgcgcatcatagattcatata

SEQ ID NO: 15403 - DNA, 80 bp, synthetic construct
  misc_feature 1..80: note = Synthetic: >NC_001611.1-cand-34330-34409
  source 1..80: mol_type = other DNA
caagtggcgaattccaaatttttttcattgatagtaccaaattcttctatctctttaactatttgcatagataggtaatt

SEQ ID NO: 15404 - DNA, 80 bp, synthetic construct
  misc_feature 1..80: note = Synthetic: >NC_001611.1-cand-34490-34569
  source 1..80: mol_type = other DNA
tcatatttagaatatatgtatgtaaaaatatagtagaatttcattttgtttttttctatgctataaatgaattctcattt

SEQ ID NO: 15405 - DNA, 80 bp, synthetic construct
  misc_feature 1..80: note = Synthetic: >NC_001611.1-cand-34570-34649
  source 1..80: mol_type = other DNA
tgcatctgcccatactccgttttatatcaataccaaagaaggaagatatctggttctaaaagctgttaaagtatgcgatg

SEQ ID NO: 15406 - DNA, 80 bp, synthetic construct
  misc_feature 1..80: note = Synthetic: >NC_001611.1-cand-34650-34729
  source 1..80: mol_type = other DNA
ttagaactgtagaattcgaaggaagtaaagcttcctgcgtactcaaagtagataaaccctcatcgcccgcgagcgagaga

SEQ ID NO: 15407 - DNA, 80 bp, synthetic construct
  misc_feature 1..80: note = Synthetic: >NC_001611.1-cand-34740-34819
  source 1..80: mol_type = other DNA
caccgtccagatgcgagagaatgaataacccaggaaaacaagttccgtttatgaggacggacatgctacaaaatatgttc

SEQ ID NO: 15408 - DNA, 80 bp, synthetic construct
  misc_feature 1..80: note = Synthetic: >NC_001611.1-cand-34820-34899
  source 1..80: mol_type = other DNA
gcggctaatcgcgataatgtagcttctagacttttgtcctaaaatactattatatctttttcgatattaataaatccgtg

SEQ ID NO: 15409 - DNA, 80 bp, synthetic construct
  misc_feature 1..80: note = Synthetic: >NC_001611.1-cand-35300-35379
  source 1..80: mol_type = other DNA
atcggcatattattacgcttaccatcaaagactataccatgtgtatatctaacgtattctagcatagttgccatacgcgc

SEQ ID NO: 15410 - DNA, 80 bp, synthetic construct
  misc_feature 1..80: note = Synthetic: >NC_001611.1-cand-35460-35539
  source 1..80: mol_type = other DNA
acgtcgggtccactatatagatattatctataaagattttaggaactacgttcatggtatcctggcgaatattaaaacta

SEQ ID NO: 15411 - DNA, 80 bp, synthetic construct
  misc_feature 1..80: note = Synthetic: >NC_001611.1-cand-36020-36099
  source 1..80: mol_type = other DNA
ttacctatattatatgtttgagtctgtttagaaaagtagctaagtatacgatcttttatttctgatgcagatgtatcaac

SEQ ID NO: 15412 - DNA, 80 bp, synthetic construct
  misc_feature 1..80: note = Synthetic: >NC_001611.1-cand-36180-36259
  source 1..80: mol_type = other DNA
ttctagtttgtaattttaacatatgatattcattcacactaggtaatctacctaaataggtttctataatctttaatgta

SEQ ID NO: 15413 - DNA, 80 bp, synthetic construct
  misc_feature 1..80: note = Synthetic: >NC_001802.1-cand-4960-5039
  source 1..80: mol_type = other DNA
cacatagttagccctaggtgtgaatatcaagcaggacataacaaggtaggatctctacaatacttggcactagcagcatt

SEQ ID NO: 15414 - DNA, 80 bp, synthetic construct
  misc_feature 1..80: note = Synthetic: >NC_001802.1-cand-5040-5119
  source 1..80: mol_type = other DNA
aataacaccaaaaaagataaagccacctttgcctagtgttacgaaactgacagaggatagatggaacaagccccagaaga

SEQ ID NO: 15415 - DNA, 80 bp, synthetic construct
  misc_feature 1..80: note = Synthetic: >NC_001802.1-cand-5130-5209
  source 1..80: mol_type = other DNA
cagagggagccacacaatgaatggacactagagcttttagaggagcttaagaatgaagctgttagacattttcctaggat

SEQ ID NO: 15416 - DNA, 80 bp, synthetic construct
  misc_feature 1..80: note = Synthetic: >NC_001802.1-cand-5170-5249
  source 1..80: mol_type = other DNA
aggagcttaagaatgaagctgttagacattttcctaggatttggctccatggcttagggcaacatatctatgaaacttat

SEQ ID NO: 15417 - DNA, 80 bp, synthetic construct
  misc_feature 1..80: note = Synthetic: >NC_001802.1-cand-5290-5369
  source 1..80: mol_type = other DNA
tgcaacaactgctgtttatccattttcagaattgggtgtcgacatagcagaataggcgttactcgacagaggagagcaag

SEQ ID NO: 15418 - DNA, 80 bp, synthetic construct
  misc_feature 1..80: note = Synthetic: >NC_001802.1-cand-5370-5449
  source 1..80: mol_type = other DNA
aaatggagccagtagatcctagactagagccctggaagcatccaggaagtcagcctaaaactgcttgtaccaattgctat

SEQ ID NO: 15419 - DNA, 80 bp, synthetic construct
  misc_feature 1..80: note = Synthetic: >NC_001802.1-cand-5450-5529
  source 1..80: mol_type = other DNA
tgtaaaaagtgttgctttcattgccaagtttgtttcataacaaaagccttaggcatctcctatggcaggaagaagcggag

SEQ ID NO: 15420 - DNA, 80 bp, synthetic construct
  misc_feature 1..80: note = Synthetic: >NC_001802.1-cand-5530-5609
  source 1..80: mol_type = other DNA
acagcgacgaagagctcatcagaacagtcagactcatcaagcttctctatcaaagcagtaagtagtacatgtaatgcaac

SEQ ID NO: 15421 - DNA, 80 bp, synthetic construct
  misc_feature 1..80: note = Synthetic: >NC_001802.1-cand-5610-5689
  source 1..80: mol_type = other DNA
ctataccaatagtagcaatagtagcattagtagtagcaataataatagcaatagttgtgtggtccatagtaatcatagaa

SEQ ID NO: 15422 - DNA, 80 bp, synthetic construct
  misc_feature 1..80: note = Synthetic: >NC_001802.1-cand-5720-5799
  source 1..80: mol_type = other DNA
gacaggttaattgatagactaatagaaagagcagaagacagtggcaatgagagtgaaggagaaatatcagcacttgtgga

SEQ ID NO: 15423 - DNA, 80 bp, synthetic construct
  misc_feature 1..80: note = Synthetic: >NC_001802.1-cand-5810-5889
  source 1..80: mol_type = other DNA
gagatggggcaccatgctccttgggatgttgatgatctgtagtgctacagaaaaattgtgggtcacagtctattatgggg

SEQ ID NO: 15424 - DNA, 80 bp, synthetic construct
  misc_feature 1..80: note = Synthetic: >NC_001802.1-cand-5890-5969
  source 1..80: mol_type = other DNA
tacctgtgtggaaggaagcaaccaccactctattttgtgcatcagatgctaaagcatatgatacagaggtacataatgtt

SEQ ID NO: 15425 - DNA, 80 bp, synthetic construct
  misc_feature 1..80: note = Synthetic: >NC_001802.1-cand-5970-6049
  source 1..80: mol_type = other DNA
tgggccacacatgcctgtgtacccacagaccccaacccacaagaagtagtattggtaaatgtgacagaaaattttaacat

SEQ ID NO: 15426 - DNA, 80 bp, synthetic construct
  misc_feature 1..80: note = Synthetic: >NC_001802.1-cand-6050-6129
  source 1..80: mol_type = other DNA
gtggaaaaatgacatggtagaacagatgcatgaggatataatcagtttatgggatcaaagcctaaagccatgtgtaaaat

SEQ ID NO: 15427 - DNA, 80 bp, synthetic construct
  misc_feature 1..80: note = Synthetic: >NC_001802.1-cand-6130-6209
  source 1..80: mol_type = other DNA
taaccccactctgtgttagtttaaagtgcactgatttgaagaatgatactaataccaatagtagtagcgggagaatgata

SEQ ID NO: 15428 - DNA, 80 bp, synthetic construct
  misc_feature 1..80: note = Synthetic: >NC_001802.1-cand-6210-6289
  source 1..80: mol_type = other DNA
atggagaaaggagagataaaaaactgctctttcaatatcagcacaagcataagaggtaaggtgcagaaagaatatgcatt

SEQ ID NO: 15429 - DNA, 80 bp, synthetic construct
  misc_feature 1..80: note = Synthetic: >NC_001803.1-cand-6230-6309
  source 1..80: mol_type = other DNA
cagttgttacctattgtgaacaagcaaagctgtagcatatcaaacattgaaactgtgatagagttccaacaaaagaacaa

SEQ ID NO: 15430 - DNA, 80 bp, synthetic construct
  misc_feature 1..80: note = Synthetic: >NC_001803.1-cand-6310-6389
  source 1..80: mol_type = other DNA
cagactactagagattaccagggaatttagtgttaatgcaggtgtaactacacctgtaagcacttatatgttaacaaata

SEQ ID NO: 15431 - DNA, 80 bp, synthetic construct
  misc_feature 1..80: note = Synthetic: >NC_001803.1-cand-6390-6469
  source 1..80: mol_type = other DNA
gtgaattattatcattaatcaatgatatgcctataacaaatgatcagaaaaagttaatgtccaacaatgttcaaatagtt

SEQ ID NO: 15432 - DNA, 80 bp, synthetic construct
  misc_feature 1..80: note = Synthetic: >NC_001803.1-cand-6470-6549
  source 1..80: mol_type = other DNA
agacagcaaagttactctatcatgtccataataaaggaggaagtcttagcatatgtagtacaattaccactatatggtgt

SEQ ID NO: 15433 - DNA, 80 bp, synthetic construct
  misc_feature 1..80: note = Synthetic: >NC_001803.1-cand-6550-6629
  source 1..80: mol_type = other DNA
aatagatacaccttgttggaaactgcacacatcccctctatgtacaaccaacacaaaggaagggtccaacatctgtttaa

SEQ ID NO: 15434 - DNA, 80 bp, synthetic construct
  misc_feature 1..80: note = Synthetic: >NC_001803.1-cand-6630-6709
  source 1..80: mol_type = other DNA
caagaaccgacagaggatggtactgtgacaatgcaggatcagtatctttcttcccactagctgaaacatgtaaagttcaa

SEQ ID NO: 15435 - DNA, 80 bp, synthetic construct
  misc_feature 1..80: note = Synthetic: >NC_001803.1-cand-6710-6789
  source 1..80: mol_type = other DNA
tcgaatcgagtattttgtgacacaatgaacagtttaacattaccaagtgaagtaaatctctgcaacattgacatattcaa

SEQ ID NO: 15436 - DNA, 80 bp, synthetic construct
  misc_feature 1..80: note = Synthetic: >NC_001803.1-cand-6790-6869
  source 1..80: mol_type = other DNA
ccccaaatatgattgcaaaattatgacttcaaaaacagatgtaagcagctccgttatcacatctctaggagccattgtgt

SEQ ID NO: 15437 - DNA, 80 bp, synthetic construct
  misc_feature 1..80: note = Synthetic: >NC_001803.1-cand-6870-6949
  source 1..80: mol_type = other DNA
catgctatggcaaaactaaatgtacagcatccaataaaaatcgtggaatcataaagacattttctaacgggtgcgattat

SEQ ID NO: 15438 - DNA, 80 bp, synthetic construct
  misc_feature 1..80: note = Synthetic: >NC_001803.1-cand-6970-7049
  source 1..80: mol_type = other DNA
cactgtgtctgtaggtaatacattatattatgtaaataagcaagaaggcaaaagtctctatgtaaaaggtgaaccaataa

SEQ ID NO: 15439 - DNA, 80 bp, synthetic construct
  misc_feature 1..80: note = Synthetic: >NC_001803.1-cand-7030-7109
  source 1..80: mol_type = other DNA
tgtaaaaggtgaaccaataataaatttctatgacccattagtgttcccctctgatgaatttgatgcatcaatatctcaag

SEQ ID NO: 15440 - DNA, 80 bp, synthetic construct
  misc_feature 1..80: note = Synthetic: >NC_001803.1-cand-7110-7189
  source 1..80: mol_type = other DNA
tcaatgagaagattaaccagagcctagcatttattcgtaaatccgatgaattattacataatgtaaatgctggtaaatcc

SEQ ID NO: 15441 - DNA, 80 bp, synthetic construct
  misc_feature 1..80: note = Synthetic: >NC_001803.1-cand-7190-7269
  source 1..80: mol_type = other DNA
accataaatatcatgataactactataattatagtgattatagtaatattgttatcattaattgccgttggactgctcct

SEQ ID NO: 15442 - DNA, 80 bp, synthetic construct
  misc_feature 1..80: note = Synthetic: >NC_001803.1-cand-7270-7349
  source 1..80: mol_type = other DNA
atactgcaaggccagaagcacaccagtcacactaagcaaggatcaactgagtggtataaataatattgcatttagtaact

SEQ ID NO: 15443 - DNA, 80 bp, synthetic construct
  misc_feature 1..80: note = Synthetic: >NC_001803.1-cand-7360-7439
  source 1..80: mol_type = other DNA
agcacctaatcatgttcttacaatggtttcatatctgctcatagacaacccatctatcattggattttcttaaaatctga

SEQ ID NO: 15444 - DNA, 80 bp, synthetic construct
  misc_feature 1..80: note = Synthetic: >NC_001803.1-cand-7440-7519
  source 1..80: mol_type = other DNA
acttcatcgaaactctcatctataaaccatctcacttacattatttaagtagattcctagtttatagttatataaaacaa

SEQ ID NO: 15445 - DNA, 80 bp, synthetic construct
  misc_feature 1..80: note = Synthetic: >NC_001803.1-cand-11350-11429
  source 1..80: mol_type = other DNA
aaaccttttttaatcttgataatattgatacagcattaacattgtatatgaatttgcccatgttatttggtggtggtgat

SEQ ID NO: 15446 - DNA, 80 bp, synthetic construct
  misc_feature 1..80: note = Synthetic: >NC_001803.1-cand-11430-11509
  source 1..80: mol_type = other DNA
cccaacttgttatatcgaagtttctatagaagaactcctgatttcctcacagaggctatagttcactctgtgttcatact

SEQ ID NO: 15447 - DNA, 80 bp, synthetic construct
  misc_feature 1..80: note = Synthetic: >NC_001803.1-cand-11510-11589
  source 1..80: mol_type = other DNA
tagttattatacaaaccatgatttaaaagataaacttcaagatctgtcagatgatagattgaataagttcttaacatgca

SEQ ID NO: 15448 - DNA, 80 bp, synthetic construct
  misc_feature 1..80: note = Synthetic: >NC_001803.1-cand-11590-11669
  source 1..80: mol_type = other DNA
taatcacatttgacaaaaaccctaatgctgaattcgtaacattgatgagagatcctcaagctttagggtctgagagacaa

SEQ ID NO: 15449 - DNA, 80 bp, synthetic construct
  misc_feature 1..80: note = Synthetic: >NC_001803.1-cand-11670-11749
  source 1..80: mol_type = other DNA
gctaaaattactagcgaaatcaatagactggcagttactgaggttttgagcacagctccaaacaaaatattctccaaaag

SEQ ID NO: 15450 - DNA, 80 bp, synthetic construct
  misc_feature 1..80: note = Synthetic: >NC_001803.1-cand-11750-11829
  source 1..80: mol_type = other DNA
tgcacaacactataccactacagagatagatctaaatgatattatgcaaaatatagaacctacatatcctcacgggctaa

SEQ ID NO: 15451 - DNA, 80 bp, synthetic construct
  misc_feature 1..80: note = Synthetic: >NC_001803.1-cand-11830-11909
  source 1..80: mol_type = other DNA
gagttgtttatgaaagtttacccttttataaagcagagaaaatagtaaatcttatatccggtacaaaatctataactaac

SEQ ID NO: 15452 - DNA, 80 bp, synthetic construct
  misc_feature 1..80: note = Synthetic: >NC_001803.1-cand-11910-11989
  source 1..80: mol_type = other DNA
atactggaaaagacttctgccatagacttaacagatattgatagagccactgagatgatgaggaaaaacataactttgct

SEQ ID NO: 15453 - DNA, 80 bp, synthetic construct
  misc_feature 1..80: note = Synthetic: >NC_001803.1-cand-11990-12069
  source 1..80: mol_type = other DNA
tataaggatatttccattagattgtaacagagataaaagggaaatattgagtatggaaaacctaagtattactgaattaa

SEQ ID NO: 15454 - DNA, 80 bp, synthetic construct
  misc_feature 1..80: note = Synthetic: >NC_001803.1-cand-12070-12149
  source 1..80: mol_type = other DNA
gcaaatatgttagggaaagatcttggtctttatccaatatagttggtgttacatcacctagtatcatgtatacaatggac

SEQ ID NO: 15455 - DNA, 80 bp, synthetic construct
  misc_feature 1..80: note = Synthetic: >NC_001803.1-cand-12150-12229
  source 1..80: mol_type = other DNA
atcaaatatacaacaagcactatagctagtggcataatcatagagaaatataatgttaacagtttaacacgtggtgagag

SEQ ID NO: 15456 - DNA, 80 bp, synthetic construct
  misc_feature 1..80: note = Synthetic: >NC_001803.1-cand-12230-12309
  source 1..80: mol_type = other DNA
aggacccactaaaccatgggttggttcatctacacaagagaaaaaaacaatgccagtttataatagacaagttttaacca

SEQ ID NO: 15457 - DNA, 80 bp, synthetic construct
  misc_feature 1..80: note = Synthetic: >NC_001803.1-cand-12310-12389
  source 1..80: mol_type = other DNA
aaaaacagagagatcaaatagatctattagcaaaattggattgggtgtatgcatctatagataacaaggatgaattcatg

SEQ ID NO: 15458 - DNA, 80 bp, synthetic construct
  misc_feature 1..80: note = Synthetic: >NC_001803.1-cand-12390-12469
  source 1..80: mol_type = other DNA
gaagaacttagcataggaattcttgggttaacatatgagaaagccaaaaaattatttccacaatatttaagtgttaacta

SEQ ID NO: 15459 - DNA, 80 bp, synthetic construct
  misc_feature 1..80: note = Synthetic: >NC_001803.1-cand-12470-12549
  source 1..80: mol_type = other DNA
tttgcatcgccttacagtcagtagtagaccatgtgaattccctgcatcaataccagcttatagaactacaaattatcact

SEQ ID NO: 15460 - DNA, 80 bp, synthetic construct
  misc_feature 1..80: note = Synthetic: >NC_001803.1-cand-12550-12629
  source 1..80: mol_type = other DNA
ttgatactagccctattaatcgcatattaacagaaaagtatggtgatgaagatattgatatagtattccaaaactgtata

SEQ ID NO: 15461 - DNA, 80 bp, synthetic construct
  misc_feature 1..80: note = Synthetic: >NC_001897.1-cand-1310-1389
  source 1..80: mol_type = other DNA
accaatttaccacatgtgttaatgaacttggccgagactacccaggccgacttatgtatcccctatgttgcagatacaaa

SEQ ID NO: 15462 - DNA, 80 bp, synthetic construct
  misc_feature 1..80: note = Synthetic: >NC_001897.1-cand-1390-1469
  source 1..80: mol_type = other DNA
ctatgtgaagactgattcatctgacttagggcaattgaaagtttatgtgtggactccccttagcattccatcaggctcat

SEQ ID NO: 15463 - DNA, 80 bp, synthetic construct
  misc_feature 1..80: note = Synthetic: >NC_001897.1-cand-1470-1549
  source 1..80: mol_type = other DNA
ctaaccaagtggacgtgactatattgggtagcttattacaattggatttccaaaacccaagggtgtatgggcaaaatgtt

SEQ ID NO: 15464 - DNA, 80 bp, synthetic construct
  misc_feature 1..80: note = Synthetic: >NC_001897.1-cand-1550-1629
  source 1..80: mol_type = other DNA
gacatttacgatacagcaccctctaaaccaattccattgaggaagactaaatatttgactatgagcacaaaatacaaatg

SEQ ID NO: 15465 - DNA, 80 bp, synthetic construct
  misc_feature 1..80: note = Synthetic: >NC_001897.1-cand-1630-1709
  source 1..80: mol_type = other DNA
gacaagaaataaagtagacatagctgaaggtccaggttcaatgaacatggcaaatgtacttagtacgacagcagcacaat

SEQ ID NO: 15466 - DNA, 80 bp, synthetic construct
  misc_feature 1..80: note = Synthetic: >NC_001897.1-cand-1730-1809
  source 1..80: mol_type = other DNA
agggctttttatgatcccaggactgctggtagcaaatctagatttgatgacttagtaaaaatctcacagttgttttcagt

SEQ ID NO: 15467 - DNA, 80 bp, synthetic construct
  misc_feature 1..80: note = Synthetic: >NC_001897.1-cand-1790-1869
  source 1..80: mol_type = other DNA
atctcacagttgttttcagttatggcagattccaccactccatctgccaatcatggaatagaccaaaagggttatttcaa

SEQ ID NO: 15468 - DNA, 80 bp, synthetic construct
  misc_feature 1..80: note = Synthetic: >NC_001897.1-cand-1870-1949
  source 1..80: mol_type = other DNA
atggtctgccaattctgatccacaggcaatagtgcatagaaacttagttcatttaaatctatttccaaatttgaaggtct

SEQ ID NO: 15469 - DNA, 80 bp, synthetic construct
  misc_feature 1..80: note = Synthetic: >NC_001897.1-cand-1950-2029
  source 1..80: mol_type = other DNA
ttgaaaacagttattcatacttcagaggttctcttataatcaggttaagtgtttatgctagtacattcaacagaggccgt

SEQ ID NO: 15470 - DNA, 80 bp, synthetic construct
  misc_feature 1..80: note = Synthetic: >NC_001897.1-cand-2030-2109
  source 1..80: mol_type = other DNA
ttgaatgggttctttccaaattccagtacagatgaaacttctgaaattgataatgccatctacaccatatgtgatattgg

SEQ ID NO: 15471 - DNA, 80 bp, synthetic construct
  misc_feature 1..80: note = Synthetic: >NC_001897.1-cand-2110-2189
  source 1..80: mol_type = other DNA
atctgacaatagttttgagattactatcccttattcattttccacttggatgaggaagacacatggtaaacctattggcc

SEQ ID NO: 15472 - DNA, 80 bp, synthetic construct
  misc_feature 1..80: note = Synthetic: >NC_001897.1-cand-2190-2269
  source 1..80: mol_type = other DNA
tattccagattgaagtcctaaataggttaacatacaattactccagtccaaatgaggtatactgcatagtgcaaggtaaa

SEQ ID NO: 15473 - DNA, 80 bp, synthetic construct
  misc_feature 1..80: note = Synthetic: >NC_001897.1-cand-2250-2329
  source 1..80: mol_type = other DNA
actgcatagtgcaaggtaaaatgggacaagacgccaaatttttctgccccactgggtctttagtaactttccagaattca

SEQ ID NO: 15474 - DNA, 80 bp, synthetic construct
  misc_feature 1..80: note = Synthetic: >NC_001897.1-cand-2350-2429
  source 1..80: mol_type = other DNA
gactgacccgctttgcatagaagattcagtagaagattgtaagcaaaccattacaccaacagaattgggactaacctcag

SEQ ID NO: 15475 - DNA, 80 bp, synthetic construct
  misc_feature 1..80: note = Synthetic: >NC_001897.1-cand-2430-2509
  source 1..80: mol_type = other DNA
cacaagatgatggccctttaggaaatgacaaaccaaattattttcttaactttaagtctatgaatgttgatatctttact

SEQ ID NO: 15476 - DNA, 80 bp, synthetic construct
  misc_feature 1..80: note = Synthetic: >NC_001897.1-cand-2510-2589
  source 1..80: mol_type = other DNA
gtcagtcacaccaaagtagacaatatttttggacgtgcttggtttgcccatgttcatgacttcactaatgatggcctatg

SEQ ID NO: 15477 - DNA, 80 bp, synthetic construct
  misc_feature 1..80: note = Synthetic: >NC_001897.1-cand-3880-3959
  source 1..80: mol_type = other DNA
ttggtggatacaaactttgttgaaaattaaggatatggtactatcagtatttaagcccagtgtggagaagagagcagttg

SEQ ID NO: 15478 - DNA, 80 bp, synthetic construct
  misc_feature 1..80: note = Synthetic: >NC_001897.1-cand-3960-4039
  source 1..80: mol_type = other DNA
aatggttggaaagaaataaagagcatgtgtgcagtatacttgattatgcttctgacattatagttaagtcaaaggaccag

SEQ ID NO: 15479 - DNA, 80 bp, synthetic construct
  misc_feature 1..80: note = Synthetic: >NC_001897.1-cand-4040-4119
  source 1..80: mol_type = other DNA
acaaaaatgaaaacacaagaattttatcagcgttacaatgattgtttgtctaaatttaaacccattatggcaatgtgctt

SEQ ID NO: 15480 - DNA, 80 bp, synthetic construct
  misc_feature 1..80: note = Synthetic: >NC_001897.1-cand-4120-4199
  source 1..80: mol_type = other DNA
tagaagctgtcacaatagtattagtaacacagtctacagattattccaggaattagctagaatacccaacagaatggcca

SEQ ID NO: 15481 - DNA, 80 bp, synthetic construct
  misc_feature 1..80: note = Synthetic: >NC_001897.1-cand-4200-4279
  source 1..80: mol_type = other DNA
cacaaaatgacttaatccgagtagaaccaattggaatttggatccaaggtgagcccggtcagggcaaatcattcctaaca

SEQ ID NO: 15482 - DNA, 80 bp, synthetic construct
  misc_feature 1..80: note = Synthetic: >NC_001897.1-cand-4280-4359
  source 1..80: mol_type = other DNA
cacacactttctaaacaactacaaaagacttgtggattacagggtatttataccaacccaactgcaagtgaattcatgga

SEQ ID NO: 15483 - DNA, 80 bp, synthetic construct
  misc_feature 1..80: note = Synthetic: >NC_001897.1-cand-4360-4439
  source 1..80: mol_type = other DNA
tggatatgataatcaggatatacatttgattgatgatttgggccaaacaaggaaggagagggacattgagatgttgtgta

SEQ ID NO: 15484 - DNA, 80 bp, synthetic construct
  misc_feature 1..80: note = Synthetic: >NC_001897.1-cand-4440-4519
  source 1..80: mol_type = other DNA
attgtatatcatcagatcccgatatagtccctatggcccaccttgaggaaaaaggcaaattctacacaagcaaattagtt

SEQ ID NO: 15485 - DNA, 80 bp, synthetic construct
  misc_feature 1..80: note = Synthetic: >NC_001897.1-cand-4520-4599
  source 1..80: mol_type = other DNA
atagccaccacaaataaacctgatttttccagtacagtcttattagattcaggtgctctgaggagaaggtttccatacat

SEQ ID NO: 15486 - DNA, 80 bp, synthetic construct
  misc_feature 1..80: note = Synthetic: >NC_001897.1-cand-4600-4679
  source 1..80: mol_type = other DNA
tatgcatattagagctgctaaacattatagcaaatcaggcaaactaaatgtctcccaagctatgccacatatgtcaaccg

SEQ ID NO: 15487 - DNA, 80 bp, synthetic construct
  misc_feature 1..80: note = Synthetic: >NC_001897.1-cand-4680-4759
  source 1..80: mol_type = other DNA
gcgagtgttgggaagtctctaagaatggtagagactgggaaactttgaaactgaaagagctaatagataagatcacagtt

SEQ ID NO: 15488 - DNA, 80 bp, synthetic construct
  misc_feature 1..80: note = Synthetic: >NC_001897.1-cand-4750-4829
  source 1..80: mol_type = other DNA
gatcacagttgactacaaagagagaattgcaaattacaacacttggaagaagcagttagaggaccagaccctcgatgatt

SEQ ID NO: 15489 - DNA, 80 bp, synthetic construct
  misc_feature 1..80: note = Synthetic: >NC_001897.1-cand-4830-4909
  source 1..80: mol_type = other DNA
tggatgatgcagtttcatacatcaagcacaactacccagatgcaattccgtatattgatgaatatctgaatattgaaatg

SEQ ID NO: 15490 - DNA, 80 bp, synthetic construct
  misc_feature 1..80: note = Synthetic: >NC_001897.1-cand-4910-4989
  source 1..80: mol_type = other DNA
tcaacactaattgaacaaatggaagcttttattgaaccaaaacctagtgttttcaaatgttttgccagcagagttggaga

SEQ ID NO: 15491 - DNA, 80 bp, synthetic construct
  misc_feature 1..80: note = Synthetic: >NC_001897.1-cand-4990-5069
  source 1..80: mol_type = other DNA
taaaattaaagaagcttctagggaggttgttaaatggttctcagataaattaaaatctatgctaaattttgtagaaagga

SEQ ID NO: 15492 - DNA, 80 bp, synthetic construct
  misc_feature 1..80: note = Synthetic: >NC_001897.1-cand-5070-5149
  source 1..80: mol_type = other DNA
acaaggcatggttaactgtggtttcagcagtaactagtgccattggtatcctcttactggtcaccaaaatttttaaaaaa

SEQ ID NO: 15493 - DNA, 80 bp, synthetic construct
  misc_feature 1..80: note = Synthetic: >NC_001906.3-cand-380-459
  source 1..80: mol_type = other DNA
ccttaacgacccagacatagaagctgtcatcatagatgtgggttccatgctcaacgggatccctgtgatggaaaggagag

SEQ ID NO: 15494 - DNA, 80 bp, synthetic construct
  misc_feature 1..80: note = Synthetic: >NC_001906.3-cand-490-569
  source 1..80: mol_type = other DNA
tgatgaggattctgaagactgcacgtgaaagcagcaagggaaagaccccgtttgtagatagcagagcctatggactgagg

SEQ ID NO: 15495 - DNA, 80 bp, synthetic construct
  misc_feature 1..80: note = Synthetic: >NC_001906.3-cand-570-649
  source 1..80: mol_type = other DNA
atcaccgatatgagcactcttgtgtcagccgtcattaccatcgaagcccaaatttggatcctgattgcaaaggcagtgac

SEQ ID NO: 15496 - DNA, 80 bp, synthetic construct
  misc_feature 1..80: note = Synthetic: >NC_001906.3-cand-650-729
  source 1..80: mol_type = other DNA
tgctccagatacagccgaggaaagtgagaccagaagatgggcaaagtatgttcaacaaaagagggtcaatccattctttg

SEQ ID NO: 15497 - DNA, 80 bp, synthetic construct
  misc_feature 1..80: note = Synthetic: >NC_001906.3-cand-730-809
  source 1..80: mol_type = other DNA
ccttaacccagcaatggctgacagagatgaggaatctcctctcacaaagtctctcagtcagaaaattcatggtggaaatt

SEQ ID NO: 15498 - DNA, 80 bp, synthetic construct
  misc_feature 1..80: note = Synthetic: >NC_001906.3-cand-810-889
  source 1..80: mol_type = other DNA
ctgatggaggtaaagaaaggcggatcagctaaaggaagggccgttgagataatatctgacataggaaattatgtcgagga

SEQ ID NO: 15499 - DNA, 80 bp, synthetic construct
  misc_feature 1..80: note = Synthetic: >NC_001906.3-cand-890-969
  source 1..80: mol_type = other DNA
aacaggaatggccggcttctttgcgactatcagattcggtcttgaaacaagataccctgcacttgccctcaatgagttcc

SEQ ID NO: 15500 - DNA, 80 bp, synthetic construct
  misc_feature 1..80: note = Synthetic: >NC_001906.3-cand-970-1049
  source 1..80: mol_type = other DNA
agagtgatctcaataccatcaaagggctgatgctgctctacagagaaatagggcctcgagcgccatacatggtgctcctt

SEQ ID NO: 15501 - DNA, 80 bp, synthetic construct
  misc_feature 1..80: note = Synthetic: >NC_001906.3-cand-1050-1129
  source 1..80: mol_type = other DNA
gaggaatctattcagacaaagtttgcaccaggtggttatccactcctgtggagctttgctatgggtgttgcaaccactat

SEQ ID NO: 15502 - DNA, 80 bp, synthetic construct
  misc_feature 1..80: note = Synthetic: >NC_001906.3-cand-1130-1209
  source 1..80: mol_type = other DNA
cgaccgatccatgggtgctctcaacatcaatcgtggttatcttgaacctatgtatttcagacttggacagaaatcagcaa

SEQ ID NO: 15503 - DNA, 80 bp, synthetic construct
  misc_feature 1..80: note = Synthetic: >NC_001906.3-cand-1210-1289
  source 1..80: mol_type = other DNA
gacatcatgctggcgggattgatcaaaacatggctaataaacttggattaaattctgatcaagttgcagaactggctgct

SEQ ID NO: 15504 - DNA, 80 bp, synthetic construct
  misc_feature 1..80: note = Synthetic: >NC_001906.3-cand-1280-1359
  source 1..80: mol_type = other DNA
actggctgctgcagttcaagaaacatcagttgggagacaggacaacaacatgcaggcaagagaagccaaatttgcagctg

SEQ ID NO: 15505 - DNA, 80 bp, synthetic construct
  misc_feature 1..80: note = Synthetic: >NC_001906.3-cand-1380-1459
  source 1..80: mol_type = other DNA
ggcgaacaagatattgatgaggaagaagagcctatcgaacatagtggtaggcagtcagtgactttcaagagagaaatgag

SEQ ID NO: 15506 - DNA, 80 bp, synthetic construct
  misc_feature 1..80: note = Synthetic: >NC_001906.3-cand-1460-1539
  source 1..80: mol_type = other DNA
catgtcatctctcgcagacagtgtcccaagcagttcagtgagtacatccggaggaacgagattgacaaattctctattga

SEQ ID NO: 15507 - DNA, 80 bp, synthetic construct
  misc_feature 1..80: note = Synthetic: >NC_001906.3-cand-1540-1619
  source 1..80: mol_type = other DNA
atctcagatccagattagctgcaaaggctatcaaagagagtactgcacagagctcatcggaaagaaacccacctaataac

SEQ ID NO: 15508 - DNA, 80 bp, synthetic construct
  misc_feature 1..80: note = Synthetic: >NC_001906.3-cand-1650-1729
  source 1..80: mol_type = other DNA
gaccaggaacccaaacctgcccaaaatgatttggactttgttagagcagacgtgtgacgcttaatcagaaactcatataa

SEQ ID NO: 15509 - DNA, 80 bp, synthetic construct
  misc_feature 1..80: note = Synthetic: >NC_002640.1-cand-1110-1189
  source 1..80: mol_type = other DNA
ttgcattgaagcctcaatatcaaacataactacggcaacaagatgtccaacgcaaggagagccttatctgaaagaggaac

SEQ ID NO: 15510 - DNA, 80 bp, synthetic construct
  misc_feature 1..80: note = Synthetic: >NC_002640.1-cand-1150-1229
  source 1..80: mol_type = other DNA
agatgtccaacgcaaggagagccttatctgaaagaggaacaggaccaacagtacatttgccggagagatgtggtagacag

SEQ ID NO: 15511 - DNA, 80 bp, synthetic construct
  misc_feature 1..80: note = Synthetic: >NC_002640.1-cand-1300-1379
  source 1..80: mol_type = other DNA
gggaagataacaggcaatttggtccaaattgagaaccttgaatacacagtggttgtaacagtccacaatggagacaccca

SEQ ID NO: 15512 - DNA, 80 bp, synthetic construct
  misc_feature 1..80: note = Synthetic: >NC_002640.1-cand-1350-1429
  source 1..80: mol_type = other DNA
ggttgtaacagtccacaatggagacacccatgcagtaggaaatgacacatccaatcatggagttacagccatgataactc

SEQ ID NO: 15513 - DNA, 80 bp, synthetic construct
  misc_feature 1..80: note = Synthetic: >NC_002640.1-cand-1440-1519
  source 1..80: mol_type = other DNA
atcggtggaagtcaaattgccggactatggagaactaacactcgattgtgaacccaggtctggaattgactttaatgaga

SEQ ID NO: 15514 - DNA, 80 bp, synthetic construct
  misc_feature 1..80: note = Synthetic: >NC_002640.1-cand-1520-1599
  source 1..80: mol_type = other DNA
tgattctgatgaaaatgaaaaagaaaacatggctcgtgcataagcaatggtttttggatctgcctcttccatggacagca

SEQ ID NO: 15515 - DNA, 80 bp, synthetic construct
  misc_feature 1..80: note = Synthetic: >NC_002640.1-cand-1600-1679
  source 1..80: mol_type = other DNA
ggagcagacacatcagaggttcactggaattacaaagagagaatggtgacatttaaggttcctcatgccaagagacagga

SEQ ID NO: 15516 - DNA, 80 bp, synthetic construct
  misc_feature 1..80: note = Synthetic: >NC_002640.1-cand-1680-1759
  source 1..80: mol_type = other DNA
tgtgacagtgctgggatctcaggaaggagccatgcattctgccctcgctggagccacagaagtggactccggtgatggaa

SEQ ID NO: 15517 - DNA, 80 bp, synthetic construct
  misc_feature 1..80: note = Synthetic: >NC_002640.1-cand-1760-1839
  source 1..80: mol_type = other DNA
atcacatgtttgcaggacatcttaagtgcaaagtccgtatggagaaattgagaatcaagggaatgtcatacacgatgtgt

SEQ ID NO: 15518 - DNA, 80 bp, synthetic construct
  misc_feature 1..80: note = Synthetic: >NC_002640.1-cand-1840-1919
  source 1..80: mol_type = other DNA
tcaggaaagttttcaattgacaaagagatggcagaaacacagcatgggacaacagtggtgaaagtcaagtatgaaggtgc

SEQ ID NO: 15519 - DNA, 80 bp, synthetic construct
  misc_feature 1..80: note = Synthetic: >NC_002640.1-cand-1920-1999
  source 1..80: mol_type = other DNA
tggagctccgtgtaaagtccccatagagataagagatgtaaacaaggaaaaagtggttgggcgtatcatctcatccaccc

SEQ ID NO: 15520 - DNA, 80 bp, synthetic construct
  misc_feature 1..80: note = Synthetic: >NC_002640.1-cand-1970-2049
  source 1..80: mol_type = other DNA
aagtggttgggcgtatcatctcatccacccctttggctgagaataccaacagtgtaaccaacatagaattagaacccccc

SEQ ID NO: 15521 - DNA, 80 bp, synthetic construct
  misc_feature 1..80: note = Synthetic: >NC_002640.1-cand-2080-2159
  source 1..80: mol_type = other DNA
ggaaacagcgcattaacactccattggttcaggaaagggagttccattggcaagatgtttgagtccacatacagaggtgc

SEQ ID NO: 15522 - DNA, 80 bp, synthetic construct
  misc_feature 1..80: note = Synthetic: >NC_002640.1-cand-2160-2239
  source 1..80: mol_type = other DNA
aaaacgaatggccattctaggtgaaacagcttgggattttggttccgttggtggactgttcacatcattgggaaaggctg

SEQ ID NO: 15523 - DNA, 80 bp, synthetic construct
  misc_feature 1..80: note = Synthetic: >NC_002640.1-cand-2240-2319
  source 1..80: mol_type = other DNA
tgcaccaggtttttggaagtgtgtatacaaccatgtttggaggagtctcatggatgattagaatcctaattgggttctta

SEQ ID NO: 15524 - DNA, 80 bp, synthetic construct
  misc_feature 1..80: note = Synthetic: >NC_002640.1-cand-2320-2399
  source 1..80: mol_type = other DNA
gtgttgtggattggcacgaactcgaggaacacttcaatggctatgacgtgcatagctgttggaggaatcactctgtttct

SEQ ID NO: 15525 - DNA, 80 bp, synthetic construct
  misc_feature 1..80: note = Synthetic: >NC_002728.1-cand-13360-13439
  source 1..80: mol_type = other DNA
tgccaagctgacggagtccatcataacatgtcacccaatacacgaaatcgttataagtgtagtaatacaagtaagtcttt

SEQ ID NO: 15526 - DNA, 80 bp, synthetic construct
  misc_feature 1..80: note = Synthetic: >NC_002728.1-cand-13440-13519
  source 1..80: mol_type = other DNA
tctcgattatcataccgagtttaatcctcacaatcactataaatcagacaatacagaggcggccgtactgtccaggtatg

SEQ ID NO: 15527 - DNA, 80 bp, synthetic construct
  misc_feature 1..80: note = Synthetic: >NC_002728.1-cand-13520-13599
  source 1..80: mol_type = other DNA
aggacaacactgggacaaaatttgatacagtaagtgcatttcttacaactgatcttaagaaattctgtctcaattggaga

SEQ ID NO: 15528 - DNA, 80 bp, synthetic construct
  misc_feature 1..80: note = Synthetic: >NC_002728.1-cand-13600-13679
  source 1..80: mol_type = other DNA
tacgaatcaatggctatatttgctgaacgtctggatgagatatacggtttacctggattttttaattggatgcacaaacg

SEQ ID NO: 15529 - DNA, 80 bp, synthetic construct
  misc_feature 1..80: note = Synthetic: >NC_002728.1-cand-13680-13759
  source 1..80: mol_type = other DNA
actagaaagatctgttatctatgttgcagaccctaattgcccccctaatattgacaaacatatggaactagaaaaaactc

SEQ ID NO: 15530 - DNA, 80 bp, synthetic construct
  misc_feature 1..80: note = Synthetic: >NC_002728.1-cand-13760-13839
  source 1..80: mol_type = other DNA
ctgaagatgatatattcattcattatcctaaaggcggtattgaaggatatagccaaaaaacatggactatagcaactatc

SEQ ID NO: 15531 - DNA, 80 bp, synthetic construct
  misc_feature 1..80: note = Synthetic: >NC_002728.1-cand-13840-13919
  source 1..80: mol_type = other DNA
ccctttttattcttgagtgcctatgagacaaacacgaggattgctgcaattgtccaaggagacaatgaatcaattgctat

SEQ ID NO: 15532 - DNA, 80 bp, synthetic construct
  misc_feature 1..80: note = Synthetic: >NC_002728.1-cand-13920-13999
  source 1..80: mol_type = other DNA
cactcaaaaagttcatcctaatcttccctacaaggtaaagaaagagatctgtgcaaagcaagctcagctttattttgaaa

SEQ ID NO: 15533 - DNA, 80 bp, synthetic construct
  misc_feature 1..80: note = Synthetic: >NC_002728.1-cand-14000-14079
  source 1..80: mol_type = other DNA
ggttaaggatgaacttaagagccctcggccacaatcttaaagctacagaaactatcatcagtacacatctttttatttat

SEQ ID NO: 15534 - DNA, 80 bp, synthetic construct
  misc_feature 1..80: note = Synthetic: >NC_002728.1-cand-14080-14159
  source 1..80: mol_type = other DNA
tcgaagaaaattcattatgatggtgctgtgctgtctcaggcactcaaatcaatgtcaagatgttgcttttggtcagagac

SEQ ID NO: 15535 - DNA, 80 bp, synthetic construct
  misc_feature 1..80: note = Synthetic: >NC_002728.1-cand-14160-14239
  source 1..80: mol_type = other DNA
tctggtggatgaaactagatcagcttgtagtaacatcagcactacaatagctaaagctatagaaaatgggttgtcaagaa

SEQ ID NO: 15536 - DNA, 80 bp, synthetic construct
  misc_feature 1..80: note = Synthetic: >NC_002728.1-cand-14240-14319
  source 1..80: mol_type = other DNA
atgtcggctattgcatcaatattttgaaagtaattcagcagcttctcatatcaactgagtttagtattaacgagacattg

SEQ ID NO: 15537 - DNA, 80 bp, synthetic construct
  misc_feature 1..80: note = Synthetic: >NC_002728.1-cand-14320-14399
  source 1..80: mol_type = other DNA
acactggatgtgacatctcccatttcaaataatttagattggcttataacagctgcattaatcccggcacctattggagg

SEQ ID NO: 15538 - DNA, 80 bp, synthetic construct
  misc_feature 1..80: note = Synthetic: >NC_002728.1-cand-14390-14469
  source 1..80: mol_type = other DNA
ctattggaggattcaattaccttaatttgtctagaatttttgttagaaatataggtgatccggttacagcatctttggct

SEQ ID NO: 15539 - DNA, 80 bp, synthetic construct
  misc_feature 1..80: note = Synthetic: >NC_002728.1-cand-14470-14549
  source 1..80: mol_type = other DNA
gatcttaagagaatgattgatcacagtattatgactgaaagcgtattacaaaaagttatgaatcaagaacctggtgatgc

SEQ ID NO: 15540 - DNA, 80 bp, synthetic construct
  misc_feature 1..80: note = Synthetic: >NC_002728.1-cand-14550-14629
  source 1..80: mol_type = other DNA
gagtttcttggactgggccagtgatccatactcgggcaacttgcctgactcacaaagcatcactaaaacaattaaaaata

SEQ ID NO: 15541 - DNA, 80 bp, synthetic construct
  misc_feature 1..80: note = Synthetic: >NC_003310.1-cand-147310-147389
  source 1..80: mol_type = other DNA
cgaatggcataagtttgaaacgagtgaagaaataatttctacttacttaatagatgatgtggtaacgggtgttattaatg

SEQ ID NO: 15542 - DNA, 80 bp, synthetic construct
  misc_feature 1..80: note = Synthetic: >NC_003310.1-cand-147390-147469
  source 1..80: mol_type = other DNA
gggctgtatatacattttcaaataatgaactaaacaaaactgggttaactaataacaataattatatcacaacatctata

SEQ ID NO: 15543 - DNA, 80 bp, synthetic construct
  misc_feature 1..80: note = Synthetic: >NC_003310.1-cand-147470-147549
  source 1..80: mol_type = other DNA
aaagtagaggataatgatacattagtagtatgcggaaccaataacggaaatcccaaatgttggaaaatagacggttcata

SEQ ID NO: 15544 - DNA, 80 bp, synthetic construct
  misc_feature 1..80: note = Synthetic: >NC_003310.1-cand-147550-147629
  source 1..80: mol_type = other DNA
ctacccaaaacatataggtagaggatacgatcatcaaaatagcaaagtaacgataatcagtcacaatgaatgtgtactat

SEQ ID NO: 15545 - DNA, 80 bp, synthetic construct
  misc_feature 1..80: note = Synthetic: >NC_003310.1-cand-147720-147799
  source 1..80: mol_type = other DNA
aagccttagaagagggctattgggtatgaaaatccgaaatattaaaccagacaaccccatataattttatagctaagaat

SEQ ID NO: 15546 - DNA, 80 bp, synthetic construct
  misc_feature 1..80: note = Synthetic: >NC_003310.1-cand-147800-147879
  source 1..80: mol_type = other DNA
accgcgaagaatggaactaaaaacggaaatatttgtagcacaacgaataactcccaaactgcattcatgttacactatat

SEQ ID NO: 15547 - DNA, 80 bp, synthetic construct
  misc_feature 1..80: note = Synthetic: >NC_003310.1-cand-147880-147959
  source 1..80: mol_type = other DNA
aacaattacaatacatttttatcataacactacttcggttagatgttttagaaaaaaataaatatcactaccgttcttgt

SEQ ID NO: 15548 - DNA, 80 bp, synthetic construct
  misc_feature 1..80: note = Synthetic: >NC_003310.1-cand-147960-148039
  source 1..80: mol_type = other DNA
tttataaaaataacaattaacaattatcaatttttttctttaatattttacgtggttgaccattcttggtggtaaaataa

SEQ ID NO: 15549 - DNA, 80 bp, synthetic construct
  misc_feature 1..80: note = Synthetic: >NC_003310.1-cand-148120-148199
  source 1..80: mol_type = other DNA
gcaatagtcagactgtagttctatcatgcttcctacgttagaaggaggaacagttttaaagtctcttggttttaatctat

SEQ ID NO: 15550 - DNA, 80 bp, synthetic construct
  misc_feature 1..80: note = Synthetic: >NC_003310.1-cand-148200-148279
  source 1..80: mol_type = other DNA
tgtcattagttttcatgaaatcctttgttttatccacttcacattttaaataaatgtcaactatacattcttctgttaat

SEQ ID NO: 15551 - DNA, 80 bp, synthetic construct
  misc_feature 1..80: note = Synthetic: >NC_003310.1-cand-148280-148359
  source 1..80: mol_type = other DNA
tttactagatcatcataggtcatagaatttataggttccgtagtccatggatccaaactagcaaacttcgcgtatacagt

SEQ ID NO: 15552 - DNA, 80 bp, synthetic construct
  misc_feature 1..80: note = Synthetic: >NC_003310.1-cand-148440-148519
  source 1..80: mol_type = other DNA
ttgatacagatgcgccatatttatggatttcggattcacacgttgtttgtctaagtggttcgtctagtgttgcttctaca

SEQ ID NO: 15553 - DNA, 80 bp, synthetic construct
  misc_feature 1..80: note = Synthetic: >NC_003310.1-cand-148520-148599
  source 1..80: mol_type = other DNA
tagacttcgattcccatatattctttattgtcagaatcacataccgatttatcatacgctggttcacttgtttgaaaact

SEQ ID NO: 15554 - DNA, 80 bp, synthetic construct
  misc_feature 1..80: note = Synthetic: >NC_003310.1-cand-148600-148679
  source 1..80: mol_type = other DNA
aaatggtagtagatacatcaaaataataaataataagtacattctgcaatattgttatcgtaattggaaaattggtattc

SEQ ID NO: 15555 - DNA, 80 bp, synthetic construct
  misc_feature 1..80: note = Synthetic: >NC_003310.1-cand-148680-148759
  source 1..80: mol_type = other DNA
aagtgagctggattatgtgagtattggattgtatattttattttattttatattttatattttatattttattttatatt

SEQ ID NO: 15556 - DNA, 80 bp, synthetic construct
  misc_feature 1..80: note = Synthetic: >NC_003310.1-cand-148760-148839
  source 1..80: mol_type = other DNA
ttgtagtaagaatagaatgctaaatgtcaagtttattcgaatagatgtcttattaaaaacatatataataaataacaatg

SEQ ID NO: 15557 - DNA, 80 bp, synthetic construct
  misc_feature 1..80: note = Synthetic: >NC_003310.1-cand-189890-189969
  source 1..80: mol_type = other DNA
tacatatccagatatctatattcctactagtttgctgcgtagttgcatcattgatatgcatgatttatcaggattcagag

SEQ ID NO: 15558 - DNA, 80 bp, synthetic construct
  misc_feature 1..80: note = Synthetic: >NC_003310.1-cand-189970-190049
  source 1..80: mol_type = other DNA
atgaattactaagtaaactacaatcccacaataagtaagaatcaaatatcaaaaactcacttttgatttttctagtctta

SEQ ID NO: 15559 - DNA, 80 bp, synthetic construct
  misc_feature 1..80: note = Synthetic: >NC_003310.1-cand-190050-190129
  source 1..80: mol_type = other DNA
agtaatacatatatttattaatagacctatgaaataaaaaagttaacaatggattcgcgtatagctatttacgtattagt

SEQ ID NO: 15560 - DNA, 80 bp, synthetic construct
  misc_feature 1..80: note = Synthetic: >NC_003310.1-cand-190130-190209
  source 1..80: mol_type = other DNA
atcggcatctcttttgtatcttgttaattgtcacaaactagtacattacttcaatctgaaaataaatggaagtgatataa

SEQ ID NO: 15561 - DNA, 80 bp, synthetic construct
  misc_feature 1..80: note = Synthetic: >NC_003310.1-cand-190210-190289
  source 1..80: mol_type = other DNA
ctaatacagcagatatattgctggacaattatccaattatgacctttgatggaaaggatatttatccatctatcgcgttc

SEQ ID NO: 15562 - DNA, 80 bp, synthetic construct
  misc_feature 1..80: note = Synthetic: >NC_003310.1-cand-190290-190369
  source 1..80: mol_type = other DNA
atggtcggtaataaacttttcctagatctttataaaaatatctttgtagaatttttcagactatttcgagtatctgtaag

SEQ ID NO: 15563 - DNA, 80 bp, synthetic construct
  misc_feature 1..80: note = Synthetic: >NC_003310.1-cand-190370-190449
  source 1..80: mol_type = other DNA
tagtcaatacgaggaattagaatattattattcatgtgattatactaacaaccgtcctacaattaaacaacattactttt

SEQ ID NO: 15564 - DNA, 80 bp, synthetic construct
  misc_feature 1..80: note = Synthetic: >NC_003310.1-cand-190450-190529
  source 1..80: mol_type = other DNA
ataacggcgaagaatatactgaaattgatagatcgaaaaaagccactaataaaaacagttggttaattacttcaggcttt

SEQ ID NO: 15565 - DNA, 80 bp, synthetic construct
  misc_feature 1..80: note = Synthetic: >NC_003310.1-cand-191080-191159
  source 1..80: mol_type = other DNA
tgtaattctgtacaagatctcttactttactatctatctaatgcatatgtagaaatagacattgttgattttatggtaga

SEQ ID NO: 15566 - DNA, 80 bp, synthetic construct
  misc_feature 1..80: note = Synthetic: >NC_003443.1-cand-2160-2239
  source 1..80: mol_type = other DNA
ccaaaccagttgctgctggtccagttaaacccaggcggaagaaagtgatcagcaatactactccatacactattgcagac

SEQ ID NO: 15567 - DNA, 80 bp, synthetic construct
  misc_feature 1..80: note = Synthetic: >NC_003443.1-cand-2240-2319
  source 1..80: mol_type = other DNA
aatattccacctgagaagctaccgatcaacactccaatacccaatccattacttccactggcacgccctcacggaaagat

SEQ ID NO: 15568 - DNA, 80 bp, synthetic construct
  misc_feature 1..80: note = Synthetic: >NC_003443.1-cand-2320-2399
  source 1..80: mol_type = other DNA
gacagacattgacattgtcactgggaacattacagaaggatcgtacaaaggtgtggagcttgctaaattagggaagcaga

SEQ ID NO: 15569 - DNA, 80 bp, synthetic construct
  misc_feature 1..80: note = Synthetic: >NC_003443.1-cand-2390-2469
  source 1..80: mol_type = other DNA
gggaagcagacactactcacaaggttcacctcgaatgagccagtctcctcagctggatccgcccaagaccccaactttaa

SEQ ID NO: 15570 - DNA, 80 bp, synthetic construct
  misc_feature 1..80: note = Synthetic: >NC_003443.1-cand-2480-2559
  source 1..80: mol_type = other DNA
gctaatagagaaagagcaagaggcaaccataggagagaatggagtattgcatgggtcggagatcaggtcaaagtcttcga

SEQ ID NO: 15571 - DNA, 80 bp, synthetic construct
  misc_feature 1..80: note = Synthetic: >NC_003443.1-cand-2560-2639
  source 1..80: mol_type = other DNA
gtggtgtaatcccaggtgtgccccagtcacggcctcagctcgcaagttcacctgcacatgcggatcctgccccagcatct

SEQ ID NO: 15572 - DNA, 80 bp, synthetic construct
  misc_feature 1..80: note = Synthetic: >NC_003443.1-cand-2640-2719
  source 1..80: mol_type = other DNA
gcggagaatgtgaaggagatcattgagctcttaaagggacttgatcttcgccttcagactgtagaagggaaagtagataa

SEQ ID NO: 15573 - DNA, 80 bp, synthetic construct
  misc_feature 1..80: note = Synthetic: >NC_003443.1-cand-2720-2799
  source 1..80: mol_type = other DNA
aattcttgcaacttctgcaactataatcaatcttaaaaatgaaatgactagtctcaaggcgagtgttgcaactatggaag

SEQ ID NO: 15574 - DNA, 80 bp, synthetic construct
  misc_feature 1..80: note = Synthetic: >NC_003443.1-cand-2800-2879
  source 1..80: mol_type = other DNA
gtatgataacaacaattaaaatcatggatcccagtacaccaactaatgtccctgtagaggagatcagaaagagtttacac

SEQ ID NO: 15575 - DNA, 80 bp, synthetic construct
  misc_feature 1..80: note = Synthetic: >NC_003443.1-cand-2880-2959
  source 1..80: mol_type = other DNA
aatgttccagtagtaattgccggtccaactagtggaggcttcacagccgaacaggtgatattgatttcaatggatgaact

SEQ ID NO: 15576 - DNA, 80 bp, synthetic construct
  misc_feature 1..80: note = Synthetic: >NC_003443.1-cand-2960-3039
  source 1..80: mol_type = other DNA
agctagacctacactctcatcaacaaaaaggatcacacgaaagcctgaatccaagaaagatttaacaggcataaaactaa

SEQ ID NO: 15577 - DNA, 80 bp, synthetic construct
  misc_feature 1..80: note = Synthetic: >NC_003443.1-cand-3040-3119
  source 1..80: mol_type = other DNA
ctttgatgcagcttgcaaatgactgcatctcgcgtccagataccaagactgagttcgtgactaagattcaggcagcaacc

SEQ ID NO: 15578 - DNA, 80 bp, synthetic construct
  misc_feature 1..80: note = Synthetic: >NC_003443.1-cand-3120-3199
  source 1..80: mol_type = other DNA
acagaatcacagcttaacgaaattaaacggtcaataatacgctctgcaatataaaatgaggtgcagtcacacaagagaca

SEQ ID NO: 15579 - DNA, 80 bp, synthetic construct
  misc_feature 1..80: note = Synthetic: >NC_003443.1-cand-3200-3279
  source 1..80: mol_type = other DNA
ctcaacatgcatccaatcaagatccagactccatccatccaaaaacacgcccacaattgtcaacaccaagaaacaaccac

SEQ ID NO: 15580 - DNA, 80 bp, synthetic construct
  misc_feature 1..80: note = Synthetic: >NC_003443.1-cand-3280-3359
  source 1..80: mol_type = other DNA
agccgaaccatgctcaaccaaaagacccaaacaacacctcacatcaatagaaggctggacatgataaatttaataaaaaa

SEQ ID NO: 15581 - DNA, 80 bp, synthetic construct
  misc_feature 1..80: note = Synthetic: >NC_003443.1-cand-3360-3439
  source 1..80: mol_type = other DNA
agaaaagaagttaagtaaaatttaaaggacacaatagagaaaatctaggtccgaaagcttgcctctcagacagatcccaa

SEQ ID NO: 15582 - DNA, 80 bp, synthetic construct
  misc_feature 1..80: note = Synthetic: >NC_003443.1-cand-7260-7339
  source 1..80: mol_type = other DNA
tcctaaatattcccagctttatcccctcagcaacatctcccaacgggtgcactagaataccatcattttcactcattaag

SEQ ID NO: 15583 - DNA, 80 bp, synthetic construct
  misc_feature 1..80: note = Synthetic: >NC_003443.1-cand-7340-7419
  source 1..80: mol_type = other DNA
acccattggtgttacactcacaatgtaatgcttggagattgcctcgatttcacgacatctaatcagtatttagcaatggg

SEQ ID NO: 15584 - DNA, 80 bp, synthetic construct
  misc_feature 1..80: note = Synthetic: >NC_003443.1-cand-7420-7499
  source 1..80: mol_type = other DNA
gataatacaacaatctgctgcagcatttccaatcttcaggactatgaaaaccatttacctaagtgatggaatcaatcgca

SEQ ID NO: 15585 - DNA, 80 bp, synthetic construct
  misc_feature 1..80: note = Synthetic: >NC_003443.1-cand-7500-7579
  source 1..80: mol_type = other DNA
aaagctgttcagtcactgctataccaggaggttgtgtcttgtattgctatgtagctacaagatctgagaaagaagattat

SEQ ID NO: 15586 - DNA, 80 bp, synthetic construct
  misc_feature 1..80: note = Synthetic: >NC_003443.1-cand-7580-7659
  source 1..80: mol_type = other DNA
gccacaactgatctagctgaactgagacttgctttctattattataatgatacctttattgaaagagtcatatctcttcc

SEQ ID NO: 15587 - DNA, 80 bp, synthetic construct
  misc_feature 1..80: note = Synthetic: >NC_003443.1-cand-7660-7739
  source 1..80: mol_type = other DNA
aaatacaacagggcaatgggccacaatcaatcctgcagttggaagcgggatctatcatctaggctttatcttatttcctg

SEQ ID NO: 15588 - DNA, 80 bp, synthetic construct
  misc_feature 1..80: note = Synthetic: >NC_003443.1-cand-7740-7819
  source 1..80: mol_type = other DNA
tatatggtggtctcataagtgggactccttcctacaacaagcagtcctcacgctattttatcccaaaacatcccaacata

SEQ ID NO: 15589 - DNA, 80 bp, synthetic construct
  misc_feature 1..80: note = Synthetic: >NC_003443.1-cand-7820-7899
  source 1..80: mol_type = other DNA
acctgtgccggtaactccagcgaacaggctgcagcagcacggagttcctatgtaatccgttatcactcaaacaggttgat

SEQ ID NO: 15590 - DNA, 80 bp, synthetic construct
  misc_feature 1..80: note = Synthetic: >NC_003443.1-cand-7900-7979
  source 1..80: mol_type = other DNA
tcagagtgctgttcttatttgcccattgtctgacatgcacacagcaaggtgtaatctagttatgtttaacaattctcaag

SEQ ID NO: 15591 - DNA, 80 bp, synthetic construct
  misc_feature 1..80: note = Synthetic: >NC_003443.1-cand-7980-8059
  source 1..80: mol_type = other DNA
tcatgatgggtgcagaaggtaggctctatgttattgacaataatttgtattattatcaacgtagttcctcttggtggtct

SEQ ID NO: 15592 - DNA, 80 bp, synthetic construct
  misc_feature 1..80: note = Synthetic: >NC_003443.1-cand-8060-8139
  source 1..80: mol_type = other DNA
gcatcgcttttttacaggatcaatacagatttttctaaaggaattcctcctatcattgaggctcaatgggtaccgtccta

SEQ ID NO: 15593 - DNA, 80 bp, synthetic construct
  misc_feature 1..80: note = Synthetic: >NC_003443.1-cand-8130-8209
  source 1..80: mol_type = other DNA
taccgtcctatcaagttccccgtcctggagtcatgccatgcaatgcaacaagtttttgccctgctaattgcatcacaggg

SEQ ID NO: 15594 - DNA, 80 bp, synthetic construct
  misc_feature 1..80: note = Synthetic: >NC_003443.1-cand-8220-8299
  source 1..80: mol_type = other DNA
atgtgtggccgcttaacgatccagaacccacatcacaaaatgctctgaatcccaactatcgatttgctggagcctttctc

SEQ ID NO: 15595 - DNA, 80 bp, synthetic construct
  misc_feature 1..80: note = Synthetic: >NC_003443.1-cand-8300-8379
  source 1..80: mol_type = other DNA
agaaatgagtccaaccgaaccaatcccacattctacactgcatcagccagcgccctactaaatactaccggattcaacaa

SEQ ID NO: 15596 - DNA, 80 bp, synthetic construct
  misc_feature 1..80: note = Synthetic: >NC_003443.1-cand-8380-8459
  source 1..80: mol_type = other DNA
caccaatcacaaagcagcatatacgtcttcaacctgctttaagaatactggaactcaaaagatttattgtttgataataa

SEQ ID NO: 15597 - DNA, 80 bp, synthetic construct
  misc_feature 1..80: note = Synthetic: >NC_003443.1-cand-8490-8569
  source 1..80: mol_type = other DNA
tccaaataataccatttctaagggaactaataccttaatactattgaatgaagactccagattcaataataattgaaagg

SEQ ID NO: 15598 - DNA, 80 bp, synthetic construct
  misc_feature 1..80: note = Synthetic: >NC_004102.1-cand-7050-7129
  source 1..80: mol_type = other DNA
cggcaacatcaccagggttgagtcagagaacaaagtggtgattctggactccttcgatccgcttgtggcagaggaggatg

SEQ ID NO: 15599 - DNA, 80 bp, synthetic construct
  misc_feature 1..80: note = Synthetic: >NC_004102.1-cand-7130-7209
  source 1..80: mol_type = other DNA
agcgggaggtctccgtacccgcagaaattctgcggaagtctcggagattcgcccgggccctgcccgtttgggcgcggccg

SEQ ID NO: 15600 - DNA, 80 bp, synthetic construct
  misc_feature 1..80: note = Synthetic: >NC_004102.1-cand-7210-7289
  source 1..80: mol_type = other DNA
gactacaaccccccgctagtagagacgtggaaaaagcctgactacgaaccacctgtggtccatggctgcccgctaccacc

SEQ ID NO: 15601 - DNA, 80 bp, synthetic construct
  misc_feature 1..80: note = Synthetic: >NC_004102.1-cand-7290-7369
  source 1..80: mol_type = other DNA
tccacggtcccctcctgtgcctccgcctcggaaaaagcgtacggtggtcctcaccgaatcaaccctatctactgccttgg

SEQ ID NO: 15602 - DNA, 80 bp, synthetic construct
  misc_feature 1..80: note = Synthetic: >NC_004102.1-cand-7370-7449
  source 1..80: mol_type = other DNA
ccgagcttgccaccaaaagttttggcagctcctcaacttccggcattacgggcgacaatacgacaacatcctctgagccc

SEQ ID NO: 15603 - DNA, 80 bp, synthetic construct
  misc_feature 1..80: note = Synthetic: >NC_004102.1-cand-7430-7509
  source 1..80: mol_type = other DNA
cgacaacatcctctgagcccgccccttctggctgcccccccgactccgacgttgagtcctattcttccatgccccccctg

SEQ ID NO: 15604 - DNA, 80 bp, synthetic construct
  misc_feature 1..80: note = Synthetic: >NC_004102.1-cand-7570-7649
  source 1..80: mol_type = other DNA
gccgacacggaagatgtcgtgtgctgctcaatgtcttattcctggacaggcgcactcgtcaccccgtgcgctgcggaaga

SEQ ID NO: 15605 - DNA, 80 bp, synthetic construct
  misc_feature 1..80: note = Synthetic: >NC_004102.1-cand-7610-7689
  source 1..80: mol_type = other DNA
cctggacaggcgcactcgtcaccccgtgcgctgcggaagaacaaaaactgcccatcaacgcactgagcaactcgttgcta

SEQ ID NO: 15606 - DNA, 80 bp, synthetic construct
  misc_feature 1..80: note = Synthetic: >NC_004102.1-cand-7690-7769
  source 1..80: mol_type = other DNA
cgccatcacaatctggtgtattccaccacttcacgcagtgcttgccaaaggcagaagaaagtcacatttgacagactgca

SEQ ID NO: 15607 - DNA, 80 bp, synthetic construct
  misc_feature 1..80: note = Synthetic: >NC_004102.1-cand-7770-7849
  source 1..80: mol_type = other DNA
agttctggacagccattaccaggacgtgctcaaggaggtcaaagcagcggcgtcaaaagtgaaggctaacttgctatccg

SEQ ID NO: 15608 - DNA, 80 bp, synthetic construct
  misc_feature 1..80: note = Synthetic: >NC_004102.1-cand-7820-7899
  source 1..80: mol_type = other DNA
cgtcaaaagtgaaggctaacttgctatccgtagaggaagcttgcagcctgacgcccccacattcagccaaatccaagttt

SEQ ID NO: 15609 - DNA, 80 bp, synthetic construct
  misc_feature 1..80: note = Synthetic: >NC_004102.1-cand-7930-8009
  source 1..80: mol_type = other DNA
gccagaaaggccgtagcccacatcaactccgtgtggaaagaccttctggaagacagtgtaacaccaatagacactaccat

SEQ ID NO: 15610 - DNA, 80 bp, synthetic construct
  misc_feature 1..80: note = Synthetic: >NC_004102.1-cand-7970-8049
  source 1..80: mol_type = other DNA
accttctggaagacagtgtaacaccaatagacactaccatcatggccaagaacgaggttttctgcgttcagcctgagaag

SEQ ID NO: 15611 - DNA, 80 bp, synthetic construct
  misc_feature 1..80: note = Synthetic: >NC_004102.1-cand-8090-8169
  source 1..80: mol_type = other DNA
tgggcgtgcgcgtgtgcgagaagatggccctgtacgacgtggttagcaagctccccctggccgtgatgggaagctcctac

SEQ ID NO: 15612 - DNA, 80 bp, synthetic construct
  misc_feature 1..80: note = Synthetic: >NC_004102.1-cand-8160-8239
  source 1..80: mol_type = other DNA
aagctcctacggattccaatactcaccaggacagcgggttgaattcctcgtgcaagcgtggaagtccaagaagaccccga

SEQ ID NO: 15613 - DNA, 80 bp, synthetic construct
  misc_feature 1..80: note = Synthetic: >NC_004102.1-cand-8250-8329
  source 1..80: mol_type = other DNA
gtatgatacccgctgttttgactccacagtcactgagagcgacatccgtacggaggaggcaatttaccaatgttgtgacc

SEQ ID NO: 15614 - DNA, 80 bp, synthetic construct
  misc_feature 1..80: note = Synthetic: >NC_005078.1-cand-1840-1919
  source 1..80: mol_type = other DNA
ttgttgacaacaactccattatgatgtttgcaaagatgtccaaacttctcccaaatttgctgatcatagagtcttgcttg

SEQ ID NO: 15615 - DNA, 80 bp, synthetic construct
  misc_feature 1..80: note = Synthetic: >NC_005078.1-cand-1920-1999
  source 1..80: mol_type = other DNA
atcagatgtgagtttcacatctaccagctttaaatccttccgtccatgaatgtctaaaagtttccttatgtcgtcagaac

SEQ ID NO: 15616 - DNA, 80 bp, synthetic construct
  misc_feature 1..80: note = Synthetic: >NC_005078.1-cand-2000-2079
  source 1..80: mol_type = other DNA
cttgagttgtaatcaccatatcttgtggtagtaaacctattacataacttaatactcctggcattgcatcctcgatgtct

SEQ ID NO: 15617 - DNA, 80 bp, synthetic construct
  misc_feature 1..80: note = Synthetic: >NC_005078.1-cand-2080-2159
  source 1..80: mol_type = other DNA
tgcatcaagatgccatgtgaatgtctgctgccatttttgaagcccttctcatcatgtggctttctaaaacaatgaatata

SEQ ID NO: 15618 - DNA, 80 bp, synthetic construct
  misc_feature 1..80: note = Synthetic: >NC_005078.1-cand-2150-2229
  source 1..80: mol_type = other DNA
aatgaatataatgcttgttggctggctgatatagtgccaattccacagggtctgttggaggcccttcaatgtcaagccac

SEQ ID NO: 15619 - DNA, 80 bp, synthetic construct
  misc_feature 1..80: note = Synthetic: >NC_005078.1-cand-2250-2329
  source 1..80: mol_type = other DNA
cttctttacagcctctttaatcactgcttcttgcatttcagtcaggtttgctagtcttagattctgaccgtttttctcgg

SEQ ID NO: 15620 - DNA, 80 bp, synthetic construct
  misc_feature 1..80: note = Synthetic: >NC_005078.1-cand-2310-2389
  source 1..80: mol_type = other DNA
attctgaccgtttttctcgggttgtctcggtccaacttgaggtttctttgttagatcaacacttgtgttgtcccaagatc

SEQ ID NO: 15621 - DNA, 80 bp, synthetic construct
  misc_feature 1..80: note = Synthetic: >NC_005078.1-cand-2390-2469
  source 1..80: mol_type = other DNA
tcccaagaatttgtgatctggaaccaatgtaaggccacccgtcacctgagagacacaatttatacagaaggttctcataa

SEQ ID NO: 15622 - DNA, 80 bp, synthetic construct
  misc_feature 1..80: note = Synthetic: >NC_005078.1-cand-2470-2549
  source 1..80: mol_type = other DNA
ggatttcgattcccaggtttctcgtctataaacatcccctcttttcgcttgacttgcagagttgatttaatcaagctgga

SEQ ID NO: 15623 - DNA, 80 bp, synthetic construct
  misc_feature 1..80: note = Synthetic: >NC_005078.1-cand-2550-2629
  source 1..80: mol_type = other DNA
gaaattatcaggagtgaccctaattgtttccagcatgttcccaccgtcaagtattgaggcgccagctttcacagcagctg

SEQ ID NO: 15624 - DNA, 80 bp, synthetic construct
  misc_feature 1..80: note = Synthetic: >NC_005078.1-cand-2630-2709
  source 1..80: mol_type = other DNA
acagactgaagttatagccagagatgttgatggagctctcgtccttagttacgatctgcaagcattcgtgctctagagtt

SEQ ID NO: 15625 - DNA, 80 bp, synthetic construct
  misc_feature 1..80: note = Synthetic: >NC_005078.1-cand-2710-2789
  source 1..80: mol_type = other DNA
agcttgtcaaggtcatttaaattcggatatttaacagtgtataacaggcccagagatgtcaacgcttggaccacactatt

SEQ ID NO: 15626 - DNA, 80 bp, synthetic construct
  misc_feature 1..80: note = Synthetic: >NC_005078.1-cand-2790-2869
  source 1..80: mol_type = other DNA
catcgtttctccaccctggacagtcatacaagcgattgtgagagctggcatggaaccaaactgattattcagttttgatg

SEQ ID NO: 15627 - DNA, 80 bp, synthetic construct
  misc_feature 1..80: note = Synthetic: >NC_005078.1-cand-2870-2949
  source 1..80: mol_type = other DNA
gatctgagacatcccagattctaaccacaccatttccagcacctctctgctgttggaatcccagggtcttcaagatttct

SEQ ID NO: 15628 - DNA, 80 bp, synthetic construct
  misc_feature 1..80: note = Synthetic: >NC_005078.1-cand-2920-2999
  source 1..80: mol_type = other DNA
tgttggaatcccagggtcttcaagatttctgacctctttgtcagttgcagctgtgacaaattacccatgtacagcccttg

SEQ ID NO: 15629 - DNA, 80 bp, synthetic construct
  misc_feature 1..80: note = Synthetic: >NC_005078.1-cand-3030-3109
  source 1..80: mol_type = other DNA
cttcagtttttccaagtctgatgcaagctccatcaattcatctctccccagatctccaatcttgaatatggtgtttttct

SEQ ID NO: 15630 - DNA, 80 bp, synthetic construct
  misc_feature 1..80: note = Synthetic: >NC_005226.1-cand-2410-2489
  source 1..80: mol_type = other DNA
tgcaatggaattaaatacatatttggaagccaagtcacaagtgatggcagctaacataatgaacaaacactgggatcgtc

SEQ ID NO: 15631 - DNA, 80 bp, synthetic construct
  misc_feature 1..80: note = Synthetic: >NC_005226.1-cand-2490-2569
  source 1..80: mol_type = other DNA
catatttcagccaaacaaggaatattagcttaaaaggtatgtcaggcgcattacaagaagatggtcatttatcagctagt

SEQ ID NO: 15632 - DNA, 80 bp, synthetic construct
  misc_feature 1..80: note = Synthetic: >NC_005226.1-cand-2580-2659
  source 1..80: mol_type = other DNA
ttgaagcaatacgttttttgaatcaatctcaacaaaacccctcagtgttggagatgtatgaacaaactaagaggcagaag

SEQ ID NO: 15633 - DNA, 80 bp, synthetic construct
  misc_feature 1..80: note = Synthetic: >NC_005226.1-cand-2660-2739
  source 1..80: mol_type = other DNA
gctatggcacggattgttagaaaataccagagaacagaagctgatcgtggattttttataactactttaccaaccagagt

SEQ ID NO: 15634 - DNA, 80 bp, synthetic construct
  misc_feature 1..80: note = Synthetic: >NC_005226.1-cand-2740-2819
  source 1..80: mol_type = other DNA
gagattagagataatagaggattattttgatgcaatagctaaagtagtccctgaagagtatatatcatatggaggagagc

SEQ ID NO: 15635 - DNA, 80 bp, synthetic construct
  misc_feature 1..80: note = Synthetic: >NC_005226.1-cand-2830-2909
  source 1..80: mol_type = other DNA
aaatattcaacaggcacttgaaaaggcattaagatgggcttcaggtgaaagtgagattcaaattagtatgggacaggtca

SEQ ID NO: 15636 - DNA, 80 bp, synthetic construct
  misc_feature 1..80: note = Synthetic: >NC_005226.1-cand-2910-2989
  source 1..80: mol_type = other DNA
ttaaactaaaacggaagttaatgtatgttagtgcagatgcaacaaaatggtccccaggagataactctgcgaaattccga

SEQ ID NO: 15637 - DNA, 80 bp, synthetic construct
  misc_feature 1..80: note = Synthetic: >NC_005226.1-cand-2990-3069
  source 1..80: mol_type = other DNA
agattcacccaggcattacacgatggtctacgagatgataaattaaagaggtgtgtagtggatgccttacggaatatata

SEQ ID NO: 15638 - DNA, 80 bp, synthetic construct
  misc_feature 1..80: note = Synthetic: >NC_005226.1-cand-3070-3149
  source 1..80: mol_type = other DNA
tgaaactgattttttcatgtctaggaagttacatcgatatatcgatggtatggatgatttatctgaatttgtagaagatt

SEQ ID NO: 15639 - DNA, 80 bp, synthetic construct
  misc_feature 1..80: note = Synthetic: >NC_005226.1-cand-3150-3229
  source 1..80: mol_type = other DNA
ttttatcattctttccaaataaagtatctgctgctatcaaaggaaattggctgcaaggaaatctaaacaagtgctcatca

SEQ ID NO: 15640 - DNA, 80 bp, synthetic construct
  misc_feature 1..80: note = Synthetic: >NC_005226.1-cand-3230-3309
  source 1..80: mol_type = other DNA
ttatttggtgcagcagtttccctgctatttagaaaaatctggagccttctttacccagaactggactgcttctttgagtt

SEQ ID NO: 15641 - DNA, 80 bp, synthetic construct
  misc_feature 1..80: note = Synthetic: >NC_005226.1-cand-3310-3389
  source 1..80: mol_type = other DNA
tgcacaccattctgacgatgcattgtttatctatggttatcttgaacctactgatgatggaactgaatggtttagatttg

SEQ ID NO: 15642 - DNA, 80 bp, synthetic construct
  misc_feature 1..80: note = Synthetic: >NC_005226.1-cand-3390-3469
  source 1..80: mol_type = other DNA
taacacaacagatacaagctgggaatctccattggtatgcagtcaatcaagagatgtggaagagtatgtttaaccttcat

SEQ ID NO: 15643 - DNA, 80 bp, synthetic construct
  misc_feature 1..80: note = Synthetic: >NC_005226.1-cand-3470-3549
  source 1..80: mol_type = other DNA
gaacatattttattgatgggttccatcaaaatatcgcctaaaaagactacagtatccccaactaatgcagaattcctatc

SEQ ID NO: 15644 - DNA, 80 bp, synthetic construct
  misc_feature 1..80: note = Synthetic: >NC_005226.1-cand-3550-3629
  source 1..80: mol_type = other DNA
aacattttttgaaggatgtgcagtttcgatcccttttataaaaatactattgggctctctgtctgatttaccagggttag

SEQ ID NO: 15645 - DNA, 80 bp, synthetic construct
  misc_feature 1..80: note = Synthetic: >NC_005226.1-cand-3600-3679
  source 1..80: mol_type = other DNA
tgggctctctgtctgatttaccagggttaggttattttgatgatttggctgctgcacagagtagatgtgttaaagcgctt

SEQ ID NO: 15646 - DNA, 80 bp, synthetic construct
  misc_feature 1..80: note = Synthetic: >NC_005227.2-cand-1070-1149
  source 1..80: mol_type = other DNA
tccaaaactgtgggcacagcagaggaaaaattgaagaaaaaatcctcattctatcagtcatatctgagacgcactcaatc

SEQ ID NO: 15647 - DNA, 80 bp, synthetic construct
  misc_feature 1..80: note = Synthetic: >NC_005227.2-cand-1120-1199
  source 1..80: mol_type = other DNA
ctatcagtcatatctgagacgcactcaatctatgggaatacaactggatcaaagaattatcttgctatttatgacagagt

SEQ ID NO: 15648 - DNA, 80 bp, synthetic construct
  misc_feature 1..80: note = Synthetic: >NC_005227.2-cand-1250-1329
  source 1..80: mol_type = other DNA
gagctcagaacacttgcacaaagtctcattgatcagaaggtcaaagagatttcaaaccaggaaccgctaaaaatctaatt

SEQ ID NO: 15649 - DNA, 80 bp, synthetic construct
  misc_feature 1..80: note = Synthetic: >NC_005227.2-cand-1330-1409
  source 1..80: mol_type = other DNA
tgtagttcctgcatacacacacgcacatccaatgatatgaatttgaagggttgggcacaaaattcacaccaatgcatgat

SEQ ID NO: 15650 - DNA, 80 bp, synthetic construct
  misc_feature 1..80: note = Synthetic: >NC_005227.2-cand-1390-1469
  source 1..80: mol_type = other DNA
aattcacaccaatgcatgattacaattcacacatacactgattgggttgggtgggtcaaatcaaacacatataagctggg

SEQ ID NO: 15651 - DNA, 80 bp, synthetic construct
  misc_feature 1..80: note = Synthetic: >NC_005227.2-cand-1490-1569
  source 1..80: mol_type = other DNA
taaggtagctactaagttgattattgcactacagcttggtcattgaccactcaggtaatctgctgctctgtatgtttatt

SEQ ID NO: 15652 - DNA, 80 bp, synthetic construct
  misc_feature 1..80: note = Synthetic: >NC_005227.2-cand-1570-1649
  source 1..80: mol_type = other DNA
gttagtttgttaagtttaaaattgtaagtccttgtttggtgtaaaaatttatttttgtattatgtcactagtgtaagttc

SEQ ID NO: 15653 - DNA, 80 bp, synthetic construct
  misc_feature 1..80: note = Synthetic: >NC_005227.2-cand-1650-1729
  source 1..80: mol_type = other DNA
attattgggcccaataatgtgaaactgagctatcatctctgtctcttttcttcatctctatttaaacatttctacctccg

SEQ ID NO: 15654 - DNA, 80 bp, synthetic construct
  misc_feature 1..80: note = Synthetic: >NC_005227.2-cand-1740-1819
  source 1..80: mol_type = other DNA
tatatgcacgtagcatatatataagtgtacgattccactacctcagacagttgttttcttgattgcttttcaaggagtct

SEQ ID NO: 15655 - DNA, 80 bp, synthetic construct
  misc_feature 1..80: note = Synthetic: >NC_005228.1-cand-0-79
  source 1..80: mol_type = other DNA
agtagactccgcaagaagaagcaaacacagagaaaactggaataaagaagtatgttttgtctgtgtttgagtcttctcgg

SEQ ID NO: 15656 - DNA, 80 bp, synthetic construct
  misc_feature 1..80: note = Synthetic: >NC_005228.1-cand-80-159
  source 1..80: mol_type = other DNA
tctactactatgttggccagcagctacaagaaaccttttagaactgaaggttgaatgtccacacacaattgggttaggac

SEQ ID NO: 15657 - DNA, 80 bp, synthetic construct
  misc_feature 1..80: note = Synthetic: >NC_005228.1-cand-160-239
  source 1..80: mol_type = other DNA
aaggtattgtgattggtagtgcagaattgccacctgtgcctttagcgaaggtagagtcactgaagctggaaagttcttgt

SEQ ID NO: 15658 - DNA, 80 bp, synthetic construct
  misc_feature 1..80: note = Synthetic: >NC_005228.1-cand-240-319
  source 1..80: mol_type = other DNA
aactttgacttgcatacaagcacagctgcacaacaggcttttactaaatggtcatgggagaagaaggctgatactgctga

SEQ ID NO: 15659 - DNA, 80 bp, synthetic construct
  misc_feature 1..80: note = Synthetic: >NC_005228.1-cand-320-399
  source 1..80: mol_type = other DNA
gaatgcaaaagcagcatcaacaacatttcaatctagcagtaaggaagtgcaattaagaggtctttgtgtcataccaaccc

SEQ ID NO: 15660 - DNA, 80 bp, synthetic construct
  misc_feature 1..80: note = Synthetic: >NC_005228.1-cand-410-489
  source 1..80: mol_type = other DNA
gactgcttctcggacaaggaaaactgtcacatgttttgacctttcatgtaatcagactgtatgtcaacccacagtgtatt

SEQ ID NO: 15661 - DNA, 80 bp, synthetic construct
  misc_feature 1..80: note = Synthetic: >NC_005228.1-cand-460-539
  source 1..80: mol_type = other DNA
atcagactgtatgtcaacccacagtgtatttaatggcaccaatccagacctgtgttaccacaaaaagctgcttgttaggt

SEQ ID NO: 15662 - DNA, 80 bp, synthetic construct
  misc_feature 1..80: note = Synthetic: >NC_005301.3-cand-9490-9569
  source 1..80: mol_type = other DNA
aattttttccttcagtgttcactttgattaagatgctgacagatgaatcgtcagattcagaaaagagtggccttagtcca

SEQ ID NO: 15663 - DNA, 80 bp, synthetic construct
  misc_feature 1..80: note = Synthetic: >NC_005301.3-cand-9570-9649
  source 1..80: mol_type = other DNA
gatttgcaacaagttgcaagatactcaaaccatttgaccttgctcagcagaatgattcaacaagcaaagccaaccgtgac

SEQ ID NO: 15664 - DNA, 80 bp, synthetic construct
  misc_feature 1..80: note = Synthetic: >NC_005301.3-cand-9650-9729
  source 1..80: mol_type = other DNA
tgttttctacatgctaaaaggtaacttgatgaacacagagccaacagttgctgagcttgtcagctatggtataaaggaag

SEQ ID NO: 15665 - DNA, 80 bp, synthetic construct
  misc_feature 1..80: note = Synthetic: >NC_005301.3-cand-9730-9809
  source 1..80: mol_type = other DNA
gcagattttttaggctttccgacaccggagtcgatgcaagcacatactctgtaaaatattggaaaattcttcactgcatc

SEQ ID NO: 15666 - DNA, 80 bp, synthetic construct
  misc_feature 1..80: note = Synthetic: >NC_005301.3-cand-9810-9889
  source 1..80: mol_type = other DNA
tctgccattggatgtttacctttgagtcaagcagacaaatcttcactacttatgagcttcttaaactggagggtcaacat

SEQ ID NO: 15667 - DNA, 80 bp, synthetic construct
  misc_feature 1..80: note = Synthetic: >NC_005301.3-cand-9890-9969
  source 1..80: mol_type = other DNA
ggacattagaacatctgactgtccactatctagtcatgaagcaagtatactgagtgaatttgatggacaagttatcgcca

SEQ ID NO: 15668 - DNA, 80 bp, synthetic construct
  misc_feature 1..80: note = Synthetic: >NC_005301.3-cand-9970-10049
  source 1..80: mol_type = other DNA
acatacttgccagtgaattgagttctgtgaaacgagattctgaacgcgagggtctaactgatctccttgattatctaaac

SEQ ID NO: 15669 - DNA, 80 bp, synthetic construct
  misc_feature 1..80: note = Synthetic: >NC_005301.3-cand-10030-10109
  source 1..80: mol_type = other DNA
atctccttgattatctaaactcaccaactgaattgttgaagaagaagccttacttagggacaacttgcaagttcaacacc

SEQ ID NO: 15670 - DNA, 80 bp, synthetic construct
  misc_feature 1..80: note = Synthetic: >NC_005301.3-cand-10130-10209
  source 1..80: mol_type = other DNA
tggaaagttcacatacagcagcagatctggagaatccattggaatcttcattgcagggaaattgcacatccatctctcat

SEQ ID NO: 15671 - DNA, 80 bp, synthetic construct
  misc_feature 1..80: note = Synthetic: >NC_005301.3-cand-10210-10289
  source 1..80: mol_type = other DNA
ctgagtccgttgccttgttgtgtgaaactgaaagacaagtgctttcttggatgagtaagaggaggactgaggtaataact

SEQ ID NO: 15672 - DNA, 80 bp, synthetic construct
  misc_feature 1..80: note = Synthetic: >NC_005301.3-cand-10290-10369
  source 1..80: mol_type = other DNA
aaagaacagcatcaactgtttctaagtcttctcccacagtctcatgagtgtttacaaaagcacaaggacggtagtgcgct

SEQ ID NO: 15673 - DNA, 80 bp, synthetic construct
  misc_feature 1..80: note = Synthetic: >NC_005301.3-cand-10370-10449
  source 1..80: mol_type = other DNA
atcagtcatacctgatagcagcaacccccgattacttaagtttgtgcccctcaaaaaaggtctagcagtggtgaaaatca

SEQ ID NO: 15674 - DNA, 80 bp, synthetic construct
  misc_feature 1..80: note = Synthetic: >NC_005301.3-cand-10430-10509
  source 1..80: mol_type = other DNA
tctagcagtggtgaaaatcaaaaaacaaattttaacagtgaagaagcaggttgtgtttgatgcagagagcgagcctagac

SEQ ID NO: 15675 - DNA, 80 bp, synthetic construct
  misc_feature 1..80: note = Synthetic: >NC_005301.3-cand-10530-10609
  source 1..80: mol_type = other DNA
ttgtccattgtttatgacgaaactgatactcagaccacataccatgaaaatcttttgaaggtgaagcatcttgtagactg

SEQ ID NO: 15676 - DNA, 80 bp, synthetic construct
  misc_feature 1..80: note = Synthetic: >NC_005301.3-cand-10610-10689
  source 1..80: mol_type = other DNA
ctctacagatagaaaaaagcttttgccccagtcagtgttttctgactccaaagttgtcctttcaaggatcaagttcaaga

SEQ ID NO: 15677 - DNA, 80 bp, synthetic construct
  misc_feature 1..80: note = Synthetic: >NC_005301.3-cand-10710-10789
  source 1..80: mol_type = other DNA
ttgacgctgctccactgtttcctaaaacatgctcctagtgatgccataatggaggtagagagcaaaagtagcttgctaca

SEQ ID NO: 15678 - DNA, 80 bp, synthetic construct
  misc_feature 1..80: note = Synthetic: >NC_005831.2-cand-4810-4889
  source 1..80: mol_type = other DNA
tttatatgtgtgttgtaccatcgataaatgatctttcttttgataaaaatcttggtcgttgtgtgcgtaaacttaataga

SEQ ID NO: 15679 - DNA, 80 bp, synthetic construct
  misc_feature 1..80: note = Synthetic: >NC_005831.2-cand-4890-4969
  source 1..80: mol_type = other DNA
ttgaaaacttgtgttattgccaatgttcctgctattgatgttttgaaaaagcttctttcaagtttgactttaactgttaa

SEQ ID NO: 15680 - DNA, 80 bp, synthetic construct
  misc_feature 1..80: note = Synthetic: >NC_005831.2-cand-4970-5049
  source 1..80: mol_type = other DNA
atttgttgtagagagtaatgttatggatgttaacgactgttttaagaatgataatgtagttttgaaaattactgaagatg

SEQ ID NO: 15681 - DNA, 80 bp, synthetic construct
  misc_feature 1..80: note = Synthetic: >NC_005831.2-cand-5050-5129
  source 1..80: mol_type = other DNA
gtattaatgttaaagatgttgttgttgagtcttctaagtcacttggtaaacaattgggtgttgtgagtgatggtgttgac

SEQ ID NO: 15682 - DNA, 80 bp, synthetic construct
  misc_feature 1..80: note = Synthetic: >NC_005831.2-cand-5130-5209
  source 1..80: mol_type = other DNA
tcttttgaaggtgttttacctattaatactgatactgtcttatctgtagctccagaagttgactgggttgctttttacgg

SEQ ID NO: 15683 - DNA, 80 bp, synthetic construct
  misc_feature 1..80: note = Synthetic: >NC_005831.2-cand-5210-5289
  source 1..80: mol_type = other DNA
ttttgaaaaggcagcactttttgcttctttggatgtaaagccatatggttaccctaatgattttgttggtggttttagag

SEQ ID NO: 15684 - DNA, 80 bp, synthetic construct
  misc_feature 1..80: note = Synthetic: >NC_005831.2-cand-5290-5369
  source 1..80: mol_type = other DNA
ttcttgggaccaccgacaataattgttgggttaatgcaacttgtataattttacagtatcttaagcctacttttaaatct

SEQ ID NO: 15685 - DNA, 80 bp, synthetic construct
  misc_feature 1..80: note = Synthetic: >NC_005831.2-cand-5370-5449
  source 1..80: mol_type = other DNA
aagggtttaaatgttctttggaacaaatttgttacaggtgatgttggaccttttgttagttttatttattttataactat

SEQ ID NO: 15686 - DNA, 80 bp, synthetic construct
  misc_feature 1..80: note = Synthetic: >NC_005831.2-cand-5450-5529
  source 1..80: mol_type = other DNA
gtcttcaaagggtcaaaagggtgatgctgaagaggcattatctaaattgtcagagtatttgattagtgattctattgtta

SEQ ID NO: 15687 - DNA, 80 bp, synthetic construct
  misc_feature 1..80: note = Synthetic: >NC_005831.2-cand-5530-5609
  source 1..80: mol_type = other DNA
ctcttgaacaatattcaacttgtgacatttgtaaaagtactgtagttgaagttaaaagtgctattgtctgtgctagtgtg

SEQ ID NO: 15688 - DNA, 80 bp, synthetic construct
  misc_feature 1..80: note = Synthetic: >NC_005831.2-cand-5610-5689
  source 1..80: mol_type = other DNA
cttaaagatggttgtgatgttggtttttgtccacacagacataaattgcgttcacgtgttaagtttgttaatggacgtgt

SEQ ID NO: 15689 - DNA, 80 bp, synthetic construct
  misc_feature 1..80: note = Synthetic: >NC_005831.2-cand-5690-5769
  source 1..80: mol_type = other DNA
tgttattaccaatgttggtgaacctataatttcacaaccttctaagttgcttaatggtattgcttatacaacattttcag

SEQ ID NO: 15690 - DNA, 80 bp, synthetic construct
  misc_feature 1..80: note = Synthetic: >NC_005831.2-cand-5770-5849
  source 1..80: mol_type = other DNA
gttcttttgataacggtcactatgtagtttatgatgctgctaataatgctgtctatgatggtgctcgtttattttcttca

SEQ ID NO: 15691 - DNA, 80 bp, synthetic construct
  misc_feature 1..80: note = Synthetic: >NC_005831.2-cand-5850-5929
  source 1..80: mol_type = other DNA
gatttgtctactttagctgttacagctattgttgtagtaggtggttgtgtaacatctaatgttccaacaattgttagtga

SEQ ID NO: 15692 - DNA, 80 bp, synthetic construct
  misc_feature 1..80: note = Synthetic: >NC_005831.2-cand-5930-6009
  source 1..80: mol_type = other DNA
gaaaatttctgttatggataaacttgatactggtgcacaaaaatttttccaatttggtgattttgttatgaataacattg

SEQ ID NO: 15693 - DNA, 80 bp, synthetic construct
  misc_feature 1..80: note = Synthetic: >NC_005831.2-cand-6020-6099
  source 1..80: mol_type = other DNA
aacttggttgcttagtatgtttagtcttttacgtacttctattatgaagcatgatattaaagttattgccaaggctccta

SEQ ID NO: 15694 - DNA, 80 bp, synthetic construct
  misc_feature 1..80: note = Synthetic: >NC_006213.1-cand-25970-26049
  source 1..80: mol_type = other DNA
acgatagtttagaacctgtaggtggtttgtatgaaattcaaataccttcagagtttactataggtaatatggtggagttt

SEQ ID NO: 15695 - DNA, 80 bp, synthetic construct
  misc_feature 1..80: note = Synthetic: >NC_006213.1-cand-26050-26129
  source 1..80: mol_type = other DNA
attcaaacaagctctcctaaagttactattgattgtgctgcatttgtctgtggtgattatgcagcatgtaaatcacagtt

SEQ ID NO: 15696 - DNA, 80 bp, synthetic construct
  misc_feature 1..80: note = Synthetic: >NC_006213.1-cand-26130-26209
  source 1..80: mol_type = other DNA
ggttgaatatggtagtttctgtgataacattaatgccatactcacagaagtaaatgaactacttgacactacacagttgc

SEQ ID NO: 15697 - DNA, 80 bp, synthetic construct
  misc_feature 1..80: note = Synthetic: >NC_006213.1-cand-26210-26289
  source 1..80: mol_type = other DNA
aagtagctaatagtttaatgaatggtgttactcttagcactaagcttaaagatggcgttaatttcaatgtagacgacatc

SEQ ID NO: 15698 - DNA, 80 bp, synthetic construct
  misc_feature 1..80: note = Synthetic: >NC_006213.1-cand-26290-26369
  source 1..80: mol_type = other DNA
aatttttcccctgtattaggttgtctaggcagcgaatgtagtaaagcttccagtagatctgctatagaggatttactttt

SEQ ID NO: 15699 - DNA, 80 bp, synthetic construct
  misc_feature 1..80: note = Synthetic: >NC_006213.1-cand-26370-26449
  source 1..80: mol_type = other DNA
tgataaagtaaagttatctgatgtcggttttgttgaggcttataataattgtacaggaggtgccgaaattagggacctca

SEQ ID NO: 15700 - DNA, 80 bp, synthetic construct
  misc_feature 1..80: note = Synthetic: >NC_006213.1-cand-26450-26529
  source 1..80: mol_type = other DNA
tttgtgtgcaaagttataaaggcatcaaagtgttgcctccactgctctcagaaaatcagatcagtggatacactttggct

SEQ ID NO: 15701 - DNA, 80 bp, synthetic construct
  misc_feature 1..80: note = Synthetic: >NC_006213.1-cand-26530-26609
  source 1..80: mol_type = other DNA
gccacctctgctagtctatttcctccttggacagcagcagcaggtgtaccattttatttaaatgttcagtatcgcattaa

SEQ ID NO: 15702 - DNA, 80 bp, synthetic construct
  misc_feature 1..80: note = Synthetic: >NC_006213.1-cand-26610-26689
  source 1..80: mol_type = other DNA
tgggcttggtgtcaccatggatgtgctaagtcaaaatcaaaagcttattgctaatgcatttaacaatgccctttatgcta

SEQ ID NO: 15703 - DNA, 80 bp, synthetic construct
  misc_feature 1..80: note = Synthetic: >NC_006213.1-cand-26690-26769
  source 1..80: mol_type = other DNA
ttcaggaagggttcgatgcaactaattctgctttagttaaaattcaagctgttgttaatgcaaatgctgaagctcttaat

SEQ ID NO: 15704 - DNA, 80 bp, synthetic construct
  misc_feature 1..80: note = Synthetic: >NC_006213.1-cand-26770-26849
  source 1..80: mol_type = other DNA
aacttattgcaacaactctctaatagatttggtgctataagtgcttctttacaagaaattctatctagacttgatgctct

SEQ ID NO: 15705 - DNA, 80 bp, synthetic construct
  misc_feature 1..80: note = Synthetic: >NC_006213.1-cand-26830-26909
  source 1..80: mol_type = other DNA
ctatctagacttgatgctcttgaagcggaagctcagatagatagacttattaatggtcgtcttaccgctcttaatgctta

SEQ ID NO: 15706 - DNA, 80 bp, synthetic construct
  misc_feature 1..80: note = Synthetic: >NC_006213.1-cand-26910-26989
  source 1..80: mol_type = other DNA
tgtttctcaacagcttagtgattctacactggtaaaatttagtgcagcacaagctatggagaaggttaatgaatgtgtca

SEQ ID NO: 15707 - DNA, 80 bp, synthetic construct
  misc_feature 1..80: note = Synthetic: >NC_006213.1-cand-26990-27069
  source 1..80: mol_type = other DNA
aaagccaatcatctaggataaatttctgtggtaatggtaatcatattatatcattagtgcagaatgctccatatggtttg

SEQ ID NO: 15708 - DNA, 80 bp, synthetic construct
  misc_feature 1..80: note = Synthetic: >NC_006213.1-cand-27070-27149
  source 1..80: mol_type = other DNA
tattttatccactttagttatgtccctactaagtatgtcacagcgagggttagtcctggtctgtgcattgctggtgatag

SEQ ID NO: 15709 - DNA, 80 bp, synthetic construct
  misc_feature 1..80: note = Synthetic: >NC_006213.1-cand-27150-27229
  source 1..80: mol_type = other DNA
aggtatagctcctaagagtggttattttgttaatgtaaataatacttggatgtacactggtagtggttactactaccctg

SEQ ID NO: 15710 - DNA, 80 bp, synthetic construct
  misc_feature 1..80: note = Synthetic: >NC_006213.1-cand-28510-28589
  source 1..80: mol_type = other DNA
cgcagtatgtttgtttatgttattaagatgattattttgtggcttatgtggccccttactataatcttaactattttcaa

SEQ ID NO: 15711 - DNA, 80 bp, synthetic construct
  misc_feature 1..80: note = Synthetic: >NC_006213.1-cand-28590-28669
  source 1..80: mol_type = other DNA
ttgcgtatacgcattgaataatgtgtatcttggcctttctatagtttttaccatagtggccattattatgtggattgtgt

SEQ ID NO: 15712 - DNA, 80 bp, synthetic construct
  misc_feature 1..80: note = Synthetic: >NC_006213.1-cand-28670-28749
  source 1..80: mol_type = other DNA
attttgtgaatagtatcaggttgtttattagaactggaagtttttggagtttcaacccagaaacaaacaacttgatgtgt

SEQ ID NO: 15713 - DNA, 80 bp, synthetic construct
  misc_feature 1..80: note = Synthetic: >NC_006213.1-cand-28750-28829
  source 1..80: mol_type = other DNA
atagatatgaaaggaacaatgtatgttaggccgataattgaggactatcatactctgacggtcacaataatacgcggcca

SEQ ID NO: 15714 - DNA, 80 bp, synthetic construct
  misc_feature 1..80: note = Synthetic: >NC_006213.1-cand-28820-28899
  source 1..80: mol_type = other DNA
tacgcggccatctttacattcaaggtataaaactaggtactggctattctttggcagatttgccagcttatatgactgtt

SEQ ID NO: 15715 - DNA, 80 bp, synthetic construct
  misc_feature 1..80: note = Synthetic: >NC_006213.1-cand-28900-28979
  source 1..80: mol_type = other DNA
gctaaggttacacacctgtgcacatataagcgtggttttcttgacaggataagcgatactagtggttttgctgtttatgt

SEQ ID NO: 15716 - DNA, 80 bp, synthetic construct
  misc_feature 1..80: note = Synthetic: >NC_006213.1-cand-28980-29059
  source 1..80: mol_type = other DNA
taagtccaaagtcggtaattaccgactgccatcaacccaaaagggttctggcatggacaccgcattgttgagaaataata

SEQ ID NO: 15717 - DNA, 80 bp, synthetic construct
  misc_feature 1..80: note = Synthetic: >NC_006213.1-cand-29060-29139
  source 1..80: mol_type = other DNA
tctaaattttaaggatgtcttttactcctggtaagcaatccagtagtagagcgtcctctggaaatcgttctggtaatggc

SEQ ID NO: 15718 - DNA, 80 bp, synthetic construct
  misc_feature 1..80: note = Synthetic: >NC_006213.1-cand-29110-29189
  source 1..80: mol_type = other DNA
gcgtcctctggaaatcgttctggtaatggcatcctcaagtgggccgatcagtccgaccagtttagaaatgttcaaaccag

SEQ ID NO: 15719 - DNA, 80 bp, synthetic construct
  misc_feature 1..80: note = Synthetic: >NC_006213.1-cand-29220-29299
  source 1..80: mol_type = other DNA
tacctctcagcaaccatcaggagggaatgttgtaccctactattcttggttctctggaattactcagtttcaaaagggaa

SEQ ID NO: 15720 - DNA, 80 bp, synthetic construct
  misc_feature 1..80: note = Synthetic: >NC_006213.1-cand-29290-29369
  source 1..80: mol_type = other DNA
caaaagggaaaggagtttgagtttgtagaaggacaaggtgtgcctattgcaccaggagtcccagctactgaagctaaggg

SEQ ID NO: 15721 - DNA, 80 bp, synthetic construct
  misc_feature 1..80: note = Synthetic: >NC_006213.1-cand-29380-29459
  source 1..80: mol_type = other DNA
agacacaacagacgttcttttaaaacagccgatggcaaccagcgtcaactgctgccacgatggtatttttactatctggg

SEQ ID NO: 15722 - DNA, 80 bp, synthetic construct
  misc_feature 1..80: note = Synthetic: >NC_006213.1-cand-29460-29539
  source 1..80: mol_type = other DNA
aacaggaccgcatgctaaagaccagtacggcaccgatattgacggagtctactgggtcgctagcaaccaggctgatgtca

SEQ ID NO: 15723 - DNA, 80 bp, synthetic construct
  misc_feature 1..80: note = Synthetic: >NC_006213.1-cand-29540-29619
  source 1..80: mol_type = other DNA
ataccccggctgacattgtcgatcgggacccaagtagcgatgaggctattccgactaggtttccgcctggcacggtactc

SEQ ID NO: 15724 - DNA, 80 bp, synthetic construct
  misc_feature 1..80: note = Synthetic: >NC_006213.1-cand-29620-29699
  source 1..80: mol_type = other DNA
cctcagggttactatattgaaggctcaggaaggtctgctcctaattccagatctacttcgcgcacatccagcagagcctc

SEQ ID NO: 15725 - DNA, 80 bp, synthetic construct
  misc_feature 1..80: note = Synthetic: >NC_006213.1-cand-29700-29779
  source 1..80: mol_type = other DNA
tagtgcaggatcgcgtagtagagccaattctggcaatagaacccctacctctggtgtaacacctgacatggctgatcaaa

SEQ ID NO: 15726 - DNA, 80 bp, synthetic construct
  misc_feature 1..80: note = Synthetic: >NC_006313.1-cand-2860-2939
  source 1..80: mol_type = other DNA
tatgtaatgctgcggccacaaacttggtcaacaagggagtttcctcacccattacaaaaaatctcgatttgaactcagca

SEQ ID NO: 15727 - DNA, 80 bp, synthetic construct
  misc_feature 1..80: note = Synthetic: >NC_006313.1-cand-2940-3019
  source 1..80: mol_type = other DNA
acaaaattccccaccacactctttggacttacaaatttgttcaattttgaagataggtactcatggaaacagatgatttc

SEQ ID NO: 15728 - DNA, 80 bp, synthetic construct
  misc_feature 1..80: note = Synthetic: >NC_006313.1-cand-3020-3099
  source 1..80: mol_type = other DNA
caaccagtcaaaatcttcatcattttcttttgtactcagtggcaatttcatgattgaaatttggtcatcactagatgtgt

SEQ ID NO: 15729 - DNA, 80 bp, synthetic construct
  misc_feature 1..80: note = Synthetic: >NC_006313.1-cand-3100-3179
  source 1..80: mol_type = other DNA
aagaagtgacatcaatatcaaacagtttgtgtattacataattaaggaattgttcagttattaatgcatacaagtctgac

SEQ ID NO: 15730 - DNA, 80 bp, synthetic construct
  misc_feature 1..80: note = Synthetic: >NC_006313.1-cand-3180-3259
  source 1..80: mol_type = other DNA
aaattgtgtaggatgccttggcccatgtcaagtacagacattatatgacttgggatttcatcttgaatctgaaggtagct

SEQ ID NO: 15731 - DNA, 80 bp, synthetic construct
  misc_feature 1..80: note = Synthetic: >NC_006313.1-cand-3260-3339
  source 1..80: mol_type = other DNA
atgataaaattcctctgtgagacttgaacactgacattccatcaacccaagacttcttttaagcttccctatacagtaag

SEQ ID NO: 15732 - DNA, 80 bp, synthetic construct
  misc_feature 1..80: note = Synthetic: >NC_006313.1-cand-3340-3419
  source 1..80: mol_type = other DNA
cctgtgcaacattaaaaggaacctctactgttttgtgtaagtgccacttcagtatattaagtaaaggatcaaggttcagc

SEQ ID NO: 15733 - DNA, 80 bp, synthetic construct
  misc_feature 1..80: note = Synthetic: >NC_006313.1-cand-3410-3489
  source 1..80: mol_type = other DNA
aaggttcagccttgttctactcttgggctcagtaagattcaaattggctaaaaatgtaaaaaacagagcagggctcatgt

SEQ ID NO: 15734 - DNA, 80 bp, synthetic construct
  misc_feature 1..80: note = Synthetic: >NC_006313.1-cand-3500-3579
  source 1..80: mol_type = other DNA
ctttgagtggtccatggaaagactaaagtcaccattgtttactgccattttcatatcacaaattgccctttcaaattcct

SEQ ID NO: 15735 - DNA, 80 bp, synthetic construct
  misc_feature 1..80: note = Synthetic: >NC_006313.1-cand-3580-3659
  source 1..80: mol_type = other DNA
tctcagaattcaaacaagagaacctcattgatcctgtgaccacttctgagaaatcctctaccaatctagtcataagctta

SEQ ID NO: 15736 - DNA, 80 bp, synthetic construct
  misc_feature 1..80: note = Synthetic: >NC_006313.1-cand-3660-3739
  source 1..80: mol_type = other DNA
gtgttaagatctcccacataaagctccctgttagacccaacctgttctttataacttaacccaaatttcagattgccagt

SEQ ID NO: 15737 - DNA, 80 bp, synthetic construct
  misc_feature 1..80: note = Synthetic: >NC_006313.1-cand-3770-3849
  source 1..80: mol_type = other DNA
ggaatcttctgagtaaaagcaaagatttcgtaaagctgcacttgtaaagaaagttctatcaagtttttttgctattgcct

SEQ ID NO: 15738 - DNA, 80 bp, synthetic construct
  misc_feature 1..80: note = Synthetic: >NC_006313.1-cand-3820-3899
  source 1..80: mol_type = other DNA
aagttctatcaagtttttttgctattgcctcagcattgctttctcttgtgctaactcttgcattctcttgtaccttaagt

SEQ ID NO: 15739 - DNA, 80 bp, synthetic construct
  misc_feature 1..80: note = Synthetic: >NC_006313.1-cand-3900-3979
  source 1..80: mol_type = other DNA
gcctctgaactcagccctaatcttgatctactcttgtgttcatatgtacctagcttttgatcaaagtctccttgtattaa

SEQ ID NO: 15740 - DNA, 80 bp, synthetic construct
  misc_feature 1..80: note = Synthetic: >NC_006313.1-cand-3980-4059
  source 1..80: mol_type = other DNA
taggtacttaaaacactcaaagaactcttcctcttcataggctatggtagttaaattgatcaacaacatttccaatggaa

SEQ ID NO: 15741 - DNA, 80 bp, synthetic construct
  misc_feature 1..80: note = Synthetic: >NC_006313.1-cand-4060-4139
  source 1..80: mol_type = other DNA
cagattttaacggttcatcaaggaaaaacagtgacttttgtgatgaattatacacctcatgacaaagtttttcaacaaga

SEQ ID NO: 15742 - DNA, 80 bp, synthetic construct
  misc_feature 1..80: note = Synthetic: >NC_006572.1-cand-2160-2239
  source 1..80: mol_type = other DNA
cccaagatccaaagatcgacgcccttaactttcaagctggaaacagaatccaatgctgacagtcttgaaactaatgattt

SEQ ID NO: 15743 - DNA, 80 bp, synthetic construct
  misc_feature 1..80: note = Synthetic: >NC_006572.1-cand-2240-2319
  source 1..80: mol_type = other DNA
tatataggcggtggacctatctgagaatcgaacacatttgctacctagtgtcttgcaaagacctatgaaacctgatgcta

SEQ ID NO: 15744 - DNA, 80 bp, synthetic construct
  misc_feature 1..80: note = Synthetic: >NC_006572.1-cand-2320-2399
  source 1..80: mol_type = other DNA
tcccactctgaaaggcacttttgttgacggcttcacagagcaacttttgtgcccctcttgtgaaattagaggataacttg

SEQ ID NO: 15745 - DNA, 80 bp, synthetic construct
  misc_feature 1..80: note = Synthetic: >NC_006572.1-cand-2400-2479
  source 1..80: mol_type = other DNA
ctttgcaatgttttcaccaaggtaggcagtttttcttccccgagttcaacagcacctgtgtaaatgaccttctgtctcat

SEQ ID NO: 15746 - DNA, 80 bp, synthetic construct
  misc_feature 1..80: note = Synthetic: >NC_006572.1-cand-2480-2559
  source 1..80: mol_type = other DNA
gaccatctttaaagggtgatgagttgtcaaattaagccaacacaccgataaatcctcttctgagagggtgtcatcaccaa

SEQ ID NO: 15747 - DNA, 80 bp, synthetic construct
  misc_feature 1..80: note = Synthetic: >NC_006572.1-cand-2600-2679
  source 1..80: mol_type = other DNA
tgacaagtagatggctgtgaattcttcatgaagctctcctaatttcagcttattaaaaactgtccttaggaccttcctaa

SEQ ID NO: 15748 - DNA, 80 bp, synthetic construct
  misc_feature 1..80: note = Synthetic: >NC_006572.1-cand-2640-2719
  source 1..80: mol_type = other DNA
aatttcagcttattaaaaactgtccttaggaccttcctaactttctgagtgctttctggtaggattgcctcaatgttcct

SEQ ID NO: 15749 - DNA, 80 bp, synthetic construct
  misc_feature 1..80: note = Synthetic: >NC_006572.1-cand-2720-2799
  source 1..80: mol_type = other DNA
cataatcctatagcccctattgccatcaacccaatctttaacatcagaatccaaaaacaacaagaaaggatcaatgggat

SEQ ID NO: 15750 - DNA, 80 bp, synthetic construct
  misc_feature 1..80: note = Synthetic: >NC_006572.1-cand-2800-2879
  source 1..80: mol_type = other DNA
attgtgcatatctaagtagattcagtgttctctcctgaatagcgttacatagtgtgacaggcacaccattggccactgac

SEQ ID NO: 15751 - DNA, 80 bp, synthetic construct
  misc_feature 1..80: note = Synthetic: >NC_006572.1-cand-2880-2959
  source 1..80: mol_type = other DNA
tgatcaatgatagtgtcaatagtttcagctaattgatgtggctccttacacttaacgttgtggagggcggcagccacgaa

SEQ ID NO: 15752 - DNA, 80 bp, synthetic construct
  misc_feature 1..80: note = Synthetic: >NC_006572.1-cand-2960-3039
  source 1..80: mol_type = other DNA
tttcgttaacaatggaacttcatcaccccagacataaaaccttgatttgaactcagcaacaaatgaaccaataacactct

SEQ ID NO: 15753 - DNA, 80 bp, synthetic construct
  misc_feature 1..80: note = Synthetic: >NC_006572.1-cand-3040-3119
  source 1..80: mol_type = other DNA
ttggactgatgaatttattcaattgatcacttaggaaatagtgaaattctagaatggcttggaattcctcaggctcattt

SEQ ID NO: 15754 - DNA, 80 bp, synthetic construct
  misc_feature 1..80: note = Synthetic: >NC_006572.1-cand-3120-3199
  source 1..80: mol_type = other DNA
gagagtaaatctgaaagatccttgccaaatagtgatatttgatcatcactagaggtatatgaatcaacttcatcttcaaa

SEQ ID NO: 15755 - DNA, 80 bp, synthetic construct
  misc_feature 1..80: note = Synthetic: >NC_006572.1-cand-3200-3279
  source 1..80: mol_type = other DNA
tagacacttaatgcaataatttatgaatctctcactcactagaccgtagaagtcagaagcattgtgcaagatcccttgcc

SEQ ID NO: 15756 - DNA, 80 bp, synthetic construct
  misc_feature 1..80: note = Synthetic: >NC_006572.1-cand-3280-3359
  source 1..80: mol_type = other DNA
ccatgtcaattattgagctgagatgtgatggtatcctgttttgtttaaagtattcaaagaagaaagcttctgttgacgtt

SEQ ID NO: 15757 - DNA, 80 bp, synthetic construct
  misc_feature 1..80: note = Synthetic: >NC_006572.1-cand-3360-3439
  source 1..80: mol_type = other DNA
tggtggagtgattttttcaaacctaacctagacttaagataagatctcatcattgcattcacaacattgaaaggtacctc

SEQ ID NO: 15758 - DNA, 80 bp, synthetic construct
  misc_feature 1..80: note = Synthetic: >NC_007366.1-cand-110-189
  source 1..80: mol_type = other DNA
tgtgccttgggcaccatgcagtaccaaacggaacgatagtgaaaacaatcacgaatgaccaaattgaagtcactaatgct

SEQ ID NO: 15759 - DNA, 80 bp, synthetic construct
  misc_feature 1..80: note = Synthetic: >NC_007366.1-cand-200-279
  source 1..80: mol_type = other DNA
ttcagagttcctcaacaggtggaatatgcgacagtcctcatcagatccttgatggagaaaactgcacactaatagatgct

SEQ ID NO: 15760 - DNA, 80 bp, synthetic construct
  misc_feature 1..80: note = Synthetic: >NC_007366.1-cand-280-359
  source 1..80: mol_type = other DNA
ctattgggagaccctcagtgtgatggcttccaaaataagaaatgggacctttttgttgaacgcagcaaagcctacagcaa

SEQ ID NO: 15761 - DNA, 80 bp, synthetic construct
  misc_feature 1..80: note = Synthetic: >NC_007366.1-cand-370-449
  source 1..80: mol_type = other DNA
tatgatgtgccggattatgcctcccttaggtcactagttgcctcatccggcacactggagtttaacaatgaaagcttcaa

SEQ ID NO: 15762 - DNA, 80 bp, synthetic construct
  misc_feature 1..80: note = Synthetic: >NC_007366.1-cand-460-539
  source 1..80: mol_type = other DNA
gtcactcaaaatggaacaagctctgcttgcaaaaggagatctaataacagtttctttagtagattgaattggttgaccca

SEQ ID NO: 15763 - DNA, 80 bp, synthetic construct
  misc_feature 1..80: note = Synthetic: >NC_007366.1-cand-530-609
  source 1..80: mol_type = other DNA
ggttgacccacttaaaattcaaatacccagcattgaacgtgactatgccaaacaatgaaaaatttgacaaactgtacatt

SEQ ID NO: 15764 - DNA, 80 bp, synthetic construct
  misc_feature 1..80: note = Synthetic: >NC_007366.1-cand-640-719
  source 1..80: mol_type = other DNA
gaccaaatcagcctatatgctcaagcatcaggaagaatcacagtctctaccaaaagaagccaacaaaccgtaatcccgag

SEQ ID NO: 15765 - DNA, 80 bp, synthetic construct
  misc_feature 1..80: note = Synthetic: >NC_007366.1-cand-730-809
  source 1..80: mol_type = other DNA
agacccaggataagggatgtccccagcagaataagcatctattggacaatagtaaaaccgggagacatacttttgattaa

SEQ ID NO: 15766 - DNA, 80 bp, synthetic construct
  misc_feature 1..80: note = Synthetic: >NC_007366.1-cand-840-919
  source 1..80: mol_type = other DNA
ttacttcaaaatacgaagtgggaaaagctcaataatgagatcagatgcacccattggcaaatgcaattctgaatgcatca

SEQ ID NO: 15767 - DNA, 80 bp, synthetic construct
  misc_feature 1..80: note = Synthetic: >NC_007366.1-cand-900-979
  source 1..80: mol_type = other DNA
atgcaattctgaatgcatcactccaaatggaagcattcccaatgacaaaccatttcaaaatgtaaacaggatcacatatg

SEQ ID NO: 15768 - DNA, 80 bp, synthetic construct
  misc_feature 1..80: note = Synthetic: >NC_007366.1-cand-990-1069
  source 1..80: mol_type = other DNA
cagatatgttaagcaaaacactctgaaattggcaacagggatgcgaaatgtaccagagaaacaaactagaggcatatttg

SEQ ID NO: 15769 - DNA, 80 bp, synthetic construct
  misc_feature 1..80: note = Synthetic: >NC_007366.1-cand-1080-1159
  source 1..80: mol_type = other DNA
gggtttcatagaaaatggttgggagggaatggtagacggttggtacggtttcaggcatcaaaattctgagggaacaggac

SEQ ID NO: 15770 - DNA, 80 bp, synthetic construct
  misc_feature 1..80: note = Synthetic: >NC_007366.1-cand-1170-1249
  source 1..80: mol_type = other DNA
tctcaaaagcactcaagcagcaatcaaccaaatcaatgggaagctgaataggttgatcgggaaaacaaacgagaaattcc

SEQ ID NO: 15771 - DNA, 80 bp, synthetic construct
  misc_feature 1..80: note = Synthetic: >NC_007366.1-cand-1260-1339
  source 1..80: mol_type = other DNA
aaaagaattctcagaagtagaagggagaattcaggacctcgagaaatatgttgaggacactaaaatagatctctggtcat

SEQ ID NO: 15772 - DNA, 80 bp, synthetic construct
  misc_feature 1..80: note = Synthetic: >NC_007366.1-cand-1340-1419
  source 1..80: mol_type = other DNA
acaacgcggagcttcttgtggccctggagaaccaacatacaattgatctaactgactcagaaatgaacaaactgtttgaa

SEQ ID NO: 15773 - DNA, 80 bp, synthetic construct
  misc_feature 1..80: note = Synthetic: >NC_007366.1-cand-1420-1499
  source 1..80: mol_type = other DNA
agaacaaagaagcaactgagggaaaatgctgaggatatgggcaatggttgtttcaaaatataccacaaatgtgacaatgc

SEQ ID NO: 15774 - DNA, 80 bp, synthetic construct
  misc_feature 1..80: note = Synthetic: >NC_007371.1-cand-1320-1399
  source 1..80: mol_type = other DNA
caattgagtacattgcaagcatgaggaggaattatttcacagcagaggtgtcccattgtagagccactgagtacataatg

SEQ ID NO: 15775 - DNA, 80 bp, synthetic construct
  misc_feature 1..80: note = Synthetic: >NC_007371.1-cand-1410-1489
  source 1..80: mol_type = other DNA
acattaatactgccctgctcaatgcatcctgtgcagcaatggacgattttcaactaattcccatgataagcaagtgcaga

SEQ ID NO: 15776 - DNA, 80 bp, synthetic construct
  misc_feature 1..80: note = Synthetic: >NC_007371.1-cand-1480-1559
  source 1..80: mol_type = other DNA
caagtgcagaactaaagagggaaggcgaaaaaccaatttatatggattcatcataaagggaagatctcatttaaggaatg

SEQ ID NO: 15777 - DNA, 80 bp, synthetic construct
  misc_feature 1..80: note = Synthetic: >NC_007371.1-cand-1650-1729
  source 1..80: mol_type = other DNA
agataggagatatgttactaagaagtgccataggccaaatttcaaggcctatgttcttgtatgtgaggacaaacggaaca

SEQ ID NO: 15778 - DNA, 80 bp, synthetic construct
  misc_feature 1..80: note = Synthetic: >NC_007371.1-cand-1750-1829
  source 1..80: mol_type = other DNA
gggaatggagatgagacgttgcctccttcagtcactccagcagatcgagagcatgattgaagccgagtcctcgattaaag

SEQ ID NO: 15779 - DNA, 80 bp, synthetic construct
  misc_feature 1..80: note = Synthetic: >NC_007371.1-cand-1800-1879
  source 1..80: mol_type = other DNA
gcatgattgaagccgagtcctcgattaaagagaaagacatgaccaaagagttttttgagaataaatcagaagcatggccc

SEQ ID NO: 15780 - DNA, 80 bp, synthetic construct
  misc_feature 1..80: note = Synthetic: >NC_007371.1-cand-1900-1979
  source 1..80: mol_type = other DNA
agtggaagaaggttccattgggaaagtctgtaggactctattggctaagtcagtgttcaatagcctgtatgcatcaccac

SEQ ID NO: 15781 - DNA, 80 bp, synthetic construct
  misc_feature 1..80: note = Synthetic: >NC_007371.1-cand-1980-2059
  source 1..80: mol_type = other DNA
aattggaaggattttcagcggagtcaagaaaactgcttcttgttgttcaggctcttagggacaacctcgaacctgggacc

SEQ ID NO: 15782 - DNA, 80 bp, synthetic construct
  misc_feature 1..80: note = Synthetic: >NC_007371.1-cand-2080-2159
  source 1..80: mol_type = other DNA
tgaagcaattgaggagtgcctgattaatgatccctgggttttgctcaatgcatcttggttcaactccttcctgacacatg

SEQ ID NO: 15783 - DNA, 80 bp, synthetic construct
  misc_feature 1..80: note = Synthetic: >NC_007371.1-cand-2140-2219
  source 1..80: mol_type = other DNA
caactccttcctgacacatgcattaaaatagttatggcagtgctactatttgttatccgtactgtccaaaaaagtacctt

SEQ ID NO: 15784 - DNA, 80 bp, synthetic construct
  misc_feature 1..80: note = Synthetic: >NC_007372.1-cand-90-169
  source 1..80: mol_type = other DNA
atactggagatcctccatacagccatggaacaggaacaggatacaccatggacacagtcaacagaacacaccaatattca

SEQ ID NO: 15785 - DNA, 80 bp, synthetic construct
  misc_feature 1..80: note = Synthetic: >NC_007372.1-cand-210-289
  source 1..80: mol_type = other DNA
cccaactcaacccaattgatggaccactacctgaggataatgagccaagtggatatgcacaaacagactgtgtcctggag

SEQ ID NO: 15786 - DNA, 80 bp, synthetic construct
  misc_feature 1..80: note = Synthetic: >NC_007372.1-cand-290-369
  source 1..80: mol_type = other DNA
gctatggccttccttgaagaatcccacccaggtatctttgagaactcatgccttgaaacaatggaagtcgttcaacaaac

SEQ ID NO: 15787 - DNA, 80 bp, synthetic construct
  misc_feature 1..80: note = Synthetic: >NC_007372.1-cand-450-529
  source 1..80: mol_type = other DNA
ccaacaccatagaagtttttagatcgaatggactaacagccaatgaatcaggaaggctaatagatttcctcaaggatgtg

SEQ ID NO: 15788 - DNA, 80 bp, synthetic construct
  misc_feature 1..80: note = Synthetic: >NC_007372.1-cand-680-759
  source 1..80: mol_type = other DNA
gctttgacattgaacacgatgaccaaagatgcagagagaggtaaattaaaaagaagggctattgcaacacccgggatgca

SEQ ID NO: 15789 - DNA, 80 bp, synthetic construct
  misc_feature 1..80: note = Synthetic: >NC_007372.1-cand-760-839
  source 1..80: mol_type = other DNA
aattagagggttcgtgtacttcgttgaaactttagctagaagcatttgcgaaaagcttgaacagtctggacttccggttg

SEQ ID NO: 15790 - DNA, 80 bp, synthetic construct
  misc_feature 1..80: note = Synthetic: >NC_009824.1-cand-2070-2149
  source 1..80: mol_type = other DNA
cccacaatgaatcagatcttttctgccccactgactgcttcaggaaacatcccgagaccacgtacagccggtgtggtgca

SEQ ID NO: 15791 - DNA, 80 bp, synthetic construct
  misc_feature 1..80: note = Synthetic: >NC_009824.1-cand-2090-2169
  source 1..80: mol_type = other DNA
ttctgccccactgactgcttcaggaaacatcccgagaccacgtacagccggtgtggtgcagggccctggttgacacctcg

SEQ ID NO: 15792 - DNA, 80 bp, synthetic construct
  misc_feature 1..80: note = Synthetic: >NC_009824.1-cand-2170-2249
  source 1..80: mol_type = other DNA
ttgcatggttgactacccataccggctttggcattacccatgtacagtcgatttcagattgttcaaggtgaggatgtttg

SEQ ID NO: 15793 - DNA, 80 bp, synthetic construct
  misc_feature 1..80: note = Synthetic: >NC_009824.1-cand-2210-2289
  source 1..80: mol_type = other DNA
tgtacagtcgatttcagattgttcaaggtgaggatgtttgtgggtgggtttgaacatcgatttaccgccgcttgcaactg

SEQ ID NO: 15794 - DNA, 80 bp, synthetic construct
  misc_feature 1..80: note = Synthetic: >NC_009824.1-cand-2330-2409
  source 1..80: mol_type = other DNA
agtgagcaacatccgctgctgcattcaacaactgagcttgctatactgccttgctctttcacgcccatgcctgcgctgtc

SEQ ID NO: 15795 - DNA, 80 bp, synthetic construct
  misc_feature 1..80: note = Synthetic: >NC_009824.1-cand-2410-2489
  source 1..80: mol_type = other DNA
aacaggtctgatacacctccaccaaaacatcgtggatgtccaatacctttatggcgttggatctggcatggtgggatggg

SEQ ID NO: 15796 - DNA, 80 bp, synthetic construct
  misc_feature 1..80: note = Synthetic: >NC_009824.1-cand-2490-2569
  source 1..80: mol_type = other DNA
cgctgaaatgggagttcgtcatcctcgttttcctccttctggcggacgcacgcgtgtgcgttgccctttggctgatgctg

SEQ ID NO: 15797 - DNA, 80 bp, synthetic construct
  misc_feature 1..80: note = Synthetic: >NC_009824.1-cand-2570-2649
  source 1..80: mol_type = other DNA
atgatatcacagacagaagcagccttggagaacctggtcacgctgaacgccgtcgctgctgctgggacacatggtatcgg

SEQ ID NO: 15798 - DNA, 80 bp, synthetic construct
  misc_feature 1..80: note = Synthetic: >NC_009824.1-cand-2690-2769
  source 1..80: mol_type = other DNA
ggtaaactcgtcccgctggtgacctacagcctgacgggtctttggtccctagcattgctcgtcctcttgctcccccaacg

SEQ ID NO: 15799 - DNA, 80 bp, synthetic construct
  misc_feature 1..80: note = Synthetic: >NC_009824.1-cand-2730-2809
  source 1..80: mol_type = other DNA
tttggtccctagcattgctcgtcctcttgctcccccaacgtgcgtatgcttggtcgggtgaagacagcgccactcttggc

SEQ ID NO: 15800 - DNA, 80 bp, synthetic construct
  misc_feature 1..80: note = Synthetic: >NC_009824.1-cand-2820-2899
  source 1..80: mol_type = other DNA
tggtcctcttcggcttctttaccttgtcaccctggtataagcattggatcggccgcctcatgtggtggaaccagtacacc

SEQ ID NO: 15801 - DNA, 80 bp, synthetic construct
  misc_feature 1..80: note = Synthetic: >NC_009824.1-cand-2890-2969
  source 1..80: mol_type = other DNA
ccagtacaccatatgcagatgcgagtccgcccttcacgtgtgggttccccccttactcgcacgcgggagtagggatggtg

SEQ ID NO: 15802 - DNA, 80 bp, synthetic construct
  misc_feature 1..80: note = Synthetic: >NC_009824.1-cand-2970-3049
  source 1..80: mol_type = other DNA
tcatcctgctaacaagcctgctttatccatccttaatttttgacatcactaagctgctgatggcagtattgggcccatta

SEQ ID NO: 15803 - DNA, 80 bp, synthetic construct
  misc_feature 1..80: note = Synthetic: >NC_009824.1-cand-3050-3129
  source 1..80: mol_type = other DNA
tacttaatacaggctaccattactaccaccccctactttgtgcgtgcgcatgtactggtccgcctttgcatgctcgtgcg

SEQ ID NO: 15804 - DNA, 80 bp, synthetic construct
  misc_feature 1..80: note = Synthetic: >NC_009824.1-cand-3150-3229
  source 1..80: mol_type = other DNA
acttccagatgatcatactgagcattggcagatggttcaacacctacctatacgaccacctagcgccaatgcaacactgg

SEQ ID NO: 15805 - DNA, 80 bp, synthetic construct
  misc_feature 1..80: note = Synthetic: >NC_009824.1-cand-3210-3289
  source 1..80: mol_type = other DNA
tagcgccaatgcaacactgggccgctgctggtctcaaagacctagcagtggccactgaacctgtaatatttagtcccatg

SEQ ID NO: 15806 - DNA, 80 bp, synthetic construct
  misc_feature 1..80: note = Synthetic: >NC_009996.1-cand-6900-6979
  source 1..80: mol_type = other DNA
attcgttgtgtttgttagcctggcacaatggagaagaggtttatgaggatttctgcgccaaaattaggacaactagtgtt

SEQ ID NO: 15807 - DNA, 80 bp, synthetic construct
  misc_feature 1..80: note = Synthetic: >NC_009996.1-cand-6980-7059
  source 1..80: mol_type = other DNA
ggcaagagtctgtatttaccaccatacaaatacttgtacagacagtggattgacctcttcatttgattggcccacaatct

SEQ ID NO: 15808 - DNA, 80 bp, synthetic construct
  misc_feature 1..80: note = Synthetic: >NC_010277.2-cand-0-79
  source 1..80: mol_type = other DNA
tctatatgcagaaggagtttgcagaaagagcagaggagcaaatgagctacctcactaaggagtggtttttatactgcagt

SEQ ID NO: 15809 - DNA, 80 bp, synthetic construct
  misc_feature 1..80: note = Synthetic: >NC_010277.2-cand-90-169
  source 1..80: mol_type = other DNA
tgggatctgcccttagatactgccttttttgctaattaagcctcttaagcctcagaggcctctctcttttttttccagag

SEQ ID NO: 15810 - DNA, 80 bp, synthetic construct
  misc_feature 1..80: note = Synthetic: >NC_010277.2-cand-200-279
  source 1..80: mol_type = other DNA
ccaacttgaaaaaaaaaagtcacctaggcagccaagttgtggttacatgattgaacttttattgctgcagggtttctggc

SEQ ID NO: 15811 - DNA, 80 bp, synthetic construct
  misc_feature 1..80: note = Synthetic: >NC_010277.2-cand-280-359
  source 1..80: mol_type = other DNA
attgactcatttcctggagaggcggagtttgactgataaacaaaactttttttctttctgtttgggagggagacggaaga

SEQ ID NO: 15812 - DNA, 80 bp, synthetic construct
  misc_feature 1..80: note = Synthetic: >NC_010277.2-cand-360-439
  source 1..80: mol_type = other DNA
ctcttaactttttttcaacaagggaggcccggaggcttttttttctcttacaaagggaggaggacattaaaagagtaagt

SEQ ID NO: 15813 - DNA, 80 bp, synthetic construct
  misc_feature 1..80: note = Synthetic: >NC_010277.2-cand-470-549
  source 1..80: mol_type = other DNA
tcatcacactgctggccaatattggtgaaattgctactgaactaagtgccaccacaggagtaactttggaagctattctt

SEQ ID NO: 15814 - DNA, 80 bp, synthetic construct
  misc_feature 1..80: note = Synthetic: >NC_010277.2-cand-520-599
  source 1..80: mol_type = other DNA
accacaggagtaactttggaagctattcttacaggagaagctttagcagctttggaagcagagatctccagtttaatgac

SEQ ID NO: 15815 - DNA, 80 bp, synthetic construct
  misc_feature 1..80: note = Synthetic: >NC_010277.2-cand-600-679
  source 1..80: mol_type = other DNA
aattgagggtatttctggcattgaggctttagctcaacttgggttcacagctgaacagttttcaaatttctcattagtgg

SEQ ID NO: 15816 - DNA, 80 bp, synthetic construct
  misc_feature 1..80: note = Synthetic: >NC_010277.2-cand-670-749
  source 1..80: mol_type = other DNA
tcattagtggcttctttggttaaccaaggtttaacttatggcttcattctccaaactgttagtggtataggctctctaat

SEQ ID NO: 15817 - DNA, 80 bp, synthetic construct
  misc_feature 1..80: note = Synthetic: >NC_010277.2-cand-760-839
  source 1..80: mol_type = other DNA
gtgaggttgtcacgcgagcaagtgtcacttgtaaagagggatgtttcgtgggtaggtagtaatgaggttttgaggcatgc

SEQ ID NO: 15818 - DNA, 80 bp, synthetic construct
  misc_feature 1..80: note = Synthetic: >NC_010277.2-cand-820-899
  source 1..80: mol_type = other DNA
aatgaggttttgaggcatgcacttatggcctttagcctagatcctctgcagtgggaaaatagcttgctgcattctgtggg

SEQ ID NO: 15819 - DNA, 80 bp, synthetic construct
  misc_feature 1..80: note = Synthetic: >NC_010277.2-cand-920-999
  source 1..80: mol_type = other DNA
tatctcctacctctaggctgcagatacaatcaaacctagtgaatctgatactaaatagccggtgggtctttcagacaact

SEQ ID NO: 15820 - DNA, 80 bp, synthetic construct
  misc_feature 1..80: note = Synthetic: >NC_010277.2-cand-1000-1079
  source 1..80: mol_type = other DNA
gcttctcagaatcagggccttttatcaggagaggctatattaattcctgaacatataggaggaactctgcagcagcaaac

SEQ ID NO: 15821 - DNA, 80 bp, synthetic construct
  misc_feature 1..80: note = Synthetic: >NC_010277.2-cand-1080-1159
  source 1..80: mol_type = other DNA
tccagattggcttcttcctctggtactaggccttagtggatatatttctcctgaattacaagtaattgaagatggcacca

SEQ ID NO: 15822 - DNA, 80 bp, synthetic construct
  misc_feature 1..80: note = Synthetic: >NC_014397.1-cand-2130-2209
  source 1..80: mol_type = other DNA
acttattaaactgcttatgcagaactatccagagaatagcaggtgagcccttcattcttaagaagaaggatgggtctata

SEQ ID NO: 15823 - DNA, 80 bp, synthetic construct
  misc_feature 1..80: note = Synthetic: >NC_014397.1-cand-2240-2319
  source 1..80: mol_type = other DNA
gggcgtccactgcttgatatgcaaccactcatcagctgttgttacaatggttactttaaaaataaagaagaagagactga

SEQ ID NO: 15824 - DNA, 80 bp, synthetic construct
  misc_feature 1..80: note = Synthetic: >NC_014397.1-cand-2320-2399
  source 1..80: mol_type = other DNA
gccttcgtccctttctgggatgtataagaaaatcatagaacttgagcaccttagaccacagtcagatgccttcttgggtt

SEQ ID NO: 15825 - DNA, 80 bp, synthetic construct
  misc_feature 1..80: note = Synthetic: >NC_014397.1-cand-2400-2479
  source 1..80: mol_type = other DNA
acaaagatccagaacttcccagaatgcatgagttcagtgtttcctacttgaaggaggcttgcaatcatgctaagctagtc

SEQ ID NO: 15826 - DNA, 80 bp, synthetic construct
  misc_feature 1..80: note = Synthetic: >NC_014397.1-cand-2480-2559
  source 1..80: mol_type = other DNA
ttgaggagcctctatggacagaatttcatggagcagatagacaaccagattattcgagagctcagtgggttgactctaga

SEQ ID NO: 15827 - DNA, 80 bp, synthetic construct
  misc_feature 1..80: note = Synthetic: >NC_014397.1-cand-2560-2639
  source 1..80: mol_type = other DNA
aaggttggccacacttaaggccacaagcaactttaatgagaattggtatgtctataaggatgtagcagacaaaaactaca

SEQ ID NO: 15828 - DNA, 80 bp, synthetic construct
  misc_feature 1..80: note = Synthetic: >NC_014397.1-cand-2650-2729
  source 1..80: mol_type = other DNA
attattagtgaagatgtcaaaatatgcctctgagggaaagagcctagctatccagaagtttgaggattgtatgaggcaga

SEQ ID NO: 15829 - DNA, 80 bp, synthetic construct
  misc_feature 1..80: note = Synthetic: >NC_014397.1-cand-2730-2809
  source 1..80: mol_type = other DNA
tagagtcacaaggatgcatgcatatttgtttgtttaagaaacaacagcatggaggtctgagagagatctatgtgatgggt

SEQ ID NO: 15830 - DNA, 80 bp, synthetic construct
  misc_feature 1..80: note = Synthetic: >NC_014397.1-cand-2810-2889
  source 1..80: mol_type = other DNA
gcagaggaaagaattgttcaatcggtggtggagacaatagccaggtccatagggaagttctttgcttctgataccctctg

SEQ ID NO: 15831 - DNA, 80 bp, synthetic construct
  misc_feature 1..80: note = Synthetic: >NC_014397.1-cand-2870-2949
  source 1..80: mol_type = other DNA
tttgcttctgataccctctgtaacccccccaataaagtgaaaattcctgagacacatggcatcagggcccggaagcaatg

SEQ ID NO: 15832 - DNA, 80 bp, synthetic construct
  misc_feature 1..80: note = Synthetic: >NC_014397.1-cand-2980-3059
  source 1..80: mol_type = other DNA
agatgatgcaaggaagtggaaccaaggccattttgttacaaagtttgccctcatgctgtgtgagttcacctctcctaaat

SEQ ID NO: 15833 - DNA, 80 bp, synthetic construct
  misc_feature 1..80: note = Synthetic: >NC_014397.1-cand-3080-3159
  source 1..80: mol_type = other DNA
ggatgctcaatgtttaccaggaaaaggatgatgatgaatttgaattatcttaagatcctggatggtcatcgggagcttga

SEQ ID NO: 15834 - DNA, 80 bp, synthetic construct
  misc_feature 1..80: note = Synthetic: >NC_014397.1-cand-3140-3219
  source 1..80: mol_type = other DNA
gatggtcatcgggagcttgatattagagatgactttgtgatggatctcttcaaagcttatcatggcgaggcagaagttcc

SEQ ID NO: 15835 - DNA, 80 bp, synthetic construct
  misc_feature 1..80: note = Synthetic: >NC_014397.1-cand-3220-3299
  source 1..80: mol_type = other DNA
atgggcctttaaaggcaaaacatatttggaaaccacaacagggatgatgcagggaatactgcattatacttcctcactat

SEQ ID NO: 15836 - DNA, 80 bp, synthetic construct
  misc_feature 1..80: note = Synthetic: >NC_014397.1-cand-3300-3379
  source 1..80: mol_type = other DNA
tacacaccattcaccaagaatacatccggtccttgtcctttaagatattcaacctgaaggttgctcctgagatgagcaag

SEQ ID NO: 15837 - DNA, 80 bp, synthetic construct
  misc_feature 1..80: note = Synthetic: >NC_014397.1-cand-3390-3469
  source 1..80: mol_type = other DNA
gtgacatgatgcaaggatcagatgatagtagtatgctaatcagcttcccagctgatgatgagaaggttcttaccagatgc

SEQ ID NO: 15838 - DNA, 80 bp, synthetic construct
  misc_feature 1..80: note = Synthetic: >NC_021541.1-cand-1350-1429
  source 1..80: mol_type = other DNA
ctctaaagaagtgacttttattgatagaaagattaagactactaaaaaaattctgcacttagataatgatttgctagctg

SEQ ID NO: 15839 - DNA, 80 bp, synthetic construct
  misc_feature 1..80: note = Synthetic: >NC_021541.1-cand-1430-1509
  source 1..80: mol_type = other DNA
aagattacaatgatttaggaaaagcattatctcatggaataccaatgggtacgagaaacgttcccgctaggcaaacaaga

SEQ ID NO: 15840 - DNA, 80 bp, synthetic construct
  misc_feature 1..80: note = Synthetic: >NC_021541.1-cand-1510-1589
  source 1..80: mol_type = other DNA
ggaatattcattctcccatggcaggtggcggctatacaacacactatagctgagtcgttgtacaaacgagcaaagaaggg

SEQ ID NO: 15841 - DNA, 80 bp, synthetic construct
  misc_feature 1..80: note = Synthetic: >NC_021541.1-cand-1590-1669
  source 1..80: mol_type = other DNA
ttcgtatcaagggtcattcgctgaagcttatacagcaaagacggcctctctcacatatggagtattagctgaggatacct

SEQ ID NO: 15842 - DNA, 80 bp, synthetic construct
  misc_feature 1..80: note = Synthetic: >NC_021541.1-cand-1670-1749
  source 1..80: mol_type = other DNA
ctaaagctaccaaaatcatattatacactgatgtatctcagtgggacgccagtcaacataataccgaaccataccgatcc

SEQ ID NO: 15843 - DNA, 80 bp, synthetic construct
  misc_feature 1..80: note = Synthetic: >NC_021541.1-cand-1750-1829
  source 1..80: mol_type = other DNA
gcttggattaacgccatacgtgaagcgagatctgaaatgaaatggctgtattctgatgagcctattgtattaaatatgaa

SEQ ID NO: 15844 - DNA, 80 bp, synthetic construct
  misc_feature 1..80: note = Synthetic: >NC_021541.1-cand-1830-1909
  source 1..80: mol_type = other DNA
cgttcttgattcaatgataaaaatccaagagtatcttttaaattccaatttaatcgtggcttctccaggctcacaacgtc

SEQ ID NO: 15845 - DNA, 80 bp, synthetic construct
  misc_feature 1..80: note = Synthetic: >NC_021541.1-cand-1890-1969
  source 1..80: mol_type = other DNA
ttctccaggctcacaacgtccactaaaaataataagatatcatggtgttgcatcgggtgaaaaaacaaccaaaataggca

SEQ ID NO: 15846 - DNA, 80 bp, synthetic construct
  misc_feature 1..80: note = Synthetic: >NC_021541.1-cand-1970-2049
  source 1..80: mol_type = other DNA
actcgttcgcaaatgtagcactaatagaaacagttttagacagtgtgaaacaagaaattccagatatagaagttacacat

SEQ ID NO: 15847 - DNA, 80 bp, synthetic construct
  misc_feature 1..80: note = Synthetic: >NC_021541.1-cand-2050-2129
  source 1..80: mol_type = other DNA
ctaagagtagatggagacgataatgtagtgtcattaactacgtcatgtcaaatatcaaagttgcaagaaacggttaagag

SEQ ID NO: 15848 - DNA, 80 bp, synthetic construct
  misc_feature 1..80: note = Synthetic: >NC_021541.1-cand-2130-2209
  source 1..80: mol_type = other DNA
agcatattcaaaactgaatgctagagttaaagcacttgcttcatatacaggtctagagatggcaaaaagattcatagtat

SEQ ID NO: 15849 - DNA, 80 bp, synthetic construct
  misc_feature 1..80: note = Synthetic: >NC_021541.1-cand-2240-2319
  source 1..80: mol_type = other DNA
ccatttttacggctgaaagaccttacggaaccgatgtgtcaatacaatccatgtgcggatcatccatttattcgtctgcc

SEQ ID NO: 15850 - DNA, 80 bp, synthetic construct
  misc_feature 1..80: note = Synthetic: >NC_021541.1-cand-2290-2369
  source 1..80: mol_type = other DNA
atgtgcggatcatccatttattcgtctgccgttaatgcgtaccgtgggtttggcgattcatattttgcgttcatgcaaga

SEQ ID NO: 15851 - DNA, 80 bp, synthetic construct
  misc_feature 1..80: note = Synthetic: >NC_021541.1-cand-2370-2449
  source 1..80: mol_type = other DNA
tgtattggttcctccgtcatcatccgtaaggataactggaagattaagggtgttgttgtcaccagtaactttgtatgcaa

SEQ ID NO: 15852 - DNA, 80 bp, synthetic construct
  misc_feature 1..80: note = Synthetic: >NC_021541.1-cand-2450-2529
  source 1..80: mol_type = other DNA
ctggtccgctcagctttgaaataactcctcagggattaggaggcagatgtcgtatgtacacacaatcagaaaaacttttc

SEQ ID NO: 15853 - DNA, 80 bp, synthetic construct
  misc_feature 1..80: note = Synthetic: >NC_021541.1-cand-2530-2609
  source 1..80: mol_type = other DNA
acattatttaagctgttaactcaaactgtatctgtttcagttactccagaagaaattaagaagtattctaacacgcctca

SEQ ID NO: 15854 - DNA, 80 bp, synthetic construct
  misc_feature 1..80: note = Synthetic: >NC_027026.1-cand-4270-4349
  source 1..80: mol_type = other DNA
gcacgactgcaaactgttgtgcctatgacacctgttgcagtcggcatcaacatggattctgcacacatagaagttatgaa

SEQ ID NO: 15855 - DNA, 80 bp, synthetic construct
  misc_feature 1..80: note = Synthetic: >NC_027026.1-cand-4370-4449
  source 1..80: mol_type = other DNA
tgctttatgcattagattatagcaagtgggacagcacccaatctgcagctgtgacagcagcctcacttgagatccttgca

SEQ ID NO: 15856 - DNA, 80 bp, synthetic construct
  misc_feature 1..80: note = Synthetic: >NC_027026.1-cand-4420-4499
  source 1..80: mol_type = other DNA
gtgacagcagcctcacttgagatccttgcatccttcatgacaccaactccaattgtctcatcagctattgaggccctgaa

SEQ ID NO: 15857 - DNA, 80 bp, synthetic construct
  misc_feature 1..80: note = Synthetic: >NC_027026.1-cand-4500-4579
  source 1..80: mol_type = other DNA
ggcacccgctagaggcatggtcaacgatgccatcttcatagctcgatccggtttgccatctggcatgccgttcacaagtg

SEQ ID NO: 15858 - DNA, 80 bp, synthetic construct
  misc_feature 1..80: note = Synthetic: >NC_027026.1-cand-4580-4659
  source 1..80: mol_type = other DNA
tggtcaactccatcaaccacatgctttacatctctgcagctattcttcaggcatacgaagcacataatctcccatatagt

SEQ ID NO: 15859 - DNA, 80 bp, synthetic construct
  misc_feature 1..80: note = Synthetic: >NC_027026.1-cand-4660-4739
  source 1..80: mol_type = other DNA
gacaatgtttttaacattgaaaccattcacacctatggtgatgattgcctgtacgggttcacccccgcaacagcctctct

SEQ ID NO: 15860 - DNA, 80 bp, synthetic construct
  misc_feature 1..80: note = Synthetic: >NC_027026.1-cand-4740-4819
  source 1..80: mol_type = other DNA
catgcaggtaatcatagaaaacctacgctcatatggcctgaaacccacagcagctgataagggcgaaaccattgccccag

SEQ ID NO: 15861 - DNA, 80 bp, synthetic construct
  misc_feature 1..80: note = Synthetic: >NC_027026.1-cand-4820-4899
  source 1..80: mol_type = other DNA
tgcaaactcctgtttttctcaagcgcacgttcgcaacaacaccacatggactgcgcgctttgcttgacacctcttccatt

SEQ ID NO: 15862 - DNA, 80 bp, synthetic construct
  misc_feature 1..80: note = Synthetic: >NC_027026.1-cand-4900-4979
  source 1..80: mol_type = other DNA
cttaggcagttcttctgggtgaaagcccaacgcacatgtgatgtctattctgctcctacaattgacaccaaatctcgggc

SEQ ID NO: 15863 - DNA, 80 bp, synthetic construct
  misc_feature 1..80: note = Synthetic: >NC_027026.1-cand-4990-5069
  source 1..80: mol_type = other DNA
gaggtggcattggcctatgctagtcaacatggtcatgagttcttcaacaaagcacgtgaaatcgctgagaaaacaagtgc

SEQ ID NO: 15864 - DNA, 80 bp, synthetic construct
  misc_feature 1..80: note = Synthetic: >NC_027026.1-cand-5080-5159
  source 1..80: mol_type = other DNA
tatgttctggtgaataccaactacgaacaagcaactgcatgttacaacagctggtacataggaggcactacaccagaaat

SEQ ID NO: 15865 - DNA, 80 bp, synthetic construct
  misc_feature 1..80: note = Synthetic: >NC_027026.1-cand-5160-5239
  source 1..80: mol_type = other DNA
gcccgctaccaatgaaggctgcgggctaatagtgtttgagatggagggcaatggctccccacgaggaggtaaccagcctc

SEQ ID NO: 15866 - DNA, 80 bp, synthetic construct
  misc_feature 1..80: note = Synthetic: >NC_027026.1-cand-5240-5319
  source 1..80: mol_type = other DNA
aatcccacaatggtggcacttcacctgctcaggctgcaccgcctggcacgactggccctgcggaagcaccccttgtacct

SEQ ID NO: 15867 - DNA, 80 bp, synthetic construct
  misc_feature 1..80: note = Synthetic: >NC_027026.1-cand-5320-5399
  source 1..80: mol_type = other DNA
gttaatcctgaacagcccaattccattgcccaacgcatggagctggctgttgccacaggagcaacaacctcaaatgtccc

SEQ ID NO: 15868 - DNA, 80 bp, synthetic construct
  misc_feature 1..80: note = Synthetic: >NC_027026.1-cand-5400-5479
  source 1..80: mol_type = other DNA
tgaatgtgtgcggaactgctttgctctccttcgtacgattccttggaattctcgacagccccagggatctcttctcacag

SEQ ID NO: 15869 - DNA, 80 bp, synthetic construct
  misc_feature 1..80: note = Synthetic: >NC_027026.1-cand-5460-5539
  source 1..80: mol_type = other DNA
ccagggatctcttctcacagctgtttctttacaccctgacatcaacccgtacacaaaacatcttgctcaaatgtttgccg

SEQ ID NO: 15870 - DNA, 80 bp, synthetic construct
  misc_feature 1..80: note = Synthetic: >NC_029646.1-cand-3240-3319
  source 1..80: mol_type = other DNA
ctagaagaaggtgcgcccgaagggaccgtggtcacattactcatcaagagaccaactggagaactcatgcccttggcagc

SEQ ID NO: 15871 - DNA, 80 bp, synthetic construct
  misc_feature 1..80: note = Synthetic: >NC_029646.1-cand-3280-3359
  source 1..80: mol_type = other DNA
tcatcaagagaccaactggagaactcatgcccttggcagccagaatgggaacccatgcaaccatgaagatacaagggcgc

SEQ ID NO: 15872 - DNA, 80 bp, synthetic construct
  misc_feature 1..80: note = Synthetic: >NC_029646.1-cand-3400-3479
  source 1..80: mol_type = other DNA
acgccaagagtatggacctgggcaccacaccaggtgactgtggctgtccctacatttacaagagagggaatgactacata

SEQ ID NO: 15873 - DNA, 80 bp, synthetic construct
  misc_feature 1..80: note = Synthetic: >NC_029646.1-cand-3460-3539
  source 1..80: mol_type = other DNA
agagagggaatgactacatagtcattggagtccacacggctgctgcccgtggaggaaacactgtcatatgtgccacccag

SEQ ID NO: 15874 - DNA, 80 bp, synthetic construct
  misc_feature 1..80: note = Synthetic: >NC_029646.1-cand-3560-3639
  source 1..80: mol_type = other DNA
acttgaaggcggtgacaacaagggaacctactgcggtgcaccaatcttaggtccagggagtgccccaaagctcagcacca

SEQ ID NO: 15875 - DNA, 80 bp, synthetic construct
  misc_feature 1..80: note = Synthetic: >NC_029646.1-cand-3640-3719
  source 1..80: mol_type = other DNA
agactaagttttggagatcatccacagcaccactcccacctggtacctatgaaccagcctatcttggcggcaaggacccc

SEQ ID NO: 15876 - DNA, 80 bp, synthetic construct
  misc_feature 1..80: note = Synthetic: >NC_029646.1-cand-3710-3789
  source 1..80: mol_type = other DNA
caaggaccccagagtcaagggtggcccctcattgcaacaagttatgagggaccagctgaaaccattcactgagcccaggg

SEQ ID NO: 15877 - DNA, 80 bp, synthetic construct
  misc_feature 1..80: note = Synthetic: >NC_029646.1-cand-3800-3879
  source 1..80: mol_type = other DNA
aaaaccaagtgtgttagaggctgccaagaaaaccatcatcaatgttcttgaacaaacaattgacccacctcaaaaatggt

SEQ ID NO: 15878 - DNA, 80 bp, synthetic construct
  misc_feature 1..80: note = Synthetic: >NC_029646.1-cand-3880-3959
  source 1..80: mol_type = other DNA
cattcgcgcaggcatgcgcatccctcgacaagaccacttccagcggccacccgcaccacatgcggaagaacgactgctgg

SEQ ID NO: 15879 - DNA, 80 bp, synthetic construct
  misc_feature 1..80: note = Synthetic: >NC_029646.1-cand-3970-4049
  source 1..80: mol_type = other DNA
ccttcacaggcaaattggcagaccaggcttccaaggctaacctgatgttcgaagagggaaagaacatgaccccagtctac

SEQ ID NO: 15880 - DNA, 80 bp, synthetic construct
  misc_feature 1..80: note = Synthetic: >NC_029646.1-cand-4040-4119
  source 1..80: mol_type = other DNA
cccagtctacacaggtgcgcttaaggacgagctggtcaagactgacaaaatttatggcaagatcaaaaagaggcttctct

SEQ ID NO: 15881 - DNA, 80 bp, synthetic construct
  misc_feature 1..80: note = Synthetic: >NC_029646.1-cand-4130-4209
  source 1..80: mol_type = other DNA
tctggcaaccatgatccggtgtgctcgagcgtttggaggcctgatggaggaactcaaagcacattgtgtcacactacccg

SEQ ID NO: 15882 - DNA, 80 bp, synthetic construct
  misc_feature 1..80: note = Synthetic: >NC_029646.1-cand-4200-4279
  source 1..80: mol_type = other DNA
acactacccgtcagagtaggtatgaatatgaatgaggatggccctatcatctttgagaggcactccagatataagtatca

SEQ ID NO: 15883 - DNA, 80 bp, synthetic construct
  misc_feature 1..80: note = Synthetic: >NC_029646.1-cand-4280-4359
  source 1..80: mol_type = other DNA
ttatgatgctgattactcccggtgggactcaacacaacaaagagccgtgttagcagcagccttagaaatcatggttaagt

SEQ ID NO: 15884 - DNA, 80 bp, synthetic construct
  misc_feature 1..80: note = Synthetic: >NC_029646.1-cand-4370-4449
  source 1..80: mol_type = other DNA
accgaatctggcccaaaaggttgcagaagaccttctctctcccagcgtgatggacgtaggtgacttcaaaatatcaatca

SEQ ID NO: 15885 - DNA, 80 bp, synthetic construct
  misc_feature 1..80: note = Synthetic: >NC_029646.1-cand-4470-4549
  source 1..80: mol_type = other DNA
gtgccctgcacctcccaatggaattccatcgcccactggctcctcaccctctgtgcgctttctgaggttacaaacctgtc

SEQ ID NO: 15886 - DNA, 80 bp, synthetic construct
  misc_feature 1..80: note = Synthetic: >NC_034556.1-cand-1700-1779
  source 1..80: mol_type = other DNA
tcaaaaataatgagtatagatctaaatagactccttgccttaaacattgcttttgaaaaggcattaattgcaacagccac

SEQ ID NO: 15887 - DNA, 80 bp, synthetic construct
  misc_feature 1..80: note = Synthetic: >NC_034556.1-cand-1750-1829
  source 1..80: mol_type = other DNA
ttttgaaaaggcattaattgcaacagccacatggtttcaatattatacagaagaccaaggccagtttccattgcagcatt

SEQ ID NO: 15888 - DNA, 80 bp, synthetic construct
  misc_feature 1..80: note = Synthetic: >NC_034556.1-cand-1830-1909
  source 1..80: mol_type = other DNA
ccatacgttcagtctttgcatatcatctgttgctagcagtatgccagaaaatgaaactctgtgcaatctttgacaacctg

SEQ ID NO: 15889 - DNA, 80 bp, synthetic construct
  misc_feature 1..80: note = Synthetic: >NC_034556.1-cand-1910-1989
  source 1..80: mol_type = other DNA
cgatatctgattcctgctgttacctcattgtattcagggtttccttcacttataaagaaattatttgagcggccatttaa

SEQ ID NO: 15890 - DNA, 80 bp, synthetic construct
  misc_feature 1..80: note = Synthetic: >NC_034556.1-cand-1990-2069
  source 1..80: mol_type = other DNA
gagtgcattagaagtatttatttattacaatattaaaagtttgcttgttgcattagctcaaaataataaagcaaggttct

SEQ ID NO: 15891 - DNA, 80 bp, synthetic construct
  misc_feature 1..80: note = Synthetic: >NC_034556.1-cand-2070-2149
  source 1..80: mol_type = other DNA
actcaaaagttaagctattaggacttactgttgatcaatcaactgtgggcgctagtggcatatatccttcgttcatgtct

SEQ ID NO: 15892 - DNA, 80 bp, synthetic construct
  misc_feature 1..80: note = Synthetic: >NC_034556.1-cand-2150-2229
  source 1..80: mol_type = other DNA
cgggttgtctataaacattataggagtctaatttcagaagtaaccacctgcttttttctttttgaaaaaggtttacatgg

SEQ ID NO: 15893 - DNA, 80 bp, synthetic construct
  misc_feature 1..80: note = Synthetic: >NC_034556.1-cand-2230-2309
  source 1..80: mol_type = other DNA
taacgtaaatgaagaggcaaagattcatttagagactgtagaatgggcaataaagtttaaagaaaaggaactgaggtatg

SEQ ID NO: 15894 - DNA, 80 bp, synthetic construct
  misc_feature 1..80: note = Synthetic: >NC_034556.1-cand-2310-2389
  source 1..80: mol_type = other DNA
gtgaagcaatggttgagcatggttatactattggtgaactagtagaaacccctgatttggttgaacagcagttatattgc

SEQ ID NO: 15895 - DNA, 80 bp, synthetic construct
  misc_feature 1..80: note = Synthetic: >NC_034556.1-cand-2390-2469
  source 1..80: mol_type = other DNA
caagatgctgtagagctagcagctatggaattaaacaagttgttagtaactaagtcacaaattgttgcaaattcaatttt

SEQ ID NO: 15896 - DNA, 80 bp, synthetic construct
  misc_feature 1..80: note = Synthetic: >NC_034556.1-cand-2480-2559
  source 1..80: mol_type = other DNA
tgggaagaaccttattttagtcaaacaagaaatattagtttaaaagggatgtctggtcaagtacaagaagatggccacct

SEQ ID NO: 15897 - DNA, 80 bp, synthetic construct
  misc_feature 1..80: note = Synthetic: >NC_034556.1-cand-2560-2639
  source 1..80: mol_type = other DNA
gtcctcatcagtaacaataattgaagcaattaggtatttgtcaaatgcccggcacaatccaaatgtgctacagctatatg

SEQ ID NO: 15898 - DNA, 80 bp, synthetic construct
  misc_feature 1..80: note = Synthetic: >NC_034556.1-cand-2640-2719
  source 1..80: mol_type = other DNA
aagaaacaaggcagataaaagctcaagcaagaattgtgagaaaatatcagcgaactgaggccgatcgtggttttttcatc

SEQ ID NO: 15899 - DNA, 80 bp, synthetic construct
  misc_feature 1..80: note = Synthetic: >NC_034556.1-cand-2720-2799
  source 1..80: mol_type = other DNA
acaaccctgcctacaagatgtagactagaaatcatagaagattattatgatgctatctcaaaaaatgttgccgaagaata

SEQ ID NO: 15900 - DNA, 80 bp, synthetic construct
  misc_feature 1..80: note = Synthetic: >NC_034556.1-cand-2800-2879
  source 1..80: mol_type = other DNA
tatctcatatggaggtgaaaggaagattctttcaattcaagctgcattagagaaagctttaagatgggcatcaggtgaaa

SEQ ID NO: 15901 - DNA, 80 bp, synthetic construct
  misc_feature 1..80: note = Synthetic: >NC_034556.1-cand-2870-2949
  source 1..80: mol_type = other DNA
tcaggtgaaagctatattgaacttagcaatggcaagtttattaggatgaaaagaaagcttatgtatgttagtgctgatgc

SEQ ID NO: 15902 - DNA, 80 bp, synthetic construct
  misc_feature 1..80: note = Synthetic: >NC_039218.1-cand-9080-9159
  source 1..80: mol_type = other DNA
ctgggatggcatttgaagaagctgtccgaactcgaaggagggcttttctatgccgacgacaccgccggctgggacacaag

SEQ ID NO: 15903 - DNA, 80 bp, synthetic construct
  misc_feature 1..80: note = Synthetic: >NC_039218.1-cand-9160-9239
  source 1..80: mol_type = other DNA
aatcaccaatgcagaccttgaggatgaggagcaaattctgcgttatctggaaggcgaacaccgaaccctcgcaaagacaa

SEQ ID NO: 15904 - DNA, 80 bp, synthetic construct
  misc_feature 1..80: note = Synthetic: >NC_039218.1-cand-9240-9319
  source 1..80: mol_type = other DNA
tcttggaaaaagcttaccatgccaaagtggtcaaagtggcgcgcccctccagctcgggaggctgcgtcatggacatcata

SEQ ID NO: 15905 - DNA, 80 bp, synthetic construct
  misc_feature 1..80: note = Synthetic: >NC_039218.1-cand-9320-9399
  source 1..80: mol_type = other DNA
accagaagagaccaacgtggttcaggccaggtggtgacctacgctctaaacaccctcacgaacatcaaggtgcagcttat

SEQ ID NO: 15906 - DNA, 80 bp, synthetic construct
  misc_feature 1..80: note = Synthetic: >NC_039218.1-cand-9400-9479
  source 1..80: mol_type = other DNA
ccgcatgatggagggagagggcgtgatcgggccatctgactcacaggacccgcgactcctacgtgtggaagcctggctga

SEQ ID NO: 15907 - DNA, 80 bp, synthetic construct
  misc_feature 1..80: note = Synthetic: >NC_039218.1-cand-9440-9519
  source 1..80: mol_type = other DNA
tcacaggacccgcgactcctacgtgtggaagcctggctgaaagagcatggagaggagcgcctgacccgcatgctggtcag

SEQ ID NO: 15908 - DNA, 80 bp, synthetic construct
  misc_feature 1..80: note = Synthetic: >NC_039218.1-cand-9560-9639
  source 1..80: mol_type = other DNA
gggaaggccctctacttcctaaatgacatggccaaggtgagaaaggacattggagagtgggagccctcagaaggttactc

SEQ ID NO: 15909 - DNA, 80 bp, synthetic construct
  misc_feature 1..80: note = Synthetic: >NC_039218.1-cand-9640-9719
  source 1..80: mol_type = other DNA
cagctgggaggaggtccccttttgttcccaccatttccatgagttgacgatgaaggatggcagggtcataatcgtcccat

SEQ ID NO: 15910 - DNA, 80 bp, synthetic construct
  misc_feature 1..80: note = Synthetic: >NC_039218.1-cand-9750-9829
  source 1..80: mol_type = other DNA
caagagtgtcacctgggtgtggctggagcgttagggaaacagcatgtctctcaaaggcctatggacagatgtggctgctg

SEQ ID NO: 15911 - DNA, 80 bp, synthetic construct
  misc_feature 1..80: note = Synthetic: >NC_039218.1-cand-9800-9879
  source 1..80: mol_type = other DNA
tcaaaggcctatggacagatgtggctgctgagctacttccacaggagggacctgaggacgctcggcctggcaatctgctc

SEQ ID NO: 15912 - DNA, 80 bp, synthetic construct
  misc_feature 1..80: note = Synthetic: >NC_039218.1-cand-9880-9959
  source 1..80: mol_type = other DNA
agctgtgcccattgattgggtcccgcagggacgaaccacatggagcatccacgcgagtggagcgtggatgaccacagagg

SEQ ID NO: 15913 - DNA, 80 bp, synthetic construct
  misc_feature 1..80: note = Synthetic: >NC_039218.1-cand-9930-10009
  source 1..80: mol_type = other DNA
acgcgagtggagcgtggatgaccacagaggacatgctggaagtgtggaaccgggtctggattcttgacaaccccttcatg

SEQ ID NO: 15914 - DNA, 80 bp, synthetic construct
  misc_feature 1..80: note = Synthetic: >NC_039218.1-cand-10040-10119
  source 1..80: mol_type = other DNA
gacatcccgtacctccctaagtcccaggatgggctgtgctcttccctggtgggacgccgagaacgggcggaatgggcaaa

SEQ ID NO: 15915 - DNA, 80 bp, synthetic construct
  misc_feature 1..80: note = Synthetic: >NC_039218.1-cand-10130-10209
  source 1..80: mol_type = other DNA
ggatcagtggagaaagtgaggagaatgatcggccccgagaggtatgctgattatctctcctgcatggacaggcatgagct

SEQ ID NO: 15916 - DNA, 80 bp, synthetic construct
  misc_feature 1..80: note = Synthetic: >NC_039218.1-cand-10200-10279
  source 1..80: mol_type = other DNA
ggcatgagctccactgggacctgaagttggaaagcaatatcatctaaatgcaccaaccatctgggaccagacaagacaac

SEQ ID NO: 15917 - DNA, 80 bp, synthetic construct
  misc_feature 1..80: note = Synthetic: >NC_039218.1-cand-10220-10299
  source 1..80: mol_type = other DNA
ctgaagttggaaagcaatatcatctaaatgcaccaaccatctgggaccagacaagacaacaccctcaccgtgtgacaggg

SEQ ID NO: 15918 - DNA, 80 bp, synthetic construct
  misc_feature 1..80: note = Synthetic: >NC_044046.1-cand-640-719
  source 1..80: mol_type = other DNA
actcgtggctgagcagaaggatgatacaacgaactactgggtttttcagaccgtatcaggactggaacaggaaacctttg

SEQ ID NO: 15919 - DNA, 80 bp, synthetic construct
  misc_feature 1..80: note = Synthetic: >NC_044046.1-cand-720-799
  source 1..80: mol_type = other DNA
cccacaatggatgactcaaaaataaagaaagtggccaacatgtttttgtgtagcttatcaaccctgttcacccgtcctat

SEQ ID NO: 15920 - DNA, 80 bp, synthetic construct
  misc_feature 1..80: note = Synthetic: >NC_044046.1-cand-800-879
  source 1..80: mol_type = other DNA
aaaagatatattagggaaggtaaagccactcaacatcttgaacatacttgcaacctgtgattggacattccctggcatag

SEQ ID NO: 15921 - DNA, 80 bp, synthetic construct
  misc_feature 1..80: note = Synthetic: >NC_044046.1-cand-880-959
  source 1..80: mol_type = other DNA
tagaatccctgatacttcttgctgaactctttggtctttactggacacccccagatgtgtctgcaatgatcgctcccttg

SEQ ID NO: 15922 - DNA, 80 bp, synthetic construct
  misc_feature 1..80: note = Synthetic: >NC_044046.1-cand-960-1039
  source 1..80: mol_type = other DNA
cttggtgaatacgagctacagggcccagaagacatcgctgtagagctcgtccccgtggtgatgggagggatcggattggt

SEQ ID NO: 15923 - DNA, 80 bp, synthetic construct
  misc_feature 1..80: note = Synthetic: >NC_044046.1-cand-1030-1109
  source 1..80: mol_type = other DNA
tcggattggtgttaggtttcaccagagagaaaatagggaaaatgctttcatcagcagcatcaacattgagggcttgcaaa

SEQ ID NO: 15924 - DNA, 80 bp, synthetic construct
  misc_feature 1..80: note = Synthetic: >NC_044046.1-cand-1120-1199
  source 1..80: mol_type = other DNA
catatggcttggaaatcctgaaattagtgatgaagtggttctttccaaagaaggatgaagctaatgagctggccatggtc

SEQ ID NO: 15925 - DNA, 80 bp, synthetic construct
  misc_feature 1..80: note = Synthetic: >NC_044046.1-cand-1200-1279
  source 1..80: mol_type = other DNA
agggcgatagaggatgcagtgctagacctggaagcaattgagaataatcacatgacagccctcttgaaggataaggatag

SEQ ID NO: 15926 - DNA, 80 bp, synthetic construct
  misc_feature 1..80: note = Synthetic: >NC_044046.1-cand-1280-1359
  source 1..80: mol_type = other DNA
cctttccacttacatgagaaccctggacttagaggaagaaaaggctcgcaagttgtcaactaaatcagcctccccagata

SEQ ID NO: 15927 - DNA, 80 bp, synthetic construct
  misc_feature 1..80: note = Synthetic: >NC_044046.1-cand-1360-1439
  source 1..80: mol_type = other DNA
tagttggcaccatcaacgcgctgctggcacgcatagcagccgcacgttcgttggtgcaccgagccaaggaggagctgtca

SEQ ID NO: 15928 - DNA, 80 bp, synthetic construct
  misc_feature 1..80: note = Synthetic: >NC_044046.1-cand-1440-1519
  source 1..80: mol_type = other DNA
agtcgacccagaccagttgtgctcatgatttcaggcagaccaggcataggcaagactcacgtggcaagggagattgcaaa

SEQ ID NO: 15929 - DNA, 80 bp, synthetic construct
  misc_feature 1..80: note = Synthetic: >NC_044046.1-cand-1520-1599
  source 1..80: mol_type = other DNA
gagggtggcctcatccctgacaggagaccagaggataggactcgtgcctaggaatggcgttgaccactgggacgcctata

SEQ ID NO: 15930 - DNA, 80 bp, synthetic construct
  misc_feature 1..80: note = Synthetic: >NC_044046.1-cand-1600-1679
  source 1..80: mol_type = other DNA
agggcgagagagtggttctttgggatgactatggaatgagcaacaccatacaggatgccctgaggctgcaggaactggcg

SEQ ID NO: 15931 - DNA, 80 bp, synthetic construct
  misc_feature 1..80: note = Synthetic: >NC_044046.1-cand-1680-1759
  source 1..80: mol_type = other DNA
gacacgtgcccgctaaccctcaactgtgacaggatagagaataagggaaaactttttgacagtgatgtcataatcattac

SEQ ID NO: 15932 - DNA, 80 bp, synthetic construct
  misc_feature 1..80: note = Synthetic: >NC_044046.1-cand-1760-1839
  source 1..80: mol_type = other DNA
caccaacctggctaaccctgcccccctcgattatgtcaattttgaggcctgttccaggagaatagatttccttgtgtatg

SEQ ID NO: 15933 - DNA, 80 bp, synthetic construct
  misc_feature 1..80: note = Synthetic: >NC_044046.1-cand-1850-1929
  source 1..80: mol_type = other DNA
agaggttgaaaaggcaaaacgcgactttcctggccaacctgacatgtggaaggacgctttcagacaagacttctcccata

SEQ ID NO: 15934 - DNA, 80 bp, synthetic construct
  misc_feature 1..80: note = Synthetic: >NC_044046.1-cand-6970-7049
  source 1..80: mol_type = other DNA
tttcccccacggacgctgctagaggttctgtgggtgcaaacatgacccagatacttgattggagtgggacgcgatactat

SEQ ID NO: 15935 - DNA, 80 bp, synthetic construct
  misc_feature 1..80: note = Synthetic: >NC_044046.1-cand-7090-7169
  source 1..80: mol_type = other DNA
ttctgaggcagagtgtcccccacaccacaccaaaggctaactacagacaggcaggccaagaccctagcaccgagtcattg

SEQ ID NO: 15936 - DNA, 80 bp, synthetic construct
  misc_feature 1..80: note = Synthetic: >NC_044046.1-cand-7170-7249
  source 1..80: mol_type = other DNA
tactcagggtcatggagtgggtcatataagagtggttcgaccaataccactgctgtctctgcatcaacagcatcgagcag

SEQ ID NO: 15937 - DNA, 80 bp, synthetic construct
  misc_feature 1..80: note = Synthetic: >NC_044046.1-cand-7250-7329
  source 1..80: mol_type = other DNA
aacctcagattgggtgtcacaacactcaaacttggcccctttccatgaaaacgctctcaggacagcatatgtgtcacccc

SEQ ID NO: 15938 - DNA, 80 bp, synthetic construct
  misc_feature 1..80: note = Synthetic: >NC_044046.1-cand-7330-7409
  source 1..80: mol_type = other DNA
cttcaacagtttcttcacatagtgtttccacagttagaggcagtttattggactcttggacccctgcattcaacacccat

SEQ ID NO: 15939 - DNA, 80 bp, synthetic construct
  misc_feature 1..80: note = Synthetic: >NC_044046.1-cand-7410-7489
  source 1..80: mol_type = other DNA
aggcagccagcttttgcccatctgagaaagagagggatttctgaagcttgaaaataatcactaatgattaaaattctaat

SEQ ID NO: 15940 - DNA, 80 bp, synthetic construct
  misc_feature 1..80: note = Synthetic: >NC_044853.1-cand-0-79
  source 1..80: mol_type = other DNA
tggcgtcgaaagacgtcgttgcagctactgctgctagcgcttccaacgctagtgacaatagtactacaattaaagatcgc

SEQ ID NO: 15941 - DNA, 80 bp, synthetic construct
  misc_feature 1..80: note = Synthetic: >NC_044853.1-cand-80-159
  source 1..80: mol_type = other DNA
cttatggcgaaacttaagaatataggcactaacaacaagcctataaaaattgaaaacacacacatggcccttgggctcat

SEQ ID NO: 15942 - DNA, 80 bp, synthetic construct
  misc_feature 1..80: note = Synthetic: >NC_044853.1-cand-170-249
  source 1..80: mol_type = other DNA
tcaccaacccccctgaaagagtcccccaaacaacagagggagcgggctccaaggagtgtggctgagacccagcaggcgat

SEQ ID NO: 15943 - DNA, 80 bp, synthetic construct
  misc_feature 1..80: note = Synthetic: >NC_044853.1-cand-240-319
  source 1..80: mol_type = other DNA
agcaggcgatgggctgggtggagcagccagtggatcaaaacttgccaacgtgggaggagttgagtgaatcagagaagcgt

SEQ ID NO: 15944 - DNA, 80 bp, synthetic construct
  misc_feature 1..80: note = Synthetic: >NC_044853.1-cand-320-399
  source 1..80: mol_type = other DNA
gacatcttggctaagaatgagagatggtttgacgctggtggcctcggccccgccactctccctgactcatacgaacgtac

SEQ ID NO: 15945 - DNA, 80 bp, synthetic construct
  misc_feature 1..80: note = Synthetic: >NC_044853.1-cand-400-479
  source 1..80: mol_type = other DNA
ctcacaaagtgattcacatgaacatcaggtcagatgggacgccaacacaggtgtggaccttggtatcagaggtttgacat

SEQ ID NO: 15946 - DNA, 80 bp, synthetic construct
  misc_feature 1..80: note = Synthetic: >NC_044853.1-cand-480-559
  source 1..80: mol_type = other DNA
cggttgacggaccggcgtggaacatgtgcccgatgccccctatggaccagcgtaacagcgggcctgctaaggaaccaatc

SEQ ID NO: 15947 - DNA, 80 bp, synthetic construct
  misc_feature 1..80: note = Synthetic: >NC_044853.1-cand-560-639
  source 1..80: mol_type = other DNA
ataggtgatatgttggagttccatgagggacacatctatcactatgccatttatattggccaaggaaagactattggcgt

SEQ ID NO: 15948 - DNA, 80 bp, synthetic construct
  misc_feature 1..80: note = Synthetic: >NC_044853.1-cand-640-719
  source 1..80: mol_type = other DNA
gcactcaccacgagcggctttctcaattccaagaataaccatccatcctattgcagcttggtggagggtgtgttacactc

SEQ ID NO: 15949 - DNA, 80 bp, synthetic construct
  misc_feature 1..80: note = Synthetic: >NC_044853.1-cand-730-809
  source 1..80: mol_type = other DNA
ccaacggctcacatacgatcagctaagagaattggaaaatgagccgtggccttatgctgctgtgactaacaattgctatg

SEQ ID NO: 15950 - DNA, 80 bp, synthetic construct
  misc_feature 1..80: note = Synthetic: >NC_044854.1-cand-6070-6149
  source 1..80: mol_type = other DNA
aaagacctttcaaattctcgtgtccctgtgcctatacagggcatgttcatgtccccagatgtcaatcagtcagtccagtt

SEQ ID NO: 15951 - DNA, 80 bp, synthetic construct
  misc_feature 1..80: note = Synthetic: >AdVB7-cand-35270-35349
  source 1..80: mol_type = other DNA
caacacacaccccgaaactgcgtcagcagggaaaagtacagtttcacttcctcaatcccaacaagcgtaacttcctcttt

SEQ ID NO: 15952 - DNA, 80 bp, synthetic construct
  misc_feature 1..80: note = Synthetic: >NC_001611.1-cand-115450-115529
  source 1..80: mol_type = other DNA
aaagagttaacgttaatcgtacacccaacgtatttacatctagttctttgaacatcttgattataatataaccattttct

SEQ ID NO: 15953 - DNA, 80 bp, synthetic construct
  misc_feature 1..80: note = Synthetic: >NC_001611.1-cand-27760-27839
  source 1..80: mol_type = other DNA
aaagataaactttatgtattgtaccaaagatttaaatcctaatttaatagctaactcggtatctactttatctgccgaat

SEQ ID NO: 15954 - DNA, 80 bp, synthetic construct
  misc_feature 1..80: note = Synthetic: >NC_001611.1-cand-122890-122969
  source 1..80: mol_type = other DNA
aaatatgaaatgctacataactttttacctcatatgaactatacacccgatcaactaaagggattttatatgatatcttt

SEQ ID NO: 15955 - DNA, 80 bp, synthetic construct
  misc_feature 1..80: note = Synthetic: >NC_002023.1-cand-1900-1979
  source 1..80: mol_type = other DNA
aaagcaaagtagaatgcagttctcctcatttactgtgaatgtgaggggatcaggaatgagaatacttgtaaggggcaatt

SEQ ID NO: 15956 - DNA, 80 bp, synthetic construct
  misc_feature 1..80: note = Synthetic: >NC_007366.1-cand-0-79
  source 1..80: mol_type = other DNA
aaagcaggggataattctattaaccatgaagactatcattgctttgagctacattctatgtctggttttcgctcaaaaac

SEQ ID NO: 15957 - DNA, 80 bp, synthetic construct
  misc_feature 1..80: note = Synthetic: >NC_002019.1-cand-0-79
  source 1..80: mol_type = other DNA
aaagcagggtagataatcactcactgagtgacatcaaaatcatggcgtcccaaggcaccaaacggtcttacgaacagatg

SEQ ID NO: 15958 - DNA, 80 bp, synthetic construct
  misc_feature 1..80: note = Synthetic: >NC_007371.1-cand-0-79
  source 1..80: mol_type = other DNA
aaagcaggtactgattcgaaatggaagattttgtgcgacaatgcttcaacccgatgattgtcgaacttgcagaaaaagca

SEQ ID NO: 15959 - DNA, 80 bp, synthetic construct
  misc_feature 1..80: note = Synthetic: >NC_004910.1-cand-0-79
  source 1..80: mol_type = other DNA
aaagcaggtcaattatattcaatatggaaagaataaaagaactaagaaatttgatgtcgcaatctcgcactcgcgagata

SEQ ID NO: 15960 - DNA, 80 bp, synthetic construct
  misc_feature 1..80: note = Synthetic: >NC_001611.1-cand-70380-70459
  source 1..80: mol_type = other DNA
cgtaaaaagattaatatttataaagaaaatatggaatccgcatcgactgagtatacacctatcggagacaacaaggcttt

SEQ ID NO: 15961 - DNA, 80 bp, synthetic construct
  misc_feature 1..80: note = Synthetic: >NC_003310.1-cand-121200-121279
  source 1..80: mol_type = other DNA
aaagcggggttgatcttgtgctgttatatattgtctaacacctataagattatcaaaatcttgtctgcttaatacaccgt

SEQ ID NO: 15962 - DNA, 80 bp, synthetic construct
  misc_feature 1..80: note = Synthetic: >NC_003310.1-cand-37340-37419
  source 1..80: mol_type = other DNA
agtttataacattaatattactgttaataactgcaggataaaagtgggatagtaatttcacgaatttgatactgtccttt

SEQ ID NO: 15963 - DNA, 80 bp, synthetic construct
  misc_feature 1..80: note = Synthetic: >EVD70-cand-4260-4339
  source 1..80: mol_type = other DNA
tgtccaaatagtgagcaacaacaggccctgtttaataatgtgcaatactattcacactactgcaaaaaatacgctccttt

SEQ ID NO: 15964 - DNA, 80 bp, synthetic construct
  misc_feature 1..80: note = Synthetic: >NC_003310.1-cand-60080-60159
  source 1..80: mol_type = other DNA
acatactatgttttgtatacataaaggcgcccattttaacagtttctagtgacaaaatgctagcgatcctaggatccttt

SEQ ID NO: 15965 - DNA, 80 bp, synthetic construct
  misc_feature 1..80: note = Synthetic: >NC_001611.1-cand-59910-59989
  source 1..80: mol_type = other DNA
gtgtagatagtaaatgtgaacagataaaaggtattcttgctcaatagattggtaaattccatagaatatattaatccttt

SEQ ID NO: 15966 - DNA, 80 bp, synthetic construct
  misc_feature 1..80: note = Synthetic: >NC_001611.1-cand-95950-96029
  source 1..80: mol_type = other DNA
agacaattcttttgtattcatagacactcggttttttattcatggtatcatagaagataccattattaacaaattttttg

SEQ ID NO: 15967 - DNA, 80 bp, synthetic construct
  misc_feature 1..80: note = Synthetic: >NC_004296.1-cand-2980-3059
  source 1..80: mol_type = other DNA
agacagattgcaaaatttgtgattaataatgctcgtgttggtcaaggtcagttctagtcctgtctcattgcccaccatta

SEQ ID NO: 15968 - DNA, 80 bp, synthetic construct
  misc_feature 1..80: note = Synthetic: >AdVB7-cand-12890-12969
  source 1..80: mol_type = other DNA
agacagtgaacctgactcaggctttcaagaacctgaagggtctctggggagtgcacgccccagtaggggatcgcgcgacc

SEQ ID NO: 15969 - DNA, 80 bp, synthetic construct
  misc_feature 1..80: note = Synthetic: >NC_001611.1-cand-91410-91489
  source 1..80: mol_type = other DNA
agacataagaaatttgccaatgttagtgatgaatatctacaatatatattcatagaggatatttcatctccgtaaatata

SEQ ID NO: 15970 - DNA, 80 bp, synthetic construct
  misc_feature 1..80: note = Synthetic: >AdVB3-cand-32490-32569
  source 1..80: mol_type = other DNA
agacatagttttagattccacattccaaacagtttcagagcgagccaatctggggtcagtgatacataaaaatgcatcgg

SEQ ID NO: 15971 - DNA, 80 bp, synthetic construct
  misc_feature 1..80: note = Synthetic: >NC_001430.1-cand-2740-2819
  source 1..80: mol_type = other DNA
ggaattgtttacttacctaaggtttgacactgaaataactattgtacccacccttagactattctcaagcagcaatgtct

SEQ ID NO: 15972 - DNA, 80 bp, synthetic construct
  misc_feature 1..80: note = Synthetic: >NC_003310.1-cand-155710-155789
  source 1..80: mol_type = other DNA
gttgacgaatattagtaacgagtctcagttaactgatgtattagatgatgcactaacgagaaaattagaaggattggtct

SEQ ID NO: 15973 - DNA, 80 bp, synthetic construct
  misc_feature 1..80: note = Synthetic: >NC_001611.1-cand-143550-143629
  source 1..80: mol_type = other DNA
agaccacgataatatcagaggagttatttactttgaaccagtccatggaaaagataaagttttaggatcagttattggat

SEQ ID NO: 15974 - DNA, 80 bp, synthetic construct
  misc_feature 1..80: note = Synthetic: >AdVB3-cand-26450-26529
  source 1..80: mol_type = other DNA
agaccagagagctgaggaaccggatctttccaaccctctatgccattttccagcagagtcgggggcaagagcaggaactg

SEQ ID NO: 15975 - DNA, 80 bp, synthetic construct
  misc_feature 1..80: note = Synthetic: >NC_001611.1-cand-45460-45539
  source 1..80: mol_type = other DNA
agaccatatactgagttggctatgatcttgtacgtatactgcatggaatcatagatggccttttcagttgaactggtagc

SEQ ID NO: 15976 - DNA, 80 bp, synthetic construct
  misc_feature 1..80: note = Synthetic: >NC_001611.1-cand-52860-52939
  source 1..80: mol_type = other DNA
agaccgagactccatccgtaaaaatgcatacttgttagtttggaataactcggatctgctatatggatattcatagattg

SEQ ID NO: 15977 - DNA, 80 bp, synthetic construct
  misc_feature 1..80: note = Synthetic: >AdVB7-cand-6710-6789
  source 1..80: mol_type = other DNA
agattggtgcggttgggtttttccgccctgtaaacgatctggcgaaagatggcatgggaatttgaagagatagtaggtct

SEQ ID NO: 15978 - DNA, 80 bp, synthetic construct
  misc_feature 1..80: note = Synthetic: >NC_001611.1-cand-43630-43709
  source 1..80: mol_type = other DNA
gtcgttccgcgttttgatgacgtgtacaaaaatgcacagcgaagaattctagatcaagaaacattttttagtagaggtct

SEQ ID NO: 15979 - DNA, 80 bp, synthetic construct
  misc_feature 1..80: note = Synthetic: >EVB82-cand-4100-4179
  source 1..80: mol_type = other DNA
gatgacaaacgcctgtaagggcatggagtggatagctatcaaaattcagaaattcatagagtggctcaaagtcaaggtct

SEQ ID NO: 15980 - DNA, 80 bp, synthetic construct
  misc_feature 1..80: note = Synthetic: >AdVB3-cand-17360-17439
  source 1..80: mol_type = other DNA
agacgaaggcgcgctatcagcagacgattagggggtggctttttgccagctcttatacccatcatcgccgcagcgatcgg

SEQ ID NO: 15981 - DNA, 80 bp, synthetic construct
  misc_feature 1..80: note = Synthetic: >NC_001611.1-cand-60310-60389
  source 1..80: mol_type = other DNA
gtattccttcggcatttctttttaatgatatatcttgtttagacaatgataaagttatcatgtccatgagagacgcgtct

SEQ ID NO: 15982 - DNA, 80 bp, synthetic construct
  misc_feature 1..80: note = Synthetic: >AdVB3-cand-630-709
  source 1..80: mol_type = other DNA
tactggagtttgtggtaaataccctaatgggagacgacccggaaccgccagtgcagccttttgatccacctacgctgcac

SEQ ID NO: 15983 - DNA, 80 bp, synthetic construct
  misc_feature 1..80: note = Synthetic: >NC_001611.1-cand-132580-132659
  source 1..80: mol_type = other DNA
gtgcatcgatatctttattattagataaatttatcaataaatgtgagaagtttgcctcgttaaggtcttccatttaaata

SEQ ID NO: 15984 - DNA, 80 bp, synthetic construct
  misc_feature 1..80: note = Synthetic: >EVD70-cand-1250-1329
  source 1..80: mol_type = other DNA
gtgccacgtacaatgcaatgctacaaaatttcaccaaggtactcttctaatagtggctatcccagaacaccaaattggaa

SEQ ID NO: 15985 - DNA, 80 bp, synthetic construct
  misc_feature 1..80: note = Synthetic: >NC_001611.1-cand-31710-31789
  source 1..80: mol_type = other DNA
gtggctagatacccaatctctctcaaatatttttttagcctcgcttacaagctgtttatctatactattaaaactaacaa

SEQ ID NO: 15986 - DNA, 80 bp, synthetic construct
  misc_feature 1..80: note = Synthetic: >NC_001611.1-cand-137620-137699
  source 1..80: mol_type = other DNA
tttgcgttgatggaaagcagactagaaataacaggctaaaatgttcagacaccataatagttcccaacccagataataac

SEQ ID NO: 15987 - DNA, 80 bp, synthetic construct
  misc_feature 1..80: note = Synthetic: >AdVB7-cand-20050-20129
  source 1..80: mol_type = other DNA
tgtaccttccagatgtttacaagtacacgccaactaacattactctgcccgctaacaccaacacctatgagtacatgaac

SEQ ID NO: 15988 - DNA, 80 bp, synthetic construct
  misc_feature 1..80: note = Synthetic: >NC_011505.2-cand-20-99
  source 1..80: mol_type = other DNA
tctctcagtattgacgtgacgagtcttccttctattccttcaactatatataagaatgaatcgtcttcaacaacgtcaac

SEQ ID NO: 15989 - DNA, 80 bp, synthetic construct
  misc_feature 1..80: note = Synthetic: >NC_003310.1-cand-10660-10739
  source 1..80: mol_type = other DNA
gtttcatcttctttgatgccatcacccagatgttctataaacttggtatcctcgtccgatttcatatcatttgccaacca

SEQ ID NO: 15990 - DNA, 80 bp, synthetic construct
  misc_feature 1..80: note = Synthetic: >NC_011502.2-cand-20-99
  source 1..80: mol_type = other DNA
gtttgagccttgcggtgtagccatggctgagctagcttgcttttgctatcctcatttggagaatgatagctataaattta

SEQ ID NO: 15991 - DNA, 80 bp, synthetic construct
  misc_feature 1..80: note = Synthetic: >NC_001611.1-cand-132260-132339
  source 1..80: mol_type = other DNA
taaaatatcttcatggtgggaatatgctctaccacagttagccattcctcattgatagcggtagatgtattagacaaaac

SEQ ID NO: 15992 - DNA, 80 bp, synthetic construct
  misc_feature 1..80: note = Synthetic: >LR861845.1-cand-7610-7689
  source 1..80: mol_type = other DNA
tagtcattttcctgtccaggtgtactaaaacaatggcttgcacaactgtatccacaccctatgtaataaaactgctttta

SEQ ID NO: 15993 - DNA, 80 bp, synthetic construct
  misc_feature 1..80: note = Synthetic: >NC_003310.1-cand-24370-24449
  source 1..80: mol_type = other DNA
taaatacatctaaatttttactattatatttggcataaagagatagataatactcgaccgacataatgttgtgttgtcca

SEQ ID NO: 15994 - DNA, 80 bp, synthetic construct
  misc_feature 1..80: note = Synthetic: >NC_003310.1-cand-83220-83299
  source 1..80: mol_type = other DNA
taaatacatttacatcgtatatcgtctttgttagcatcacagaatgcataaatttgttcgtccgtcatgataaaaattta

SEQ ID NO: 15995 - DNA, 80 bp, synthetic construct
  misc_feature 1..80: note = Synthetic: >NC_003310.1-cand-30480-30559
  source 1..80: mol_type = other DNA
taaattccaatcattgggaaacattacagatctgatgaccgacgataatataaacatcttgatactttttctagaaaaaa

SEQ ID NO: 15996 - DNA, 80 bp, synthetic construct
  misc_feature 1..80: note = Synthetic: >NC_003310.1-cand-121280-121359
  source 1..80: mol_type = other DNA
taacaatttttgccttgaattcttttattggtgcattaataacatccttatagaggatgttaaacaaataagtattatca

SEQ ID NO: 15997 - DNA, 80 bp, synthetic construct
  misc_feature 1..80: note = Synthetic: >NC_001611.1-cand-149550-149629
  source 1..80: mol_type = other DNA
ttacggtgactactaggagggaaaatgaagaaagaaaaaatatctacctctccaaaaagaaaaatttactactgatgtta

SEQ ID NO: 15998 - DNA, 80 bp, synthetic construct
  misc_feature 1..80: note = Synthetic: >AF028022.1-cand-0-79
  source 1..80: mol_type = other DNA
agtagactccgcaagaagaagcaaaaactgaagaaagttatagaaaagatggaagggtggtatttgattgtcttgggagt

SEQ ID NO: 15999 - DNA, 80 bp, synthetic construct
  misc_feature 1..80: note = Synthetic: >AF028022.1-cand-80-159
  source 1..80: mol_type = other DNA
ctgctctactttgacactggcaatgccgaaaaccatttatgaactcaaaatggaatgcccgcatactgtgggactcggtc

SEQ ID NO: 16000 - DNA, 80 bp, synthetic construct
  misc_feature 1..80: note = Synthetic: >AF028022.1-cand-160-239
  source 1..80: mol_type = other DNA
aagggataattgttggttctacagagcttgggttgataccaattgagacagcatcagacttaaagcttgaaagttcatgc

SEQ ID NO: 16001 - DNA, 80 bp, synthetic construct
  misc_feature 1..80: note = Synthetic: >AF028022.1-cand-240-319
  source 1..80: mol_type = other DNA
aatttcgatctgcatactacatccatgacccaaaaaagttatacacaggttgagtggagaaaaaagagcgacacaactga

SEQ ID NO: 16002 - DNA, 80 bp, synthetic construct
  misc_feature 1..80: note = Synthetic: >AF028022.1-cand-320-399
  source 1..80: mol_type = other DNA
cacaactaatgctgcagccacgacattcgaatcacaagctaaaactgtgaaccttcgtgggacttgtgttttggctgcag

SEQ ID NO: 16003 - DNA, 80 bp, synthetic construct
  misc_feature 1..80: note = Synthetic: >AF028022.1-cand-400-479
  source 1..80: mol_type = other DNA
agctatatgacaccttaaagaaggttaaaaagacggtgttgtgctatgatcttacctgtaatcagacacattgtcagcca

SEQ ID NO: 16004 - DNA, 80 bp, synthetic construct
  misc_feature 1..80: note = Synthetic: >AF028022.1-cand-480-559
  source 1..80: mol_type = other DNA
acagtttatttgattgcacctgtgattacatgtatgtcaataaggagctgcatggcaagtgtctttattagcaggatcca

SEQ ID NO: 16005 - DNA, 80 bp, synthetic construct
  misc_feature 1..80: note = Synthetic: >AF028022.1-cand-560-639
  source 1..80: mol_type = other DNA
gataatatatgaaaagacacactgtgtgacgggtcaattaatagagggccaatgttttaatcctgcacacactctgacac

SEQ ID NO: 16006 - DNA, 80 bp, synthetic construct
  misc_feature 1..80: note = Synthetic: >AF028022.1-cand-640-719
  source 1..80: mol_type = other DNA
ttgctcagcctgctcacacatatgagacagttacactccctgttacctgtttttttacacctaaaaagtctgatcagctt

SEQ ID NO: 16007 - DNA, 80 bp, synthetic construct
  misc_feature 1..80: note = Synthetic: >AF028022.1-cand-750-829
  source 1..80: mol_type = other DNA
agtaaaacaggctgtacagaaaatgcactacaaggctattatgtttgttttctcggaagtcattctgaaccccttcatgt

SEQ ID NO: 16008 - DNA, 80 bp, synthetic construct
  misc_feature 1..80: note = Synthetic: >AF028022.1-cand-810-889
  source 1..80: mol_type = other DNA
cattctgaaccccttcatgtcccaagtctaaaagacatccggtcagcagaagtcgttacccgaatgattgtccatcctag

SEQ ID NO: 16009 - DNA, 80 bp, synthetic construct
  misc_feature 1..80: note = Synthetic: >AF028022.1-cand-890-969
  source 1..80: mol_type = other DNA
aggtgaggaccatgacccaatccaaaactcacagggttaccttcggatagtgggaccattaacagcaaaagtaccgagca

SEQ ID NO: 16010 - DNA, 80 bp, synthetic construct
  misc_feature 1..80: note = Synthetic: >AF028022.1-cand-970-1049
  source 1..80: mol_type = other DNA
ccagctctagtgatactctgcagggaacagcatttgcaggtgttccaatgtatagctctttatctactttggtgaggaat

SEQ ID NO: 16011 - DNA, 80 bp, synthetic construct
  misc_feature 1..80: note = Synthetic: >AF028022.1-cand-1050-1129
  source 1..80: mol_type = other DNA
acagaccctgaatttgtattctcaccagggattataccagaatccaaccatagtgcgtgtgataagaagaccatcccact

SEQ ID NO: 16012 - DNA, 80 bp, synthetic construct
  misc_feature 1..80: note = Synthetic: >AF028022.1-cand-1130-1209
  source 1..80: mol_type = other DNA
cacctggactggttacttaccgatctcaggtgaaatggagaaggtaacaggctgtacagtcttttgcacattagctggcc

SEQ ID NO: 16013 - DNA, 80 bp, synthetic construct
  misc_feature 1..80: note = Synthetic: >AF028022.1-cand-1220-1299
  source 1..80: mol_type = other DNA
ttgtgaggcttactctgaaagcggtatattcaacataagttccccaacatgccttgtcaataaagttcaaaagttcagag

SEQ ID NO: 16014 - DNA, 80 bp, synthetic construct
  misc_feature 1..80: note = Synthetic: >AdVE4-cand-16520-16599
  source 1..80: mol_type = other DNA
gtccatcccgctggaccacggcaaccccacgccaagtctcaagcccgtgaccctgcagcaggtgttgccgaacgcggcgc

SEQ ID NO: 16015 - DNA, 80 bp, synthetic construct
  misc_feature 1..80: note = Synthetic: >AdVE4-cand-16600-16679
  source 1..80: mol_type = other DNA
cgcgccagggcttgaagcgccagggcgaggatgtgtaccccaccatgcagctgatggtgcccaagcgccagaagctagaa

SEQ ID NO: 16016 - DNA, 80 bp, synthetic construct
  misc_feature 1..80: note = Synthetic: >AdVE4-cand-16680-16759
  source 1..80: mol_type = other DNA
gacgtgctggagaccatgaaggtggacccggacgcgcagcccgaggttaaggtacgacccatcaagcaggtggccccagg

SEQ ID NO: 16017 - DNA, 80 bp, synthetic construct
  misc_feature 1..80: note = Synthetic: >AdVE4-cand-16760-16839
  source 1..80: mol_type = other DNA
cctcggcgtgcagaccgtggacatcaagatccccacggagcccatggaaacgcagacagaggtcgtgaagcccatcacca

SEQ ID NO: 16018 - DNA, 80 bp, synthetic construct
  misc_feature 1..80: note = Synthetic: >AdVE4-cand-16840-16919
  source 1..80: mol_type = other DNA
gcaccatggaggtgcagacggatccctggatgccggtggtgccccgaaaaccccggcgcaagtacggcgcgaccagcctg

SEQ ID NO: 16019 - DNA, 80 bp, synthetic construct
  misc_feature 1..80: note = Synthetic: >AdVE4-cand-16920-16999
  source 1..80: mol_type = other DNA
ctaatgcccaactacgcgctgcatccttccatcatccccacgccgggctaccgcggcacacgcttctaccacggctatac

SEQ ID NO: 16020 - DNA, 80 bp, synthetic construct
  misc_feature 1..80: note = Synthetic: >AdVE4-cand-17000-17079
  source 1..80: mol_type = other DNA
cagctcccggcgccgcaagaccaccacccgccgccgtcgtcgccgcacagctacaactcccgccgacgccctggtgcgga

SEQ ID NO: 16021 - DNA, 80 bp, synthetic construct
  misc_feature 1..80: note = Synthetic: >AdVE4-cand-17080-17159
  source 1..80: mol_type = other DNA
gagtgtaccgccgcggccgcgcgcctctgaccctgccgcgtgcgcgctaccacccgagcattgccatttaactttgccgt

SEQ ID NO: 16022 - DNA, 80 bp, synthetic construct
  misc_feature 1..80: note = Synthetic: >AdVE4-cand-17160-17239
  source 1..80: mol_type = other DNA
cgcctttgcagatatggctctcacatgccgcattcgcgtccccattacgggctaccgaggaagaaaaccgcgccgtagaa

SEQ ID NO: 16023 - DNA, 80 bp, synthetic construct
  misc_feature 1..80: note = Synthetic: >AdVE4-cand-17220-17299
  source 1..80: mol_type = other DNA
aagaaaaccgcgccgtagaaggctggcgggaagcgggatgcgtcgccacccccaccggcggcggcgcgccatcagcaagc

SEQ ID NO: 16024 - DNA, 80 bp, synthetic construct
  misc_feature 1..80: note = Synthetic: >AdVE4-cand-17360-17439
  source 1..80: mol_type = other DNA
tccccggcattgcttccgtggcggtgcaggcctctcagcgccactgagacacacacttggaaattgtaataaacccaaat

SEQ ID NO: 16025 - DNA, 80 bp, synthetic construct
  misc_feature 1..80: note = Synthetic: >AdVE4-cand-17400-17479
  source 1..80: mol_type = other DNA
ccactgagacacacacttggaaattgtaataaacccaaattggactctgacgctcctggtcctgtgatgtgttttcgtag

SEQ ID NO: 16026 - DNA, 80 bp, synthetic construct
  misc_feature 1..80: note = Synthetic: >AdVE4-cand-17480-17559
  source 1..80: mol_type = other DNA
acagatggaagacatcaatttttcgtccctggctccacgacacggcacgcggccgtttatgggcacctggagcgacatcg

SEQ ID NO: 16027 - DNA, 80 bp, synthetic construct
  misc_feature 1..80: note = Synthetic: >AdVE4-cand-17580-17659
  source 1..80: mol_type = other DNA
ggcgccttcaattggagcagtctctggagcgggcttaagaatttcgggtccacgcttaaaacctatggcagcaaggcgtg

SEQ ID NO: 16028 - DNA, 80 bp, synthetic construct
  misc_feature 1..80: note = Synthetic: >AdVE4-cand-17640-17719
  source 1..80: mol_type = other DNA
acctatggcagcaaggcgtggaacagcaccacagggcaggcgctgagagataagctaaaagagcagaacttccagcagaa

SEQ ID NO: 16029 - DNA, 80 bp, synthetic construct
  misc_feature 1..80: note = Synthetic: >AdVE4-cand-17760-17839
  source 1..80: mol_type = other DNA
gacctggccaaccaggccgtgcagcggcagatcaacagccgcctggacccggttccccccgtcggctccgtggagatgcc

SEQ ID NO: 16030 - DNA, 80 bp, synthetic construct
  misc_feature 1..80: note = Synthetic: >EF177176.1-cand-3030-3109
  source 1..80: mol_type = other DNA
acatgcgaggaactatggcttactgaacccaaaaaatgctttaaaaaagaaggacaacatatagaagtatggtttgatgg

SEQ ID NO: 16031 - DNA, 80 bp, synthetic construct
  misc_feature 1..80: note = Synthetic: >EF177176.1-cand-3110-3189
  source 1..80: mol_type = other DNA
tagtaaaaacaattgtatgcaatatgtagcctggaaatatatatattacaatggagactgtgggtggcaaaaagtgtgtt

SEQ ID NO: 16032 - DNA, 80 bp, synthetic construct
  misc_feature 1..80: note = Synthetic: >EF177176.1-cand-3200-3279
  source 1..80: mol_type = other DNA
ctatagaggtatatattatgtacatgatggccacaaaacatactacacagactttgaacaagaggccaaaaaatttgggt

SEQ ID NO: 16033 - DNA, 80 bp, synthetic construct
  misc_feature 1..80: note = Synthetic: >EF177176.1-cand-3270-3349
  source 1..80: mol_type = other DNA
aaatttgggtgtaaaaacatatgggaagtacatatggaaaatgagagtatttattgtcctgactctgtgtctagtacctg

SEQ ID NO: 16034 - DNA, 80 bp, synthetic construct
  misc_feature 1..80: note = Synthetic: >EF177176.1-cand-3350-3429
  source 1..80: mol_type = other DNA
tagatacaacgtatcccctgttgaaactcttaacgaatacaacacccacaagaccaccaccaccacctccacgtccgtgg

SEQ ID NO: 16035 - DNA, 80 bp, synthetic construct
  misc_feature 1..80: note = Synthetic: >EF177176.1-cand-3430-3509
  source 1..80: mol_type = other DNA
gcaaccaagacgccgcagtatcccacagaccaggaaaacgacccagactacgggaatcagaatttgactcctccagagag

SEQ ID NO: 16036 - DNA, 80 bp, synthetic construct
  misc_feature 1..80: note = Synthetic: >EF177176.1-cand-3510-3589
  source 1..80: mol_type = other DNA
tcccacgcaaagtgtgtcacaacacacacaaacatcagcgacacagacaataccgacagtagaagtagaagtatcaacaa

SEQ ID NO: 16037 - DNA, 80 bp, synthetic construct
  misc_feature 1..80: note = Synthetic: >EF177176.1-cand-3590-3669
  source 1..80: mol_type = other DNA
caacaaccaccctggtgataagactacgcctgtagtacatttaaaaggtgaacctaacagattaaaatgttgtagatatc

SEQ ID NO: 16038 - DNA, 80 bp, synthetic construct
  misc_feature 1..80: note = Synthetic: >EF177176.1-cand-3670-3749
  source 1..80: mol_type = other DNA
gatttcaaaaatataaaacattgtttgtggatgtaacatcaacatatcattggacaagtacagacaataaaaattatagc

SEQ ID NO: 16039 - DNA, 80 bp, synthetic construct
  misc_feature 1..80: note = Synthetic: >EF177176.1-cand-3760-3839
  source 1..80: mol_type = other DNA
ttttatataaggatgaaacacaacgaaacagctttttaagtaatgtaaaaattcccaatagtgtacaggttagtttggga

SEQ ID NO: 16040 - DNA, 80 bp, synthetic construct
  misc_feature 1..80: note = Synthetic: >EF177176.1-cand-3840-3919
  source 1..80: mol_type = other DNA
caaatgagttttccataaagtgctgtatatattgtatatacatttgtgttattgtaacacacaaatacgtgaagtgtacc

SEQ ID NO: 16041 - DNA, 80 bp, synthetic construct
  misc_feature 1..80: note = Synthetic: >EF177176.1-cand-3920-3999
  source 1..80: mol_type = other DNA
tgccatacattgctgctacgcatatatattgcaaccattgatttttgtgttattggtgtgtttgcgctttgcttttgtgt

SEQ ID NO: 16042 - DNA, 80 bp, synthetic construct
  misc_feature 1..80: note = Synthetic: >EF177176.1-cand-4000-4079
  source 1..80: mol_type = other DNA
ttgtttgcttgtgtgtcatgttgtcccgcttttgctatctgcctctgtgttttccagttgtatattattaataatattgt

SEQ ID NO: 16043 - DNA, 80 bp, synthetic construct
  misc_feature 1..80: note = Synthetic: >EF177176.1-cand-4080-4159
  source 1..80: mol_type = other DNA
tttggtttgttatagccacatccttttttaatacatttataatatttttgatatttttttactgtcctgtgctgtgtata

SEQ ID NO: 16044 - DNA, 80 bp, synthetic construct
  misc_feature 1..80: note = Synthetic: >EF177176.1-cand-4160-4239
  source 1..80: mol_type = other DNA
tatttacatgctttgtggataataaatactacgtaaatgtagtagtactgttactactatggttgcccaccgtgccacac

SEQ ID NO: 16045 - DNA, 80 bp, synthetic construct
  misc_feature 1..80: note = Synthetic: >EF177176.1-cand-4240-4319
  source 1..80: mol_type = other DNA
gacgcaaacgcgcatctgcaacacaactatataaaacatgtaagttgtctggtacatgtccagaggatgttgttaataaa

SEQ ID NO: 16046 - DNA, 80 bp, synthetic construct
  misc_feature 1..80: note = Synthetic: >EVB80-cand-6830-6909
  source 1..80: mol_type = other DNA
atgccatcagggtgctcaggaaccagcatctttaactcaatgatcaacaacataattattaggacactgatgctgaaggt

SEQ ID NO: 16047 - DNA, 80 bp, synthetic construct
  misc_feature 1..80: note = Synthetic: >EVB80-cand-6900-6979
  source 1..80: mol_type = other DNA
tgctgaaggtgtacaaagggatagacttagatcagttcaggatgatagcatatggagacgatgtcatcgcatcctatcct

SEQ ID NO: 16048 - DNA, 80 bp, synthetic construct
  misc_feature 1..80: note = Synthetic: >EVB80-cand-7060-7139
  source 1..80: mol_type = other DNA
ttttaatgaagtgacatggactaacgtcaccttcttgaagagatatttcagggcagatgaacaataccccttcctcgtcc

SEQ ID NO: 16049 - DNA, 80 bp, synthetic construct
  misc_feature 1..80: note = Synthetic: >EVB80-cand-7220-7299
  source 1..80: mol_type = other DNA
tccctgtgtctattggcctggcacaacggagagcaagaatatgaagaattcgtgtctaagatcagaagcgtcccagtagg

SEQ ID NO: 16050 - DNA, 80 bp, synthetic construct
  misc_feature 1..80: note = Synthetic: >EVB80-cand-7300-7379
  source 1..80: mol_type = other DNA
gcgctgtctgactctacctgcgttctcaaccctacgcaggaagtggctagactccttttaaattagagtacaatttgaat

SEQ ID NO: 16051 - DNA, 80 bp, synthetic construct
  misc_feature 1..80: note = Synthetic: >EVB80-cand-7350-7429
  source 1..80: mol_type = other DNA
actccttttaaattagagtacaatttgaatacaattctaattggcttaaccctaccacacttaccgaactagacaacggt

SEQ ID NO: 16052 - DNA, 80 bp, synthetic construct
  misc_feature 1..80: note = Synthetic: >EVB81-cand-40-119
  source 1..80: mol_type = other DNA
cgctagcacactagtattgaggtacttttgtgcgcctgttttatccaccctctccccacgtaacttagaagcaaaactca

SEQ ID NO: 16053 - DNA, 80 bp, synthetic construct
  misc_feature 1..80: note = Synthetic: >EVB81-cand-120-199
  source 1..80: mol_type = other DNA
ttcggtcaatagacagcccagtaagccaactgggcaatgaccaagcacttctgtttccccggactgagtatcaatagact

SEQ ID NO: 16054 - DNA, 80 bp, synthetic construct
  misc_feature 1..80: note = Synthetic: >EVB81-cand-380-459
  source 1..80: mol_type = other DNA
ggcaacccatgggacgcttcaatattaacatggtgtgaagagtctattgagctaattggtagtcctccggcccctgaatg

SEQ ID NO: 16055 - DNA, 80 bp, synthetic construct
  misc_feature 1..80: note = Synthetic: >EVB81-cand-610-689
  source 1..80: mol_type = other DNA
ccatatagctattggattggccatccagtgacaaatcgagcgatcatttacttgtttgttggtttcgtaccgctaaactt

SEQ ID NO: 16056 - DNA, 80 bp, synthetic construct
  misc_feature 1..80: note = Synthetic: >EVB81-cand-690-769
  source 1..80: mol_type = other DNA
taaagttgtgaatactcttaactttattatagcacagaacacatcactatgggcgcacaagtgtcaacccagaaaaccgg

SEQ ID NO: 16057 - DNA, 80 bp, synthetic construct
  misc_feature 1..80: note = Synthetic: >EVB81-cand-770-849
  source 1..80: mol_type = other DNA
ggcacatgagaatagcgtgaaagctaatgggagctcgaccatcaactacaccaccatcaactactacaaagattcagctt

SEQ ID NO: 16058 - DNA, 80 bp, synthetic construct
  misc_feature 1..80: note = Synthetic: >EVB81-cand-850-929
  source 1..80: mol_type = other DNA
caaattcactcaataggcaagacttaagacaggatccagctaagttcacagaacccattaaagatgtcatgatcaaaacc

SEQ ID NO: 16059 - DNA, 80 bp, synthetic construct
  misc_feature 1..80: note = Synthetic: >EVB81-cand-930-1009
  source 1..80: mol_type = other DNA
ctcccagcactgaactcaccatctgctgaagagtgtggttatagcgatcgtgtccgatcgatcacccttggtaactcgac

SEQ ID NO: 16060 - DNA, 80 bp, synthetic construct
  misc_feature 1..80: note = Synthetic: >EVB81-cand-1010-1089
  source 1..80: mol_type = other DNA
aatcacaactcaggagagtgccaatgtggttgtttcgtacggcgagtggccacgctacctaaaggatgatgaagctactg

SEQ ID NO: 16061 - DNA, 80 bp, synthetic construct
  misc_feature 1..80: note = Synthetic: >EVB81-cand-1090-1169
  source 1..80: mol_type = other DNA
ctgaggataaaccgacacagcctgatgtagctacctgcaggttttacactctggaatccatcaactgggaaaagagctct

SEQ ID NO: 16062 - DNA, 80 bp, synthetic construct
  misc_feature 1..80: note = Synthetic: >EVB85-cand-550-629
  source 1..80: mol_type = other DNA
tgaccgtgtttccttttattttttcctattggctgcttatggtgacaatcgaggaattgttgccatatagctattggatt

SEQ ID NO: 16063 - DNA, 80 bp, synthetic construct
  misc_feature 1..80: note = Synthetic: >EVB85-cand-630-709
  source 1..80: mol_type = other DNA
ggccatccggtgtcaaatagagcgattatttacctgtttgttggatttgtaccactgaactttaaggcgctcatcactct

SEQ ID NO: 16064 - DNA, 80 bp, synthetic construct
  misc_feature 1..80: note = Synthetic: >EVB85-cand-690-769
  source 1..80: mol_type = other DNA
tttaaggcgctcatcactctcaactatattttatcccttaacgcaacaaaatgggtgctcaagtctcgacacagaagaca

SEQ ID NO: 16065 - DNA, 80 bp, synthetic construct
  misc_feature 1..80: note = Synthetic: >EVB85-cand-790-869
  source 1..80: mol_type = other DNA
gaatgccagcggcaactcaaccattcatttcaccaacatcaattattacaaggatgctgcgtcaaattcagcgaataggc

SEQ ID NO: 16066 - DNA, 80 bp, synthetic construct
  misc_feature 1..80: note = Synthetic: >EVB85-cand-870-949
  source 1..80: mol_type = other DNA
aagatttcacgcaggaccctagtaagtttacagaaccaatgaaggatatcatgatcaaatctctacctgccctgaattcc

SEQ ID NO: 16067 - DNA, 80 bp, synthetic construct
  misc_feature 1..80: note = Synthetic: >EVB85-cand-950-1029
  source 1..80: mol_type = other DNA
cccacagtggaggagtgcgggtatagtgatagagttcgatcaatcacactagggaactcaaccatcactacacaggagtg

SEQ ID NO: 16068 - DNA, 80 bp, synthetic construct
  misc_feature 1..80: note = Synthetic: >EVB85-cand-1050-1129
  source 1..80: mol_type = other DNA
acggtgtgtggcccacctacctatctgatgacgaagccactgcagaagatcaaccaacgcagccagatgtagcaacatgc

SEQ ID NO: 16069 - DNA, 80 bp, synthetic construct
  misc_feature 1..80: note = Synthetic: >EVB85-cand-1110-1189
  source 1..80: mol_type = other DNA
agccagatgtagcaacatgcaggttctatacattggattcaataaagtggcagaagaactcaaatgggtggtggtggaag

SEQ ID NO: 16070 - DNA, 80 bp, synthetic construct
  misc_feature 1..80: note = Synthetic: >EVB85-cand-1190-1269
  source 1..80: mol_type = other DNA
tttccagaggctctcagcaacatgggtttgtttggccagaacatgatgtaccactaccttggtagagctggatacacaat

SEQ ID NO: 16071 - DNA, 80 bp, synthetic construct
  misc_feature 1..80: note = Synthetic: >EVB85-cand-1270-1349
  source 1..80: mol_type = other DNA
acacgtgcagtgcaatgcatccaaatttcaccagggttgtctgcttgttgtgtgtgtaccggaggctgaaatgggatgtg

SEQ ID NO: 16072 - DNA, 80 bp, synthetic construct
  misc_feature 1..80: note = Synthetic: >EVB85-cand-1350-1429
  source 1..80: mol_type = other DNA
ccacaattgggaacactgttaacgctgaacatttagcaaaagatgacaaagcctacgagttctccgagggcaatgcaaac

SEQ ID NO: 16073 - DNA, 80 bp, synthetic construct
  misc_feature 1..80: note = Synthetic: >EVB85-cand-1430-1509
  source 1..80: mol_type = other DNA
ggcgagcatgatgtgcagacagctgttcacaacgctggaatgggtgttggtgtgggcaacctaacgatcttcccacatca

SEQ ID NO: 16074 - DNA, 80 bp, synthetic construct
  misc_feature 1..80: note = Synthetic: >EVB85-cand-1510-1589
  source 1..80: mol_type = other DNA
atggatcaatcttaggaccaataacagcgcgacaattgtaatgccttacataaacagtgtaccaatggacaacatgttta

SEQ ID NO: 16075 - DNA, 80 bp, synthetic construct
  misc_feature 1..80: note = Synthetic: >EVB85-cand-1590-1669
  source 1..80: mol_type = other DNA
ggcattacaatttcacgttgatggtcatcccatttgtcaagttggactacacggatcaggctacgacgtatgtacctatt

SEQ ID NO: 16076 - DNA, 80 bp, synthetic construct
  misc_feature 1..80: note = Synthetic: >EVB85-cand-1670-1749
  source 1..80: mol_type = other DNA
acaatcaccgtagccccaatggccgcggagtataacggtttgcggttggcacagtctcaaggcctgccggtgctgtgcac

SEQ ID NO: 16077 - DNA, 80 bp, synthetic construct
  misc_feature 1..80: note = Synthetic: >EVB85-cand-1750-1829
  source 1..80: mol_type = other DNA
tcctggtagcaatcagttcctcacatcagatgacttccaatcaccatcggccctgccacagtttgacgtgacgcccccac

SEQ ID NO: 16078 - DNA, 80 bp, synthetic construct
  misc_feature 1..80: note = Synthetic: >FJ809772.1-cand-1970-2049
  source 1..80: mol_type = other DNA
aattctttgaacggcctttcaaaagctctctagatgtatatctttattctgttattaagtctttacttatcagtcttgca

SEQ ID NO: 16079 - DNA, 80 bp, synthetic construct
  misc_feature 1..80: note = Synthetic: >FJ809772.1-cand-2050-2129
  source 1..80: mol_type = other DNA
cagaataataaggttaggttttattcaaaggttagattactaggtctcacagtagatcattcaacggtaggagctagtgg

SEQ ID NO: 16080 - DNA, 80 bp, synthetic construct
  misc_feature 1..80: note = Synthetic: >FJ809772.1-cand-2130-2209
  source 1..80: mol_type = other DNA
ggtctatccttcacttatgtctagagtagtgtataagcattaccggagtcttatctctgaagcaaccacatgtttctttt

SEQ ID NO: 16081 - DNA, 80 bp, synthetic construct
  misc_feature 1..80: note = Synthetic: >FJ809772.1-cand-2220-2299
  source 1..80: mol_type = other DNA
aggtttgcatgggaatttgccagaagaagcaaagatacatttagagacagtagagtgggccagaaagtttaatgaaaaag

SEQ ID NO: 16082 - DNA, 80 bp, synthetic construct
  misc_feature 1..80: note = Synthetic: >FJ809772.1-cand-2310-2389
  source 1..80: mol_type = other DNA
tggtgatatcttgatgaaggaaggktataacattgattctctcattaaaggtgatgttaaggttgaacagcagttattct

SEQ ID NO: 16083 - DNA, 80 bp, synthetic construct
  misc_feature 1..80: note = Synthetic: >FJ809772.1-cand-2390-2469
  source 1..80: mol_type = other DNA
gtcaagaggtagttgaactaagtgcacaagaattgaataagtacttgcaggcaaaatcccaagttttatgtgcaaacatt

SEQ ID NO: 16084 - DNA, 80 bp, synthetic construct
  misc_feature 1..80: note = Synthetic: >FJ809772.1-cand-2470-2549
  source 1..80: mol_type = other DNA
atgaataaacattgggatagaccatattttagccagacacgaaatataagcttaaaaggtatgtcaggtgcattacagga

SEQ ID NO: 16085 - DNA, 80 bp, synthetic construct
  misc_feature 1..80: note = Synthetic: >FJ809772.1-cand-2550-2629
  source 1..80: mol_type = other DNA
agatgggcatttagcagcaagtgtgacattaattgaagccattcgttttctcaatagatcacagacaaatccaaacgtaa

SEQ ID NO: 16086 - DNA, 80 bp, synthetic construct
  misc_feature 1..80: note = Synthetic: >FJ809772.1-cand-2630-2709
  source 1..80: mol_type = other DNA
tagatatgtatgagcagacaaaacaattgaaagcacaagccaggattgtgagaaaataccaaaggacagaggctgataga

SEQ ID NO: 16087 - DNA, 80 bp, synthetic construct
  misc_feature 1..80: note = Synthetic: >FJ809772.1-cand-2710-2789
  source 1..80: mol_type = other DNA
ggcttttttataacaactttgccaacaagagttaggttagaaatcattgaagattattatgatgcaatagcaaaggtcgt

SEQ ID NO: 16088 - DNA, 80 bp, synthetic construct
  misc_feature 1..80: note = Synthetic: >FJ809772.1-cand-2820-2899
  source 1..80: mol_type = other DNA
caagaaaattttgaatattcagcatgctttagagaaagctttaagatgggcatcagggtcatctgaaataacaactagta

SEQ ID NO: 16089 - DNA, 80 bp, synthetic construct
  misc_feature 1..80: note = Synthetic: >FJ809772.1-cand-2870-2949
  source 1..80: mol_type = other DNA
catcagggtcatctgaaataacaactagtacagggaagattatacgattcaaaaggaagcttatgtatgtgagtgctgat

SEQ ID NO: 16090 - DNA, 80 bp, synthetic construct
  misc_feature 1..80: note = Synthetic: >FJ809772.1-cand-2950-3029
  source 1..80: mol_type = other DNA
gcaactaaatggtcaccaggagacaattcagcaaaattcagaaggtttactcaggcaatctatgatggattatctgatca

SEQ ID NO: 16091 - DNA, 80 bp, synthetic construct
  misc_feature 1..80: note = Synthetic: >FJ809772.1-cand-3030-3109
  source 1..80: mol_type = other DNA
aaagttaaaatgctgtgtagtggatgcacttcggaatatatatgaaacagagtttttcatgtcccgtaaattacataggt

SEQ ID NO: 16092 - DNA, 80 bp, synthetic construct
  misc_feature 1..80: note = Synthetic: >FJ809772.1-cand-3110-3189
  source 1..80: mol_type = other DNA
atatagatgagatgaacgattgttcagaagctgtacgtgattttttatcttttttttctggtggcgtgtcagcaaatgta

SEQ ID NO: 16093 - DNA, 80 bp, synthetic construct
  misc_feature 1..80: note = Synthetic: >FJ809772.1-cand-3190-3269
  source 1..80: mol_type = other DNA
aaaggtaattggctgcaagggaatttaaataaatgttcatcattattcggctcagctatttccctcctattccgagaagt

SEQ ID NO: 16094 - DNA, 80 bp, synthetic construct
  misc_feature 1..80: note = Synthetic: >FJ809772.1-cand-4530-4609
  source 1..80: mol_type = other DNA
tcaaaatccaatcacatccattataggctataaatatgcagcaactgtggatgaggtaagtgatgtattggatagttcat

SEQ ID NO: 16095 - DNA, 80 bp, synthetic construct
  misc_feature 1..80: note = Synthetic: >FJ809772.1-cand-4610-4689
  source 1..80: mol_type = other DNA
tttttcctgaatccttgtctgctgatctccaagtaatgaaagaaggtgtctatcgagaattgggattagacattggatct

SEQ ID NO: 16096 - DNA, 80 bp, synthetic construct
  misc_feature 1..80: note = Synthetic: >FJ809772.1-cand-4690-4769
  source 1..80: mol_type = other DNA
cctgaagttttaaagagaatagcaccattgctctataaagctgggaaatcacgggtggtcattgtagaaggtaatgtaga

SEQ ID NO: 16097 - DNA, 80 bp, synthetic construct
  misc_feature 1..80: note = Synthetic: >FJ809772.1-cand-4770-4849
  source 1..80: mol_type = other DNA
aggcacagctgagtctatctgtagttattggttaaagagtatgtctttgataaagacaatcaaagtgaggccaaaaaaag

SEQ ID NO: 16098 - DNA, 80 bp, synthetic construct
  misc_feature 1..80: note = Synthetic: >FJ809772.1-cand-4850-4929
  source 1..80: mol_type = other DNA
aagtgcttaaagcagtatccctatacaaccagaaagaaaacgtaggtttgcaagatgatctcgcagctacaagactgtgt

SEQ ID NO: 16099 - DNA, 80 bp, synthetic construct
  misc_feature 1..80: note = Synthetic: >FJ809772.1-cand-4930-5009
  source 1..80: mol_type = other DNA
attgaagtatggaggtggtgcaaagcaaatgatcaggatgtaagagagtggctcaatgcgttatattttgagaagcagac

SEQ ID NO: 16100 - DNA, 80 bp, synthetic construct
  misc_feature 1..80: note = Synthetic: >FJ809772.1-cand-5010-5089
  source 1..80: mol_type = other DNA
attaatggattggattgaaagatttagaaggaagggagttgtaccaactgatcctgaaatacaatgtatgggtctgcttc

SEQ ID NO: 16101 - DNA, 80 bp, synthetic construct
  misc_feature 1..80: note = Synthetic: >FJ809772.1-cand-5090-5169
  source 1..80: mol_type = other DNA
tgtttgatgtactaggttataaaagtgtgcttcagatgcaagcaaaccgtagggcctattcaggtaagcaatatgacgct

SEQ ID NO: 16102 - DNA, 80 bp, synthetic construct
  misc_feature 1..80: note = Synthetic: >FJ809772.1-cand-5170-5249
  source 1..80: mol_type = other DNA
tattgtgttcaaacatacaatgaagagactaagctgtatgagggtgatctgagggtgacatttaattttggtcttgattg

SEQ ID NO: 16103 - DNA, 80 bp, synthetic construct
  misc_feature 1..80: note = Synthetic: >FJ809772.1-cand-5250-5329
  source 1..80: mol_type = other DNA
tgcacgccttgaagtattctggtctaagaaagaatatatactggaaacatcaataacacagaggcacgttctcaggttgt

SEQ ID NO: 16104 - DNA, 80 bp, synthetic construct
  misc_feature 1..80: note = Synthetic: >FJ809772.1-cand-5330-5409
  source 1..80: mol_type = other DNA
tgatggaggaagtttcaaaagaattaataagatgtggtatgaggttcaaaactgaacaggtgaaccaaacacggagtctt

SEQ ID NO: 16105 - DNA, 80 bp, synthetic construct
  misc_feature 1..80: note = Synthetic: >FJ809772.1-cand-5450-5529
  source 1..80: mol_type = other DNA
caaacataccatgcatcgtatataagcattgtgttttacgaactgggctaagaaccagacaacccatcaataaagagttc

SEQ ID NO: 16106 - DNA, 80 bp, synthetic construct
  misc_feature 1..80: note = Synthetic: >FJ809772.1-cand-5490-5569
  source 1..80: mol_type = other DNA
aactgggctaagaaccagacaacccatcaataaagagttcatgatcaatatacaagcagatgggtttagagcaatagctc

SEQ ID NO: 16107 - DNA, 80 bp, synthetic construct
  misc_feature 1..80: note = Synthetic: >FJ809772.1-cand-5570-5649
  source 1..80: mol_type = other DNA
agatggatatagaaagtcctcgattcttgctagctcatgcatatcatacactgagggatgtaagatatcaggcagtacag

SEQ ID NO: 16108 - DNA, 80 bp, synthetic construct
  misc_feature 1..80: note = Synthetic: >FJ809772.1-cand-5650-5729
  source 1..80: mol_type = other DNA
gctgtaggcaatgtttggtttaaaactgaacagcataagttattcataaaccctattgtgtcatcaggactccttgaaaa

SEQ ID NO: 16109 - DNA, 80 bp, synthetic construct
  misc_feature 1..80: note = Synthetic: >FJ809772.1-cand-5730-5809
  source 1..80: mol_type = other DNA
ttttatgaaaggcttgccagctgcaatacccccagctgcctactcattaattatgaataaggcaaagatttctgttgact

SEQ ID NO: 16110 - DNA, 80 bp, synthetic construct
  misc_feature 1..80: note = Synthetic: >GU997097.1-cand-560-639
  source 1..80: mol_type = other DNA
atgagggtgttgtgcagcagatgagacttgtccaagccgatattaattatgtaagggaacatcttataatgcaagatgag

SEQ ID NO: 16111 - DNA, 80 bp, synthetic construct
  misc_feature 1..80: note = Synthetic: >GU997097.1-cand-640-719
  source 1..80: mol_type = other DNA
cgggcatcacttgaagccatgttcaacctaaagttccatgttactggtccaaggctaaggtattttagtatacccgatta

SEQ ID NO: 16112 - DNA, 80 bp, synthetic construct
  misc_feature 1..80: note = Synthetic: >GU997097.1-cand-720-799
  source 1..80: mol_type = other DNA
tagacctcagcctttatgtaaccctacaatcgatggtttacttcagtattgtaaacaatggcttactgaagaacataaat

SEQ ID NO: 16113 - DNA, 80 bp, synthetic construct
  misc_feature 1..80: note = Synthetic: >GU997097.1-cand-800-879
  source 1..80: mol_type = other DNA
ttatattcaaggaggtgagtggtacaaatgtgatgggttcttttgaagttaatgagaaaaaacataaagaaaggtactta

SEQ ID NO: 16114 - DNA, 80 bp, synthetic construct
  misc_feature 1..80: note = Synthetic: >GU997097.1-cand-880-959
  source 1..80: mol_type = other DNA
gaatcacgcaagccccgaaattttttacttttacagacgactatacaagggtcatatttaccatctactataagctctga

SEQ ID NO: 16115 - DNA, 80 bp, synthetic construct
  misc_feature 1..80: note = Synthetic: >GU997097.1-cand-960-1039
  source 1..80: mol_type = other DNA
tcaatgtaatactagaattggctgtttagaaatatgtaaaaatataccagagacaccagtgcaagcattggcatctgata

SEQ ID NO: 16116 - DNA, 80 bp, synthetic construct
  misc_feature 1..80: note = Synthetic: >GU997097.1-cand-1040-1119
  source 1..80: mol_type = other DNA
tagcatttaaatatataagtcttgataaagatgaagtaataaattattacaatcccagaatccatttcaagccaggacag

SEQ ID NO: 16117 - DNA, 80 bp, synthetic construct
  misc_feature 1..80: note = Synthetic: >GU997097.1-cand-1110-1189
  source 1..80: mol_type = other DNA
gccaggacagaatgttaaagaacctgggacattgaaaataggtttatctcaaatgaaccctctatctaaagctatcttgg

SEQ ID NO: 16118 - DNA, 80 bp, synthetic construct
  misc_feature 1..80: note = Synthetic: >GU997097.1-cand-1190-1269
  source 1..80: mol_type = other DNA
ataatataggtaaacacaaatcagataagggtttatttggtcaagcaattgagagtataaatattgccagtcagatacaa

SEQ ID NO: 16119 - DNA, 80 bp, synthetic construct
  misc_feature 1..80: note = Synthetic: >GU997097.1-cand-1270-1349
  source 1..80: mol_type = other DNA
ttaaatgagtgttctaaagtaatagaacaaatattatcaaatcttgaaattaatataagtgatgttagtgaaaatatccc

SEQ ID NO: 16120 - DNA, 80 bp, synthetic construct
  misc_feature 1..80: note = Synthetic: >GU997097.1-cand-1350-1429
  source 1..80: mol_type = other DNA
tttaccaaagaagacaacatgtgtagatgaactactaggaaaattttatgaaaatgaaattacaaagtacatgttaggga

SEQ ID NO: 16121 - DNA, 80 bp, synthetic construct
  misc_feature 1..80: note = Synthetic: >GU997097.1-cand-1430-1509
  source 1..80: mol_type = other DNA
ttttaagaaagacggtagcatggcatatagggcatttaattagggatattacagaaagcttgatagcccattcaggccta

SEQ ID NO: 16122 - DNA, 80 bp, synthetic construct
  misc_feature 1..80: note = Synthetic: >GU997097.1-cand-1510-1589
  source 1..80: mol_type = other DNA
cgtcgttccaaatattggtcagttcatgcctatgatcatgggaatgtaatactattcatattaccatccaagtcacttga

SEQ ID NO: 16123 - DNA, 80 bp, synthetic construct
  misc_feature 1..80: note = Synthetic: >GU997097.1-cand-1590-1669
  source 1..80: mol_type = other DNA
ggtggcagggtcttatattcgattttttacagtgtttaaggatggcattggcctggttgataatgataacactgactcaa

SEQ ID NO: 16124 - DNA, 80 bp, synthetic construct
  misc_feature 1..80: note = Synthetic: >GU997097.1-cand-1670-1749
  source 1..80: mol_type = other DNA
aaactgaaattgatggcattacatggatctattcaaaagttatgagcattgacttaaacagattgctggcattgaatatt

SEQ ID NO: 16125 - DNA, 80 bp, synthetic construct
  misc_feature 1..80: note = Synthetic: >GU997097.1-cand-1750-1829
  source 1..80: mol_type = other DNA
gcatttgagaaggccttattagctacagccacatggttccaatattacacagaagatcaaggacactttccacttcaaca

SEQ ID NO: 16126 - DNA, 80 bp, synthetic construct
  misc_feature 1..80: note = Synthetic: >HCV.A13-cand-2650-2729
  source 1..80: mol_type = other DNA
taatccactagagcccggtgacacagtccaaaccagacatgtaatccaaaccagatctagaagtgaaagcaccgttgaat

SEQ ID NO: 16127 - DNA, 80 bp, synthetic construct
  misc_feature 1..80: note = Synthetic: >HCV.A13-cand-2750-2829
  source 1..80: mol_type = other DNA
tgtgtaacaataatgggagtggacaactacaatgagacattaactggtaatcaaaagtctaccctgtttgcaacatggaa

SEQ ID NO: 16128 - DNA, 80 bp, synthetic construct
  misc_feature 1..80: note = Synthetic: >HCV.A13-cand-2810-2889
  source 1..80: mol_type = other DNA
accctgtttgcaacatggaatatcacatacacagacacagtccaactgaggagaaaattagagatgttcacatactccag

SEQ ID NO: 16129 - DNA, 80 bp, synthetic construct
  misc_feature 1..80: note = Synthetic: >HCV.A13-cand-2890-2969
  source 1..80: mol_type = other DNA
atttgacatcgaattcacttttgttgtgacagaacgatactactcatctaatactggtcatgccttaaaccaagtgtacc

SEQ ID NO: 16130 - DNA, 80 bp, synthetic construct
  misc_feature 1..80: note = Synthetic: >HCV.A13-cand-2970-3049
  source 1..80: mol_type = other DNA
aaattatgtatgttccaccaggtgcaccagtacctaagaagtgggatgattacacctggcaaacctcatcaaatccatca

SEQ ID NO: 16131 - DNA, 80 bp, synthetic construct
  misc_feature 1..80: note = Synthetic: >HCV.A13-cand-3050-3129
  source 1..80: mol_type = other DNA
atattctacacttatggcacagctccacctagaatctccattccatttgtgggaattgcaaatgcttactctcacttcta

SEQ ID NO: 16132 - DNA, 80 bp, synthetic construct
  misc_feature 1..80: note = Synthetic: >HCV.A13-cand-3130-3209
  source 1..80: mol_type = other DNA
tgacgggtatgccacagtgccactgaaagctgacacaacagactcaggagcagcctactatggtgcagtatccataaatg

SEQ ID NO: 16133 - DNA, 80 bp, synthetic construct
  misc_feature 1..80: note = Synthetic: >HCV.A13-cand-3210-3289
  source 1..80: mol_type = other DNA
actttgggctgctggcagtgcgagtggtcaatgaacacaacccagtcagagtgtcatccaaaatgagagtgtacatgaaa

SEQ ID NO: 16134 - DNA, 80 bp, synthetic construct
  misc_feature 1..80: note = Synthetic: >HCV.A13-cand-3290-3369
  source 1..80: mol_type = other DNA
ccaaaacatgtccgagtatggtgtccaagaccaccacgcgctgtggagtattatggacctggagttgattacaaagcaga

SEQ ID NO: 16135 - DNA, 80 bp, synthetic construct
  misc_feature 1..80: note = Synthetic: >HCV.A13-cand-3370-3449
  source 1..80: mol_type = other DNA
cacactagaaccactaccaacaaagaccttaaccacctatggttttggacatcaaaacaaggcagtgtatgtggcagggt

SEQ ID NO: 16136 - DNA, 80 bp, synthetic construct
  misc_feature 1..80: note = Synthetic: >HCV.A13-cand-3450-3529
  source 1..80: mol_type = other DNA
acaaaatcataaactaccacctggccactccagaagactataggaactgtgtaagaagcatgtgggagagagatcttatg

SEQ ID NO: 16137 - DNA, 80 bp, synthetic construct
  misc_feature 1..80: note = Synthetic: >HCV.A13-cand-3530-3609
  source 1..80: mol_type = other DNA
gttgttgagtcaaaagcacaagggatagaccaaattgctcggtgttcatgtaagacaggagtgtattactgtgagtccag

SEQ ID NO: 16138 - DNA, 80 bp, synthetic construct
  misc_feature 1..80: note = Synthetic: >HCV.A13-cand-3610-3689
  source 1..80: mol_type = other DNA
aaacaaacactaccccatcactatcacatcacccacattccagtggatggagaaaaatgacttctacccagcacgctacc

SEQ ID NO: 16139 - DNA, 80 bp, synthetic construct
  misc_feature 1..80: note = Synthetic: >HCV.A13-cand-3650-3729
  source 1..80: mol_type = other DNA
cagtggatggagaaaaatgacttctacccagcacgctaccaatcacacatgactattggcagtggttttgcagcccctgg

SEQ ID NO: 16140 - DNA, 80 bp, synthetic construct
  misc_feature 1..80: note = Synthetic: >HCV.A13-cand-3770-3849
  source 1..80: mol_type = other DNA
ggccttatcactgccggtggtgatggagtggtggcctttgcagacattagagatctctatgtagaggatgaggcaatgga

SEQ ID NO: 16141 - DNA, 80 bp, synthetic construct
  misc_feature 1..80: note = Synthetic: >HCV.A13-cand-3850-3929
  source 1..80: mol_type = other DNA
gcaaggaatcacttcttacattgaatcccttggagctgcctttgggagtggttttactactcaaattggagagaagatca

SEQ ID NO: 16142 - DNA, 80 bp, synthetic construct
  misc_feature 1..80: note = Synthetic: >HCV.A21-cand-6280-6359
  source 1..80: mol_type = other DNA
ggaggatgccatgtacggcactgatggtcttgaggccctggatcttagcactagtgcaggatacccttatgttgcaatgg

SEQ ID NO: 16143 - DNA, 80 bp, synthetic construct
  misc_feature 1..80: note = Synthetic: >HCV.A21-cand-6370-6449
  source 1..80: mol_type = other DNA
aagagatatcttagacaaacagactagagatactaaagagatgcagagacttttggatacctatggaatcaacctaccat

SEQ ID NO: 16144 - DNA, 80 bp, synthetic construct
  misc_feature 1..80: note = Synthetic: >HCV.A21-cand-6450-6529
  source 1..80: mol_type = other DNA
tagtcacctatgtgaaagatgaactcagatcaaagactaaagtggagcaaggaaaatcaaggttaattgaagcttccagt

SEQ ID NO: 16145 - DNA, 80 bp, synthetic construct
  misc_feature 1..80: note = Synthetic: >HCV.A21-cand-6530-6609
  source 1..80: mol_type = other DNA
cttaatgattcagttgcaatgagaatggcatttggcaatctctacgcagccttccataagaatccaggtgtggtaacagg

SEQ ID NO: 16146 - DNA, 80 bp, synthetic construct
  misc_feature 1..80: note = Synthetic: >HCV.A21-cand-6610-6689
  source 1..80: mol_type = other DNA
ctcagcagttggttgtgacccagacttattttggagtaagataccagtactaatggaagaaaagctctttgcttttgact

SEQ ID NO: 16147 - DNA, 80 bp, synthetic construct
  misc_feature 1..80: note = Synthetic: >HCV.A21-cand-6690-6769
  source 1..80: mol_type = other DNA
acacaggatatgatgcctcactcagtcctgcttggtttgaagctcttaaaatggtgttagaaaagattggttttggtgat

SEQ ID NO: 16148 - DNA, 80 bp, synthetic construct
  misc_feature 1..80: note = Synthetic: >HCV.A21-cand-6770-6849
  source 1..80: mol_type = other DNA
agagcagattacatagattacctgaaccactctcatcatctttacaaaaacaaaacttattgtgtcaagggcggtatgcc

SEQ ID NO: 16149 - DNA, 80 bp, synthetic construct
  misc_feature 1..80: note = Synthetic: >HCV.A21-cand-6850-6929
  source 1..80: mol_type = other DNA
atctggctgttctggcacatcaatttttaactcaatgattaacaatttgatcatcaggacgcttttactgaaaacctaca

SEQ ID NO: 16150 - DNA, 80 bp, synthetic construct
  misc_feature 1..80: note = Synthetic: >HCV.A21-cand-6930-7009
  source 1..80: mol_type = other DNA
agggcatggatttggaccatttaaaaatgattgcctatggtgatgatgtgatagcttcctacccccatgaggttgacgct

SEQ ID NO: 16151 - DNA, 80 bp, synthetic construct
  misc_feature 1..80: note = Synthetic: >HCV.A21-cand-7010-7089
  source 1..80: mol_type = other DNA
agtctcctagcccaatcaggaaaagactacggactgaccatgactccagcagataaatcagcaacctttgaaacagtcac

SEQ ID NO: 16152 - DNA, 80 bp, synthetic construct
  misc_feature 1..80: note = Synthetic: >HCV.A21-cand-7090-7169
  source 1..80: mol_type = other DNA
atgggagaatgtaacattcctgaaaagatttttcagagcagatgagaaatatccattcctggtgcatccagtaatgccaa

SEQ ID NO: 16153 - DNA, 80 bp, synthetic construct
  misc_feature 1..80: note = Synthetic: >HCV.A21-cand-7170-7249
  source 1..80: mol_type = other DNA
tgaaagaaattcatgaatcaatcagatggaccaaggaccctagaaacacacaggatcatgtgcgctcgttgtgcttattg

SEQ ID NO: 16154 - DNA, 80 bp, synthetic construct
  misc_feature 1..80: note = Synthetic: >HCV.A21-cand-7250-7329
  source 1..80: mol_type = other DNA
gcttggcacaacggcgaagaagaatacaacaaattcttagctaaaatcagaagtgtgccaatcggtagagctttattgct

SEQ ID NO: 16155 - DNA, 80 bp, synthetic construct
  misc_feature 1..80: note = Synthetic: >HCV.A24-cand-20-99
  source 1..80: mol_type = other DNA
gttcccaccccagaggcccacgtggcggctagtacacctggtattacggtacccttgtacgcctgttttacacccccttt

SEQ ID NO: 16156 - DNA, 80 bp, synthetic construct
  misc_feature 1..80: note = Synthetic: >HCV.A24-cand-80-159
  source 1..80: mol_type = other DNA
gcctgttttacaccccctttcccccgtaacttagaagcttttgcaaaatcaaacaagttcaacaggtgagtggtacaacc

SEQ ID NO: 16157 - DNA, 80 bp, synthetic construct
  misc_feature 1..80: note = Synthetic: >HCV.A24-cand-160-239
  source 1..80: mol_type = other DNA
cagtactactacgaacaagcacttctgttaccccggtgagattgcataggctgtccccacggctaaaagcgattgatccg

SEQ ID NO: 16158 - DNA, 80 bp, synthetic construct
  misc_feature 1..80: note = Synthetic: >HCV.A8-cand-2440-2519
  source 1..80: mol_type = other DNA
ggaccccattgaagacataataaccagcactgtcacccgcacattgcaacaaatcagtgccccaacgcacagcacaacgg

SEQ ID NO: 16159 - DNA, 80 bp, synthetic construct
  misc_feature 1..80: note = Synthetic: >HCV.A8-cand-2500-2579
  source 1..80: mol_type = other DNA
cccaacgcacagcacaacggcagctaacaccacagtgagtaatcacaaaatagggacaggagatgttccagccctccaag

SEQ ID NO: 16160 - DNA, 80 bp, synthetic construct
  misc_feature 1..80: note = Synthetic: >HCV.A8-cand-2580-2659
  source 1..80: mol_type = other DNA
ctgcagaaacaggtgccacttctaatgcctcagatgagaacatgattgagacacggtgtgtgctaaaccgcaatggagtg

SEQ ID NO: 16161 - DNA, 80 bp, synthetic construct
  misc_feature 1..80: note = Synthetic: >HCV.A8-cand-2620-2699
  source 1..80: mol_type = other DNA
catgattgagacacggtgtgtgctaaaccgcaatggagtggtggaaactagtctggaccacttcttctcgagtgcagggc

SEQ ID NO: 16162 - DNA, 80 bp, synthetic construct
  misc_feature 1..80: note = Synthetic: >HCV.A8-cand-2780-2859
  source 1..80: mol_type = other DNA
cagctcaggaggaagttggagatgtttacatacatgagatttaatgctgagtttacattcgtgtccacactagctgacgg

SEQ ID NO: 16163 - DNA, 80 bp, synthetic construct
  misc_feature 1..80: note = Synthetic: >HCV.A8-cand-2810-2889
  source 1..80: mol_type = other DNA
tacatgagatttaatgctgagtttacattcgtgtccacactagctgacggcacaactcccagagtgatgttgcagtacat

SEQ ID NO: 16164 - DNA, 80 bp, synthetic construct
  misc_feature 1..80: note = Synthetic: >HCV.A8-cand-2890-2969
  source 1..80: mol_type = other DNA
gtatgtcccacctggtgcccccaagcctcaagagagagactccttccagtggcagacagccaccaacccctcagtgtttt

SEQ ID NO: 16165 - DNA, 80 bp, synthetic construct
  misc_feature 1..80: note = Synthetic: >HCV.A8-cand-2970-3049
  source 1..80: mol_type = other DNA
gcaaaatgagcgacccacccccacaggtctccgtccctttcatgtcaccagctagtgcataccagtggttttatgatgga

SEQ ID NO: 16166 - DNA, 80 bp, synthetic construct
  misc_feature 1..80: note = Synthetic: >HCV.A8-cand-3050-3129
  source 1..80: mol_type = other DNA
taccccacatttgatgatcgacctgccacctcaaaccacccgtacggccagtgccctaacaacatgatgggcacattcgc

SEQ ID NO: 16167 - DNA, 80 bp, synthetic construct
  misc_feature 1..80: note = Synthetic: >HCV.A8-cand-3130-3209
  source 1..80: mol_type = other DNA
agtgcggtttgtcagcaagacccctgcaatgcgagacctgcgtgttagggtgtatatgcgcctgaagcacgtgcgcgcct

SEQ ID NO: 16168 - DNA, 80 bp, synthetic construct
  misc_feature 1..80: note = Synthetic: >HCV.A8-cand-3210-3289
  source 1..80: mol_type = other DNA
gggtgccgaggcctatacgatcccaaccatacatactaaaaaactatccaaattatgatgggacaaagataacatcaaca

SEQ ID NO: 16169 - DNA, 80 bp, synthetic construct
  misc_feature 1..80: note = Synthetic: >HCV.A8-cand-3290-3369
  source 1..80: mol_type = other DNA
tccaaggacaggcaaagtattaaaaccactgggaaattcggacaacaatcaggagcaatatatgttggcaactacagagt

SEQ ID NO: 16170 - DNA, 80 bp, synthetic construct
  misc_feature 1..80: note = Synthetic: >HCV.A8-cand-3370-3449
  source 1..80: mol_type = other DNA
agtgaacagacaccttgccactcacaatgactgggcgaacttagtatgggaagacagctctagggatctccttgtgtctt

SEQ ID NO: 16171 - DNA, 80 bp, synthetic construct
  misc_feature 1..80: note = Synthetic: >HCV.A8-cand-3470-3549
  source 1..80: mol_type = other DNA
gacactattgcccgttgcaactgccaaactggagtgtactattgtaactcccgaaggaaacactaccccgttagcttctc

SEQ ID NO: 16172 - DNA, 80 bp, synthetic construct
  misc_feature 1..80: note = Synthetic: >HCV.A8-cand-3540-3619
  source 1..80: mol_type = other DNA
ttagcttctcaaagcccagtctaatctttgtggaagccagtgagtattatcctgctagatatcagtctcacctcatgctc

SEQ ID NO: 16173 - DNA, 80 bp, synthetic construct
  misc_feature 1..80: note = Synthetic: >HCV.A8-cand-3620-3699
  source 1..80: mol_type = other DNA
gcacaaggccattctgaaccaggagattgtggtggcatcctcaggtgccagcacggtgttgttggtatagtgtccaccgg

SEQ ID NO: 16174 - DNA, 80 bp, synthetic construct
  misc_feature 1..80: note = Synthetic: >HCV.A8-cand-5080-5159
  source 1..80: mol_type = other DNA
gatcagccttgaggaaaagccagctccagacgccattagtgatcttctcgctagcgtggatagcgaagaggtgcgtcagt

SEQ ID NO: 16175 - DNA, 80 bp, synthetic construct
  misc_feature 1..80: note = Synthetic: >HCV.A8-cand-5160-5239
  source 1..80: mol_type = other DNA
attgcagagaccaagggtggattattccagagactcccaccaatgttgagcggcacctcaacagagctgtgctagtcatg

SEQ ID NO: 16176 - DNA, 80 bp, synthetic construct
  misc_feature 1..80: note = Synthetic: >HCV.A8-cand-5240-5319
  source 1..80: mol_type = other DNA
caatccatcgccacagtagtagcggttgtctccttggtgtatgttatctacaaactctttgctggattccaaggtgcata

SEQ ID NO: 16177 - DNA, 80 bp, synthetic construct
  misc_feature 1..80: note = Synthetic: >HCV.A8-cand-5320-5399
  source 1..80: mol_type = other DNA
ctctggtgctcccaagcaagtgctcaagaaacctattctccgcacggcaacagtgcagggtccaagccttgattttgctc

SEQ ID NO: 16178 - DNA, 80 bp, synthetic construct
  misc_feature 1..80: note = Synthetic: >HCV.A8-cand-5400-5479
  source 1..80: mol_type = other DNA
tgtcactattgaggagaaacatcaggcaagtgcaaacagatcaagggcacttcaccatgttaggtgtcagggatcgctta

SEQ ID NO: 16179 - DNA, 80 bp, synthetic construct
  misc_feature 1..80: note = Synthetic: >HCV.A8-cand-5480-5559
  source 1..80: mol_type = other DNA
gctgtcctcccgcgacactctcaacctggaaagacaatctgggtggagcacaaactcgtgaacattctggatgcagtcga

SEQ ID NO: 16180 - DNA, 80 bp, synthetic construct
  misc_feature 1..80: note = Synthetic: >HCV.A8-cand-5580-5659
  source 1..80: mol_type = other DNA
tcaatttagagttgaccttaatcacccttgacaccaatgagaaattcagagacatcaccaagtttatcccagagagcatc

SEQ ID NO: 16181 - DNA, 80 bp, synthetic construct
  misc_feature 1..80: note = Synthetic: >HCV.A8-cand-5640-5719
  source 1..80: mol_type = other DNA
agtttatcccagagagcatcagcgctgctagcgatgccaccctagtgatcaacacagagcacatgccttcaatgtttgtg

SEQ ID NO: 16182 - DNA, 80 bp, synthetic construct
  misc_feature 1..80: note = Synthetic: >HCV.A8-cand-5720-5799
  source 1..80: mol_type = other DNA
ccagtaggtgatgtcgtgcagtacggctttttgaatcttagtggaaagccaactcaccgcactatgatgtacaactttcc

SEQ ID NO: 16183 - DNA, 80 bp, synthetic construct
  misc_feature 1..80: note = Synthetic: >HCV.A8-cand-5830-5909
  source 1..80: mol_type = other DNA
gacatcagttggaaaggtcattggtattcacataggtggtaatggtagacaaggtttttgtgcaggactcaagaggagct

SEQ ID NO: 16184 - DNA, 80 bp, synthetic construct
  misc_feature 1..80: note = Synthetic: >HCV.A8-cand-5960-6039
  source 1..80: mol_type = other DNA
acagggagactcaacatcaatgggccaactcgcacaaagctcgaacccagtgtgttccatgatgtctttgagggaaacaa

SEQ ID NO: 16185 - DNA, 80 bp, synthetic construct
  misc_feature 1..80: note = Synthetic: >HCV.A8-cand-6030-6109
  source 1..80: mol_type = other DNA
agggaaacaaggagccagcagtcctgcacagtaaagaccctcgcctcgaggtggatttcgagcaagccctgttctccaag

SEQ ID NO: 16186 - DNA, 80 bp, synthetic construct
  misc_feature 1..80: note = Synthetic: >HCV.A8-cand-6120-6199
  source 1..80: mol_type = other DNA
atacactacatgaacctgatgagtacatcagggaggcagctctccactatgcaaaccagttaaagcagttagacatagac

SEQ ID NO: 16187 - DNA, 80 bp, synthetic construct
  misc_feature 1..80: note = Synthetic: >HCV.A8-cand-6200-6279
  source 1..80: mol_type = other DNA
acttctcagatgagcatggaggaagcttgttatggcacagagaaccttgaggctattgacctccacactagcgcaggtta

SEQ ID NO: 16188 - DNA, 80 bp, synthetic construct
  misc_feature 1..80: note = Synthetic: >HCV.A8-cand-6280-6359
  source 1..80: mol_type = other DNA
cccctatagtgccctgggaataaagaaaagagatatcctagaccccatcactagggatgtgagcaagatgaaattttaca

SEQ ID NO: 16189 - DNA, 80 bp, synthetic construct
  misc_feature 1..80: note = Synthetic: >HCV.A8-cand-6350-6429
  source 1..80: mol_type = other DNA
aaattttacatggacaagtatggccttgacctcccttactccacctatgtcaaggatgagcttcgctcaatagataaaat

SEQ ID NO: 16190 - DNA, 80 bp, synthetic construct
  misc_feature 1..80: note = Synthetic: >HQ537689.1-cand-0-79
  source 1..80: mol_type = other DNA
actataatgccaagttttaaaaaagtagggtgtaaccgaaagcggttcaaccgaaaacggtgcatatataaagcaaccat

SEQ ID NO: 16191 - DNA, 80 bp, synthetic construct
  misc_feature 1..80: note = Synthetic: >HQ537689.1-cand-80-159
  source 1..80: mol_type = other DNA
tttgcagtaaggtactgcacgactatgtttcaagacactgaggaaaaaccacgaacattgcatgatttgtgccaagcatt

SEQ ID NO: 16192 - DNA, 80 bp, synthetic construct
  misc_feature 1..80: note = Synthetic: >HQ537689.1-cand-160-239
  source 1..80: mol_type = other DNA
ggagacaactatacacaacattgaactacagtgcgtggaatgcaaaaaacctttgcaacgatctgaggtatatgattttg

SEQ ID NO: 16193 - DNA, 80 bp, synthetic construct
  misc_feature 1..80: note = Synthetic: >HQ537689.1-cand-240-319
  source 1..80: mol_type = other DNA
catttgcagatttaacagttgtatatagagagggaaatccatttggaatatgtaaactgtgtttgcggttcttatctaaa

SEQ ID NO: 16194 - DNA, 80 bp, synthetic construct
  misc_feature 1..80: note = Synthetic: >HQ537689.1-cand-350-429
  source 1..80: mol_type = other DNA
gtatatggaaatacattagaacaaacagttaaaaaacctttaaatgaaatattaattaggtgtattatatgtcaaagacc

SEQ ID NO: 16195 - DNA, 80 bp, synthetic construct
  misc_feature 1..80: note = Synthetic: >HQ537689.1-cand-430-509
  source 1..80: mol_type = other DNA
tttgtgtcctcaagaaaaaaaacgacatgtggatttaaacaaacgatttcataatatttcgggtcgttgggcagggcgct

SEQ ID NO: 16196 - DNA, 80 bp, synthetic construct
  misc_feature 1..80: note = Synthetic: >HQ537689.1-cand-520-599
  source 1..80: mol_type = other DNA
ttggaggtcccgacgtagagaaactgcactgtgacgtgtaaaaacgccatgagaggacacaagccaacgttaaaggaata

SEQ ID NO: 16197 - DNA, 80 bp, synthetic construct
  misc_feature 1..80: note = Synthetic: >HQ537689.1-cand-600-679
  source 1..80: mol_type = other DNA
tgttttagatttatatcctgaaccaactgacctatactgctatgagcaattaagtgacagctcagatgaggatgaaggct

SEQ ID NO: 16198 - DNA, 80 bp, synthetic construct
  misc_feature 1..80: note = Synthetic: >HQ537689.1-cand-680-759
  source 1..80: mol_type = other DNA
tggaccggccagatggacaagcacaaccagccacagctgattactacattgtaacctgttgtcacacttgtaacaccaca

SEQ ID NO: 16199 - DNA, 80 bp, synthetic construct
  misc_feature 1..80: note = Synthetic: >HQ537689.1-cand-760-839
  source 1..80: mol_type = other DNA
gttcgtttatgtgtcaacagtacagcaagtgacctacgaaccatacagcaactacttatgggcacagtgaatattgtgtg

SEQ ID NO: 16200 - DNA, 80 bp, synthetic construct
  misc_feature 1..80: note = Synthetic: >HQ537689.1-cand-820-899
  source 1..80: mol_type = other DNA
ggcacagtgaatattgtgtgccctacctgtgcacaacaataaacatcatctacaatggccgatcctgaaggtacaaatgg

SEQ ID NO: 16201 - DNA, 80 bp, synthetic construct
  misc_feature 1..80: note = Synthetic: >HQ537689.1-cand-910-989
  source 1..80: mol_type = other DNA
gggtgtactggttggtttgaggtagaagcagtcatagagagaagaacaggagataatatttcagaagatgaggatgaaac

SEQ ID NO: 16202 - DNA, 80 bp, synthetic construct
  misc_feature 1..80: note = Synthetic: >HQ537689.1-cand-990-1069
  source 1..80: mol_type = other DNA
agcagatgacagtggcacggatttactagagtttatagatgattctatggaaaatagtatacaggcagacacagaggcag

SEQ ID NO: 16203 - DNA, 80 bp, synthetic construct
  misc_feature 1..80: note = Synthetic: >HQ537689.1-cand-1100-1179
  source 1..80: mol_type = other DNA
aggatgatttaaatgctgtgtgtgcactaaaacgaaagtttgccgcatgttcacaaagtgctgcggaggacgttgttgat

SEQ ID NO: 16204 - DNA, 80 bp, synthetic construct
  misc_feature 1..80: note = Synthetic: >HQ537689.1-cand-1150-1229
  source 1..80: mol_type = other DNA
tcacaaagtgctgcggaggacgttgttgatcgtgctgcaaacccgtgtagaacgtctattaataaaaataaagaatgcac

SEQ ID NO: 16205 - DNA, 80 bp, synthetic construct
  misc_feature 1..80: note = Synthetic: >HQ537689.1-cand-1230-1309
  source 1..80: mol_type = other DNA
atacagaaaacgaaaaatagatgagctagaagacagcggatatggcaatactgaagtggaaactcagcagatggtacaac

SEQ ID NO: 16206 - DNA, 80 bp, synthetic construct
  misc_feature 1..80: note = Synthetic: >KF436887.1-cand-7510-7589
  source 1..80: mol_type = other DNA
acgccttgtacttggcgcgccttaccggcgctagtcatacaacctattagtcatttgtactttaacaattgttggcacac

SEQ ID NO: 16207 - DNA, 80 bp, synthetic construct
  misc_feature 1..80: note = Synthetic: >KF436887.1-cand-7590-7669
  source 1..80: mol_type = other DNA
tgttttccgccctataataatttaactgcttataggcatgtattttttggcatattttatcttactaattgcatagttgg

SEQ ID NO: 16208 - DNA, 80 bp, synthetic construct
  misc_feature 1..80: note = Synthetic: >KF436887.1-cand-7670-7749
  source 1..80: mol_type = other DNA
caggtcaaatactatgtttttagtgccaagtttctatcctacttattaatcatcttactcatatgcaggtgtgctacaca

SEQ ID NO: 16209 - DNA, 80 bp, synthetic construct
  misc_feature 1..80: note = Synthetic: >KF436887.1-cand-7720-7799
  source 1..80: mol_type = other DNA
catcttactcatatgcaggtgtgctacacaaatgtgttacctaaccgatttgtgttctgcctatgcttgcaacatttttt

SEQ ID NO: 16210 - DNA, 80 bp, synthetic construct
  misc_feature 1..80: note = Synthetic: >KF913849.1-cand-0-79
  source 1..80: mol_type = other DNA
agtagactccttgagaagctactgctgcaaaagctggaatgagcaacctccaagacattcaagatagtatcacagtacac

SEQ ID NO: 16211 - DNA, 80 bp, synthetic construct
  misc_feature 1..80: note = Synthetic: >KF913849.1-cand-60-139
  source 1..80: mol_type = other DNA
aagatagtatcacagtacacgaacaacagctcgtgactgccaggcaaaaacttaaagatgccgagaaagcagtggaggtg

SEQ ID NO: 16212 - DNA, 80 bp, synthetic construct
  misc_feature 1..80: note = Synthetic: >KF913849.1-cand-130-209
  source 1..80: mol_type = other DNA
agtggaggtggacccagatgacgttaacaagagcacattacaaagcagacgggcagctgtgtctacattggagactaaac

SEQ ID NO: 16213 - DNA, 80 bp, synthetic construct
  misc_feature 1..80: note = Synthetic: >KF913849.1-cand-290-369
  source 1..80: mol_type = other DNA
gaacctgatgaccatctgaaggagaagtcttcactgcggtatggcaatgtcatcgatgtcaatccgattgacttagaaga

SEQ ID NO: 16214 - DNA, 80 bp, synthetic construct
  misc_feature 1..80: note = Synthetic: >KF913849.1-cand-380-459
  source 1..80: mol_type = other DNA
cagactgctgactggaaggcaataggtgcctatatcttaggctttgcaataccaataatacttaaggcactatatatgct

SEQ ID NO: 16215 - DNA, 80 bp, synthetic construct
  misc_feature 1..80: note = Synthetic: >KF913849.1-cand-500-579
  source 1..80: mol_type = other DNA
actaggattaggtttaaagatgattcatccttcgaagaagtcaacgggatccggaaaccaaaacatctctatgtttcaat

SEQ ID NO: 16216 - DNA, 80 bp, synthetic construct
  misc_feature 1..80: note = Synthetic: >KF913849.1-cand-560-639
  source 1..80: mol_type = other DNA
aaacatctctatgtttcaatgccaactgcacaatcaacaatgaaggctgaagagataacacctgggcgctttcgaacaat

SEQ ID NO: 16217 - DNA, 80 bp, synthetic construct
  misc_feature 1..80: note = Synthetic: >KF913849.1-cand-650-729
  source 1..80: mol_type = other DNA
cttttcccagctcaagtgaaagcaaggaatatcataagtcctgtcatgggtgtcattggattcagcttttttgtcaagga

SEQ ID NO: 16218 - DNA, 80 bp, synthetic construct
  misc_feature 1..80: note = Synthetic: >KF913849.1-cand-730-809
  source 1..80: mol_type = other DNA
ttggatggaaaggattgaaaacttcttagctgctgaatgcccattccttccaaaaccaaaagttgcatctgaagcattca

SEQ ID NO: 16219 - DNA, 80 bp, synthetic construct
  misc_feature 1..80: note = Synthetic: >KF913849.1-cand-810-889
  source 1..80: mol_type = other DNA
tggctacaaataaggcatacttcttgaataggcagcgccaagtgaatgattccaaggtccaagacatcatggatctgatt

SEQ ID NO: 16220 - DNA, 80 bp, synthetic construct
  misc_feature 1..80: note = Synthetic: >KF913849.1-cand-900-979
  source 1..80: mol_type = other DNA
agatcgaatctgcaacattgtttactgacatagcaacaccacattctgtatgggtatttgcatgtgcacctgataggtgc

SEQ ID NO: 16221 - DNA, 80 bp, synthetic construct
  misc_feature 1..80: note = Synthetic: >KF913849.1-cand-1010-1089
  source 1..80: mol_type = other DNA
ccagaattaggtgcattttttgctatacttcaggatatgcgcaataccatcatggcttcaaagtcagttggcactgctga

SEQ ID NO: 16222 - DNA, 80 bp, synthetic construct
  misc_feature 1..80: note = Synthetic: >KY225961.1-cand-450-529
  source 1..80: mol_type = other DNA
aaaaggcatgtggatttaaacaaaaggtttcataatatttcgggtcgttggacagggcgctgtgcagtgtgttggagacc

SEQ ID NO: 16223 - DNA, 80 bp, synthetic construct
  misc_feature 1..80: note = Synthetic: >KY225961.1-cand-530-609
  source 1..80: mol_type = other DNA
ccgacgtagacaaacacaagtgtaacctgtaacaacgccatgagaggaaacaacccaacgctaagagaatatattttaga

SEQ ID NO: 16224 - DNA, 80 bp, synthetic construct
  misc_feature 1..80: note = Synthetic: >KY225961.1-cand-610-689
  source 1..80: mol_type = other DNA
tttacatcctgaaccaactgacctattctgctatgagcaattatgtgacagctcagacgaggatgaaataggcttggacg

SEQ ID NO: 16225 - DNA, 80 bp, synthetic construct
  misc_feature 1..80: note = Synthetic: >KY225961.1-cand-690-769
  source 1..80: mol_type = other DNA
ggccagatggacaagcacaaccggccacagctaattactacattgtaacgtgttgttacacttgtggcaccacggttcgt

SEQ ID NO: 16226 - DNA, 80 bp, synthetic construct
  misc_feature 1..80: note = Synthetic: >KY225961.1-cand-770-849
  source 1..80: mol_type = other DNA
ttgtgtatcaacagtacagcaactgaagtacgaaccctacagcagctgcttatgggcacatgtactattgtgtgccccag

SEQ ID NO: 16227 - DNA, 80 bp, synthetic construct
  misc_feature 1..80: note = Synthetic: >KY225961.1-cand-820-899
  source 1..80: mol_type = other DNA
tatgggcacatgtactattgtgtgccccagctgtgcacagcaataaacaccatctgcaatggatgaccctgaaggtacaa

SEQ ID NO: 16228 - DNA, 80 bp, synthetic construct
  misc_feature 1..80: note = Synthetic: >KY225961.1-cand-930-1009
  source 1..80: mol_type = other DNA
ttgaggtagaagcggtaatagaacgaagaacaggagataatatttcagatgatgaggacgaaacagcagacgatagtggt

SEQ ID NO: 16229 - DNA, 80 bp, synthetic construct
  misc_feature 1..80: note = Synthetic: >KY225961.1-cand-1010-1089
  source 1..80: mol_type = other DNA
acagatttaatagagtttatagatgattcagtacaaagtactacacaggcagaagcagaggcagcccgagcgttgtttaa

SEQ ID NO: 16230 - DNA, 80 bp, synthetic construct
  misc_feature 1..80: note = Synthetic: >KY225961.1-cand-1110-1189
  source 1..80: mol_type = other DNA
atataaatgctgtgtgtgcactaaaacgaaagtttgcagcatgctcagaaagtgctgtagaggactgtgtggaccgggcc

SEQ ID NO: 16231 - DNA, 80 bp, synthetic construct
  misc_feature 1..80: note = Synthetic: >KY225961.1-cand-1170-1249
  source 1..80: mol_type = other DNA
aggactgtgtggaccgggccgcaaatgtgtgtgtatcgtggaaatataaaaataaagaatgcacacacagaaaacgaaaa

SEQ ID NO: 16232 - DNA, 80 bp, synthetic construct
  misc_feature 1..80: note = Synthetic: >KY225961.1-cand-1250-1329
  source 1..80: mol_type = other DNA
attattgagctagaagacagcggatatggcaatactgaagtggaaactgagcagatggcacaccaggtagaaagccaaaa

SEQ ID NO: 16233 - DNA, 80 bp, synthetic construct
  misc_feature 1..80: note = Synthetic: >KY225961.1-cand-1280-1359
  source 1..80: mol_type = other DNA
aatactgaagtggaaactgagcagatggcacaccaggtagaaagccaaaatggcgacgcagacttaaatgactctgagtc

SEQ ID NO: 16234 - DNA, 80 bp, synthetic construct
  misc_feature 1..80: note = Synthetic: >KY225961.1-cand-1410-1489
  source 1..80: mol_type = other DNA
gttgtactagtgttccattacaaaatattagtaatattttacataacagtaatactaaagcaacgctattatataaattt

SEQ ID NO: 16235 - DNA, 80 bp, synthetic construct
  misc_feature 1..80: note = Synthetic: >KY225961.1-cand-1490-1569
  source 1..80: mol_type = other DNA
aaagaagcttatggagtaagttttatggaattagttagaccatttaaaagtgataaaacaagctgtacagattggtgtat

SEQ ID NO: 16236 - DNA, 80 bp, synthetic construct
  misc_feature 1..80: note = Synthetic: >KY225961.1-cand-1570-1649
  source 1..80: mol_type = other DNA
aacagggtatggaataagtccctctgtagcagaaagtttaaaagtattaattaaacagcacagtatatatacacacctac

SEQ ID NO: 16237 - DNA, 80 bp, synthetic construct
  misc_feature 1..80: note = Synthetic: >KY225961.1-cand-1650-1729
  source 1..80: mol_type = other DNA
aatgtttaacgtgtgacagaggaattatattattattgttaattagatttaaatgtagcaaaaatagattaactgtggca

SEQ ID NO: 16238 - DNA, 80 bp, synthetic construct
  misc_feature 1..80: note = Synthetic: >KY225961.1-cand-3080-3159
  source 1..80: mol_type = other DNA
aaaaaaaggcataacagtaactgtacaatatgacaatgataaagcaaacacaatggattatacaaattggagtgaaatat

SEQ ID NO: 16239 - DNA, 80 bp, synthetic construct
  misc_feature 1..80: note = Synthetic: >KY225961.1-cand-3130-3209
  source 1..80: mol_type = other DNA
caatggattatacaaattggagtgaaatatatattattgaggaaacaacatgtactttggtagcaggagaagttgactat

SEQ ID NO: 16240 - DNA, 80 bp, synthetic construct
  misc_feature 1..80: note = Synthetic: >KY225961.1-cand-3240-3319
  source 1..80: mol_type = other DNA
aagacgtattttaaatattttaaagaggatgcaaaaaagtactctaaaacacaattatgggaggtacatgtgggtagtcg

SEQ ID NO: 16241 - DNA, 80 bp, synthetic construct
  misc_feature 1..80: note = Synthetic: >KY225961.1-cand-3320-3399
  source 1..80: mol_type = other DNA
ggtaattgtatgtcctacatctatacctagtgatcaaatatccactactgaaactgctgacccaaagaccaccgaggcca

SEQ ID NO: 16242 - DNA, 80 bp, synthetic construct
  misc_feature 1..80: note = Synthetic: >KY225961.1-cand-3420-3499
  source 1..80: mol_type = other DNA
gggacaaagcgacgacgactcgatttaccagactccagagacaacacccagtactccacaaagtatacagactgcgccgt

SEQ ID NO: 16243 - DNA, 80 bp, synthetic construct
  misc_feature 1..80: note = Synthetic: >KY225961.1-cand-3480-3559
  source 1..80: mol_type = other DNA
aagtatacagactgcgccgtggacagtagaccacgaggaggaggactacacagtacaactaactgcacatacaaagggcg

SEQ ID NO: 16244 - DNA, 80 bp, synthetic construct
  misc_feature 1..80: note = Synthetic: >KY225961.1-cand-3560-3639
  source 1..80: mol_type = other DNA
gaacgtttgtagttctaaagttgcacctatcttgcatttaaaaggtgacccaaatagtttaaaatgtttaagatatagat

SEQ ID NO: 16245 - DNA, 80 bp, synthetic construct
  misc_feature 1..80: note = Synthetic: >KY225961.1-cand-3640-3719
  source 1..80: mol_type = other DNA
taaaaccatttaaagacttatactgtaatatgtcatccacatggcattggaccagtgatgacaaaggtgacaaagtagga

SEQ ID NO: 16246 - DNA, 80 bp, synthetic construct
  misc_feature 1..80: note = Synthetic: >KY225961.1-cand-3720-3799
  source 1..80: mol_type = other DNA
attgttactgtaacatacacaacggagacacaacgacaaatgtttttaaacactgttaaaataccacccactgtgcaaat

SEQ ID NO: 16247 - DNA, 80 bp, synthetic construct
  misc_feature 1..80: note = Synthetic: >KY225961.1-cand-3800-3879
  source 1..80: mol_type = other DNA
aagtactggtgttatgtcattgtaattgtattgtacaattactgtatgtaaaccacaagccaatatgtgctgctaagtgt

SEQ ID NO: 16248 - DNA, 80 bp, synthetic construct
  misc_feature 1..80: note = Synthetic: >KY225961.1-cand-3880-3959
  source 1..80: mol_type = other DNA
atatacaatgatattacctatttttgttgtttgttttatactgttcttatgcttgtgcatttttttgcggccgttggtgc

SEQ ID NO: 16249 - DNA, 80 bp, synthetic construct
  misc_feature 1..80: note = Synthetic: >KY225961.1-cand-3940-4019
  source 1..80: mol_type = other DNA
ttttttgcggccgttggtgctatctatttctatatatgcttggttgctggtgttggtgttgctgctttgggtgtctgtgg

SEQ ID NO: 16250 - DNA, 80 bp, synthetic construct
  misc_feature 1..80: note = Synthetic: >KY225961.1-cand-4040-4119
  source 1..80: mol_type = other DNA
ttttgttacttaatatttttatatataccaatgatgtgtattaattttcatgcacaatacttaacccaacaagactaaat

SEQ ID NO: 16251 - DNA, 80 bp, synthetic construct
  misc_feature 1..80: note = Synthetic: >KY225961.1-cand-4120-4199
  source 1..80: mol_type = other DNA
gtatactggtgttgcacatggtggtatggtattgtaaatatttactgttgtgtgtgtttgtttttattatttttatacat

SEQ ID NO: 16252 - DNA, 80 bp, synthetic construct
  misc_feature 1..80: note = Synthetic: >KY225961.1-cand-4200-4279
  source 1..80: mol_type = other DNA
ttactaataaatacttttatatttttagcactgtcttattatgagacacaaacggtctacaaggcgcaagcgtgcatctg

SEQ ID NO: 16253 - DNA, 80 bp, synthetic construct
  misc_feature 1..80: note = Synthetic: >KY225961.1-cand-4280-4359
  source 1..80: mol_type = other DNA
ctacacaactttaccaaacatgcaaggcctcaggcacctgcccacctgatgttataccaaaagttgaaggaactactata

SEQ ID NO: 16254 - DNA, 80 bp, synthetic construct
  misc_feature 1..80: note = Synthetic: >NC_000883.2-cand-1550-1629
  source 1..80: mol_type = other DNA
attgataaaaaatgtggcaagaaaaatacactgtggttttatgggccgccaagtacaggaaaaacaaacttggcaatggc

SEQ ID NO: 16255 - DNA, 80 bp, synthetic construct
  misc_feature 1..80: note = Synthetic: >NC_000883.2-cand-1640-1719
  source 1..80: mol_type = other DNA
agtgttccagtatatggcatggttaactggaataatgaaaactttccatttaatgatgtagcaggaaaaagcttggtggt

SEQ ID NO: 16256 - DNA, 80 bp, synthetic construct
  misc_feature 1..80: note = Synthetic: >NC_000883.2-cand-1720-1799
  source 1..80: mol_type = other DNA
ctgggatgaaggtattattaagtctacaattgtagaagctgcaaaagccattttaggcgggcaacccaccagggtagatc

SEQ ID NO: 16257 - DNA, 80 bp, synthetic construct
  misc_feature 1..80: note = Synthetic: >NC_000883.2-cand-1800-1879
  source 1..80: mol_type = other DNA
aaaaaatgcgtggaagtgtagctgtgcctggagtacctgtggttataaccagcaatggtgacattacttttgttgtaagc

SEQ ID NO: 16258 - DNA, 80 bp, synthetic construct
  misc_feature 1..80: note = Synthetic: >NC_000883.2-cand-1880-1959
  source 1..80: mol_type = other DNA
gggaacactacaacaactgtacatgctaaagccttaaaagagcgcatggtaaagttaaactttactgtaagatgcagccc

SEQ ID NO: 16259 - DNA, 80 bp, synthetic construct
  misc_feature 1..80: note = Synthetic: >NC_000883.2-cand-1970-2049
  source 1..80: mol_type = other DNA
ttactaacagaggctgatgtacaacagtggcttacatggtgtaatgcacaaagctgggaccactatgaaaactgggcaat

SEQ ID NO: 16260 - DNA, 80 bp, synthetic construct
  misc_feature 1..80: note = Synthetic: >NC_000883.2-cand-2030-2109
  source 1..80: mol_type = other DNA
cactatgaaaactgggcaataaactacacttttgatttccctggaattaatgcagatgccctccacccagacctccaaac

SEQ ID NO: 16261 - DNA, 80 bp, synthetic construct
  misc_feature 1..80: note = Synthetic: >NC_000883.2-cand-2110-2189
  source 1..80: mol_type = other DNA
caccccaattgtcacagacaccagtatcagcagcagtggtggtgaaagctctgaagaactcagtgaaagcagctttttta

SEQ ID NO: 16262 - DNA, 80 bp, synthetic construct
  misc_feature 1..80: note = Synthetic: >NC_000883.2-cand-2190-2269
  source 1..80: mol_type = other DNA
acctcatcaccccaggcgcctggaacactgaaaccccgcgctctagtacgcccatccccgggaccagttcaggagaatca

SEQ ID NO: 16263 - DNA, 80 bp, synthetic construct
  misc_feature 1..80: note = Synthetic: >NC_000883.2-cand-2270-2349
  source 1..80: mol_type = other DNA
tttgtcggaagcccagtttcctccgaagttgtagctgcatcgtgggaagaagccttctacacacctttggcagaccagtt

SEQ ID NO: 16264 - DNA, 80 bp, synthetic construct
  misc_feature 1..80: note = Synthetic: >NC_000883.2-cand-2280-2359
  source 1..80: mol_type = other DNA
gcccagtttcctccgaagttgtagctgcatcgtgggaagaagccttctacacacctttggcagaccagtttcgtgaactg

SEQ ID NO: 16265 - DNA, 80 bp, synthetic construct
  misc_feature 1..80: note = Synthetic: >NC_000883.2-cand-2480-2559
  source 1..80: mol_type = other DNA
tggtataatggatggaaatttcgagaatttaccccagatttggtgcgatgtagctgccatgtgggagcttctaatccctt

SEQ ID NO: 16266 - DNA, 80 bp, synthetic construct
  misc_feature 1..80: note = Synthetic: >NC_000883.2-cand-2510-2589
  source 1..80: mol_type = other DNA
accccagatttggtgcgatgtagctgccatgtgggagcttctaatcccttttctgtgctaacctgcaaaaaatgtgctta

SEQ ID NO: 16267 - DNA, 80 bp, synthetic construct
  misc_feature 1..80: note = Synthetic: >NC_000883.2-cand-2590-2669
  source 1..80: mol_type = other DNA
cctgtctggattgcaaagctttgtagattatgagtaaagaaagtggcaaatggtgggaaagtgatgatgaatttgctaaa

SEQ ID NO: 16268 - DNA, 80 bp, synthetic construct
  misc_feature 1..80: note = Synthetic: >NC_000883.2-cand-2670-2749
  source 1..80: mol_type = other DNA
gctgtgtatcagcaatttgtggaattttatgaaaaggttactggaacagacttagagcttattcaaatattaaaagatca

SEQ ID NO: 16269 - DNA, 80 bp, synthetic construct
  misc_feature 1..80: note = Synthetic: >NC_000883.2-cand-2760-2839
  source 1..80: mol_type = other DNA
tctttagataatcccctagaaaacccatcctctctgtttgacttagttgctcgcattaaaaataaccttaaaaattctcc

SEQ ID NO: 16270 - DNA, 80 bp, synthetic construct
  misc_feature 1..80: note = Synthetic: >NC_001357.1-cand-1430-1509
  source 1..80: mol_type = other DNA
gggcaacaacagcagtgtagacggtacaagtgacaatagcaatatagaaaatgtaaatccacaatgtaccatagcacaat

SEQ ID NO: 16271 - DNA, 80 bp, synthetic construct
  misc_feature 1..80: note = Synthetic: >NC_001357.1-cand-1500-1579
  source 1..80: mol_type = other DNA
atagcacaattaaaagacttgttaaaagtaaacaataaacaaggagctatgttagcagtatttaaagacacatatgggct

SEQ ID NO: 16272 - DNA, 80 bp, synthetic construct
  misc_feature 1..80: note = Synthetic: >NC_001357.1-cand-1570-1649
  source 1..80: mol_type = other DNA
catatgggctatcatttacagatttagttagaaattttaaaagtgataaaaccacgtgtacagattgggttacagctata

SEQ ID NO: 16273 - DNA, 80 bp, synthetic construct
  misc_feature 1..80: note = Synthetic: >NC_001357.1-cand-1650-1729
  source 1..80: mol_type = other DNA
tttggagtaaacccaacaatagcagaaggatttaaaacactaatacagccatttatattatatgcccatattcaatgtct

SEQ ID NO: 16274 - DNA, 80 bp, synthetic construct
  misc_feature 1..80: note = Synthetic: >NC_001357.1-cand-1750-1829
  source 1..80: mol_type = other DNA
taatattagccctgttgcgttacaaatgtggtaagagtagactaacagttgctaaaggtttaagtacgttgttacacgta

SEQ ID NO: 16275 - DNA, 80 bp, synthetic construct
  misc_feature 1..80: note = Synthetic: >NC_001357.1-cand-1810-1889
  source 1..80: mol_type = other DNA
taagtacgttgttacacgtacctgaaacttgtatgttaattcaaccaccaaaattgcgaagtagtgttgcagcactatat

SEQ ID NO: 16276 - DNA, 80 bp, synthetic construct
  misc_feature 1..80: note = Synthetic: >NC_001357.1-cand-1890-1969
  source 1..80: mol_type = other DNA
tggtatagaacaggaatatcaaatattagtgaagtaatgggagacacacctgagtggatacaaagacttactattataca

SEQ ID NO: 16277 - DNA, 80 bp, synthetic construct
  misc_feature 1..80: note = Synthetic: >NC_001357.1-cand-1970-2049
  source 1..80: mol_type = other DNA
acatggaatagatgatagcaattttgatttgtcagaaatggtacaatgggcatttgataatgagctgacagatgaaagcg

SEQ ID NO: 16278 - DNA, 80 bp, synthetic construct
  misc_feature 1..80: note = Synthetic: >NC_001357.1-cand-2050-2129
  source 1..80: mol_type = other DNA
atatggcatttgaatatgccttattagcagacagcaacagcaatgcagctgcctttttaaaaagcaattgccaagctaaa

SEQ ID NO: 16279 - DNA, 80 bp, synthetic construct
  misc_feature 1..80: note = Synthetic: >NC_001357.1-cand-2130-2209
  source 1..80: mol_type = other DNA
tatttaaaagattgtgccacaatgtgcaaacattataggcgagcccaaaaacgacaaatgaatatgtcacagtggatacg

SEQ ID NO: 16280 - DNA, 80 bp, synthetic construct
  misc_feature 1..80: note = Synthetic: >NC_001357.1-cand-2150-2229
  source 1..80: mol_type = other DNA
aatgtgcaaacattataggcgagcccaaaaacgacaaatgaatatgtcacagtggatacgatttagatgttcaaaaatag

SEQ ID NO: 16281 - DNA, 80 bp, synthetic construct
  misc_feature 1..80: note = Synthetic: >NC_001357.1-cand-2260-2339
  source 1..80: mol_type = other DNA
aattcctgcgataccaacaaatagagtttataacatttttaggagccttaaaatcatttttaaaaggaacccccaaaaaa

SEQ ID NO: 16282 - DNA, 80 bp, synthetic construct
  misc_feature 1..80: note = Synthetic: >NC_001357.1-cand-2340-2419
  source 1..80: mol_type = other DNA
aattgtttagtattttgtggaccagcaaatacaggaaaatcatattttggaatgagttttatacactttatacaaggagc

SEQ ID NO: 16283 - DNA, 80 bp, synthetic construct
  misc_feature 1..80: note = Synthetic: >NC_001357.1-cand-2420-2499
  source 1..80: mol_type = other DNA
agtaatatcatttgtgaattccactagtcatttttggttggaaccgttaacagatactaaggtggccatgttagatgatg

SEQ ID NO: 16284 - DNA, 80 bp, synthetic construct
  misc_feature 1..80: note = Synthetic: >NC_001357.1-cand-2500-2579
  source 1..80: mol_type = other DNA
caacgaccacgtgttggacatactttgatacctatatgagaaatgcgttagatggcaatccaataagtattgatagaaag

SEQ ID NO: 16285 - DNA, 80 bp, synthetic construct
  misc_feature 1..80: note = Synthetic: >NC_001357.1-cand-2580-2659
  source 1..80: mol_type = other DNA
cacaaaccattaatacaactaaaatgtcctccaatactactaaccacaaatatacatccagcaaaggataatagatggcc

SEQ ID NO: 16286 - DNA, 80 bp, synthetic construct
  misc_feature 1..80: note = Synthetic: >NC_001545.2-cand-2570-2649
  source 1..80: mol_type = other DNA
ggccggctctggcgtgtgcggtgccatctttgccaacgccacggcggccctcgctgcaaactgccggcgcctcgccccat

SEQ ID NO: 16287 - DNA, 80 bp, synthetic construct
  misc_feature 1..80: note = Synthetic: >NC_001545.2-cand-2640-2719
  source 1..80: mol_type = other DNA
ctcgccccatgccccaccggcgaggcagtggcgacacccggccacggctgcgggtacacccacatcatccacgccgtcgc

SEQ ID NO: 16288 - DNA, 80 bp, synthetic construct
  misc_feature 1..80: note = Synthetic: >NC_001545.2-cand-2720-2799
  source 1..80: mol_type = other DNA
gccgcggcgtcctcgggaccccgccgccctcgaggagggcgaagcgctgctcgagcgcgcctaccgcagcatcgtcgcgc

SEQ ID NO: 16289 - DNA, 80 bp, synthetic construct
  misc_feature 1..80: note = Synthetic: >NC_001545.2-cand-2800-2879
  source 1..80: mol_type = other DNA
tagccgccgcgcgtcggtgggcgtgtgtcgcgtgccccctcctcggcgctggcgtctacggctggtctgctgcggagtcc

SEQ ID NO: 16290 - DNA, 80 bp, synthetic construct
  misc_feature 1..80: note = Synthetic: >NC_001545.2-cand-2880-2959
  source 1..80: mol_type = other DNA
ctccgagccgcgctcgcggctacgcgcaccgagcccgtcgagcgcgtgagcctgcacatctgccaccccgaccgcgccac

SEQ ID NO: 16291 - DNA, 80 bp, synthetic construct
  misc_feature 1..80: note = Synthetic: >NC_001545.2-cand-3000-3079
  source 1..80: mol_type = other DNA
gccaggcgcgtcagtcctcctccgaccgagcccctcgcatcttgccccgccggtgacccgggccgaccggctcagcgcag

SEQ ID NO: 16292 - DNA, 80 bp, synthetic construct
  misc_feature 1..80: note = Synthetic: >NC_001545.2-cand-3020-3099
  source 1..80: mol_type = other DNA
tccgaccgagcccctcgcatcttgccccgccggtgacccgggccgaccggctcagcgcagcgcgtcgcccccagcgaccc

SEQ ID NO: 16293 - DNA, 80 bp, synthetic construct
  misc_feature 1..80: note = Synthetic: >NC_001545.2-cand-3150-3229
  source 1..80: mol_type = other DNA
ctctgccggtacacgcgcgtcaccaatgaccgcgcctatgtcaacctgtggctcgagcgcgaccgcggcgccaccagctg

SEQ ID NO: 16294 - DNA, 80 bp, synthetic construct
  misc_feature 1..80: note = Synthetic: >NC_001545.2-cand-3200-3279
  source 1..80: mol_type = other DNA
gctcgagcgcgaccgcggcgccaccagctgggccatgcgcattcccgaggtggttgtctacgggccggagcacctcgcca

SEQ ID NO: 16295 - DNA, 80 bp, synthetic construct
  misc_feature 1..80: note = Synthetic: >NC_001545.2-cand-3280-3359
  source 1..80: mol_type = other DNA
cgcattttccattaaaccactacagtgtgctcaagcccgcggaggtcaggcccccgcgaggcatgtgcgggagtgacatg

SEQ ID NO: 16296 - DNA, 80 bp, synthetic construct
  misc_feature 1..80: note = Synthetic: >NC_001545.2-cand-3360-3439
  source 1..80: mol_type = other DNA
tggcgctgccgcggctggcatggcatgccgcaggtgcggtgcaccccctccaacgctcacgccgccctgtgccgcacagg

SEQ ID NO: 16297 - DNA, 80 bp, synthetic construct
  misc_feature 1..80: note = Synthetic: >NC_001545.2-cand-3440-3519
  source 1..80: mol_type = other DNA
cgtgccccctcgggcgagcacgcgaggcggcgagctagacccaaacacctgctggctccgcgccgccgccaacgttgcgc

SEQ ID NO: 16298 - DNA, 80 bp, synthetic construct
  misc_feature 1..80: note = Synthetic: >NC_001545.2-cand-3520-3599
  source 1..80: mol_type = other DNA
aggctgcgcgcgcctgcggcgcctacacgagtgccgggtgccccaagtgcgcctacggccgcgccctgagcgaagcccgc

SEQ ID NO: 16299 - DNA, 80 bp, synthetic construct
  misc_feature 1..80: note = Synthetic: >NC_001545.2-cand-3600-3679
  source 1..80: mol_type = other DNA
actcatgaggacttcgccgcgctgagccagcggtggagcgcgagccacgccgatgcctcccctgacggcaccggagatcc

SEQ ID NO: 16300 - DNA, 80 bp, synthetic construct
  misc_feature 1..80: note = Synthetic: >NC_001545.2-cand-3680-3759
  source 1..80: mol_type = other DNA
cctcgaccccctgatggagaccgtgggatgcgcctgttcgcgcgtgtgggtcggctccgagcatgaggccccgcccgacc

SEQ ID NO: 16301 - DNA, 80 bp, synthetic construct
  misc_feature 1..80: note = Synthetic: >NC_001545.2-cand-3720-3799
  source 1..80: mol_type = other DNA
cgcgtgtgggtcggctccgagcatgaggccccgcccgaccacctcctggtgtcccttcaccgtgccccaaatggtccgtg

SEQ ID NO: 16302 - DNA, 80 bp, synthetic construct
  misc_feature 1..80: note = Synthetic: >NC_001611.1-cand-127050-127129
  source 1..80: mol_type = other DNA
tttgaaattctatctctaagacgtctcatttctatctgtttcggtattggtcttattattatgtctacagtcgttcaact

SEQ ID NO: 16303 - DNA, 80 bp, synthetic construct
  misc_feature 1..80: note = Synthetic: >NC_001611.1-cand-127130-127209
  source 1..80: mol_type = other DNA
gtctttcaagatctaatattctagattggagtctactaatctctgtaagatttcctcctccgctctcaatgcagtcggtc

SEQ ID NO: 16304 - DNA, 80 bp, synthetic construct
  misc_feature 1..80: note = Synthetic: >NC_001611.1-cand-127210-127289
  source 1..80: mol_type = other DNA
aacttattctctagttcgctaatacgcgaacgcagtgcatcaacttcttgcgtgtctttctggttgtgtgtacattcatc

SEQ ID NO: 16305 - DNA, 80 bp, synthetic construct
  misc_feature 1..80: note = Synthetic: >NC_001611.1-cand-127280-127359
  source 1..80: mol_type = other DNA
tacattcatcgagtctagattcgagatctctaacgcgtcgtcgttcttcctcaagttctccgcgtactgcagaaagcgtg

SEQ ID NO: 16306 - DNA, 80 bp, synthetic construct
  misc_feature 1..80: note = Synthetic: >NC_001611.1-cand-127440-127519
  source 1..80: mol_type = other DNA
cttatcaagttcctccttgtatttgtcgcattccttgatatccctacgaagtttggacagttcccattcgacattacgac

SEQ ID NO: 16307 - DNA, 80 bp, synthetic construct
  misc_feature 1..80: note = Synthetic: >NC_001611.1-cand-127520-127599
  source 1..80: mol_type = other DNA
gtttatcgatttcagctcggagatcgtcatcgcgttgttttagccacatacgactaagttcaagtcttccttgacaagat

SEQ ID NO: 16308 - DNA, 80 bp, synthetic construct
  misc_feature 1..80: note = Synthetic: >NC_001611.1-cand-127680-127759
  source 1..80: mol_type = other DNA
tttcaattctcggatagtcttcttatcaatttctgatgaatctgaaccatcatctgtcccattttgaatatccctaagtt

SEQ ID NO: 16309 - DNA, 80 bp, synthetic construct
  misc_feature 1..80: note = Synthetic: >NC_001611.1-cand-127840-127919
  source 1..80: mol_type = other DNA
ttatcactaagttctgcattcaattcggtgagttttctcttggcttcttccaactctgttttaaactctccaccatttcc

SEQ ID NO: 16310 - DNA, 80 bp, synthetic construct
  misc_feature 1..80: note = Synthetic: >NC_001611.1-cand-127990-128069
  source 1..80: mol_type = other DNA
atagccgttcttgtaattgtgggaacataattaggatcttctaatggattgtatgacttaatagcatcatctttatcatt

SEQ ID NO: 16311 - DNA, 80 bp, synthetic construct
  misc_feature 1..80: note = Synthetic: >NC_001611.1-cand-128160-128239
  source 1..80: mol_type = other DNA
aggcaaatgcttgtcgtacgcgggcacttcctcatccattaagtatttataatcgggttctgcttcagaatattcttttc

SEQ ID NO: 16312 - DNA, 80 bp, synthetic construct
  misc_feature 1..80: note = Synthetic: >NC_001611.1-cand-128400-128479
  source 1..80: mol_type = other DNA
aatagaatcagatttagtattaaacagatccttaacctttttagtaaatgcatatatatatattagatctccagatttca

SEQ ID NO: 16313 - DNA, 80 bp, synthetic construct
  misc_feature 1..80: note = Synthetic: >NC_001611.1-cand-128480-128559
  source 1..80: mol_type = other DNA
taatatgatcacatgccttaaatgtcagtgcttccataatatagtctggaacactaatgggtgacgaaaaagataccgca

SEQ ID NO: 16314 - DNA, 80 bp, synthetic construct
  misc_feature 1..80: note = Synthetic: >NC_001611.1-cand-128560-128639
  source 1..80: mol_type = other DNA
ccatatgctacgttaataaataaatctgaaccactaagtagataatgattaatattaaggaagaggaaatattcagtata

SEQ ID NO: 16315 - DNA, 80 bp, synthetic construct
  misc_feature 1..80: note = Synthetic: >NC_001611.1-cand-128640-128719
  source 1..80: mol_type = other DNA
tagatatgccttagcatcatatcttgtactaaacacactaaacagtttattgatgtgatcaatttccaacaaaacaatta

SEQ ID NO: 16316 - DNA, 80 bp, synthetic construct
  misc_feature 1..80: note = Synthetic: >NC_001611.1-cand-128800-128879
  source 1..80: mol_type = other DNA
agaagagcaaatatctcatctgacttaatgagacgtagttcagcagcagcataagtcataactgtaaatagaacatactt

SEQ ID NO: 16317 - DNA, 80 bp, synthetic construct
  misc_feature 1..80: note = Synthetic: >NC_001611.1-cand-128880-128959
  source 1..80: mol_type = other DNA
tcctgtagtattgattctagactccgcatcaacaccattattaaaaatagttttatatacatctttaatctgctcaccgt

SEQ ID NO: 16318 - DNA, 80 bp, synthetic construct
  misc_feature 1..80: note = Synthetic: >NC_001699.1-cand-210-289
  source 1..80: mol_type = other DNA
gaaagcagccaagggaacatgttttgcgagccagagctgttttggcttgtcaccagctggccatggttcttcgccagctg

SEQ ID NO: 16319 - DNA, 80 bp, synthetic construct
  misc_feature 1..80: note = Synthetic: >NC_001699.1-cand-260-339
  source 1..80: mol_type = other DNA
caccagctggccatggttcttcgccagctgtcacgtaaggcttctgtgaaagttagtaaaacctggagtggaactaaaaa

SEQ ID NO: 16320 - DNA, 80 bp, synthetic construct
  misc_feature 1..80: note = Synthetic: >NC_001699.1-cand-340-419
  source 1..80: mol_type = other DNA
aagagctcaaaggattttaatttttttgttagaatttttgctggacttttgcacaggtgaagacagtgtagacgggaaaa

SEQ ID NO: 16321 - DNA, 80 bp, synthetic construct
  misc_feature 1..80: note = Synthetic: >NC_001699.1-cand-420-499
  source 1..80: mol_type = other DNA
aaagacagagacacagtggtttgactgagcagacatacagtgctttgcctgaaccaaaagctacataggtaagtaatgtt

SEQ ID NO: 16322 - DNA, 80 bp, synthetic construct
  misc_feature 1..80: note = Synthetic: >NC_001699.1-cand-460-539
  source 1..80: mol_type = other DNA
tgctttgcctgaaccaaaagctacataggtaagtaatgtttttttttgtgttttcaggttcatgggtgccgcacttgcac

SEQ ID NO: 16323 - DNA, 80 bp, synthetic construct
  misc_feature 1..80: note = Synthetic: >NC_001699.1-cand-580-659
  source 1..80: mol_type = other DNA
tgccacaggattttcagtagctgaaattgctgctggagaggctgctgctactatagaagttgaaattgcatcccttgcta

SEQ ID NO: 16324 - DNA, 80 bp, synthetic construct
  misc_feature 1..80: note = Synthetic: >NC_001699.1-cand-590-669
  source 1..80: mol_type = other DNA
ttttcagtagctgaaattgctgctggagaggctgctgctactatagaagttgaaattgcatcccttgctactgtagaggg

SEQ ID NO: 16325 - DNA, 80 bp, synthetic construct
  misc_feature 1..80: note = Synthetic: >NC_001699.1-cand-750-829
  source 1..80: mol_type = other DNA
ctgtagctgggtttgctgcattggttcaaactgtaactggtggtagtgctattgctcagttgggatatagattttttgct

SEQ ID NO: 16326 - DNA, 80 bp, synthetic construct
  misc_feature 1..80: note = Synthetic: >NC_001699.1-cand-830-909
  source 1..80: mol_type = other DNA
gactgggatcataaagtttcaacagttgggctttttcagcagccagctatggctttacaattatttaatccagaagacta

SEQ ID NO: 16327 - DNA, 80 bp, synthetic construct
  misc_feature 1..80: note = Synthetic: >NC_001699.1-cand-900-979
  source 1..80: mol_type = other DNA
cagaagactactatgatattttatttcctggagtgaatgcctttgttaacaatattcactatttagatcctagacattgg

SEQ ID NO: 16328 - DNA, 80 bp, synthetic construct
  misc_feature 1..80: note = Synthetic: >NC_001699.1-cand-990-1069
  source 1..80: mol_type = other DNA
tgttctccacaatctcccaggctttttggaatcttgttagagatgatttgccagccttaacctctcaggaaattcagaga

SEQ ID NO: 16329 - DNA, 80 bp, synthetic construct
  misc_feature 1..80: note = Synthetic: >NC_001699.1-cand-1070-1149
  source 1..80: mol_type = other DNA
agaacccaaaaactatttgttgaaagtttagcaaggtttttggaagaaactacttgggcaatagttaattcaccagctaa

SEQ ID NO: 16330 - DNA, 80 bp, synthetic construct
  misc_feature 1..80: note = Synthetic: >NC_001699.1-cand-1150-1229
  source 1..80: mol_type = other DNA
cttatataattatatttcagactattattctagattgtctccagttaggccctctatggtaaggcaagttgcccaaaggg

SEQ ID NO: 16331 - DNA, 80 bp, synthetic construct
  misc_feature 1..80: note = Synthetic: >NC_001699.1-cand-1230-1309
  source 1..80: mol_type = other DNA
agggaacctatatttcttttggccactcatacacccaaagtatagatgatgcagacagcattcaagaagttacccaaagg

SEQ ID NO: 16332 - DNA, 80 bp, synthetic construct
  misc_feature 1..80: note = Synthetic: >NC_001699.1-cand-1310-1389
  source 1..80: mol_type = other DNA
ctagatttaaaaaccccaaatgtgcaatctggtgaatttatagaaagaagtattgcaccaggaggtgcaaatcaaagatc

SEQ ID NO: 16333 - DNA, 80 bp, synthetic construct
  misc_feature 1..80: note = Synthetic: >NC_001699.1-cand-1470-1549
  source 1..80: mol_type = other DNA
ccaacaaaaagaaaaggagaaaggaaggaccccgtgcaagttccaaaacttcttataagaggaggagtagaagttctaga

SEQ ID NO: 16334 - DNA, 80 bp, synthetic construct
  misc_feature 1..80: note = Synthetic: >NC_001906.3-cand-12000-12079
  source 1..80: mol_type = other DNA
agataataacatggaaattgtaatgaacccaaatcttgtctgcatttacaaaaatgataaggatggaaagaggtgttact

SEQ ID NO: 16335 - DNA, 80 bp, synthetic construct
  misc_feature 1..80: note = Synthetic: >NC_001906.3-cand-12080-12159
  source 1..80: mol_type = other DNA
accttacaccagaaattgttctaatgtgttgtgatgtcttggaaggccggatgatgatcgagacttcgataaaatctgat

SEQ ID NO: 16336 - DNA, 80 bp, synthetic construct
  misc_feature 1..80: note = Synthetic: >NC_001906.3-cand-12160-12239
  source 1..80: mol_type = other DNA
atcaaataccaatctttaattaccagatccaacgctttgtggacattcattgattcactcttcccgattatgggtaatag

SEQ ID NO: 16337 - DNA, 80 bp, synthetic construct
  misc_feature 1..80: note = Synthetic: >NC_001906.3-cand-12240-12319
  source 1..80: mol_type = other DNA
gatatacaatatagtatctatgatagagcctttagtcttggcacttttacagttgaaagatgaggcgcgcatcctaagag

SEQ ID NO: 16338 - DNA, 80 bp, synthetic construct
  misc_feature 1..80: note = Synthetic: >NC_001906.3-cand-12320-12399
  source 1..80: mol_type = other DNA
gggcatttctacatcattgcattaaagagatccaccaagagttgattggatgtgggtttactgatcaaaaaacaagatct

SEQ ID NO: 16339 - DNA, 80 bp, synthetic construct
  misc_feature 1..80: note = Synthetic: >NC_001906.3-cand-12400-12479
  source 1..80: mol_type = other DNA
atctttatcgatgatcttctatcagtaatgaatattgataatatccatctgttagctgagttcttttctttcttccgaac

SEQ ID NO: 16340 - DNA, 80 bp, synthetic construct
  misc_feature 1..80: note = Synthetic: >NC_001906.3-cand-12480-12559
  source 1..80: mol_type = other DNA
ctttggtcatccaattctcgaagccaaaaccgcagcagacaaagttagagagcatatgctagcagataaggtccttgaat

SEQ ID NO: 16341 - DNA, 80 bp, synthetic construct
  misc_feature 1..80: note = Synthetic: >NC_001906.3-cand-12550-12629
  source 1..80: mol_type = other DNA
gtccttgaatacgggccaatcatgaaagcacacgcagtcttttgtggtacaattataaatgggtaccgtgacaggcatcg

SEQ ID NO: 16342 - DNA, 80 bp, synthetic construct
  misc_feature 1..80: note = Synthetic: >NC_001906.3-cand-12630-12709
  source 1..80: mol_type = other DNA
gggagcttggcctccactttatctgccatcgcatgcatcgaaacacataataagactcaagaattctggtgaatcattaa

SEQ ID NO: 16343 - DNA, 80 bp, synthetic construct
  misc_feature 1..80: note = Synthetic: >NC_001906.3-cand-12710-12789
  source 1..80: mol_type = other DNA
cagttgatgattgtgttaagaactgggagtcattttgtgggattcaatttgattgctttatggagttaaaattagacagt

SEQ ID NO: 16344 - DNA, 80 bp, synthetic construct
  misc_feature 1..80: note = Synthetic: >NC_001906.3-cand-12790-12869
  source 1..80: mol_type = other DNA
gatttgagcatgtatatgaaagataaagcactatccccaataaaggaggaatgggatagtgtctatccacgtgaagtact

SEQ ID NO: 16345 - DNA, 80 bp, synthetic construct
  misc_feature 1..80: note = Synthetic: >NC_001906.3-cand-12870-12949
  source 1..80: mol_type = other DNA
taattacacgccacccagatctaccgaaccaagaagattggtggatgtatttgtcaatgatgagaatttcgatccttata

SEQ ID NO: 16346 - DNA, 80 bp, synthetic construct
  misc_feature 1..80: note = Synthetic: >NC_001906.3-cand-12950-13029
  source 1..80: mol_type = other DNA
atatgttagagtatgtccttacaggagattatttaactgatgaacaattcaatgtttcttatagtctaaaggagaaagaa

SEQ ID NO: 16347 - DNA, 80 bp, synthetic construct
  misc_feature 1..80: note = Synthetic: >NC_001906.3-cand-13030-13109
  source 1..80: mol_type = other DNA
actaaacaagcaggaagattatttgctaaaatgacatataagatgcgtgcctgtcaggtaattgctgaagctttgattgc

SEQ ID NO: 16348 - DNA, 80 bp, synthetic construct
  misc_feature 1..80: note = Synthetic: >NC_001906.3-cand-13110-13189
  source 1..80: mol_type = other DNA
atcgggagtgggcaagtattttaaagagaacgggatggttaaagatgaacatgagctactcaaaactttatttcaactgt

SEQ ID NO: 16349 - DNA, 80 bp, synthetic construct
  misc_feature 1..80: note = Synthetic: >NC_001906.3-cand-13190-13269
  source 1..80: mol_type = other DNA
caatctcttcagtacctcgaggcaatagtcagggcagagattccgaattttccaataacacagagaaaagtctcatatca

SEQ ID NO: 16350 - DNA, 80 bp, synthetic construct
  misc_feature 1..80: note = Synthetic: >NC_002058.3-cand-4240-4319
  source 1..80: mol_type = other DNA
gagataagttggaatttgtaacaaaacttagacaactagaaatgctggaaaaccaaatctcaactatacaccaatcatgc

SEQ ID NO: 16351 - DNA, 80 bp, synthetic construct
  misc_feature 1..80: note = Synthetic: >NC_002058.3-cand-4320-4399
  source 1..80: mol_type = other DNA
cctagtcaggaacaccaggaaattctattcaataatgtcagatggttatccatccagtctaagaggtttgcccctcttta

SEQ ID NO: 16352 - DNA, 80 bp, synthetic construct
  misc_feature 1..80: note = Synthetic: >NC_002058.3-cand-4400-4479
  source 1..80: mol_type = other DNA
cgcagtggaagccaaaagaatacagaaactagagcatactattaacaactacatacagttcaagagcaaacaccgtattg

SEQ ID NO: 16353 - DNA, 80 bp, synthetic construct
  misc_feature 1..80: note = Synthetic: >NC_002058.3-cand-4480-4559
  source 1..80: mol_type = other DNA
aaccagtatgtttgctagtacatggcagccccggaacaggtaaatctgtagcaaccaacctgattgctagagccatagct

SEQ ID NO: 16354 - DNA, 80 bp, synthetic construct
  misc_feature 1..80: note = Synthetic: >NC_002058.3-cand-4560-4639
  source 1..80: mol_type = other DNA
gaaagagaaaacacgtccacgtactcgctacccccggatccatcacacttcgacggatacaaacaacagggagtggtgat

SEQ ID NO: 16355 - DNA, 80 bp, synthetic construct
  misc_feature 1..80: note = Synthetic: >NC_002058.3-cand-4640-4719
  source 1..80: mol_type = other DNA
tatggacgacctgaatcaaaacccagatggtgcggacatgaagctgttctgtcagatggtatcaacagtggagtttatac

SEQ ID NO: 16356 - DNA, 80 bp, synthetic construct
  misc_feature 1..80: note = Synthetic: >NC_002058.3-cand-4720-4799
  source 1..80: mol_type = other DNA
cacccatggcatccctggaggagaaaggaatcctgtttacttcaaattacgttctagcatccacaaactcaagcagaatt

SEQ ID NO: 16357 - DNA, 80 bp, synthetic construct
  misc_feature 1..80: note = Synthetic: >NC_002058.3-cand-4800-4879
  source 1..80: mol_type = other DNA
tccccccccactgtggcacacagtgatgcattagccaggcgctttgcgttcgacatggacattcaggtcatgaatgagta

SEQ ID NO: 16358 - DNA, 80 bp, synthetic construct
  misc_feature 1..80: note = Synthetic: >NC_002058.3-cand-4880-4959
  source 1..80: mol_type = other DNA
ttctagagatgggaaattgaacatggccatggctactgaaatgtgtaagaactgtcaccaaccagcaaactttaagagat

SEQ ID NO: 16359 - DNA, 80 bp, synthetic construct
  misc_feature 1..80: note = Synthetic: >NC_002058.3-cand-4960-5039
  source 1..80: mol_type = other DNA
gctgtcctttagtgtgtggtaaggcaattcaattaatggacaaatcttccagagttagatacagtattgaccagatcact

SEQ ID NO: 16360 - DNA, 80 bp, synthetic construct
  misc_feature 1..80: note = Synthetic: >NC_002058.3-cand-5120-5199
  source 1..80: mol_type = other DNA
taaagacttgaaaattgacatcaagacgagtccccctcctgaatgtatcaatgacttgctccaagcagttgactcccagg

SEQ ID NO: 16361 - DNA, 80 bp, synthetic construct
  misc_feature 1..80: note = Synthetic: >NC_002058.3-cand-5200-5279
  source 1..80: mol_type = other DNA
aggtgagagattactgtgagaagaagggttggatagtcaacatcaccagccaggttcaaacagaaaggaacatcaacagg

SEQ ID NO: 16362 - DNA, 80 bp, synthetic construct
  misc_feature 1..80: note = Synthetic: >NC_002058.3-cand-5280-5359
  source 1..80: mol_type = other DNA
gcaatgacaattctacaagcggtgacaaccttcgccgcagtggctggagttgtctatgtcatgtataaactgtttgctgg

SEQ ID NO: 16363 - DNA, 80 bp, synthetic construct
  misc_feature 1..80: note = Synthetic: >NC_002058.3-cand-5360-5439
  source 1..80: mol_type = other DNA
acaccagggagcatacactggtttaccaaacaaaaaacccaacgtgcccaccattcggacagcaaaggtacaaggaccag

SEQ ID NO: 16364 - DNA, 80 bp, synthetic construct
  misc_feature 1..80: note = Synthetic: >NC_002058.3-cand-5440-5519
  source 1..80: mol_type = other DNA
ggttcgattacgcagtggctatggctaaaagaaacattgttacagcaactactagcaagggagagttcactatgttagga

SEQ ID NO: 16365 - DNA, 80 bp, synthetic construct
  misc_feature 1..80: note = Synthetic: >NC_002058.3-cand-5520-5599
  source 1..80: mol_type = other DNA
gtccacgacaacgtggctattttaccaacccacgcttcacctggtgaaagcattgtgatcgatggcaaagaagtggagat

SEQ ID NO: 16366 - DNA, 80 bp, synthetic construct
  misc_feature 1..80: note = Synthetic: >NC_002205.1-cand-1350-1429
  source 1..80: mol_type = other DNA
gatatgaggaatcacctaaagcaagtgagctacatgggataaatgaattaatgaatgcatctgactatacattgaaaggg

SEQ ID NO: 16367 - DNA, 80 bp, synthetic construct
  misc_feature 1..80: note = Synthetic: >NC_002205.1-cand-1430-1509
  source 1..80: mol_type = other DNA
gttgtagtaacaaaaaatgtgattgatgattttagttctactgaaacagaaaaagtatctataacaaaaaatcttagttt

SEQ ID NO: 16368 - DNA, 80 bp, synthetic construct
  misc_feature 1..80: note = Synthetic: >NC_002205.1-cand-1530-1609
  source 1..80: mol_type = other DNA
ttataatgggagccaatgacgtaagtgaattagaatcacaagcacagctaatgataacgtatgatacacccaagatgtgg

SEQ ID NO: 16369 - DNA, 80 bp, synthetic construct
  misc_feature 1..80: note = Synthetic: >NC_002205.1-cand-1550-1629
  source 1..80: mol_type = other DNA
gtaagtgaattagaatcacaagcacagctaatgataacgtatgatacacccaagatgtgggaaatgggaacaaccaaaga

SEQ ID NO: 16370 - DNA, 80 bp, synthetic construct
  misc_feature 1..80: note = Synthetic: >NC_002205.1-cand-1630-1709
  source 1..80: mol_type = other DNA
actggtacaaaacacttaccaatgggtgcttaaaaatttagtaacattgaaggctcagtttcttttgggaaaagaagaca

SEQ ID NO: 16371 - DNA, 80 bp, synthetic construct
  misc_feature 1..80: note = Synthetic: >NC_002205.1-cand-1710-1789
  source 1..80: mol_type = other DNA
tgttccaatgggatgcatttgaagcatttgaaagcataatccctcagaagatggctggtcagtacagtggatttgcaaga

SEQ ID NO: 16372 - DNA, 80 bp, synthetic construct
  misc_feature 1..80: note = Synthetic: >NC_002205.1-cand-1790-1869
  source 1..80: mol_type = other DNA
gcagtgctcaaacaaatgagagaccaagaggttatgaaaactgaccaattcataaaattgttgcctttctgtttttcgcc

SEQ ID NO: 16373 - DNA, 80 bp, synthetic construct
  misc_feature 1..80: note = Synthetic: >NC_002205.1-cand-1850-1929
  source 1..80: mol_type = other DNA
ttgcctttctgtttttcgccaccaaaattaaggagcaatggagagccttatcaatttttgaggcttatgctgaaaggagg

SEQ ID NO: 16374 - DNA, 80 bp, synthetic construct
  misc_feature 1..80: note = Synthetic: >NC_002205.1-cand-1960-2039
  source 1..80: mol_type = other DNA
gtcccccttgttctcctacaatccacaaacggaaatcctaactatatgcggcagaatgatgtcattaaaaggaaaaattg

SEQ ID NO: 16375 - DNA, 80 bp, synthetic construct
  misc_feature 1..80: note = Synthetic: >NC_002205.1-cand-2070-2149
  source 1..80: mol_type = other DNA
atgcagtactggcaggctttcttgttagtggcaaatatgaccctgatcttggagatttcaaaaccattgaggaacttgaa

SEQ ID NO: 16376 - DNA, 80 bp, synthetic construct
  misc_feature 1..80: note = Synthetic: >NC_002205.1-cand-2130-2209
  source 1..80: mol_type = other DNA
aaaccattgaggaacttgaaagactaaaaccgggagaaaaagccaacatcttactttaccaaggaaagcccgttaaagta

SEQ ID NO: 16377 - DNA, 80 bp, synthetic construct
  misc_feature 1..80: note = Synthetic: >NC_002205.1-cand-2210-2289
  source 1..80: mol_type = other DNA
gttaaaaggaaaagatatagtgctttatccaatgatatttcacaagggattaagagacaaagaatgacagttgagtccat

SEQ ID NO: 16378 - DNA, 80 bp, synthetic construct
  misc_feature 1..80: note = Synthetic: >NC_002206.1-cand-20-99
  source 1..80: mol_type = other DNA
ttccagactacaataatacaaaaggccaaaaacacaatggcagaatttagtgaagatcctgaattacagccagcagtact

SEQ ID NO: 16379 - DNA, 80 bp, synthetic construct
  misc_feature 1..80: note = Synthetic: >NC_002206.1-cand-100-179
  source 1..80: mol_type = other DNA
attcaacatctgcgtccatctggaggtctgctatgtaataagtgatatgaactttcttgatgaggaaggaaagacatata

SEQ ID NO: 16380 - DNA, 80 bp, synthetic construct
  misc_feature 1..80: note = Synthetic: >NC_002206.1-cand-180-259
  source 1..80: mol_type = other DNA
cagcattagaaggacaaggaaaagagcaaaatttgagaccacagtatgaagtgattgagggaatgccaagaaacatagca

SEQ ID NO: 16381 - DNA, 80 bp, synthetic construct
  misc_feature 1..80: note = Synthetic: >NC_002206.1-cand-260-339
  source 1..80: mol_type = other DNA
tggatggttcaaagatccttagcccaagagcatggaatagagactccaaggtatctggctgatttatttgattataaaac

SEQ ID NO: 16382 - DNA, 80 bp, synthetic construct
  misc_feature 1..80: note = Synthetic: >NC_003310.1-cand-11700-11779
  source 1..80: mol_type = other DNA
taagtgtagaaattataacatccatagttggattcacataggtgtccaatcgggatctctccatcatcgagatgattgac

SEQ ID NO: 16383 - DNA, 80 bp, synthetic construct
  misc_feature 1..80: note = Synthetic: >NC_003310.1-cand-11780-11859
  source 1..80: mol_type = other DNA
ggcatctcccccttccttttttagtagatatttcatcgtgtaagaatcaatattaatatttctaaagtatctgtgtatag

SEQ ID NO: 16384 - DNA, 80 bp, synthetic construct
  misc_feature 1..80: note = Synthetic: >NC_003310.1-cand-11860-11939
  source 1..80: mol_type = other DNA
cctctttatttaccacagctccatattccaacatgcattccactagagggatatcgatatcgccgaatgtcatatactca

SEQ ID NO: 16385 - DNA, 80 bp, synthetic construct
  misc_feature 1..80: note = Synthetic: >NC_003310.1-cand-12020-12099
  source 1..80: mol_type = other DNA
tacaatactacgcattattccgtgcggctttccattctccaaaaacaattttaccaaatctaaatctacatctttattgt

SEQ ID NO: 16386 - DNA, 80 bp, synthetic construct
  misc_feature 1..80: note = Synthetic: >NC_003310.1-cand-12100-12179
  source 1..80: mol_type = other DNA
atctataatcactatttagataatcagccataattcctcgagtgcaacatgttagatcgtctatatataaataagccgtg

SEQ ID NO: 16387 - DNA, 80 bp, synthetic construct
  misc_feature 1..80: note = Synthetic: >NC_003310.1-cand-12340-12419
  source 1..80: mol_type = other DNA
tatccgactctgaatacagatgagagatgatatacagatgcaatacggtaccgcaatttcgtggttgataatcatcatac

SEQ ID NO: 16388 - DNA, 80 bp, synthetic construct
  misc_feature 1..80: note = Synthetic: >NC_003310.1-cand-12580-12659
  source 1..80: mol_type = other DNA
cctttatcaagtcaacgtctacattttttgatttaatatagctgaatatattaaagtcatttatgttgctatatccagta

SEQ ID NO: 16389 - DNA, 80 bp, synthetic construct
  misc_feature 1..80: note = Synthetic: >NC_003310.1-cand-12650-12729
  source 1..80: mol_type = other DNA
atatccagtagcttctagtagagccatcgctatatccttattgactttaacatgtctactatttgtgtattcttctattg

SEQ ID NO: 16390 - DNA, 80 bp, synthetic construct
  misc_feature 1..80: note = Synthetic: >NC_003310.1-cand-12740-12819
  source 1..80: mol_type = other DNA
tctccaatttttgtgtaatggattagtgccactgtctagtagtagtttgacgacctcaacattattacaatgctcattga

SEQ ID NO: 16391 - DNA, 80 bp, synthetic construct
  misc_feature 1..80: note = Synthetic: >NC_003310.1-cand-12820-12899
  source 1..80: mol_type = other DNA
aaaggtatgcgtgtaaagcattattcttgaattggttcctggtatcattaggatctctgtctctcaacatctgtttaagt

SEQ ID NO: 16392 - DNA, 80 bp, synthetic construct
  misc_feature 1..80: note = Synthetic: >NC_003310.1-cand-12900-12979
  source 1..80: mol_type = other DNA
tcatcgagaaccacctcctcattttccagatagtcaaacattttgactgaatagaagtgaatgagctactgtgaactcta

SEQ ID NO: 16393 - DNA, 80 bp, synthetic construct
  misc_feature 1..80: note = Synthetic: >NC_003310.1-cand-12980-13059
  source 1..80: mol_type = other DNA
tacacccgcacaactaatgtcattaaatatcatttttgaatgtatttataccatgtcaaaaacttgtacaattattaata

SEQ ID NO: 16394 - DNA, 80 bp, synthetic construct
  misc_feature 1..80: note = Synthetic: >NC_003310.1-cand-13070-13149
  source 1..80: mol_type = other DNA
gtgtttaaattttaccagttccagattttacacctccgttaacacctccattaaccccactttttacaccactggacgat

SEQ ID NO: 16395 - DNA, 80 bp, synthetic construct
  misc_feature 1..80: note = Synthetic: >NC_003310.1-cand-13230-13309
  source 1..80: mol_type = other DNA
actccacatgccgccactactaccccctttagaagacatattaataagacaagtttaacaataaaattaatcacgagtac

SEQ ID NO: 16396 - DNA, 80 bp, synthetic construct
  misc_feature 1..80: note = Synthetic: >NC_003310.1-cand-13310-13389
  source 1..80: mol_type = other DNA
cctactccaaccactattatatgattatagtttctatttttacagtaccttgactaaagtctctagtcacaagatcaata

SEQ ID NO: 16397 - DNA, 80 bp, synthetic construct
  misc_feature 1..80: note = Synthetic: >NC_003310.1-cand-13390-13469
  source 1..80: mol_type = other DNA
ctaccaacctacactatatatgattatagtttctatttttataggaacgcgtacgagaaaatcaaatgtctaagttctaa

SEQ ID NO: 16398 - DNA, 80 bp, synthetic construct
  misc_feature 1..80: note = Synthetic: >NC_003310.1-cand-18330-18409
  source 1..80: mol_type = other DNA
gatccatagttataacgcagtaacatagattattaccttcttgactgtcgctaatatctatatacttattgttatcgtat

SEQ ID NO: 16399 - DNA, 80 bp, synthetic construct
  misc_feature 1..80: note = Synthetic: >NC_003310.1-cand-18400-18479
  source 1..80: mol_type = other DNA
gttatcgtattggattctacatatagatggcttgtatatcaaagatatagaacacataaccaatttatattctcgctttg

SEQ ID NO: 16400 - DNA, 80 bp, synthetic construct
  misc_feature 1..80: note = Synthetic: >NC_003310.1-cand-18480-18559
  source 1..80: mol_type = other DNA
tattttcgaatctaaagttaagagatttagaaaacattatatcctcggatgatgatatcactgtttccagagtaggatat

SEQ ID NO: 16401 - DNA, 80 bp, synthetic construct
  misc_feature 1..80: note = Synthetic: >NC_003310.1-cand-18560-18639
  source 1..80: mol_type = other DNA
attaaagtctttaaagattttgtccgattcaaataaatcactaaataatatcccatattatcatctgttatagtcatgtc

SEQ ID NO: 16402 - DNA, 80 bp, synthetic construct
  misc_feature 1..80: note = Synthetic: >NC_003310.1-cand-18880-18959
  source 1..80: mol_type = other DNA
tcactacggacataaaccattgtataatttttatgtttattagtgtacacattttggaagtaagttccggctgccatgta

SEQ ID NO: 16403 - DNA, 80 bp, synthetic construct
  misc_feature 1..80: note = Synthetic: >NC_003310.1-cand-19040-19119
  source 1..80: mol_type = other DNA
tgagagtatgatcttttaagccgctagaagttttccgtttgatataggatgtggacatttaacaatctgacacgtgggtg

SEQ ID NO: 16404 - DNA, 80 bp, synthetic construct
  misc_feature 1..80: note = Synthetic: >NC_003310.1-cand-19200-19279
  source 1..80: mol_type = other DNA
atgctcccatcgatataaaaatcctcgtatccgttatgtcttccgttggatatagatggaggtgattggcatttaacaga

SEQ ID NO: 16405 - DNA, 80 bp, synthetic construct
  misc_feature 1..80: note = Synthetic: >NC_003310.1-cand-19280-19359
  source 1..80: mol_type = other DNA
ttcgcaaataggtgcctcaggattccataccatagatccagtagatcctaattcacaatacgatttagattcaccgatca

SEQ ID NO: 16406 - DNA, 80 bp, synthetic construct
  misc_feature 1..80: note = Synthetic: >NC_003310.1-cand-19360-19439
  source 1..80: mol_type = other DNA
aatgatatccgctattacaagagtacgttatactagagccaaagtctactccgccaatatcaagttggccattatcgata

SEQ ID NO: 16407 - DNA, 80 bp, synthetic construct
  misc_feature 1..80: note = Synthetic: >NC_003310.1-cand-19440-19519
  source 1..80: mol_type = other DNA
tctcgaggcgatgggcatctccgtttaatacattgattaaagagtgtccatccggtaccggtacatttagcatatatggg

SEQ ID NO: 16408 - DNA, 80 bp, synthetic construct
  misc_feature 1..80: note = Synthetic: >NC_003310.1-cand-19630-19709
  source 1..80: mol_type = other DNA
gtgacggaatagtacagtatgatagaacacatcctattcccaacaatgtcaggaacgtcacgctctccaccttcatattt

SEQ ID NO: 16409 - DNA, 80 bp, synthetic construct
  misc_feature 1..80: note = Synthetic: >NC_003310.1-cand-19680-19759
  source 1..80: mol_type = other DNA
aggaacgtcacgctctccaccttcatatttatttatccgtaaaatgttatcctggacatcgtacaaataataaaaagccc

SEQ ID NO: 16410 - DNA, 80 bp, synthetic construct
  misc_feature 1..80: note = Synthetic: >NC_003310.1-cand-19760-19839
  source 1..80: mol_type = other DNA
atatatatgttcgctattgtagaaattgtttttcacagttgctcaaaaacaatggcagtgacttatgagttagttacact

SEQ ID NO: 16411 - DNA, 80 bp, synthetic construct
  misc_feature 1..80: note = Synthetic: >NC_003310.1-cand-20080-20159
  source 1..80: mol_type = other DNA
ttccagtaattgcatagatgtcaccatcgtattctacagcataaactatactatgacgtctaggcatgggagactttttt

SEQ ID NO: 16412 - DNA, 80 bp, synthetic construct
  misc_feature 1..80: note = Synthetic: >NC_003310.1-cand-20160-20239
  source 1..80: mol_type = other DNA
atccaacgatttttagtgaaacattccacatcgtttaatactacatatttctcatagtggtataaactccacccattaca

SEQ ID NO: 16413 - DNA, 80 bp, synthetic construct
  misc_feature 1..80: note = Synthetic: >NC_003310.1-cand-20240-20319
  source 1..80: mol_type = other DNA
tatatatcatcgtttacgaatactgatgcgcctgaatatctaggagtgattaagtttggaagtcttttccatttcgaagt

SEQ ID NO: 16414 - DNA, 80 bp, synthetic construct
  misc_feature 1..80: note = Synthetic: >NC_003310.1-cand-113010-113089
  source 1..80: mol_type = other DNA
ttcgtcgatggaaaccatacaatcctttttgataggctgttgagattgatcatttcctgtacgtttaggtttggtacgtt

SEQ ID NO: 16415 - DNA, 80 bp, synthetic construct
  misc_feature 1..80: note = Synthetic: >NC_003310.1-cand-113570-113649
  source 1..80: mol_type = other DNA
ccagtaggtgtgggagtacatacagtggccacaataggaggttgaagaggtgtaaccgttggagtagtacaagaaatact

SEQ ID NO: 16416 - DNA, 80 bp, synthetic construct
  misc_feature 1..80: note = Synthetic: >NC_003310.1-cand-113650-113729
  source 1..80: mol_type = other DNA
tccatccgattgttgtgtacatgtggttgttggtaacgtctgagaaggttgggtagatggcggtgtcgtcatcttttgat

SEQ ID NO: 16417 - DNA, 80 bp, synthetic construct
  misc_feature 1..80: note = Synthetic: >NC_003310.1-cand-113730-113809
  source 1..80: mol_type = other DNA
ctttattaaatttagagataatatcctgaacagtattgctcggcgtcaacgctggaaggagtgtactcgccggcgcatca

SEQ ID NO: 16418 - DNA, 80 bp, synthetic construct
  misc_feature 1..80: note = Synthetic: >NC_003310.1-cand-113810-113889
  source 1..80: mol_type = other DNA
gtatctgcagacagccaatcaaaaagattagacatatcagatgatgtattagtttgttgtcgtggttttagtacaggagc

SEQ ID NO: 16419 - DNA, 80 bp, synthetic construct
  misc_feature 1..80: note = Synthetic: >NC_003310.1-cand-113890-113969
  source 1..80: mol_type = other DNA
agtactactaggtagaagaataggagccggtgtaggtgtcggaaccggctgtggagttatatgaatagttggttgtagcg

SEQ ID NO: 16420 - DNA, 80 bp, synthetic construct
  misc_feature 1..80: note = Synthetic: >NC_003310.1-cand-114210-114289
  source 1..80: mol_type = other DNA
aagattaaatggcagacacggacgatattatcgactatgaatccgatgatctcaccgaatacgaggatgatgaagaagat

SEQ ID NO: 16421 - DNA, 80 bp, synthetic construct
  misc_feature 1..80: note = Synthetic: >NC_003310.1-cand-114610-114689
  source 1..80: mol_type = other DNA
agaattgttgtcggtaaacgattttgataaagatggtctaaaattccatctagactatattatcaaaatttggaaacttc

SEQ ID NO: 16422 - DNA, 80 bp, synthetic construct
  misc_feature 1..80: note = Synthetic: >NC_003310.1-cand-114710-114789
  source 1..80: mol_type = other DNA
tacgaatatcgttctctaaatgttacaatcaagtctctcatattcagcagtttattgtcgtactttatatcgtgttcatt

SEQ ID NO: 16423 - DNA, 80 bp, synthetic construct
  misc_feature 1..80: note = Synthetic: >NC_003310.1-cand-114790-114869
  source 1..80: mol_type = other DNA
aacgatattttgcaaaatagtaatgattctatcttccttcgatagatattcttcagagattattgtcttatattctttct

SEQ ID NO: 16424 - DNA, 80 bp, synthetic construct
  misc_feature 1..80: note = Synthetic: >NC_003310.1-cand-114870-114949
  source 1..80: mol_type = other DNA
tgttatccgatatgaatttgataagactttgaacattattaatacccgtctgtttaattttttctatagatattttagtt

SEQ ID NO: 16425 - DNA, 80 bp, synthetic construct
  misc_feature 1..80: note = Synthetic: >NC_003310.1-cand-114950-115029
  source 1..80: mol_type = other DNA
ttggtagattctatggtgtctgttaataggcatccaacatcgacattcgacgtcaattgtctataaatcagagtataaat

SEQ ID NO: 16426 - DNA, 80 bp, synthetic construct
  misc_feature 1..80: note = Synthetic: >NC_003310.1-cand-115030-115109
  source 1..80: mol_type = other DNA
tttagaaataacattagcaaattgttgtgcgttgatgtcgttattctgaaacagtatgattttaggtagcattttcttaa

SEQ ID NO: 16427 - DNA, 80 bp, synthetic construct
  misc_feature 1..80: note = Synthetic: >NC_003310.1-cand-115110-115189
  source 1..80: mol_type = other DNA
caaagagaacgtatttattgttactcagttgaacagatgatatatccagattactaacgcatctgattccatataccaaa

SEQ ID NO: 16428 - DNA, 80 bp, synthetic construct
  misc_feature 1..80: note = Synthetic: >NC_003310.1-cand-115190-115269
  source 1..80: mol_type = other DNA
ctttcagaagaaatggtgtacaattgtttgtattcattcaatgtctccttttcagaaattagtttagagtcgaatactgc

SEQ ID NO: 16429 - DNA, 80 bp, synthetic construct
  misc_feature 1..80: note = Synthetic: >NC_003310.1-cand-115270-115349
  source 1..80: mol_type = other DNA
aataattttcaagagatagttttcatcagataagattttatttagtgtagatatgataaaactattgttttgttggagaa

SEQ ID NO: 16430 - DNA, 80 bp, synthetic construct
  misc_feature 1..80: note = Synthetic: >NC_003310.1-cand-124610-124689
  source 1..80: mol_type = other DNA
tggatgtacgtcaccaactacagacgtagttctagtacaattagacgtaagttccgcttgggaattttttaacactaaag

SEQ ID NO: 16431 - DNA, 80 bp, synthetic construct
  misc_feature 1..80: note = Synthetic: >NC_003310.1-cand-125050-125129
  source 1..80: mol_type = other DNA
ttccaggatcgtttctacaaaaaccagtcatgaaatcgtcacaatgttctgtcttgtaattattattaaatatttttgga

SEQ ID NO: 16432 - DNA, 80 bp, synthetic construct
  misc_feature 1..80: note = Synthetic: >NC_003310.1-cand-125170-125249
  source 1..80: mol_type = other DNA
tatcactatcacccaggagataatccttttttataaaatgacaccgttgcccggatgctatataatcagtagcatatttt

SEQ ID NO: 16433 - DNA, 80 bp, synthetic construct
  misc_feature 1..80: note = Synthetic: >NC_003310.1-cand-125250-125329
  source 1..80: mol_type = other DNA
aaatccttaatatactcaggagttacctcgttctgataatagattaatgatccaggacgaaatttgaaagaactacatgg

SEQ ID NO: 16434 - DNA, 80 bp, synthetic construct
  misc_feature 1..80: note = Synthetic: >NC_003310.1-cand-125490-125569
  source 1..80: mol_type = other DNA
ctattatattcaggataattaaaatctaataccatatatttgtctcgtatatctgctattcctgtctctattttgattct

SEQ ID NO: 16435 - DNA, 80 bp, synthetic construct
  misc_feature 1..80: note = Synthetic: >NC_003310.1-cand-125570-125649
  source 1..80: mol_type = other DNA
attaagagtaacagctgcccccattcttaataatcatcagtatttaaactgttaaatgttggtatatcaacatctatctt

SEQ ID NO: 16436 - DNA, 80 bp, synthetic construct
  misc_feature 1..80: note = Synthetic: >NC_003310.1-cand-125650-125729
  source 1..80: mol_type = other DNA
atttcccgcaatataaggtttgttgcaggtatactgttcaggaatgggtacatttatacttcttttatagtcctgtcttt

SEQ ID NO: 16437 - DNA, 80 bp, synthetic construct
  misc_feature 1..80: note = Synthetic: >NC_003310.1-cand-126050-126129
  source 1..80: mol_type = other DNA
cccaaataatcattcattattcctccataatcgttttgcatcatacccccatctttaggcataaacgattgctgctgttc

SEQ ID NO: 16438 - DNA, 80 bp, synthetic construct
  misc_feature 1..80: note = Synthetic: >NC_003310.1-cand-126280-126359
  source 1..80: mol_type = other DNA
gtggtcagaccataagtctttttaatgaagacggcgatttcgtagaagttgaaccaggatcatcctttaagtttctaata

SEQ ID NO: 16439 - DNA, 80 bp, synthetic construct
  misc_feature 1..80: note = Synthetic: >NC_003310.1-cand-126910-126989
  source 1..80: mol_type = other DNA
tgatgtgttattttttaactgctacacctagaccagctaaccgaatttattgtaacagtgttattaatattgccaagtta

SEQ ID NO: 16440 - DNA, 80 bp, synthetic construct
  misc_feature 1..80: note = Synthetic: >NC_003310.1-cand-126990-127069
  source 1..80: mol_type = other DNA
tcagatctaaaaaaaactatctatacagtagatagtttttttgagccatattccacagacaatattagaaatatggtaaa

SEQ ID NO: 16441 - DNA, 80 bp, synthetic construct
  misc_feature 1..80: note = Synthetic: >NC_003310.1-cand-127070-127149
  source 1..80: mol_type = other DNA
acgactagatggaccatctaataaatatcatatatataccgagaagttattatctgtagacgagcctagaaaccaactta

SEQ ID NO: 16442 - DNA, 80 bp, synthetic construct
  misc_feature 1..80: note = Synthetic: >NC_003310.1-cand-127230-127309
  source 1..80: mol_type = other DNA
gtattcttctacaaacgattattagatcctttcggaccagaggttgtatttataggagacgcccaaaatagacgtactcc

SEQ ID NO: 16443 - DNA, 80 bp, synthetic construct
  misc_feature 1..80: note = Synthetic: >NC_003310.1-cand-127310-127389
  source 1..80: mol_type = other DNA
agatatggtcaaatcaattaaggaactaaatagatttatattcgtatccaccttattttattccggcactggtttagata

SEQ ID NO: 16444 - DNA, 80 bp, synthetic construct
  misc_feature 1..80: note = Synthetic: >NC_003310.1-cand-127550-127629
  source 1..80: mol_type = other DNA
tttcgtgcaacgaattattagtctgtctgtagataaactcggatttaaacaagaaagttatcggaaacatcaggaatctg

SEQ ID NO: 16445 - DNA, 80 bp, synthetic construct
  misc_feature 1..80: note = Synthetic: >NC_003310.1-cand-127630-127709
  source 1..80: mol_type = other DNA
aacccgcttccgtgccaacatcctccagagaagaacgtgtattaaatagaatatttaactcgcaaaatcgttaagaagtt

SEQ ID NO: 16446 - DNA, 80 bp, synthetic construct
  misc_feature 1..80: note = Synthetic: >NC_003443.1-cand-9810-9889
  source 1..80: mol_type = other DNA
tgttactacacaattgttagatatattttccaacctttctccagatttaattgctgagatgttgtgtctcatgagacttt

SEQ ID NO: 16447 - DNA, 80 bp, synthetic construct
  misc_feature 1..80: note = Synthetic: >NC_003443.1-cand-9900-9979
  source 1..80: mol_type = other DNA
cactcttactgctgcgcaagtgggtaaagtgagagaatctatgtgtgcaggtaagttacttgatttccctacaataatga

SEQ ID NO: 16448 - DNA, 80 bp, synthetic construct
  misc_feature 1..80: note = Synthetic: >NC_003443.1-cand-9980-10059
  source 1..80: mol_type = other DNA
aaactcttgcttttttccacacaattttaattaatggttaccgtagaaagaaaaatggaatgtggcctccacttatactt

SEQ ID NO: 16449 - DNA, 80 bp, synthetic construct
  misc_feature 1..80: note = Synthetic: >NC_003443.1-cand-10060-10139
  source 1..80: mol_type = other DNA
cctaaaaatgcatcaaaaagcttaatagaatttcaacatgataatgctgaaatatcttacgaatatacactcaagcattg

SEQ ID NO: 16450 - DNA, 80 bp, synthetic construct
  misc_feature 1..80: note = Synthetic: >NC_003443.1-cand-10140-10219
  source 1..80: mol_type = other DNA
gaaagagatatctctcatagaatttagaaagtgctttgactttgatcctggtgaggagctaagcatttttatgaaagaca

SEQ ID NO: 16451 - DNA, 80 bp, synthetic construct
  misc_feature 1..80: note = Synthetic: >NC_003443.1-cand-10220-10299
  source 1..80: mol_type = other DNA
aggcaataagtgctccaagaagtgattggatgagtgtatttcgtagaagtctaataaaacaacgacatcagagacatcat

SEQ ID NO: 16452 - DNA, 80 bp, synthetic construct
  misc_feature 1..80: note = Synthetic: >NC_003443.1-cand-10300-10379
  source 1..80: mol_type = other DNA
attcctatgcccaatccatttaatagacgtctattactcaatttcttagaagatgacagttttgatccagttgccgagct

SEQ ID NO: 16453 - DNA, 80 bp, synthetic construct
  misc_feature 1..80: note = Synthetic: >NC_003443.1-cand-10380-10459
  source 1..80: mol_type = other DNA
tcgatatgttaccggtggtgaatatctccaagatgacacattttgtgcatcttactcattaaaagagaaagaaataaaac

SEQ ID NO: 16454 - DNA, 80 bp, synthetic construct
  misc_feature 1..80: note = Synthetic: >NC_003443.1-cand-10460-10539
  source 1..80: mol_type = other DNA
cagatggaaggatatttgctaagcttactaatagaatgcggtcctgtcaagtaattgcggaagcaattctcgcaaatcat

SEQ ID NO: 16455 - DNA, 80 bp, synthetic construct
  misc_feature 1..80: note = Synthetic: >NC_003443.1-cand-10540-10619
  source 1..80: mol_type = other DNA
gcaggtactctaatgaaggaaaacggagttgtcttgaatcaattatcactgactaaatcattgcttactatgagtcaaat

SEQ ID NO: 16456 - DNA, 80 bp, synthetic construct
  misc_feature 1..80: note = Synthetic: >NC_003443.1-cand-10620-10699
  source 1..80: mol_type = other DNA
tggcataatatcagaaaaggcgaagagatatacgcgagataacatctcatcccaaggtttccatacaatcaagactgatt

SEQ ID NO: 16457 - DNA, 80 bp, synthetic construct
  misc_feature 1..80: note = Synthetic: >NC_003443.1-cand-10710-10789
  source 1..80: mol_type = other DNA
gaggaaaagcaaaactgcatcatcatacctcacagatcctgatgatacatttgaacttagtgcatgttttataactactg

SEQ ID NO: 16458 - DNA, 80 bp, synthetic construct
  misc_feature 1..80: note = Synthetic: >NC_003443.1-cand-10790-10869
  source 1..80: mol_type = other DNA
atcttgctaaatactgtcttcaatggagatatcagaccataatccattttgctcgaacattaaacagaatgtatggagtt

SEQ ID NO: 16459 - DNA, 80 bp, synthetic construct
  misc_feature 1..80: note = Synthetic: >NC_003443.1-cand-10870-10949
  source 1..80: mol_type = other DNA
ccacatttatttgaatggattcatcttcgtttaattagatctacattatatgttggtgatccattcaatcctcctgccgc

SEQ ID NO: 16460 - DNA, 80 bp, synthetic construct
  misc_feature 1..80: note = Synthetic: >NC_003443.1-cand-10940-11019
  source 1..80: mol_type = other DNA
ctcctgccgcaactgatgctttcgatctagataaagtattaaatggtgatatctttatagtctccaagggaggtattgaa

SEQ ID NO: 16461 - DNA, 80 bp, synthetic construct
  misc_feature 1..80: note = Synthetic: >NC_003443.1-cand-11020-11099
  source 1..80: mol_type = other DNA
ggcctatgtcagaaaatgtggacaatgatctctatttctgtgatcatcctctcttcagccgaatccaaaacaagagtaat

SEQ ID NO: 16462 - DNA, 80 bp, synthetic construct
  misc_feature 1..80: note = Synthetic: >NC_004102.1-cand-5780-5859
  source 1..80: mol_type = other DNA
gggtggctgcccagctcgccgcccccggtgccgctaccgcctttgtgggcgctggcttagctggcgccgccatcggcagc

SEQ ID NO: 16463 - DNA, 80 bp, synthetic construct
  misc_feature 1..80: note = Synthetic: >NC_004102.1-cand-5870-5949
  source 1..80: mol_type = other DNA
ggaaggtcctcgtggacattcttgcagggtatggcgcgggcgtggcgggagctcttgtagcattcaagatcatgagcggt

SEQ ID NO: 16464 - DNA, 80 bp, synthetic construct
  misc_feature 1..80: note = Synthetic: >NC_004102.1-cand-5930-6009
  source 1..80: mol_type = other DNA
cattcaagatcatgagcggtgaggtcccctccacggaggacctggtcaatctgctgcccgccatcctctcgcctggagcc

SEQ ID NO: 16465 - DNA, 80 bp, synthetic construct
  misc_feature 1..80: note = Synthetic: >NC_004102.1-cand-5980-6059
  source 1..80: mol_type = other DNA
ctgctgcccgccatcctctcgcctggagcccttgtagtcggtgtggtctgcgcagcaatactgcgccggcacgttggccc

SEQ ID NO: 16466 - DNA, 80 bp, synthetic construct
  misc_feature 1..80: note = Synthetic: >NC_004102.1-cand-6120-6199
  source 1..80: mol_type = other DNA
tgtttcccccacgcactacgtgccggagagcgatgcagccgcccgcgtcactgccatactcagcagcctcactgtaaccc

SEQ ID NO: 16467 - DNA, 80 bp, synthetic construct
  misc_feature 1..80: note = Synthetic: >NC_004102.1-cand-6170-6249
  source 1..80: mol_type = other DNA
ctgccatactcagcagcctcactgtaacccagctcctgaggcgactgcatcagtggataagctcggagtgtaccactcca

SEQ ID NO: 16468 - DNA, 80 bp, synthetic construct
  misc_feature 1..80: note = Synthetic: >NC_004102.1-cand-6250-6329
  source 1..80: mol_type = other DNA
tgctccggttcctggctaagggacatctgggactggatatgcgaggtgctgagcgactttaagacctggctgaaagccaa

SEQ ID NO: 16469 - DNA, 80 bp, synthetic construct
  misc_feature 1..80: note = Synthetic: >NC_004102.1-cand-6300-6379
  source 1..80: mol_type = other DNA
gagcgactttaagacctggctgaaagccaagctcatgccacaactgcctgggattccctttgtgtcctgccagcgcgggt

SEQ ID NO: 16470 - DNA, 80 bp, synthetic construct
  misc_feature 1..80: note = Synthetic: >NC_004102.1-cand-6410-6489
  source 1..80: mol_type = other DNA
tgcacactcgctgccactgtggagctgagatcactggacatgtcaaaaacgggacgatgaggatcgtcggtcctaggacc

SEQ ID NO: 16471 - DNA, 80 bp, synthetic construct
  misc_feature 1..80: note = Synthetic: >NC_004102.1-cand-6490-6569
  source 1..80: mol_type = other DNA
tgcaggaacatgtggagtgggacgttccccattaacgcctacaccacgggcccctgtactccccttcctgcgccgaacta

SEQ ID NO: 16472 - DNA, 80 bp, synthetic construct
  misc_feature 1..80: note = Synthetic: >NC_004102.1-cand-6540-6619
  source 1..80: mol_type = other DNA
cccctgtactccccttcctgcgccgaactataagttcgcgctgtggagggtgtctgcagaggaatacgtggagataaggc

SEQ ID NO: 16473 - DNA, 80 bp, synthetic construct
  misc_feature 1..80: note = Synthetic: >NC_004102.1-cand-6630-6709
  source 1..80: mol_type = other DNA
cttccactacgtatcgggtatgactactgacaatcttaaatgcccgtgccagatcccatcgcccgaatttttcacagaat

SEQ ID NO: 16474 - DNA, 80 bp, synthetic construct
  misc_feature 1..80: note = Synthetic: >NC_004102.1-cand-6720-6799
  source 1..80: mol_type = other DNA
gcgcctacataggtttgcgcccccttgcaagcccttgctgcgggaggaggtatcattcagagtaggactccacgagtacc

SEQ ID NO: 16475 - DNA, 80 bp, synthetic construct
  misc_feature 1..80: note = Synthetic: >NC_004102.1-cand-6810-6889
  source 1..80: mol_type = other DNA
gcaattaccttgcgagcccgaaccggacgtagccgtgttgacgtccatgctcactgatccctcccatataacagcagagg

SEQ ID NO: 16476 - DNA, 80 bp, synthetic construct
  misc_feature 1..80: note = Synthetic: >NC_004102.1-cand-6890-6969
  source 1..80: mol_type = other DNA
cggccgggagaaggttggcgagagggtcacccccttctatggccagctcctcggccagccagctgtccgctccatctctc

SEQ ID NO: 16477 - DNA, 80 bp, synthetic construct
  misc_feature 1..80: note = Synthetic: >NC_004102.1-cand-6970-7049
  source 1..80: mol_type = other DNA
aaggcaacttgcaccgccaaccatgactcccctgacgccgagctcatagaggctaacctcctgtggaggcaggagatggg

SEQ ID NO: 16478 - DNA, 80 bp, synthetic construct
  misc_feature 1..80: note = Synthetic: >NC_005078.1-cand-3110-3189
  source 1..80: mol_type = other DNA
ggatgcttttcatagacatgagcctatccacttctttgtttaaatccctcagcttgttcagatcctcttcaccccttttg

SEQ ID NO: 16479 - DNA, 80 bp, synthetic construct
  misc_feature 1..80: note = Synthetic: >NC_005078.1-cand-3190-3269
  source 1..80: mol_type = other DNA
ttctttctgagagccctctgcacttgtgaaacctggttgaagtcgatgctgtcagctatgagcttggcatctttcaacac

SEQ ID NO: 16480 - DNA, 80 bp, synthetic construct
  misc_feature 1..80: note = Synthetic: >NC_005078.1-cand-3260-3339
  source 1..80: mol_type = other DNA
ctttcaacacatctgttttcacagtgtgggtgaactgactcaggcctcttctcagtgactgagtccaccgaaagctggga

SEQ ID NO: 16481 - DNA, 80 bp, synthetic construct
  misc_feature 1..80: note = Synthetic: >NC_005078.1-cand-3340-3419
  source 1..80: mol_type = other DNA
atttccttggagtgagccatagtggctaataaccaaaggatttgaaataaagctcagtagaagagttagacactttgcct

SEQ ID NO: 16482 - DNA, 80 bp, synthetic construct
  misc_feature 1..80: note = Synthetic: >NC_005079.1-cand-0-79
  source 1..80: mol_type = other DNA
acagtggatcctaggcgtaactagatcaagttttgctgagtaaaattttaaacacattgagtatccgtgcaagacagcgc

SEQ ID NO: 16483 - DNA, 80 bp, synthetic construct
  misc_feature 1..80: note = Synthetic: >NC_005079.1-cand-90-169
  source 1..80: mol_type = other DNA
acaatgggcaactgcaataagcctcccaagaggcctcccaacacacaaacatcatccaaccaaccctcagcagagttcag

SEQ ID NO: 16484 - DNA, 80 bp, synthetic construct
  misc_feature 1..80: note = Synthetic: >NC_005079.1-cand-170-249
  source 1..80: mol_type = other DNA
gagaacagccccacccagtctctatggtcgctacaactgcaaatgctgttggtttgccgacacaaacttgattacatgta

SEQ ID NO: 16485 - DNA, 80 bp, synthetic construct
  misc_feature 1..80: note = Synthetic: >NC_005079.1-cand-250-329
  source 1..80: mol_type = other DNA
acgaccactacttgtgcctgagatgtcatcaaacaatgctcaggaattctgaactctgtcacatatgctggaaaccacta

SEQ ID NO: 16486 - DNA, 80 bp, synthetic construct
  misc_feature 1..80: note = Synthetic: >NC_005079.1-cand-330-409
  source 1..80: mol_type = other DNA
ccgacatccatcacagttcccgtggagccaagtgcccccccaccatgaacatccccaaactcggtccacaagacccccgg

SEQ ID NO: 16487 - DNA, 80 bp, synthetic construct
  misc_feature 1..80: note = Synthetic: >NC_005079.1-cand-410-489
  source 1..80: mol_type = other DNA
ggggccccaacggggcccccacgggggatccccgggggtcttgggctgcgtcactcaatgtcctccacttggggcgtgct

SEQ ID NO: 16488 - DNA, 80 bp, synthetic construct
  misc_feature 1..80: note = Synthetic: >NC_005079.1-cand-500-579
  source 1..80: mol_type = other DNA
ctacacatcacacccttcagtctgaatgacccctgggtgtctgatatcacaagctctttgagtgatttactataggcaac

SEQ ID NO: 16489 - DNA, 80 bp, synthetic construct
  misc_feature 1..80: note = Synthetic: >NC_005079.1-cand-570-649
  source 1..80: mol_type = other DNA
tataggcaaccttaaagttggtaaattcgatccattcgccaaagctttcaattgattttgtgagctgtttcttgtacaaa

SEQ ID NO: 16490 - DNA, 80 bp, synthetic construct
  misc_feature 1..80: note = Synthetic: >NC_005079.1-cand-650-729
  source 1..80: mol_type = other DNA
tcatgaacaatggtgaaatcttcctgttgaaacaaaataacctgtgatgttgctttcaaataaggccacagttggtgcag

SEQ ID NO: 16491 - DNA, 80 bp, synthetic construct
  misc_feature 1..80: note = Synthetic: >NC_005079.1-cand-730-809
  source 1..80: mol_type = other DNA
catagaaacaacactctcatcatcttctagggcccccaatgctttcaccacaagatcacctgtaaactctactttatatg

SEQ ID NO: 16492 - DNA, 80 bp, synthetic construct
  misc_feature 1..80: note = Synthetic: >NC_005079.1-cand-790-869
  source 1..80: mol_type = other DNA
tgtaaactctactttatatgtggacagtctctcacctcccacatagaaggcaccatccttcaagaccaacgggtcttctt

SEQ ID NO: 16493 - DNA, 80 bp, synthetic construct
  misc_feature 1..80: note = Synthetic: >NC_005079.1-cand-840-919
  source 1..80: mol_type = other DNA
caccatccttcaagaccaacgggtcttcttggttttcaggtcccgagagcctgtaggaatatttgtcactcaactctggg

SEQ ID NO: 16494 - DNA, 80 bp, synthetic construct
  misc_feature 1..80: note = Synthetic: >NC_005079.1-cand-4770-4849
  source 1..80: mol_type = other DNA
ctggtgtctgcacatcctcagtgtcccttaaggattttgaaaaaaacttctttaaaccatttatcataatgtcttcctga

SEQ ID NO: 16495 - DNA, 80 bp, synthetic construct
  misc_feature 1..80: note = Synthetic: >NC_005079.1-cand-4850-4929
  source 1..80: mol_type = other DNA
tctacagtcagctttccatttagagatgggttcaccacagcacatccaaacttaactttgggctcaatgaacttctcaaa

SEQ ID NO: 16496 - DNA, 80 bp, synthetic construct
  misc_feature 1..80: note = Synthetic: >NC_005079.1-cand-4930-5009
  source 1..80: mol_type = other DNA
acatttcatctgatctgttaatcggtcaggcgtttcttttgtgattaaatggcaaaggtaactaacatttagcagatatt

SEQ ID NO: 16497 - DNA, 80 bp, synthetic construct
  misc_feature 1..80: note = Synthetic: >NC_005079.1-cand-5010-5089
  source 1..80: mol_type = other DNA
tgaatcttcttgagaaaaataaacttgcatctgactcaccactaagtagtctaatgaagagtcccactgcaagcctttga

SEQ ID NO: 16498 - DNA, 80 bp, synthetic construct
  misc_feature 1..80: note = Synthetic: >NC_005079.1-cand-5090-5169
  source 1..80: mol_type = other DNA
accaccacttctgaacttgacttgcattccactaccaatttagatgtcaggtcgatatgatgaatttggttagcaaaagc

SEQ ID NO: 16499 - DNA, 80 bp, synthetic construct
  misc_feature 1..80: note = Synthetic: >NC_005079.1-cand-5140-5219
  source 1..80: mol_type = other DNA
gtcgatatgatgaatttggttagcaaaagccattaaaaagtatcttaatccttgtagaaaggtttgattcctctttgatg

SEQ ID NO: 16500 - DNA, 80 bp, synthetic construct
  misc_feature 1..80: note = Synthetic: >NC_005079.1-cand-5250-5329
  source 1..80: mol_type = other DNA
ttaatatgggcccagtgtcattcattaatccggtgtcaaaatccagccagcttgtcatttcctcacacattccagccaaa

SEQ ID NO: 16501 - DNA, 80 bp, synthetic construct
  misc_feature 1..80: note = Synthetic: >NC_005079.1-cand-5330-5409
  source 1..80: mol_type = other DNA
acttcatcagaaaaaacaggcaagaagaatctctttggatcacaataaaatgaaccctgttctgacatcacaccgttatc

SEQ ID NO: 16502 - DNA, 80 bp, synthetic construct
  misc_feature 1..80: note = Synthetic: >NC_005079.1-cand-5420-5499
  source 1..80: mol_type = other DNA
actgaataacacctggacctttcacctgtcttctgatagaaaagaaagccaactaaactctcagccaaataaaacctttg

SEQ ID NO: 16503 - DNA, 80 bp, synthetic construct
  misc_feature 1..80: note = Synthetic: >NC_005079.1-cand-5500-5579
  source 1..80: mol_type = other DNA
ggcataacactctctgagtctaacattaccaaagtacttagaaaattctctctcattcacaagcaatcttgaagaaaagg

SEQ ID NO: 16504 - DNA, 80 bp, synthetic construct
  misc_feature 1..80: note = Synthetic: >NC_005079.1-cand-5580-5659
  source 1..80: mol_type = other DNA
atgtcttcatagaattgattagtgacaaggatattgaggacaaagtcttgaataacctcatttgctcaaagctagacatc

SEQ ID NO: 16505 - DNA, 80 bp, synthetic construct
  misc_feature 1..80: note = Synthetic: >NC_005079.1-cand-5660-5739
  source 1..80: mol_type = other DNA
tcctggaacaatttatgtctacaaatcttatcagagcctctttccactgaatacctcataattggtctatctgagacaag

SEQ ID NO: 16506 - DNA, 80 bp, synthetic construct
  misc_feature 1..80: note = Synthetic: >NC_005079.1-cand-5740-5819
  source 1..80: mol_type = other DNA
atgttgggctattgaaatcaagctattgaagtctggttgctttatcaaagtgcttaagtgatgccatatttctggatgtg

SEQ ID NO: 16507 - DNA, 80 bp, synthetic construct
  misc_feature 1..80: note = Synthetic: >NC_005079.1-cand-5820-5899
  source 1..80: mol_type = other DNA
atctctctagaatttttgaacaattcttgacccaattgggattagtcccaatcttttttctgatgagtttaacagcctcc

SEQ ID NO: 16508 - DNA, 80 bp, synthetic construct
  misc_feature 1..80: note = Synthetic: >NC_005079.1-cand-5900-5979
  source 1..80: mol_type = other DNA
aaaatgtccagcactctatcattcactaacataaccatctgacccactatcaatcccgattttctcaaactttcaatcgc

SEQ ID NO: 16509 - DNA, 80 bp, synthetic construct
  misc_feature 1..80: note = Synthetic: >NC_005079.1-cand-5980-6059
  source 1..80: mol_type = other DNA
gtcctggcaactgtcactaatgtcaaccatcaaattaaccattatgagatctaagaatagtagggtgtttcttctggtgt

SEQ ID NO: 16510 - DNA, 80 bp, synthetic construct
  misc_feature 1..80: note = Synthetic: >NC_005080.1-cand-2820-2899
  source 1..80: mol_type = other DNA
tgtgtctatagtctctgacagttgtgttggagttttacacttaacattgtgtagagcagcagacacaaacttggtgagta

SEQ ID NO: 16511 - DNA, 80 bp, synthetic construct
  misc_feature 1..80: note = Synthetic: >NC_005080.1-cand-2900-2979
  source 1..80: mol_type = other DNA
aaggagtctcttcacccatgacaaaaaatcttgacttaaactcagcaacaaaagttcctatcacactctttgggctgata

SEQ ID NO: 16512 - DNA, 80 bp, synthetic construct
  misc_feature 1..80: note = Synthetic: >NC_005080.1-cand-2980-3059
  source 1..80: mol_type = other DNA
aacttgtttaatttagaagataagaattcatggaagcacaccatttccagcagttctgtcctgtcttgaaacttttcatc

SEQ ID NO: 16513 - DNA, 80 bp, synthetic construct
  misc_feature 1..80: note = Synthetic: >NC_005080.1-cand-3060-3139
  source 1..80: mol_type = other DNA
actaaggcaaggaatttttataaggctaacctggtcatcgctggaggtataagtgacaggtatcacatcatacaataagt

SEQ ID NO: 16514 - DNA, 80 bp, synthetic construct
  misc_feature 1..80: note = Synthetic: >NC_005080.1-cand-3140-3219
  source 1..80: mol_type = other DNA
caagtgcataacacagaaattgttcagtaattagcccatataaatctgatgtgttgtgcaagattccctggcccatgtcc

SEQ ID NO: 16515 - DNA, 80 bp, synthetic construct
  misc_feature 1..80: note = Synthetic: >NC_005080.1-cand-3250-3329
  source 1..80: mol_type = other DNA
tcccttgactgcagatactggtgaaaaaactcttcaccaacactagtacagtcacaacccattaaacctaaagatctctt

SEQ ID NO: 16516 - DNA, 80 bp, synthetic construct
  misc_feature 1..80: note = Synthetic: >NC_005080.1-cand-3300-3379
  source 1..80: mol_type = other DNA
gtcacaacccattaaacctaaagatctcttcaatttccctacacagtaggcttctgcaacattaattggaacttcaacga

SEQ ID NO: 16517 - DNA, 80 bp, synthetic construct
  misc_feature 1..80: note = Synthetic: >NC_005080.1-cand-3380-3459
  source 1..80: mol_type = other DNA
ccttatgaagatgccatttgagaatgttcattactggttcaagattcacctttgttctatctctgggattcttcaattct

SEQ ID NO: 16518 - DNA, 80 bp, synthetic construct
  misc_feature 1..80: note = Synthetic: >NC_005080.1-cand-3460-3539
  source 1..80: mol_type = other DNA
aatgtgtacaaaaaagaaaggaaaagtgctgggctcatagttggtccccatttggagtggtcatatgaacaggacaagtc

SEQ ID NO: 16519 - DNA, 80 bp, synthetic construct
  misc_feature 1..80: note = Synthetic: >NC_005080.1-cand-3540-3619
  source 1..80: mol_type = other DNA
accattgttaacagccattttcatatcacagattgcacgttcgaattccttttctgaattcaagcatgtgtatctcattg

SEQ ID NO: 16520 - DNA, 80 bp, synthetic construct
  misc_feature 1..80: note = Synthetic: >NC_005080.1-cand-3620-3699
  source 1..80: mol_type = other DNA
aactacccacagcttctgagaagtcttcaactaacctggtcatcagcttagtgttgaggtctcccacatacagttctcta

SEQ ID NO: 16521 - DNA, 80 bp, synthetic construct
  misc_feature 1..80: note = Synthetic: >NC_005080.1-cand-3700-3779
  source 1..80: mol_type = other DNA
tttgagccaacctgctccttataacttagtccaaatttcaagttccctgtatttgagctgatgcttgtgaactctgtagg

SEQ ID NO: 16522 - DNA, 80 bp, synthetic construct
  misc_feature 1..80: note = Synthetic: >NC_005080.1-cand-3780-3859
  source 1..80: mol_type = other DNA
agagtcgtctgaatagaaacataaattccgtagggctgcatttgtaaaataacttttgtctagcttatcagcaatggctt

SEQ ID NO: 16523 - DNA, 80 bp, synthetic construct
  misc_feature 1..80: note = Synthetic: >NC_005080.1-cand-3860-3939
  source 1..80: mol_type = other DNA
cagaattgctttccctggtactaagccgaacctcatcctttagtctcagaacttcactggaaaagcccaatctagatcta

SEQ ID NO: 16524 - DNA, 80 bp, synthetic construct
  misc_feature 1..80: note = Synthetic: >NC_005080.1-cand-3940-4019
  source 1..80: mol_type = other DNA
cttctatgctcataactacccaatttctgatcataatgtccttgaattaaaagatacttgaagcattcaaagaattcatc

SEQ ID NO: 16525 - DNA, 80 bp, synthetic construct
  misc_feature 1..80: note = Synthetic: >NC_005080.1-cand-4020-4099
  source 1..80: mol_type = other DNA
ttcttggtaggctattgttgtcaaattttttaataacaaacccaaagggcagatgtcctgcggtgcttcaagaaaataag

SEQ ID NO: 16526 - DNA, 80 bp, synthetic construct
  misc_feature 1..80: note = Synthetic: >NC_005081.1-cand-890-969
  source 1..80: mol_type = other DNA
attgtctagaagagtggatgctcgtagcagccaaaatgaagtgttttggcaatactgctgtagcaaaatgcaatttgaat

SEQ ID NO: 16527 - DNA, 80 bp, synthetic construct
  misc_feature 1..80: note = Synthetic: >NC_005081.1-cand-970-1049
  source 1..80: mol_type = other DNA
catgactctgaattctgtgacatgttgaggctttttgattacaacaaaaatgctatcaaaaccctaaatgatgaaactaa

SEQ ID NO: 16528 - DNA, 80 bp, synthetic construct
  misc_feature 1..80: note = Synthetic: >NC_005081.1-cand-1070-1149
  source 1..80: mol_type = other DNA
ggcagacaatcaatgccctgatatctgacaatttattgatgaaaaacaaaattagggaactgatgagtgtcccttactgc

SEQ ID NO: 16529 - DNA, 80 bp, synthetic construct
  misc_feature 1..80: note = Synthetic: >NC_005081.1-cand-1130-1209
  source 1..80: mol_type = other DNA
tgatgagtgtcccttactgcaattacacaaaattttggtatgtcaaccacacactttcaggacaacactcattaccaagg

SEQ ID NO: 16530 - DNA, 80 bp, synthetic construct
  misc_feature 1..80: note = Synthetic: >NC_005081.1-cand-1210-1289
  source 1..80: mol_type = other DNA
tgctggttaataaaaaacaacagctatttgaacatctctgacttccgtaatgactggatattagaaagtgacttcttaat

SEQ ID NO: 16531 - DNA, 80 bp, synthetic construct
  misc_feature 1..80: note = Synthetic: >NC_005081.1-cand-1290-1369
  source 1..80: mol_type = other DNA
ttctgaaatgctaagcaaagagtattcggacaggcagggtaaaactcctttgactttagttgacatctgtttttggagca

SEQ ID NO: 16532 - DNA, 80 bp, synthetic construct
  misc_feature 1..80: note = Synthetic: >NC_005081.1-cand-1350-1429
  source 1..80: mol_type = other DNA
tgacatctgtttttggagcacagtattcttcacagcgtcactcttccttcacttggtgggtatacccacccacagacaca

SEQ ID NO: 16533 - DNA, 80 bp, synthetic construct
  misc_feature 1..80: note = Synthetic: >NC_005081.1-cand-1460-1539
  source 1..80: mol_type = other DNA
ggttgaacagcttgggtggttgcagatgtggtaagtaccccaatctaaagaaaccaacagtttggcgtagaggacactaa

SEQ ID NO: 16534 - DNA, 80 bp, synthetic construct
  misc_feature 1..80: note = Synthetic: >NC_005081.1-cand-1540-1619
  source 1..80: mol_type = other DNA
gacctcctgagggtccccaccagcccgggcactgcccgggctggtgtggccccccagtccgcggcctggccgcggactgg

SEQ ID NO: 16535 - DNA, 80 bp, synthetic construct
  misc_feature 1..80: note = Synthetic: >NC_005081.1-cand-1620-1699
  source 1..80: mol_type = other DNA
ggaggcactgcttacagtgcataggctgccttcgggaggaacagcaagctcggtggtaatagaggtgtaggttcctcctc

SEQ ID NO: 16536 - DNA, 80 bp, synthetic construct
  misc_feature 1..80: note = Synthetic: >NC_005081.1-cand-1700-1779
  source 1..80: mol_type = other DNA
atagagcttcccatctagcactgactgaaacattatgcagtctagcagagcacagtgtggttcactggaggccaacttga

SEQ ID NO: 16537 - DNA, 80 bp, synthetic construct
  misc_feature 1..80: note = Synthetic: >NC_005081.1-cand-1780-1859
  source 1..80: mol_type = other DNA
agggagtatccttttccctctttttcttattgacaaccactccattgtgatatttgcataagtgaccatatttctcccag

SEQ ID NO: 16538 - DNA, 80 bp, synthetic construct
  misc_feature 1..80: note = Synthetic: >NC_005081.1-cand-1860-1939
  source 1..80: mol_type = other DNA
acctgttgatcaaactgcctggcttgttcagatgtgagcttaacatcaaccagtttaagatctcttcttccatggaggtc

SEQ ID NO: 16539 - DNA, 80 bp, synthetic construct
  misc_feature 1..80: note = Synthetic: >NC_005081.1-cand-1940-2019
  source 1..80: mol_type = other DNA
aaacaacttcctgatgtcatcggatccttgagtagtcacaaccatgtctggaggcagcaagccgatcacgtaactaagaa

SEQ ID NO: 16540 - DNA, 80 bp, synthetic construct
  misc_feature 1..80: note = Synthetic: >NC_005081.1-cand-2010-2089
  source 1..80: mol_type = other DNA
taactaagaactcctggcattgcatcttctatgtccttcattaagatgccgtgagagtgtctgctaccatttttaaaccc

SEQ ID NO: 16541 - DNA, 80 bp, synthetic construct
  misc_feature 1..80: note = Synthetic: >NC_005081.1-cand-2090-2169
  source 1..80: mol_type = other DNA
tttctcatcatgtggttttctgaagcagtgaatgtactgcttacctgcaggttggaataatgccatctcaacagggtcag

SEQ ID NO: 16542 - DNA, 80 bp, synthetic construct
  misc_feature 1..80: note = Synthetic: >NC_005082.1-cand-3950-4029
  source 1..80: mol_type = other DNA
aagcccctaacctctgatcaaatcctgcttgaatcaggatgtacttgaaacaatcaaagaattcatcatcttcataagat

SEQ ID NO: 16543 - DNA, 80 bp, synthetic construct
  misc_feature 1..80: note = Synthetic: >NC_005082.1-cand-4040-4119
  source 1..80: mol_type = other DNA
agtttttcagtaggagttccaatggacagatgtcaagaggcttttccaaaaagaaggtaggtcttaatggagaatcataa

SEQ ID NO: 16544 - DNA, 80 bp, synthetic construct
  misc_feature 1..80: note = Synthetic: >NC_005082.1-cand-4120-4199
  source 1..80: mol_type = other DNA
acagccacacataacttttcatagacatcttcccccaagaggtcaggatcaaaatccctaatttcatgaacacttgtctc

SEQ ID NO: 16545 - DNA, 80 bp, synthetic construct
  misc_feature 1..80: note = Synthetic: >NC_005082.1-cand-4200-4279
  source 1..80: mol_type = other DNA
actcctaattactttcaagacattgaagggtgcccacacaccttccagtgtacatggttttttgtggccacactcaagtt

SEQ ID NO: 16546 - DNA, 80 bp, synthetic construct
  misc_feature 1..80: note = Synthetic: >NC_005082.1-cand-4280-4359
  source 1..80: mol_type = other DNA
cccttgagagcctcattttgcttaaagtgatctcaacttcatactttatctcttcaaatgctttcatgacatcttcagac

SEQ ID NO: 16547 - DNA, 80 bp, synthetic construct
  misc_feature 1..80: note = Synthetic: >NC_005082.1-cand-4360-4439
  source 1..80: mol_type = other DNA
aagtgctcatataacaatgacaactcttccttcttgctgctgtcaagttttcttgcagacaaaagattagtcaagttcct

SEQ ID NO: 16548 - DNA, 80 bp, synthetic construct
  misc_feature 1..80: note = Synthetic: >NC_005082.1-cand-4440-4519
  source 1..80: mol_type = other DNA
cataatcagaaagtcgattgtatcgggatctagattataccttccctttgtcttaaatctttctgccattgaagtaatgc

SEQ ID NO: 16549 - DNA, 80 bp, synthetic construct
  misc_feature 1..80: note = Synthetic: >NC_005082.1-cand-4520-4599
  source 1..80: mol_type = other DNA
aagtggaaaccaatttttgtttgtcgtattccgacacaatctctcccacttcgtttaatttcggaataacaacactcttg

SEQ ID NO: 16550 - DNA, 80 bp, synthetic construct
  misc_feature 1..80: note = Synthetic: >NC_005082.1-cand-4560-4639
  source 1..80: mol_type = other DNA
ctctcccacttcgtttaatttcggaataacaacactcttgttgctagataagtctaatgcagtgcttgtgaaactgggtc

SEQ ID NO: 16551 - DNA, 80 bp, synthetic construct
  misc_feature 1..80: note = Synthetic: >NC_005082.1-cand-4680-4759
  source 1..80: mol_type = other DNA
tcccttgttaaaaagtgacacacaataactcagtagctctctagaaacccctggtctctttaaatcttccacagtaagaa

SEQ ID NO: 16552 - DNA, 80 bp, synthetic construct
  misc_feature 1..80: note = Synthetic: >NC_005082.1-cand-4760-4839
  source 1..80: mol_type = other DNA
gctcttttgagaagaacttctctacaccctcaatcatgacatcttcttgttccttagacagaaagccatttaaagatggg

SEQ ID NO: 16553 - DNA, 80 bp, synthetic construct
  misc_feature 1..80: note = Synthetic: >NC_005082.1-cand-4840-4919
  source 1..80: mol_type = other DNA
ttaacaatgagactaccaaactctagttttggttccatgaatttctcaaaacacttaatttgatctgtgagtctatctgg

SEQ ID NO: 16554 - DNA, 80 bp, synthetic construct
  misc_feature 1..80: note = Synthetic: >NC_005082.1-cand-4920-4999
  source 1..80: mol_type = other DNA
agtttcttttgtgatcaaatgacataagtaacttacatttaagacaaacttaaacttcctcgtcatatgcatgtctggat

SEQ ID NO: 16555 - DNA, 80 bp, synthetic construct
  misc_feature 1..80: note = Synthetic: >NC_005082.1-cand-5000-5079
  source 1..80: mol_type = other DNA
cagaaccatcacttaacaccatatccacaatttttacactaagcctctgaattaaaacatctgaggctgatttgcattca

SEQ ID NO: 16556 - DNA, 80 bp, synthetic construct
  misc_feature 1..80: note = Synthetic: >NC_005082.1-cand-5080-5159
  source 1..80: mol_type = other DNA
acagccaacttgctcatcaattggatatgatgggcctgattgacatacgccatgatgaaataccttaatccttgtagaaa

SEQ ID NO: 16557 - DNA, 80 bp, synthetic construct
  misc_feature 1..80: note = Synthetic: >NC_005082.1-cand-5140-5219
  source 1..80: mol_type = other DNA
taccttaatccttgtagaaatgtttgactcctttttgttggtgaactcaatatacttaaaaccaggattttcaataaggg

SEQ ID NO: 16558 - DNA, 80 bp, synthetic construct
  misc_feature 1..80: note = Synthetic: >NC_005222.1-cand-240-319
  source 1..80: mol_type = other DNA
attataacagcactagagaagaaaataataccaaatcatcctacaggaaagagtctaaaggccttcttcaagatgacacc

SEQ ID NO: 16559 - DNA, 80 bp, synthetic construct
  misc_feature 1..80: note = Synthetic: >NC_005222.1-cand-320-399
  source 1..80: mol_type = other DNA
tgataattataaaattagtggaacaacaattgagtttgttgaggttactgtcacggcagatgttgacaagggaataagag

SEQ ID NO: 16560 - DNA, 80 bp, synthetic construct
  misc_feature 1..80: note = Synthetic: >NC_005222.1-cand-400-479
  source 1..80: mol_type = other DNA
agaagaagcttaaatatgaggcaggcttaacctatattgaacaagagttgcataagttcttcctaaagggtgagatccca

SEQ ID NO: 16561 - DNA, 80 bp, synthetic construct
  misc_feature 1..80: note = Synthetic: >NC_005222.1-cand-480-559
  source 1..80: mol_type = other DNA
caaccctataaaataacatttaatgtagttgcagttcgcacagatggctccaatattactacacaatggcctagtagaag

SEQ ID NO: 16562 - DNA, 80 bp, synthetic construct
  misc_feature 1..80: note = Synthetic: >NC_005222.1-cand-560-639
  source 1..80: mol_type = other DNA
aaatgatggtgttgtccagtatatgaggctagttcaagctgagataagttatgttagagagcacttgatcaaaactgagg

SEQ ID NO: 16563 - DNA, 80 bp, synthetic construct
  misc_feature 1..80: note = Synthetic: >NC_005222.1-cand-640-719
  source 1..80: mol_type = other DNA
agagagctgcactagaagccatgtttaatttaaaattcaacataagtacacacaaaagccagccctattacataccagat

SEQ ID NO: 16564 - DNA, 80 bp, synthetic construct
  misc_feature 1..80: note = Synthetic: >NC_005222.1-cand-730-809
  source 1..80: mol_type = other DNA
tggaaccaataggagcaaatattgaagacttagtggactattcgaaagactggttgtctagagctagaaatttttcattt

SEQ ID NO: 16565 - DNA, 80 bp, synthetic construct
  misc_feature 1..80: note = Synthetic: >NC_005222.1-cand-800-879
  source 1..80: mol_type = other DNA
tttttcattttttgaagttaaaggtacagcagtgttcgagtgctttaattcaaatgaggccaatcattgtcaaagatatc

SEQ ID NO: 16566 - DNA, 80 bp, synthetic construct
  misc_feature 1..80: note = Synthetic: >NC_005222.1-cand-880-959
  source 1..80: mol_type = other DNA
ctatgtcccgaaagcctagaaatttcctactcatacaatgttctttaatcacatcttataaacctgctaccacattgtca

SEQ ID NO: 16567 - DNA, 80 bp, synthetic construct
  misc_feature 1..80: note = Synthetic: >NC_005222.1-cand-960-1039
  source 1..80: mol_type = other DNA
gatcaaattgatagtagaagggcctgttcatacattctaaacttaattccagatacaccagcatcctatctgatccatga

SEQ ID NO: 16568 - DNA, 80 bp, synthetic construct
  misc_feature 1..80: note = Synthetic: >NC_005222.1-cand-1040-1119
  source 1..80: mol_type = other DNA
tatggcatatagatacataaacctaacaagagaagatatgattaattattatgccccgcggatacagtttaaacagacac

SEQ ID NO: 16569 - DNA, 80 bp, synthetic construct
  misc_feature 1..80: note = Synthetic: >NC_005222.1-cand-1120-1199
  source 1..80: mol_type = other DNA
aaaatgtaagagagccaggaacgtttaagttgacatcaagtatgttgagagcagaatcaaaagcaatgctagatttactt

SEQ ID NO: 16570 - DNA, 80 bp, synthetic construct
  misc_feature 1..80: note = Synthetic: >NC_005222.1-cand-1210-1289
  source 1..80: mol_type = other DNA
aaagtggtgaaaagcatggtgcacaaatagagagcctaaatattgctagtcatattgtacagtctgaatctgttagcctg

SEQ ID NO: 16571 - DNA, 80 bp, synthetic construct
  misc_feature 1..80: note = Synthetic: >NC_005222.1-cand-1310-1389
  source 1..80: mol_type = other DNA
tttagaattgaatataactgagccatcaactcaagaatattccacaactaagcatacttatgtcgatacagtgttagaca

SEQ ID NO: 16572 - DNA, 80 bp, synthetic construct
  misc_feature 1..80: note = Synthetic: >NC_005222.1-cand-1390-1469
  source 1..80: mol_type = other DNA
agttttttcaaaatgaaacccagaagtacctgatagatgtgttgaaaaaaacaacagcatggcacataggtcatctcata

SEQ ID NO: 16573 - DNA, 80 bp, synthetic construct
  misc_feature 1..80: note = Synthetic: >NC_005222.1-cand-1470-1549
  source 1..80: mol_type = other DNA
agggatataacagaaagtttaattgctcattcaggattaaaaagatcaaagtattggtccttacactcatacaataacgg

SEQ ID NO: 16574 - DNA, 80 bp, synthetic construct
  misc_feature 1..80: note = Synthetic: >NC_005831.2-cand-16370-16449
  source 1..80: mol_type = other DNA
tataaacatattgtttatgttggtgatccacaacaacttcctgcacctagagtaatgattactaaaggtgttatggagcc

SEQ ID NO: 16575 - DNA, 80 bp, synthetic construct
  misc_feature 1..80: note = Synthetic: >NC_005831.2-cand-16450-16529
  source 1..80: mol_type = other DNA
tgttgattataacgttgttactcaacgtatgtgtgctataggccctgatgtttttcttcataaatgttatagatgtcctg

SEQ ID NO: 16576 - DNA, 80 bp, synthetic construct
  misc_feature 1..80: note = Synthetic: >NC_005831.2-cand-16530-16609
  source 1..80: mol_type = other DNA
ctgaaatagttaatacagtttctgaacttgtttatgagaacaagtttgtccctgttaaacctgctagtaaacagtgtttt

SEQ ID NO: 16577 - DNA, 80 bp, synthetic construct
  misc_feature 1..80: note = Synthetic: >NC_005831.2-cand-16610-16689
  source 1..80: mol_type = other DNA
aaagtcttttttaagggtaatgtacaggttgacaatggttctagtattaacagaaagcagcttgaaatagttaagctgtt

SEQ ID NO: 16578 - DNA, 80 bp, synthetic construct
  misc_feature 1..80: note = Synthetic: >NC_005831.2-cand-16690-16769
  source 1..80: mol_type = other DNA
tttagttaaaaatccaagttggagtaaggctgtgtttatttctccttataatagtcagaattatgttgctagtagatttt

SEQ ID NO: 16579 - DNA, 80 bp, synthetic construct
  misc_feature 1..80: note = Synthetic: >NC_005831.2-cand-16770-16849
  source 1..80: mol_type = other DNA
taggacttcaaattcaaactgttgattcttctcaaggtagtgagtatgattatgtaatctatgcacaaacttctgacact

SEQ ID NO: 16580 - DNA, 80 bp, synthetic construct
  misc_feature 1..80: note = Synthetic: >NC_005831.2-cand-16850-16929
  source 1..80: mol_type = other DNA
gcacatgcttgcaatgtaaaccgttttaatgttgctataacacgtgctaagaagggtatattttgtgtaatgtgtgataa

SEQ ID NO: 16581 - DNA, 80 bp, synthetic construct
  misc_feature 1..80: note = Synthetic: >NC_005831.2-cand-16930-17009
  source 1..80: mol_type = other DNA
aactttgtttgattcacttaagttttttgagattaaacatgcagatttacactctagccaggtttgtggcttgtttaaaa

SEQ ID NO: 16582 - DNA, 80 bp, synthetic construct
  misc_feature 1..80: note = Synthetic: >NC_005831.2-cand-17010-17089
  source 1..80: mol_type = other DNA
attgtacacgcactcctcttaatttaccaccaactcatgcacacactttcttgtcgttgtcagatcagtttaagactaca

SEQ ID NO: 16583 - DNA, 80 bp, synthetic construct
  misc_feature 1..80: note = Synthetic: >NC_005831.2-cand-17090-17169
  source 1..80: mol_type = other DNA
ggtgatttagctgttcaaataggttcaaataacgtttgtacttatgaacatgttatatcatttatgggttttaggtttga

SEQ ID NO: 16584 - DNA, 80 bp, synthetic construct
  misc_feature 1..80: note = Synthetic: >NC_005831.2-cand-17170-17249
  source 1..80: mol_type = other DNA
tattagtattcctggtagtcatagtttgttttgtacacgtgactttgctattcgtaatgtgcgtggttggttgggtatgg

SEQ ID NO: 16585 - DNA, 80 bp, synthetic construct
  misc_feature 1..80: note = Synthetic: >NC_005831.2-cand-17250-17329
  source 1..80: mol_type = other DNA
atgttgaaagtgctcatgtttgtggcgataacataggtactaatgttcctttacaggttggtttttcaaatggtgttaat

SEQ ID NO: 16586 - DNA, 80 bp, synthetic construct
  misc_feature 1..80: note = Synthetic: >NC_005831.2-cand-17330-17409
  source 1..80: mol_type = other DNA
tttgttgtgcaaactgaaggttgtgtgtctaccaattttggtgatgttattaaacctgtttgtgcaaaatctccaccagg

SEQ ID NO: 16587 - DNA, 80 bp, synthetic construct
  misc_feature 1..80: note = Synthetic: >NC_005831.2-cand-17410-17489
  source 1..80: mol_type = other DNA
tgaacaatttagacaccttattcctcttttacgtaaaggacaaccttggttaattgttcgtagacgcattgtgcaaatga

SEQ ID NO: 16588 - DNA, 80 bp, synthetic construct
  misc_feature 1..80: note = Synthetic: >NC_005831.2-cand-17490-17569
  source 1..80: mol_type = other DNA
tatctgattatttgtccaatttgtctgacattcttgtctttgttttgtgggcaggtagtttggaattaactacaatgcgt

SEQ ID NO: 16589 - DNA, 80 bp, synthetic construct
  misc_feature 1..80: note = Synthetic: >NC_005831.2-cand-17570-17649
  source 1..80: mol_type = other DNA
tactttgtaaaaatagggccaattaaatattgttattgtggtaattctgccacttgttataattcagttagtaatgaata

SEQ ID NO: 16590 - DNA, 80 bp, synthetic construct
  misc_feature 1..80: note = Synthetic: >NC_005831.2-cand-21470-21549
  source 1..80: mol_type = other DNA
ttcttgacaccacaataccttttggcccgtcctctcaaccttattactgttttataaacagcactatcaacactactcat

SEQ ID NO: 16591 - DNA, 80 bp, synthetic construct
  misc_feature 1..80: note = Synthetic: >NC_005831.2-cand-21550-21629
  source 1..80: mol_type = other DNA
gttagcacttttgtgggtattttaccacccactgtgcgtgaaattgttgttgctagaactggccagttttatattaatgg

SEQ ID NO: 16592 - DNA, 80 bp, synthetic construct
  misc_feature 1..80: note = Synthetic: >NC_005831.2-cand-21630-21709
  source 1..80: mol_type = other DNA
ttttaagtatttcgatttgggtttcatagaagctgtcaattttaatgtcacgactgctagcgccacagatttttggacgg

SEQ ID NO: 16593 - DNA, 80 bp, synthetic construct
  misc_feature 1..80: note = Synthetic: >NC_005831.2-cand-21710-21789
  source 1..80: mol_type = other DNA
ttgcatttgctacttttgttgatgttttggttaatgttagtgcaactaacattcaaaacttactttattgcgattctcca

SEQ ID NO: 16594 - DNA, 80 bp, synthetic construct
  misc_feature 1..80: note = Synthetic: >NC_005831.2-cand-21790-21869
  source 1..80: mol_type = other DNA
tttgaaaagttgcagtgtgagcacttgcagtttggattgcaggatggtttttattctgcaaattttcttgatgataatgt

SEQ ID NO: 16595 - DNA, 80 bp, synthetic construct
  misc_feature 1..80: note = Synthetic: >NC_005831.2-cand-21870-21949
  source 1..80: mol_type = other DNA
tttgcctgagacttatgttgcactccccatttattatcaacacacggacataaattttactgcaactgcatcttttggtg

SEQ ID NO: 16596 - DNA, 80 bp, synthetic construct
  misc_feature 1..80: note = Synthetic: >NC_005831.2-cand-21950-22029
  source 1..80: mol_type = other DNA
gttcttgttatgtttgtaaaccacaccaggttaatatatctcttaatggtaacacttcagtgtgtgttagaacatctcat

SEQ ID NO: 16597 - DNA, 80 bp, synthetic construct
  misc_feature 1..80: note = Synthetic: >NC_005831.2-cand-22030-22109
  source 1..80: mol_type = other DNA
ttttcaattaggtatatttataaccgcgttaagagtggttcaccaggtgactcttcatggcacatttatttaaagagtgg

SEQ ID NO: 16598 - DNA, 80 bp, synthetic construct
  misc_feature 1..80: note = Synthetic: >NC_005831.2-cand-22110-22189
  source 1..80: mol_type = other DNA
cacttgtccattttctttttctaagttaaataattttcaaaagttcaagactatttgtttctcaaccgtcgaagtgcctg

SEQ ID NO: 16599 - DNA, 80 bp, synthetic construct
  misc_feature 1..80: note = Synthetic: >NC_005831.2-cand-22190-22269
  source 1..80: mol_type = other DNA
gtagttgtaattttccgcttgaagccacctggcattacacttcttatactattgttggtgctttgtatgttacttggtct

SEQ ID NO: 16600 - DNA, 80 bp, synthetic construct
  misc_feature 1..80: note = Synthetic: >NC_005831.2-cand-22270-22349
  source 1..80: mol_type = other DNA
gaaggtaattctattactggtgtaccttatcctgtctctggtattcgtgagtttagtaatttagttttaaataattgtac

SEQ ID NO: 16601 - DNA, 80 bp, synthetic construct
  misc_feature 1..80: note = Synthetic: >NC_005831.2-cand-22360-22439
  source 1..80: mol_type = other DNA
atttatgattatgttggtactggaattatacgttcttcaaaccagtcacttgctggtggtattacatatgtttctaactc

SEQ ID NO: 16602 - DNA, 80 bp, synthetic construct
  misc_feature 1..80: note = Synthetic: >NC_005831.2-cand-22440-22519
  source 1..80: mol_type = other DNA
tggtaatttacttggttttaaaaatgtttccactggtaacatttttattgtgacaccatgtaaccaaccagaccaagtag

SEQ ID NO: 16603 - DNA, 80 bp, synthetic construct
  misc_feature 1..80: note = Synthetic: >NC_005831.2-cand-22520-22599
  source 1..80: mol_type = other DNA
ctgtttatcaacaaagcattattggtgccatgaccgctgttaatgagtctagatatggcttgcaaaacttactacagtta

SEQ ID NO: 16604 - DNA, 80 bp, synthetic construct
  misc_feature 1..80: note = Synthetic: >NC_005831.2-cand-22600-22679
  source 1..80: mol_type = other DNA
cctaacttttattatgttagtaatggtggtaacaattgcactacggccgttatgacttattctaattttggtatttgtgc

SEQ ID NO: 16605 - DNA, 80 bp, synthetic construct
  misc_feature 1..80: note = Synthetic: >NC_005831.2-cand-22680-22759
  source 1..80: mol_type = other DNA
tgatggttctttgattcctgttcgtccgcgtaattctagtgataatggtatttcagccataatcactgctaatttatcca

SEQ ID NO: 16606 - DNA, 80 bp, synthetic construct
  misc_feature 1..80: note = Synthetic: >NC_006213.1-cand-6710-6789
  source 1..80: mol_type = other DNA
aaattgcatcaaagcttacgtgtaagcttgtagctttagcttttaaaaatgcatttttgacatttaagtggagtatggtt

SEQ ID NO: 16607 - DNA, 80 bp, synthetic construct
  misc_feature 1..80: note = Synthetic: >NC_006213.1-cand-6790-6869
  source 1..80: mol_type = other DNA
gctagaggtgcttgcattatagcgactatatttctattgtggtttaattttatatatgccaatgtaatttttagtgattt

SEQ ID NO: 16608 - DNA, 80 bp, synthetic construct
  misc_feature 1..80: note = Synthetic: >NC_006213.1-cand-6870-6949
  source 1..80: mol_type = other DNA
ttatttgcctaaaatcggtttcttgccgacttttgttggtaagattgcacagtggattaagaacacttttagtcttgtaa

SEQ ID NO: 16609 - DNA, 80 bp, synthetic construct
  misc_feature 1..80: note = Synthetic: >NC_006213.1-cand-6950-7029
  source 1..80: mol_type = other DNA
ctatttgtgatctatattccattcaggatgtgggttttaagaatcagtattgtaatggaagtattgcatgtcagttctgc

SEQ ID NO: 16610 - DNA, 80 bp, synthetic construct
  misc_feature 1..80: note = Synthetic: >NC_006213.1-cand-7030-7109
  source 1..80: mol_type = other DNA
ttggcaggatttgatatgttagataattataaagccattgatgtagtacagtatgaagctgataggagagcatttgttga

SEQ ID NO: 16611 - DNA, 80 bp, synthetic construct
  misc_feature 1..80: note = Synthetic: >NC_006213.1-cand-7110-7189
  source 1..80: mol_type = other DNA
ttatacaggtgtgttaaagattgtcattgaattgatagttagttacgccctgtatacggcatggttttatccattgtttg

SEQ ID NO: 16612 - DNA, 80 bp, synthetic construct
  misc_feature 1..80: note = Synthetic: >NC_006213.1-cand-7190-7269
  source 1..80: mol_type = other DNA
cccttatcagtattcagatcttgaccacttggctgcctgagctttttatgcttagtacattacattggagttttaggttg

SEQ ID NO: 16613 - DNA, 80 bp, synthetic construct
  misc_feature 1..80: note = Synthetic: >NC_006213.1-cand-7270-7349
  source 1..80: mol_type = other DNA
ctggtggctttagctaatatgttaccagcacatgtgtttatgaggttttatattattattgcctcttttattaagctctt

SEQ ID NO: 16614 - DNA, 80 bp, synthetic construct
  misc_feature 1..80: note = Synthetic: >NC_006213.1-cand-7350-7429
  source 1..80: mol_type = other DNA
tagcttgtttaggcatgttgcctatggttgtagtaaatctggttgtttgttttgttacaagaggaatcgtagtctacgtg

SEQ ID NO: 16615 - DNA, 80 bp, synthetic construct
  misc_feature 1..80: note = Synthetic: >NC_006213.1-cand-7430-7509
  source 1..80: mol_type = other DNA
ttaaatgtagtactatcgttggtggcatgatacgctattacgatgttatggctaatggtggcactggcttttgttcaaaa

SEQ ID NO: 16616 - DNA, 80 bp, synthetic construct
  misc_feature 1..80: note = Synthetic: >NC_006213.1-cand-7510-7589
  source 1..80: mol_type = other DNA
catcaatggaattgcattgattgtgattcttataaaccaggtaatacttttattactgttgaggccgctcttgatctatc

SEQ ID NO: 16617 - DNA, 80 bp, synthetic construct
  misc_feature 1..80: note = Synthetic: >NC_006213.1-cand-7590-7669
  source 1..80: mol_type = other DNA
taaggaattgaaacggcccattcagcctacagatgttgcttatcatacggttactgatgttaagcaagttggttgttcta

SEQ ID NO: 16618 - DNA, 80 bp, synthetic construct
  misc_feature 1..80: note = Synthetic: >NC_006213.1-cand-7670-7749
  source 1..80: mol_type = other DNA
tgcgcttgttctatgatcgtgatggacagcgcacatatgatgatgttaatgctagtttgtttgtggattatagtaatttg

SEQ ID NO: 16619 - DNA, 80 bp, synthetic construct
  misc_feature 1..80: note = Synthetic: >NC_006213.1-cand-7750-7829
  source 1..80: mol_type = other DNA
ctacattctaaggttaagagtgtgcctaatatgcatgttgtggtagtggaaaatgatgctgataaagccaattttctgaa

SEQ ID NO: 16620 - DNA, 80 bp, synthetic construct
  misc_feature 1..80: note = Synthetic: >NC_006213.1-cand-7830-7909
  source 1..80: mol_type = other DNA
tgctgctgtattttatgcacagtctttgtttagacctattttaatggttgataaaaatctgataactactgctaacactg

SEQ ID NO: 16621 - DNA, 80 bp, synthetic construct
  misc_feature 1..80: note = Synthetic: >NC_006213.1-cand-7910-7989
  source 1..80: mol_type = other DNA
gtacgtctgttacagaaactatgtttgatgtttatgtggatacatttttgtctatgtttgatgtggataaaaagagtctt

SEQ ID NO: 16622 - DNA, 80 bp, synthetic construct
  misc_feature 1..80: note = Synthetic: >NC_006213.1-cand-13150-13229
  source 1..80: mol_type = other DNA
ccagatgttgatgggttgtgcaaattacgcggcaagtttgtacaagtgcctgtaggtataaaagatcctgtgtcttatgt

SEQ ID NO: 16623 - DNA, 80 bp, synthetic construct
  misc_feature 1..80: note = Synthetic: >NC_006213.1-cand-13230-13309
  source 1..80: mol_type = other DNA
tttgacacatgatgtttgtcgagtttgtggattttggcgggatggaagttgttcatgtgttagcactgacactactgttc

SEQ ID NO: 16624 - DNA, 80 bp, synthetic construct
  misc_feature 1..80: note = Synthetic: >NC_006213.1-cand-13350-13429
  source 1..80: mol_type = other DNA
agtgtagatgcccgtctcgtaccctgcgccagtggtttatctactgatgtacaattaagggcatttgatatttacaatgc

SEQ ID NO: 16625 - DNA, 80 bp, synthetic construct
  misc_feature 1..80: note = Synthetic: >NC_006213.1-cand-13390-13469
  source 1..80: mol_type = other DNA
ctactgatgtacaattaagggcatttgatatttacaatgctagtgttgctggcattggtttacatttaaaagttaattgt

SEQ ID NO: 16626 - DNA, 80 bp, synthetic construct
  misc_feature 1..80: note = Synthetic: >NC_006213.1-cand-13470-13549
  source 1..80: mol_type = other DNA
tgccgttttcagcgtgttgatgagaacggtgataaattagatcagttctttgttgttaagaggacagatctgactatata

SEQ ID NO: 16627 - DNA, 80 bp, synthetic construct
  misc_feature 1..80: note = Synthetic: >NC_006213.1-cand-13560-13639
  source 1..80: mol_type = other DNA
atgaaatgctatgagcgtgtaaaagattgtaagtttgtggctgaacacgatttctttacatttgatgtagaaggtagtcg

SEQ ID NO: 16628 - DNA, 80 bp, synthetic construct
  misc_feature 1..80: note = Synthetic: >NC_006213.1-cand-13640-13719
  source 1..80: mol_type = other DNA
tgtgccacacattgtacgcaaggatttaacaaagtatactatgttggatctttgctatgcattgcgacattttgatcgca

SEQ ID NO: 16629 - DNA, 80 bp, synthetic construct
  misc_feature 1..80: note = Synthetic: >NC_006213.1-cand-13720-13799
  source 1..80: mol_type = other DNA
atgattgcatgctgctttgtgacattctctctatatatgctggttgtgaacaatcctactttactaagaaggattggtat

SEQ ID NO: 16630 - DNA, 80 bp, synthetic construct
  misc_feature 1..80: note = Synthetic: >NC_006213.1-cand-13800-13879
  source 1..80: mol_type = other DNA
gattttgttgaaaatcctgatattattaatgtgtataaaaagctaggacctatttttaatagagccctagttagcgctac

SEQ ID NO: 16631 - DNA, 80 bp, synthetic construct
  misc_feature 1..80: note = Synthetic: >NC_006213.1-cand-13880-13959
  source 1..80: mol_type = other DNA
tgagtttgcggacaaattggtggaggtaggcttagtaggcgttttaacacttgataatcaagatttaaatggtaaatggt

SEQ ID NO: 16632 - DNA, 80 bp, synthetic construct
  misc_feature 1..80: note = Synthetic: >NC_006213.1-cand-13960-14039
  source 1..80: mol_type = other DNA
atgattttggtgactatgttattgcagccccaggatgtggtgttgctatagcagattcttattattcttatatcatgcct

SEQ ID NO: 16633 - DNA, 80 bp, synthetic construct
  misc_feature 1..80: note = Synthetic: >NC_006213.1-cand-14040-14119
  source 1..80: mol_type = other DNA
atgctgaccatgtgtcatgcattggattgcgaattgtatgtgaataatgcttatagactatttgatcttgtacagtatga

SEQ ID NO: 16634 - DNA, 80 bp, synthetic construct
  misc_feature 1..80: note = Synthetic: >NC_006213.1-cand-14120-14199
  source 1..80: mol_type = other DNA
ttttactgattacaagcttgaattgtttaataagtattttaagcactggagtatgccatatcatcctaacactgttgatt

SEQ ID NO: 16635 - DNA, 80 bp, synthetic construct
  misc_feature 1..80: note = Synthetic: >NC_006213.1-cand-14200-14279
  source 1..80: mol_type = other DNA
gtcaggatgatcggtgtattatacattgtgctaattttaacatactttttagtatggttttacctaatacatgttttggg

SEQ ID NO: 16636 - DNA, 80 bp, synthetic construct
  misc_feature 1..80: note = Synthetic: >NC_006213.1-cand-14280-14359
  source 1..80: mol_type = other DNA
cctcttgttaggcaaatttttgtggatggtgtgccttttgttgtttcaattggctaccattataaagaacttggtattgt

SEQ ID NO: 16637 - DNA, 80 bp, synthetic construct
  misc_feature 1..80: note = Synthetic: >NC_006213.1-cand-14360-14439
  source 1..80: mol_type = other DNA
gatgaatatggatgtggatacacatcgttatcgcttgtctttaaaagacttgcttttatatgctgctgatccagctttgc

SEQ ID NO: 16638 - DNA, 80 bp, synthetic construct
  misc_feature 1..80: note = Synthetic: >NC_007544.1-cand-1180-1259
  source 1..80: mol_type = other DNA
taaatagaattgaatcgcaacaaatggatgtgctatgatcctccaaaatctgtgtctgatcgcaacagactaaactctat

SEQ ID NO: 16639 - DNA, 80 bp, synthetic construct
  misc_feature 1..80: note = Synthetic: >NC_007545.1-cand-0-79
  source 1..80: mol_type = other DNA
tttaaattgcacgtcggtcccagctgatcactggtgccatggccgagctagcctgtttcgtttccttctcactgactgaa

SEQ ID NO: 16640 - DNA, 80 bp, synthetic construct
  misc_feature 1..80: note = Synthetic: >NC_007545.1-cand-40-119
  source 1..80: mol_type = other DNA
ggccgagctagcctgtttcgtttccttctcactgactgaagataaagtagtatggtatccaattaataaaaaagcagtac

SEQ ID NO: 16641 - DNA, 80 bp, synthetic construct
  misc_feature 1..80: note = Synthetic: >NC_007545.1-cand-130-209
  source 1..80: mol_type = other DNA
gtgtgctaaagtggaaaaagatcagaggagtaattattatgatactatactatatggtgttgcaccaccaccggagttta

SEQ ID NO: 16642 - DNA, 80 bp, synthetic construct
  misc_feature 1..80: note = Synthetic: >NC_007545.1-cand-190-269
  source 1..80: mol_type = other DNA
tgcaccaccaccggagtttagaaatagatttaaaacaaatgaaagatatggcttagactatgaatcagatcaatataccg

SEQ ID NO: 16643 - DNA, 80 bp, synthetic construct
  misc_feature 1..80: note = Synthetic: >NC_007545.1-cand-280-359
  source 1..80: mol_type = other DNA
tctgttagcagatacattgaatatggtgtctatgccaactgaaaaatttcaatttgacatagttaaaacagtagtgcaag

SEQ ID NO: 16644 - DNA, 80 bp, synthetic construct
  misc_feature 1..80: note = Synthetic: >NC_007545.1-cand-380-459
  source 1..80: mol_type = other DNA
ctttgcagaataaaagatgttaatgatattttgaatgcaaatgtgaaattaagagtaaaagcagttatgattgcatgcaa

SEQ ID NO: 16645 - DNA, 80 bp, synthetic construct
  misc_feature 1..80: note = Synthetic: >NC_007545.1-cand-470-549
  source 1..80: mol_type = other DNA
gaaactgaaactactccattgacagagagtaatgatattgtatatcaggattcatattttacgattacaaaattagatta

SEQ ID NO: 16646 - DNA, 80 bp, synthetic construct
  misc_feature 1..80: note = Synthetic: >NC_007545.1-cand-570-649
  source 1..80: mol_type = other DNA
cattaatggctgatgaatataaaattacaattaacacaaaaactgatattccagatcgtaatcaaactgcatttgcagct

SEQ ID NO: 16647 - DNA, 80 bp, synthetic construct
  misc_feature 1..80: note = Synthetic: >NC_007545.1-cand-670-749
  source 1..80: mol_type = other DNA
taaatttgcagcaatatctcatggtaaacggcattggaggcttgttcttcattctcagttgatgtctcatgcagaaagat

SEQ ID NO: 16648 - DNA, 80 bp, synthetic construct
  misc_feature 1..80: note = Synthetic: >NC_007545.1-cand-760-839
  source 1..80: mol_type = other DNA
aattaagtcggataaaaaacatggtagacaattctcttatgatgatggagatatggctttcgtacatccaggatggaaaa

SEQ ID NO: 16649 - DNA, 80 bp, synthetic construct
  misc_feature 1..80: note = Synthetic: >NC_007545.1-cand-850-929
  source 1..80: mol_type = other DNA
tcaattatgtggtggtactacatttgaagttgctaaaacatcactatacagcataaaaccatcaaaaactgtgcgcacag

SEQ ID NO: 16650 - DNA, 80 bp, synthetic construct
  misc_feature 1..80: note = Synthetic: >NC_007545.1-cand-940-1019
  source 1..80: mol_type = other DNA
aattgaaagtgacttaatttctatggttggaaattaataatgtagtgagtgaaggttacaagcaataggaattgcagctg

SEQ ID NO: 16651 - DNA, 80 bp, synthetic construct
  misc_feature 1..80: note = Synthetic: >NC_007546.1-cand-0-79
  source 1..80: mol_type = other DNA
taaaaagatcagttgaggacaaatcgttcaagatgataagcagaaacaggcgcagaaataatcaacaaaaaaacatagaa

SEQ ID NO: 16652 - DNA, 80 bp, synthetic construct
  misc_feature 1..80: note = Synthetic: >NC_007546.1-cand-80-159
  source 1..80: mol_type = other DNA
aaagagaaacaattagagactataattaacaaagaagttaaggaaaacaaagattctatgaaagaagataagctagtagt

SEQ ID NO: 16653 - DNA, 80 bp, synthetic construct
  misc_feature 1..80: note = Synthetic: >NC_007546.1-cand-150-229
  source 1..80: mol_type = other DNA
agctagtagttacagaagaaagcaatggagacgtcacaactgctaaagaacaatcgaataatattaatttacaaaagaat

SEQ ID NO: 16654 - DNA, 80 bp, synthetic construct
  misc_feature 1..80: note = Synthetic: >NC_007547.1-cand-1350-1429
  source 1..80: mol_type = other DNA
aagaaatccaatcccattaggaagaagagatgttccaggacgtagaacaagagctatttttatattaccatatcagtatt

SEQ ID NO: 16655 - DNA, 80 bp, synthetic construct
  misc_feature 1..80: note = Synthetic: >NC_007547.1-cand-1430-1509
  source 1..80: mol_type = other DNA
ttatcgctcaacattcatttgctgaaataatgcttaactatgcaaaacgtgaaagagagtattcagagttttattctcaa

SEQ ID NO: 16656 - DNA, 80 bp, synthetic construct
  misc_feature 1..80: note = Synthetic: >NC_007547.1-cand-1510-1589
  source 1..80: mol_type = other DNA
gcaaatcaagtattatcgtatggagatgtaactagatatcttgattcaaatagtatattgtgctttactgatgtatcaca

SEQ ID NO: 16657 - DNA, 80 bp, synthetic construct
  misc_feature 1..80: note = Synthetic: >NC_007547.1-cand-1590-1669
  source 1..80: mol_type = other DNA
gtgggatgcttctcaacataatactaaagtattacgaagatcaataatacgagcaatgaaaagactaaaacagttgacgc

SEQ ID NO: 16658 - DNA, 80 bp, synthetic construct
  misc_feature 1..80: note = Synthetic: >NC_007547.1-cand-1670-1749
  source 1..80: mol_type = other DNA
ataatataaatatacataaagctattaatatatacatacaatctcaagaaaatttagaaaattcatatgtattgatagat

SEQ ID NO: 16659 - DNA, 80 bp, synthetic construct
  misc_feature 1..80: note = Synthetic: >NC_007547.1-cand-1750-1829
  source 1..80: mol_type = other DNA
aaaaaagccattcaatatggcgctacggcatcaggcgaaaaacagactaagatcatgaattcaatagcgaataaagcttt

SEQ ID NO: 16660 - DNA, 80 bp, synthetic construct
  misc_feature 1..80: note = Synthetic: >NC_007547.1-cand-1830-1909
  source 1..80: mol_type = other DNA
aatacagacagttctcggaaaacttatgacagattatacatttgacgttaaaatgatacgggttgatggagatgacaatt

SEQ ID NO: 16661 - DNA, 80 bp, synthetic construct
  misc_feature 1..80: note = Synthetic: >NC_007547.1-cand-1910-1989
  source 1..80: mol_type = other DNA
atgctatagtacgctttcctatcgcaataactgaaaaattactgtcagaattcacatcaaaattaagatcatattactca

SEQ ID NO: 16662 - DNA, 80 bp, synthetic construct
  misc_feature 1..80: note = Synthetic: >NC_007547.1-cand-1990-2069
  source 1..80: mol_type = other DNA
gaaatgaatgtaaaagtaaaagcattagcatcactcacaggatgtgaaatcgcaaaaagatatgtagctggtggaatgtt

SEQ ID NO: 16663 - DNA, 80 bp, synthetic construct
  misc_feature 1..80: note = Synthetic: >NC_007547.1-cand-2070-2149
  source 1..80: mol_type = other DNA
gttttttagagctggtgtgaacatactccatcatgaaaagagaaaccaagattcagcatatgatatggcggctacattat

SEQ ID NO: 16664 - DNA, 80 bp, synthetic construct
  misc_feature 1..80: note = Synthetic: >NC_007547.1-cand-2150-2229
  source 1..80: mol_type = other DNA
atgcaaattacatagtaaatgctttaagaggacttactatgtcaagaacatttatattaactaaaatatgtcagatgact

SEQ ID NO: 16665 - DNA, 80 bp, synthetic construct
  misc_feature 1..80: note = Synthetic: >NC_007547.1-cand-2240-2319
  source 1..80: mol_type = other DNA
tcactggtacattgagattgtttccaatgaaatcaatattggcattgaattcagcattcaaagtatttgatgaagtagat

SEQ ID NO: 16666 - DNA, 80 bp, synthetic construct
  misc_feature 1..80: note = Synthetic: >NC_007547.1-cand-2320-2399
  source 1..80: mol_type = other DNA
tatgttattaactatccaatatcaaatctatttatacagttgcaaaggaagctaagttcaattaaagcgaaatctaaaat

SEQ ID NO: 16667 - DNA, 80 bp, synthetic construct
  misc_feature 1..80: note = Synthetic: >NC_007547.1-cand-2400-2479
  source 1..80: mol_type = other DNA
tgctgataatatcgcaaagtcaccgcagtttaaatcatacgttgaattgctcaacaaatcactaactactgatgaaaatc

SEQ ID NO: 16668 - DNA, 80 bp, synthetic construct
  misc_feature 1..80: note = Synthetic: >NC_007547.1-cand-2480-2559
  source 1..80: mol_type = other DNA
caattgtttcagatggaattcgattgactgaaaaagcaaaactcaatagttatgcaccaatagcattagaaaaaagacgg

SEQ ID NO: 16669 - DNA, 80 bp, synthetic construct
  misc_feature 1..80: note = Synthetic: >NC_007547.1-cand-2560-2639
  source 1..80: mol_type = other DNA
gatcaatttagtataatggtatcatttctacaaaatccaactacttttaaaagtgaaactgtagttactataaatgatgt

SEQ ID NO: 16670 - DNA, 80 bp, synthetic construct
  misc_feature 1..80: note = Synthetic: >NC_007557.1-cand-0-79
  source 1..80: mol_type = other DNA
ttttgttcatcacaaatcacgatggaaggaactagtgaaagtccagtgttagatgaattcgaagtcaacaacaatgacta

SEQ ID NO: 16671 - DNA, 80 bp, synthetic construct
  misc_feature 1..80: note = Synthetic: >NC_007557.1-cand-80-159
  source 1..80: mol_type = other DNA
tgataatgattttatttctagattttcacaaaatccgttaaatgctttttctttatttacagatgggaacttacaggaat

SEQ ID NO: 16672 - DNA, 80 bp, synthetic construct
  misc_feature 1..80: note = Synthetic: >NC_007557.1-cand-170-249
  source 1..80: mol_type = other DNA
caattcgttagagaagatagtcatacacgttgtgttaatagttatttcattatgtgggataaaagcccaaacatcaaaga

SEQ ID NO: 16673 - DNA, 80 bp, synthetic construct
  misc_feature 1..80: note = Synthetic: >NC_007557.1-cand-260-339
  source 1..80: mol_type = other DNA
tgtcagattactgttttggaaaatatataatgtgattaacaatctagtaaataaagtgataaatagagagaagattatta

SEQ ID NO: 16674 - DNA, 80 bp, synthetic construct
  misc_feature 1..80: note = Synthetic: >NC_007557.1-cand-350-429
  source 1..80: mol_type = other DNA
agttgataatagatttagagagtttgaagaacgttttagacttttattacttcagcatgataaaaacattgctaaacagg

SEQ ID NO: 16675 - DNA, 80 bp, synthetic construct
  misc_feature 1..80: note = Synthetic: >NC_007557.1-cand-440-519
  source 1..80: mol_type = other DNA
acagtataataagttggataatttcgctgaatccataaagagtgaattcaacttaaaagtcgcagagatggagagaagat

SEQ ID NO: 16676 - DNA, 80 bp, synthetic construct
  misc_feature 1..80: note = Synthetic: >NC_007557.1-cand-530-609
  source 1..80: mol_type = other DNA
aaagtggagatgtgatatgatagctaacaaagcaatgaacacaatagttctagcgaatacagttgattcaaataacaaag

SEQ ID NO: 16677 - DNA, 80 bp, synthetic construct
  misc_feature 1..80: note = Synthetic: >NC_007558.1-cand-0-79
  source 1..80: mol_type = other DNA
cttaaaacatcaatcgttgctgcaacagcggttggttacctcttgccttagaatgagcgaagtgcctcgatttgaattaa

SEQ ID NO: 16678 - DNA, 80 bp, synthetic construct
  misc_feature 1..80: note = Synthetic: >NC_007558.1-cand-40-119
  source 1..80: mol_type = other DNA
tcttgccttagaatgagcgaagtgcctcgatttgaattaagaagcaaacgaaagattggaaagaaacaaaaagttgatat

SEQ ID NO: 16679 - DNA, 80 bp, synthetic construct
  misc_feature 1..80: note = Synthetic: >NC_007558.1-cand-150-229
  source 1..80: mol_type = other DNA
acagatcgactgtgagacagattctcttatttcagaatcggttagttcaactcatagttacgaagattattctaaagcgt

SEQ ID NO: 16680 - DNA, 80 bp, synthetic construct
  misc_feature 1..80: note = Synthetic: >NC_007558.1-cand-250-329
  source 1..80: mol_type = other DNA
actccagccgatgtaaatgactcagcttctacaatcgttgacagtgtttgtgaagagtcttggtatgataaaacgattaa

SEQ ID NO: 16681 - DNA, 80 bp, synthetic construct
  misc_feature 1..80: note = Synthetic: >NC_007558.1-cand-360-439
  source 1..80: mol_type = other DNA
agataaaaaacttaaaagaatagaaaaagttaaagagaataatcaaaatgattcaatgagtttgcaaatagctcaattat

SEQ ID NO: 16682 - DNA, 80 bp, synthetic construct
  misc_feature 1..80: note = Synthetic: >NC_007558.1-cand-460-539
  source 1..80: mol_type = other DNA
gaatcagaaacaaagttgaaaacacttgattcagcttacaatactataattacacaagccgacaatttgactactccaca

SEQ ID NO: 16683 - DNA, 80 bp, synthetic construct
  misc_feature 1..80: note = Synthetic: >NC_007558.1-cand-550-629
  source 1..80: mol_type = other DNA
ttaataagtgctatattagcaactatgagataatcgagagccggatacattcccctcattactaagggtcagcccctgag

SEQ ID NO: 16684 - DNA, 80 bp, synthetic construct
  misc_feature 1..80: note = Synthetic: >NC_007569.1-cand-10-89
  source 1..80: mol_type = other DNA
cgacaatgtctgattttggaattaatcttgatgccatttgcgacaatgtaaaaaaaggccaaacagaatcaagaactggt

SEQ ID NO: 16685 - DNA, 80 bp, synthetic construct
  misc_feature 1..80: note = Synthetic: >NC_007569.1-cand-100-179
  source 1..80: mol_type = other DNA
caaatcggagttcacgaagaatggattttgttgatgatgaagagttaagtacttactttaactcaaaagcctctgtgaca

SEQ ID NO: 16686 - DNA, 80 bp, synthetic construct
  misc_feature 1..80: note = Synthetic: >NC_011500.2-cand-830-909
  source 1..80: mol_type = other DNA
gataagaataaattaattgctgcaatgatgacgagtaagtatactcggttctatgctcatgataataattttggaaggtt

SEQ ID NO: 16687 - DNA, 80 bp, synthetic construct
  misc_feature 1..80: note = Synthetic: >NC_011500.2-cand-910-989
  source 1..80: mol_type = other DNA
gaaaatgacaatatttgagttgggacatcattgtcagcctaactacgtggcatctaatcacccaggcaatgcttccgata

SEQ ID NO: 16688 - DNA, 80 bp, synthetic construct
  misc_feature 1..80: note = Synthetic: >NC_011500.2-cand-970-1049
  source 1..80: mol_type = other DNA
cccaggcaatgcttccgatatccagtactgtaaatggtgtaatataaaatattttcttagtaaaattgattggcggattc

SEQ ID NO: 16689 - DNA, 80 bp, synthetic construct
  misc_feature 1..80: note = Synthetic: >NC_011500.2-cand-1040-1119
  source 1..80: mol_type = other DNA
tggcggattcgtgatatgtataatttattgatggaatttattaaggattgttataaaagtaatgttaacgttggacattg

SEQ ID NO: 16690 - DNA, 80 bp, synthetic construct
  misc_feature 1..80: note = Synthetic: >NC_011500.2-cand-1120-1199
  source 1..80: mol_type = other DNA
tagttctgttgaaaacatatatcctttaattaaaagattaatttggagtttgtttactaatcacatggatcaaacaattg

SEQ ID NO: 16691 - DNA, 80 bp, synthetic construct
  misc_feature 1..80: note = Synthetic: >NC_011500.2-cand-1200-1279
  source 1..80: mol_type = other DNA
aagaagtgtttaatcacatgtcgccagtgtcagttgaaggtacgaatgtcatcatgttgattcttggattgaatattagt

SEQ ID NO: 16692 - DNA, 80 bp, synthetic construct
  misc_feature 1..80: note = Synthetic: >NC_011500.2-cand-1280-1359
  source 1..80: mol_type = other DNA
ttgtataatgaaattaagcgcactttgaatgtagatagcataccaatggtacttaatttaaatgaattcagtagtatagt

SEQ ID NO: 16693 - DNA, 80 bp, synthetic construct
  misc_feature 1..80: note = Synthetic: >NC_011500.2-cand-1360-1439
  source 1..80: mol_type = other DNA
taaatcaattagcagtaaatggtataatgttgatgaattggataaattgccaatgtcaataaaatcaacggaggaactga

SEQ ID NO: 16694 - DNA, 80 bp, synthetic construct
  misc_feature 1..80: note = Synthetic: >NC_011500.2-cand-1440-1519
  source 1..80: mol_type = other DNA
ttgaaatgaagaattctggaactttaactgaagaatttgagctactgatctccaactcagaagatgacaatgagtgaaat

SEQ ID NO: 16695 - DNA, 80 bp, synthetic construct
  misc_feature 1..80: note = Synthetic: >NC_011500.2-cand-1520-1599
  source 1..80: mol_type = other DNA
tactaatgtcactatctaattatacagtatttagccatcacaagaccgtccagactagagtagcgcctagctggcaaaat

SEQ ID NO: 16696 - DNA, 80 bp, synthetic construct
  misc_feature 1..80: note = Synthetic: >NC_011501.2-cand-0-79
  source 1..80: mol_type = other DNA
tttaatgcttttcagtggttgatgctcaagatggagtctacgcaacagatggccgtctcaattattaactcttcttttga

SEQ ID NO: 16697 - DNA, 80 bp, synthetic construct
  misc_feature 1..80: note = Synthetic: >NC_011501.2-cand-80-159
  source 1..80: mol_type = other DNA
agctgcagttgtagctgcaacctcagctcttgagaatatgggaatagaatatgattatcaggatatatattctagagtaa

SEQ ID NO: 16698 - DNA, 80 bp, synthetic construct
  misc_feature 1..80: note = Synthetic: >NC_011501.2-cand-170-249
  source 1..80: mol_type = other DNA
tgattttgtgatggacgattctggtgttaaaaataatctgattggtaaagcaataactattgatcaagctttgaataata

SEQ ID NO: 16699 - DNA, 80 bp, synthetic construct
  misc_feature 1..80: note = Synthetic: >NC_011501.2-cand-260-339
  source 1..80: mol_type = other DNA
tgctataagaaatagaaactggcttgctgatacttctagagcagctaaattggatgaggatgtaaacaaactaagaatga

SEQ ID NO: 16700 - DNA, 80 bp, synthetic construct
  misc_feature 1..80: note = Synthetic: >NC_011501.2-cand-350-429
  source 1..80: mol_type = other DNA
aaaaggaattgatcaaaaaatgagagttttaaacgcatgcttcagtgtaaaaagaatacctggaaaatcatcatctatta

SEQ ID NO: 16701 - DNA, 80 bp, synthetic construct
  misc_feature 1..80: note = Synthetic: >NC_011501.2-cand-440-519
  source 1..80: mol_type = other DNA
aaaattgatgcgtgataaattggaacgtggtgaagttgaagtggatgattcatttgtggatgaaaaaatggaagtggata

SEQ ID NO: 16702 - DNA, 80 bp, synthetic construct
  misc_feature 1..80: note = Synthetic: >NC_012777.1-cand-2080-2159
  source 1..80: mol_type = other DNA
ctctgactccaattccactatgagaatgtcatccttcatgatgacttttaaaccaggcagtgattccagttttgataaga

SEQ ID NO: 16703 - DNA, 80 bp, synthetic construct
  misc_feature 1..80: note = Synthetic: >NC_012777.1-cand-2160-2239
  source 1..80: mol_type = other DNA
tctctactatgtaatgacagttcctgtcagcatctctcacacacttacttcctatcgtctttgctagcccaataaaccct

SEQ ID NO: 16704 - DNA, 80 bp, synthetic construct
  misc_feature 1..80: note = Synthetic: >NC_012777.1-cand-2240-2319
  source 1..80: mol_type = other DNA
gaagcaacactgctttggaatgcacttttgttcactgaatctgataacagcttttgggtgctttttgtgaagctatggct

SEQ ID NO: 16705 - DNA, 80 bp, synthetic construct
  misc_feature 1..80: note = Synthetic: >NC_012777.1-cand-2320-2399
  source 1..80: mol_type = other DNA
taatttgttttgcagcaccctgatcacagttggtaggttgactgattctatctgaagtgcagaaggaaagagaactttct

SEQ ID NO: 16706 - DNA, 80 bp, synthetic construct
  misc_feature 1..80: note = Synthetic: >NC_012777.1-cand-2340-2419
  source 1..80: mol_type = other DNA
tgatcacagttggtaggttgactgattctatctgaagtgcagaaggaaagagaactttctgacgaagaaccattctgatg

SEQ ID NO: 16707 - DNA, 80 bp, synthetic construct
  misc_feature 1..80: note = Synthetic: >NC_012777.1-cand-2480-2559
  source 1..80: mol_type = other DNA
tgtttgaatagggactttaggacagtgaatgggtctcttgagaacaactcagccaaaaagtcttccctcacctcatcatt

SEQ ID NO: 16708 - DNA, 80 bp, synthetic construct
  misc_feature 1..80: note = Synthetic: >NC_012777.1-cand-2560-2639
  source 1..80: mol_type = other DNA
ttttaaggagttatacaatctccttactaactttcgaacagtcccagtgctatctggaaataagttttctaactgtcttt

SEQ ID NO: 16709 - DNA, 80 bp, synthetic construct
  misc_feature 1..80: note = Synthetic: >NC_012777.1-cand-2640-2719
  source 1..80: mol_type = other DNA
gaatcctgtaacctctggttccatcaatccaatctttgatgtctgtattcacattgagcaagaatggattaatagggaat

SEQ ID NO: 16710 - DNA, 80 bp, synthetic construct
  misc_feature 1..80: note = Synthetic: >NC_012777.1-cand-2720-2799
  source 1..80: mol_type = other DNA
ctacaatacctcaataagttaatacatctcttttgcagaaggttgcatatgttaattggcaccccatttgcagcgcattg

SEQ ID NO: 16711 - DNA, 80 bp, synthetic construct
  misc_feature 1..80: note = Synthetic: >NC_012777.1-cand-2800-2879
  source 1..80: mol_type = other DNA
atccacaatggtgtccacagtttctgacagttgatgcggtgttttgcattttacattgtgtaatgaagctgctacgaact

SEQ ID NO: 16712 - DNA, 80 bp, synthetic construct
  misc_feature 1..80: note = Synthetic: >NC_012777.1-cand-2880-2959
  source 1..80: mol_type = other DNA
ttgttaacaaagggacctcttcaccccaaacaaagaatcttgacttaaattctgcaacgaactcacagagcgagcttttg

SEQ ID NO: 16713 - DNA, 80 bp, synthetic construct
  misc_feature 1..80: note = Synthetic: >NC_012777.1-cand-2940-3019
  source 1..80: mol_type = other DNA
actcacagagcgagcttttgggactgacaaacttattaagctgactagataaataatagtggtagttcaaaaagcatagg

SEQ ID NO: 16714 - DNA, 80 bp, synthetic construct
  misc_feature 1..80: note = Synthetic: >NC_012777.1-cand-3020-3099
  source 1..80: mol_type = other DNA
agctcttcagtgtcatcccttagtgtggctgataattctttgtcaaacaatgatatttgatcatcgctagaagtgaaact

SEQ ID NO: 16715 - DNA, 80 bp, synthetic construct
  misc_feature 1..80: note = Synthetic: >NC_012777.1-cand-3100-3179
  source 1..80: mol_type = other DNA
cttcagctcacctctgaacaaaagcttcagtgtgtagtttatgaacttctcagttattaaaccataataatcagatgcgt

SEQ ID NO: 16716 - DNA, 80 bp, synthetic construct
  misc_feature 1..80: note = Synthetic: >NC_012777.1-cand-3180-3259
  source 1..80: mol_type = other DNA
tatgcaatataccctgacccatgtctaagatgctgctaatgtgagacggaacaataccatgatctaaatgagaaaagatg

SEQ ID NO: 16717 - DNA, 80 bp, synthetic construct
  misc_feature 1..80: note = Synthetic: >NC_012777.1-cand-3260-3339
  source 1..80: mol_type = other DNA
aactcttctgtttttgtgttaatgacaccctgttgtatacctaactgacgttttacaaaggatttggtaatggcattgat

SEQ ID NO: 16718 - DNA, 80 bp, synthetic construct
  misc_feature 1..80: note = Synthetic: >NC_021928.1-cand-7940-8019
  source 1..80: mol_type = other DNA
ttctatttcacatataaagataatatgcaaattaagtttaaatcattattagattaccccaattttattccaactgctac

SEQ ID NO: 16719 - DNA, 80 bp, synthetic construct
  misc_feature 1..80: note = Synthetic: >NC_021928.1-cand-8020-8099
  source 1..80: mol_type = other DNA
aactccccacggatgcattcgaattccatcattctccttaggtcaaacccattggtgttatacccataatataaacctac

SEQ ID NO: 16720 - DNA, 80 bp, synthetic construct
  misc_feature 1..80: note = Synthetic: >NC_021928.1-cand-8100-8179
  source 1..80: mol_type = other DNA
taggatgtgcagaccctgcatctagcaatcaatatgtatcactaggaaccttacaagtcttaaaaatgggtgacccttat

SEQ ID NO: 16721 - DNA, 80 bp, synthetic construct
  misc_feature 1..80: note = Synthetic: >NC_021928.1-cand-8180-8259
  source 1..80: mol_type = other DNA
tttaaagtcgagcatagtcattatttaaatgacgggaggaatcgaaaaggttgttcagtggttgctgtccccgacggatg

SEQ ID NO: 16722 - DNA, 80 bp, synthetic construct
  misc_feature 1..80: note = Synthetic: >NC_021928.1-cand-8260-8339
  source 1..80: mol_type = other DNA
cctgcggaattgtgtgaccatgacaaaaaatgagacagagaatttcaaagacctcaattggcaacacaattacttacata

SEQ ID NO: 16723 - DNA, 80 bp, synthetic construct
  misc_feature 1..80: note = Synthetic: >NC_021928.1-cand-8340-8419
  source 1..80: mol_type = other DNA
catatcatataatggtaccattaaagactcgtataataaatccaccaggatcatccagagattgggttcatatcgcacca

SEQ ID NO: 16724 - DNA, 80 bp, synthetic construct
  misc_feature 1..80: note = Synthetic: >NC_021928.1-cand-8480-8559
  source 1..80: mol_type = other DNA
acggaaaaatcagtgatacataataatcaatcagggaaatattttttccctaattcaactaaattgcaatgccgtaacag

SEQ ID NO: 16725 - DNA, 80 bp, synthetic construct
  misc_feature 1..80: note = Synthetic: >NC_021928.1-cand-8510-8589
  source 1..80: mol_type = other DNA
tcagggaaatattttttccctaattcaactaaattgcaatgccgtaacagcactatggaaaaaataaaaggagcaaaaga

SEQ ID NO: 16726 - DNA, 80 bp, synthetic construct
  misc_feature 1..80: note = Synthetic: >NC_021928.1-cand-8590-8669
  source 1..80: mol_type = other DNA
ttcatacacaataacttacttctcagggagacttatacagagtgcatttctggtttgtgatctaagacaatttctttctg

SEQ ID NO: 16727 - DNA, 80 bp, synthetic construct
  misc_feature 1..80: note = Synthetic: >NC_021928.1-cand-8670-8749
  source 1..80: mol_type = other DNA
aagattgtgaaatcttaattcctagtaatgattacatgatggtcggtgcagagggtcgattatataacattgagaacaac

SEQ ID NO: 16728 - DNA, 80 bp, synthetic construct
  misc_feature 1..80: note = Synthetic: >NC_021928.1-cand-8750-8829
  source 1..80: mol_type = other DNA
atattttattatcagagaggatccagctggtggccttatccgagcctctatagaatcaggttaaaccttagtaagaaata

SEQ ID NO: 16729 - DNA, 80 bp, synthetic construct
  misc_feature 1..80: note = Synthetic: >NC_021928.1-cand-8830-8909
  source 1..80: mol_type = other DNA
tcctagaataactgaaattaaatttacaaaaattgaaatcgccccaagaccaggcaacaaagattgtccaggaaataagg

SEQ ID NO: 16730 - DNA, 80 bp, synthetic construct
  misc_feature 1..80: note = Synthetic: >NC_021928.1-cand-8910-8989
  source 1..80: mol_type = other DNA
cttgcccaaaagaatgtataacgggagtctaccaagatatattgccactaagttatcccaatactgcatttccacactta

SEQ ID NO: 16731 - DNA, 80 bp, synthetic construct
  misc_feature 1..80: note = Synthetic: >NC_021928.1-cand-8990-9069
  source 1..80: mol_type = other DNA
aaacaagcgtattatacaggtttttatcttaataactcgctcgagagacgcaatccaacattttatactgctgacaatct

SEQ ID NO: 16732 - DNA, 80 bp, synthetic construct
  misc_feature 1..80: note = Synthetic: >NC_021928.1-cand-9070-9149
  source 1..80: mol_type = other DNA
agattaccatcaacaggaaagattaggtaaattcaatcttactgctggatactctactacaacttgttttaaacagacca

SEQ ID NO: 16733 - DNA, 80 bp, synthetic construct
  misc_feature 1..80: note = Synthetic: >NC_021928.1-cand-9120-9199
  source 1..80: mol_type = other DNA
actctactacaacttgttttaaacagaccactactgcgaggttatactgtctctacataattgaagtgggtgactcagtc

SEQ ID NO: 16734 - DNA, 80 bp, synthetic construct
  misc_feature 1..80: note = Synthetic: >NC_026425.1-cand-0-79
  source 1..80: mol_type = other DNA
acactcaaatcctggtattcgctctgattgcgatcattccaacaaatgcagacaaaatctgcctcggacatcatgccgtg

SEQ ID NO: 16735 - DNA, 80 bp, synthetic construct
  misc_feature 1..80: note = Synthetic: >NC_026425.1-cand-80-159
  source 1..80: mol_type = other DNA
tcaaacggaaccaaagtaaacacattaactgaaagaggagtggaagtcgtcaatgcaactgaaacagtggaacgaacaaa

SEQ ID NO: 16736 - DNA, 80 bp, synthetic construct
  misc_feature 1..80: note = Synthetic: >NC_026425.1-cand-140-219
  source 1..80: mol_type = other DNA
gaaacagtggaacgaacaaacatccccaggatctgctcaaaagggaaaaggacagttgacctcggtcaatgtggactcct

SEQ ID NO: 16737 - DNA, 80 bp, synthetic construct
  misc_feature 1..80: note = Synthetic: >NC_026425.1-cand-250-329
  source 1..80: mol_type = other DNA
ccaattcctagaattttcagccgatttaattattgagaggcgagaaggaagtgatgtctgttatcctgggaaattcgtga

SEQ ID NO: 16738 - DNA, 80 bp, synthetic construct
  misc_feature 1..80: note = Synthetic: >NC_026425.1-cand-330-409
  source 1..80: mol_type = other DNA
atgaagaagctctgaggcaaattctcagagaatcaggcggaattgacaaggaagcaatgggattcacatacagtggaata

SEQ ID NO: 16739 - DNA, 80 bp, synthetic construct
  misc_feature 1..80: note = Synthetic: >NC_026425.1-cand-410-489
  source 1..80: mol_type = other DNA
agaactaatggagcaaccagtgcatgtaggagatcaggatcttcattctatgcagaaatgaaatggctcctgtcaaacac

SEQ ID NO: 16740 - DNA, 80 bp, synthetic construct
  misc_feature 1..80: note = Synthetic: >NC_026425.1-cand-480-559
  source 1..80: mol_type = other DNA
tgtcaaacacagataatgctgcattcccgcagatgactaagtcatataaaaatacaagaaaaagcccagctctaatagta

SEQ ID NO: 16741 - DNA, 80 bp, synthetic construct
  misc_feature 1..80: note = Synthetic: >NC_026425.1-cand-570-649
  source 1..80: mol_type = other DNA
atcattccgtatcaactgcagagcaaaccaagctatatgggagtggaaacaaactggtgacagttgggagttctaattat

SEQ ID NO: 16742 - DNA, 80 bp, synthetic construct
  misc_feature 1..80: note = Synthetic: >NC_026425.1-cand-650-729
  source 1..80: mol_type = other DNA
caacaatcttttgtaccgagtccaggagcgagaccacaagttaatggtctatctggaagaattgactttcattggctaat

SEQ ID NO: 16743 - DNA, 80 bp, synthetic construct
  misc_feature 1..80: note = Synthetic: >NC_026425.1-cand-690-769
  source 1..80: mol_type = other DNA
ttaatggtctatctggaagaattgactttcattggctaatgctaaatcccaatgatacagtcactttcagtttcaatggg

SEQ ID NO: 16744 - DNA, 80 bp, synthetic construct
  misc_feature 1..80: note = Synthetic: >NC_026425.1-cand-780-859
  source 1..80: mol_type = other DNA
ctccagaccgtgcaagcttcctgagaggaaaatctatgggaatccagagtggagtacaggttgatgccaattgtgaaggg

SEQ ID NO: 16745 - DNA, 80 bp, synthetic construct
  misc_feature 1..80: note = Synthetic: >NC_026425.1-cand-890-969
  source 1..80: mol_type = other DNA
agtaacttgccatttcagaacatagatagcagggcagttggaaaatgtccgagatatgttaagcaaaggagtctgctgct

SEQ ID NO: 16746 - DNA, 80 bp, synthetic construct
  misc_feature 1..80: note = Synthetic: >NC_026425.1-cand-970-1049
  source 1..80: mol_type = other DNA
agcaacagggatgaagaatgttcctgagattccaaaaggaagaggcctatttggtgctatagcgggtttcattgaaaatg

SEQ ID NO: 16747 - DNA, 80 bp, synthetic construct
  misc_feature 1..80: note = Synthetic: >NC_026425.1-cand-1050-1129
  source 1..80: mol_type = other DNA
gatgggaaggcctaattgatggttggtatggtttcagacaccagaatgcacagggagagggaactgctgcagattacaaa

SEQ ID NO: 16748 - DNA, 80 bp, synthetic construct
  misc_feature 1..80: note = Synthetic: >NC_026425.1-cand-1130-1209
  source 1..80: mol_type = other DNA
agcactcaatcggcaattgatcaaataacaggaaaattaaaccggcttatagaaaaaaccaaccaacaatttgagttgat

SEQ ID NO: 16749 - DNA, 80 bp, synthetic construct
  misc_feature 1..80: note = Synthetic: >NC_026425.1-cand-1210-1289
  source 1..80: mol_type = other DNA
agacaatgaattcaatgaggtagagaagcaaatcggtaatgtgataaattggaccagagattctataacagaagtgtggt

SEQ ID NO: 16750 - DNA, 80 bp, synthetic construct
  misc_feature 1..80: note = Synthetic: >NC_038311.1-cand-6510-6589
  source 1..80: mol_type = other DNA
attgtgttattccaagcacttgtttaaatcaacatattatgaagtggcaggtggagttccttctgggtgttctggaacca

SEQ ID NO: 16751 - DNA, 80 bp, synthetic construct
  misc_feature 1..80: note = Synthetic: >NC_038311.1-cand-6550-6629
  source 1..80: mol_type = other DNA
gaagtggcaggtggagttccttctgggtgttctggaaccagtatattcaatactatgattaataacattataataagaac

SEQ ID NO: 16752 - DNA, 80 bp, synthetic construct
  misc_feature 1..80: note = Synthetic: >NC_038311.1-cand-6630-6709
  source 1..80: mol_type = other DNA
actagttctagatgcatacaaaaatattgatctggacaagcttaaaataattgcatatggtgatgatgtgattttctctt

SEQ ID NO: 16753 - DNA, 80 bp, synthetic construct
  misc_feature 1..80: note = Synthetic: >NC_038311.1-cand-6710-6789
  source 1..80: mol_type = other DNA
ataaatatactctagatatggaagctattgctaatgaaggaaagaaatatggacttacaataacaccagcagataagtcc

SEQ ID NO: 16754 - DNA, 80 bp, synthetic construct
  misc_feature 1..80: note = Synthetic: >NC_038311.1-cand-6790-6869
  source 1..80: mol_type = other DNA
aatgaattcaagaaacttgattatagtaatgtgacttttcttaaacgtggttttaagcaagatgaaagacatacattcct

SEQ ID NO: 16755 - DNA, 80 bp, synthetic construct
  misc_feature 1..80: note = Synthetic: >NC_038311.1-cand-6870-6949
  source 1..80: mol_type = other DNA
tattcatcctacattcccagtggaagagatacatgaatcaattagatggaccaagaaaccttcacagatgcaagaacatg

SEQ ID NO: 16756 - DNA, 80 bp, synthetic construct
  misc_feature 1..80: note = Synthetic: >NC_038311.1-cand-6950-7029
  source 1..80: mol_type = other DNA
tgctatcattatgtcacctgatgtggcacaatggacgtaaggtgtatgaagatttctctagtaagatacgcagtgtcagc

SEQ ID NO: 16757 - DNA, 80 bp, synthetic construct
  misc_feature 1..80: note = Synthetic: >NC_038311.1-cand-7030-7109
  source 1..80: mol_type = other DNA
gctggacgtgcactgtatatcccaccttatgatctgttgaaacatgaatggtatgaaaaattttagatatagaaataatg

SEQ ID NO: 16758 - DNA, 80 bp, synthetic construct
  misc_feature 1..80: note = Synthetic: >NC_038312.1-cand-30-109
  source 1..80: mol_type = other DNA
cactgggtgtagtactctggtacttcgtacctttgtacgcctgttcttcccattgtacccttcctgaacttccaacccaa

SEQ ID NO: 16759 - DNA, 80 bp, synthetic construct
  misc_feature 1..80: note = Synthetic: >NC_038312.1-cand-110-189
  source 1..80: mol_type = other DNA
gtaacgttagaagctcaacatttagtacaacaggaagcaccacatccagtggtgtttagtacaagcacttctgtttcccc

SEQ ID NO: 16760 - DNA, 80 bp, synthetic construct
  misc_feature 1..80: note = Synthetic: >NC_038312.1-cand-190-269
  source 1..80: mol_type = other DNA
ggagcgaggtataggctgtacccactgccaaaaacctttaaccgttatccgccaaccaactacgtaaaagctagtagtat

SEQ ID NO: 16761 - DNA, 80 bp, synthetic construct
  misc_feature 1..80: note = Synthetic: >NC_038312.1-cand-270-349
  source 1..80: mol_type = other DNA
tatgtttttaactaggcgttcgatcaggtggatttcccctccactagtttggtcgatgaggctaggaattccccacgggt

SEQ ID NO: 16762 - DNA, 80 bp, synthetic construct
  misc_feature 1..80: note = Synthetic: >NC_038312.1-cand-350-429
  source 1..80: mol_type = other DNA
gaccgtgtcctagcctgcgtggcggccaacccagcttatgctgggacgcctttttatagacatggtgtgaagactcgcat

SEQ ID NO: 16763 - DNA, 80 bp, synthetic construct
  misc_feature 1..80: note = Synthetic: >NC_038312.1-cand-430-509
  source 1..80: mol_type = other DNA
gtgcttggttgtgattcctccggcccctgaatgcggctaaccttaaccctggagccttgtgtcacaaaccagtgatgata

SEQ ID NO: 16764 - DNA, 80 bp, synthetic construct
  misc_feature 1..80: note = Synthetic: >NC_038312.1-cand-510-589
  source 1..80: mol_type = other DNA
aggtcgtaatgagcaattccgggacgggaccgactactttgggtgtccgtgtttcttatttttcttattattgtcttatg

SEQ ID NO: 16765 - DNA, 80 bp, synthetic construct
  misc_feature 1..80: note = Synthetic: >NC_038312.1-cand-590-669
  source 1..80: mol_type = other DNA
gtcacagcatatatataacatatactgtgatcatgggcgctcaagtttcaacacagaaaagtggatctcatgagaatcaa

SEQ ID NO: 16766 - DNA, 80 bp, synthetic construct
  misc_feature 1..80: note = Synthetic: >NC_038505.1-cand-1020-1099
  source 1..80: mol_type = other DNA
gggcattctttgccatactccaggatatgagaaatacaatcatggcatctaaatctgttggaacagcagaagaaaagttg

SEQ ID NO: 16767 - DNA, 80 bp, synthetic construct
  misc_feature 1..80: note = Synthetic: >NC_038505.1-cand-1070-1149
  source 1..80: mol_type = other DNA
aaatctgttggaacagcagaagaaaagttgaagaagaaatctgccttctaccagtcatatttacggagaactcaatcaat

SEQ ID NO: 16768 - DNA, 80 bp, synthetic construct
  misc_feature 1..80: note = Synthetic: >NC_038505.1-cand-1200-1279
  source 1..80: mol_type = other DNA
gaaaggaggcagttaatcacttccaccttggtgatgacatggatcctgagcttagacagctggcacagactctcattgat

SEQ ID NO: 16769 - DNA, 80 bp, synthetic construct
  misc_feature 1..80: note = Synthetic: >NC_038505.1-cand-1250-1329
  source 1..80: mol_type = other DNA
cttagacagctggcacagactctcattgatgcaaaggtcaaagagatctctaatcaggaacccctaaaactctaagaagg

SEQ ID NO: 16770 - DNA, 80 bp, synthetic construct
  misc_feature 1..80: note = Synthetic: >NC_038505.1-cand-1330-1409
  source 1..80: mol_type = other DNA
cagtaggatcaatgattgtggtatgtgagggctttccgggcttgtgccaacatttattcatctcagggctattctgcact

SEQ ID NO: 16771 - DNA, 80 bp, synthetic construct
  misc_feature 1..80: note = Synthetic: >NC_038505.1-cand-1410-1489
  source 1..80: mol_type = other DNA
aatcaatgggtgggattagtatctatgaatgtatgggtggtgggtaatgtcatactactgatgggaggatttactgatac

SEQ ID NO: 16772 - DNA, 80 bp, synthetic construct
  misc_feature 1..80: note = Synthetic: >NC_038505.1-cand-1490-1569
  source 1..80: mol_type = other DNA
gggtaaagaatatcagggatttgtataacaatcatcgtaaaagatatttagtttatatattatagaattcatgagttaat

SEQ ID NO: 16773 - DNA, 80 bp, synthetic construct
  misc_feature 1..80: note = Synthetic: >NC_038505.1-cand-1570-1649
  source 1..80: mol_type = other DNA
tactaaactggttgattatgatttgatcatatggtgcttgctgattgatcaatgagtaaacctgtcatttatcactactg

SEQ ID NO: 16774 - DNA, 80 bp, synthetic construct
  misc_feature 1..80: note = Synthetic: >NC_038505.1-cand-1660-1739
  source 1..80: mol_type = other DNA
agacatggtaagttttatgtgtaatcaatttaaatttatgtttgttcaactctattttaatcatttataactaataatca

SEQ ID NO: 16775 - DNA, 80 bp, synthetic construct
  misc_feature 1..80: note = Synthetic: >NC_038505.1-cand-1740-1819
  source 1..80: mol_type = other DNA
ggcatattagatgtaaatttcattctcagcttatgctttgcagcactaacactaacttacacatttctacctcaaccact

SEQ ID NO: 16776 - DNA, 80 bp, synthetic construct
  misc_feature 1..80: note = Synthetic: >NC_038505.1-cand-1810-1889
  source 1..80: mol_type = other DNA
ctcaaccacttaccctcccctttatactacctcatttattctacctcataaattttctttcttgattgcttttcaaggag

SEQ ID NO: 16777 - DNA, 80 bp, synthetic construct
  misc_feature 1..80: note = Synthetic: >NC_038506.1-cand-0-79
  source 1..80: mol_type = other DNA
agtagactccgcaagaagaagcagaaaatcaacaaaagagagacaaaatggaagggtggttattcaccatcctaggggtc

SEQ ID NO: 16778 - DNA, 80 bp, synthetic construct
  misc_feature 1..80: note = Synthetic: >NC_038506.1-cand-80-159
  source 1..80: mol_type = other DNA
tgctacattatgacaactgtgctacccaaaacaatttatgagttgaaaatggaatgtccgcatacagtgggattaggtca

SEQ ID NO: 16779 - DNA, 80 bp, synthetic construct
  misc_feature 1..80: note = Synthetic: >NC_038506.1-cand-160-239
  source 1..80: mol_type = other DNA
aggctatattataggttctgcagagctgggccttatagatatagcaacagtcccagagataaagcttgaaagctcctgta

SEQ ID NO: 16780 - DNA, 80 bp, synthetic construct
  misc_feature 1..80: note = Synthetic: >NC_038506.1-cand-210-289
  source 1..80: mol_type = other DNA
tcccagagataaagcttgaaagctcctgtaattttgatttacatactacatcatctacccaaaaaagctttacacagctg

SEQ ID NO: 16781 - DNA, 80 bp, synthetic construct
  misc_feature 1..80: note = Synthetic: >NC_038506.1-cand-290-369
  source 1..80: mol_type = other DNA
gaatggagaaaaaaggctgagacaactgatacaacacaggctgcatcaacaacctttgaagcacaaacaaagacagtaaa

SEQ ID NO: 16782 - DNA, 80 bp, synthetic construct
  misc_feature 1..80: note = Synthetic: >NC_039199.1-cand-12120-12199
  source 1..80: mol_type = other DNA
actgttgccatggcaacatgttaatagatataactttgtctttagttctactggatgtaaagttagtctaaaaacatgca

SEQ ID NO: 16783 - DNA, 80 bp, synthetic construct
  misc_feature 1..80: note = Synthetic: >NC_039199.1-cand-12170-12249
  source 1..80: mol_type = other DNA
ctggatgtaaagttagtctaaaaacatgcattggaaaacttatgaaagatctaaaccctaaagttctgtactttattgga

SEQ ID NO: 16784 - DNA, 80 bp, synthetic construct
  misc_feature 1..80: note = Synthetic: >NC_039199.1-cand-12280-12359
  source 1..80: mol_type = other DNA
gcatgtgaatatcctgacatcaaatttgtatacagaagtttaaaagatgaccttgatcatcattatcctttggaatacca

SEQ ID NO: 16785 - DNA, 80 bp, synthetic construct
  misc_feature 1..80: note = Synthetic: >NC_039199.1-cand-12360-12439
  source 1..80: mol_type = other DNA
gagagttataggagaattaagcaggataatagatagcggtgaagggctttcaatggaaacaacagatgcaactcaaaaaa

SEQ ID NO: 16786 - DNA, 80 bp, synthetic construct
  misc_feature 1..80: note = Synthetic: >NC_039199.1-cand-12440-12519
  source 1..80: mol_type = other DNA
ctcattgggatttgatacacagagtaagcaaagatgctttattaataactttatgtgatgcagaatttaaggacagagat

SEQ ID NO: 16787 - DNA, 80 bp, synthetic construct
  misc_feature 1..80: note = Synthetic: >NC_039199.1-cand-12540-12619
  source 1..80: mol_type = other DNA
tctatggaggaaacatgtattatcatgcagaatttgcactacttatgggacagacctctatttattcgcaaagtatcatg

SEQ ID NO: 16788 - DNA, 80 bp, synthetic construct
  misc_feature 1..80: note = Synthetic: >NC_039199.1-cand-12620-12699
  source 1..80: mol_type = other DNA
ctaaagactgcaatgtaaaattacctttttttgtgagatcagtagccacctttattatgcaaggtagtaaactgtcaggc

SEQ ID NO: 16789 - DNA, 80 bp, synthetic construct
  misc_feature 1..80: note = Synthetic: >NC_039199.1-cand-12700-12779
  source 1..80: mol_type = other DNA
tcagaatgctacatactcttaacactaggccaccacaacaatttaccctgccatggagaaatacaaaattctaagatgaa

SEQ ID NO: 16790 - DNA, 80 bp, synthetic construct
  misc_feature 1..80: note = Synthetic: >NC_039199.1-cand-12780-12859
  source 1..80: mol_type = other DNA
aatagcagtgtgtaatgatttttatgctgcaaaaaaacttgacaataaatctattgaagccaactgtaaatcacttttat

SEQ ID NO: 16791 - DNA, 80 bp, synthetic construct
  misc_feature 1..80: note = Synthetic: >NC_039199.1-cand-12860-12939
  source 1..80: mol_type = other DNA
cagggctaagaataccgataaataagaaagaattaaatagacagagaaggttattaacactacaaagcaaccattcttct

SEQ ID NO: 16792 - DNA, 80 bp, synthetic construct
  misc_feature 1..80: note = Synthetic: >NC_039199.1-cand-12940-13019
  source 1..80: mol_type = other DNA
gtagcaacagttggaggtagcaaggtcatagagtctaaatggttaacaaacaaggcaaacacaataattgattggttaga

SEQ ID NO: 16793 - DNA, 80 bp, synthetic construct
  misc_feature 1..80: note = Synthetic: >NC_039199.1-cand-13020-13099
  source 1..80: mol_type = other DNA
acatattttaaattctccaaaaggtgaattaaattatgatttttttgaagcattagaaaatacttaccctaatatgatta

SEQ ID NO: 16794 - DNA, 80 bp, synthetic construct
  misc_feature 1..80: note = Synthetic: >NC_039199.1-cand-13100-13179
  source 1..80: mol_type = other DNA
aactaatagataatctagggaatgcagagataaaaaaactgatcaaagtaactggatatatgcttgtaagtaaaaaatga

SEQ ID NO: 16795 - DNA, 80 bp, synthetic construct
  misc_feature 1..80: note = Synthetic: >NC_039199.1-cand-13180-13259
  source 1..80: mol_type = other DNA
aaaatgataaaaatgataaaataggtgacaacttcatactattccaaagtaatcatttgattatgcaattatgtaatagt

SEQ ID NO: 16796 - DNA, 80 bp, synthetic construct
  misc_feature 1..80: note = Synthetic: >NC_039199.1-cand-13260-13339
  source 1..80: mol_type = other DNA
taattaaaaactaaaaatcaaaagttagaaactaacaactgtcattaagtttattaaaaataagaaattataattggatg

SEQ ID NO: 16797 - DNA, 80 bp, synthetic construct
  misc_feature 1..80: note = Synthetic: >NC_039218.1-cand-30-109
  source 1..80: mol_type = other DNA
gcggtccccctaggcgagtgccgaaagagaccgcaaaaaagacgcgtcaaggaccaggccgattgccaaacggactggta

SEQ ID NO: 16798 - DNA, 80 bp, synthetic construct
  misc_feature 1..80: note = Synthetic: >NC_039475.1-cand-5130-5209
  source 1..80: mol_type = other DNA
tgctgctggtctcgtaccagagggcaacaacgagacccttcccctagaaccagttgcgggcgcagctatagccgcacccg

SEQ ID NO: 16799 - DNA, 80 bp, synthetic construct
  misc_feature 1..80: note = Synthetic: >NC_039475.1-cand-5210-5289
  source 1..80: mol_type = other DNA
tcactggccaaaataacataattgacccctggattagaacaaattttgtgcaagcaccaaatggagagttcacagtgtca

SEQ ID NO: 16800 - DNA, 80 bp, synthetic construct
  misc_feature 1..80: note = Synthetic: >NC_039475.1-cand-5290-5369
  source 1..80: mol_type = other DNA
cccagaaactctcctggagaaattttattaaacttagagttgggccctgatttgaacccttatttggctcatttgtcaag

SEQ ID NO: 16801 - DNA, 80 bp, synthetic construct
  misc_feature 1..80: note = Synthetic: >NC_039475.1-cand-5370-5449
  source 1..80: mol_type = other DNA
gatgtacaatgggtatgctggtggagtggaagttcaggttctcctggcagggaacgcgttcactgccggaaagatcctct

SEQ ID NO: 16802 - DNA, 80 bp, synthetic construct
  misc_feature 1..80: note = Synthetic: >NC_039475.1-cand-5460-5539
  source 1..80: mol_type = other DNA
cccgccaaatttcccagtggaattcttaagcccagcccagatcacaatgctcccacatttaatagtagatgttaggactc

SEQ ID NO: 16803 - DNA, 80 bp, synthetic construct
  misc_feature 1..80: note = Synthetic: >NC_039475.1-cand-5540-5619
  source 1..80: mol_type = other DNA
ttgaaccaattatgatcccactccctgatgttaggaatacattcttccattatagtaaccagcctaacagccgcatgaga

SEQ ID NO: 16804 - DNA, 80 bp, synthetic construct
  misc_feature 1..80: note = Synthetic: >NC_039475.1-cand-5620-5699
  source 1..80: mol_type = other DNA
ttagtggctatgctctataccccactcagatctaatggctcaggtgatgatgtctttactgtctcttgcagggttttgac

SEQ ID NO: 16805 - DNA, 80 bp, synthetic construct
  misc_feature 1..80: note = Synthetic: >NC_039475.1-cand-5700-5779
  source 1..80: mol_type = other DNA
taggcctactcctgattttgagttcacttatttagtgccaccttctgttgaatctaaaactaagcctttttccttaccta

SEQ ID NO: 16806 - DNA, 80 bp, synthetic construct
  misc_feature 1..80: note = Synthetic: >NC_039475.1-cand-5780-5859
  source 1..80: mol_type = other DNA
ttttaaccctttctgagctcacaaattcgaggttcccagtccccatcgattcgcttttcaccgcccagaataatgtgttg

SEQ ID NO: 16807 - DNA, 80 bp, synthetic construct
  misc_feature 1..80: note = Synthetic: >NC_039475.1-cand-5860-5939
  source 1..80: mol_type = other DNA
caggtgcagtgtcaaaatggcaggtgtacacttgatggtgagttacaaggcacaacccagttgctcccatctggcatctg

SEQ ID NO: 16808 - DNA, 80 bp, synthetic construct
  misc_feature 1..80: note = Synthetic: >NC_039475.1-cand-5940-6019
  source 1..80: mol_type = other DNA
tgcattcagaggacgggtgacagcacaaattaaccaacgtgacaggtggcacatgcaactgcaaaacctcaatggtacaa

SEQ ID NO: 16809 - DNA, 80 bp, synthetic construct
  misc_feature 1..80: note = Synthetic: >NC_039475.1-cand-6020-6099
  source 1..80: mol_type = other DNA
catatgacccaactgatgatgtgccagccccgctgggtacacctgacttcaagggcgtcgtgtttgggatggtaagccaa

SEQ ID NO: 16810 - DNA, 80 bp, synthetic construct
  misc_feature 1..80: note = Synthetic: >NC_039475.1-cand-6100-6179
  source 1..80: mol_type = other DNA
agaaatgtgggtaatgatgcgcctggctcaaccagagcccaacaggcgtgggtttcaacctatagcccccaatttgtccc

SEQ ID NO: 16811 - DNA, 80 bp, synthetic construct
  misc_feature 1..80: note = Synthetic: >NC_039475.1-cand-6180-6259
  source 1..80: mol_type = other DNA
caaattaggttctgtcaatcttagaattagtgataatgatgatttccaattccagccgacaaaattcacaccagtgggcg

SEQ ID NO: 16812 - DNA, 80 bp, synthetic construct
  misc_feature 1..80: note = Synthetic: >NC_039475.1-cand-6230-6309
  source 1..80: mol_type = other DNA
tccagccgacaaaattcacaccagtgggcgtcaatgatgacgatgatggccacccgttcagacaatgggaactaccaaac

SEQ ID NO: 16813 - DNA, 80 bp, synthetic construct
  misc_feature 1..80: note = Synthetic: >NC_039475.1-cand-6350-6429
  source 1..80: mol_type = other DNA
cagttgctccaaattttcctggtgaacaattgttattcttcagatctttcgtgccatgctcaggaggttacaaccaaggt

SEQ ID NO: 16814 - DNA, 80 bp, synthetic construct
  misc_feature 1..80: note = Synthetic: >NC_044045.1-cand-3070-3149
  source 1..80: mol_type = other DNA
gtttctgggtctcctccaacctcctcatctctctggaacgagtcctgccaaaaggagtgagtgagctgttcggagttgac

SEQ ID NO: 16815 - DNA, 80 bp, synthetic construct
  misc_feature 1..80: note = Synthetic: >NC_044045.1-cand-3140-3219
  source 1..80: mol_type = other DNA
cggagttgacatcaaacaaattcagatacacaagtcaggtgagttttgcaggttcaggtttccaagacctatcagaccag

SEQ ID NO: 16816 - DNA, 80 bp, synthetic construct
  misc_feature 1..80: note = Synthetic: >NC_044045.1-cand-3220-3299
  source 1..80: mol_type = other DNA
atgtcacaggcctcatccttgaagaaggagcccctgaaggcacggtgtgttctatcctcgtcaaaagaccgactggagag

SEQ ID NO: 16817 - DNA, 80 bp, synthetic construct
  misc_feature 1..80: note = Synthetic: >NC_044045.1-cand-3300-3379
  source 1..80: mol_type = other DNA
atgataccactcgcagtgaggatgggcacccacgcttccatgaaaattcagggcagaacagttggtggtcaaatgggcat

SEQ ID NO: 16818 - DNA, 80 bp, synthetic construct
  misc_feature 1..80: note = Synthetic: >NC_044045.1-cand-3310-3389
  source 1..80: mol_type = other DNA
tcgcagtgaggatgggcacccacgcttccatgaaaattcagggcagaacagttggtggtcaaatgggcatgttgctcaca

SEQ ID NO: 16819 - DNA, 80 bp, synthetic construct
  misc_feature 1..80: note = Synthetic: >NC_044045.1-cand-3460-3539
  source 1..80: mol_type = other DNA
ggggcaatgacattgtggtagctggggttcacaccgcagctgcaaggggtggcaacactgtgatctgtgccacgcagggg

SEQ ID NO: 16820 - DNA, 80 bp, synthetic construct
  misc_feature 1..80: note = Synthetic: >NC_044045.1-cand-3540-3619
  source 1..80: mol_type = other DNA
gctgacggagaggccgttcttgaaggaggagaggacaaaggaacatactgtggtgccccaatacttggacttgggaaggc

SEQ ID NO: 16821 - DNA, 80 bp, synthetic construct
  misc_feature 1..80: note = Synthetic: >NC_044045.1-cand-3620-3699
  source 1..80: mol_type = other DNA
ccctaagctctgcactaaaacaaagttctggcgttcctcacctgatgcactacccccgggaacgtatgaaccagcctatc

SEQ ID NO: 16822 - DNA, 80 bp, synthetic construct
  misc_feature 1..80: note = Synthetic: >NC_044045.1-cand-3700-3779
  source 1..80: mol_type = other DNA
taggtggaaaagacccaagagttgagaagggcccatcactccagcaggttatgagagaacaacttaaacccttcaccgaa

SEQ ID NO: 16823 - DNA, 80 bp, synthetic construct
  misc_feature 1..80: note = Synthetic: >NC_044045.1-cand-3780-3859
  source 1..80: mol_type = other DNA
cccagaggaaaaccgccaaagcccagcgttctcgatgaggcaaagaaaactgtgatgaatgtgttggagcaaaccataaa

SEQ ID NO: 16824 - DNA, 80 bp, synthetic construct
  misc_feature 1..80: note = Synthetic: >NC_044045.1-cand-3860-3939
  source 1..80: mol_type = other DNA
ccctgccaaaccctggtcatactcacaagcatgtgcctcacttgacaaaacgacttcaagtggtagcccacaccacctaa

SEQ ID NO: 16825 - DNA, 80 bp, synthetic construct
  misc_feature 1..80: note = Synthetic: >NC_044045.1-cand-3940-4019
  source 1..80: mol_type = other DNA
ggaagaatgatcactggaatggtgagtctttcaccggccctttagccgaccaagcttcaaaggcaaacttaatgtatgaa

SEQ ID NO: 16826 - DNA, 80 bp, synthetic construct
  misc_feature 1..80: note = Synthetic: >NC_044045.1-cand-4020-4099
  source 1..80: mol_type = other DNA
caggcaaaacacgtgagccccgtttacaccgcagccctcaaagatgaactagtcaagactgacaagatttataataagat

SEQ ID NO: 16827 - DNA, 80 bp, synthetic construct
  misc_feature 1..80: note = Synthetic: >NC_044045.1-cand-4040-4119
  source 1..80: mol_type = other DNA
cgtttacaccgcagccctcaaagatgaactagtcaagactgacaagatttataataagataaagaagaggttgctatggg

SEQ ID NO: 16828 - DNA, 80 bp, synthetic construct
  misc_feature 1..80: note = Synthetic: >NC_044045.1-cand-4150-4229
  source 1..80: mol_type = other DNA
ccagagcctttggtgggttaatggacagcatgaaagagagttgtgtgatgttgccctgcagagttggaatgaatatgaat

SEQ ID NO: 16829 - DNA, 80 bp, synthetic construct
  misc_feature 1..80: note = Synthetic: >NC_044045.1-cand-4230-4309
  source 1..80: mol_type = other DNA
gaggatgggccaatcatttttgacaaacatgcaaaatataaataccactatgatgcagactactccagatgggactccac

SEQ ID NO: 16830 - DNA, 80 bp, synthetic construct
  misc_feature 1..80: note = Synthetic: >NC_003310.1-cand-54930-55009
  source 1..80: mol_type = other DNA
gtggatatttctgaagcaagagctgattatttatttcttcttccaatctattggtactaacaacgacaccgactaatgtt

SEQ ID NO: 16831 - DNA, 80 bp, synthetic construct
  misc_feature 1..80: note = Synthetic: >AdVB3-cand-12960-13039
  source 1..80: mol_type = other DNA
aaccaaccggtcgcagaagatccctcctcagtatgcgcttaccgctgaggaggagcggatcctcagatacgtgcaacaga

SEQ ID NO: 16832 - DNA, 80 bp, synthetic construct
  misc_feature 1..80: note = Synthetic: >AdVB3-cand-20550-20629
  source 1..80: mol_type = other DNA
aaccacactttcaagaaggtctccatcatgtttgactcctcagtcagctggcctggcaatgacaggctgttgagcccaaa

SEQ ID NO: 16833 - DNA, 80 bp, synthetic construct
  misc_feature 1..80: note = Synthetic: >EVA90-cand-5770-5849
  source 1..80: mol_type = other DNA
ttaatctcagtggtaaaccaacacatagaactatgatgtacaacttcccaaccaaagcaggacagtgtggaggagtggtt

SEQ ID NO: 16834 - DNA, 80 bp, synthetic construct
  misc_feature 1..80: note = Synthetic: >NC_003310.1-cand-112530-112609
  source 1..80: mol_type = other DNA
atacgcgttctcgagcgcaggaagtttaataccgaatagtgccatcagaataggatgaatgtagtaattagtttctggtt

SEQ ID NO: 16835 - DNA, 80 bp, synthetic construct
  misc_feature 1..80: note = Synthetic: >NC_039477.1-cand-3830-3909
  source 1..80: mol_type = other DNA
aaccattatcaatgtcctcgaacaaaccctggaccctccacaaaaatggacatacgcacaggcgtgtgcctcacttgaca

SEQ ID NO: 16836 - DNA, 80 bp, synthetic construct
  misc_feature 1..80: note = Synthetic: >EVA76-cand-380-459
  source 1..80: mol_type = other DNA
aacccataggacgctttaatgttgacatggtgcgaagagtctactgagctaggtagtagtcctccggcccctgaatgcgg

SEQ ID NO: 16837 - DNA, 80 bp, synthetic construct
  misc_feature 1..80: note = Synthetic: >AdVB7-cand-27540-27619
  source 1..80: mol_type = other DNA
aaccccttctccggctctcctggccagtacccagacgagttcataccgaacttcgacgcaatcagcgagtcagtggatgg

SEQ ID NO: 16838 - DNA, 80 bp, synthetic construct
  misc_feature 1..80: note = Synthetic: >AdVB7-cand-13450-13529
  source 1..80: mol_type = other DNA
gctatcctgaacccacactggctgcccccacctggtttctacactggcgagtacgacatgcccgaccccaatgacgggtt

SEQ ID NO: 16839 - DNA, 80 bp, synthetic construct
  misc_feature 1..80: note = Synthetic: >NC_003310.1-cand-91750-91829
  source 1..80: mol_type = other DNA
atgtataatttttttagtttttatagattctttattctatacttaaaaaatgaaaataaatacaaaggttcttgagggtt

SEQ ID NO: 16840 - DNA, 80 bp, synthetic construct
  misc_feature 1..80: note = Synthetic: >NC_039477.1-cand-2940-3019
  source 1..80: mol_type = other DNA
aaccctgatgacttcaaacccaaagggaagctgtgggccgatgacaacagaagtgttgactacaatgagaaactggactt

SEQ ID NO: 16841 - DNA, 80 bp, synthetic construct
  misc_feature 1..80: note = Synthetic: >NC_001611.1-cand-37390-37469
  source 1..80: mol_type = other DNA
atatcgacatatttcatttgtatacacataaccattactaacgtagaatgtataggaagagatgtaacgggaacagggtt

SEQ ID NO: 16842 - DNA, 80 bp, synthetic construct
  misc_feature 1..80: note = Synthetic: >NC_006573.1-cand-3140-3219
  source 1..80: mol_type = other DNA
aaccgttgaacattactgacttcggagaagtcaagtccatgtaaaagagcctgggcatctttcaccacctgtagtttgat

SEQ ID NO: 16843 - DNA, 80 bp, synthetic construct
  misc_feature 1..80: note = Synthetic: >AdVB7-cand-8150-8229
  source 1..80: mol_type = other DNA
gcgcggcaggggcggagctcgaggacgagagcgcgcaggccggagctgtccagggtcctgagacgctgcggagtcaggtt

SEQ ID NO: 16844 - DNA, 80 bp, synthetic construct
  misc_feature 1..80: note = Synthetic: >NC_001611.1-cand-162600-162679
  source 1..80: mol_type = other DNA
tacaaattttaagaaatggtgtaactctctggaagctacgtttatcgatgtacacattcccaagtttaaggtaacaggtt

SEQ ID NO: 16845 - DNA, 80 bp, synthetic construct
  misc_feature 1..80: note = Synthetic: >NC_003310.1-cand-36780-36859
  source 1..80: mol_type = other DNA
aacctttaatctatatttatcacagtctgttttggtacacataatgaattcttctaatgctgtactaaattcgatatctt

SEQ ID NO: 16846 - DNA, 80 bp, synthetic construct
  misc_feature 1..80: note = Synthetic: >NC_003310.1-cand-45510-45589
  source 1..80: mol_type = other DNA
acatcgaaaaaaaatctttttttattcttttttactaacgatacgaatatgtctttgttaaaaacagttattttctgaat

SEQ ID NO: 16847 - DNA, 80 bp, synthetic construct
  misc_feature 1..80: note = Synthetic: >NC_001611.1-cand-63730-63809
  source 1..80: mol_type = other DNA
tattatagaaagactaactctaccgtagacgtgcgtaatattgttacgtttataaacgattacgctaatttagacgatgt

SEQ ID NO: 16848 - DNA, 80 bp, synthetic construct
  misc_feature 1..80: note = Synthetic: >AdVB3-cand-33440-33519
  source 1..80: mol_type = other DNA
acatcgtggtaactgggctctggtgtaagggtgatgtctggcgcatgatgtggagcgtgcgcgcaaccttgtcataatgg

SEQ ID NO: 16849 - DNA, 80 bp, synthetic construct
  misc_feature 1..80: note = Synthetic: >NC_001611.1-cand-44350-44429
  source 1..80: mol_type = other DNA
cctgggtattcaattactacaaaaattactccagcagtagagtatctaatggataaactgaaactaacaaagaacgatgt

SEQ ID NO: 16850 - DNA, 80 bp, synthetic construct
  misc_feature 1..80: note = Synthetic: >NC_003310.1-cand-113170-113249
  source 1..80: mol_type = other DNA
tcagaagtgtgaatatgatcttcatctaccaaagaaagagtttgattagtataactagattttagtcccgcgttagatgt

SEQ ID NO: 16851 - DNA, 80 bp, synthetic construct
  misc_feature 1..80: note = Synthetic: >NC_003310.1-cand-70590-70669
  source 1..80: mol_type = other DNA
tacaccaaaaactcatataacttctagatgtagaagcattcgctaaaaaattagtagaatcaaaggatataagtagatgt

SEQ ID NO: 16852 - DNA, 80 bp, synthetic construct
  misc_feature 1..80: note = Synthetic: >NC_003310.1-cand-48730-48809
  source 1..80: mol_type = other DNA
taggtgatgctggttctggagattctggaggagatggattattatccggaagaatctctgttatttccttgttttcatgt

SEQ ID NO: 16853 - DNA, 80 bp, synthetic construct
  misc_feature 1..80: note = Synthetic: >NC_007358.1-cand-600-679
  source 1..80: mol_type = other DNA
acatgaccaagaaaatggtcacacaaagaacaatagggaagaaaaaacaaaggctgaacaaaaggagctacctaataaga

SEQ ID NO: 16854 - DNA, 80 bp, synthetic construct
  misc_feature 1..80: note = Synthetic: >NC_001611.1-cand-72780-72859
  source 1..80: mol_type = other DNA
acatgagacttactcgagttaccaaatcagatgctgtaaattatgaaaaaaagatgtattaccttaataagatagttcgc

SEQ ID NO: 16855 - DNA, 80 bp, synthetic construct
  misc_feature 1..80: note = Synthetic: >NC_003310.1-cand-30160-30239
  source 1..80: mol_type = other DNA
tttgtggatgatgatgaaatatgtagtcgcgactccatcattgatctaatagatgaatatatcacgtggagaaatcatgt

SEQ ID NO: 16856 - DNA, 80 bp, synthetic construct
  misc_feature 1..80: note = Synthetic: >NC_006573.1-cand-2740-2819
  source 1..80: mol_type = other DNA
acatgccagtgtcagacttggcatggtcccgaactgattactgagcaactctgcatttttcacatcccaaactctcacca

SEQ ID NO: 16857 - DNA, 80 bp, synthetic construct
  misc_feature 1..80: note = Synthetic: >EVD70-cand-1730-1809
  source 1..80: mol_type = other DNA
tgaccactcatcggcaccagcatttccagacttttcaccaacccctgaaatgcacataccaggacaagtgcacagcatgt

SEQ ID NO: 16858 - DNA, 80 bp, synthetic construct
  misc_feature 1..80: note = Synthetic: >EVB79-cand-4750-4829
  source 1..80: mol_type = other DNA
caacgccccaaccgtgtcagacagtagggccttagccaggagattccactttgacatgaatattgaagtaatttccatgt

SEQ ID NO: 16859 - DNA, 80 bp, synthetic construct
  misc_feature 1..80: note = Synthetic: >NC_001611.1-cand-147140-147219
  source 1..80: mol_type = other DNA
acatgtaatgatttaaaatgtgtagtcatgcttattgataaagatctaaaaattaaagcgggtcctcggtacgtacttaa

SEQ ID NO: 16860 - DNA, 80 bp, synthetic construct
  misc_feature 1..80: note = Synthetic: >NC_001611.1-cand-82120-82199
  source 1..80: mol_type = other DNA
acatgtctaatgtgttaaaaaaaagatcatacaagttatacgtcatttcatctgtagtattcttgtcattgagtgataaa

SEQ ID NO: 16861 - DNA, 80 bp, synthetic construct
  misc_feature 1..80: note = Synthetic: >AdVB3-cand-11200-11279
  source 1..80: mol_type = other DNA
ctggatcgaagacggctgctgcaagacgaggattttgaggtcgatgaagtgacagggatcagcccagctagggcacatgt

SEQ ID NO: 16862 - DNA, 80 bp, synthetic construct
  misc_feature 1..80: note = Synthetic: >AdVB7-cand-5350-5429
  source 1..80: mol_type = other DNA
acggagcttacctttggaagttttatggcaggcggggcagtagatacatttgagggcatacagcttgggcgcgaggaaaa

SEQ ID NO: 16863 - DNA, 80 bp, synthetic construct
  misc_feature 1..80: note = Synthetic: >EVB86-cand-6060-6139
  source 1..80: mol_type = other DNA
gtcaattttgaggaagccatcttttcaaagtacataggcaatgtcaacactcatgtggatgagtacatgctggaagccgt

SEQ ID NO: 16864 - DNA, 80 bp, synthetic construct
  misc_feature 1..80: note = Synthetic: >NC_001611.1-cand-21530-21609
  source 1..80: mol_type = other DNA
ttgtgggcaattgtctatacaagtcgtctaaacgttgtttactcatatagtattgaacagccatcattacatggtcccgt

SEQ ID NO: 16865 - DNA, 80 bp, synthetic construct
  misc_feature 1..80: note = Synthetic: >AdVB3-cand-13280-13359
  source 1..80: mol_type = other DNA
acgggttcctgtgggacgatgtagacagcagcatattctccccgcctcccggttatacagtttggaagaaggaagggggc

SEQ ID NO: 16866 - DNA, 80 bp, synthetic construct
  misc_feature 1..80: note = Synthetic: >NC_003310.1-cand-140730-140809
  source 1..80: mol_type = other DNA
ttaacattattatattctctattaaatacctccacatctaaaaatgttaattttgaaaccatgtcttcgtttattaccgt

SEQ ID NO: 16867 - DNA, 80 bp, synthetic construct
  misc_feature 1..80: note = Synthetic: >NC_003310.1-cand-174860-174939
  source 1..80: mol_type = other DNA
ctgttacgttcattacgacgacgttagaatcaagaatgatatcgtagtatcaagatgtaaaatacttacggttataccgt

SEQ ID NO: 16868 - DNA, 80 bp, synthetic construct
  misc_feature 1..80: note = Synthetic: >NC_001611.1-cand-101790-101869
  source 1..80: mol_type = other DNA
tttttgtacctttgtacatttttgaaatacagactcgcaaaaaatacaatattcatatccttgttcagatactataccgt

SEQ ID NO: 16869 - DNA, 80 bp, synthetic construct
  misc_feature 1..80: note = Synthetic: >NC_001611.1-cand-35620-35699
  source 1..80: mol_type = other DNA
tcccgtaataaattttattagaaatgccaaatctataagaaaagtcctagaattagtctgaagaatatctatatcaccgt

SEQ ID NO: 16870 - DNA, 80 bp, synthetic construct
  misc_feature 1..80: note = Synthetic: >NC_003310.1-cand-184560-184639
  source 1..80: mol_type = other DNA
agcaaccaatgtttctggtccgaacctatgatattggaagatgtatcatcgtgtagttctagaactagaaaaatatacgt

SEQ ID NO: 16871 - DNA, 80 bp, synthetic construct
  misc_feature 1..80: note = Synthetic: >NC_001611.1-cand-10180-10259
  source 1..80: mol_type = other DNA
acgtatctcttctatattattgttgatgtattgtcgtagaaaactattacgtagaccattttctttataaaacgaatata

SEQ ID NO: 16872 - DNA, 80 bp, synthetic construct
  misc_feature 1..80: note = Synthetic: >NC_003310.1-cand-76330-76409
  source 1..80: mol_type = other DNA
actcattattggaagaaggatggaaagatatcagataagtatgaagagggcgcagtattagaatcgtgttggcccgacgt

SEQ ID NO: 16873 - DNA, 80 bp, synthetic construct
  misc_feature 1..80: note = Synthetic: >NC_003310.1-cand-128350-128429
  source 1..80: mol_type = other DNA
gaagtataattctttggtagaatggggaacatctacttactggaaaataggcgtacaaaaggtaactaatgtcgagacgt

SEQ ID NO: 16874 - DNA, 80 bp, synthetic construct
  misc_feature 1..80: note = Synthetic: >NC_001611.1-cand-80460-80539
  source 1..80: mol_type = other DNA
agatgtgatggaaaaatgactaattttgtagcattagtatcatgaactctaatcaaaatcttaatatcttcgtcacacgt

SEQ ID NO: 16875 - DNA, 80 bp, synthetic construct
  misc_feature 1..80: note = Synthetic: >NC_003310.1-cand-156020-156099
  source 1..80: mol_type = other DNA
acgttaagggttttgcaagaccaattaacgatggttaaaattaacaaggatcccaaaaaaattccagagtggttggtagt

SEQ ID NO: 16876 - DNA, 80 bp, synthetic construct
  misc_feature 1..80: note = Synthetic: >NC_003310.1-cand-129640-129719
  source 1..80: mol_type = other DNA
tagactggagttctgattgggaaaggcgcatagctcaagatttgtcacaatatgaatacactacagttcttctagaacgt

SEQ ID NO: 16877 - DNA, 80 bp, synthetic construct
  misc_feature 1..80: note = Synthetic: >AdVB7-cand-22280-22359
  source 1..80: mol_type = other DNA
acgttgcggaactgtaacctgttctgccacttgaactcggggatcaccaacttgggaactggaatctcgggaaaggtgtc

SEQ ID NO: 16878 - DNA, 80 bp, synthetic construct
  misc_feature 1..80: note = Synthetic: >NC_001611.1-cand-92290-92369
  source 1..80: mol_type = other DNA
agagattatatgattactagacgacagctatgttatcatgaaatgtttgataaaaatatgtataacgtgtcaatggcagt

SEQ ID NO: 16879 - DNA, 80 bp, synthetic construct
  misc_feature 1..80: note = Synthetic: >NC_003310.1-cand-63760-63839
  source 1..80: mol_type = other DNA
actgcgacacgcattaacatgtgctgaggtctttcaacaattttgttgtttattttcaacaagtaggatttttccaaagt

SEQ ID NO: 16880 - DNA, 80 bp, synthetic construct
  misc_feature 1..80: note = Synthetic: >NC_001611.1-cand-88880-88959
  source 1..80: mol_type = other DNA
ataactaaacacgttaggtttctttattgtttgggtaaaacagatttctcgaatatacgggccaagttagaatctccagt

SEQ ID NO: 16881 - DNA, 80 bp, synthetic construct
  misc_feature 1..80: note = Synthetic: >AdVB7-cand-34560-34639
  source 1..80: mol_type = other DNA
actggcaaccaccagtaatatcatcaaagttgctggaaatataatcaggcagagtttcttgtaagaattgaataaaagaa

SEQ ID NO: 16882 - DNA, 80 bp, synthetic construct
  misc_feature 1..80: note = Synthetic: >NC_007543.1-cand-1260-1339
  source 1..80: mol_type = other DNA
gtccagaatatacggagcactaagttaccgacttgactgtctaacagcaagtaaaaggtcaatggcagactgcttacagt

SEQ ID NO: 16883 - DNA, 80 bp, synthetic construct
  misc_feature 1..80: note = Synthetic: >NC_001611.1-cand-87600-87679
  source 1..80: mol_type = other DNA
actgtaggtgtaccatttgattttctttctaatactatatatttctctcgaagaagttcttgcacatcatctgggaataa

SEQ ID NO: 16884 - DNA, 80 bp, synthetic construct
  misc_feature 1..80: note = Synthetic: >NC_001722.1-cand-10020-10099
  source 1..80: mol_type = other DNA
actgtataaatgtacccgcttcttgcattgtattcagtcgctctgcggagaggctggcagatcgagccctgagaggttct

SEQ ID NO: 16885 - DNA, 80 bp, synthetic construct
  misc_feature 1..80: note = Synthetic: >NC_003310.1-cand-7720-7799
  source 1..80: mol_type = other DNA
actgtatccacgctagagatatcgacggtatgtattgtagatgctctcatggttatacaggcattagatgtcagcatgta

SEQ ID NO: 16886 - DNA, 80 bp, synthetic construct
  misc_feature 1..80: note = Synthetic: >EVB85-cand-5740-5819
  source 1..80: mol_type = other DNA
agattatggtttcctaaatctgggtgggacccctaccaaacgtatgctaatgtacaacttccccacgcgcgcaggacagt

SEQ ID NO: 16887 - DNA, 80 bp, synthetic construct
  misc_feature 1..80: note = Synthetic: >AdVB7-cand-13290-13369
  source 1..80: mol_type = other DNA
actgtttctgatgcaggagggggcgacacctaccgccgcgctggacatgacagctcgaaacatggagcccagcatgtatg

SEQ ID NO: 16888 - DNA, 80 bp, synthetic construct
  misc_feature 1..80: note = Synthetic: >AdVB3-cand-28200-28279
  source 1..80: mol_type = other DNA
atgtctagactttgacccagaaaactgcacacttacttttgcacccgacacaagccgtctctgtggagttcttattaagt

SEQ ID NO: 16889 - DNA, 80 bp, synthetic construct
  misc_feature 1..80: note = Synthetic: >NC_003310.1-cand-84750-84829
  source 1..80: mol_type = other DNA
cccgtttatggatctattcaagatgaaatcgtagcagcgtattcattgtttaggatacaagatcttcgtttagatgaagt

SEQ ID NO: 16890 - DNA, 80 bp, synthetic construct
  misc_feature 1..80: note = Synthetic: >NC_006573.1-cand-2820-2899
  source 1..80: mol_type = other DNA
ctccatctctcccagcccgagccccttgattaccaccactcattcctatcatattcaggagagctcttctttggtcaagt

SEQ ID NO: 16891 - DNA, 80 bp, synthetic construct
  misc_feature 1..80: note = Synthetic: >HCV.A9-cand-6720-6799
  source 1..80: mol_type = other DNA
acttgggtactcacacaaagagacaaattacatagattacctgtgcaactcccaccatctgtacagggacaaacactact

SEQ ID NO: 16892 - DNA, 80 bp, synthetic construct
  misc_feature 1..80: note = Synthetic: >NC_001611.1-cand-168790-168869
  source 1..80: mol_type = other DNA
taattcatgttatagatgtggatgtacggctttacatgagtacttttataattatagatcagtcaacggaaaatacaagt

SEQ ID NO: 16893 - DNA, 80 bp, synthetic construct
  misc_feature 1..80: note = Synthetic: >NC_003310.1-cand-69700-69779
  source 1..80: mol_type = other DNA
tagtccatcattggttgcgtcaagaactactatctgatgttgttgggtatctctagtgttacacatggccttactaaagt

SEQ ID NO: 16894 - DNA, 80 bp, synthetic construct
  misc_feature 1..80: note = Synthetic: >AdVB7-cand-15120-15199
  source 1..80: mol_type = other DNA
agataataatataactagaggagatacttatataactgaaaaacaaaaacgtgaagctgcagctgctgaagttaaaaaag

SEQ ID NO: 16895 - DNA, 80 bp, synthetic construct
  misc_feature 1..80: note = Synthetic: >NC_001611.1-cand-54120-54199
  source 1..80: mol_type = other DNA
gccataatatcagaatgccacggttccaagtatatggtcataactccaggccgtttgtttcctccctgatctatgtatct

SEQ ID NO: 16896 - DNA, 80 bp, synthetic construct
  misc_feature 1..80: note = Synthetic: >NC_003310.1-cand-100370-100449
  source 1..80: mol_type = other DNA
ctattatgaaactatatcctacaccggaagagattccggactttgcattctatctcaaaataggtactctgttggtatct

SEQ ID NO: 16897 - DNA, 80 bp, synthetic construct
  misc_feature 1..80: note = Synthetic: >NC_003310.1-cand-75050-75129
  source 1..80: mol_type = other DNA
agataccattaatcactgattcctttttcgatgccggacaatagcacaattgtttagctttggactctatgtattcagaa

SEQ ID NO: 16898 - DNA, 80 bp, synthetic construct
  misc_feature 1..80: note = Synthetic: >NC_003310.1-cand-84590-84669
  source 1..80: mol_type = other DNA
agatactatcaaaatatctcccggaattgccaactctcaaaatgctgatttcgacggagatgaagaatggatgatattgg

SEQ ID NO: 16899 - DNA, 80 bp, synthetic construct
  misc_feature 1..80: note = Synthetic: >NC_003310.1-cand-86270-86349
  source 1..80: mol_type = other DNA
tggtttcaacgagtttaataacttgactaatttgagtaagaataagaccgaaattatcactctggtatccgatgatatct

SEQ ID NO: 16900 - DNA, 80 bp, synthetic construct
  misc_feature 1..80: note = Synthetic: >NC_001611.1-cand-116480-116559
  source 1..80: mol_type = other DNA
atagtcctgtctttcgatgttcatcacatatgcaaagaacaaaataaacaaaataatgtaagaaataatattaaatatct

SEQ ID NO: 16901 - DNA, 80 bp, synthetic construct
  misc_feature 1..80: note = Synthetic: >JX443691.1-cand-370-449
  source 1..80: mol_type = other DNA
agatcaataggggcctatattcttggttttgcaatcccgataattctaaaagcattatatatgctttctactcgcgggag

SEQ ID NO: 16902 - DNA, 80 bp, synthetic construct
  misc_feature 1..80: note = Synthetic: >NC_004296.1-cand-2580-2659
  source 1..80: mol_type = other DNA
taatataaatatctctagtcctttgtgagaggagcccgagataaccgatgggagatggtctcgagaattggcagtgatct

SEQ ID NO: 16903 - DNA, 80 bp, synthetic construct
  misc_feature 1..80: note = Synthetic: >NC_001611.1-cand-99420-99499
  source 1..80: mol_type = other DNA
tcggtcttattcttaaaatctattcccttgatgaagggatcgttaatgaacaaatccttggcctttgattcggctgatct

SEQ ID NO: 16904 - DNA, 80 bp, synthetic construct
  misc_feature 1..80: note = Synthetic: >NC_003310.1-cand-196380-196459
  source 1..80: mol_type = other DNA
ataaaataatgtttataatttacacgttaacatcatataataaacgtatatagttaatatttttggaatataaatgatct

SEQ ID NO: 16905 - DNA, 80 bp, synthetic construct
  misc_feature 1..80: note = Synthetic: >NC_001611.1-cand-71820-71899
  source 1..80: mol_type = other DNA
gcaaacgaaggaaaaatagttatagtagccgcactcgatgggacatttcaacgtaaaccgtttaataatatcttggatct

SEQ ID NO: 16906 - DNA, 80 bp, synthetic construct
  misc_feature 1..80: note = Synthetic: >NC_003310.1-cand-176540-176619
  source 1..80: mol_type = other DNA
gtatatcataatattgaatatggtatccgatactataatgaaaagattatagacgcatttatagagttaggagccgatct

SEQ ID NO: 16907 - DNA, 80 bp, synthetic construct
  misc_feature 1..80: note = Synthetic: >NC_003310.1-cand-80000-80079
  source 1..80: mol_type = other DNA
taagtgtttataaacacagattaatagttttatttgaagtattcgttgtattcattctaatatatgtattttttagatct

SEQ ID NO: 16908 - DNA, 80 bp, synthetic construct
  misc_feature 1..80: note = Synthetic: >NC_001563.2-cand-10-89
  source 1..80: mol_type = other DNA
gtgagctgacaaacttagtagtgtttgtgaggattaacaacaattaacacagtgcgagctgtttcttggcacgaagatct

SEQ ID NO: 16909 - DNA, 80 bp, synthetic construct
  misc_feature 1..80: note = Synthetic: >NC_001611.1-cand-83080-83159
  source 1..80: mol_type = other DNA
gaagctggtaaagtaaatcatagtgctagaagcgatctctctgacctaaaggtggctaccgacaatattgttaaagatct

SEQ ID NO: 16910 - DNA, 80 bp, synthetic construct
  misc_feature 1..80: note = Synthetic: >NC_003310.1-cand-113090-113169
  source 1..80: mol_type = other DNA
gatttctagcccctgcggatataaagtcatcgtctacaatttgggataatgaattacatacactacaagacaaagattta

SEQ ID NO: 16911 - DNA, 80 bp, synthetic construct
  misc_feature 1..80: note = Synthetic: >HCV.A6-cand-6790-6869
  source 1..80: mol_type = other DNA
gcaacaaaacttattgcgtacttggtgggatgccctcaggctgttcaggaacatccattttcaactcaatgattaacaac

SEQ ID NO: 16912 - DNA, 80 bp, synthetic construct
  misc_feature 1..80: note = Synthetic: >NC_039476.1-cand-4890-4969
  source 1..80: mol_type = other DNA
gcactgcttggtgaagcctctcttcacggaccctctttctacagtaaaatcagtaaattggtcataactgaactcaaaga

SEQ ID NO: 16913 - DNA, 80 bp, synthetic construct
  misc_feature 1..80: note = Synthetic: >AdVB7-cand-33290-33369
  source 1..80: mol_type = other DNA
gcattgaagtgaaccctgccgattacaatgacaatgaagaacccaattctctcgaccatgaatcacttgagaataaaaaa

SEQ ID NO: 16914 - DNA, 80 bp, synthetic construct
  misc_feature 1..80: note = Synthetic: >NC_001611.1-cand-131210-131289
  source 1..80: mol_type = other DNA
gccatcgtgttaaattttctaatggatctagtattattgggtccaacttcagcctgaaatccaaatatggaagcggatac

SEQ ID NO: 16915 - DNA, 80 bp, synthetic construct
  misc_feature 1..80: note = Synthetic: >AdVB3-cand-11600-11679
  source 1..80: mol_type = other DNA
gcctgggtttggctgagaaagtggcagctatcaactactcggtcttgagcctgggcaaatactacgctcgcaagatctac

SEQ ID NO: 16916 - DNA, 80 bp, synthetic construct
  misc_feature 1..80: note = Synthetic: >AdVB3-cand-17280-17359
  source 1..80: mol_type = other DNA
gccttcgcgtccccattactggctaccgaggaagaaactcgcgccgtagaaggatgttggggcgagggatgcgccgccac

SEQ ID NO: 16917 - DNA, 80 bp, synthetic construct
  misc_feature 1..80: note = Synthetic: >AdVB3-cand-28280-28359
  source 1..80: mol_type = other DNA
gcggatgggactgcaggtccgttgaaattacacataataacaaaacatggaacaataccttatccaccacatgggagcca

SEQ ID NO: 16918 - DNA, 80 bp, synthetic construct
  misc_feature 1..80: note = Synthetic: >NC_001611.1-cand-89440-89519
  source 1..80: mol_type = other DNA
gcggtgccattcatgaaaatgtaataaaatccatgagatctaatttttcattaactaagtctacaaatagagataaaaca

SEQ ID NO: 16919 - DNA, 80 bp, synthetic construct
  misc_feature 1..80: note = Synthetic: >NC_003310.1-cand-88170-88249
  source 1..80: mol_type = other DNA
gcgtggatggttaaaaaggcggcaaaagtcgatccatctgctcaacaattttgtcagtatttgataaaacacaagtctaa

SEQ ID NO: 16920 - DNA, 80 bp, synthetic construct
  misc_feature 1..80: note = Synthetic: >NC_001611.1-cand-9940-10019
  source 1..80: mol_type = other DNA
gcgttgtctgtattctggagctattttctctatcgcattagtgagttcagaatatgttataaatttaaatcgaataacga

SEQ ID NO: 16921 - DNA, 80 bp, synthetic construct
  misc_feature 1..80: note = Synthetic: >NC_001611.1-cand-130730-130809
  source 1..80: mol_type = other DNA
tttgaatatacttttaattgaacaaaagagttaagttactcatatgggcgccgaccagtctgaacatcaatctttttagc

SEQ ID NO: 16922 - DNA, 80 bp, synthetic construct
  misc_feature 1..80: note = Synthetic: >AdVB7-cand-16560-16639
  source 1..80: mol_type = other DNA
gctggtggagtttgtgcgcgagttcgccccaagacggcgcgtgcagtggcgcgggcgcaaagtgcgtcaagtgctcagac

SEQ ID NO: 16923 - DNA, 80 bp, synthetic construct
  misc_feature 1..80: note = Synthetic: >LR861845.1-cand-1260-1339
  source 1..80: mol_type = other DNA
ttaaatagtgggcacaaaaaagcaaaacgacggttgtttacaatatcagatagtggctatggctgttctgaagtggaagc

SEQ ID NO: 16924 - DNA, 80 bp, synthetic construct
  misc_feature 1..80: note = Synthetic: >EVB86-cand-5900-5979
  source 1..80: mol_type = other DNA
tgagcagggtgagattgagttcatcgagagctccaaggaggcaggcttcccagtcatcagcactcccagcaaaacgaagc

SEQ ID NO: 16925 - DNA, 80 bp, synthetic construct
  misc_feature 1..80: note = Synthetic: >NC_003310.1-cand-184480-184559
  source 1..80: mol_type = other DNA
ttagcaaatacgattttaacgacaccataatcgatcctaatggtgtggtgggtcatgctagcttttgtaccaatagaagc

SEQ ID NO: 16926 - DNA, 80 bp, synthetic construct
  misc_feature 1..80: note = Synthetic: >NC_001611.1-cand-41710-41789
  source 1..80: mol_type = other DNA
taagaaaacagactttaaagttgttaaaaaattaagtgttataagattacttatttgggcttacctaagcaagaaagata

SEQ ID NO: 16927 - DNA, 80 bp, synthetic construct
  misc_feature 1..80: note = Synthetic: >NC_003310.1-cand-137690-137769
  source 1..80: mol_type = other DNA
tcgtcgaacgttctagtatacggaaacactttgatttcttatctgtagttaatgacttagtgatatcacgaagaatatta

SEQ ID NO: 16928 - DNA, 80 bp, synthetic construct
  misc_feature 1..80: note = Synthetic: >NC_001611.1-cand-11630-11709
  source 1..80: mol_type = other DNA
tatttcctggagagcaagtagatgatgaggaaccagatagtttatatccgtacttgcacgtaaagtctacattgtcatta

SEQ ID NO: 16929 - DNA, 80 bp, synthetic construct
  misc_feature 1..80: note = Synthetic: >NC_001611.1-cand-86880-86959
  source 1..80: mol_type = other DNA
tgaataacttatccgaactaactgcttctggaggcaaggtattaattactaccatggacggagacaaattatcaaaatta

SEQ ID NO: 16930 - DNA, 80 bp, synthetic construct
  misc_feature 1..80: note = Synthetic: >AdVB7-cand-14560-14639
  source 1..80: mol_type = other DNA
tacatgttcagcaacaagttcaaggcgagggtgatggtgtccagaaaagctcctgaaggtgttatagtaaatgacaccta

SEQ ID NO: 16931 - DNA, 80 bp, synthetic construct
  misc_feature 1..80: note = Synthetic: >NC_001611.1-cand-37300-37379
  source 1..80: mol_type = other DNA
taccatcttgttgtaaatgtgtattcggttatcggatctgctcctttttctattaaagtatcgatgtcgatctcgtctaa

SEQ ID NO: 16932 - DNA, 80 bp, synthetic construct
  misc_feature 1..80: note = Synthetic: >AdVB3-cand-14080-14159
  source 1..80: mol_type = other DNA
tactcggagctgtcgcccctgtacgataccaccaagttgtatctggtggacaacaagtcggcggacattgcctccctgaa

SEQ ID NO: 16933 - DNA, 80 bp, synthetic construct
  misc_feature 1..80: note = Synthetic: >NC_003310.1-cand-123890-123969
  source 1..80: mol_type = other DNA
tactttccatgtacgagtgggactggtagacttactaaagtcaataaaggcgaagatacacgaaagaatcaaaagaatga

SEQ ID NO: 16934 - DNA, 80 bp, synthetic construct
  misc_feature 1..80: note = Synthetic: >NC_001611.1-cand-133780-133859
  source 1..80: mol_type = other DNA
tagagattcctgactactaacgaaattaatatgatttggccaaatgtacccatcataatctgggttataaacgggtgtaa

SEQ ID NO: 16935 - DNA, 80 bp, synthetic construct
  misc_feature 1..80: note = Synthetic: >NC_003310.1-cand-88400-88479
  source 1..80: mol_type = other DNA
tagatttaacattaaagatgagcataaacataataaacaaaattacaatcaaacctataacattaatatcaaacaatcca

SEQ ID NO: 16936 - DNA, 80 bp, synthetic construct
  misc_feature 1..80: note = Synthetic: >NC_039476.1-cand-1130-1209
  source 1..80: mol_type = other DNA
tggtgcctatggcttagagatactcaaattggtcatgaagtggttcttcccaaagaaagaggaggccaatgagctagcta

SEQ ID NO: 16937 - DNA, 80 bp, synthetic construct
  misc_feature 1..80: note = Synthetic: >AdVB3-cand-24690-24769
  source 1..80: mol_type = other DNA
tgatggctgtagtgctagtaactgtggagctggagtgtctgcgccgctttttcaccgaccctgagaccctgcgcaagcta

SEQ ID NO: 16938 - DNA, 80 bp, synthetic construct
  misc_feature 1..80: note = Synthetic: >NC_001611.1-cand-103410-103489
  source 1..80: mol_type = other DNA
tataaataaaagacaaatcttgcgagctagacatatcggtaaaatgcatggattggaatcgtgtagtcgacagaagaata

SEQ ID NO: 16939 - DNA, 80 bp, synthetic construct
  misc_feature 1..80: note = Synthetic: >NC_006573.1-cand-2340-2419
  source 1..80: mol_type = other DNA
tatatggccatccatctcctgacaaacaaatcttgtagagtatgttttcataaggattcctttcaccaggggtgtctgaa

SEQ ID NO: 16940 - DNA, 80 bp, synthetic construct
  misc_feature 1..80: note = Synthetic: >NC_004296.1-cand-1050-1129
  source 1..80: mol_type = other DNA
tatattgcatcaagaacctcaataacaggaagggcctgggaaaacactgtcgttgatctggaatcagatgggaagccaca

SEQ ID NO: 16941 - DNA, 80 bp, synthetic construct
  misc_feature 1..80: note = Synthetic: >NC_001611.1-cand-49630-49709
  source 1..80: mol_type = other DNA
tcaaatctagattgtttaatatattatatagatgtagtgtagctcctacaggaatatctttaactaagtcaattatttca

SEQ ID NO: 16942 - DNA, 80 bp, synthetic construct
  misc_feature 1..80: note = Synthetic: >AdVB3-cand-24210-24289
  source 1..80: mol_type = other DNA
agaaccaaaagattccagtctcctgccgcgccaaccgcacccgcgccgatgccctgctcaacttgggtccgggagctcgc

SEQ ID NO: 16943 - DNA, 80 bp, synthetic construct
  misc_feature 1..80: note = Synthetic: >AdVB3-cand-24370-24449
  source 1..80: mol_type = other DNA
tctgcaacagggagagaatgacatggatgaacatcacagcgctctggtggaactggagggtgacaatgcccggattgcag

SEQ ID NO: 16944 - DNA, 80 bp, synthetic construct
  misc_feature 1..80: note = Synthetic: >AdVB3-cand-24840-24919
  source 1..80: mol_type = other DNA
ttaccaaccttgtttcttacatgggcattttgcatgagaaccgactagggcagagcgtcctgcacaccacccttaaaggg

SEQ ID NO: 16945 - DNA, 80 bp, synthetic construct
  misc_feature 1..80: note = Synthetic: >AdVB3-cand-24930-25009
  source 1..80: mol_type = other DNA
gtgactacatccgagactgtgtctacctctacctctgtcatacctggcagactggtatgggtgtgtggcaacagtgtttg

SEQ ID NO: 16946 - DNA, 80 bp, synthetic construct
  misc_feature 1..80: note = Synthetic: >AdVB3-cand-25010-25089
  source 1..80: mol_type = other DNA
gaagagcagaacctgaaagagctgaacaagctcttgcagagatccctcaaagccctgtggacaggttttgatgagcgcac

SEQ ID NO: 16947 - DNA, 80 bp, synthetic construct
  misc_feature 1..80: note = Synthetic: >AdVB3-cand-25550-25629
  source 1..80: mol_type = other DNA
acctccgcctacctgcgcaagtttcaccccgaggactaccatccctatgagatcaggttctatgaggaccaatcacatcc

SEQ ID NO: 16948 - DNA, 80 bp, synthetic construct
  misc_feature 1..80: note = Synthetic: >AdVB3-cand-25570-25649
  source 1..80: mol_type = other DNA
gtttcaccccgaggactaccatccctatgagatcaggttctatgaggaccaatcacatcctcccaaagtcgagctctcag

SEQ ID NO: 16949 - DNA, 80 bp, synthetic construct
  misc_feature 1..80: note = Synthetic: >AdVB3-cand-25650-25729
  source 1..80: mol_type = other DNA
cctgcgtcatcacccagggagcaattctagcccaattgcaagccatccaaaaatctcgccaagaatttctgctgaaaaag

SEQ ID NO: 16950 - DNA, 80 bp, synthetic construct
  misc_feature 1..80: note = Synthetic: >AdVB3-cand-25740-25819
  source 1..80: mol_type = other DNA
tctaccttgaccctcagaccggtgaggagcttaacacaagattcccccaggatgtcccatcgccgaggaagcaagaagct

SEQ ID NO: 16951 - DNA, 80 bp, synthetic construct
  misc_feature 1..80: note = Synthetic: >AdVB3-cand-26070-26149
  source 1..80: mol_type = other DNA
cagcggcggcccaacagtagatgggacgagaccgggcgattcccgaacccgaccaccgcttccaagaccggtaagaagga

SEQ ID NO: 16952 - DNA, 80 bp, synthetic construct
  misc_feature 1..80: note = Synthetic: >AdVB3-cand-26220-26299
  source 1..80: mol_type = other DNA
aacatatccttcacccggcgatacctgcttttccaccacggtgtaaacttcccccgcaatatcttgcattactaccgtca

SEQ ID NO: 16953 - DNA, 80 bp, synthetic construct
  misc_feature 1..80: note = Synthetic: >AdVB3-cand-26430-26509
  source 1..80: mol_type = other DNA
cacagcgaacgagccagcgcagaccagagagctgaggaaccggatctttccaaccctctatgccattttccagcagagtc

SEQ ID NO: 16954 - DNA, 80 bp, synthetic construct
  misc_feature 1..80: note = Synthetic: >AdVB3-cand-26610-26689
  source 1..80: mol_type = other DNA
tgaggacgccgaggctctcttcaacaagtactgcgcgctgactcttaaagagtagcccttgcccgcgctcatttcgaaaa

SEQ ID NO: 16955 - DNA, 80 bp, synthetic construct
  misc_feature 1..80: note = Synthetic: >AdVB3-cand-26690-26769
  source 1..80: mol_type = other DNA
cggcgggaatcacgtcatccttggcacctgtcctttgccctcgtcatgagtaaagagattcccacaccttacatgtggag

SEQ ID NO: 16956 - DNA, 80 bp, synthetic construct
  misc_feature 1..80: note = Synthetic: >AdVB3-cand-26790-26869
  source 1..80: mol_type = other DNA
tggcagcaggcgcttcccaggactactccacccgcatgaattggcttagcgccgggccctcaatgatatcacgggttaat

SEQ ID NO: 16957 - DNA, 80 bp, synthetic construct
  misc_feature 1..80: note = Synthetic: >AdVB3-cand-26930-27009
  source 1..80: mol_type = other DNA
cgtcaacaccttaatccccgaaattggcccgccaccctggtgtaccaggaaaatcccgctcccaccaccgtactacttcc

SEQ ID NO: 16958 - DNA, 80 bp, synthetic construct
  misc_feature 1..80: note = Synthetic: >AdVE4-cand-19080-19159
  source 1..80: mol_type = other DNA
tgacggcaaaaatattgttgctaactacgatccagatattgtaatgtacacagaaaatgttgacttgcagactccagata

SEQ ID NO: 16959 - DNA, 80 bp, synthetic construct
  misc_feature 1..80: note = Synthetic: >AdVE4-cand-19160-19239
  source 1..80: mol_type = other DNA
ctcatattgtatacaaacctggaaaagaggacaccagctctgaatccaatttgggtcagcaggccatgcctaacagaccc

SEQ ID NO: 16960 - DNA, 80 bp, synthetic construct
  misc_feature 1..80: note = Synthetic: >AdVE4-cand-19220-19299
  source 1..80: mol_type = other DNA
aggccatgcctaacagacccaactacattggcttcagagacaattttatcgggctcatgtactacaacagcactggcaat

SEQ ID NO: 16961 - DNA, 80 bp, synthetic construct
  misc_feature 1..80: note = Synthetic: >AdVE4-cand-19320-19399
  source 1..80: mol_type = other DNA
ggcctctcagctgaatgctgtggttgacttgcaagacagaaacactgaactgtcctaccagctcttgcttgactctttag

SEQ ID NO: 16962 - DNA, 80 bp, synthetic construct
  misc_feature 1..80: note = Synthetic: >AdVE4-cand-19400-19479
  source 1..80: mol_type = other DNA
gcgacagaacccggtatttcagtatgtggaatcaggcggtggacagctatgatcctgatgtgcgcattattgaaaaccat

SEQ ID NO: 16963 - DNA, 80 bp, synthetic construct
  misc_feature 1..80: note = Synthetic: >AdVE4-cand-19480-19559
  source 1..80: mol_type = other DNA
ggtgtggaggatgaattgccaaactattgctttccgttaaatggtgtgggattgacagacacttaccagggtgttaaagt

SEQ ID NO: 16964 - DNA, 80 bp, synthetic construct
  misc_feature 1..80: note = Synthetic: >AdVE4-cand-19560-19639
  source 1..80: mol_type = other DNA
taaaacagatgcaggttctgaaaagtgggacaaagatgacaccacagttagtactgctaatgaaatccatgtaggcaatc

SEQ ID NO: 16965 - DNA, 80 bp, synthetic construct
  misc_feature 1..80: note = Synthetic: >AdVE4-cand-19640-19719
  source 1..80: mol_type = other DNA
cttttgccatggaaatcaacatccaagccaacctgtggaggaacttcctctatgccaatgttgccctctatttgcctgat

SEQ ID NO: 16966 - DNA, 80 bp, synthetic construct
  misc_feature 1..80: note = Synthetic: >AdVE4-cand-19720-19799
  source 1..80: mol_type = other DNA
aaatacaaatacacaccggccaacatcaccctgcccaccaacaccaacacctacgagtacatgaatggccgggtggtggc

SEQ ID NO: 16967 - DNA, 80 bp, synthetic construct
  misc_feature 1..80: note = Synthetic: >AdVE4-cand-19800-19879
  source 1..80: mol_type = other DNA
gccatcgctggtggacgcctacattaacatcggagcacgctggtcgctggaccccatggacaacgtaaatcccttcaacc

SEQ ID NO: 16968 - DNA, 80 bp, synthetic construct
  misc_feature 1..80: note = Synthetic: >AdVE4-cand-19880-19959
  source 1..80: mol_type = other DNA
accaccgtaacgcgggcttgcgctaccgctccatgcttctgggcaacgggcgctacgtgccattccacatccaggtgccc

SEQ ID NO: 16969 - DNA, 80 bp, synthetic construct
  misc_feature 1..80: note = Synthetic: >AdVE4-cand-19960-20039
  source 1..80: mol_type = other DNA
cagaaatttttcgccatcaagaaccttttgctcctgcccgggtcctatacctacgagtggaacttccgcaaggacgtcaa

SEQ ID NO: 16970 - DNA, 80 bp, synthetic construct
  misc_feature 1..80: note = Synthetic: >AdVE4-cand-20000-20079
  source 1..80: mol_type = other DNA
ggtcctatacctacgagtggaacttccgcaaggacgtcaacatgatcttgcagagttcccttggcaacgacctgcgcaca

SEQ ID NO: 16971 - DNA, 80 bp, synthetic construct
  misc_feature 1..80: note = Synthetic: >AdVE4-cand-20120-20199
  source 1..80: mol_type = other DNA
ctaccttcttccccatggcgcacaacaccgcctccacgcttgaggccatgctgcgcaacgacaccaatgaccagtccttt

SEQ ID NO: 16972 - DNA, 80 bp, synthetic construct
  misc_feature 1..80: note = Synthetic: >AdVE4-cand-20200-20279
  source 1..80: mol_type = other DNA
aacgactacctctcggcggccaacatgctataccccatcccggccaatgccaccaacgtgcccatctccatcccctcgcg

SEQ ID NO: 16973 - DNA, 80 bp, synthetic construct
  misc_feature 1..80: note = Synthetic: >AdVE4-cand-20280-20359
  source 1..80: mol_type = other DNA
caactgggccgcctttcgcggctggtccttcacgcgtctcaagaccaaagagacgccctcgctgggctccgggtttgacc

SEQ ID NO: 16974 - DNA, 80 bp, synthetic construct
  misc_feature 1..80: note = Synthetic: >EF177176.1-cand-1750-1829
  source 1..80: mol_type = other DNA
accacaggagcaaatgttaattcaaccaccaaaaatacgaagtcctgctgtagctttatatttttataaaacagcaatgt

SEQ ID NO: 16975 - DNA, 80 bp, synthetic construct
  misc_feature 1..80: note = Synthetic: >EF177176.1-cand-1830-1909
  source 1..80: mol_type = other DNA
caaatattagtgatgtgtatggagacacaccagaatggatacaaagacaaacacaattgcaacacagtttacaggatagt

SEQ ID NO: 16976 - DNA, 80 bp, synthetic construct
  misc_feature 1..80: note = Synthetic: >EF177176.1-cand-1910-1989
  source 1..80: mol_type = other DNA
caatttgaattatctaaaatggtgcagtgggcatttgataatgacgtaacagatgatagccaaattgcgtttcaatatgc

SEQ ID NO: 16977 - DNA, 80 bp, synthetic construct
  misc_feature 1..80: note = Synthetic: >EF177176.1-cand-1990-2069
  source 1..80: mol_type = other DNA
acaattagcagatgtagacagcaatgcacaagcctttttaaaaagcaatatgcaggcaaaatatgtaaaggattgtggaa

SEQ ID NO: 16978 - DNA, 80 bp, synthetic construct
  misc_feature 1..80: note = Synthetic: >EF177176.1-cand-2070-2149
  source 1..80: mol_type = other DNA
taatgtgtagacattataaaagggcacaacagcaacaaatgaatatgtgccagtggataaagcacatatgtagtaaaaca

SEQ ID NO: 16979 - DNA, 80 bp, synthetic construct
  misc_feature 1..80: note = Synthetic: >EF177176.1-cand-2200-2279
  source 1..80: mol_type = other DNA
ggtcgatttcatttcatttttaagttactttaaattatttctacaaggaacacctaaacataactgtttggtactttgtg

SEQ ID NO: 16980 - DNA, 80 bp, synthetic construct
  misc_feature 1..80: note = Synthetic: >EF177176.1-cand-2230-2309
  source 1..80: mol_type = other DNA
taaattatttctacaaggaacacctaaacataactgtttggtactttgtggaccgccaaatacaggtaaatcatgctttg

SEQ ID NO: 16981 - DNA, 80 bp, synthetic construct
  misc_feature 1..80: note = Synthetic: >EF177176.1-cand-2310-2389
  source 1..80: mol_type = other DNA
ctatgagtcttataaagttttttcaagggtctgtcatttcatttgtgaattcacaaagccacttttggttgcagccatta

SEQ ID NO: 16982 - DNA, 80 bp, synthetic construct
  misc_feature 1..80: note = Synthetic: >EF177176.1-cand-2390-2469
  source 1..80: mol_type = other DNA
gacaatgctaaacttggtttgttggatgatgcaacagaaatatgttggaaatatatagacgattatttaaggaatttggt

SEQ ID NO: 16983 - DNA, 80 bp, synthetic construct
  misc_feature 1..80: note = Synthetic: >EF177176.1-cand-2470-2549
  source 1..80: mol_type = other DNA
agatggaaatcccataagtttagatagaaaacataaacaattagtacaaataaaatgtccaccattactaattacaacta

SEQ ID NO: 16984 - DNA, 80 bp, synthetic construct
  misc_feature 1..80: note = Synthetic: >EF177176.1-cand-2550-2629
  source 1..80: mol_type = other DNA
atataaatcctatgctagatgctaaattacgatatttacacagtagaatgttagtgtttcagtttcaaaatccatttcca

SEQ ID NO: 16985 - DNA, 80 bp, synthetic construct
  misc_feature 1..80: note = Synthetic: >EF177176.1-cand-2630-2709
  source 1..80: mol_type = other DNA
ttagataataatggtaatcctgtatatgaattaagtaatgtaaactggaaatgtttctttacaaggacgtggtccagatt

SEQ ID NO: 16986 - DNA, 80 bp, synthetic construct
  misc_feature 1..80: note = Synthetic: >EF177176.1-cand-2710-2789
  source 1..80: mol_type = other DNA
aaatttggataacgacgaggacaaagaaaacaatggagacgctttcccaacgtttaaatgcgtgccagaacaaaatacta

SEQ ID NO: 16987 - DNA, 80 bp, synthetic construct
  misc_feature 1..80: note = Synthetic: >EF177176.1-cand-2790-2869
  source 1..80: mol_type = other DNA
gactgttttgaaaaagatagtagatgtattgcagatcatatagaatattggaaagctgtgcgacatgaaaatgtgctata

SEQ ID NO: 16988 - DNA, 80 bp, synthetic construct
  misc_feature 1..80: note = Synthetic: >EF177176.1-cand-2870-2949
  source 1..80: mol_type = other DNA
ctataaagcaagagaaaatgacattactgtactaaaccaccagatggtgccttgtttacaagtatgtaaagcaaaagcat

SEQ ID NO: 16989 - DNA, 80 bp, synthetic construct
  misc_feature 1..80: note = Synthetic: >EF177176.1-cand-2950-3029
  source 1..80: mol_type = other DNA
gtagtgcaatagaagtgcaaatagcactggaatcattaagtacaacaatatataacaatgaagagtggacattaagagac

SEQ ID NO: 16990 - DNA, 80 bp, synthetic construct
  misc_feature 1..80: note = Synthetic: >EVA89-cand-5410-5489
  source 1..80: mol_type = other DNA
tgccctttccctacttaggaggaacattagacaagtgcagacagatcagggccatttcaccatgctaggcatcagagacc

SEQ ID NO: 16991 - DNA, 80 bp, synthetic construct
  misc_feature 1..80: note = Synthetic: >EVA89-cand-5490-5569
  source 1..80: mol_type = other DNA
agatcgcagtgctaccgcgacacgctcttcctggcaagcaaatttggattgaacataaattagttaatgttttagatgcg

SEQ ID NO: 16992 - DNA, 80 bp, synthetic construct
  misc_feature 1..80: note = Synthetic: >EVA89-cand-5570-5649
  source 1..80: mol_type = other DNA
gtggagttagtggatgaacaacaggttaatttggaactcaccttagtgactttggataccaatgagaaattcagagacat

SEQ ID NO: 16993 - DNA, 80 bp, synthetic construct
  misc_feature 1..80: note = Synthetic: >EVA89-cand-5650-5729
  source 1..80: mol_type = other DNA
tactaaatttataccagaacaaattgagggttctcccgatgctgtcttagtgataaacactgagaccatgccatcaatgt

SEQ ID NO: 16994 - DNA, 80 bp, synthetic construct
  misc_feature 1..80: note = Synthetic: >EVA89-cand-5750-5829
  source 1..80: mol_type = other DNA
accgaatatggctttctcaatcttagtggtagaccaacccaccgaaccatgatgtacaatttcccaactagagcaggaca

SEQ ID NO: 16995 - DNA, 80 bp, synthetic construct
  misc_feature 1..80: note = Synthetic: >EVA89-cand-5870-5949
  source 1..80: mol_type = other DNA
attcacattggaggaaatggtagacagggattctgtgcagctttaaagcgaggctactttacaactgagcaaggtgagat

SEQ ID NO: 16996 - DNA, 80 bp, synthetic construct
  misc_feature 1..80: note = Synthetic: >EVA89-cand-5910-5989
  source 1..80: mol_type = other DNA
ctttaaagcgaggctactttacaactgagcaaggtgagatccagtggatgaagcccaacaaagagacaggcaatttcaac

SEQ ID NO: 16997 - DNA, 80 bp, synthetic construct
  misc_feature 1..80: note = Synthetic: >EVA89-cand-5990-6069
  source 1..80: mol_type = other DNA
atcaacggtccaaccaagactaagcttgaacccagtgttttccatgatgtgtttgagggagtcaaagagccagcagtcct

SEQ ID NO: 16998 - DNA, 80 bp, synthetic construct
  misc_feature 1..80: note = Synthetic: >EVA89-cand-6320-6399
  source 1..80: mol_type = other DNA
aagaaggacatcttgaacccccaaactagggatgtaaccaaaatgaaaatgtacttggataaatatggcattgacctccc

SEQ ID NO: 16999 - DNA, 80 bp, synthetic construct
  misc_feature 1..80: note = Synthetic: >EVA89-cand-6400-6479
  source 1..80: mol_type = other DNA
ctactccacttatgtcaaggatgagcttagagctaaagacaaaatcaagaaaggaaaatctaggcttattgaagccagta

SEQ ID NO: 17000 - DNA, 80 bp, synthetic construct
  misc_feature 1..80: note = Synthetic: >EVA89-cand-6560-6639
  source 1..80: mol_type = other DNA
gggtcagcagtcggttgtaacccagacactttctggagtaaagttcctataatgctccctggttctctttttgcttttga

SEQ ID NO: 17001 - DNA, 80 bp, synthetic construct
  misc_feature 1..80: note = Synthetic: >EVA89-cand-6790-6869
  source 1..80: mol_type = other DNA
aatgggtgggatgccatctggatgctctggcaccagcatctttaattccatgattaataatataataatcagaactctct

SEQ ID NO: 17002 - DNA, 80 bp, synthetic construct
  misc_feature 1..80: note = Synthetic: >EVA89-cand-6840-6919
  source 1..80: mol_type = other DNA
tgattaataatataataatcagaactctcttaattaagaccttcaagggaattgacctagatgaattaaatatgattgca

SEQ ID NO: 17003 - DNA, 80 bp, synthetic construct
  misc_feature 1..80: note = Synthetic: >EVA89-cand-6990-7069
  source 1..80: mol_type = other DNA
aatatggcttagttatgacaccagctgataaatctgcttgttttaacgaagtgaactgggagaacgcaacatttctcaag

SEQ ID NO: 17004 - DNA, 80 bp, synthetic construct
  misc_feature 1..80: note = Synthetic: >EVA89-cand-7090-7169
  source 1..80: mol_type = other DNA
acaatatccattcctcatccacccaatcatgccaatgaaagagatacacgagtccattcgctggactaaggacccacgta

SEQ ID NO: 17005 - DNA, 80 bp, synthetic construct
  misc_feature 1..80: note = Synthetic: >EVA89-cand-7170-7249
  source 1..80: mol_type = other DNA
atacgcaagatcacgtgcggtcactgtgtctcttggcgtggcacaatggtagggaaacttatgaggaatttgttgataaa

SEQ ID NO: 17006 - DNA, 80 bp, synthetic construct
  misc_feature 1..80: note = Synthetic: >EVB73-cand-1260-1339
  source 1..80: mol_type = other DNA
agtggctacaccatacatgtgcaatgcaacgcctccaagttccaccagggagccttacttgtagtgtgtgttccagaagc

SEQ ID NO: 17007 - DNA, 80 bp, synthetic construct
  misc_feature 1..80: note = Synthetic: >EVB73-cand-1350-1429
  source 1..80: mol_type = other DNA
tcagccaaaattaatcaagcattcacgcatgaggcactgagtaaaggagaaattgccatggagttcacctcaggcgacgc

SEQ ID NO: 17008 - DNA, 80 bp, synthetic construct
  misc_feature 1..80: note = Synthetic: >EVB73-cand-1410-1489
  source 1..80: mol_type = other DNA
gagttcacctcaggcgacgcagcagaaggagtacaaacagcagtgcacaatgcagccatgggcgtggcagtaggaaacct

SEQ ID NO: 17009 - DNA, 80 bp, synthetic construct
  misc_feature 1..80: note = Synthetic: >EVB73-cand-1490-1569
  source 1..80: mol_type = other DNA
cacaatcttcccacatcagtggataaacctgcgcacaaacaacagtgctacgattgtgatgccatatataaaagcagtgc

SEQ ID NO: 17010 - DNA, 80 bp, synthetic construct
  misc_feature 1..80: note = Synthetic: >EVB73-cand-1570-1649
  source 1..80: mol_type = other DNA
ccatggacaacatgtatcgacattacaacttcacactaatgataatcccatttgccaagcttgaatacaacaccggatcc

SEQ ID NO: 17011 - DNA, 80 bp, synthetic construct
  misc_feature 1..80: note = Synthetic: >EVB73-cand-1650-1729
  source 1..80: mol_type = other DNA
tccagcatggtgcccataacagtgactgtcgcaccaatgtgtgcggagtacaatgggctacgcttggccggtcaccaggg

SEQ ID NO: 17012 - DNA, 80 bp, synthetic construct
  misc_feature 1..80: note = Synthetic: >EVB73-cand-1730-1809
  source 1..80: mol_type = other DNA
attaccagtgatgtgcactccaggcagcaaccaatttttgacatccgatgactttcaatccccatcagcaatgccccagt

SEQ ID NO: 17013 - DNA, 80 bp, synthetic construct
  misc_feature 1..80: note = Synthetic: >EVB73-cand-1840-1919
  source 1..80: mol_type = other DNA
gggaggtgcaaaatttgatggaaatagctgaggtcgactcactggtacccgtgaacaacacttcgcggaacacaaggtca

SEQ ID NO: 17014 - DNA, 80 bp, synthetic construct
  misc_feature 1..80: note = Synthetic: >EVB73-cand-1890-1969
  source 1..80: mol_type = other DNA
gtgaacaacacttcgcggaacacaaggtcaattgaagcatatggcatccccgtcagaacaggaataacatcccaacaagt

SEQ ID NO: 17015 - DNA, 80 bp, synthetic construct
  misc_feature 1..80: note = Synthetic: >EVB73-cand-1970-2049
  source 1..80: mol_type = other DNA
atttggatttcgggtgcaaccaggctatgattcagtgtttaaacacacgctcttgggtgaggtgctcaactactacgcaa

SEQ ID NO: 17016 - DNA, 80 bp, synthetic construct
  misc_feature 1..80: note = Synthetic: >EVB73-cand-2050-2129
  source 1..80: mol_type = other DNA
actggtctgggagcataaagctcaccttcatgttttgtggctcggcaatgacaacagggaagttaatccttgcgtattcc

SEQ ID NO: 17017 - DNA, 80 bp, synthetic construct
  misc_feature 1..80: note = Synthetic: >EVB73-cand-2130-2209
  source 1..80: mol_type = other DNA
ccaccaggagctggtgtcccagattcgaggaaaaacgccatgttgggcacccacgtggtgtgggacttaggactacaatc

SEQ ID NO: 17018 - DNA, 80 bp, synthetic construct
  misc_feature 1..80: note = Synthetic: >EVB73-cand-2210-2289
  source 1..80: mol_type = other DNA
aagttgtgtcttgtgtatcccgtggatcagtcaaactcactacaggtacgtgcagagtgatgcatacacagatgccgggt

SEQ ID NO: 17019 - DNA, 80 bp, synthetic construct
  misc_feature 1..80: note = Synthetic: >EVB73-cand-2290-2369
  source 1..80: mol_type = other DNA
tcgtgacatgttggtaccagacgagcatagttgtgcccgttggcgtagtgacacaaagcaccattctatgttttgtttca

SEQ ID NO: 17020 - DNA, 80 bp, synthetic construct
  misc_feature 1..80: note = Synthetic: >EVB73-cand-2380-2459
  source 1..80: mol_type = other DNA
acttttcagtgagattactgcgggacacccccttcataacacagacaacattgtaccagaatgacccagcacaagccata

SEQ ID NO: 17021 - DNA, 80 bp, synthetic construct
  misc_feature 1..80: note = Synthetic: >EVB73-cand-2470-2549
  source 1..80: mol_type = other DNA
tcacacgagtagcagacactgtagcaagtggtcccaccaattcaaccagcatccccgcactgacagctgcggaaacaggg

SEQ ID NO: 17022 - DNA, 80 bp, synthetic construct
  misc_feature 1..80: note = Synthetic: >EVB80-cand-1580-1659
  source 1..80: mol_type = other DNA
gacaatatgtataggcattataacttcaccttaatggtcatcccattcgcaccattgaattactctaacaccaccacgtt

SEQ ID NO: 17023 - DNA, 80 bp, synthetic construct
  misc_feature 1..80: note = Synthetic: >EVB80-cand-1660-1739
  source 1..80: mol_type = other DNA
tgttccaatcaccatcacagtggcgcccatgtacgcagagtacaatggcctgaggctgggtacccaccagggactgcctg

SEQ ID NO: 17024 - DNA, 80 bp, synthetic construct
  misc_feature 1..80: note = Synthetic: >EVB80-cand-1740-1819
  source 1..80: mol_type = other DNA
tactgaatacaccagggagcaatcagttcatgacctccgacgactttcaatcaccatcggcactcccacagtatgatgtg

SEQ ID NO: 17025 - DNA, 80 bp, synthetic construct
  misc_feature 1..80: note = Synthetic: >EVB80-cand-1820-1899
  source 1..80: mol_type = other DNA
acccccccaatgcagatccctggtgaggtaaagaacttaatggagattgctgaggtggattcagtggtgcccataaacaa

SEQ ID NO: 17026 - DNA, 80 bp, synthetic construct
  misc_feature 1..80: note = Synthetic: >EVB80-cand-1890-1969
  source 1..80: mol_type = other DNA
ccataaacaatttggaaggaaatgtcaccaacctaaaagcctactgtgtgcaagttggtgtagggaatcacgagaccaac

SEQ ID NO: 17027 - DNA, 80 bp, synthetic construct
  misc_feature 1..80: note = Synthetic: >EVB80-cand-1950-2029
  source 1..80: mol_type = other DNA
tagggaatcacgagaccaacaaacccatattttcgtttcagcttagcccaggcagcagtagcgtgttgaaaagaacatta

SEQ ID NO: 17028 - DNA, 80 bp, synthetic construct
  misc_feature 1..80: note = Synthetic: >EVB80-cand-2050-2129
  source 1..80: mol_type = other DNA
ttatgcacattggtcaggtagcataaaattgaccttcttgttctgtggatccgctatggccacgggcaagttgctgctag

SEQ ID NO: 17029 - DNA, 80 bp, synthetic construct
  misc_feature 1..80: note = Synthetic: >EVB80-cand-2130-2209
  source 1..80: mol_type = other DNA
catatgctccccccggcgcgtcggtcccaaagaaccggaaagacgccatgctcggaactcacgttatctgggatgttgga

SEQ ID NO: 17030 - DNA, 80 bp, synthetic construct
  misc_feature 1..80: note = Synthetic: >EVB80-cand-2210-2289
  source 1..80: mol_type = other DNA
ttacaatccagctgtgtattgtgcatcccatggataagccaaacacattacaggttggtggagcacgacacatacacagc

SEQ ID NO: 17031 - DNA, 80 bp, synthetic construct
  misc_feature 1..80: note = Synthetic: >EVB80-cand-2290-2369
  source 1..80: mol_type = other DNA
agcaggttacatcacgtgctggtaccaaactagtatagtggtcccccctaaaacccctacacaatgtgacgtcatgtgtt

SEQ ID NO: 17032 - DNA, 80 bp, synthetic construct
  misc_feature 1..80: note = Synthetic: >EVB80-cand-2370-2449
  source 1..80: mol_type = other DNA
tcgtttcagcgtgcaatgacttttctgtgaggatgttgagagacacacccttcatagaacaaaaggcaaaactacaaggg

SEQ ID NO: 17033 - DNA, 80 bp, synthetic construct
  misc_feature 1..80: note = Synthetic: >EVB80-cand-2520-2599
  source 1..80: mol_type = other DNA
ggataccaatgttaactgcagtggagacgggccatacatcacaagtggaacccagtgacacaatccagacaagacatgta

SEQ ID NO: 17034 - DNA, 80 bp, synthetic construct
  misc_feature 1..80: note = Synthetic: >EVB80-cand-2530-2609
  source 1..80: mol_type = other DNA
gttaactgcagtggagacgggccatacatcacaagtggaacccagtgacacaatccagacaagacatgtagtgaattatc

SEQ ID NO: 17035 - DNA, 80 bp, synthetic construct
  misc_feature 1..80: note = Synthetic: >EVB80-cand-2610-2689
  source 1..80: mol_type = other DNA
attccaggtcagagtccaccctagaaaactttttgggacgttccgcttgtgtgcacattgacacatacaatgccaaaggt

SEQ ID NO: 17036 - DNA, 80 bp, synthetic construct
  misc_feature 1..80: note = Synthetic: >EVB80-cand-2690-2769
  source 1..80: mol_type = other DNA
gaggaaggctcccacactaggtacgcatcatgggaaatcaccacgagggaactagtgcaaatgaggagaaagatggaact

SEQ ID NO: 17037 - DNA, 80 bp, synthetic construct
  misc_feature 1..80: note = Synthetic: >EVB80-cand-2770-2849
  source 1..80: mol_type = other DNA
gttcacgtacatgagatttgatgtggaggtcacattcgtaatcaccagttaccaggaacagagcacacaattaacccagg

SEQ ID NO: 17038 - DNA, 80 bp, synthetic construct
  misc_feature 1..80: note = Synthetic: >EVB84-cand-5180-5259
  source 1..80: mol_type = other DNA
gtaccagagatcaactccaccttgcagattgagaagcacgttagcagagcattcatatgcctacaagcactaacaacatt

SEQ ID NO: 17039 - DNA, 80 bp, synthetic construct
  misc_feature 1..80: note = Synthetic: >EVB84-cand-5260-5339
  source 1..80: mol_type = other DNA
tgtatcagtggccggcataatatatatcatttacaagctgtttgctggattccagggcgcgtacacaggaatgcccaatc

SEQ ID NO: 17040 - DNA, 80 bp, synthetic construct
  misc_feature 1..80: note = Synthetic: >EVB84-cand-5340-5419
  source 1..80: mol_type = other DNA
agaaacccaaggtgccaaccctgagacaagctaaggtgcaaggtccagcatttgagttcgcagtggcaatgatgaagaga

SEQ ID NO: 17041 - DNA, 80 bp, synthetic construct
  misc_feature 1..80: note = Synthetic: >EVB84-cand-5420-5499
  source 1..80: mol_type = other DNA
aacgcaagcacagtgaagacagagtatggagagttcactatgctcggcatctacgacagatgggctgtattaccacgtca

SEQ ID NO: 17042 - DNA, 80 bp, synthetic construct
  misc_feature 1..80: note = Synthetic: >EVB84-cand-5500-5579
  source 1..80: mol_type = other DNA
cgcaaagccaggaccaacaattttaatgaatgaccaagaggttggcgtgctggatgctaaggagctagtggacaaggatg

SEQ ID NO: 17043 - DNA, 80 bp, synthetic construct
  misc_feature 1..80: note = Synthetic: >EVB84-cand-5580-5659
  source 1..80: mol_type = other DNA
gaacaaacctggaattaaccctactgaagctcaaccgcaatgagaagttcagagacatcagaggcttccttgcaagagag

SEQ ID NO: 17044 - DNA, 80 bp, synthetic construct
  misc_feature 1..80: note = Synthetic: >EVB84-cand-5660-5739
  source 1..80: mol_type = other DNA
gaggtcgaagtgaatgaggcagtactggcaataaacactagcaaattcccaaacatgtacatcccagtaggacaagtcac

SEQ ID NO: 17045 - DNA, 80 bp, synthetic construct
  misc_feature 1..80: note = Synthetic: >EVB84-cand-5740-5819
  source 1..80: mol_type = other DNA
agattacggattcttgaacttgggaggcaccccaactaagaggatgctcatgtacaacttccccaccagagcaggacagt

SEQ ID NO: 17046 - DNA, 80 bp, synthetic construct
  misc_feature 1..80: note = Synthetic: >EVB84-cand-5820-5899
  source 1..80: mol_type = other DNA
gcggtggtgtcctcatgtcaaccggaaaagtcctcggaatacatgtaggaggaaatggacatcagggtttctctgctgcc

SEQ ID NO: 17047 - DNA, 80 bp, synthetic construct
  misc_feature 1..80: note = Synthetic: >EVB84-cand-5900-5979
  source 1..80: mol_type = other DNA
ctcctcaggcattatttcaatgaagagcagggagagatagagttcattgaaagctcaaaagacgcaggattcccagtgat

SEQ ID NO: 17048 - DNA, 80 bp, synthetic construct
  misc_feature 1..80: note = Synthetic: >EVB84-cand-5980-6059
  source 1..80: mol_type = other DNA
caacaccccaagtaaaaccaagttggaaccaagtgtgtttcaccaggtgtttgagggcaacaaggaaccagcagttctta

SEQ ID NO: 17049 - DNA, 80 bp, synthetic construct
  misc_feature 1..80: note = Synthetic: >EVB84-cand-6070-6149
  source 1..80: mol_type = other DNA
cccacggctcaaaaccaactttgaagaggcaatcttttccaaatacattggaaatgtcaacacgcacgtagatgagtaca

SEQ ID NO: 17050 - DNA, 80 bp, synthetic construct
  misc_feature 1..80: note = Synthetic: >EVB84-cand-6140-6219
  source 1..80: mol_type = other DNA
gatgagtacatgcaagaggctgtggatcactatgcaggacaactggccaccttggatatcagcacagagccaatgaaact

SEQ ID NO: 17051 - DNA, 80 bp, synthetic construct
  misc_feature 1..80: note = Synthetic: >EVB84-cand-6250-6329
  source 1..80: mol_type = other DNA
ggaagcgctagatttaaccacaagtgcgggctacccatatgtggctatgggcatcaagaaaagagacattctctcgaaga

SEQ ID NO: 17052 - DNA, 80 bp, synthetic construct
  misc_feature 1..80: note = Synthetic: >EVB84-cand-6300-6379
  source 1..80: mol_type = other DNA
gcatcaagaaaagagacattctctcgaagaaaaccaaagacctaaccaaactgaaggaatgcatggacaagtatggactg

SEQ ID NO: 17053 - DNA, 80 bp, synthetic construct
  misc_feature 1..80: note = Synthetic: >EVB84-cand-6380-6459
  source 1..80: mol_type = other DNA
aacctgccaatggtgacatacgttaaggatgagctaagatctgctgagaaagtagccaagggaaaatccaggcttataga

SEQ ID NO: 17054 - DNA, 80 bp, synthetic construct
  misc_feature 1..80: note = Synthetic: >FJ809772.1-cand-640-719
  source 1..80: mol_type = other DNA
cgtgcttcattagaagcaatgttcaacttaaagtttcatgtgtctgggcctaaactccgtttttttaacattccggatta

SEQ ID NO: 17055 - DNA, 80 bp, synthetic construct
  misc_feature 1..80: note = Synthetic: >FJ809772.1-cand-720-799
  source 1..80: mol_type = other DNA
tcgccctcagcctctttgtgaacctgatattgcaaacttgttacagtattgtaagaattggctaacagaagaacatgaat

SEQ ID NO: 17056 - DNA, 80 bp, synthetic construct
  misc_feature 1..80: note = Synthetic: >FJ809772.1-cand-800-879
  source 1..80: mol_type = other DNA
ttgtatttaaggaggtcactggtacaagtgtttcacaggtttttgagcagcatgaacgagagcatatgtcaagatattca

SEQ ID NO: 17057 - DNA, 80 bp, synthetic construct
  misc_feature 1..80: note = Synthetic: >FJ809772.1-cand-880-959
  source 1..80: mol_type = other DNA
gaatctcgaaagcctagaaattttttgttgatgcagttaactgttcaaggtgtttatctgccctctactattagttcaga

SEQ ID NO: 17058 - DNA, 80 bp, synthetic construct
  misc_feature 1..80: note = Synthetic: >FJ809772.1-cand-960-1039
  source 1..80: mol_type = other DNA
ccagtgtgatacaaggatcggctgtttagaaatatcaaaaaatctacctgagacaccagtgcaagcactggcattagatg

SEQ ID NO: 17059 - DNA, 80 bp, synthetic construct
  misc_feature 1..80: note = Synthetic: >FJ809772.1-cand-1040-1119
  source 1..80: mol_type = other DNA
ttgcacataggtacttaagtttgaatgaagatgagctgatcaattactacagcccaaaggttcatttttcagcaagccag

SEQ ID NO: 17060 - DNA, 80 bp, synthetic construct
  misc_feature 1..80: note = Synthetic: >FJ809772.1-cand-1120-1199
  source 1..80: mol_type = other DNA
aatgttaaagagccagggacactcaaaataggactttcacaattgaacccgacttctaaagcagttctagagaatgttgg

SEQ ID NO: 17061 - DNA, 80 bp, synthetic construct
  misc_feature 1..80: note = Synthetic: >FJ809772.1-cand-1210-1289
  source 1..80: mol_type = other DNA
tccgaaaaaggaatatttggtgagatgattgaaagtatcaacattggtagtcaaatacaattaaatgaatgctctaagac

SEQ ID NO: 17062 - DNA, 80 bp, synthetic construct
  misc_feature 1..80: note = Synthetic: >FJ809772.1-cand-1330-1409
  source 1..80: mol_type = other DNA
gagacaaacacatctatccctgtgcctaataagactacaggtgttgatgaattattgaacaagttttatgataatgaaat

SEQ ID NO: 17063 - DNA, 80 bp, synthetic construct
  misc_feature 1..80: note = Synthetic: >FJ809772.1-cand-1410-1489
  source 1..80: mol_type = other DNA
tggaaaatatttgatctctatattgcgaaagactgctgcctggcatttgggacatcttgttcgtgacattactgaaagct

SEQ ID NO: 17064 - DNA, 80 bp, synthetic construct
  misc_feature 1..80: note = Synthetic: >FJ809772.1-cand-1490-1569
  source 1..80: mol_type = other DNA
taatagcccattctggattgaggaggtcaaagtactggtcagtccatgcttatgatcatggaaatgttgttctctttata

SEQ ID NO: 17065 - DNA, 80 bp, synthetic construct
  misc_feature 1..80: note = Synthetic: >FJ809772.1-cand-1570-1649
  source 1..80: mol_type = other DNA
ttgccttccaaatcgcttgaggtggtaggctcctacataagatacttcacagtattcaaagatggtattggcttattaga

SEQ ID NO: 17066 - DNA, 80 bp, synthetic construct
  misc_feature 1..80: note = Synthetic: >FJ809772.1-cand-1650-1729
  source 1..80: mol_type = other DNA
tcatgataacctggattctaaagtcgaaattgatggtgtagtatggtgctattcaaaagtcatgagtatcgatctgaacc

SEQ ID NO: 17067 - DNA, 80 bp, synthetic construct
  misc_feature 1..80: note = Synthetic: >FJ809772.1-cand-1730-1809
  source 1..80: mol_type = other DNA
ggttgctggctttaaatattgcatttgaaaaatctctcttagcaactgctacatggtttcagtactatacagaagatcaa

SEQ ID NO: 17068 - DNA, 80 bp, synthetic construct
  misc_feature 1..80: note = Synthetic: >FJ809772.1-cand-1810-1889
  source 1..80: mol_type = other DNA
ggccattttcctcttcaacatgcattgaggtctgtcttttcatttcatttcttgttatgtatctcacaaaagatgaaatt

SEQ ID NO: 17069 - DNA, 80 bp, synthetic construct
  misc_feature 1..80: note = Synthetic: >FJ809772.1-cand-1890-1969
  source 1..80: mol_type = other DNA
gtgtgccatattcgataatctcagatacctaataccatctgtaacatcattatattctggttatgagttgctcattgaaa

SEQ ID NO: 17070 - DNA, 80 bp, synthetic construct
  misc_feature 1..80: note = Synthetic: >HCV.A13-cand-6580-6659
  source 1..80: mol_type = other DNA
tggaaacctctatgcagcatttcacaagaacccaggtgtagtgacaggatcagctgttggttgtgacccagatctgtttt

SEQ ID NO: 17071 - DNA, 80 bp, synthetic construct
  misc_feature 1..80: note = Synthetic: >HCV.A13-cand-6660-6739
  source 1..80: mol_type = other DNA
ggagtaagataccagtattaatggaagaaaaactctttgcttttgattacacagggtatgatgcttcactcagtccagct

SEQ ID NO: 17072 - DNA, 80 bp, synthetic construct
  misc_feature 1..80: note = Synthetic: >HCV.A13-cand-6740-6819
  source 1..80: mol_type = other DNA
tggtttgaagctctcaaaatggtgttggagaaaattggatttggagacagagtagactacattgattacctcaatcactc

SEQ ID NO: 17073 - DNA, 80 bp, synthetic construct
  misc_feature 1..80: note = Synthetic: >HCV.A13-cand-6870-6949
  source 1..80: mol_type = other DNA
ctggctgctcaggcacttcaatttttaattcaatgattaacaatttgatcatcaggacactcttactgaaaacctacaag

SEQ ID NO: 17074 - DNA, 80 bp, synthetic construct
  misc_feature 1..80: note = Synthetic: >HCV.A13-cand-7200-7279
  source 1..80: mol_type = other DNA
atgaatcaattagatggacaaaagatcctagaaacacacaggatcatgttcgctcgctgtgcctattggcttggcacaat

SEQ ID NO: 17075 - DNA, 80 bp, synthetic construct
  misc_feature 1..80: note = Synthetic: >HCV.A13-cand-7350-7429
  source 1..80: mol_type = other DNA
ctgagtactcaacattgtaccgccgttggctcgactcattttagtaaccctacctcagtcgaattggattgggttatact

SEQ ID NO: 17076 - DNA, 80 bp, synthetic construct
  misc_feature 1..80: note = Synthetic: >HCV.A14-cand-20-99
  source 1..80: mol_type = other DNA
cccacccacagggcccactgggcgctagcactctgattctacggaatctttgtgcgcctgttttataaccccccccccca

SEQ ID NO: 17077 - DNA, 80 bp, synthetic construct
  misc_feature 1..80: note = Synthetic: >HCV.A14-cand-80-159
  source 1..80: mol_type = other DNA
ttttataacccccccccccaaaataagtaacttagaagcaacgcacactacagatcaatagtaggcatagcgcaccagcc

SEQ ID NO: 17078 - DNA, 80 bp, synthetic construct
  misc_feature 1..80: note = Synthetic: >HCV.A14-cand-310-389
  source 1..80: mol_type = other DNA
ccgtgtagatcaggtcgatgagtcaccgcaatccccacgggcgaccgtggcagtggctgcgttggcggcctgcctatggg

SEQ ID NO: 17079 - DNA, 80 bp, synthetic construct
  misc_feature 1..80: note = Synthetic: >HCV.A14-cand-640-719
  source 1..80: mol_type = other DNA
catccggtgtgtaacagagcgataatctactcttttgttgcctttgttccattgacctctttcactacattaaacactct

SEQ ID NO: 17080 - DNA, 80 bp, synthetic construct
  misc_feature 1..80: note = Synthetic: >HCV.A14-cand-720-799
  source 1..80: mol_type = other DNA
acaatacatactttatctcaactctaggaagcgaacatgggagctcaagtgtcaacacaacggacaggctcacacgagac

SEQ ID NO: 17081 - DNA, 80 bp, synthetic construct
  misc_feature 1..80: note = Synthetic: >HCV.A14-cand-800-879
  source 1..80: mol_type = other DNA
caccaacaccgtacgtgatgggtccaccctaaacttcaccaacattaactattacagggagtcatacgcggcggcagcaa

SEQ ID NO: 17082 - DNA, 80 bp, synthetic construct
  misc_feature 1..80: note = Synthetic: >HCV.A14-cand-880-959
  source 1..80: mol_type = other DNA
acagacacgacatggcccaagatccttccaaattcaccaagcctgttttggacatactcacagaaatggcagcccccctt

SEQ ID NO: 17083 - DNA, 80 bp, synthetic construct
  misc_feature 1..80: note = Synthetic: >HCV.A14-cand-960-1039
  source 1..80: mol_type = other DNA
caatcaccaactgccgaagcgtgcgggtatagtgatagagtggcacaactcactattggcaattctactataacaacgca

SEQ ID NO: 17084 - DNA, 80 bp, synthetic construct
  misc_feature 1..80: note = Synthetic: >HCV.A14-cand-1050-1129
  source 1..80: mol_type = other DNA
aacgtgatcgtggcatatggagaatggccagaatattgcagtgacaccgacgccactgcagttgataaacctacaagacc

SEQ ID NO: 17085 - DNA, 80 bp, synthetic construct
  misc_feature 1..80: note = Synthetic: >HCV.A14-cand-1130-1209
  source 1..80: mol_type = other DNA
agatgtgtcagtgaacagattctacactttagatactaaagactgggaagccagttcaaaagggtggtactggaaattcc

SEQ ID NO: 17086 - DNA, 80 bp, synthetic construct
  misc_feature 1..80: note = Synthetic: >HCV.A20-cand-6460-6539
  source 1..80: mol_type = other DNA
tcacttatgtgaaagatgagctaagaaccaagagcaaagtggaacagggcaaatccagattaattgaagcctccagtctg

SEQ ID NO: 17087 - DNA, 80 bp, synthetic construct
  misc_feature 1..80: note = Synthetic: >HCV.A20-cand-6540-6619
  source 1..80: mol_type = other DNA
aatgactcagtggcaatgagaatggcctttggaaatctgtatgcagctttccacaaaaacccaggagtagtcactggttc

SEQ ID NO: 17088 - DNA, 80 bp, synthetic construct
  misc_feature 1..80: note = Synthetic: >HCV.A20-cand-6700-6779
  source 1..80: mol_type = other DNA
caggctatgatgcttcactcagtccagcttggtttgaggcactcaaaatggtgctagagaaaattggatttggtgacaga

SEQ ID NO: 17089 - DNA, 80 bp, synthetic construct
  misc_feature 1..80: note = Synthetic: >HCV.A20-cand-7190-7269
  source 1..80: mol_type = other DNA
tgaatcaatcagatggaccaaagatcctagaaacacacaggatcatgttcgctcattgtgcctattggcttggcacaatg

SEQ ID NO: 17090 - DNA, 80 bp, synthetic construct
  misc_feature 1..80: note = Synthetic: >HCV.A20-cand-7340-7419
  source 1..80: mol_type = other DNA
tgagtactcaacactgtaccgccgttggctcgactcattttagtaaccctacctcagtcgaattggattgggttatactg

SEQ ID NO: 17091 - DNA, 80 bp, synthetic construct
  misc_feature 1..80: note = Synthetic: >HCV.A21-cand-50-129
  source 1..80: mol_type = other DNA
tctggtatcacggtacctttgtacgcctgttttatatccccttccccccgcaactttagaagcttaacacaaagttcaat

SEQ ID NO: 17092 - DNA, 80 bp, synthetic construct
  misc_feature 1..80: note = Synthetic: >HCV.A21-cand-160-239
  source 1..80: mol_type = other DNA
acaagcacttctgtttccccggtgaaattacatagactgtacccacggtcaaaagtgattgatccgttatccgcttgagt

SEQ ID NO: 17093 - DNA, 80 bp, synthetic construct
  misc_feature 1..80: note = Synthetic: >HCV.A21-cand-240-319
  source 1..80: mol_type = other DNA
acttcgagaagcctagtatcaccttggaatcttcgacgcgttgcgctcaacactctaccccagggtgtagcttaggctga

SEQ ID NO: 17094 - DNA, 80 bp, synthetic construct
  misc_feature 1..80: note = Synthetic: >HCV.A21-cand-310-389
  source 1..80: mol_type = other DNA
cttaggctgatgagtctgggcactccccaccggtgacggtggcccaggctgcgttggcggcctacccatggtctaacgcc

SEQ ID NO: 17095 - DNA, 80 bp, synthetic construct
  misc_feature 1..80: note = Synthetic: >HCV.A21-cand-470-549
  source 1..80: mol_type = other DNA
ctaaccacggagcaatcgctcacgacccagtgagtaggttgtcgtaatgcgcaagtccgtggcggaaccgactactttgg

SEQ ID NO: 17096 - DNA, 80 bp, synthetic construct
  misc_feature 1..80: note = Synthetic: >HCV.A21-cand-550-629
  source 1..80: mol_type = other DNA
gtgtccgtgtttcccttttttattcatatctggctgcttatggtgacaatttacagattgttaccatatagcgtattgga

SEQ ID NO: 17097 - DNA, 80 bp, synthetic construct
  misc_feature 1..80: note = Synthetic: >HCV.A21-cand-630-709
  source 1..80: mol_type = other DNA
ttggccatccagtgaaatataagcacattatttatctctttattgtgttacatatattaaaatacttttctacaagcaac

SEQ ID NO: 17098 - DNA, 80 bp, synthetic construct
  misc_feature 1..80: note = Synthetic: >HCV.A21-cand-670-749
  source 1..80: mol_type = other DNA
tattgtgttacatatattaaaatacttttctacaagcaacaacaacattgtgttttgaaccacaatagccattacatcag

SEQ ID NO: 17099 - DNA, 80 bp, synthetic construct
  misc_feature 1..80: note = Synthetic: >HCV.A21-cand-790-869
  source 1..80: mol_type = other DNA
cgagaatcaaaacgtggcagctaatggatccaccattaattacactactatcaattactacaaagatagtgcaagtaatt

SEQ ID NO: 17100 - DNA, 80 bp, synthetic construct
  misc_feature 1..80: note = Synthetic: >HCV.A21-cand-870-949
  source 1..80: mol_type = other DNA
cggctactagacaagatctttcccaagatccatcaaaattcacagaaccagttaaagatttaatgttgaaaacagcacca

SEQ ID NO: 17101 - DNA, 80 bp, synthetic construct
  misc_feature 1..80: note = Synthetic: >HCV.A21-cand-950-1029
  source 1..80: mol_type = other DNA
gctttaaattcaccaaatgtggaagcatgtggatacagtgaccgtgtaagacaaattaccctgggaaactcgactattac

SEQ ID NO: 17102 - DNA, 80 bp, synthetic construct
  misc_feature 1..80: note = Synthetic: >HCV.A9-cand-4960-5039
  source 1..80: mol_type = other DNA
ttcattgacagaagaacacaggtgaggtactccctggacatgctggtgactgagatgttcagagagtacaaccacaggca

SEQ ID NO: 17103 - DNA, 80 bp, synthetic construct
  misc_feature 1..80: note = Synthetic: >HCV.A9-cand-5150-5229
  source 1..80: mol_type = other DNA
taaaatcagtggacagtgaggcagtgagagagtactgtaaagaaaagggatggctagtgcctgaaattaactccactctg

SEQ ID NO: 17104 - DNA, 80 bp, synthetic construct
  misc_feature 1..80: note = Synthetic: >HCV.A9-cand-5230-5309
  source 1..80: mol_type = other DNA
caaattgagaaacatgttagcagggctttcatatgcctacaagcactaaccacctttgtctctgtggcagggatcattta

SEQ ID NO: 17105 - DNA, 80 bp, synthetic construct
  misc_feature 1..80: note = Synthetic: >HCV.A9-cand-5310-5389
  source 1..80: mol_type = other DNA
catcatctacaaactgtttgcaggattccaaggcgcatacacagggatgcccaatcaaaaacccaaagtgccaaccctaa

SEQ ID NO: 17106 - DNA, 80 bp, synthetic construct
  misc_feature 1..80: note = Synthetic: >HCV.A9-cand-5390-5469
  source 1..80: mol_type = other DNA
gacaagccaaggtgcaaggtccagcttttgaatttgctgtggccatgatgaagagaaacgccagcaccgtgaaaacagag

SEQ ID NO: 17107 - DNA, 80 bp, synthetic construct
  misc_feature 1..80: note = Synthetic: >HCV.A9-cand-5470-5549
  source 1..80: mol_type = other DNA
tacggcgagttcactatgcttggcatctatgacaggtgggctgtgctgccacgccatgccaagcctggaccaaccatcct

SEQ ID NO: 17108 - DNA, 80 bp, synthetic construct
  misc_feature 1..80: note = Synthetic: >HCV.A9-cand-5550-5629
  source 1..80: mol_type = other DNA
gatgaatgatcaggaagttggtgtgctggatgccaaagagttggtggacaaagatggcacaaatctggaactaacactcc

SEQ ID NO: 17109 - DNA, 80 bp, synthetic construct
  misc_feature 1..80: note = Synthetic: >HCV.A9-cand-5710-5789
  source 1..80: mol_type = other DNA
ctggccataaacaccagcaaatttccaaacatgtacatcccagtgggtcaagtgacagactatggtttcctgaacctggg

SEQ ID NO: 17110 - DNA, 80 bp, synthetic construct
  misc_feature 1..80: note = Synthetic: >HCV.A9-cand-5790-5869
  source 1..80: mol_type = other DNA
tggtacccccaccaagagcatgctcatgtacaacttcccaactagagcaggccagtgtggtggcgtcctcatgtcaactg

SEQ ID NO: 17111 - DNA, 80 bp, synthetic construct
  misc_feature 1..80: note = Synthetic: >HCV.A9-cand-5870-5949
  source 1..80: mol_type = other DNA
gcaaggtcctgggaatacatgttggtggaaatggacaccaaggcttctcagcagccctgctcagacactacttcaatgat

SEQ ID NO: 17112 - DNA, 80 bp, synthetic construct
  misc_feature 1..80: note = Synthetic: >HCV.A9-cand-5930-6009
  source 1..80: mol_type = other DNA
tcagacactacttcaatgatgaacagggtgagattgagttcatcgagagttcaaaggaagcaggcttcccagttattaac

SEQ ID NO: 17113 - DNA, 80 bp, synthetic construct
  misc_feature 1..80: note = Synthetic: >HCV.A9-cand-5980-6059
  source 1..80: mol_type = other DNA
tcaaaggaagcaggcttcccagttattaacacacccagtaaaacaaagctggagcctagcgtcttccaccaagtgtttga

SEQ ID NO: 17114 - DNA, 80 bp, synthetic construct
  misc_feature 1..80: note = Synthetic: >HCV.A9-cand-6250-6329
  source 1..80: mol_type = other DNA
gatgcagtgtatggtactgaaggcctggaggctctagatctgaccacaagtgcagggtacccgtacgttgcactaggcat

SEQ ID NO: 17115 - DNA, 80 bp, synthetic construct
  misc_feature 1..80: note = Synthetic: >HCV.A9-cand-6330-6409
  source 1..80: mol_type = other DNA
caagaagagagacatcctatccaagaagaccaaggatctgaccaaactgaaggagtgcatggacaaatatggtttgaacc

SEQ ID NO: 17116 - DNA, 80 bp, synthetic construct
  misc_feature 1..80: note = Synthetic: >HCV.A9-cand-6410-6489
  source 1..80: mol_type = other DNA
taccaatggtgacctatgtgaaagatgagctcagatcagcagaaaaggtggctaaaggcaagtccaggcttattgaagca

SEQ ID NO: 17117 - DNA, 80 bp, synthetic construct
  misc_feature 1..80: note = Synthetic: >HCV.A9-cand-6480-6559
  source 1..80: mol_type = other DNA
tattgaagcatccagcttgaatgactctgtggcaatgagacagacttttggcaacctgtacaagacattccacctgaacc

SEQ ID NO: 17118 - DNA, 80 bp, synthetic construct
  misc_feature 1..80: note = Synthetic: >HCV.B6-cand-6170-6249
  source 1..80: mol_type = other DNA
ttgatattaacactgaaccgatgaaactggaagatgcagtgtatggcacagaagggttagaggctctggacctaacaacg

SEQ ID NO: 17119 - DNA, 80 bp, synthetic construct
  misc_feature 1..80: note = Synthetic: >HCV.B6-cand-6290-6369
  source 1..80: mol_type = other DNA
gagacatcctatccaagaagtctaaagacttaaccaaattaaaggaatgcatggacaaatacggtttgaacttgccaatg

SEQ ID NO: 17120 - DNA, 80 bp, synthetic construct
  misc_feature 1..80: note = Synthetic: >HCV.B6-cand-6370-6449
  source 1..80: mol_type = other DNA
gtgacctatgtgaaggatgaactaagatcggcagaaaaggtggccaaaggaaaatctagactcattgaagcatccagtct

SEQ ID NO: 17121 - DNA, 80 bp, synthetic construct
  misc_feature 1..80: note = Synthetic: >HCV.B6-cand-6430-6509
  source 1..80: mol_type = other DNA
ctcattgaagcatccagtctgaatgattctgttgcgatgaggcagacatttggtaatctgtacaagacattccacctgaa

SEQ ID NO: 17122 - DNA, 80 bp, synthetic construct
  misc_feature 1..80: note = Synthetic: >HCV.B6-cand-6530-6609
  source 1..80: mol_type = other DNA
gtgcagttgggtgcgacccagatctcttttggagcaaaatacctgtaatgctggacggacacctcatagctttcgattac

SEQ ID NO: 17123 - DNA, 80 bp, synthetic construct
  misc_feature 1..80: note = Synthetic: >HCV.B6-cand-6610-6689
  source 1..80: mol_type = other DNA
tctggctatgacgccagcctgagccccgtttggtttgcttgcctgaagttgctgcttgagaagctcgggtacacgcacaa

SEQ ID NO: 17124 - DNA, 80 bp, synthetic construct
  misc_feature 1..80: note = Synthetic: >HCV.B6-cand-6690-6769
  source 1..80: mol_type = other DNA
ggaaacaaactacattgactacctatgtaactcccatcacctgtatagggacaaacactactttgtgcgtggcggcatgc

SEQ ID NO: 17125 - DNA, 80 bp, synthetic construct
  misc_feature 1..80: note = Synthetic: >HCV.B6-cand-6770-6849
  source 1..80: mol_type = other DNA
cctcagggtgctccggcaccagcatcttcaattcaatgatcaacaacattataatcagaacattaatgttgaaggtgtat

SEQ ID NO: 17126 - DNA, 80 bp, synthetic construct
  misc_feature 1..80: note = Synthetic: >HCV.B6-cand-6930-7009
  source 1..80: mol_type = other DNA
ctctctgctcgctgaggctggcaaaggctatggcttaatcatgacaccagcagacaagggagagtgtttcaatgaagtta

SEQ ID NO: 17127 - DNA, 80 bp, synthetic construct
  misc_feature 1..80: note = Synthetic: >HCV.B6-cand-7010-7089
  source 1..80: mol_type = other DNA
cgtggaccaatgtcacctttttaaagaggtatttcagagcagatgagcaatatcctttcttagttcaccctgtcatgccc

SEQ ID NO: 17128 - DNA, 80 bp, synthetic construct
  misc_feature 1..80: note = Synthetic: >HCV.B6-cand-7090-7169
  source 1..80: mol_type = other DNA
atgaaggacatccacgagtccataagatggaccaaagatccaaagaacacccaggatcacgtgcgctcactgtgcttact

SEQ ID NO: 17129 - DNA, 80 bp, synthetic construct
  misc_feature 1..80: note = Synthetic: >HCV.B6-cand-7170-7249
  source 1..80: mol_type = other DNA
ggcatggcacaatggagaacacgaatatgaggaattcattcgaaaggtcagaagcgttcctgttggacgctgtttgactc

SEQ ID NO: 17130 - DNA, 80 bp, synthetic construct
  misc_feature 1..80: note = Synthetic: >HCV.B6-cand-7250-7329
  source 1..80: mol_type = other DNA
tacctgcgttctcgacactacgcagaaagtggttggattccttctaaaattagagcacaattcgataaaatttgaattgg

SEQ ID NO: 17131 - DNA, 80 bp, synthetic construct
  misc_feature 1..80: note = Synthetic: >HCV.B6-cand-7290-7369
  source 1..80: mol_type = other DNA
cttctaaaattagagcacaattcgataaaatttgaattggcttaaccctactgcgctaaccgaactagacaacggcgcag

SEQ ID NO: 17132 - DNA, 80 bp, synthetic construct
  misc_feature 1..80: note = Synthetic: >HQ537675.1-cand-40-119
  source 1..80: mol_type = other DNA
gtggtgaaccgaaaacggttggtatataaagcacatagtattttgtgcaaacctacagacgccatgttcaaaaatcctgc

SEQ ID NO: 17133 - DNA, 80 bp, synthetic construct
  misc_feature 1..80: note = Synthetic: >HQ537675.1-cand-120-199
  source 1..80: mol_type = other DNA
agaaagacctcggaaattgcatgaactaagctcggcattggaaataccctacgatgaactaagattgaattgtgtctact

SEQ ID NO: 17134 - DNA, 80 bp, synthetic construct
  misc_feature 1..80: note = Synthetic: >HQ537675.1-cand-1490-1569
  source 1..80: mol_type = other DNA
acatgtactgattggtgtgtagctgcgtttggagttacaggtacagttgcagaaggatttaaaaccctattgcaaccata

SEQ ID NO: 17135 - DNA, 80 bp, synthetic construct
  misc_feature 1..80: note = Synthetic: >HQ537675.1-cand-1530-1609
  source 1..80: mol_type = other DNA
gtacagttgcagaaggatttaaaaccctattgcaaccatattgtttgtattgccatttacaaagtttagcatgttcctgg

SEQ ID NO: 17136 - DNA, 80 bp, synthetic construct
  misc_feature 1..80: note = Synthetic: >HQ537675.1-cand-1650-1729
  source 1..80: mol_type = other DNA
aaaatagaataacaattgaaaaattattagaaaaattattgtgtatatctacaaattgtatgttaattcagccacccaaa

SEQ ID NO: 17137 - DNA, 80 bp, synthetic construct
  misc_feature 1..80: note = Synthetic: >HQ537675.1-cand-1730-1809
  source 1..80: mol_type = other DNA
ttacgtagcacagctgcagcattatattggtacagaacaggaatgtcaaacattagcgatgtatatggtgaaacaccaga

SEQ ID NO: 17138 - DNA, 80 bp, synthetic construct
  misc_feature 1..80: note = Synthetic: >HQ537675.1-cand-1810-1889
  source 1..80: mol_type = other DNA
atggatagaaagacaaacagtattacagcatagttttaatgacacaacatttgatttgtcccaaatggtacaatgggcat

SEQ ID NO: 17139 - DNA, 80 bp, synthetic construct
  misc_feature 1..80: note = Synthetic: >HQ537675.1-cand-1890-1969
  source 1..80: mol_type = other DNA
atgacaatgatgttatggatgatagtgaaattgcctataaatatgcacaattagctgacagtgatagtaatgcatgtgca

SEQ ID NO: 17140 - DNA, 80 bp, synthetic construct
  misc_feature 1..80: note = Synthetic: >HQ537675.1-cand-1980-2059
  source 1..80: mol_type = other DNA
gtaattcgcaggcaaaaatagttaaagattgtggaacaatgtgtagacattataaacgagcagaaaaacgacaaatgtcc

SEQ ID NO: 17141 - DNA, 80 bp, synthetic construct
  misc_feature 1..80: note = Synthetic: >HQ537675.1-cand-2060-2139
  source 1..80: mol_type = other DNA
atgggacagtggattaaaagtagatgtgacaaagttagtgacgaaggtgactggagggacatagtaaagtttttaagata

SEQ ID NO: 17142 - DNA, 80 bp, synthetic construct
  misc_feature 1..80: note = Synthetic: >HQ537675.1-cand-2140-2219
  source 1..80: mol_type = other DNA
tcaacaaatagaatttgtgtcatttttatctgcattaaagctgtttttaaaaggagtgccaaagaaaaactgtattttaa

SEQ ID NO: 17143 - DNA, 80 bp, synthetic construct
  misc_feature 1..80: note = Synthetic: >HQ537675.1-cand-2220-2299
  source 1..80: mol_type = other DNA
tacatggtgcacctaatacaggtaaatcatattttggaatgagccttattagctttttacaaggatgtataatatcatat

SEQ ID NO: 17144 - DNA, 80 bp, synthetic construct
  misc_feature 1..80: note = Synthetic: >HQ537675.1-cand-2300-2379
  source 1..80: mol_type = other DNA
gcaaattcaaaaagtcatttttggttacaaccactggctgatgctaaaataggcatgttagatgatgctacaacgccatg

SEQ ID NO: 17145 - DNA, 80 bp, synthetic construct
  misc_feature 1..80: note = Synthetic: >HQ537675.1-cand-2370-2449
  source 1..80: mol_type = other DNA
caacgccatgttggcattatatagacaattacctacgaaatgcactagatggcaaccctgtatctatagatgtaaagcat

SEQ ID NO: 17146 - DNA, 80 bp, synthetic construct
  misc_feature 1..80: note = Synthetic: >HQ537675.1-cand-2450-2529
  source 1..80: mol_type = other DNA
aaagctttaatgcagttaaaatgtcctcctttattgattacatctaatataaatgcaggtaaggatgacagatggccata

SEQ ID NO: 17147 - DNA, 80 bp, synthetic construct
  misc_feature 1..80: note = Synthetic: >HQ537675.1-cand-2530-2609
  source 1..80: mol_type = other DNA
cctacatagcagactggtggtttttacatttccaaatccatttccatttgacaaaaacggaaatccagtatatgaattaa

SEQ ID NO: 17148 - DNA, 80 bp, synthetic construct
  misc_feature 1..80: note = Synthetic: >HQ537675.1-cand-2690-2769
  source 1..80: mol_type = other DNA
ggagactctttctcaacgtttaaatgtgtgtcaggacaaaatattagaacattatgaaaatgatagtaaacgactttgtg

SEQ ID NO: 17149 - DNA, 80 bp, synthetic construct
  misc_feature 1..80: note = Synthetic: >HQ537675.1-cand-2780-2859
  source 1..80: mol_type = other DNA
ctattggaaacatattcgacttgaatgtgtattaatgtataaagcaagagaaatgggaatacacagtattaaccaccagg

SEQ ID NO: 17150 - DNA, 80 bp, synthetic construct
  misc_feature 1..80: note = Synthetic: >KY225961.1-cand-5660-5739
  source 1..80: mol_type = other DNA
gaggccactgtgtacctgcctcctgtgcctgtgtctaaggttgtaagcactgatgaatatgtgtcacgcacaagcattta

SEQ ID NO: 17151 - DNA, 80 bp, synthetic construct
  misc_feature 1..80: note = Synthetic: >KY225961.1-cand-5740-5819
  source 1..80: mol_type = other DNA
ttattatgctggcagttccagacttttggctgttggcaatccatatttttccatcaaaagtcccaataacaataaaaaag

SEQ ID NO: 17152 - DNA, 80 bp, synthetic construct
  misc_feature 1..80: note = Synthetic: >KY225961.1-cand-5820-5899
  source 1..80: mol_type = other DNA
tattagttcccaaggtatcaggcttacagtatagggtgtttagggtgcgtttacctgatcccaataaatttggttttcct

SEQ ID NO: 17153 - DNA, 80 bp, synthetic construct
  misc_feature 1..80: note = Synthetic: >KY225961.1-cand-5890-5969
  source 1..80: mol_type = other DNA
tggttttcctgatacatctttttataaccctgatacacaacgtttagtctgggcatgtgtaggccttgaaataggtaggg

SEQ ID NO: 17154 - DNA, 80 bp, synthetic construct
  misc_feature 1..80: note = Synthetic: >KY225961.1-cand-5980-6059
  source 1..80: mol_type = other DNA
gggtgttggcataagtggtcatccttatttaaataaatttgatgacactgaaactggtaacagatataccgcacagccag

SEQ ID NO: 17155 - DNA, 80 bp, synthetic construct
  misc_feature 1..80: note = Synthetic: >KY225961.1-cand-6060-6139
  source 1..80: mol_type = other DNA
ggtctgataacagggaatgcttatctatggattataaacaaacacaattatgtttaattggctgtaaacctcccactggt

SEQ ID NO: 17156 - DNA, 80 bp, synthetic construct
  misc_feature 1..80: note = Synthetic: >KY225961.1-cand-6150-6229
  source 1..80: mol_type = other DNA
gtaaaggtgttgcctgtaacaataatgcagctgctactgattgtcctccattggaactttttaattctattattgaggat

SEQ ID NO: 17157 - DNA, 80 bp, synthetic construct
  misc_feature 1..80: note = Synthetic: >KY225961.1-cand-6220-6299
  source 1..80: mol_type = other DNA
tattgaggatggtgacatggtagatacagggtttggatgcatggactttggtacattgcaggctaataaaagtgatgtgc

SEQ ID NO: 17158 - DNA, 80 bp, synthetic construct
  misc_feature 1..80: note = Synthetic: >KY225961.1-cand-6280-6359
  source 1..80: mol_type = other DNA
ggctaataaaagtgatgtgcctattgatatttgtaacagtacatgcaaatatccagattatttaaaaatggccagtgaac

SEQ ID NO: 17159 - DNA, 80 bp, synthetic construct
  misc_feature 1..80: note = Synthetic: >KY225961.1-cand-6460-6539
  source 1..80: mol_type = other DNA
cctttatattaaagggtccggtaatactgcaggtatccaaagtagtgcattttttccaactcctagtggctctatagtta

SEQ ID NO: 17160 - DNA, 80 bp, synthetic construct
  misc_feature 1..80: note = Synthetic: >KY225961.1-cand-6530-6609
  source 1..80: mol_type = other DNA
tctatagttacctcagaatcacaattatttaataagccttattggctacagcgtgcacaaggtcataacaatggcatttg

SEQ ID NO: 17161 - DNA, 80 bp, synthetic construct
  misc_feature 1..80: note = Synthetic: >KY225961.1-cand-6620-6699
  source 1..80: mol_type = other DNA
cagttatttgttaccgtggttgataccactcgtagcactaatatgacattatgcactgaagtaactaaagaagatacata

SEQ ID NO: 17162 - DNA, 80 bp, synthetic construct
  misc_feature 1..80: note = Synthetic: >KY225961.1-cand-6710-6789
  source 1..80: mol_type = other DNA
aattttaaggaatatgtacgtcatgttgaagaatatgacttacagtttgtttttcagctttgcaaaattacactaactgc

SEQ ID NO: 17163 - DNA, 80 bp, synthetic construct
  misc_feature 1..80: note = Synthetic: >KY225961.1-cand-6790-6869
  source 1..80: mol_type = other DNA
agaggtaatgacatatatacatactatgaattcagatattttggaggactggcaatttggtttaacacctcctccgtctg

SEQ ID NO: 17164 - DNA, 80 bp, synthetic construct
  misc_feature 1..80: note = Synthetic: >KY225961.1-cand-6870-6949
  source 1..80: mol_type = other DNA
ccagtttacaggacacatatagatttgttacctcccaggctattacttgccaaaaaacagcaccccctaaagaaaaggaa

SEQ ID NO: 17165 - DNA, 80 bp, synthetic construct
  misc_feature 1..80: note = Synthetic: >KY225961.1-cand-6950-7029
  source 1..80: mol_type = other DNA
gatccattaaataaatatactttttgggaggttaacttaaaggaaaagttttctgcagatctggatcagtttcctttggg

SEQ ID NO: 17166 - DNA, 80 bp, synthetic construct
  misc_feature 1..80: note = Synthetic: >MH539865.1-cand-4160-4239
  source 1..80: mol_type = other DNA
gggataatctattggtatatttagtacgtaagctcaatgacccaagtattgttacagcaatgacaatgcaatcccctctt

SEQ ID NO: 17167 - DNA, 80 bp, synthetic construct
  misc_feature 1..80: note = Synthetic: >MH539865.1-cand-4240-4319
  source 1..80: mol_type = other DNA
caattgagatttaggatgcaagcaaaacaacatatgaaagtttgtaagcttgatggcgaatgggtcacatttagggaagt

SEQ ID NO: 17168 - DNA, 80 bp, synthetic construct
  misc_feature 1..80: note = Synthetic: >MH539865.1-cand-4320-4399
  source 1..80: mol_type = other DNA
tttagctgcagctgatagctttgccacaaagtataatccaacagaaaaagatttagatctatttaataccttggtcagtt

SEQ ID NO: 17169 - DNA, 80 bp, synthetic construct
  misc_feature 1..80: note = Synthetic: >MH539865.1-cand-4400-4479
  source 1..80: mol_type = other DNA
gtacattttcaaaggagtatgcatggaaagactttttgaatgaagtaagatgtgaggtggtaccaactaagcatgttcat

SEQ ID NO: 17170 - DNA, 80 bp, synthetic construct
  misc_feature 1..80: note = Synthetic: >MH539865.1-cand-4480-4559
  source 1..80: mol_type = other DNA
cgttcaaaaatagctaggacatttacagtcagggagaaagatcaggctattcagaatcctattacagctgttataggtta

SEQ ID NO: 17171 - DNA, 80 bp, synthetic construct
  misc_feature 1..80: note = Synthetic: >MH539865.1-cand-4560-4639
  source 1..80: mol_type = other DNA
taagtatgcgtcaagtgttgatgaaattagtgatgttttggatagtgccttttttcctgattcattatctgcagatttac

SEQ ID NO: 17172 - DNA, 80 bp, synthetic construct
  misc_feature 1..80: note = Synthetic: >MH539865.1-cand-4640-4719
  source 1..80: mol_type = other DNA
aggttatgaaagaaggtgtttatagagagttgggtcttgacatagggttacctgaggtattaaagcgaatagctccactc

SEQ ID NO: 17173 - DNA, 80 bp, synthetic construct
  misc_feature 1..80: note = Synthetic: >MH539865.1-cand-4680-4759
  source 1..80: mol_type = other DNA
catagggttacctgaggtattaaagcgaatagctccactcttatacaaagctgggaggtctagagttgttattgttgagg

SEQ ID NO: 17174 - DNA, 80 bp, synthetic construct
  misc_feature 1..80: note = Synthetic: >MH539865.1-cand-4800-4879
  source 1..80: mol_type = other DNA
gctacgtagcatgtcattggtgaagacaataaaggtacgtcctaaaaaggaagtattaagagctgtttcattatatggca

SEQ ID NO: 17175 - DNA, 80 bp, synthetic construct
  misc_feature 1..80: note = Synthetic: >MH539865.1-cand-4880-4959
  source 1..80: mol_type = other DNA
ctaaagaaaatataggtttacaagatgatgttgcagctactcgtctttgtattgaggtttggagatggtgtaaagctaat

SEQ ID NO: 17176 - DNA, 80 bp, synthetic construct
  misc_feature 1..80: note = Synthetic: >MH539865.1-cand-4960-5039
  source 1..80: mol_type = other DNA
gatcaaagtgtcaatgactggctcaatgcattatattttgaaagacagacacttatggattgggttgagaggtttaggag

SEQ ID NO: 17177 - DNA, 80 bp, synthetic construct
  misc_feature 1..80: note = Synthetic: >MH539865.1-cand-5040-5119
  source 1..80: mol_type = other DNA
aaagggtgttgttcctgtggatcctgagatacagtgtatggcacttttactgtatgatgtattgggttataagagtgtac

SEQ ID NO: 17178 - DNA, 80 bp, synthetic construct
  misc_feature 1..80: note = Synthetic: >MH539865.1-cand-5120-5199
  source 1..80: mol_type = other DNA
tacaaatgcaggcaaacaggagggcttattcagggaagcagtatgatgcttactgtgtacagacatacaatgaagagact

SEQ ID NO: 17179 - DNA, 80 bp, synthetic construct
  misc_feature 1..80: note = Synthetic: >MH539865.1-cand-5200-5279
  source 1..80: mol_type = other DNA
aagctttatgagggtgacctaagagtgacatttaattttggtctagactgtgcaagattagaggtattttgggataagag

SEQ ID NO: 17180 - DNA, 80 bp, synthetic construct
  misc_feature 1..80: note = Synthetic: >MH539865.1-cand-5290-5369
  source 1..80: mol_type = other DNA
cttgaaacctcaatcacacagcgtcatgttttgaagttgatgatggaagaagtcacacaggaactattaagatgcggaat

SEQ ID NO: 17181 - DNA, 80 bp, synthetic construct
  misc_feature 1..80: note = Synthetic: >MH539865.1-cand-5360-5439
  source 1..80: mol_type = other DNA
gatgcggaatgagattcaagacggagcaggtaagtcatacaaaaagtttagtgttatttaagacagagtcaggattcgag

SEQ ID NO: 17182 - DNA, 80 bp, synthetic construct
  misc_feature 1..80: note = Synthetic: >MH539867.1-cand-640-719
  source 1..80: mol_type = other DNA
tgcatgtggacttttccctgctcaagtcaaagccaggaatatcatcagtcctgttatgggtgttatcggattcaacttct

SEQ ID NO: 17183 - DNA, 80 bp, synthetic construct
  misc_feature 1..80: note = Synthetic: >MH539867.1-cand-720-799
  source 1..80: mol_type = other DNA
ttgttaaagattggatggatagaattgatgatttcttggctgatcgctgccctttcctacctgagcctagagacccaaaa

SEQ ID NO: 17184 - DNA, 80 bp, synthetic construct
  misc_feature 1..80: note = Synthetic: >MH539867.1-cand-810-889
  source 1..80: mol_type = other DNA
caggaacaaacagggcttatttcgtgaatcgtcagatgcaagtagaggaatctaaggttgtagacatcgaggagctaatc

SEQ ID NO: 17185 - DNA, 80 bp, synthetic construct
  misc_feature 1..80: note = Synthetic: >MH539867.1-cand-890-969
  source 1..80: mol_type = other DNA
atagatgctagagcagagtctgcgactcttttcacagatattgcaactcctcactcagtgtggatttttgcatgtgcacc

SEQ ID NO: 17186 - DNA, 80 bp, synthetic construct
  misc_feature 1..80: note = Synthetic: >MH539867.1-cand-980-1059
  source 1..80: mol_type = other DNA
cctcctacagctttatatgttgctgggatgccagagcttggtgctttctttgctatccttcaggatatgaggaatactat

SEQ ID NO: 17187 - DNA, 80 bp, synthetic construct
  misc_feature 1..80: note = Synthetic: >MH539867.1-cand-1060-1139
  source 1..80: mol_type = other DNA
aatggcatcaaagtctgtgggaacagctgaagagaaactaaaaaagaaatctgccttctatcaatcctatctaagacgca

SEQ ID NO: 17188 - DNA, 80 bp, synthetic construct
  misc_feature 1..80: note = Synthetic: >MH539867.1-cand-1120-1199
  source 1..80: mol_type = other DNA
tcaatcctatctaagacgcactcaatcaatgggaattcaactggaccagaaaattatcatcctctatatgatccattggg

SEQ ID NO: 17189 - DNA, 80 bp, synthetic construct
  misc_feature 1..80: note = Synthetic: >MH539867.1-cand-1220-1299
  source 1..80: mol_type = other DNA
ttccatcttggagatgatatggatccagagctgagggagctggcacaagctctcgttgatgttaaggtcagggaaatctc

SEQ ID NO: 17190 - DNA, 80 bp, synthetic construct
  misc_feature 1..80: note = Synthetic: >MH539867.1-cand-1300-1379
  source 1..80: mol_type = other DNA
taaccaggagccactcaaattgtgagtgattgagccatccactatcactcactttatttagggcattattctatcagggt

SEQ ID NO: 17191 - DNA, 80 bp, synthetic construct
  misc_feature 1..80: note = Synthetic: >MH539867.1-cand-1390-1469
  source 1..80: mol_type = other DNA
aatcagggagttattgcactagggtgggtttaagggctaattattttatactactatattactttataatcaatgtaatg

SEQ ID NO: 17192 - DNA, 80 bp, synthetic construct
  misc_feature 1..80: note = Synthetic: >MH539867.1-cand-1480-1559
  source 1..80: mol_type = other DNA
atcatgttaagtctatatgttagatttgatttatatatgttaagtttaggtttgcatgttaaatttgatttatatgtgtt

SEQ ID NO: 17193 - DNA, 80 bp, synthetic construct
  misc_feature 1..80: note = Synthetic: >MH539867.1-cand-1570-1649
  source 1..80: mol_type = other DNA
ctatatgttaagtttgatctatatatatgttatagttaattaaatgtattaagttcaaatcatatgtgtcaaagttaagt

SEQ ID NO: 17194 - DNA, 80 bp, synthetic construct
  misc_feature 1..80: note = Synthetic: >MH539867.1-cand-1660-1739
  source 1..80: mol_type = other DNA
aagtttaattatgtatgttaaggttaaggttaaggttaagttagttaatgttatatatataattcaaggtataatcaaat

SEQ ID NO: 17195 - DNA, 80 bp, synthetic construct
  misc_feature 1..80: note = Synthetic: >MH539867.1-cand-1750-1829
  source 1..80: mol_type = other DNA
tatttcaatctcactttgtcttttttcagtcatatctgtgggttatcagggtctgtatctcaggactatccctatattgg

SEQ ID NO: 17196 - DNA, 80 bp, synthetic construct
  misc_feature 1..80: note = Synthetic: >MH539867.1-cand-1840-1919
  source 1..80: mol_type = other DNA
aaaattattcaactggaactaatactgtgattttctaagtcaaatctattcatttgtatatatggatgtaaatttcattc

SEQ ID NO: 17197 - DNA, 80 bp, synthetic construct
  misc_feature 1..80: note = Synthetic: >MH539867.1-cand-1930-2009
  source 1..80: mol_type = other DNA
gtataacactaatgcctgctttgctactaattgatttctctgttacaacaatctacctcattgtccaactccccttccct

SEQ ID NO: 17198 - DNA, 80 bp, synthetic construct
  misc_feature 1..80: note = Synthetic: >NC_001563.2-cand-1950-2029
  source 1..80: mol_type = other DNA
gtccctgcaaagtgcccatttcttccgtagcttccctgaatgacctcacacctgttggaagactggtgaccgtgaatcca

SEQ ID NO: 17199 - DNA, 80 bp, synthetic construct
  misc_feature 1..80: note = Synthetic: >NC_001563.2-cand-2030-2109
  source 1..80: mol_type = other DNA
tttgtgtctgtggccacagccaactcgaaggttttgattgaactcgaacccccgtttggtgactcttacatcgtggtggg

SEQ ID NO: 17200 - DNA, 80 bp, synthetic construct
  misc_feature 1..80: note = Synthetic: >NC_001563.2-cand-2110-2189
  source 1..80: mol_type = other DNA
aagaggagaacagcagataaaccatcactggcacaaatctgggagcagcattggaaaggcctttaccaccacactcagag

SEQ ID NO: 17201 - DNA, 80 bp, synthetic construct
  misc_feature 1..80: note = Synthetic: >NC_001563.2-cand-2160-2239
  source 1..80: mol_type = other DNA
ttggaaaggcctttaccaccacactcagaggagctcaacgactcgcagctcttggagatactgcttgggattttggatca

SEQ ID NO: 17202 - DNA, 80 bp, synthetic construct
  misc_feature 1..80: note = Synthetic: >NC_001563.2-cand-2270-2349
  source 1..80: mol_type = other DNA
gccatacaccaagtctttggaggagcttttagatcactctttggagggatgtcctggatcacacagggacttctgggagc

SEQ ID NO: 17203 - DNA, 80 bp, synthetic construct
  misc_feature 1..80: note = Synthetic: >NC_001563.2-cand-2350-2429
  source 1..80: mol_type = other DNA
tcttctgttgtggatgggaatcaatgcccgtgacaggtcaattgctatgacgtttcttgcggttggaggagttttgctct

SEQ ID NO: 17204 - DNA, 80 bp, synthetic construct
  misc_feature 1..80: note = Synthetic: >NC_001563.2-cand-2430-2509
  source 1..80: mol_type = other DNA
tcctttcggtcaacgtccatgctgacacaggctgtgccattgatattggcaggcaagagctccggtgcggaagtggagtg

SEQ ID NO: 17205 - DNA, 80 bp, synthetic construct
  misc_feature 1..80: note = Synthetic: >NC_001563.2-cand-2510-2589
  source 1..80: mol_type = other DNA
tttatccacaacgatgtggaagcctggatggatcgttacaagttctacccggagacgccacagggcctagcaaaaattat

SEQ ID NO: 17206 - DNA, 80 bp, synthetic construct
  misc_feature 1..80: note = Synthetic: >NC_001563.2-cand-2590-2669
  source 1..80: mol_type = other DNA
ccagaaagcacatgcagaaggagtctgcggcttgcgttccgtttccagactcgagcaccaaatgtgggaagccattaagg

SEQ ID NO: 17207 - DNA, 80 bp, synthetic construct
  misc_feature 1..80: note = Synthetic: >NC_001563.2-cand-2670-2749
  source 1..80: mol_type = other DNA
atgagctgaacaccctgttgaaagagaatggagtcgacttgagtgtcgtggtggaaaaacagaatgggatgtacaaagca

SEQ ID NO: 17208 - DNA, 80 bp, synthetic construct
  misc_feature 1..80: note = Synthetic: >NC_001563.2-cand-2720-2799
  source 1..80: mol_type = other DNA
gtggaaaaacagaatgggatgtacaaagcagcaccaaaacgtttggctgccaccaccgaaaaactggagatgggttggaa

SEQ ID NO: 17209 - DNA, 80 bp, synthetic construct
  misc_feature 1..80: note = Synthetic: >NC_001563.2-cand-2830-2909
  source 1..80: mol_type = other DNA
agaactagctaacaacacctttgtcatcgacggtcctgagactgaggaatgcccaacggccaaccgagcatggaacagta

SEQ ID NO: 17210 - DNA, 80 bp, synthetic construct
  misc_feature 1..80: note = Synthetic: >NC_001563.2-cand-2910-2989
  source 1..80: mol_type = other DNA
tggaggtagaggactttggatttggactgacaagcactcgcatgttcctgaggattcgggaaacgaacacaacggaatgc

SEQ ID NO: 17211 - DNA, 80 bp, synthetic construct
  misc_feature 1..80: note = Synthetic: >NC_001563.2-cand-2990-3069
  source 1..80: mol_type = other DNA
gactcgaagatcataggaaccgccgtcaagaacaacatggctgtgcatagtgatctatcatactggatagagagcggact

SEQ ID NO: 17212 - DNA, 80 bp, synthetic construct
  misc_feature 1..80: note = Synthetic: >NC_001563.2-cand-3070-3149
  source 1..80: mol_type = other DNA
caacgacacctggaagcttgagagggcggttctaggagaagtcaaatcatgcacctggccagaaacccacactctgtggg

SEQ ID NO: 17213 - DNA, 80 bp, synthetic construct
  misc_feature 1..80: note = Synthetic: >NC_001563.2-cand-3150-3229
  source 1..80: mol_type = other DNA
gtgatggagttctggaaagtgatctcatcatacccatcaccttggcaggacccagaagcaaccacaacaggagaccaggg

SEQ ID NO: 17214 - DNA, 80 bp, synthetic construct
  misc_feature 1..80: note = Synthetic: >NC_001563.2-cand-7210-7289
  source 1..80: mol_type = other DNA
gggtcaggtgactctgactgtgactgtgactgcagctgctctgctcttttgccactatgcttacatggtgccaggctggc

SEQ ID NO: 17215 - DNA, 80 bp, synthetic construct
  misc_feature 1..80: note = Synthetic: >NC_001563.2-cand-7280-7359
  source 1..80: mol_type = other DNA
ccaggctggcaagcggaagccatgcgatctgcccagcggcggacagctgctggcatcatgaaaaatgtagtggtggatgg

SEQ ID NO: 17216 - DNA, 80 bp, synthetic construct
  misc_feature 1..80: note = Synthetic: >NC_001563.2-cand-7360-7439
  source 1..80: mol_type = other DNA
gatcgtggccactgatgtacctgaacttgaacgaacaactccagtcatgcagaaaaaagttggacagatcatattgatct

SEQ ID NO: 17217 - DNA, 80 bp, synthetic construct
  misc_feature 1..80: note = Synthetic: >NC_001563.2-cand-7440-7519
  source 1..80: mol_type = other DNA
tggtatcaatggccgcggtggtcgtcaatccatcagtgagaaccgtcagagaggccggaattctgactacagcagcagca

SEQ ID NO: 17218 - DNA, 80 bp, synthetic construct
  misc_feature 1..80: note = Synthetic: >NC_001563.2-cand-7520-7599
  source 1..80: mol_type = other DNA
gtcaccctatgggagaatggtgctagttcagtgtggaatgcaacgacagctattggcctttgtcacatcatgcgaggagg

SEQ ID NO: 17219 - DNA, 80 bp, synthetic construct
  misc_feature 1..80: note = Synthetic: >NC_001563.2-cand-7580-7659
  source 1..80: mol_type = other DNA
tgtcacatcatgcgaggaggatggctctcgtgtctctccatcatgtggactctcatcaaaaacatggagaaaccaggcct

SEQ ID NO: 17220 - DNA, 80 bp, synthetic construct
  misc_feature 1..80: note = Synthetic: >NC_001563.2-cand-7700-7779
  source 1..80: mol_type = other DNA
tggaaggagagactcaaccacatgacgaaggaagaatttaccagatacagaaaagaagccatcactgaagttgaccgctc

SEQ ID NO: 17221 - DNA, 80 bp, synthetic construct
  misc_feature 1..80: note = Synthetic: >NC_001563.2-cand-7750-7829
  source 1..80: mol_type = other DNA
aaaagaagccatcactgaagttgaccgctccgcagcaaaacatgctaggagagagggaaacatcactggaggccacccag

SEQ ID NO: 17222 - DNA, 80 bp, synthetic construct
  misc_feature 1..80: note = Synthetic: >NC_001563.2-cand-7840-7919
  source 1..80: mol_type = other DNA
aaccgcgaaattacggtggttagtggaaaggcgtttcctcgagccagtgggaaaggttgtggatctcgggtgtggtagag

SEQ ID NO: 17223 - DNA, 80 bp, synthetic construct
  misc_feature 1..80: note = Synthetic: >NC_001563.2-cand-7920-7999
  source 1..80: mol_type = other DNA
gcggctggtgctattacatggctacccagaagagggtacaggaagtgaaagggtacacgaaaggaggacctggccatgaa

SEQ ID NO: 17224 - DNA, 80 bp, synthetic construct
  misc_feature 1..80: note = Synthetic: >NC_001563.2-cand-8000-8079
  source 1..80: mol_type = other DNA
gaaccacaactggtgcagagctatggttggaatattgttaccatgaagagtggagtcgacgtcttctacagaccatcaga

SEQ ID NO: 17225 - DNA, 80 bp, synthetic construct
  misc_feature 1..80: note = Synthetic: >NC_001563.2-cand-8080-8159
  source 1..80: mol_type = other DNA
agcgagcgacacactgctctgtgacattggagagtcatcgtcaagtgccgaggtagaagaacaccgcaccgtccgtgtcc

SEQ ID NO: 17226 - DNA, 80 bp, synthetic construct
  misc_feature 1..80: note = Synthetic: >NC_001563.2-cand-8160-8239
  source 1..80: mol_type = other DNA
tggagatggtggaagattggttgcacagaggaccgaaggaattctgcatcaaagtgctatgcccttacatgcccaaagtg

SEQ ID NO: 17227 - DNA, 80 bp, synthetic construct
  misc_feature 1..80: note = Synthetic: >NC_001563.2-cand-8240-8319
  source 1..80: mol_type = other DNA
attgagaagatggaaacactccaaaggcgatatggaggtggccttataagaaaccccctttcacgcaactctacccatga

SEQ ID NO: 17228 - DNA, 80 bp, synthetic construct
  misc_feature 1..80: note = Synthetic: >NC_001563.2-cand-8310-8389
  source 1..80: mol_type = other DNA
ctacccatgagatgtactgggtgagccacgcttcaggcaatatcgtccactccgtcaacatgacaagccaggtgcttctg

SEQ ID NO: 17229 - DNA, 80 bp, synthetic construct
  misc_feature 1..80: note = Synthetic: >NC_001563.2-cand-8400-8479
  source 1..80: mol_type = other DNA
aaaagaaaacatggaagggaccccagtttgaggaagatgtcaacttgggaagtggaacgcgggcagtagggaagcctctc

SEQ ID NO: 17230 - DNA, 80 bp, synthetic construct
  misc_feature 1..80: note = Synthetic: >NC_001611.1-cand-90-169
  source 1..80: mol_type = other DNA
tgtttcctcgtctatctatatgttttgataagttataacacgtttcaatctctagttttatttttttgtacgtcacatct

SEQ ID NO: 17231 - DNA, 80 bp, synthetic construct
  misc_feature 1..80: note = Synthetic: >NC_001611.1-cand-170-249
  source 1..80: mol_type = other DNA
tcatccagtagacgacatagaatacatgtgcaatctttgccacaatccatagctattttggtgctaattattcctatatt

SEQ ID NO: 17232 - DNA, 80 bp, synthetic construct
  misc_feature 1..80: note = Synthetic: >NC_001611.1-cand-250-329
  source 1..80: mol_type = other DNA
atatttcacaaaaaatgatgaaggcaatcattcctcataagataataaaaagtgtattgagagtgagtaagcatgaaaaa

SEQ ID NO: 17233 - DNA, 80 bp, synthetic construct
  misc_feature 1..80: note = Synthetic: >NC_001611.1-cand-330-409
  source 1..80: mol_type = other DNA
gatttagtatttagcagtgcggatatgatccaagagggtgaaatagtcgttctcgttcagaatcttttgcagcataagta

SEQ ID NO: 17234 - DNA, 80 bp, synthetic construct
  misc_feature 1..80: note = Synthetic: >NC_001611.1-cand-410-489
  source 1..80: mol_type = other DNA
gtatgtcgatatacttatcgttgaagactcttccagagacgatagctaattgagtacaaagtccaatgattgcacaaagt

SEQ ID NO: 17235 - DNA, 80 bp, synthetic construct
  misc_feature 1..80: note = Synthetic: >NC_001611.1-cand-570-649
  source 1..80: mol_type = other DNA
tgaatccgagaactccttcaactcgctaccaaagagctccgttgcatcagttctgaaagagatgagaagcctgtaaagag

SEQ ID NO: 17236 - DNA, 80 bp, synthetic construct
  misc_feature 1..80: note = Synthetic: >NC_001611.1-cand-640-719
  source 1..80: mol_type = other DNA
ctgtaaagagaccctgcgctttctctatgggtccatctatgagaaacccacaggatgtattcagtcagacaatgtctgac

SEQ ID NO: 17237 - DNA, 80 bp, synthetic construct
  misc_feature 1..80: note = Synthetic: >NC_001611.1-cand-720-799
  source 1..80: mol_type = other DNA
gtctgccacggtattcagggagtccttagtagcatggcaatgacagggactgaactgggcacaagaagaggccattgtga

SEQ ID NO: 17238 - DNA, 80 bp, synthetic construct
  misc_feature 1..80: note = Synthetic: >NC_001611.1-cand-790-869
  source 1..80: mol_type = other DNA
gccattgtgaaggtagacgaaggttaacccgatggttaaccgtagccgtctgtgctaatagacggcattaatttccattt

SEQ ID NO: 17239 - DNA, 80 bp, synthetic construct
  misc_feature 1..80: note = Synthetic: >NC_001611.1-cand-880-959
  source 1..80: mol_type = other DNA
ttgtggatgaggaatgagagtgtcttatctcgtccttggtttacatggatcagtgtgagaaaaaatatcttgtatattat

SEQ ID NO: 17240 - DNA, 80 bp, synthetic construct
  misc_feature 1..80: note = Synthetic: >NC_001611.1-cand-960-1039
  source 1..80: mol_type = other DNA
taactaaactaactccttggtttcaattcatgtttaaaatgatctatatgttttattaatttattatactgttaaatgta

SEQ ID NO: 17241 - DNA, 80 bp, synthetic construct
  misc_feature 1..80: note = Synthetic: >NC_001611.1-cand-1040-1119
  source 1..80: mol_type = other DNA
ctgtatataatagtttctaacgtggagtacagaattttcggttaatgagttcatggtaaagggcgaatgaatgcctgcct

SEQ ID NO: 17242 - DNA, 80 bp, synthetic construct
  misc_feature 1..80: note = Synthetic: >NC_001611.1-cand-1120-1199
  source 1..80: mol_type = other DNA
gtattataatatacataagttaatagtttttatcatatttttctaatactatataaaaatatcattatgtataatcatta

SEQ ID NO: 17243 - DNA, 80 bp, synthetic construct
  misc_feature 1..80: note = Synthetic: >NC_001611.1-cand-1200-1279
  source 1..80: mol_type = other DNA
ctgtcgctatcattattgtgtttgtgtagttctgttctatcatctacatcactgtcactgtcactctccctatatcttct

SEQ ID NO: 17244 - DNA, 80 bp, synthetic construct
  misc_feature 1..80: note = Synthetic: >NC_001611.1-cand-1240-1319
  source 1..80: mol_type = other DNA
catctacatcactgtcactgtcactctccctatatcttctaaaattacaaacaactggatattcgataacagcatttgtg

SEQ ID NO: 17245 - DNA, 80 bp, synthetic construct
  misc_feature 1..80: note = Synthetic: >NC_001611.1-cand-1320-1399
  source 1..80: mol_type = other DNA
tagtttttgtcttttatagtatatacgttattgtcaaaatctaaacaaatattggcataatacctatctataagattagg

SEQ ID NO: 17246 - DNA, 80 bp, synthetic construct
  misc_feature 1..80: note = Synthetic: >NC_001611.1-cand-5160-5239
  source 1..80: mol_type = other DNA
aaaaatttatttatcaattttaaaggtataaaatacttattgttgtcctcgtttgtcaatcatgttaatgtctttaagat

SEQ ID NO: 17247 - DNA, 80 bp, synthetic construct
  misc_feature 1..80: note = Synthetic: >NC_001611.1-cand-5240-5319
  source 1..80: mol_type = other DNA
aaggcaggcaaatgtttatagtattaagaattgggcaagcataagacatgacacaaagaccctttttgtatatataagtg

SEQ ID NO: 17248 - DNA, 80 bp, synthetic construct
  misc_feature 1..80: note = Synthetic: >NC_001611.1-cand-5320-5399
  source 1..80: mol_type = other DNA
tagaaattataacatccatagttggatttacataggtgtccaattgggatctcaccatcatcgagataattgatgacatc

SEQ ID NO: 17249 - DNA, 80 bp, synthetic construct
  misc_feature 1..80: note = Synthetic: >NC_001611.1-cand-5400-5479
  source 1..80: mol_type = other DNA
tccccctttcttttttagtagatatttcatcgtgtaagaatcaatattaatatttctaaagtatccgtgtatagcctctt

SEQ ID NO: 17250 - DNA, 80 bp, synthetic construct
  misc_feature 1..80: note = Synthetic: >NC_001611.1-cand-5480-5559
  source 1..80: mol_type = other DNA
tatttaccacagctccatatgccaacatgcattccactagatggatatcgatatcgtcgaatgtcatatactcaattagt

SEQ ID NO: 17251 - DNA, 80 bp, synthetic construct
  misc_feature 1..80: note = Synthetic: >NC_001611.1-cand-5640-5719
  source 1..80: mol_type = other DNA
actacacattattccgtgtggctttccattttccaaaaacaatttgaccaaatctaaattcacatcttcattgtatctat

SEQ ID NO: 17252 - DNA, 80 bp, synthetic construct
  misc_feature 1..80: note = Synthetic: >NC_001611.1-cand-5720-5799
  source 1..80: mol_type = other DNA
aatcactattcagataatcagccataattactcgagtgcaacgtgttagatcgtctatatatgaataagcagtgttatct

SEQ ID NO: 17253 - DNA, 80 bp, synthetic construct
  misc_feature 1..80: note = Synthetic: >NC_001611.1-cand-5960-6039
  source 1..80: mol_type = other DNA
actctgaatacagatgagagataatatacaaatgcaatacggtaccgcaattttgtggttgataatcatcatacgtgtat

SEQ ID NO: 17254 - DNA, 80 bp, synthetic construct
  misc_feature 1..80: note = Synthetic: >NC_001611.1-cand-6200-6279
  source 1..80: mol_type = other DNA
ttaagtcaacgtttacatttttggatttcatatagttgaatatattaaagttatttatgttgctaaatccagtggcttct

SEQ ID NO: 17255 - DNA, 80 bp, synthetic construct
  misc_feature 1..80: note = Synthetic: >NC_001611.1-cand-6260-6339
  source 1..80: mol_type = other DNA
tgctaaatccagtggcttctagtagagccatcgctatatccttattaactttaacatgtctactatttgtgtattcttct

SEQ ID NO: 17256 - DNA, 80 bp, synthetic construct
  misc_feature 1..80: note = Synthetic: >NC_001611.1-cand-6360-6439
  source 1..80: mol_type = other DNA
atttttgtgcaatggattagtgccactgtctagtagtagtttgacgacctcgacattattacaatgctcattaaaaaggt

SEQ ID NO: 17257 - DNA, 80 bp, synthetic construct
  misc_feature 1..80: note = Synthetic: >NC_001611.1-cand-6440-6519
  source 1..80: mol_type = other DNA
atgcatgtaaagcattattcttgaattggttcctggtatcattaggatctctgtctttcaacatctgtttaagttcatcg

SEQ ID NO: 17258 - DNA, 80 bp, synthetic construct
  misc_feature 1..80: note = Synthetic: >NC_001611.1-cand-6520-6599
  source 1..80: mol_type = other DNA
agagctacctcctcattttccagatagttaaacattttgactgaatagaagtgaatgagctactgtgaactctgtacacc

SEQ ID NO: 17259 - DNA, 80 bp, synthetic construct
  misc_feature 1..80: note = Synthetic: >NC_001611.1-cand-6600-6679
  source 1..80: mol_type = other DNA
cacacaactaatgttattaaatatcattttttgaatatatttataccatgtcaaaacttgttcaattattaataaaaata

SEQ ID NO: 17260 - DNA, 80 bp, synthetic construct
  misc_feature 1..80: note = Synthetic: >NC_001611.1-cand-6680-6759
  source 1..80: mol_type = other DNA
atttagtgtttaaattttaccagttccagatttcacacctccattaaccccactttttacaccacaggacgatcctcccc

SEQ ID NO: 17261 - DNA, 80 bp, synthetic construct
  misc_feature 1..80: note = Synthetic: >NC_001611.1-cand-6840-6919
  source 1..80: mol_type = other DNA
ccgccactacctcctttagaagacatattaataagacttaagacaagtttaacaataaaattaatcacgagtaccctact

SEQ ID NO: 17262 - DNA, 80 bp, synthetic construct
  misc_feature 1..80: note = Synthetic: >NC_001611.1-cand-72620-72699
  source 1..80: mol_type = other DNA
agtattttaaaccccgtagcgtctagtcttaaatggagatgcccgtttccagatcaatggattaaggacttttatatccc

SEQ ID NO: 17263 - DNA, 80 bp, synthetic construct
  misc_feature 1..80: note = Synthetic: >NC_001611.1-cand-73020-73099
  source 1..80: mol_type = other DNA
caacatcaactgaaaaagttagtcatgaaccaatacaatgtaaagtatctagcaaagattctgtgtataaaaacagaaat

SEQ ID NO: 17264 - DNA, 80 bp, synthetic construct
  misc_feature 1..80: note = Synthetic: >NC_001611.1-cand-73340-73419
  source 1..80: mol_type = other DNA
tctatacatagatgtagtaatatctgatttatttcctagctttgttagactaaatactacagaaactaatatagttaata

SEQ ID NO: 17265 - DNA, 80 bp, synthetic construct
  misc_feature 1..80: note = Synthetic: >NC_001611.1-cand-73580-73659
  source 1..80: mol_type = other DNA
tgttatttcagtcgctgattaatcaattagtagagatgagataagaacataataatatatcttatatctcgtttagaaaa

SEQ ID NO: 17266 - DNA, 80 bp, synthetic construct
  misc_feature 1..80: note = Synthetic: >NC_001611.1-cand-73900-73979
  source 1..80: mol_type = other DNA
acgcatcgcttcgtttacatggctcgtaccaacagtaatagggtaatcttgtatctattcctatccgtactatgctttta

SEQ ID NO: 17267 - DNA, 80 bp, synthetic construct
  misc_feature 1..80: note = Synthetic: >NC_001611.1-cand-74210-74289
  source 1..80: mol_type = other DNA
taatgctacagatattatcattagtcatgttaaaaatgacgacgatatcggtaccgttaaagatggtagactaggtgcta

SEQ ID NO: 17268 - DNA, 80 bp, synthetic construct
  misc_feature 1..80: note = Synthetic: >NC_001611.1-cand-74350-74429
  source 1..80: mol_type = other DNA
gtaaagtaagtatctataaaactcatatagttaagcctgaatttatttcagaaattattcgtttactgaatcatatatgt

SEQ ID NO: 17269 - DNA, 80 bp, synthetic construct
  misc_feature 1..80: note = Synthetic: >NC_001611.1-cand-74940-75019
  source 1..80: mol_type = other DNA
aatttatcatatatcacatccggcaaaaataatatgattagaagttatatcgtcgcccggcgaaaagatcagaccgctag

SEQ ID NO: 17270 - DNA, 80 bp, synthetic construct
  misc_feature 1..80: note = Synthetic: >NC_001611.1-cand-75020-75099
  source 1..80: mol_type = other DNA
atctgtaattggtcccagtacatctatcacagttaatgaggtaggaatgcccgcatatattagaaatacacttacagaaa

SEQ ID NO: 17271 - DNA, 80 bp, synthetic construct
  misc_feature 1..80: note = Synthetic: >NC_001611.1-cand-75100-75179
  source 1..80: mol_type = other DNA
agatatttgttaatgcctttacagtgaataaagttaaacaactattagcgtcaaaccaagttaaattttactttaataaa

SEQ ID NO: 17272 - DNA, 80 bp, synthetic construct
  misc_feature 1..80: note = Synthetic: >NC_001611.1-cand-75420-75499
  source 1..80: mol_type = other DNA
gaatggatgatattggagcaaaatcctaaagccgtagttgaacagagtattcttatgtatccgacaacgttactcaaaca

SEQ ID NO: 17273 - DNA, 80 bp, synthetic construct
  misc_feature 1..80: note = Synthetic: >NC_001611.1-cand-75610-75689
  source 1..80: mol_type = other DNA
ggaaatatggaagagagttcgatcctaaaggtaaatgtaaattcagtggtaaagatatctatacttacttaataggtgaa

SEQ ID NO: 17274 - DNA, 80 bp, synthetic construct
  misc_feature 1..80: note = Synthetic: >NC_001611.1-cand-75780-75859
  source 1..80: mol_type = other DNA
ttggctggactcttatccgatcataagtcgaacgtggaaggtatcaactttattatcaagtcatcttatgtttttaagag

SEQ ID NO: 17275 - DNA, 80 bp, synthetic construct
  misc_feature 1..80: note = Synthetic: >NC_001611.1-cand-75890-75969
  source 1..80: mol_type = other DNA
attcaaagatttgagaccaaattcgacgttcactaataaattggaggccatcaacgtagaaaaaatagaacttatcaaag

SEQ ID NO: 17276 - DNA, 80 bp, synthetic construct
  misc_feature 1..80: note = Synthetic: >NC_001611.1-cand-76020-76099
  source 1..80: mol_type = other DNA
ttatctaaagctttagaggcggactatgtggaatccatgttatccaacttaacaaatcttaatatcagagagatagaaga

SEQ ID NO: 17277 - DNA, 80 bp, synthetic construct
  misc_feature 1..80: note = Synthetic: >NC_001611.1-cand-76340-76419
  source 1..80: mol_type = other DNA
gggttctcaatattacttttcaatgctggttgcaagatctcaatctactgatattgtctgtgaaacatcgcgtaccggaa

SEQ ID NO: 17278 - DNA, 80 bp, synthetic construct
  misc_feature 1..80: note = Synthetic: >NC_001611.1-cand-82440-82519
  source 1..80: mol_type = other DNA
atttttggaataatctcaattagaatagtctctttagagtccatttaaagttacaaacaactaggaaattggtttataat

SEQ ID NO: 17279 - DNA, 80 bp, synthetic construct
  misc_feature 1..80: note = Synthetic: >NC_001611.1-cand-82600-82679
  source 1..80: mol_type = other DNA
gttaaattgaaagcgagaaataatcataaattatttcattatcgcgatatccgttaagtttgtattgtaatggcgtggtc

SEQ ID NO: 17280 - DNA, 80 bp, synthetic construct
  misc_feature 1..80: note = Synthetic: >NC_001611.1-cand-82760-82839
  source 1..80: mol_type = other DNA
aagataaaaacgatgatattttcccggaagatgtaataattccatctactaagcccaaaaccaaacgagccactactcct

SEQ ID NO: 17281 - DNA, 80 bp, synthetic construct
  misc_feature 1..80: note = Synthetic: >NC_001611.1-cand-82840-82919
  source 1..80: mol_type = other DNA
cgtaaaccagcggctactaaacgatcaaccaaaaaggataaagaaaaggaggaagtggaagaagaagaagtagttataga

SEQ ID NO: 17282 - DNA, 80 bp, synthetic construct
  misc_feature 1..80: note = Synthetic: >NC_001611.1-cand-83030-83109
  source 1..80: mol_type = other DNA
atgatgataatgataatgataatgacgataatgaacctatggtacaagttgaagctggtaaagtaaatcatagtgctaga

SEQ ID NO: 17283 - DNA, 80 bp, synthetic construct
  misc_feature 1..80: note = Synthetic: >NC_001611.1-cand-84220-84299
  source 1..80: mol_type = other DNA
acgttcgatgaattcctatctatagtcgtagatcacgttaaatcatctacggatggatgatatagatccttacacaaata

SEQ ID NO: 17284 - DNA, 80 bp, synthetic construct
  misc_feature 1..80: note = Synthetic: >NC_001611.1-cand-84300-84379
  source 1..80: mol_type = other DNA
attacaaaaccgataaatggaaatggataagcgtatgaaatctctcgcaatgaccgctttctttggagagctaaccacat

SEQ ID NO: 17285 - DNA, 80 bp, synthetic construct
  misc_feature 1..80: note = Synthetic: >NC_001611.1-cand-84380-84459
  source 1..80: mol_type = other DNA
tagatattatggcattaataatgtctatatttaaacgccatccaaacaataccattttttcagtggataaggatggtcag

SEQ ID NO: 17286 - DNA, 80 bp, synthetic construct
  misc_feature 1..80: note = Synthetic: >NC_001611.1-cand-84460-84539
  source 1..80: mol_type = other DNA
tttatgattgatttcgaatacgatacttataaggcttctcaatatttggatttgccccttactccgatatctggagatga

SEQ ID NO: 17287 - DNA, 80 bp, synthetic construct
  misc_feature 1..80: note = Synthetic: >NC_001611.1-cand-84620-84699
  source 1..80: mol_type = other DNA
aaactacaccccgtcttaaacgatttataaaaaaataccgcaatagatcagatactcgtatcagtcaagatacagaaaag

SEQ ID NO: 17288 - DNA, 80 bp, synthetic construct
  misc_feature 1..80: note = Synthetic: >NC_001611.1-cand-84780-84859
  source 1..80: mol_type = other DNA
cgtttataataaaacacgatatggatgccaacgtagtatcatcttccactatcgcgacatatatagacgctttagcaaag

SEQ ID NO: 17289 - DNA, 80 bp, synthetic construct
  misc_feature 1..80: note = Synthetic: >NC_001611.1-cand-84860-84939
  source 1..80: mol_type = other DNA
aatgcttcggaattagaacagggttctaccgcatacgaaataaataatgaattggaactagtatttattaagccgccatt

SEQ ID NO: 17290 - DNA, 80 bp, synthetic construct
  misc_feature 1..80: note = Synthetic: >NC_001611.1-cand-84940-85019
  source 1..80: mol_type = other DNA
gattactttgacaaatgtagtaaatatctccacgattcaggaatcgtttatccgatttaccgttactaataaggaaggcg

SEQ ID NO: 17291 - DNA, 80 bp, synthetic construct
  misc_feature 1..80: note = Synthetic: >NC_001611.1-cand-85180-85259
  source 1..80: mol_type = other DNA
acgccatatatttttggattacaagaaatatggatcctctatccgactagaattagttaatcttattcaagcaaaaacaa

SEQ ID NO: 17292 - DNA, 80 bp, synthetic construct
  misc_feature 1..80: note = Synthetic: >NC_001611.1-cand-85540-85619
  source 1..80: mol_type = other DNA
agtaggtatggatctggaaaatctatatgccgtaactaagactgacggcattcctataactatcagagttacatcaaagg

SEQ ID NO: 17293 - DNA, 80 bp, synthetic construct
  misc_feature 1..80: note = Synthetic: >NC_001611.1-cand-85910-85989
  source 1..80: mol_type = other DNA
ccaaagcaaccagaaggtgttattttgttttattcaaagggacctaaatctaacattgattttaaaatcaaaaaggagaa

SEQ ID NO: 17294 - DNA, 80 bp, synthetic construct
  misc_feature 1..80: note = Synthetic: >NC_001796.2-cand-1140-1219
  source 1..80: mol_type = other DNA
catgcaacagtatgtgacgggaagatcatatctggatattgatatgttccagctaggacaagcagtagcacgtgatgctg

SEQ ID NO: 17295 - DNA, 80 bp, synthetic construct
  misc_feature 1..80: note = Synthetic: >NC_001796.2-cand-1220-1299
  source 1..80: mol_type = other DNA
aagctcagatgagctcaacactagaagatgaacttggagtgacacacgaagctaaagaaagcttgaagagacatataagg

SEQ ID NO: 17296 - DNA, 80 bp, synthetic construct
  misc_feature 1..80: note = Synthetic: >NC_001796.2-cand-1270-1349
  source 1..80: mol_type = other DNA
gctaaagaaagcttgaagagacatataaggaacataaatagttcagagacatctttccacaaaccaacaggtggatcagc

SEQ ID NO: 17297 - DNA, 80 bp, synthetic construct
  misc_feature 1..80: note = Synthetic: >NC_001796.2-cand-1350-1429
  source 1..80: mol_type = other DNA
catagagatggcaatagatgaagagccagaacaattcgaacatagatcagatcaagaacgagatggagaacctcaatcat

SEQ ID NO: 17298 - DNA, 80 bp, synthetic construct
  misc_feature 1..80: note = Synthetic: >NC_001796.2-cand-1430-1509
  source 1..80: mol_type = other DNA
ctataattcaatatgcttgggcagaaggaaacagaagcgatgatcggactgagcaagatacagaatctgacaatatcaag

SEQ ID NO: 17299 - DNA, 80 bp, synthetic construct
  misc_feature 1..80: note = Synthetic: >NC_001796.2-cand-1510-1589
  source 1..80: mol_type = other DNA
actgaacaacaaaacatcagagacagactaaacaagagactcaacgaaaagaagaaacaaggcagtcaaccacctaccaa

SEQ ID NO: 17300 - DNA, 80 bp, synthetic construct
  misc_feature 1..80: note = Synthetic: >NC_001796.2-cand-1590-1669
  source 1..80: mol_type = other DNA
tcccacaaacagaacgaatcaggacgaaatagatgatctgtttaatgcatttggaagcaactaatcgaatcaacattttg

SEQ ID NO: 17301 - DNA, 80 bp, synthetic construct
  misc_feature 1..80: note = Synthetic: >NC_001796.2-cand-1670-1749
  source 1..80: mol_type = other DNA
atccaaattaataataaataagaaaaacttaggattaaagaatcctattataccagaatatagggtggtaaatttagagt

SEQ ID NO: 17302 - DNA, 80 bp, synthetic construct
  misc_feature 1..80: note = Synthetic: >NC_001796.2-cand-1750-1829
  source 1..80: mol_type = other DNA
ttgcttgcaactcaatcaatagagagttgatggaaagcgatgctaaaaactatcaaatcatggattcttgggaagaggaa

SEQ ID NO: 17303 - DNA, 80 bp, synthetic construct
  misc_feature 1..80: note = Synthetic: >NC_001796.2-cand-1830-1909
  source 1..80: mol_type = other DNA
tcaagagataaatcaactaatatctcctcggccctcaatatcattgaattcatacttagcaccgacccccaagaagacct

SEQ ID NO: 17304 - DNA, 80 bp, synthetic construct
  misc_feature 1..80: note = Synthetic: >NC_001796.2-cand-1900-1979
  source 1..80: mol_type = other DNA
aagaagacctatcggaaaacgacacaatcaacacaagaacccagcaactcagtgccaccatctatcaaccaaaaatcaaa

SEQ ID NO: 17305 - DNA, 80 bp, synthetic construct
  misc_feature 1..80: note = Synthetic: >NC_001796.2-cand-1980-2059
  source 1..80: mol_type = other DNA
ccaacagaaacaagtgagaaagatagtggatcaactgacaaaaatagacagtctgggtcatcacacgaatgtacaacaga

SEQ ID NO: 17306 - DNA, 80 bp, synthetic construct
  misc_feature 1..80: note = Synthetic: >NC_001796.2-cand-2060-2139
  source 1..80: mol_type = other DNA
agcaaaagatagaactattgatcaggaaactgtacagagaggacctgggagaagaagcagctcagatagtagagctgaga

SEQ ID NO: 17307 - DNA, 80 bp, synthetic construct
  misc_feature 1..80: note = Synthetic: >NC_001796.2-cand-2140-2219
  source 1..80: mol_type = other DNA
ctgtggtctctggaggaatctccagaagcatcacaaattctaaaaatggaacccagaacacggaggatattgatctcaat

SEQ ID NO: 17308 - DNA, 80 bp, synthetic construct
  misc_feature 1..80: note = Synthetic: >NC_001796.2-cand-2260-2339
  source 1..80: mol_type = other DNA
tgcgacaatctgcagatgttccaagcgagatatcaggaagtgatgtcatatttacaacagaacaaagtagaaacagtgat

SEQ ID NO: 17309 - DNA, 80 bp, synthetic construct
  misc_feature 1..80: note = Synthetic: >NC_001796.2-cand-2300-2379
  source 1..80: mol_type = other DNA
tgatgtcatatttacaacagaacaaagtagaaacagtgatcatggaagaagcttggaatctatcagtacacctgatacaa

SEQ ID NO: 17310 - DNA, 80 bp, synthetic construct
  misc_feature 1..80: note = Synthetic: >NC_001897.1-cand-5150-5229
  source 1..80: mol_type = other DNA
gaagaatctaaagatgagagggcttacaaccctacattaccagtggccaaaccaaaaggcactttccctgtttcacagag

SEQ ID NO: 17311 - DNA, 80 bp, synthetic construct
  misc_feature 1..80: note = Synthetic: >NC_001897.1-cand-5230-5309
  source 1..80: mol_type = other DNA
ggagttcaagaatgaagcgccatatgatggccaactggagcatatcatctcccagatggcatacatcactggctcaacca

SEQ ID NO: 17312 - DNA, 80 bp, synthetic construct
  misc_feature 1..80: note = Synthetic: >NC_001897.1-cand-5310-5389
  source 1..80: mol_type = other DNA
caggccacataacccattgtgcaggttaccagcatgatgagatcatactgcatggacactcaatcaaatatttagaacaa

SEQ ID NO: 17313 - DNA, 80 bp, synthetic construct
  misc_feature 1..80: note = Synthetic: >NC_001897.1-cand-5390-5469
  source 1..80: mol_type = other DNA
gaagaagaactgacattacattataagaataaagttttcccaattgagcaaccatctgtcactcaggtaacgcttggtgg

SEQ ID NO: 17314 - DNA, 80 bp, synthetic construct
  misc_feature 1..80: note = Synthetic: >NC_001897.1-cand-5460-5539
  source 1..80: mol_type = other DNA
cgcttggtggtaaacctatggatttggccattgtaaaatgtaaattgccattcagattcaagaaaaactctaaatattat

SEQ ID NO: 17315 - DNA, 80 bp, synthetic construct
  misc_feature 1..80: note = Synthetic: >NC_001897.1-cand-5540-5619
  source 1..80: mol_type = other DNA
actaataaaattgggactgagagcatgttgatctggatgactgagcagggtatcatcacaaaagaagttcagagggtgca

SEQ ID NO: 17316 - DNA, 80 bp, synthetic construct
  misc_feature 1..80: note = Synthetic: >NC_001897.1-cand-5650-5729
  source 1..80: mol_type = other DNA
gactgaaagcactaagaccatcagctacacggtgaaatcttgcaaaggtatgtgtggtggacttttgatctcaaaagtgg

SEQ ID NO: 17317 - DNA, 80 bp, synthetic construct
  misc_feature 1..80: note = Synthetic: >NC_001897.1-cand-5700-5779
  source 1..80: mol_type = other DNA
tgtgtggtggacttttgatctcaaaagtggaaggcaattttaagattcttggtatgcacattgctgggaatggtgagatg

SEQ ID NO: 17318 - DNA, 80 bp, synthetic construct
  misc_feature 1..80: note = Synthetic: >NC_001897.1-cand-5780-5859
  source 1..80: mol_type = other DNA
ggtgtagctatcccctttaattttcttaaaaatgacatgtctgatcagggaattgttactgaagtcacacccatacagcc

SEQ ID NO: 17319 - DNA, 80 bp, synthetic construct
  misc_feature 1..80: note = Synthetic: >NC_001897.1-cand-5860-5939
  source 1..80: mol_type = other DNA
catgtacattaacaccaaatcccaaattcacaagagcccagtttatggtgctgtggaagttaaaatgggcccagctgtac

SEQ ID NO: 17320 - DNA, 80 bp, synthetic construct
  misc_feature 1..80: note = Synthetic: >NC_001897.1-cand-5940-6019
  source 1..80: mol_type = other DNA
tgagtaaatcggacactagactagaagaaccagtggattgtttggtcaagaagtcagcatcaaaatatagggtcaataaa

SEQ ID NO: 17321 - DNA, 80 bp, synthetic construct
  misc_feature 1..80: note = Synthetic: >NC_001897.1-cand-6050-6129
  source 1..80: mol_type = other DNA
gttaaagcttgtgttaagtcaaagtttagagaaatatttggtgttaatggtattgttgacatgaaaacagctatattagg

SEQ ID NO: 17322 - DNA, 80 bp, synthetic construct
  misc_feature 1..80: note = Synthetic: >NC_001897.1-cand-6100-6179
  source 1..80: mol_type = other DNA
tattgttgacatgaaaacagctatattaggaacttcccatgttaactcaatggatctcagtacttctgcaggatattcat

SEQ ID NO: 17323 - DNA, 80 bp, synthetic construct
  misc_feature 1..80: note = Synthetic: >NC_001897.1-cand-6180-6259
  source 1..80: mol_type = other DNA
ttgtcaaatctgggtacaaaaagaaagatctaatttgtttagaaccattctcggtgagcccaatgttagagaaattagta

SEQ ID NO: 17324 - DNA, 80 bp, synthetic construct
  misc_feature 1..80: note = Synthetic: >NC_001897.1-cand-6270-6349
  source 1..80: mol_type = other DNA
tccacaacctcctaaaaggaaatcagattacaaccatttttaatacatgtctcaaggatgagttgaggaagctggataaa

SEQ ID NO: 17325 - DNA, 80 bp, synthetic construct
  misc_feature 1..80: note = Synthetic: >NC_001897.1-cand-6350-6429
  source 1..80: mol_type = other DNA
atcgcaaccggtaaaactcgatgtattgaggcttgtgaaatagactattgcattgtttacagaatgattatgatggagat

SEQ ID NO: 17326 - DNA, 80 bp, synthetic construct
  misc_feature 1..80: note = Synthetic: >NC_002640.1-cand-5020-5099
  source 1..80: mol_type = other DNA
gccgaaagaattggagagccagattatgaagtggatgaggacatttttcgaaagaaaagattaactataatggacttaca

SEQ ID NO: 17327 - DNA, 80 bp, synthetic construct
  misc_feature 1..80: note = Synthetic: >NC_002640.1-cand-5100-5179
  source 1..80: mol_type = other DNA
ccccggagctggaaagacaaaaagaattcttccatcaatagtgagagaagccttaaaaaggaggctacgaactttgattt

SEQ ID NO: 17328 - DNA, 80 bp, synthetic construct
  misc_feature 1..80: note = Synthetic: >NC_002640.1-cand-5180-5259
  source 1..80: mol_type = other DNA
tagctcccacgagagtggtggcggccgagatggaagaggccctacgtggactgccaatccgttatcagaccccagctgtg

SEQ ID NO: 17329 - DNA, 80 bp, synthetic construct
  misc_feature 1..80: note = Synthetic: >NC_002640.1-cand-5260-5339
  source 1..80: mol_type = other DNA
aaatcagaacacacaggaagagagattgtagacctcatgtgtcatgcaaccttcacaacaagacttttgtcatcaaccag

SEQ ID NO: 17330 - DNA, 80 bp, synthetic construct
  misc_feature 1..80: note = Synthetic: >NC_002640.1-cand-5340-5419
  source 1..80: mol_type = other DNA
ggttccaaattacaaccttatagtgatggatgaagcacatttcaccgatccttctagtgtcgcggctagaggatacatct

SEQ ID NO: 17331 - DNA, 80 bp, synthetic construct
  misc_feature 1..80: note = Synthetic: >NC_002640.1-cand-5420-5499
  source 1..80: mol_type = other DNA
cgaccagggtggaaatgggagaggcagcagccatcttcatgaccgcaacccctcccggagcgacagatccctttccccag

SEQ ID NO: 17332 - DNA, 80 bp, synthetic construct
  misc_feature 1..80: note = Synthetic: >NC_002640.1-cand-5500-5579
  source 1..80: mol_type = other DNA
agcaacagcccaatagaagacatcgagagggaaattccggaaaggtcatggaacacagggttcgactggataacagacta

SEQ ID NO: 17333 - DNA, 80 bp, synthetic construct
  misc_feature 1..80: note = Synthetic: >NC_002640.1-cand-5580-5659
  source 1..80: mol_type = other DNA
ccaagggaaaactgtgtggtttgttcccagcataaaagctggaaatgacattgcaaattgtttgagaaagtcgggaaaga

SEQ ID NO: 17334 - DNA, 80 bp, synthetic construct
  misc_feature 1..80: note = Synthetic: >NC_002640.1-cand-5660-5739
  source 1..80: mol_type = other DNA
aagttatccagttgagtaggaaaacctttgatacagagtatccaaaaacgaaactcacggactgggactttgtggtcact

SEQ ID NO: 17335 - DNA, 80 bp, synthetic construct
  misc_feature 1..80: note = Synthetic: >NC_002640.1-cand-5760-5839
  source 1..80: mol_type = other DNA
ggccaattttagagccgggagagtgatagaccctagaagatgcctcaagccagttatcctaccagatgggccagagagag

SEQ ID NO: 17336 - DNA, 80 bp, synthetic construct
  misc_feature 1..80: note = Synthetic: >NC_002640.1-cand-5820-5899
  source 1..80: mol_type = other DNA
accagatgggccagagagagtcattttagcaggtcctattccagtgactccagcaagcgctgctcagagaagagggcgaa

SEQ ID NO: 17337 - DNA, 80 bp, synthetic construct
  misc_feature 1..80: note = Synthetic: >NC_002640.1-cand-5900-5979
  source 1..80: mol_type = other DNA
taggaaggaacccagcacaagaagacgaccaatacgttttctccggagacccactaaaaaatgatgaagatcatgcccac

SEQ ID NO: 17338 - DNA, 80 bp, synthetic construct
  misc_feature 1..80: note = Synthetic: >NC_002640.1-cand-5980-6059
  source 1..80: mol_type = other DNA
tggacagaagcaaagatgctgcttgacaatatctacaccccagaagggatcattccaacattgtttggtccggaaaggga

SEQ ID NO: 17339 - DNA, 80 bp, synthetic construct
  misc_feature 1..80: note = Synthetic: >NC_002640.1-cand-6100-6179
  source 1..80: mol_type = other DNA
gaacaaaggaagacttttgtggaattaatgaggagaggagaccttccggtgtggctgagctataaggtagcttctgctgg

SEQ ID NO: 17340 - DNA, 80 bp, synthetic construct
  misc_feature 1..80: note = Synthetic: >NC_002640.1-cand-6130-6209
  source 1..80: mol_type = other DNA
aggagaggagaccttccggtgtggctgagctataaggtagcttctgctggcatttcttacgaagatcgggaatggtgctt

SEQ ID NO: 17341 - DNA, 80 bp, synthetic construct
  misc_feature 1..80: note = Synthetic: >NC_002640.1-cand-6220-6299
  source 1..80: mol_type = other DNA
agaaataaccaaattttagaagaaaacatggaggttgaaatttggactagagagggagaaaagaaaaagctaaggccaag

SEQ ID NO: 17342 - DNA, 80 bp, synthetic construct
  misc_feature 1..80: note = Synthetic: >NC_002728.1-cand-8270-8349
  source 1..80: mol_type = other DNA
tctactacattgggacatagtgtattcagattgatgaaattatgttagagaaatcagaaaacttctgactttcagaaatg

SEQ ID NO: 17343 - DNA, 80 bp, synthetic construct
  misc_feature 1..80: note = Synthetic: >NC_002728.1-cand-8330-8409
  source 1..80: mol_type = other DNA
acttctgactttcagaaatggattgtatacaattagttagatcatcctgaataatcgaggtgagaacattgcaactataa

SEQ ID NO: 17344 - DNA, 80 bp, synthetic construct
  misc_feature 1..80: note = Synthetic: >NC_002728.1-cand-8410-8489
  source 1..80: mol_type = other DNA
aatcagatcatgtaaatagttgtaaaaaattaaaagcttcttttaattcttttgaacaataatttaattaatatataaca

SEQ ID NO: 17345 - DNA, 80 bp, synthetic construct
  misc_feature 1..80: note = Synthetic: >NC_002728.1-cand-8490-8569
  source 1..80: mol_type = other DNA
tattctctcacacgagcgctaacctatacactctctactaatattttatactcataattaatgatataatgacaaataag

SEQ ID NO: 17346 - DNA, 80 bp, synthetic construct
  misc_feature 1..80: note = Synthetic: >NC_002728.1-cand-8570-8649
  source 1..80: mol_type = other DNA
gattcaaattggattatgatatagtttcatactacaatagcatttcgaccaagaaaatatccttacaattatacaatgta

SEQ ID NO: 17347 - DNA, 80 bp, synthetic construct
  misc_feature 1..80: note = Synthetic: >NC_002728.1-cand-8650-8729
  source 1..80: mol_type = other DNA
cttaaccgtgaatatgtaattgataatttccctttagaaatttaataaaaaacttaggacccaggtccataactcattgg

SEQ ID NO: 17348 - DNA, 80 bp, synthetic construct
  misc_feature 1..80: note = Synthetic: >NC_002728.1-cand-8730-8809
  source 1..80: mol_type = other DNA
atacttaactgtatctttctaagctatcacatatcaaaggagagattgaatgcttttttggagatctagatcattactat

SEQ ID NO: 17349 - DNA, 80 bp, synthetic construct
  misc_feature 1..80: note = Synthetic: >NC_002728.1-cand-8780-8859
  source 1..80: mol_type = other DNA
tgcttttttggagatctagatcattactatatgtgtctcctataatcacatcataggagtgaaccataatacacatcttt

SEQ ID NO: 17350 - DNA, 80 bp, synthetic construct
  misc_feature 1..80: note = Synthetic: >NC_002728.1-cand-8890-8969
  source 1..80: mol_type = other DNA
ctgattgatctgcttgagtcaaataatcagtcataacaattcaagaaaatgccggcagaaaacaagaaagttagattcga

SEQ ID NO: 17351 - DNA, 80 bp, synthetic construct
  misc_feature 1..80: note = Synthetic: >NC_002728.1-cand-8970-9049
  source 1..80: mol_type = other DNA
aaatactacttcagacaaagggaaaattcctagtaaagttattaagagctactacggaaccatggacattaagaaaataa

SEQ ID NO: 17352 - DNA, 80 bp, synthetic construct
  misc_feature 1..80: note = Synthetic: >NC_002728.1-cand-9050-9129
  source 1..80: mol_type = other DNA
atgaaggattattggacagcaaaatattaagtgctttcaacacagtaatagcattgcttggatctatcgtgatcatagtg

SEQ ID NO: 17353 - DNA, 80 bp, synthetic construct
  misc_feature 1..80: note = Synthetic: >NC_002728.1-cand-9130-9209
  source 1..80: mol_type = other DNA
atgaatataatgatcatccaaaattacacaagatcaacagacaatcaggccgtgatcaaagatgcgttgcagggtatcca

SEQ ID NO: 17354 - DNA, 80 bp, synthetic construct
  misc_feature 1..80: note = Synthetic: >NC_002728.1-cand-9210-9289
  source 1..80: mol_type = other DNA
acagcagatcaaagggcttgctgacaaaatcggcacagagatagggcccaaagtatcactgattgacacatccagtacca

SEQ ID NO: 17355 - DNA, 80 bp, synthetic construct
  misc_feature 1..80: note = Synthetic: >NC_002728.1-cand-9290-9369
  source 1..80: mol_type = other DNA
ttactatcccagctaacattgggctgttaggttcaaagatcagccagtcgactgcaagtataaatgagaatgtgaatgaa

SEQ ID NO: 17356 - DNA, 80 bp, synthetic construct
  misc_feature 1..80: note = Synthetic: >NC_002728.1-cand-9370-9449
  source 1..80: mol_type = other DNA
aaatgcaaattcacactgcctcccttgaaaatccacgaatgtaacatttcttgtcctaacccactcccttttagagagta

SEQ ID NO: 17357 - DNA, 80 bp, synthetic construct
  misc_feature 1..80: note = Synthetic: >NC_002728.1-cand-9470-9549
  source 1..80: mol_type = other DNA
tgagcaatctagtaggattacctaataatatttgcctgcaaaagacatctaatcagatattgaagccaaagctgatttca

SEQ ID NO: 17358 - DNA, 80 bp, synthetic construct
  misc_feature 1..80: note = Synthetic: >NC_003310.1-cand-154490-154569
  source 1..80: mol_type = other DNA
tccagattttaaaactacgtatgtggaagtactcggttccagaatagctgatatagatattaaacaagtgatacgtaaga

SEQ ID NO: 17359 - DNA, 80 bp, synthetic construct
  misc_feature 1..80: note = Synthetic: >NC_003310.1-cand-154570-154649
  source 1..80: mol_type = other DNA
atataatacaattgtctaatgatccgcgaacgatatttgtgaaaatattaaaaaaaaatactttttttattaaatgacgt

SEQ ID NO: 17360 - DNA, 80 bp, synthetic construct
  misc_feature 1..80: note = Synthetic: >NC_003310.1-cand-154730-154809
  source 1..80: mol_type = other DNA
tttataacagatagagatgataccgatacatatttgatcattaagctattgcttcccggattagacgatagaatgtataa

SEQ ID NO: 17361 - DNA, 80 bp, synthetic construct
  misc_feature 1..80: note = Synthetic: >NC_003310.1-cand-154810-154889
  source 1..80: mol_type = other DNA
catgaacgataaacaaattataaaattatatagtataatatttaaacaatctcaggaagatatgctacaagatttaggat

SEQ ID NO: 17362 - DNA, 80 bp, synthetic construct
  misc_feature 1..80: note = Synthetic: >NC_003310.1-cand-154890-154969
  source 1..80: mol_type = other DNA
acggatatataggagacactattaggacattcttcaaagagaacacggaaatccgtccacgagataaaagcattttaact

SEQ ID NO: 17363 - DNA, 80 bp, synthetic construct
  misc_feature 1..80: note = Synthetic: >NC_003310.1-cand-154970-155049
  source 1..80: mol_type = other DNA
ttagaagaagtggatagttttttaactacgttatcatcagtaactaaagaatcacatcaaataaaattattgactgatat

SEQ ID NO: 17364 - DNA, 80 bp, synthetic construct
  misc_feature 1..80: note = Synthetic: >NC_003310.1-cand-155210-155289
  source 1..80: mol_type = other DNA
gcagctaaacaaaatctagactctatatctatttctgttatgactccaattaatcccatgttagcggaatcatgtgattc

SEQ ID NO: 17365 - DNA, 80 bp, synthetic construct
  misc_feature 1..80: note = Synthetic: >NC_003310.1-cand-155290-155369
  source 1..80: mol_type = other DNA
tgtcaataaggcgtttaaaaaatttccatcaggaatgtttgcggaagtcaaatacgatggtgaaagagtacaagttcata

SEQ ID NO: 17366 - DNA, 80 bp, synthetic construct
  misc_feature 1..80: note = Synthetic: >NC_003310.1-cand-155630-155709
  source 1..80: mol_type = other DNA
acagacattccattgtatgaacgaagatcttttctcaaagatgttatggtcgaaatacccaatagaatagtattctcaga

SEQ ID NO: 17367 - DNA, 80 bp, synthetic construct
  misc_feature 1..80: note = Synthetic: >NC_003310.1-cand-155940-156019
  source 1..80: mol_type = other DNA
cagtctttctaatgggttgttacgacgatgaatccggtaaatggaagacggtaactaaatgttccggtcacgatgataat

SEQ ID NO: 17368 - DNA, 80 bp, synthetic construct
  misc_feature 1..80: note = Synthetic: >NC_003310.1-cand-156100-156179
  source 1..80: mol_type = other DNA
taataaaatctatattcccgattttgtagtagatgatccgaaacaatctcagatatgggaaatttcaggagcagagttta

SEQ ID NO: 17369 - DNA, 80 bp, synthetic construct
  misc_feature 1..80: note = Synthetic: >NC_003310.1-cand-156260-156339
  source 1..80: mol_type = other DNA
aaagaatctactcatctaaacgatttagtaaacttgactaaatcttaatagttacatataaactgaaaaataaaataata

SEQ ID NO: 17370 - DNA, 80 bp, synthetic construct
  misc_feature 1..80: note = Synthetic: >NC_003310.1-cand-156340-156419
  source 1..80: mol_type = other DNA
ctattttagttggtggtcgccatggatggtgttatcgtatactgtctaaatgcgttagtaaaacatggcgaggaaataaa

SEQ ID NO: 17371 - DNA, 80 bp, synthetic construct
  misc_feature 1..80: note = Synthetic: >NC_003310.1-cand-156580-156659
  source 1..80: mol_type = other DNA
aagaatgtatcaagaatatccagatttgctaatatgataaaaatagatgacgatgacaagactcctaccggtgtatataa

SEQ ID NO: 17372 - DNA, 80 bp, synthetic construct
  misc_feature 1..80: note = Synthetic: >NC_003310.1-cand-156660-156739
  source 1..80: mol_type = other DNA
ttattttaaacctaaagatactattcctgttattatatccataggaaaggataaagatgtctgtgaactattaatctcat

SEQ ID NO: 17373 - DNA, 80 bp, synthetic construct
  misc_feature 1..80: note = Synthetic: >NC_003310.1-cand-156740-156819
  source 1..80: mol_type = other DNA
atgataaagcgtgtgcgtgtataaagttaaatttatataaagtagccattcttcccatggatgtttccttttttaccaaa

SEQ ID NO: 17374 - DNA, 80 bp, synthetic construct
  misc_feature 1..80: note = Synthetic: >NC_003310.1-cand-181150-181229
  source 1..80: mol_type = other DNA
atgtagaagacaataaagatagtgtagcatcgctaccgtacaagtatctacaagtagtcaaacaaagagaacgtagtaga

SEQ ID NO: 17375 - DNA, 80 bp, synthetic construct
  misc_feature 1..80: note = Synthetic: >NC_003310.1-cand-181230-181309
  source 1..80: mol_type = other DNA
ttgttggctacatttaattggacggatatagctgagggtgttagaaatgagttcattaaaatatgtgatatcaacggaac

SEQ ID NO: 17376 - DNA, 80 bp, synthetic construct
  misc_feature 1..80: note = Synthetic: >NC_003310.1-cand-181310-181389
  source 1..80: mol_type = other DNA
atatctatataattatactattgatgttagtataattattgattccacggaagaactaccaacagttactccaattacaa

SEQ ID NO: 17377 - DNA, 80 bp, synthetic construct
  misc_feature 1..80: note = Synthetic: >NC_003310.1-cand-181390-181469
  source 1..80: mol_type = other DNA
catatgaaccttctatatataattatactatcgattatagcactgttattactactgaagaactacaagtgactccaaca

SEQ ID NO: 17378 - DNA, 80 bp, synthetic construct
  misc_feature 1..80: note = Synthetic: >NC_003310.1-cand-181470-181549
  source 1..80: mol_type = other DNA
tatgcgcctgtaacaactcctcttccaacatcagcagttccttatgatcaacgatcgaataacaatgtaagtactatatc

SEQ ID NO: 17379 - DNA, 80 bp, synthetic construct
  misc_feature 1..80: note = Synthetic: >NC_003310.1-cand-181630-181709
  source 1..80: mol_type = other DNA
ttgacaataacaccatggttgatgatgagacatctgacaataacacattgcatggtaatataggatttttggaaataaat

SEQ ID NO: 17380 - DNA, 80 bp, synthetic construct
  misc_feature 1..80: note = Synthetic: >NC_003310.1-cand-181710-181789
  source 1..80: mol_type = other DNA
aattgttacaatgtttctgtgtcagatgctagttttagaataacattagtaaacgatacttctgaagaaattttgctaat

SEQ ID NO: 17381 - DNA, 80 bp, synthetic construct
  misc_feature 1..80: note = Synthetic: >NC_003310.1-cand-181790-181869
  source 1..80: mol_type = other DNA
gctaacaggaactagttcatccgacaccttcatatcttccaccaatatcactgaatgtttgaaaacattaatcaataatg

SEQ ID NO: 17382 - DNA, 80 bp, synthetic construct
  misc_feature 1..80: note = Synthetic: >NC_003310.1-cand-181870-181949
  source 1..80: mol_type = other DNA
tgtcgattaatgatgtacttataacacaaaatatgaatgtaacatctaattgtgataaatgctcaatgaatttgatggca

SEQ ID NO: 17383 - DNA, 80 bp, synthetic construct
  misc_feature 1..80: note = Synthetic: >NC_003310.1-cand-181950-182029
  source 1..80: mol_type = other DNA
tccgttattcctgcagttaatgaatttaacaatacgttgatgaaaattggtgtaaaagatgatgaaaacaatacggtata

SEQ ID NO: 17384 - DNA, 80 bp, synthetic construct
  misc_feature 1..80: note = Synthetic: >NC_003310.1-cand-182030-182109
  source 1..80: mol_type = other DNA
taactattatatttgtaaactaactacaaattctacatgtgatgagttaatcaatttagatgaagtcattaacaacataa

SEQ ID NO: 17385 - DNA, 80 bp, synthetic construct
  misc_feature 1..80: note = Synthetic: >NC_003310.1-cand-182190-182269
  source 1..80: mol_type = other DNA
tccacttccaaggaattagattgtctttacgaatcatatggtgtaaacgatgatataagtcattgttttgcatcacctag

SEQ ID NO: 17386 - DNA, 80 bp, synthetic construct
  misc_feature 1..80: note = Synthetic: >NC_003310.1-cand-182270-182349
  source 1..80: mol_type = other DNA
acgtagacgatctgacgacaaaaaggagtacatggacatgaaattattcgaccacgcgaaaaaagatttaggaatagaca

SEQ ID NO: 17387 - DNA, 80 bp, synthetic construct
  misc_feature 1..80: note = Synthetic: >NC_003310.1-cand-182350-182429
  source 1..80: mol_type = other DNA
gtgttattcctagaggtacaacccatttccaagtaggtgcatctggtgcaagtggtggtgttgtaggagatagtttccca

SEQ ID NO: 17388 - DNA, 80 bp, synthetic construct
  misc_feature 1..80: note = Synthetic: >NC_003310.1-cand-182430-182509
  source 1..80: mol_type = other DNA
tttcaaaatgttaaatcgcgtgccagtctattggcggaaaaaataatgcctagagtacctattactgctaccgaagctga

SEQ ID NO: 17389 - DNA, 80 bp, synthetic construct
  misc_feature 1..80: note = Synthetic: >NC_003310.1-cand-182510-182589
  source 1..80: mol_type = other DNA
tctatatgcaactgtaaatagacaacccaagttaccagcaggtgttaaaagtactccgtttacagaggcgcttgcgtcta

SEQ ID NO: 17390 - DNA, 80 bp, synthetic construct
  misc_feature 1..80: note = Synthetic: >NC_003310.1-cand-188540-188619
  source 1..80: mol_type = other DNA
gtttcttgctctgactacatgtactctacaatcaaagagagatttcagtaaacttgtaacaggattgtttgctgctttct

SEQ ID NO: 17391 - DNA, 80 bp, synthetic construct
  misc_feature 1..80: note = Synthetic: >NC_003310.1-cand-188620-188699
  source 1..80: mol_type = other DNA
ggattttaattttgtcaggagtcttgaggataaagtttaaaatagaattaataaagaacatataggtcattttttaaaca

SEQ ID NO: 17392 - DNA, 80 bp, synthetic construct
  misc_feature 1..80: note = Synthetic: >NC_003310.1-cand-188700-188779
  source 1..80: mol_type = other DNA
tggatagaaaccaaggttgttagttaataatatacaagatattttttctcactctgatccatgtaaaccaaggacgagag

SEQ ID NO: 17393 - DNA, 80 bp, synthetic construct
  misc_feature 1..80: note = Synthetic: >NC_003310.1-cand-188780-188859
  source 1..80: mol_type = other DNA
acactctcattcctcattcacgacaccattaaaaatggaaattaaagccctctattaagcacagacggctacaggtctac

SEQ ID NO: 17394 - DNA, 80 bp, synthetic construct
  misc_feature 1..80: note = Synthetic: >NC_003310.1-cand-188850-188929
  source 1..80: mol_type = other DNA
acaggtctaccatcaggttaaccttcgtctaccttcacaatggcctttccttgtgcccagttcagtccctgtcattgcca

SEQ ID NO: 17395 - DNA, 80 bp, synthetic construct
  misc_feature 1..80: note = Synthetic: >NC_003310.1-cand-188930-189009
  source 1..80: mol_type = other DNA
cgctactaaggactccctgaataccgtgactgacgtcagacattgtctgactgaatacatcctgtgggtttctcatagat

SEQ ID NO: 17396 - DNA, 80 bp, synthetic construct
  misc_feature 1..80: note = Synthetic: >NC_003310.1-cand-189010-189089
  source 1..80: mol_type = other DNA
ggacccatagagaaagcgcagggcctctctacaggcttctcatctctttcagaattgatgcaatggagctatttggtagc

SEQ ID NO: 17397 - DNA, 80 bp, synthetic construct
  misc_feature 1..80: note = Synthetic: >NC_003310.1-cand-189170-189249
  source 1..80: mol_type = other DNA
tgactccatgaaaaccgccaaagaactttgtgcaataattggactttgtactcaatcagctattgtcactggaagagtct

SEQ ID NO: 17398 - DNA, 80 bp, synthetic construct
  misc_feature 1..80: note = Synthetic: >NC_003310.1-cand-189250-189329
  source 1..80: mol_type = other DNA
tcaatgataagtatatcgacatactacttatgctgcgaaagattctgaatgagaacgactatctcaccctcttggatcat

SEQ ID NO: 17399 - DNA, 80 bp, synthetic construct
  misc_feature 1..80: note = Synthetic: >NC_003310.1-cand-189330-189409
  source 1..80: mol_type = other DNA
atcctcactgctaaatactaaatctccttcatgctctctcactaatactcttactcactacactttttatcatcttatga

SEQ ID NO: 17400 - DNA, 80 bp, synthetic construct
  misc_feature 1..80: note = Synthetic: >NC_003310.1-cand-189410-189489
  source 1..80: mol_type = other DNA
tgaatgattgccttcatcatttttcgtggaatataatataggaataattagcaccagaatagctatggatatctcgttaa

SEQ ID NO: 17401 - DNA, 80 bp, synthetic construct
  misc_feature 1..80: note = Synthetic: >NC_003310.1-cand-189490-189569
  source 1..80: mol_type = other DNA
gaatattctcgataagagacataatgtagacatagttattatatccttcttagataagtgttacgctactggaaagtttc

SEQ ID NO: 17402 - DNA, 80 bp, synthetic construct
  misc_feature 1..80: note = Synthetic: >NC_003310.1-cand-189570-189649
  source 1..80: mol_type = other DNA
catcgttattattacgtgaagatgatatcattaaaccaacattgagattggctcttatgttagctggattgaattactgt

SEQ ID NO: 17403 - DNA, 80 bp, synthetic construct
  misc_feature 1..80: note = Synthetic: >NC_003310.1-cand-189650-189729
  source 1..80: mol_type = other DNA
aataaatgcatcgagtatagagggatatagcaattctcgataatagtcatgcaatatttgaatgagactgataatttagg

SEQ ID NO: 17404 - DNA, 80 bp, synthetic construct
  misc_feature 1..80: note = Synthetic: >NC_003310.1-cand-189730-189809
  source 1..80: mol_type = other DNA
taatacagtactacacacacatatctttctagattatatatcgttaaaaatctgtaagaggtatatttctcataagtatc

SEQ ID NO: 17405 - DNA, 80 bp, synthetic construct
  misc_feature 1..80: note = Synthetic: >NC_003310.1-cand-189810-189889
  source 1..80: mol_type = other DNA
cactgtgtaatattattaatggatatatagataacacaatagggactaatagtattgtaaaagatataatcgactatttg

SEQ ID NO: 17406 - DNA, 80 bp, synthetic construct
  misc_feature 1..80: note = Synthetic: >NC_003443.1-cand-870-949
  source 1..80: mol_type = other DNA
aatcaagatctttgctagcaaaccgctactatgctatggtgggagacattggcaagtacattgaacacagcggaatggga

SEQ ID NO: 17407 - DNA, 80 bp, synthetic construct
  misc_feature 1..80: note = Synthetic: >NC_003443.1-cand-940-1019
  source 1..80: mol_type = other DNA
cggaatgggaggatttttcttaacacttaaatatggacttggaacaagatggcctacattggctcttgcagcattttctg

SEQ ID NO: 17408 - DNA, 80 bp, synthetic construct
  misc_feature 1..80: note = Synthetic: >NC_003443.1-cand-1030-1109
  source 1..80: mol_type = other DNA
gaaattaaaagctctcatgctacattatcagagtctaggacccatggccaagtacatggctctattagaatcaccaaaac

SEQ ID NO: 17409 - DNA, 80 bp, synthetic construct
  misc_feature 1..80: note = Synthetic: >NC_003443.1-cand-1110-1189
  source 1..80: mol_type = other DNA
tgatggattttgtcccatctgaatatccattagattatagctatgcaatgggtattggaactgtccttgatacaaatatg

SEQ ID NO: 17410 - DNA, 80 bp, synthetic construct
  misc_feature 1..80: note = Synthetic: >NC_003443.1-cand-1190-1269
  source 1..80: mol_type = other DNA
agaaattatgcatacggtagatcatatttaaatcagcaatattttcagctaggagtagaaacagcaaggaaacagcaggg

SEQ ID NO: 17411 - DNA, 80 bp, synthetic construct
  misc_feature 1..80: note = Synthetic: >NC_003443.1-cand-1270-1349
  source 1..80: mol_type = other DNA
agctgttgacaacaggacagcagaggacctcggcatgactgctgcagacaaagcagacctcactgcaaccatatcaaagc

SEQ ID NO: 17412 - DNA, 80 bp, synthetic construct
  misc_feature 1..80: note = Synthetic: >NC_003443.1-cand-1380-1459
  source 1..80: mol_type = other DNA
aaccaatatctgacccatttgctggagcaaatgacagagaaatgggaggacaagcaaatgatacacctgtgtataacttc

SEQ ID NO: 17413 - DNA, 80 bp, synthetic construct
  misc_feature 1..80: note = Synthetic: >NC_003443.1-cand-1430-1509
  source 1..80: mol_type = other DNA
caagcaaatgatacacctgtgtataacttcaatccaatcgatactcggaggtatgacaactatgacagtgatggtgagga

SEQ ID NO: 17414 - DNA, 80 bp, synthetic construct
  misc_feature 1..80: note = Synthetic: >NC_003443.1-cand-1510-1589
  source 1..80: mol_type = other DNA
cagaattgacaacgatcaagatcaagctatcagagagaatagaggagagcctggacaaccaaacaaccagacaagtgaca

SEQ ID NO: 17415 - DNA, 80 bp, synthetic construct
  misc_feature 1..80: note = Synthetic: >NC_003443.1-cand-1590-1669
  source 1..80: mol_type = other DNA
accagcagagattcaacccccccataccgcaaagaacatcaggtatgagcagtgaagagttccaacattcaatgaatcag

SEQ ID NO: 17416 - DNA, 80 bp, synthetic construct
  misc_feature 1..80: note = Synthetic: >NC_003443.1-cand-1670-1749
  source 1..80: mol_type = other DNA
tacatccgtgctatgcatgagcaatacagaggctcccaggatgatgatgccaatgatgccacagatgggaatgacatttc

SEQ ID NO: 17417 - DNA, 80 bp, synthetic construct
  misc_feature 1..80: note = Synthetic: >NC_003443.1-cand-1750-1829
  source 1..80: mol_type = other DNA
tcttgagctagttggagattttgattcctaactctcaatgtcatacaaccagatatacacatccacatcactcagagata

SEQ ID NO: 17418 - DNA, 80 bp, synthetic construct
  misc_feature 1..80: note = Synthetic: >NC_003443.1-cand-1830-1909
  source 1..80: mol_type = other DNA
cagctgccactcacacactcatccagacaaatcaaactagactcacatcattcggaaacaattctctcataatttaaaga

SEQ ID NO: 17419 - DNA, 80 bp, synthetic construct
  misc_feature 1..80: note = Synthetic: >NC_003443.1-cand-1910-1989
  source 1..80: mol_type = other DNA
aaaaatcataggccggacgggttagaaatccggtgcttgttcgtgatcagataacctccacaccagaatcatacaatcat

SEQ ID NO: 17420 - DNA, 80 bp, synthetic construct
  misc_feature 1..80: note = Synthetic: >NC_003443.1-cand-2000-2079
  source 1..80: mol_type = other DNA
ccaacatacaccactgagcaagttgatgaattaatccatgctggactgggaacagtagatttcttcctatctagacccat

SEQ ID NO: 17421 - DNA, 80 bp, synthetic construct
  misc_feature 1..80: note = Synthetic: >NC_003443.1-cand-2080-2159
  source 1..80: mol_type = other DNA
agatgctcagtcttctttaggcaaaggcagcatcccaccaggtgtcacagctgttctaactagtgcagcggagacaaaat

SEQ ID NO: 17422 - DNA, 80 bp, synthetic construct
  misc_feature 1..80: note = Synthetic: >NC_004162.2-cand-2630-2709
  source 1..80: mol_type = other DNA
tgccattgtgtcatcgttgcattacgaaggcaaaatgcgcactacgaatgagtacaacaagccgattgtagtggacacta

SEQ ID NO: 17423 - DNA, 80 bp, synthetic construct
  misc_feature 1..80: note = Synthetic: >NC_004162.2-cand-2710-2789
  source 1..80: mol_type = other DNA
caggctcaacaaaacctgaccctggagatctcgtgttaacgtgcttcagaggatgggttaaacaactgcaaattgactat

SEQ ID NO: 17424 - DNA, 80 bp, synthetic construct
  misc_feature 1..80: note = Synthetic: >NC_004162.2-cand-2790-2869
  source 1..80: mol_type = other DNA
cgtggacacgaggtcatgacagcagccgcatcccaagggttaaccagaaaaggagtttacgcagttaggcaaaaagttaa

SEQ ID NO: 17425 - DNA, 80 bp, synthetic construct
  misc_feature 1..80: note = Synthetic: >NC_004162.2-cand-2860-2939
  source 1..80: mol_type = other DNA
aaaaagttaacgaaaacccgctttatgcatcaacgtcagagcacgtcaacgtactcctaacgcgtacggaaggtaaactg

SEQ ID NO: 17426 - DNA, 80 bp, synthetic construct
  misc_feature 1..80: note = Synthetic: >NC_004162.2-cand-2940-3019
  source 1..80: mol_type = other DNA
gtatggaagacactctccggtgacccgtggataaagacgctgcagaacccaccgaaaggaaacttcaaagcaactattaa

SEQ ID NO: 17427 - DNA, 80 bp, synthetic construct
  misc_feature 1..80: note = Synthetic: >NC_004162.2-cand-3020-3099
  source 1..80: mol_type = other DNA
ggagtgggaggtggagcatgcatcaataatggcgggcatctgcagtcaccaaatgacctttgatacattccaaaacaaag

SEQ ID NO: 17428 - DNA, 80 bp, synthetic construct
  misc_feature 1..80: note = Synthetic: >NC_004162.2-cand-3060-3139
  source 1..80: mol_type = other DNA
tgcagtcaccaaatgacctttgatacattccaaaacaaagccaacgtttgttgggctaagagtttggtccctatcctcga

SEQ ID NO: 17429 - DNA, 80 bp, synthetic construct
  misc_feature 1..80: note = Synthetic: >NC_004162.2-cand-3170-3249
  source 1..80: mol_type = other DNA
gtggtcccagataattcaagccttcaaagaagacaaagcatattcacccgaagtagccctgaatgaaatatgcacgcgca

SEQ ID NO: 17430 - DNA, 80 bp, synthetic construct
  misc_feature 1..80: note = Synthetic: >NC_004162.2-cand-3260-3339
  source 1..80: mol_type = other DNA
ggatctagacagcgggctattttctaaaccgttggtgtctgtgtattacgcggataaccactgggataataggcctggag

SEQ ID NO: 17431 - DNA, 80 bp, synthetic construct
  misc_feature 1..80: note = Synthetic: >NC_004162.2-cand-3340-3419
  source 1..80: mol_type = other DNA
ggaagatgttcggattcaaccccgaggcagcatccattctagaaagaaagtatccatttacaaaagggaagtggaacatc

SEQ ID NO: 17432 - DNA, 80 bp, synthetic construct
  misc_feature 1..80: note = Synthetic: >NC_004162.2-cand-3420-3499
  source 1..80: mol_type = other DNA
aacaagcagatctgcgtgactaccaggaggatagaagacttcaaccctaccaccaacattataccggccaacaggagact

SEQ ID NO: 17433 - DNA, 80 bp, synthetic construct
  misc_feature 1..80: note = Synthetic: >NC_004162.2-cand-3460-3539
  source 1..80: mol_type = other DNA
tcaaccctaccaccaacattataccggccaacaggagactaccacactcattagtggccgaacaccgcccagtaaaaggg

SEQ ID NO: 17434 - DNA, 80 bp, synthetic construct
  misc_feature 1..80: note = Synthetic: >NC_004162.2-cand-3580-3659
  source 1..80: mol_type = other DNA
acgtgctcctggtcagtggctgtagccttgcactgcctactaagagagtcacttgggtagcgccactaggtgtccgcgga

SEQ ID NO: 17435 - DNA, 80 bp, synthetic construct
  misc_feature 1..80: note = Synthetic: >NC_004162.2-cand-3660-3739
  source 1..80: mol_type = other DNA
gcggactatacatacaacctagagttgggtctgccagcaacgcttggtaggtatgacctagtggtcataaacatccacac

SEQ ID NO: 17436 - DNA, 80 bp, synthetic construct
  misc_feature 1..80: note = Synthetic: >NC_004162.2-cand-3720-3799
  source 1..80: mol_type = other DNA
gtggtcataaacatccacacaccttttcgcatacaccattatcaacagtgcgtagaccacgcaatgaaactgcaaatgct

SEQ ID NO: 17437 - DNA, 80 bp, synthetic construct
  misc_feature 1..80: note = Synthetic: >NC_004162.2-cand-3820-3899
  source 1..80: mol_type = other DNA
tgctcaaaccgggtggctctctattgatcagagcatatggttacgcagatagaaccagtgaacgagtcatctgcgtattg

SEQ ID NO: 17438 - DNA, 80 bp, synthetic construct
  misc_feature 1..80: note = Synthetic: >NC_004162.2-cand-7760-7839
  source 1..80: mol_type = other DNA
aataagaagcaaaagcaaaagcagcaggcgccacaaaacaacacaaaccaaaagaagcagccacctaaaaagaaaccagc

SEQ ID NO: 17439 - DNA, 80 bp, synthetic construct
  misc_feature 1..80: note = Synthetic: >NC_004162.2-cand-7840-7919
  source 1..80: mol_type = other DNA
tcaaaagaaaaagaagccgggccgcagagagaggatgtgcatgaaaatcgaaaatgactgtattttcgaagtcaagcacg

SEQ ID NO: 17440 - DNA, 80 bp, synthetic construct
  misc_feature 1..80: note = Synthetic: >NC_004162.2-cand-7870-7949
  source 1..80: mol_type = other DNA
gaggatgtgcatgaaaatcgaaaatgactgtattttcgaagtcaagcacgaaggtaaggtaacaggttacgcgtgcttgg

SEQ ID NO: 17441 - DNA, 80 bp, synthetic construct
  misc_feature 1..80: note = Synthetic: >NC_004162.2-cand-8000-8079
  source 1..80: mol_type = other DNA
gcggacctggccaaattggcctttaagcggtcatctaagtacgaccttgaatgcgcgcagatacccgtgcacatgaagtc

SEQ ID NO: 17442 - DNA, 80 bp, synthetic construct
  misc_feature 1..80: note = Synthetic: >NC_004162.2-cand-8030-8109
  source 1..80: mol_type = other DNA
tcatctaagtacgaccttgaatgcgcgcagatacccgtgcacatgaagtccgacgcttcgaagttcacccatgagaaacc

SEQ ID NO: 17443 - DNA, 80 bp, synthetic construct
  misc_feature 1..80: note = Synthetic: >NC_004162.2-cand-8200-8279
  source 1..80: mol_type = other DNA
cggtagaccgatcttcgacaacaagggacgcgtggtggccatagtcttaggaggagctaatgaaggagcccgtacagccc

SEQ ID NO: 17444 - DNA, 80 bp, synthetic construct
  misc_feature 1..80: note = Synthetic: >NC_004162.2-cand-8240-8319
  source 1..80: mol_type = other DNA
atagtcttaggaggagctaatgaaggagcccgtacagccctctcagtggtgacctggaataaagacattgtcactaaaat

SEQ ID NO: 17445 - DNA, 80 bp, synthetic construct
  misc_feature 1..80: note = Synthetic: >NC_004162.2-cand-8320-8399
  source 1..80: mol_type = other DNA
cacccctgagggagccgaagagtggagtcttgccatcccagttatgtgcctgttggcaaataccacgttcccctgctccc

SEQ ID NO: 17446 - DNA, 80 bp, synthetic construct
  misc_feature 1..80: note = Synthetic: >NC_004162.2-cand-8410-8489
  source 1..80: mol_type = other DNA
cataccctgctgctacgaaaaggaaccggaggaaaccctacgcatgcttgaggacaacgtcatgagacctgggtactatc

SEQ ID NO: 17447 - DNA, 80 bp, synthetic construct
  misc_feature 1..80: note = Synthetic: >NC_004162.2-cand-8490-8569
  source 1..80: mol_type = other DNA
agctgctacaagcatcattaacatgttctccccaccgccagcgacgcagcaccaaggacaacttcaatgtctataaagcc

SEQ ID NO: 17448 - DNA, 80 bp, synthetic construct
  misc_feature 1..80: note = Synthetic: >NC_004162.2-cand-8570-8649
  source 1..80: mol_type = other DNA
acaagaccatacctagctcactgtcccgactgtggagaagggcactcgtgccatagtcccgtagcactagaacgcatcag

SEQ ID NO: 17449 - DNA, 80 bp, synthetic construct
  misc_feature 1..80: note = Synthetic: >NC_004162.2-cand-8650-8729
  source 1..80: mol_type = other DNA
aaatgaagcgacagacgggacgctgaaaatccaggtctccttgcaaattggaatagggacggatgatagccatgattgga

SEQ ID NO: 17450 - DNA, 80 bp, synthetic construct
  misc_feature 1..80: note = Synthetic: >NC_004162.2-cand-8740-8819
  source 1..80: mol_type = other DNA
ttacatggacaatcacataccagcagacgcagggagggccgggctatttgtaagaacatcagcaccatgcacgattactg

SEQ ID NO: 17451 - DNA, 80 bp, synthetic construct
  misc_feature 1..80: note = Synthetic: >NC_004162.2-cand-8830-8909
  source 1..80: mol_type = other DNA
acacttcatcctggcccgatgtccgaaaggagaaactctgacggtgggattcactgacagtaggaagattagtcactcat

SEQ ID NO: 17452 - DNA, 80 bp, synthetic construct
  misc_feature 1..80: note = Synthetic: >NC_004162.2-cand-8910-8989
  source 1..80: mol_type = other DNA
gtacgcacccatttcaccacgaccctcctgtgataggccgggaaaaattccattcccgaccgcagcacggtaaagagcta

SEQ ID NO: 17453 - DNA, 80 bp, synthetic construct
  misc_feature 1..80: note = Synthetic: >NC_004162.2-cand-8990-9069
  source 1..80: mol_type = other DNA
ccttgcagcacgtacgtgcagagcaacgccgcaactgccgaggagatagaggtacacatgcccccagacacccctgatcg

SEQ ID NO: 17454 - DNA, 80 bp, synthetic construct
  misc_feature 1..80: note = Synthetic: >NC_005062.1-cand-6750-6829
  source 1..80: mol_type = other DNA
gagtcggctatggaagcatggccggtgtggctcttgtgttctacaccttgttgacagtgctgcagcctgaagctggcaag

SEQ ID NO: 17455 - DNA, 80 bp, synthetic construct
  misc_feature 1..80: note = Synthetic: >NC_005062.1-cand-6830-6909
  source 1..80: mol_type = other DNA
cagaggagcagcgacgacaacaagctggcttacttcctcctgacactctgcagcctagctggcctggtggctgccaacga

SEQ ID NO: 17456 - DNA, 80 bp, synthetic construct
  misc_feature 1..80: note = Synthetic: >NC_005062.1-cand-6910-6989
  source 1..80: mol_type = other DNA
gatgggattcctggaaaagaccaaggcagatttatctgctgtgctatggagtgaacgtgaagagcccagagtgtggagcg

SEQ ID NO: 17457 - DNA, 80 bp, synthetic construct
  misc_feature 1..80: note = Synthetic: >NC_005062.1-cand-7030-7109
  source 1..80: mol_type = other DNA
aacttacgtgctggtggtctcacttttcacaccatacatcattcaccaactacagacaagaattcagcagctagtcaaca

SEQ ID NO: 17458 - DNA, 80 bp, synthetic construct
  misc_feature 1..80: note = Synthetic: >NC_005062.1-cand-7070-7149
  source 1..80: mol_type = other DNA
attcaccaactacagacaagaattcagcagctagtcaacagtgctgttgcgtcgggtgcgcaggccatgcgagatcttgg

SEQ ID NO: 17459 - DNA, 80 bp, synthetic construct
  misc_feature 1..80: note = Synthetic: >NC_005062.1-cand-7160-7239
  source 1..80: mol_type = other DNA
cctttctttggagtggctggacacgtcctgactctcggagtggtatccctagtgggagcgacaccaacctccttggtggt

SEQ ID NO: 17460 - DNA, 80 bp, synthetic construct
  misc_feature 1..80: note = Synthetic: >NC_005062.1-cand-7230-7309
  source 1..80: mol_type = other DNA
ccttggtggtgggcgtaggactagcagcttttcacctggccatcgtggtgtccggcctggaggctgagctgacccagaga

SEQ ID NO: 17461 - DNA, 80 bp, synthetic construct
  misc_feature 1..80: note = Synthetic: >NC_005062.1-cand-7300-7379
  source 1..80: mol_type = other DNA
gacccagagagcccacaaagttttcttctcggcaatggtacgcaatcccatggtggacggagatgtcatcaacccatttg

SEQ ID NO: 17462 - DNA, 80 bp, synthetic construct
  misc_feature 1..80: note = Synthetic: >NC_005062.1-cand-7390-7469
  source 1..80: mol_type = other DNA
agtgaaacctgccctgtatgaaaggaagatgagcttgatactggcgatgatcctgtgtttcatgtctgtggttttgaacc

SEQ ID NO: 17463 - DNA, 80 bp, synthetic construct
  misc_feature 1..80: note = Synthetic: >NC_005062.1-cand-7470-7549
  source 1..80: mol_type = other DNA
gaacggtgcccgcagttacggaggcatcggctgtaggactggcagcagcagggcagcttatcaggcctgaggctgacacg

SEQ ID NO: 17464 - DNA, 80 bp, synthetic construct
  misc_feature 1..80: note = Synthetic: >NC_005062.1-cand-7510-7589
  source 1..80: mol_type = other DNA
ggcagcagcagggcagcttatcaggcctgaggctgacacgctctggaccatgccggtggcttgtgggctgagtggtgtgg

SEQ ID NO: 17465 - DNA, 80 bp, synthetic construct
  misc_feature 1..80: note = Synthetic: >NC_005062.1-cand-7630-7709
  source 1..80: mol_type = other DNA
gctatggctgagaacttccggaactagacgcggtggttctgagggagacactcttggtgatctctggaagaggaggctga

SEQ ID NO: 17466 - DNA, 80 bp, synthetic construct
  misc_feature 1..80: note = Synthetic: >NC_005062.1-cand-7710-7789
  source 1..80: mol_type = other DNA
acaactgcaccaaagaggagttcttcgcctaccggcgcactggcattttggaaactgaacgtgacaaggctagagaattg

SEQ ID NO: 17467 - DNA, 80 bp, synthetic construct
  misc_feature 1..80: note = Synthetic: >NC_005062.1-cand-7790-7869
  source 1..80: mol_type = other DNA
ctcaagaagggtgagaccaacatgggcctggcagtgtcgagaggtacagcaaaacttgcctggcttgaggagcgcggtta

SEQ ID NO: 17468 - DNA, 80 bp, synthetic construct
  misc_feature 1..80: note = Synthetic: >NC_005062.1-cand-7870-7949
  source 1..80: mol_type = other DNA
cgtgaacctcaaaggcgaagtggtggacctcggctgtggaagaggaggctggtcctactacgcagcctcccggcctgcgg

SEQ ID NO: 17469 - DNA, 80 bp, synthetic construct
  misc_feature 1..80: note = Synthetic: >NC_005062.1-cand-7960-8039
  source 1..80: mol_type = other DNA
caaggcatacacaattggagggaaaggacatgaggtcccgagaatggtgacaagcctgggttggaatttaatcaagttta

SEQ ID NO: 17470 - DNA, 80 bp, synthetic construct
  misc_feature 1..80: note = Synthetic: >NC_005077.1-cand-1180-1259
  source 1..80: mol_type = other DNA
gttggctggtcagtaatggttcctatttgaatgagagtgattttagaaatgagtggatcttggagagtgatcacctaata

SEQ ID NO: 17471 - DNA, 80 bp, synthetic construct
  misc_feature 1..80: note = Synthetic: >NC_005077.1-cand-1300-1379
  source 1..80: mol_type = other DNA
agactcccctaacactggttgatctatgtttctggagtgcaatctttttcaccacaagtctctttttacacctggttggg

SEQ ID NO: 17472 - DNA, 80 bp, synthetic construct
  misc_feature 1..80: note = Synthetic: >NC_005077.1-cand-1340-1419
  source 1..80: mol_type = other DNA
aatctttttcaccacaagtctctttttacacctggttgggttcccaacacatagacatatacagggtgacccgtgccctt

SEQ ID NO: 17473 - DNA, 80 bp, synthetic construct
  misc_feature 1..80: note = Synthetic: >NC_005077.1-cand-1430-1509
  source 1..80: mol_type = other DNA
gctcgatagaaatggtgcttgcaggtgtggcaggtttcaaaaacttggaaaacaagtaacctggaagagaaagcattgat

SEQ ID NO: 17474 - DNA, 80 bp, synthetic construct
  misc_feature 1..80: note = Synthetic: >NC_005077.1-cand-1520-1599
  source 1..80: mol_type = other DNA
ctccagctctgtcggcccggaaacccgggccgacagagcgccccccagtccgcggcaatgcccgcggactgggagggcat

SEQ ID NO: 17475 - DNA, 80 bp, synthetic construct
  misc_feature 1..80: note = Synthetic: >NC_005077.1-cand-1610-1689
  source 1..80: mol_type = other DNA
cacaaatgcgctcttggcttggaacactaatgtgtttggtagcagttgaatgggaatggtgtcgggaagatgaccatcaa

SEQ ID NO: 17476 - DNA, 80 bp, synthetic construct
  misc_feature 1..80: note = Synthetic: >NC_005077.1-cand-1690-1769
  source 1..80: mol_type = other DNA
gaacagactgaaacatgatgcaatcgagaagagcacagtgtggctccttcgtggagttagcctccttgtttttcttctta

SEQ ID NO: 17477 - DNA, 80 bp, synthetic construct
  misc_feature 1..80: note = Synthetic: >NC_005077.1-cand-1770-1849
  source 1..80: mol_type = other DNA
ggaacaatgacaccattgtgtgctctgcagaggtggccaaatttttcccaaacttcctgttcaaaaattctggactgttc

SEQ ID NO: 17478 - DNA, 80 bp, synthetic construct
  misc_feature 1..80: note = Synthetic: >NC_005077.1-cand-1850-1929
  source 1..80: mol_type = other DNA
cccagtcagtctgacatcaacaagttttaaatctttccttccatgtatgtcgaaaagctttttgatgtcatctgcccctt

SEQ ID NO: 17479 - DNA, 80 bp, synthetic construct
  misc_feature 1..80: note = Synthetic: >NC_005077.1-cand-1940-2019
  source 1..80: mol_type = other DNA
aactgaaccctgtggcaataagccaatgacgtaactcaatagaccaggttgagcatcttcaaggtcctttaatagtatgc

SEQ ID NO: 17480 - DNA, 80 bp, synthetic construct
  misc_feature 1..80: note = Synthetic: >NC_005077.1-cand-2020-2099
  source 1..80: mol_type = other DNA
cgtgtgagtgcctacttccatttttaaaacctttctcatcatgaggttttctgaaacagtgtacatagtttcctgaagaa

SEQ ID NO: 17481 - DNA, 80 bp, synthetic construct
  misc_feature 1..80: note = Synthetic: >NC_005077.1-cand-2100-2179
  source 1..80: mol_type = other DNA
ggttggaaaactgccaactccacaggatcagttggcgggccttcaatgtccatccagattgtgtctgatgaatctaattt

SEQ ID NO: 17482 - DNA, 80 bp, synthetic construct
  misc_feature 1..80: note = Synthetic: >NC_005077.1-cand-2180-2259
  source 1..80: mol_type = other DNA
cctcattgcttcctttacgatcgcttcttgcatttcagaaagatttgatagtctgatattttgtccattcttttcaggag

SEQ ID NO: 17483 - DNA, 80 bp, synthetic construct
  misc_feature 1..80: note = Synthetic: >NC_005077.1-cand-2270-2349
  source 1..80: mol_type = other DNA
tgttacaggtcttgcatttaaatcgacacttgtgttgtcccaagacctcccgagtatttgtgaccttgatccaatatatg

SEQ ID NO: 17484 - DNA, 80 bp, synthetic construct
  misc_feature 1..80: note = Synthetic: >NC_005077.1-cand-2350-2429
  source 1..80: mol_type = other DNA
gccaaccctccccagacaaacacagcttgtagagaaggttctcataagggtttctattgcccggtctctcatctatgaac

SEQ ID NO: 17485 - DNA, 80 bp, synthetic construct
  misc_feature 1..80: note = Synthetic: >NC_005077.1-cand-2430-2509
  source 1..80: mol_type = other DNA
atgccttctcttcttttgacgttcaatgcggccttgacaatagaagagaagttgttgggtgtgacttttattgtctccag

SEQ ID NO: 17486 - DNA, 80 bp, synthetic construct
  misc_feature 1..80: note = Synthetic: >NC_005079.1-cand-2230-2309
  source 1..80: mol_type = other DNA
cccaataaaacctgaggcaacggatgactggaaagctgacttattaattgactcagcaaggatcttcttaactccttttg

SEQ ID NO: 17487 - DNA, 80 bp, synthetic construct
  misc_feature 1..80: note = Synthetic: >NC_005079.1-cand-2310-2389
  source 1..80: mol_type = other DNA
tgaagtttctggaaagtttggattgcaaggttttaattaaagttggcacttcctccctttcaagaactcttctacttgtc

SEQ ID NO: 17488 - DNA, 80 bp, synthetic construct
  misc_feature 1..80: note = Synthetic: >NC_005079.1-cand-2390-2469
  source 1..80: mol_type = other DNA
atcaactttgtcctcaaaactaacctaagatctccaaaacttgataaattcacccatctatagttcaacacgcgattaac

SEQ ID NO: 17489 - DNA, 80 bp, synthetic construct
  misc_feature 1..80: note = Synthetic: >NC_005079.1-cand-2470-2549
  source 1..80: mol_type = other DNA
ttcttgttcactgcaacctgcatactgtaaaaaaccagtcaaggcctcatcaccacctctaccaatcaaattgatcagat

SEQ ID NO: 17490 - DNA, 80 bp, synthetic construct
  misc_feature 1..80: note = Synthetic: >NC_005079.1-cand-2550-2629
  source 1..80: mol_type = other DNA
tctcctcaaatattctgccacgctttatatcattaaaaacctttctggcacagttcctaataaaagaggtttccttgtca

SEQ ID NO: 17491 - DNA, 80 bp, synthetic construct
  misc_feature 1..80: note = Synthetic: >NC_005079.1-cand-2630-2709
  source 1..80: mol_type = other DNA
tcatgaaagatagcttcaatctttctctgtagacggtaaccccttgagccatccacccagtctttcacatcttgatcttc

SEQ ID NO: 17492 - DNA, 80 bp, synthetic construct
  misc_feature 1..80: note = Synthetic: >NC_005079.1-cand-2730-2809
  source 1..80: mol_type = other DNA
ctccatatccggagtatctaattaattggttaactcgcttagatattcttgtcactattttggtgctgactccatttgca

SEQ ID NO: 17493 - DNA, 80 bp, synthetic construct
  misc_feature 1..80: note = Synthetic: >NC_005079.1-cand-2790-2869
  source 1..80: mol_type = other DNA
tggtgctgactccatttgcaatgcattgatcacagatggtatctatagtttctgacaattgtgtgggtgttttacacttt

SEQ ID NO: 17494 - DNA, 80 bp, synthetic construct
  misc_feature 1..80: note = Synthetic: >NC_005079.1-cand-2870-2949
  source 1..80: mol_type = other DNA
acattgtgtaaagctgcagcaacaaactttgtgagcaatggtgtttcttcacccatgacaaaaaatcttgatttgaactc

SEQ ID NO: 17495 - DNA, 80 bp, synthetic construct
  misc_feature 1..80: note = Synthetic: >NC_005079.1-cand-2980-3059
  source 1..80: mol_type = other DNA
gctgacaaacttattcaatttagatgacagaaactcatggaagcagatcatctcgagccactccgcagcatctgaacccc

SEQ ID NO: 17496 - DNA, 80 bp, synthetic construct
  misc_feature 1..80: note = Synthetic: >NC_005079.1-cand-3030-3109
  source 1..80: mol_type = other DNA
tctcgagccactccgcagcatctgaacccccttctatatccagagaaggtgtcttgataagagtgatctgatcgtcacta

SEQ ID NO: 17497 - DNA, 80 bp, synthetic construct
  misc_feature 1..80: note = Synthetic: >NC_005079.1-cand-3110-3189
  source 1..80: mol_type = other DNA
gaggtatatgacacagggattacatcatacaaaagatcgagtgcataacacaaaaattgctctgtgattaatccatacaa

SEQ ID NO: 17498 - DNA, 80 bp, synthetic construct
  misc_feature 1..80: note = Synthetic: >NC_005079.1-cand-3190-3269
  source 1..80: mol_type = other DNA
atcagaagtgttatgtagtatcccttgccccatgtccaaaacagacataatgtgactaggaatctgaccatttaactgca

SEQ ID NO: 17499 - DNA, 80 bp, synthetic construct
  misc_feature 1..80: note = Synthetic: >NC_005079.1-cand-3270-3349
  source 1..80: mol_type = other DNA
tggtctgatggaagaattcttcactcaaactggtggaaccgcagcccatcaatccaagggacctttttagctttccaata

SEQ ID NO: 17500 - DNA, 80 bp, synthetic construct
  misc_feature 1..80: note = Synthetic: >NC_005079.1-cand-3350-3429
  source 1..80: mol_type = other DNA
cagtaggcttcagccacattgataggcacttctacaactttgtgaaggtgccatttcagtatacttttaacagaatcaag

SEQ ID NO: 17501 - DNA, 80 bp, synthetic construct
  misc_feature 1..80: note = Synthetic: >NC_005079.1-cand-3460-3539
  source 1..80: mol_type = other DNA
caattccagcatttgtaataatgccaggaaaagtgcaggactcattgttggaccccattttgagtgatcataagaacatg

SEQ ID NO: 17502 - DNA, 80 bp, synthetic construct
  misc_feature 1..80: note = Synthetic: >NC_005226.1-cand-1110-1189
  source 1..80: mol_type = other DNA
agcaaactgctaatataaaggaacctggcacttttaagctgaatttatcatcaatggatcctaaggccaaggcactgtta

SEQ ID NO: 17503 - DNA, 80 bp, synthetic construct
  misc_feature 1..80: note = Synthetic: >NC_005226.1-cand-1190-1269
  source 1..80: mol_type = other DNA
gatgttatctcaaagaactcaaaaaaaggtgtgtttggtgaggtaattgatagtatagagataagtagtttaatacagca

SEQ ID NO: 17504 - DNA, 80 bp, synthetic construct
  misc_feature 1..80: note = Synthetic: >NC_005226.1-cand-1270-1349
  source 1..80: mol_type = other DNA
aaatgagtgttctaaagtcatagaaaagatcctatctgatttggagatcaatgttggtgaaacaagccaaggcctagata

SEQ ID NO: 17505 - DNA, 80 bp, synthetic construct
  misc_feature 1..80: note = Synthetic: >NC_005226.1-cand-1350-1429
  source 1..80: mol_type = other DNA
atcccaagaggacaacaggtgttgatgatatcttaaagaagttttatgacaatgagttggtcaagtatatgttacatata

SEQ ID NO: 17506 - DNA, 80 bp, synthetic construct
  misc_feature 1..80: note = Synthetic: >NC_005226.1-cand-1460-1539
  source 1..80: mol_type = other DNA
catttgttaagagatataacagaatgtctaattgcacatgctggcttgaaaagatcaaagtactggtcaatacatgggtt

SEQ ID NO: 17507 - DNA, 80 bp, synthetic construct
  misc_feature 1..80: note = Synthetic: >NC_005226.1-cand-1510-1589
  source 1..80: mol_type = other DNA
aagatcaaagtactggtcaatacatgggttctctcatggtggaatattattgatgatcttgccatcaaaatcactagaag

SEQ ID NO: 17508 - DNA, 80 bp, synthetic construct
  misc_feature 1..80: note = Synthetic: >NC_005226.1-cand-1590-1669
  source 1..80: mol_type = other DNA
ttgcaggttcttatattcggttttttactgtttttaaggatggattaggtttaattgactatgaaaacttagattcaact

SEQ ID NO: 17509 - DNA, 80 bp, synthetic construct
  misc_feature 1..80: note = Synthetic: >NC_005226.1-cand-1670-1749
  source 1..80: mol_type = other DNA
gtggtaattgatggtgtaagttggtgtttcagcaaggttatgagtttagacctaaatcgactattggctctgaatatatc

SEQ ID NO: 17510 - DNA, 80 bp, synthetic construct
  misc_feature 1..80: note = Synthetic: >NC_005226.1-cand-1750-1829
  source 1..80: mol_type = other DNA
ttttgagaagacactattagcaacagctacatggtttcaatactatacagaggaccaaggtcactttcccttacaacatg

SEQ ID NO: 17511 - DNA, 80 bp, synthetic construct
  misc_feature 1..80: note = Synthetic: >NC_005226.1-cand-1830-1909
  source 1..80: mol_type = other DNA
cattgaggtctgtttttgcattccactttttactgactgtgacacaaaagatgaaattatgtgctatctttgataattta

SEQ ID NO: 17512 - DNA, 80 bp, synthetic construct
  misc_feature 1..80: note = Synthetic: >NC_005226.1-cand-1920-1999
  source 1..80: mol_type = other DNA
tccctgcagtgacctcgctttattcaggatataaaccgttgattgtaaagttttttgaaaggccatttaagagtgcactt

SEQ ID NO: 17513 - DNA, 80 bp, synthetic construct
  misc_feature 1..80: note = Synthetic: >NC_005226.1-cand-2010-2089
  source 1..80: mol_type = other DNA
tgtatactattataaaaacactacttgtaagccttgcacaaaataataaaatccgcttctattcaaaagttcggctattg

SEQ ID NO: 17514 - DNA, 80 bp, synthetic construct
  misc_feature 1..80: note = Synthetic: >NC_005226.1-cand-2090-2169
  source 1..80: mol_type = other DNA
gggcttacagtagaccaatcaaccattggtgcaagtggagtttacccttctttaatgtcaagagtggtttataaacatta

SEQ ID NO: 17515 - DNA, 80 bp, synthetic construct
  misc_feature 1..80: note = Synthetic: >NC_005226.1-cand-2170-2249
  source 1..80: mol_type = other DNA
taaaagtttaatctcagaagcgactacctgttttttcttatttgagaagggtcttcatggcaatcttactgaggaagcaa

SEQ ID NO: 17516 - DNA, 80 bp, synthetic construct
  misc_feature 1..80: note = Synthetic: >NC_005226.1-cand-2250-2329
  source 1..80: mol_type = other DNA
aaatacatttagagacagtcgaatgggctaggaaatttagtgacaaagagaaggcttatggtgcatatattatggaggaa

SEQ ID NO: 17517 - DNA, 80 bp, synthetic construct
  misc_feature 1..80: note = Synthetic: >NC_005226.1-cand-2330-2409
  source 1..80: mol_type = other DNA
ggttacacaataaaggatgtagtagatggcaatattccagtagaacaacaattattttgtcaagaagtagtagagttatc

SEQ ID NO: 17518 - DNA, 80 bp, synthetic construct
  misc_feature 1..80: note = Synthetic: >NC_005226.1-cand-3710-3789
  source 1..80: mol_type = other DNA
ctagggattgttttgtgcacaagcaaagttgaacgattgtatggcacagctacagggatggtaaataatccaacttcctt

SEQ ID NO: 17519 - DNA, 80 bp, synthetic construct
  misc_feature 1..80: note = Synthetic: >NC_005226.1-cand-3790-3869
  source 1..80: mol_type = other DNA
tttaaaagtagaaagatcatcaatacctatcccattaggtggtgatggctcgatgtctatcatggaacttgctacagcag

SEQ ID NO: 17520 - DNA, 80 bp, synthetic construct
  misc_feature 1..80: note = Synthetic: >NC_005226.1-cand-3870-3949
  source 1..80: mol_type = other DNA
ggataggcatggctgacaagaatgtcttaaagaatgcatatatttcgtttaaacatactaaaagagatagtgatcgttat

SEQ ID NO: 17521 - DNA, 80 bp, synthetic construct
  misc_feature 1..80: note = Synthetic: >NC_005226.1-cand-3960-4039
  source 1..80: mol_type = other DNA
tatttaaattccttatgagtctaagtgatgatgtattccaacacgatcgattaggtgaattcagctttgtgggcaaagtt

SEQ ID NO: 17522 - DNA, 80 bp, synthetic construct
  misc_feature 1..80: note = Synthetic: >NC_005226.1-cand-4040-4119
  source 1..80: mol_type = other DNA
cagtggaaagtctttactcctaaatcagagtttgaattctttgatcaatattcgtcgaagtacttgcagttatggactga

SEQ ID NO: 17523 - DNA, 80 bp, synthetic construct
  misc_feature 1..80: note = Synthetic: >NC_005226.1-cand-4120-4199
  source 1..80: mol_type = other DNA
acaacatcctgtctatgactatatcattccgcgtgggagggataatctattagtctatttggttagaaagttaaatgacc

SEQ ID NO: 17524 - DNA, 80 bp, synthetic construct
  misc_feature 1..80: note = Synthetic: >NC_005226.1-cand-4200-4279
  source 1..80: mol_type = other DNA
caagtatagtgacagctatgactatgcaatcaccacttcaactaagattcaggatgcaagctaagcagcatatgaaagta

SEQ ID NO: 17525 - DNA, 80 bp, synthetic construct
  misc_feature 1..80: note = Synthetic: >NC_005226.1-cand-4290-4369
  source 1..80: mol_type = other DNA
acggtgagtgggtaacttttagggaggtacttgcagctgctgattcatttgcacagagtttcaaaccatcacaaagtgat

SEQ ID NO: 17526 - DNA, 80 bp, synthetic construct
  misc_feature 1..80: note = Synthetic: >NC_005226.1-cand-4370-4449
  source 1..80: mol_type = other DNA
atggaattgtttcaaactctagttaattgtactttttcaaaggaatatgcatggagggatttcttgaatgaggtgaagtg

SEQ ID NO: 17527 - DNA, 80 bp, synthetic construct
  misc_feature 1..80: note = Synthetic: >NC_005226.1-cand-4450-4529
  source 1..80: mol_type = other DNA
tgaagtgttaacaacaagacaagtgcatagaccaaaagttgctagaacctttacagttaaagaaagagatcaagcaattc

SEQ ID NO: 17528 - DNA, 80 bp, synthetic construct
  misc_feature 1..80: note = Synthetic: >NC_005226.1-cand-4540-4619
  source 1..80: mol_type = other DNA
aacagctgtaattggatataaatacgctaataaagctgatgaaataagtgatgtgttggacagtgcagtacatccagatt

SEQ ID NO: 17529 - DNA, 80 bp, synthetic construct
  misc_feature 1..80: note = Synthetic: >NC_005226.1-cand-4620-4699
  source 1..80: mol_type = other DNA
ccctttcaacagacttacaggtaatgagggagggtgtctatagagaactgggtctggatataaactatcctaatgttctt

SEQ ID NO: 17530 - DNA, 80 bp, synthetic construct
  misc_feature 1..80: note = Synthetic: >NC_005226.1-cand-4700-4779
  source 1..80: mol_type = other DNA
aaacgtgtagctccacttttgtataaatcaggaaagtcaagagtggtaatagtacagggaaatatagagggtactgcaga

SEQ ID NO: 17531 - DNA, 80 bp, synthetic construct
  misc_feature 1..80: note = Synthetic: >NC_005226.1-cand-4780-4859
  source 1..80: mol_type = other DNA
gtcaatttgcagttattggttgaaaactatgtctttagttaagaccatcaaagttagacccaaaaaagaagtgttgaagg

SEQ ID NO: 17532 - DNA, 80 bp, synthetic construct
  misc_feature 1..80: note = Synthetic: >NC_005226.1-cand-4900-4979
  source 1..80: mol_type = other DNA
aactcaccttgcagctacaagattatgtattgatgtttggaggtggtgtaaagctaatgaacaagatcctaaggcatggt

SEQ ID NO: 17533 - DNA, 80 bp, synthetic construct
  misc_feature 1..80: note = Synthetic: >NC_005226.1-cand-4940-5019
  source 1..80: mol_type = other DNA
aggtggtgtaaagctaatgaacaagatcctaaggcatggttaagtgctctttactttgaaggtaggactttgatgcaatg

SEQ ID NO: 17534 - DNA, 80 bp, synthetic construct
  misc_feature 1..80: note = Synthetic: >NC_005831.2-cand-2260-2339
  source 1..80: mol_type = other DNA
ttaaggactgttataatgtttgggagcaattctgcattgataattgtggtgagccatggtttttgactgattataatgct

SEQ ID NO: 17535 - DNA, 80 bp, synthetic construct
  misc_feature 1..80: note = Synthetic: >NC_005831.2-cand-2340-2419
  source 1..80: mol_type = other DNA
atcttgcagagtaataaccctcaatgtgctattgttcaagcatcagagtctaaagttttgcttgagaggtttttacctaa

SEQ ID NO: 17536 - DNA, 80 bp, synthetic construct
  misc_feature 1..80: note = Synthetic: >NC_005831.2-cand-2420-2499
  source 1..80: mol_type = other DNA
gtgtcctgaaatactgttgagtattgatgatggccatttatggaatctttttgttgaaaagtttaattttgttacagatt

SEQ ID NO: 17537 - DNA, 80 bp, synthetic construct
  misc_feature 1..80: note = Synthetic: >NC_005831.2-cand-2500-2579
  source 1..80: mol_type = other DNA
ggttaaaaactcttaagcttacacttacttctaatggtcttttaggtaattgtgccaaacgttttagacgtgttttggta

SEQ ID NO: 17538 - DNA, 80 bp, synthetic construct
  misc_feature 1..80: note = Synthetic: >NC_005831.2-cand-2580-2659
  source 1..80: mol_type = other DNA
aaattgcttgatgtctataatggttttcttgaaactgtctgtagtgtcgcatacactgctggtgtttgcatcaaatatta

SEQ ID NO: 17539 - DNA, 80 bp, synthetic construct
  misc_feature 1..80: note = Synthetic: >NC_005831.2-cand-2660-2739
  source 1..80: mol_type = other DNA
tgctgttaatgttccatatgtagttattagtggttttgtaagtcgtgtaattcgtagagaaaggtgtgacatgacttttc

SEQ ID NO: 17540 - DNA, 80 bp, synthetic construct
  misc_feature 1..80: note = Synthetic: >NC_005831.2-cand-2740-2819
  source 1..80: mol_type = other DNA
cttgtgttagttgtgtcacctttttctatgaatttttagacacttgttttggtgttagtaaacctaatgccattgatgtt

SEQ ID NO: 17541 - DNA, 80 bp, synthetic construct
  misc_feature 1..80: note = Synthetic: >NC_005831.2-cand-2820-2899
  source 1..80: mol_type = other DNA
gaacatttagagcttaaagaaactgtttttgttgaacctaaggatggtggtcaattttttgtttctggtgattatctttg

SEQ ID NO: 17542 - DNA, 80 bp, synthetic construct
  misc_feature 1..80: note = Synthetic: >NC_005831.2-cand-2900-2979
  source 1..80: mol_type = other DNA
gtatgttgtagatgacatttattatccagcttcatgtaatggtgtattgcctgttgcttttacaaaattagctggtggta

SEQ ID NO: 17543 - DNA, 80 bp, synthetic construct
  misc_feature 1..80: note = Synthetic: >NC_005831.2-cand-2970-3049
  source 1..80: mol_type = other DNA
gctggtggtaaaatatctttttctgatgatgttatagttcatgatgttgaacctacccataaagtcaagctcatatttga

SEQ ID NO: 17544 - DNA, 80 bp, synthetic construct
  misc_feature 1..80: note = Synthetic: >NC_005831.2-cand-3050-3129
  source 1..80: mol_type = other DNA
gtttgaagatgatgttgttaccagtctttgtaagaagagttttggtaagtccattatttatacaggtgattgggaaggtc

SEQ ID NO: 17545 - DNA, 80 bp, synthetic construct
  misc_feature 1..80: note = Synthetic: >NC_005831.2-cand-3130-3209
  source 1..80: mol_type = other DNA
tacatgaagttcttacatctgcaatgaatgtcattgggcaacatattaagttgccacaattttatatttatgatgaagag

SEQ ID NO: 17546 - DNA, 80 bp, synthetic construct
  misc_feature 1..80: note = Synthetic: >NC_005831.2-cand-3210-3289
  source 1..80: mol_type = other DNA
ggtggttatgatgtttctaaaccagttatgatttcacaatggcctattagtaatgatagtaatggttgtgttgttgaagc

SEQ ID NO: 17547 - DNA, 80 bp, synthetic construct
  misc_feature 1..80: note = Synthetic: >NC_005831.2-cand-3290-3369
  source 1..80: mol_type = other DNA
gagcactgattttcatcaattagaatgtattgttgatgactctgttagagaagaggttgatataattgaacaaccttttg

SEQ ID NO: 17548 - DNA, 80 bp, synthetic construct
  misc_feature 1..80: note = Synthetic: >NC_005831.2-cand-3370-3449
  source 1..80: mol_type = other DNA
aagaagttgaacatgtgctctcaattaagcaacctttttctttttcttttagagatgaattgggtgttcgtgttttagat

SEQ ID NO: 17549 - DNA, 80 bp, synthetic construct
  misc_feature 1..80: note = Synthetic: >NC_005831.2-cand-3450-3529
  source 1..80: mol_type = other DNA
caatctgataataattgttggattagtaccacacttgtacagttgcaacttacaaagcttttggatgattctattgagat

SEQ ID NO: 17550 - DNA, 80 bp, synthetic construct
  misc_feature 1..80: note = Synthetic: >NC_006313.1-cand-310-389
  source 1..80: mol_type = other DNA
gaagagctccccacatccattgtggtgcccatcgaaccaagtgctccacctccagaagactaaatcgtgtccgggtacac

SEQ ID NO: 17551 - DNA, 80 bp, synthetic construct
  misc_feature 1..80: note = Synthetic: >NC_006313.1-cand-440-519
  source 1..80: mol_type = other DNA
ggtttactcaatgtcttcaacggactgctgctgtctaaatagtctgcaggtaacacccttgagccttaagtttcctagat

SEQ ID NO: 17552 - DNA, 80 bp, synthetic construct
  misc_feature 1..80: note = Synthetic: >NC_006313.1-cand-490-569
  source 1..80: mol_type = other DNA
taacacccttgagccttaagtttcctagattatcagcaacaacaatgtctttgtaatgtttgctgaatgcaaccttaaaa

SEQ ID NO: 17553 - DNA, 80 bp, synthetic construct
  misc_feature 1..80: note = Synthetic: >NC_006313.1-cand-570-649
  source 1..80: mol_type = other DNA
ctggcaaattcaacccaatctccaaactgagcaattgattccaacaaaacaactctgtgaagatcataaatcatttcaaa

SEQ ID NO: 17554 - DNA, 80 bp, synthetic construct
  misc_feature 1..80: note = Synthetic: >NC_006313.1-cand-650-729
  source 1..80: mol_type = other DNA
gtctgtttgatcaaaattaatgatttgcttggtagccttcagataaggccagagcccatgtagaagactcccaatctccc

SEQ ID NO: 17555 - DNA, 80 bp, synthetic construct
  misc_feature 1..80: note = Synthetic: >NC_006313.1-cand-740-819
  source 1..80: mol_type = other DNA
cagtgccccaagtgccttaattatggtgtcaccaaaaatctccacctttaagtaagacaacttctgattatcaatcataa

SEQ ID NO: 17556 - DNA, 80 bp, synthetic construct
  misc_feature 1..80: note = Synthetic: >NC_006313.1-cand-810-889
  source 1..80: mol_type = other DNA
tcaatcataaacatgccgttgtggaggacaattggattgccctggtcctcaggaccaactaatgagtagcagaatttgtc

SEQ ID NO: 17557 - DNA, 80 bp, synthetic construct
  misc_feature 1..80: note = Synthetic: >NC_006313.1-cand-890-969
  source 1..80: mol_type = other DNA
acctagttcatcatgaaatttggtgaaatcaagtgttacagattccatcacattgtgatcattggtcgcagctaaatcgt

SEQ ID NO: 17558 - DNA, 80 bp, synthetic construct
  misc_feature 1..80: note = Synthetic: >NC_006313.1-cand-970-1049
  source 1..80: mol_type = other DNA
tatccattagaatctgagctaaattcactgccttcttccctctcagcaaaggcaaaactgaaaccatggttacaccatcc

SEQ ID NO: 17559 - DNA, 80 bp, synthetic construct
  misc_feature 1..80: note = Synthetic: >NC_006313.1-cand-1050-1129
  source 1..80: mol_type = other DNA
aactgcaggtgtcctccatttacaccagaagcaaacaactccaaggattccaccaaagccactgggtctttagtgaagca

SEQ ID NO: 17560 - DNA, 80 bp, synthetic construct
  misc_feature 1..80: note = Synthetic: >NC_006313.1-cand-1130-1209
  source 1..80: mol_type = other DNA
gtcctcaagtggtagagcacagagtgccttaagagtataaacaatcttcctactaatgttgtacttagtagaatttctca

SEQ ID NO: 17561 - DNA, 80 bp, synthetic construct
  misc_feature 1..80: note = Synthetic: >NC_006313.1-cand-1210-1289
  source 1..80: mol_type = other DNA
tatggacaatttgtatgtctaatgtgagttttattgattcactagtgagagtctttaagatgtctgataaatcattcttg

SEQ ID NO: 17562 - DNA, 80 bp, synthetic construct
  misc_feature 1..80: note = Synthetic: >NC_006313.1-cand-1290-1369
  source 1..80: mol_type = other DNA
gatggatgatttgatctgaattcttggaatgatccataggaattcagtgtgattatttcttctgcgaggttggaacacac

SEQ ID NO: 17563 - DNA, 80 bp, synthetic construct
  misc_feature 1..80: note = Synthetic: >NC_006313.1-cand-1370-1449
  source 1..80: mol_type = other DNA
ataacccattgttatgtcatcagctgtcatggccctattcagatgccctgtttttataaacaatgtgaagtcagtcaatt

SEQ ID NO: 17564 - DNA, 80 bp, synthetic construct
  misc_feature 1..80: note = Synthetic: >NC_006313.1-cand-1450-1529
  source 1..80: mol_type = other DNA
ctcccaaatctatctgatcttcttcctctatacttaaaacctcattaaaccagaaaaatgtctttaatgttgacgtagaa

SEQ ID NO: 17565 - DNA, 80 bp, synthetic construct
  misc_feature 1..80: note = Synthetic: >NC_006313.1-cand-1540-1619
  source 1..80: mol_type = other DNA
gatcaatcatcgaagaaaacaaaaattgaactttaaaattgtagcaaacttgctgaggacttaaaccaagctcatggtcc

SEQ ID NO: 17566 - DNA, 80 bp, synthetic construct
  misc_feature 1..80: note = Synthetic: >NC_006313.1-cand-6710-6789
  source 1..80: mol_type = other DNA
catatcagccttccatttcttttcaaagtcgtctggatttactctaacaaaagtctccaacaagatgagagtctttccca

SEQ ID NO: 17567 - DNA, 80 bp, synthetic construct
  misc_feature 1..80: note = Synthetic: >NC_006313.1-cand-6790-6869
  source 1..80: mol_type = other DNA
tcaggttgtaaccatctggcaccaccttaggcagagttggacagagaatgccaccatcggaaagaatcacatctataaat

SEQ ID NO: 17568 - DNA, 80 bp, synthetic construct
  misc_feature 1..80: note = Synthetic: >NC_006313.1-cand-6870-6949
  source 1..80: mol_type = other DNA
ttttgttcgtaattatgatggcatgcatttaccttacaggactccaactccaccaacaaagataaaagtttaaacccctc

SEQ ID NO: 17569 - DNA, 80 bp, synthetic construct
  misc_feature 1..80: note = Synthetic: >NC_006313.1-cand-6950-7029
  source 1..80: mol_type = other DNA
aattaacactgatcttggatgcacttgtgaaagtaatgcgtccttttgatatgcaagctcaattacatctggtatggttt

SEQ ID NO: 17570 - DNA, 80 bp, synthetic construct
  misc_feature 1..80: note = Synthetic: >NC_006313.1-cand-6990-7069
  source 1..80: mol_type = other DNA
tccttttgatatgcaagctcaattacatctggtatggtttttctaaccaaatcctttaattcagacagggttcctaagag

SEQ ID NO: 17571 - DNA, 80 bp, synthetic construct
  misc_feature 1..80: note = Synthetic: >NC_006572.1-cand-0-79
  source 1..80: mol_type = other DNA
ccggggatcctaggcaattttgtggatctttgctgatacttcattctgcactcaaagccgcatccggcaagagtcatggg

SEQ ID NO: 17572 - DNA, 80 bp, synthetic construct
  misc_feature 1..80: note = Synthetic: >NC_006572.1-cand-80-159
  source 1..80: mol_type = other DNA
gaaaacgcagtccaagggacagcccagcacaaatctcctcaaggagacagaaccaaggcatccagtaataccagatgcca

SEQ ID NO: 17573 - DNA, 80 bp, synthetic construct
  misc_feature 1..80: note = Synthetic: >NC_006572.1-cand-210-289
  source 1..80: mol_type = other DNA
ttagtcaggtgcaacgatcactacctatgtttgaactgtcttacacttttacacacagtgtcagataggtgccccatctg

SEQ ID NO: 17574 - DNA, 80 bp, synthetic construct
  misc_feature 1..80: note = Synthetic: >NC_006572.1-cand-240-319
  source 1..80: mol_type = other DNA
ttgaactgtcttacacttttacacacagtgtcagataggtgccccatctgcaaacacaaactacccttcagactagagct

SEQ ID NO: 17575 - DNA, 80 bp, synthetic construct
  misc_feature 1..80: note = Synthetic: >NC_006572.1-cand-320-399
  source 1..80: mol_type = other DNA
ccagacccagccgacagcaccaccagaaatcccaccatcccaaaatcccccaccctacagcccctgaggcagaactccgc

SEQ ID NO: 17576 - DNA, 80 bp, synthetic construct
  misc_feature 1..80: note = Synthetic: >NC_006572.1-cand-360-439
  source 1..80: mol_type = other DNA
caaaatcccccaccctacagcccctgaggcagaactccgccccgaagcccctcccaaacacccctcccctcccccccggg

SEQ ID NO: 17577 - DNA, 80 bp, synthetic construct
  misc_feature 1..80: note = Synthetic: >NC_006572.1-cand-540-619
  source 1..80: mol_type = other DNA
ctgcacagcctccctcttaatctaaacttcccctctgaagactggatcatcagtgaagcctgcgatctactgtagcagag

SEQ ID NO: 17578 - DNA, 80 bp, synthetic construct
  misc_feature 1..80: note = Synthetic: >NC_006572.1-cand-560-639
  source 1..80: mol_type = other DNA
tctaaacttcccctctgaagactggatcatcagtgaagcctgcgatctactgtagcagagactatagcctttaaaatctg

SEQ ID NO: 17579 - DNA, 80 bp, synthetic construct
  misc_feature 1..80: note = Synthetic: >NC_006572.1-cand-640-719
  source 1..80: mol_type = other DNA
cccagaagtcaattccggagaacactctagtaaggaagttttcgtagccttcaggcatgcatcgtcccacaacccctata

SEQ ID NO: 17580 - DNA, 80 bp, synthetic construct
  misc_feature 1..80: note = Synthetic: >NC_006572.1-cand-720-799
  source 1..80: mol_type = other DNA
atatcaagttgtagccagtgtagtccttggtccattctggatctcagcatcttgctcaaagatctctccaagatttcgga

SEQ ID NO: 17581 - DNA, 80 bp, synthetic construct
  misc_feature 1..80: note = Synthetic: >NC_006572.1-cand-770-849
  source 1..80: mol_type = other DNA
cttgctcaaagatctctccaagatttcggaatgattctccattagctcaccaataaaaacattaagatcctggtcatgga

SEQ ID NO: 17582 - DNA, 80 bp, synthetic construct
  misc_feature 1..80: note = Synthetic: >NC_006572.1-cand-4730-4809
  source 1..80: mol_type = other DNA
tgcacacccagcagtaactaatggatctttaaacccacttaggtcatctcctttcttgaaaagagagccattgttaaaag

SEQ ID NO: 17583 - DNA, 80 bp, synthetic construct
  misc_feature 1..80: note = Synthetic: >NC_006572.1-cand-4810-4889
  source 1..80: mol_type = other DNA
aagacgtcatcattgagaagaattttcttgacacaccaggaactttataagatattctgttgttactcatactggtttct

SEQ ID NO: 17584 - DNA, 80 bp, synthetic construct
  misc_feature 1..80: note = Synthetic: >NC_006572.1-cand-4890-4969
  source 1..80: mol_type = other DNA
ttggataaaaatttgtttgctgattcaagcagcagcatcctttcatcttcatccccctcttcagatgggttgatgttaat

SEQ ID NO: 17585 - DNA, 80 bp, synthetic construct
  misc_feature 1..80: note = Synthetic: >NC_006572.1-cand-4970-5049
  source 1..80: mol_type = other DNA
actgtcaaactccaacttgggctccaaatacttctcaaagcacttaatctgatctgtcaacctatctggagtttccttag

SEQ ID NO: 17586 - DNA, 80 bp, synthetic construct
  misc_feature 1..80: note = Synthetic: >NC_006572.1-cand-5050-5129
  source 1..80: mol_type = other DNA
ttataaaatgacacatgtatgataggtttaacacaaacttaaatctattagtcaacatagtgctcaccccttcacccagg

SEQ ID NO: 17587 - DNA, 80 bp, synthetic construct
  misc_feature 1..80: note = Synthetic: >NC_006572.1-cand-5130-5209
  source 1..80: mol_type = other DNA
atgatgttgagaatgctcctcaccacactatacaagaggtgctccggctctgttatgagatcctccctcaacttttccat

SEQ ID NO: 17588 - DNA, 80 bp, synthetic construct
  misc_feature 1..80: note = Synthetic: >NC_006572.1-cand-5210-5289
  source 1..80: mol_type = other DNA
taactgcttatggtggaagtctgaaacaaaggccattatgaagtatcgcagaccttgcaagaacttctgtgctcttttgc

SEQ ID NO: 17589 - DNA, 80 bp, synthetic construct
  misc_feature 1..80: note = Synthetic: >NC_006572.1-cand-5290-5369
  source 1..80: mol_type = other DNA
tagggttcacaagtatgaggatcatggtgattttgagcaataattttaaagttttttgttgatctctgagttctatacat

SEQ ID NO: 17590 - DNA, 80 bp, synthetic construct
  misc_feature 1..80: note = Synthetic: >NC_006572.1-cand-5370-5449
  source 1..80: mol_type = other DNA
tcagacaaccaactcatcatggtgttgatagtctcatagataacacagtgtgagaaaattgcaggaaaaaacctttttgg

SEQ ID NO: 17591 - DNA, 80 bp, synthetic construct
  misc_feature 1..80: note = Synthetic: >NC_006572.1-cand-5450-5529
  source 1..80: mol_type = other DNA
atctgcatagaatgaacaaatctcccccttctcaggattgttaatggcataacattttgagcactctcctgttttctgat

SEQ ID NO: 17592 - DNA, 80 bp, synthetic construct
  misc_feature 1..80: note = Synthetic: >NC_006572.1-cand-5540-5619
  source 1..80: mol_type = other DNA
gaaattcccgcttcccatgataaagctttgattaaaagcttccttacaacgtacacgtttgtaccttgcagcaccatact

SEQ ID NO: 17593 - DNA, 80 bp, synthetic construct
  misc_feature 1..80: note = Synthetic: >NC_006572.1-cand-5620-5699
  source 1..80: mol_type = other DNA
cattttgcctcactttggctactgatgatgtcttcattgaattcaccaatgccaaagagatgctagatagtcttctcagg

SEQ ID NO: 17594 - DNA, 80 bp, synthetic construct
  misc_feature 1..80: note = Synthetic: >NC_006572.1-cand-5660-5739
  source 1..80: mol_type = other DNA
attcaccaatgccaaagagatgctagatagtcttctcaggtcttctatggaatcagcttccaactcaataagagggtagg

SEQ ID NO: 17595 - DNA, 80 bp, synthetic construct
  misc_feature 1..80: note = Synthetic: >NC_006572.1-cand-5780-5859
  source 1..80: mol_type = other DNA
ctgaatccctcttttctccattaacataagcctctcgtaactgtcctcctccagtatatcttcctctttaacataatctc

SEQ ID NO: 17596 - DNA, 80 bp, synthetic construct
  misc_feature 1..80: note = Synthetic: >NC_006572.1-cand-5860-5939
  source 1..80: mol_type = other DNA
taaagcacaaactggcagaggataatgcctctttggcctttgtgaggagtttgtttatgatgtcaaagaatataagctca

SEQ ID NO: 17597 - DNA, 80 bp, synthetic construct
  misc_feature 1..80: note = Synthetic: >NC_006572.1-cand-5940-6019
  source 1..80: mol_type = other DNA
gatctctgacacagagttcctacacctcccttcttcttcattgcactcaccattctcctttcaatccactttttaaggtc

SEQ ID NO: 17598 - DNA, 80 bp, synthetic construct
  misc_feature 1..80: note = Synthetic: >NC_007362.1-cand-480-559
  source 1..80: mol_type = other DNA
ggaggtcctcctttttcagaaatgtggtatggcttatcaaaaagaacagtgcatacccaacaataaagaggagctacaat

SEQ ID NO: 17599 - DNA, 80 bp, synthetic construct
  misc_feature 1..80: note = Synthetic: >NC_007362.1-cand-600-679
  source 1..80: mol_type = other DNA
accatcctaatgatgcggcagagcagacaaagctctatcaaaacccaaccacttacatttccgttggaacatcaacactg

SEQ ID NO: 17600 - DNA, 80 bp, synthetic construct
  misc_feature 1..80: note = Synthetic: >NC_007362.1-cand-650-729
  source 1..80: mol_type = other DNA
acttacatttccgttggaacatcaacactgaaccagagattggttccagaaatagctactagacccaaagtaaacgggca

SEQ ID NO: 17601 - DNA, 80 bp, synthetic construct
  misc_feature 1..80: note = Synthetic: >NC_007362.1-cand-740-819
  source 1..80: mol_type = other DNA
atggagttcttctggacaattttaaagccgaatgatgccatcaatttcgagagtaatggaaatttcattgctccagaata

SEQ ID NO: 17602 - DNA, 80 bp, synthetic construct
  misc_feature 1..80: note = Synthetic: >NC_007362.1-cand-760-839
  source 1..80: mol_type = other DNA
tttaaagccgaatgatgccatcaatttcgagagtaatggaaatttcattgctccagaatatgcatacaaaattgtcaaga

SEQ ID NO: 17603 - DNA, 80 bp, synthetic construct
  misc_feature 1..80: note = Synthetic: >NC_007362.1-cand-970-1049
  source 1..80: mol_type = other DNA
ccccaaatatgtgaaatcaaacagattagtccttgcgactggactcagaaatacccctcagagagagagaagaagaaaaa

SEQ ID NO: 17604 - DNA, 80 bp, synthetic construct
  misc_feature 1..80: note = Synthetic: >NC_007362.1-cand-1060-1139
  source 1..80: mol_type = other DNA
atttggagctatagcaggttttatagagggaggatggcagggaatggtagatggttggtatgggtaccaccatagcaatg

SEQ ID NO: 17605 - DNA, 80 bp, synthetic construct
  misc_feature 1..80: note = Synthetic: >NC_007362.1-cand-1150-1229
  source 1..80: mol_type = other DNA
tggatacgctgcagacaaagaatccactcaaaaggcaatagatggagtcaccaataaggtcaactcgatcattgacaaaa

SEQ ID NO: 17606 - DNA, 80 bp, synthetic construct
  misc_feature 1..80: note = Synthetic: >NC_007362.1-cand-1230-1309
  source 1..80: mol_type = other DNA
tgaacactcagtttgaggccgttggaagggaatttaataacttggaaaggaggatagagaatttaaacaagcagatggaa

SEQ ID NO: 17607 - DNA, 80 bp, synthetic construct
  misc_feature 1..80: note = Synthetic: >NC_007362.1-cand-1310-1389
  source 1..80: mol_type = other DNA
gacggattcctagatgtctggacttataatgctgaacttctggttctcatggaaaatgagagaactctagactttcatga

SEQ ID NO: 17608 - DNA, 80 bp, synthetic construct
  misc_feature 1..80: note = Synthetic: >NC_007362.1-cand-1400-1479
  source 1..80: mol_type = other DNA
aagaacctttatgacaaggtccgactacagcttagggataatgcaaaggagctgggtaatggttgtttcgagttctatca

SEQ ID NO: 17609 - DNA, 80 bp, synthetic construct
  misc_feature 1..80: note = Synthetic: >NC_007362.1-cand-1490-1569
  source 1..80: mol_type = other DNA
aatgaatgtatggaaagtgtaaaaaacggaacgtatgactacccgcagtattcagaagaagcaagactaaacagagagga

SEQ ID NO: 17610 - DNA, 80 bp, synthetic construct
  misc_feature 1..80: note = Synthetic: >NC_007362.1-cand-1580-1659
  source 1..80: mol_type = other DNA
gtaaaattggaatcaatgggaacttaccaaatactgtcaatttattcaacagtggcgagttccctagcactggcaatcat

SEQ ID NO: 17611 - DNA, 80 bp, synthetic construct
  misc_feature 1..80: note = Synthetic: >NC_007362.1-cand-1660-1739
  source 1..80: mol_type = other DNA
ggtagctggtctatctttatggatgtgctccaatggatcgttacaatgcagaatttgcatttaaatttgtgagttcagat

SEQ ID NO: 17612 - DNA, 80 bp, synthetic construct
  misc_feature 1..80: note = Synthetic: >NC_007363.1-cand-90-169
  source 1..80: mol_type = other DNA
atcgcgcagagacttgaggatgtctttgcaggaaagaacaccgatctcgaggctctcatggaatggctaaagacaagacc

SEQ ID NO: 17613 - DNA, 80 bp, synthetic construct
  misc_feature 1..80: note = Synthetic: >NC_007368.1-cand-440-519
  source 1..80: mol_type = other DNA
cgtgcattcaaatgacacagtacatgataggaccccttatcggaccctattgatgaatgaattaggtgttccatttcatc

SEQ ID NO: 17614 - DNA, 80 bp, synthetic construct
  misc_feature 1..80: note = Synthetic: >NC_007368.1-cand-610-689
  source 1..80: mol_type = other DNA
aaaatgcaactgctagcttcatttacaatgggaggcttgtagatagtattgtttcatggtccaaaaaaatcctcaggacc

SEQ ID NO: 17615 - DNA, 80 bp, synthetic construct
  misc_feature 1..80: note = Synthetic: >NC_007368.1-cand-690-769
  source 1..80: mol_type = other DNA
caggagtcagaatgcgtttgtatcaatggaacttgtacagtagtaatgactgatgggagtgcttcaggaaaagctgatac

SEQ ID NO: 17616 - DNA, 80 bp, synthetic construct
  misc_feature 1..80: note = Synthetic: >NC_007368.1-cand-800-879
  source 1..80: mol_type = other DNA
cattcatactagcacattgtcaggaagtgctcagcatgtcgaggagtgctcctgctatcctcgatatcctggtgtcagat

SEQ ID NO: 17617 - DNA, 80 bp, synthetic construct
  misc_feature 1..80: note = Synthetic: >NC_007368.1-cand-860-939
  source 1..80: mol_type = other DNA
tcgatatcctggtgtcagatgtgtctgcagagacaactggaaaggctccaataggcccatcgtagatataaacataaagg

SEQ ID NO: 17618 - DNA, 80 bp, synthetic construct
  misc_feature 1..80: note = Synthetic: >NC_007368.1-cand-930-1009
  source 1..80: mol_type = other DNA
aacataaaggattatagcattgtttccagttatgtgtgctcagggcttgttggagacacacccagaaaaaacgacagctc

SEQ ID NO: 17619 - DNA, 80 bp, synthetic construct
  misc_feature 1..80: note = Synthetic: >NC_007368.1-cand-1020-1099
  source 1..80: mol_type = other DNA
cattgcttggatcctaacaatgaagaaggtggtcatggagtgaaaggctgggcctttgatgatggaaatgacgtgtggat

SEQ ID NO: 17620 - DNA, 80 bp, synthetic construct
  misc_feature 1..80: note = Synthetic: >NC_007368.1-cand-1110-1189
  source 1..80: mol_type = other DNA
atcagcgagaagttacgctcaggatatgaaaccttcaaagtcattgaaggctggtccaaacctaattccaaattgcagat

SEQ ID NO: 17621 - DNA, 80 bp, synthetic construct
  misc_feature 1..80: note = Synthetic: >NC_007368.1-cand-1190-1269
  source 1..80: mol_type = other DNA
aaataggcaagtcatagttgacagaggtaataggtccggttattctggtattttctctgttgaaggcaaaagctgcatca

SEQ ID NO: 17622 - DNA, 80 bp, synthetic construct
  misc_feature 1..80: note = Synthetic: >NC_007368.1-cand-1300-1379
  source 1..80: mol_type = other DNA
gaagaaaagaggaaactgaagtcttgtggacctcaaacagtattgttgtgttttgtggcacctcaggtacatatggaaca

SEQ ID NO: 17623 - DNA, 80 bp, synthetic construct
  misc_feature 1..80: note = Synthetic: >NC_007368.1-cand-1310-1389
  source 1..80: mol_type = other DNA
ggaaactgaagtcttgtggacctcaaacagtattgttgtgttttgtggcacctcaggtacatatggaacaggctcatggc

SEQ ID NO: 17624 - DNA, 80 bp, synthetic construct
  misc_feature 1..80: note = Synthetic: >NC_007369.1-cand-0-79
  source 1..80: mol_type = other DNA
aaagcagggttaataatcactcaccgagtgacatcaaaatcatggcgtcccaaggcaccaaacggtcttatgaacagatg

SEQ ID NO: 17625 - DNA, 80 bp, synthetic construct
  misc_feature 1..80: note = Synthetic: >NC_007369.1-cand-90-169
  source 1..80: mol_type = other DNA
gggatcgccagaatgcaactgagattagggcatccgtcgggaagatgattgatggaattgggagattctacatccaaatg

SEQ ID NO: 17626 - DNA, 80 bp, synthetic construct
  misc_feature 1..80: note = Synthetic: >NC_007369.1-cand-130-209
  source 1..80: mol_type = other DNA
gaagatgattgatggaattgggagattctacatccaaatgtgcactgaacttaaactcagtgatcatgaagggcggttga

SEQ ID NO: 17627 - DNA, 80 bp, synthetic construct
  misc_feature 1..80: note = Synthetic: >NC_007369.1-cand-210-289
  source 1..80: mol_type = other DNA
tccagaacagcttgacaatagagaaaatggtgctctctgcttttgatgaaagaaggaataaatacctggaagaacacccc

SEQ ID NO: 17628 - DNA, 80 bp, synthetic construct
  misc_feature 1..80: note = Synthetic: >NC_009824.1-cand-5880-5959
  source 1..80: mol_type = other DNA
gcctgggcagggtcttgcttgacatcctggcaggatacggagctggtgtctcaggcgccttggtagcttttaagatcatg

SEQ ID NO: 17629 - DNA, 80 bp, synthetic construct
  misc_feature 1..80: note = Synthetic: >NC_009824.1-cand-5950-6029
  source 1..80: mol_type = other DNA
taagatcatgggaggagaatgccccactgctgaggacatggtcaacctgttgcccgccatactatctccgggtgctctcg

SEQ ID NO: 17630 - DNA, 80 bp, synthetic construct
  misc_feature 1..80: note = Synthetic: >NC_009824.1-cand-6000-6079
  source 1..80: mol_type = other DNA
tgcccgccatactatctccgggtgctctcgtcgtcggtgtgatatgcgcagccatactgcgccgacacgtaggacctggg

SEQ ID NO: 17631 - DNA, 80 bp, synthetic construct
  misc_feature 1..80: note = Synthetic: >NC_009824.1-cand-6130-6209
  source 1..80: mol_type = other DNA
caaccacgtctcaccgacgcactatgttcccgagagcgatgctgcggcaagggtcaccgcattgctgagttctctaactg

SEQ ID NO: 17632 - DNA, 80 bp, synthetic construct
  misc_feature 1..80: note = Synthetic: >NC_009824.1-cand-6190-6269
  source 1..80: mol_type = other DNA
attgctgagttctctaactgtcacaagtctgctccggcggttacaccagtggatcaatgaagactacccaagcccttgta

SEQ ID NO: 17633 - DNA, 80 bp, synthetic construct
  misc_feature 1..80: note = Synthetic: >NC_009824.1-cand-6270-6349
  source 1..80: mol_type = other DNA
gcgacgattggctacgtaccatctgggactgggtttgctcggtgttggccgacttcaaggcatggctctctgctaagatt

SEQ ID NO: 17634 - DNA, 80 bp, synthetic construct
  misc_feature 1..80: note = Synthetic: >NC_009824.1-cand-6330-6409
  source 1..80: mol_type = other DNA
catggctctctgctaagattatgccagcgctccctgggctgcccttcatttcctgtcaaaagggatacaagggcgtgtgg

SEQ ID NO: 17635 - DNA, 80 bp, synthetic construct
  misc_feature 1..80: note = Synthetic: >NC_009824.1-cand-6450-6529
  source 1..80: mol_type = other DNA
cagcaataactggccatgtgaagaacgggtccatgcggcttgcagggccgcgtacatgtgctaacatgtggcacggtact

SEQ ID NO: 17636 - DNA, 80 bp, synthetic construct
  misc_feature 1..80: note = Synthetic: >NC_009824.1-cand-6510-6589
  source 1..80: mol_type = other DNA
ctaacatgtggcacggtactttccccatcaatgagtacaccaccggacccagcacaccttgcccatcacccaactacact

SEQ ID NO: 17637 - DNA, 80 bp, synthetic construct
  misc_feature 1..80: note = Synthetic: >NC_009824.1-cand-6560-6639
  source 1..80: mol_type = other DNA
agcacaccttgcccatcacccaactacactcgcgcactatggcgcgtggctgccaacagctacgttgaggtgcgtcgggt

SEQ ID NO: 17638 - DNA, 80 bp, synthetic construct
  misc_feature 1..80: note = Synthetic: >NC_009824.1-cand-6670-6749
  source 1..80: mol_type = other DNA
agaagatgagctcaagtgtccgtgccaagtgccggctgctgagttctttactgaagtggatggagtgagacttcaccgct

SEQ ID NO: 17639 - DNA, 80 bp, synthetic construct
  misc_feature 1..80: note = Synthetic: >NC_009824.1-cand-6750-6829
  source 1..80: mol_type = other DNA
acgcccctccatgtaagcccctgttgagagatgatatcactttcatggtagggttgcattcctacacgataggatctcaa

SEQ ID NO: 17640 - DNA, 80 bp, synthetic construct
  misc_feature 1..80: note = Synthetic: >NC_009824.1-cand-6830-6909
  source 1..80: mol_type = other DNA
ctcccctgtgagccagaaccggatgtctctgtgctgacctcgatgttgagagacccttcccatatcaccgccgagacggc

SEQ ID NO: 17641 - DNA, 80 bp, synthetic construct
  misc_feature 1..80: note = Synthetic: >NC_009824.1-cand-6910-6989
  source 1..80: mol_type = other DNA
agcgcgccgccttgcacgcgggtcccctccatcagaggcaagctcatccgccagccaactatcagctccgtcgttgaagg

SEQ ID NO: 17642 - DNA, 80 bp, synthetic construct
  misc_feature 1..80: note = Synthetic: >NC_009824.1-cand-6990-7069
  source 1..80: mol_type = other DNA
ccacttgccagacgcataggcctcatccagacgctgagctagtggacgccaacttgttatggcggcaagagatgggcagc

SEQ ID NO: 17643 - DNA, 80 bp, synthetic construct
  misc_feature 1..80: note = Synthetic: >NC_009824.1-cand-7070-7149
  source 1..80: mol_type = other DNA
aacattacacgggtggagtctgagacaaaggttgtggttcttgattcgttcgagcctctgagagccgaaactgatgacgt

SEQ ID NO: 17644 - DNA, 80 bp, synthetic construct
  misc_feature 1..80: note = Synthetic: >NC_009996.1-cand-540-619
  source 1..80: mol_type = other DNA
tgggtgtccgtgtttcctgttttctttaaatacttgcttatggtgacaaatagtgtatactgtttgacaccatgggcgca

SEQ ID NO: 17645 - DNA, 80 bp, synthetic construct
  misc_feature 1..80: note = Synthetic: >NC_009996.1-cand-620-699
  source 1..80: mol_type = other DNA
caggtcagcaagcaaaatgtcggctcgcatgaaaactcagtctcagccacaggtggatccgtgattaagtatttcaacat

SEQ ID NO: 17646 - DNA, 80 bp, synthetic construct
  misc_feature 1..80: note = Synthetic: >NC_009996.1-cand-700-779
  source 1..80: mol_type = other DNA
caattactacaaggattctgctagctctggcttgactaaacaagatttttcccaagacccatcgaaattcacacaacctc

SEQ ID NO: 17647 - DNA, 80 bp, synthetic construct
  misc_feature 1..80: note = Synthetic: >NC_009996.1-cand-780-859
  source 1..80: mol_type = other DNA
tagcagaagcacttacaaatccagctttaatgtcaccaactgttgaagcatgtgggatgtccgataggcttaaacaaatt

SEQ ID NO: 17648 - DNA, 80 bp, synthetic construct
  misc_feature 1..80: note = Synthetic: >NC_009996.1-cand-840-919
  source 1..80: mol_type = other DNA
ccgataggcttaaacaaattactatcgggaattccactataacaacacaagatacactaaactctatactggcatatggg

SEQ ID NO: 17649 - DNA, 80 bp, synthetic construct
  misc_feature 1..80: note = Synthetic: >NC_009996.1-cand-940-1019
  source 1..80: mol_type = other DNA
tgacctggacgcttcctcagtggataaacctacccacccagaaacatcatctgatagattttacacattaactagtgtag

SEQ ID NO: 17650 - DNA, 80 bp, synthetic construct
  misc_feature 1..80: note = Synthetic: >NC_009996.1-cand-990-1069
  source 1..80: mol_type = other DNA
ctgatagattttacacattaactagtgtagattggaccactacgtctaaaggttggtggtggaagttgcctgattgcctt

SEQ ID NO: 17651 - DNA, 80 bp, synthetic construct
  misc_feature 1..80: note = Synthetic: >NC_009996.1-cand-1070-1149
  source 1..80: mol_type = other DNA
aaagatatgggcatcttcgggcaaaatctgtaccatcatgcattgggtaggtcagggtacataatacacacccaatgtaa

SEQ ID NO: 17652 - DNA, 80 bp, synthetic construct
  misc_feature 1..80: note = Synthetic: >NC_009996.1-cand-1150-1229
  source 1..80: mol_type = other DNA
tgccacaaaattcaatagtggttgtctaatagtggctgttgtaccagaacaccagctagcttacataggtgaagcaaatg

SEQ ID NO: 17653 - DNA, 80 bp, synthetic construct
  misc_feature 1..80: note = Synthetic: >NC_009996.1-cand-1230-1309
  source 1..80: mol_type = other DNA
tcaatgttggttatgatcacacacaccctggtgagggaggacatgtaattggttcaaatgttaggagagataacaagcaa

SEQ ID NO: 17654 - DNA, 80 bp, synthetic construct
  misc_feature 1..80: note = Synthetic: >NC_009996.1-cand-1310-1389
  source 1..80: mol_type = other DNA
cctgatgaagaccccttctttaattgtaatgggaccctgcttggtaacatcactatattcccacaccagctcataaactt

SEQ ID NO: 17655 - DNA, 80 bp, synthetic construct
  misc_feature 1..80: note = Synthetic: >NC_009996.1-cand-1390-1469
  source 1..80: mol_type = other DNA
gaggacaaacaattccagcacaattgttgtaccatacattaattgtgtacctatggacaacatgctcaggcacaacaacc

SEQ ID NO: 17656 - DNA, 80 bp, synthetic construct
  misc_feature 1..80: note = Synthetic: >NC_009996.1-cand-1470-1549
  source 1..80: mol_type = other DNA
tatctctagttattattccaatcgttcctctcagagccgcaaatggtgtcaccaaggtccccattacaatctcaatagca

SEQ ID NO: 17657 - DNA, 80 bp, synthetic construct
  misc_feature 1..80: note = Synthetic: >NC_009996.1-cand-1600-1679
  source 1..80: mol_type = other DNA
accaacacggctgccaagtggatctcaacaatttctcacaactgaggacgagcagtcggctaatcttctaccagacttta

SEQ ID NO: 17658 - DNA, 80 bp, synthetic construct
  misc_feature 1..80: note = Synthetic: >NC_009996.1-cand-1630-1709
  source 1..80: mol_type = other DNA
atttctcacaactgaggacgagcagtcggctaatcttctaccagactttagtgtcacaaagatcatcgacattcctggta

SEQ ID NO: 17659 - DNA, 80 bp, synthetic construct
  misc_feature 1..80: note = Synthetic: >NC_009996.1-cand-1710-1789
  source 1..80: mol_type = other DNA
ggatcacaaacatactccacatggctatggtagattcattcatgccactaaacaacattgagaccaatgtaggacaaatc

SEQ ID NO: 17660 - DNA, 80 bp, synthetic construct
  misc_feature 1..80: note = Synthetic: >NC_014406.1-cand-970-1049
  source 1..80: mol_type = other DNA
ctgaaagagctttggaagcagcccctgacccagtgcaaggcctagtaaatctagtaaactatgctgtaaattataataga

SEQ ID NO: 17661 - DNA, 80 bp, synthetic construct
  misc_feature 1..80: note = Synthetic: >NC_014406.1-cand-1040-1119
  source 1..80: mol_type = other DNA
ttataatagacagtgggaaacaagggccctgttagaaggaaggcctctgtttgagggcaatggagtagtaaactatgata

SEQ ID NO: 17662 - DNA, 80 bp, synthetic construct
  misc_feature 1..80: note = Synthetic: >NC_014406.1-cand-1070-1149
  source 1..80: mol_type = other DNA
gttagaaggaaggcctctgtttgagggcaatggagtagtaaactatgatatgcaaaatcttcctgtaaatggaaataatg

SEQ ID NO: 17663 - DNA, 80 bp, synthetic construct
  misc_feature 1..80: note = Synthetic: >NC_014406.1-cand-1200-1279
  source 1..80: mol_type = other DNA
gagcagggaaatactggccaatactgtatacctcaatggctgctttttgttcttgaggagctggacaaagagattaagga

SEQ ID NO: 17664 - DNA, 80 bp, synthetic construct
  misc_feature 1..80: note = Synthetic: >NC_014406.1-cand-1280-1359
  source 1..80: mol_type = other DNA
agatgccttgtcacagaaaaggaaatggaccaattcaaaagcttcccagagtaataaaaaaaggaggagtggaggttatg

SEQ ID NO: 17665 - DNA, 80 bp, synthetic construct
  misc_feature 1..80: note = Synthetic: >NC_014406.1-cand-1360-1439
  source 1..80: mol_type = other DNA
gaaacagtgccactttctgaagacacaatttataaagtggaggcaattctgctgcctaattttgcttctggatccaatac

SEQ ID NO: 17666 - DNA, 80 bp, synthetic construct
  misc_feature 1..80: note = Synthetic: >NC_014406.1-cand-1460-1539
  source 1..80: mol_type = other DNA
gagccccctacacctttactgacactttggatgctggttcatctctgtgttataccctggctgttgttaatttgcctgaa

SEQ ID NO: 17667 - DNA, 80 bp, synthetic construct
  misc_feature 1..80: note = Synthetic: >NC_014406.1-cand-1520-1599
  source 1..80: mol_type = other DNA
ctgttgttaatttgcctgaaattcctgaggccctgtgtgatgatactttgttggtttgggaagccttcagagttgaaaca

SEQ ID NO: 17668 - DNA, 80 bp, synthetic construct
  misc_feature 1..80: note = Synthetic: >NC_014406.1-cand-1590-1669
  source 1..80: mol_type = other DNA
agttgaaacagaactaatatttaccccacaagtgggaagtgctggatatataagagcacaaggaacccctgctggtgtag

SEQ ID NO: 17669 - DNA, 80 bp, synthetic construct
  misc_feature 1..80: note = Synthetic: >NC_014406.1-cand-1670-1749
  source 1..80: mol_type = other DNA
aaggttcccaaatgtacttttgggcctgtggaggcagccccttggatgtcattggtattaacccagatccagaaagaatg

SEQ ID NO: 17670 - DNA, 80 bp, synthetic construct
  misc_feature 1..80: note = Synthetic: >NC_014406.1-cand-1750-1829
  source 1..80: mol_type = other DNA
aatgtagcagcaggcctggaagggcctagtaaagagaaccaaccatctgttgcaggcattaaagctaccagaaaacaagt

SEQ ID NO: 17671 - DNA, 80 bp, synthetic construct
  misc_feature 1..80: note = Synthetic: >NC_014406.1-cand-1830-1909
  source 1..80: mol_type = other DNA
tacagctgccaattttcccattgaaatttggagtgctgatcctaccaggaatgagaactgtagatattttggcagaattg

SEQ ID NO: 17672 - DNA, 80 bp, synthetic construct
  misc_feature 1..80: note = Synthetic: >NC_014406.1-cand-1910-1989
  source 1..80: mol_type = other DNA
ttggtggtagtgttacccctccagtggtttcctttggaaatcagagcaccactccattggttgatgaaaatggagtaggt

SEQ ID NO: 17673 - DNA, 80 bp, synthetic construct
  misc_feature 1..80: note = Synthetic: >NC_014406.1-cand-1960-2039
  source 1..80: mol_type = other DNA
actccattggttgatgaaaatggagtaggtatactctgtttgtttggagctatatatctaacatcagcagatatgttggg

SEQ ID NO: 17674 - DNA, 80 bp, synthetic construct
  misc_feature 1..80: note = Synthetic: >NC_014406.1-cand-2070-2149
  source 1..80: mol_type = other DNA
cagtgatgcctatagccagcaaagaagtgtgcaggctgcctttggaagattttttagagttcacttcagacagaggagag

SEQ ID NO: 17675 - DNA, 80 bp, synthetic construct
  misc_feature 1..80: note = Synthetic: >NC_014406.1-cand-2150-2229
  source 1..80: mol_type = other DNA
ttaaacatccatatactgtggatatgatgtttagacaattcctgcagcctcagaagccacaggtgcaagggacacaacct

SEQ ID NO: 17676 - DNA, 80 bp, synthetic construct
  misc_feature 1..80: note = Synthetic: >NC_019843.3-cand-28760-28839
  source 1..80: mol_type = other DNA
ccaattctacccctgcgcaaaatgctgggtattggcggagacaggacagaaaaattaataccgggaatggaattaagcaa

SEQ ID NO: 17677 - DNA, 80 bp, synthetic construct
  misc_feature 1..80: note = Synthetic: >NC_019843.3-cand-28850-28929
  source 1..80: mol_type = other DNA
ggtggtacttctactacactggaactggacccgaagcagcactcccattccgggctgttaaggatggcatcgtttgggtc

SEQ ID NO: 17678 - DNA, 80 bp, synthetic construct
  misc_feature 1..80: note = Synthetic: >NC_019843.3-cand-28930-29009
  source 1..80: mol_type = other DNA
catgaagatggcgccactgatgctccttcaacttttgggacgcggaaccctaacaatgattcagctattgttacacaatt

SEQ ID NO: 17679 - DNA, 80 bp, synthetic construct
  misc_feature 1..80: note = Synthetic: >NC_019843.3-cand-29050-29129
  source 1..80: mol_type = other DNA
gggactggaggcaatagtcaatcatcttcaagagcctctagcttaagcagaaactcttccagatctagttcacaaggttc

SEQ ID NO: 17680 - DNA, 80 bp, synthetic construct
  misc_feature 1..80: note = Synthetic: >NC_019843.3-cand-29100-29179
  source 1..80: mol_type = other DNA
aaactcttccagatctagttcacaaggttcaagatcaggaaactctacccgcggcacttctccaggtccatctggaatcg

SEQ ID NO: 17681 - DNA, 80 bp, synthetic construct
  misc_feature 1..80: note = Synthetic: >NC_019843.3-cand-29180-29259
  source 1..80: mol_type = other DNA
gagcagtaggaggtgatctactttaccttgatcttctgaacagactacaagcccttgagtctggcaaagtaaagcaatcg

SEQ ID NO: 17682 - DNA, 80 bp, synthetic construct
  misc_feature 1..80: note = Synthetic: >NC_019843.3-cand-29260-29339
  source 1..80: mol_type = other DNA
cagccaaaagtaatcactaagaaagatgctgctgctgctaaaaataagatgcgccacaagcgcacttccaccaaaagttt

SEQ ID NO: 17683 - DNA, 80 bp, synthetic construct
  misc_feature 1..80: note = Synthetic: >NC_019843.3-cand-29340-29419
  source 1..80: mol_type = other DNA
caacatggtgcaagcttttggtcttcgcggaccaggagacctccagggaaactttggtgatcttcaattgaataaactcg

SEQ ID NO: 17684 - DNA, 80 bp, synthetic construct
  misc_feature 1..80: note = Synthetic: >NC_019843.3-cand-29420-29499
  source 1..80: mol_type = other DNA
gcactgaggacccacgttggccccaaattgctgagcttgctcctacagccagtgcttttatgggtatgtcgcaatttaaa

SEQ ID NO: 17685 - DNA, 80 bp, synthetic construct
  misc_feature 1..80: note = Synthetic: >NC_019843.3-cand-29500-29579
  source 1..80: mol_type = other DNA
cttacccatcagaacaatgatgatcatggcaaccctgtgtacttccttcggtacagtggagccattaaacttgacccaaa

SEQ ID NO: 17686 - DNA, 80 bp, synthetic construct
  misc_feature 1..80: note = Synthetic: >NC_019843.3-cand-29580-29659
  source 1..80: mol_type = other DNA
gaatcccaactacaataagtggttggagcttcttgagcaaaatattgatgcctacaaaaccttccctaagaaggaaaaga

SEQ ID NO: 17687 - DNA, 80 bp, synthetic construct
  misc_feature 1..80: note = Synthetic: >NC_019843.3-cand-29660-29739
  source 1..80: mol_type = other DNA
aacaaaaggcaccaaaagaagaatcaacagaccaaatgtctgaacctccaaaggagcagcgtgtgcaaggtagcatcact

SEQ ID NO: 17688 - DNA, 80 bp, synthetic construct
  misc_feature 1..80: note = Synthetic: >NC_019843.3-cand-29760-29839
  source 1..80: mol_type = other DNA
aagtgttcagcctggtccaatgattgatgttaacactgattagtgtcactcaaagtaacaagatcgcggcaatcgtttgt

SEQ ID NO: 17689 - DNA, 80 bp, synthetic construct
  misc_feature 1..80: note = Synthetic: >NC_019843.3-cand-29840-29919
  source 1..80: mol_type = other DNA
gtttggcaaccccatctcaccatcgcttgtccactcttgcacagaatggaatcatgttgtaattacagtgcaataaggta

SEQ ID NO: 17690 - DNA, 80 bp, synthetic construct
  misc_feature 1..80: note = Synthetic: >NC_019843.3-cand-29920-29999
  source 1..80: mol_type = other DNA
attataacccatttaattgatagctatgctttattaaagtgtgtagctgtagagagaatgttaaagactgtcacctctgc

SEQ ID NO: 17691 - DNA, 80 bp, synthetic construct
  misc_feature 1..80: note = Synthetic: >NC_019843.3-cand-30000-30079
  source 1..80: mol_type = other DNA
ttgattgcaagtgaacagtgccccccgggaagagctctacagtgtgaaatgtaaataaaaaatagctattattcaattag

SEQ ID NO: 17692 - DNA, 80 bp, synthetic construct
  misc_feature 1..80: note = Synthetic: >NC_021544.1-cand-210-289
  source 1..80: mol_type = other DNA
ccataaatgcgccaattatatctttggctgtacgaatctctaccgatgattacgatgatatgcgatctgggattgaatct

SEQ ID NO: 17693 - DNA, 80 bp, synthetic construct
  misc_feature 1..80: note = Synthetic: >NC_021544.1-cand-300-379
  source 1..80: mol_type = other DNA
ttttagctgccgctattcgaactgaaggatcacgacctacacgagtaattgaaagacgtgttttagaaccaaatgtaaaa

SEQ ID NO: 17694 - DNA, 80 bp, synthetic construct
  misc_feature 1..80: note = Synthetic: >NC_021544.1-cand-390-469
  source 1..80: mol_type = other DNA
acgatttacgtttgaaaagtctcatttctgatttatcaatagcaaatttagccgccgtcgacactgcaatgatacaacct

SEQ ID NO: 17695 - DNA, 80 bp, synthetic construct
  misc_feature 1..80: note = Synthetic: >NC_021544.1-cand-440-519
  source 1..80: mol_type = other DNA
gccgccgtcgacactgcaatgatacaacctgaagtgattgaaactgaaaatcctctttatgcagatataatcgaacaggt

SEQ ID NO: 17696 - DNA, 80 bp, synthetic construct
  misc_feature 1..80: note = Synthetic: >NC_021544.1-cand-510-589
  source 1..80: mol_type = other DNA
tcgaacaggtagttcatagaccgaatataggtatgactggtggaaatattagagctactcttggtaggtggtcaggtaat

SEQ ID NO: 17697 - DNA, 80 bp, synthetic construct
  misc_feature 1..80: note = Synthetic: >NC_021544.1-cand-620-699
  source 1..80: mol_type = other DNA
gattctgaacatagatttacagtggaactcaaaacacgcacttgtggaataattaacatcgtctacattcccacatctgg

SEQ ID NO: 17698 - DNA, 80 bp, synthetic construct
  misc_feature 1..80: note = Synthetic: >NC_021544.1-cand-710-789
  source 1..80: mol_type = other DNA
attccgatgcccaccggtaggaatagagaaggtgatttgatagacgtgtcagctgaaatgatggcagatgattttgctat

SEQ ID NO: 17699 - DNA, 80 bp, synthetic construct
  misc_feature 1..80: note = Synthetic: >NC_021544.1-cand-800-879
  source 1..80: mol_type = other DNA
gatgatgataacattattcagactgaaactggagttggagtgtattcctttccaatgtgcaataggattagattcagaat

SEQ ID NO: 17700 - DNA, 80 bp, synthetic construct
  misc_feature 1..80: note = Synthetic: >NC_021544.1-cand-890-969
  source 1..80: mol_type = other DNA
aataatcaaaaggatgatgacaatttagggacggtgcatatggttaattgggctcaagggactgctccgaagcagccagc

SEQ ID NO: 17701 - DNA, 80 bp, synthetic construct
  misc_feature 1..80: note = Synthetic: >NC_021544.1-cand-980-1059
  source 1..80: mol_type = other DNA
atgtttgaaactcgtcggacgttcacggaaggagattaccaacatctatcaagatgcgctcctaaagcacaatacatgat

SEQ ID NO: 17702 - DNA, 80 bp, synthetic construct
  misc_feature 1..80: note = Synthetic: >NC_021544.1-cand-1070-1149
  source 1..80: mol_type = other DNA
ttcaatgacgtttcttttacaaatagaccagctgtagactggaacattcaaagtctactcacgtcaaatactcagcgagt

SEQ ID NO: 17703 - DNA, 80 bp, synthetic construct
  misc_feature 1..80: note = Synthetic: >NC_021544.1-cand-1160-1239
  source 1..80: mol_type = other DNA
aaaatagcaatgcttatcgcctcgttcgctgctaagatctagatcgacaccggattccaaaaagggattgcttcgaaagg

SEQ ID NO: 17704 - DNA, 80 bp, synthetic construct
  misc_feature 1..80: note = Synthetic: >NC_021545.1-cand-0-79
  source 1..80: mol_type = other DNA
attgtcgtgatggattcaactgccttagtcgaatctgctaaaaccaacattcatggagttgactcaaaaacggagaagca

SEQ ID NO: 17705 - DNA, 80 bp, synthetic construct
  misc_feature 1..80: note = Synthetic: >NC_021545.1-cand-80-159
  source 1..80: mol_type = other DNA
aactatatttgatcaactgatatcagatataaagagtcagaatgatggccaaattccggatgaagtacttccagatttac

SEQ ID NO: 17706 - DNA, 80 bp, synthetic construct
  misc_feature 1..80: note = Synthetic: >NC_021545.1-cand-160-239
  source 1..80: mol_type = other DNA
tacaactggctgaaattaatggactaacgtttgagtacaaaccaaaggaaaagttaagtatcatggatcgtccagatcca

SEQ ID NO: 17707 - DNA, 80 bp, synthetic construct
  misc_feature 1..80: note = Synthetic: >NC_021545.1-cand-240-319
  source 1..80: mol_type = other DNA
acgtctgtactttcacaggacgtcttccaaattagaacaattttatcgaaaacgctattcgttgatgtcgaaaatgaaga

SEQ ID NO: 17708 - DNA, 80 bp, synthetic construct
  misc_feature 1..80: note = Synthetic: >NC_021548.1-cand-720-799
  source 1..80: mol_type = other DNA
cagttttttatgtaccatggacatgggcacatcagaacagttccatatcatgaacttgctgatgccatcaaatcattcgc

SEQ ID NO: 17709 - DNA, 80 bp, synthetic construct
  misc_feature 1..80: note = Synthetic: >NC_021548.1-cand-910-989
  source 1..80: mol_type = other DNA
aagatgtgattttgaaagcaaaaatttttgaaaagaaaagaagctgaacgtgttaaatccgctgaaatgggttaacggct

SEQ ID NO: 17710 - DNA, 80 bp, synthetic construct
  misc_feature 1..80: note = Synthetic: >NC_021549.1-cand-0-79
  source 1..80: mol_type = other DNA
tataaaagtcagtagacggctggaaacgttgtactgactactcactacccagagatggcagaagcgtctgagttcaactt

SEQ ID NO: 17711 - DNA, 80 bp, synthetic construct
  misc_feature 1..80: note = Synthetic: >NC_021549.1-cand-60-139
  source 1..80: mol_type = other DNA
gaagcgtctgagttcaactttaccacaaagagaaagcaaagaataatgagtgatcgaagaacaagagaagacacaaaaca

SEQ ID NO: 17712 - DNA, 80 bp, synthetic construct
  misc_feature 1..80: note = Synthetic: >NC_021549.1-cand-160-239
  source 1..80: mol_type = other DNA
ctgatgttgacttggttgattcagcctcagtttattcacaagaatctgccagaagtaactatagtgatgcttacgataag

SEQ ID NO: 17713 - DNA, 80 bp, synthetic construct
  misc_feature 1..80: note = Synthetic: >NC_021549.1-cand-260-339
  source 1..80: mol_type = other DNA
tgaagaatcaaatgacgcgaagtataggaattttgaattttctgaagatgaagaagtttacagaccatcaagtaaagcgt

SEQ ID NO: 17714 - DNA, 80 bp, synthetic construct
  misc_feature 1..80: note = Synthetic: >NC_021549.1-cand-360-439
  source 1..80: mol_type = other DNA
atgaaacgtaaatatgatggtactagcacgtcagattccattttagaaaaattgtcagagttaaatctcgagattgagaa

SEQ ID NO: 17715 - DNA, 80 bp, synthetic construct
  misc_feature 1..80: note = Synthetic: >NC_021549.1-cand-450-529
  source 1..80: mol_type = other DNA
atgaaccaaccagtcacaatcgatgcagcatttaacatgattcttcgaaacgttgataatctaactataaggcagaaaca

SEQ ID NO: 17716 - DNA, 80 bp, synthetic construct
  misc_feature 1..80: note = Synthetic: >NC_021549.1-cand-510-589
  source 1..80: mol_type = other DNA
ctaactataaggcagaaacaggctttaataaacgcaattattaactctatgaactagactgtgatctacacctgtcatct

SEQ ID NO: 17717 - DNA, 80 bp, synthetic construct
  misc_feature 1..80: note = Synthetic: >NC_021550.1-cand-10-89
  source 1..80: mol_type = other DNA
cagttatggcggaaagtagtaatatgcaagatttatttgtgcaagcgacatacgaggagattctaaaattggctggcagc

SEQ ID NO: 17718 - DNA, 80 bp, synthetic construct
  misc_feature 1..80: note = Synthetic: >NC_021550.1-cand-210-289
  source 1..80: mol_type = other DNA
aaattcctaactacaaaaatgcagtcgaatattgtatatctagcggagatgttggtatggaaagcaaatcaaactgtgaa

SEQ ID NO: 17719 - DNA, 80 bp, synthetic construct
  misc_feature 1..80: note = Synthetic: >NC_021550.1-cand-300-379
  source 1..80: mol_type = other DNA
gatgaagttcttcatcaacgaaaagttattgaaaaactacaatgtttagataagatgtgcttagaaattgaaaaactacg

SEQ ID NO: 17720 - DNA, 80 bp, synthetic construct
  misc_feature 1..80: note = Synthetic: >NC_021550.1-cand-390-469
  source 1..80: mol_type = other DNA
gagcgtttccaagggatggacgtaactaaagaattgatacaaatgtgtgaacggaaaatgattgacatagacagcaaagt

SEQ ID NO: 17721 - DNA, 80 bp, synthetic construct
  misc_feature 1..80: note = Synthetic: >NC_021550.1-cand-480-559
  source 1..80: mol_type = other DNA
gagaagtcatgcgacagacgtatacgcgattatgattggaaaatcgccacactaactgctcatccaacacaacaatttcc

SEQ ID NO: 17722 - DNA, 80 bp, synthetic construct
  misc_feature 1..80: note = Synthetic: >NC_021550.1-cand-570-649
  source 1..80: mol_type = other DNA
gacataataaatcagcacatagaagacgatgctgagactcaaatcatacagcaacatatgaataaacaggcaagagtaaa

SEQ ID NO: 17723 - DNA, 80 bp, synthetic construct
  misc_feature 1..80: note = Synthetic: >NC_021550.1-cand-660-739
  source 1..80: mol_type = other DNA
cgtaacagactttaggatctgtgaagcagctaggagacgatctctctgtagttgcttctccccaactgatcaaactgata

SEQ ID NO: 17724 - DNA, 80 bp, synthetic construct
  misc_feature 1..80: note = Synthetic: >NC_021928.1-cand-4080-4159
  source 1..80: mol_type = other DNA
ccaaaaattcaaagtacctagacctgtactaaacttccggtccacacgaatgagaggtatacatctagaaattatcatga

SEQ ID NO: 17725 - DNA, 80 bp, synthetic construct
  misc_feature 1..80: note = Synthetic: >NC_021928.1-cand-4160-4239
  source 1..80: mol_type = other DNA
agattacttgttctgaaaacagtcctattagaaagacattgataacagatgatcttgaaaatggtccaaaagcatctgtg

SEQ ID NO: 17726 - DNA, 80 bp, synthetic construct
  misc_feature 1..80: note = Synthetic: >NC_021928.1-cand-4240-4319
  source 1..80: mol_type = other DNA
tggattcacctctgcaatctttacaaaggtagaaatcctataaagatatatgacgaggcgtattttgcagagaaatgcaa

SEQ ID NO: 17727 - DNA, 80 bp, synthetic construct
  misc_feature 1..80: note = Synthetic: >NC_021928.1-cand-4360-4439
  source 1..80: mol_type = other DNA
cccacaatcgcagtacatgcaaatgggaaaatcccaaagtctgccagcctttatttcaactcaagaggttgggctctgca

SEQ ID NO: 17728 - DNA, 80 bp, synthetic construct
  misc_feature 1..80: note = Synthetic: >NC_021928.1-cand-4400-4479
  source 1..80: mol_type = other DNA
ctgccagcctttatttcaactcaagaggttgggctctgcatcctatagctgatgcatctcctacaatggcaaaacaactt

SEQ ID NO: 17729 - DNA, 80 bp, synthetic construct
  misc_feature 1..80: note = Synthetic: >NC_021928.1-cand-4470-4549
  source 1..80: mol_type = other DNA
aaaacaactttggtccataggttgtgagatcatggaagtcaatgcaattttacaaggctctgattatagcgccctggtag

SEQ ID NO: 17730 - DNA, 80 bp, synthetic construct
  misc_feature 1..80: note = Synthetic: >NC_021928.1-cand-4550-4629
  source 1..80: mol_type = other DNA
atcatcccgatgtaatctatcggaaaattagaattgatccagcaaaaaagcaatacgcacactctaaatggaacccattc

SEQ ID NO: 17731 - DNA, 80 bp, synthetic construct
  misc_feature 1..80: note = Synthetic: >NC_021928.1-cand-4630-4709
  source 1..80: mol_type = other DNA
aagaaggcaatatccatgcctaatctcactgatgacagtatctaatcataccaatcaactattgatatagggctgagcag

SEQ ID NO: 17732 - DNA, 80 bp, synthetic construct
  misc_feature 1..80: note = Synthetic: >NC_021928.1-cand-4710-4789
  source 1..80: mol_type = other DNA
tatcccacatccttcccaactgcatcaccagcatcactccgatccatagaaccatactacactatgcaccatctaacata

SEQ ID NO: 17733 - DNA, 80 bp, synthetic construct
  misc_feature 1..80: note = Synthetic: >NC_021928.1-cand-4790-4869
  source 1..80: mol_type = other DNA
cagccaatcactgaaacacaatcacatcacaccaattcaaccaaggatatcccaacaaacaccaaatgatcaaaatatga

SEQ ID NO: 17734 - DNA, 80 bp, synthetic construct
  misc_feature 1..80: note = Synthetic: >NC_021928.1-cand-4870-4949
  source 1..80: mol_type = other DNA
ttgcagtagacataacatcactcaatcaaatcaaactctcattgtacactcagatcacctgacacaactgcaaatttctg

SEQ ID NO: 17735 - DNA, 80 bp, synthetic construct
  misc_feature 1..80: note = Synthetic: >NC_021928.1-cand-4950-5029
  source 1..80: mol_type = other DNA
aatccgccatcagaaatacatcctcgaatagactattccaaaacatcaaacaatcaatttcgtaattacaacaatcattg

SEQ ID NO: 17736 - DNA, 80 bp, synthetic construct
  misc_feature 1..80: note = Synthetic: >NC_021928.1-cand-4990-5069
  source 1..80: mol_type = other DNA
aaacatcaaacaatcaatttcgtaattacaacaatcattgtagattttaagaaaaaattaaaaacacagtaagtaccaaa

SEQ ID NO: 17737 - DNA, 80 bp, synthetic construct
  misc_feature 1..80: note = Synthetic: >NC_021928.1-cand-5110-5189
  source 1..80: mol_type = other DNA
tccaaatcctgaggtgatcaacacccttcgaattcaattccatcaccaaagaatccaacatgggtgtcaaaggtttatct

SEQ ID NO: 17738 - DNA, 80 bp, synthetic construct
  misc_feature 1..80: note = Synthetic: >NC_021928.1-cand-5200-5279
  source 1..80: mol_type = other DNA
ttgggttattaatctcaccaattaccaatctggatataactcatttaatgaatctaggaacggtaccgactgcaattaga

SEQ ID NO: 17739 - DNA, 80 bp, synthetic construct
  misc_feature 1..80: note = Synthetic: >NC_021928.1-cand-5280-5359
  source 1..80: mol_type = other DNA
tctctagtttactacacttataccaaaccatcttatctcactgtagatttgattcccaatttgaagaatctggaccaaaa

SEQ ID NO: 17740 - DNA, 80 bp, synthetic construct
  misc_feature 1..80: note = Synthetic: >NC_026433.1-cand-0-79
  source 1..80: mol_type = other DNA
aggcaatactagtagttctgctatatacatttgcaaccgcaaatgcagacacattatgtataggttatcatgcgaacaat

SEQ ID NO: 17741 - DNA, 80 bp, synthetic construct
  misc_feature 1..80: note = Synthetic: >NC_026433.1-cand-90-169
  source 1..80: mol_type = other DNA
ctgtagacacagtactagaaaagaatgtaacagtaacacactctgttaaccttctagaagacaagcataacgggaaacta

SEQ ID NO: 17742 - DNA, 80 bp, synthetic construct
  misc_feature 1..80: note = Synthetic: >NC_026433.1-cand-190-269
  source 1..80: mol_type = other DNA
cccattgcatttgggtaaatgtaacattgctggctggatcctgggaaatccagagtgtgaatcactctccacagcaagct

SEQ ID NO: 17743 - DNA, 80 bp, synthetic construct
  misc_feature 1..80: note = Synthetic: >NC_026433.1-cand-260-339
  source 1..80: mol_type = other DNA
acagcaagctcatggtcctacattgtggaaacacctagttcagacaatggaacgtgttacccaggagatttcatcgatta

SEQ ID NO: 17744 - DNA, 80 bp, synthetic construct
  misc_feature 1..80: note = Synthetic: >NC_026433.1-cand-340-419
  source 1..80: mol_type = other DNA
tgaggagctaagagagcaattgagctcagtgtcatcatttgaaaggtttgagatattccccaagacaagttcatggccca

SEQ ID NO: 17745 - DNA, 80 bp, synthetic construct
  misc_feature 1..80: note = Synthetic: >NC_026433.1-cand-420-499
  source 1..80: mol_type = other DNA
atcatgactcgaacaaaggtgtaacggcagcatgtcctcatgctggagcaaaaagcttctacaaaaatttaatatggcta

SEQ ID NO: 17746 - DNA, 80 bp, synthetic construct
  misc_feature 1..80: note = Synthetic: >NC_026433.1-cand-490-569
  source 1..80: mol_type = other DNA
aatatggctagttaaaaaaggaaattcatacccaaagctcagcaaatcctacattaatgataaagggaaagaagtcctcg

SEQ ID NO: 17747 - DNA, 80 bp, synthetic construct
  misc_feature 1..80: note = Synthetic: >NC_026433.1-cand-650-729
  source 1..80: mol_type = other DNA
gggtcatcaagatacagcaagaagttcaagccggaaatagcaataagacccaaagtgagggrtcragaagggagaatgaa

SEQ ID NO: 17748 - DNA, 80 bp, synthetic construct
  misc_feature 1..80: note = Synthetic: >NC_026433.1-cand-660-739
  source 1..80: mol_type = other DNA
gatacagcaagaagttcaagccggaaatagcaataagacccaaagtgagggrtcragaagggagaatgaactattactgg

SEQ ID NO: 17749 - DNA, 80 bp, synthetic construct
  misc_feature 1..80: note = Synthetic: >NC_026433.1-cand-730-809
  source 1..80: mol_type = other DNA
ctattactggacactagtagagccgggagacaaaataacattcgaagcaactggaaatctagtggtaccgagatatgcat

SEQ ID NO: 17750 - DNA, 80 bp, synthetic construct
  misc_feature 1..80: note = Synthetic: >NC_026433.1-cand-810-889
  source 1..80: mol_type = other DNA
tcgcaatggaaagaaatgctggatctggtattatcatttcagatacaccagtccacgattgcaatacaacttgtcaaaca

SEQ ID NO: 17751 - DNA, 80 bp, synthetic construct
  misc_feature 1..80: note = Synthetic: >NC_026433.1-cand-890-969
  source 1..80: mol_type = other DNA
cccaagggtgctataaacaccagcctcccatttcagaatatacatccgatcacaattggaaaatgtccaaaatatgtaaa

SEQ ID NO: 17752 - DNA, 80 bp, synthetic construct
  misc_feature 1..80: note = Synthetic: >NC_026433.1-cand-960-1039
  source 1..80: mol_type = other DNA
aatatgtaaaaagcacaaaattgagactggccacaggattgaggaatatcccgtctattcaatctagaggcctatttggg

SEQ ID NO: 17753 - DNA, 80 bp, synthetic construct
  misc_feature 1..80: note = Synthetic: >NC_026433.1-cand-1120-1199
  source 1..80: mol_type = other DNA
gtcaggatatgcagccgacctgaagagcacacagaatgccattgacgagattactaacaaagtaaattctgttattgaaa

SEQ ID NO: 17754 - DNA, 80 bp, synthetic construct
  misc_feature 1..80: note = Synthetic: >NC_026433.1-cand-1130-1209
  source 1..80: mol_type = other DNA
gcagccgacctgaagagcacacagaatgccattgacgagattactaacaaagtaaattctgttattgaaaagatgaatac

SEQ ID NO: 17755 - DNA, 80 bp, synthetic construct
  misc_feature 1..80: note = Synthetic: >NC_026433.1-cand-1210-1289
  source 1..80: mol_type = other DNA
acagttcacagcagtaggtaaagagttcaaccacctggaaaaaagaatagagaatttaaataaaaaagttgatgatggtt

SEQ ID NO: 17756 - DNA, 80 bp, synthetic construct
  misc_feature 1..80: note = Synthetic: >NC_038300.1-cand-1140-1219
  source 1..80: mol_type = other DNA
cgtggagaggctttctatcaatgtctggtgaaatagagaaaattacaggttgtaatgtcttttgtactttagcaggccct

SEQ ID NO: 17757 - DNA, 80 bp, synthetic construct
  misc_feature 1..80: note = Synthetic: >NC_038300.1-cand-1230-1309
  source 1..80: mol_type = other DNA
gtgaggcttattcagagaacgggatctttaatatcagttccccaacttgtctcataaataaagttcaaaagttcagaggt

SEQ ID NO: 17758 - DNA, 80 bp, synthetic construct
  misc_feature 1..80: note = Synthetic: >NC_038300.1-cand-1300-1379
  source 1..80: mol_type = other DNA
gttcagaggttcagagcagagaataaactttgtatgccaaaggatagacaatgatgtagtggtatattgtaatggtcaaa

SEQ ID NO: 17759 - DNA, 80 bp, synthetic construct
  misc_feature 1..80: note = Synthetic: >NC_038300.1-cand-1400-1479
  source 1..80: mol_type = other DNA
acattagttataggtcagtgtatttatacattcacaagcttgttctcactagtaccaaatgttgcacactctttagctgt

SEQ ID NO: 17760 - DNA, 80 bp, synthetic construct
  misc_feature 1..80: note = Synthetic: >NC_038300.1-cand-1480-1559
  source 1..80: mol_type = other DNA
ggagctttgtgtccccggcgtccatgggtgggcaactattgctcttgttaccacattttgctttgggtggcttttaatcc

SEQ ID NO: 17761 - DNA, 80 bp, synthetic construct
  misc_feature 1..80: note = Synthetic: >NC_038300.1-cand-1560-1639
  source 1..80: mol_type = other DNA
cagctgtcaccatggtgattctaaaaactttaaggttactaacatactcttgttcccactattcaacagaatccaagttt

SEQ ID NO: 17762 - DNA, 80 bp, synthetic construct
  misc_feature 1..80: note = Synthetic: >NC_038300.1-cand-1650-1729
  source 1..80: mol_type = other DNA
tagagaaagtaaaggttgaatatcaaaagacaatgggttctatggtttgtgatatttgccatcatgagtgtgaaacagca

SEQ ID NO: 17763 - DNA, 80 bp, synthetic construct
  misc_feature 1..80: note = Synthetic: >NC_038300.1-cand-1730-1809
  source 1..80: mol_type = other DNA
aaagaacttgagggacataaaaaaagctgtgctgaagggcagtgcccttactgcatgactcttacagaagcaacagagag

SEQ ID NO: 17764 - DNA, 80 bp, synthetic construct
  misc_feature 1..80: note = Synthetic: >NC_038300.1-cand-1810-1889
  source 1..80: mol_type = other DNA
tgccctccaggcccattatgcagtctgtaaattaactgggcggtttcaagaggcattaaaaaaatcacttaagaagccag

SEQ ID NO: 17765 - DNA, 80 bp, synthetic construct
  misc_feature 1..80: note = Synthetic: >NC_038300.1-cand-1890-1969
  source 1..80: mol_type = other DNA
aagtcaagagaggctgttatagaacacttggtgtttttcgttacaagagtaggtgttatgtcggtctagtctggtcattt

SEQ ID NO: 17766 - DNA, 80 bp, synthetic construct
  misc_feature 1..80: note = Synthetic: >NC_038300.1-cand-1970-2049
  source 1..80: mol_type = other DNA
ttactgacacttgaattaatagtctgggctgccagtgctgacacacccctagtagaagtaggttggtctgatacagctca

SEQ ID NO: 17767 - DNA, 80 bp, synthetic construct
  misc_feature 1..80: note = Synthetic: >NC_038300.1-cand-2060-2139
  source 1..80: mol_type = other DNA
gatatccctatgaagactgacttagaactggattttgcaattgcctcttcctcttcttacagctaccggaggaaattaac

SEQ ID NO: 17768 - DNA, 80 bp, synthetic construct
  misc_feature 1..80: note = Synthetic: >NC_038300.1-cand-2140-2219
  source 1..80: mol_type = other DNA
aaaccctgcaaatccagaagagtctgttccttttcactttcaactcgaacgtcaagtgattcatgctgaaatacagtctt

SEQ ID NO: 17769 - DNA, 80 bp, synthetic construct
  misc_feature 1..80: note = Synthetic: >NC_038300.1-cand-2220-2299
  source 1..80: mol_type = other DNA
taggtcattggatggatgccacattcaacataaaaacagcattccactgttacggtgagtgtaaaaggtactcatatcca

SEQ ID NO: 17770 - DNA, 80 bp, synthetic construct
  misc_feature 1..80: note = Synthetic: >NC_038300.1-cand-2300-2379
  source 1..80: mol_type = other DNA
tggcaaacaactaagtgtttttttgagaaagactaccaatatgaaacaagttgggcatgcaacccacctgattgtcctgg

SEQ ID NO: 17771 - DNA, 80 bp, synthetic construct
  misc_feature 1..80: note = Synthetic: >NC_038300.1-cand-2380-2459
  source 1..80: mol_type = other DNA
ggtgggtacaggttgcactgcatgtgggatctatctagacaaactgaaatcagtcgggaaagcatataaattaattacct

SEQ ID NO: 17772 - DNA, 80 bp, synthetic construct
  misc_feature 1..80: note = Synthetic: >NC_039199.1-cand-9600-9679
  source 1..80: mol_type = other DNA
gcatcctacccctataaaaaagatcttaagagtgggaccatggataaacacaatattagatgacattaaaaccagtgcag

SEQ ID NO: 17773 - DNA, 80 bp, synthetic construct
  misc_feature 1..80: note = Synthetic: >NC_039199.1-cand-9630-9709
  source 1..80: mol_type = other DNA
agtgggaccatggataaacacaatattagatgacattaaaaccagtgcagagtcaatagggagtctatgtcaggaattag

SEQ ID NO: 17774 - DNA, 80 bp, synthetic construct
  misc_feature 1..80: note = Synthetic: >NC_039199.1-cand-9750-9829
  source 1..80: mol_type = other DNA
gaatttttggctgtataatttatacatgcatgaatcaaagcaacaccccctagcagggaagcagttattcaaacaactaa

SEQ ID NO: 17775 - DNA, 80 bp, synthetic construct
  misc_feature 1..80: note = Synthetic: >NC_039199.1-cand-9830-9909
  source 1..80: mol_type = other DNA
ataaaacattaacatcagtgcagagattttttgaaataaaaaaggaaaatgaagtagtagatctatggatgaacatacca

SEQ ID NO: 17776 - DNA, 80 bp, synthetic construct
  misc_feature 1..80: note = Synthetic: >NC_039199.1-cand-9910-9989
  source 1..80: mol_type = other DNA
atgcagtttggaggaggagatccagtagtcttctatagatctttctatagaaggacccctgattttttaactgaagcaat

SEQ ID NO: 17777 - DNA, 80 bp, synthetic construct
  misc_feature 1..80: note = Synthetic: >NC_039199.1-cand-9990-10069
  source 1..80: mol_type = other DNA
cagtcatgtggatattctgttaagaatatcagccaacataagaaatgaagcgaaaataagtttcttcaaagccttactgt

SEQ ID NO: 17778 - DNA, 80 bp, synthetic construct
  misc_feature 1..80: note = Synthetic: >NC_039199.1-cand-10070-10149
  source 1..80: mol_type = other DNA
caatagaaaaaaatgaacgtgctacactgacaacactaatgagagatcctcaagctgttggctcagagcgacaagcaaaa

SEQ ID NO: 17779 - DNA, 80 bp, synthetic construct
  misc_feature 1..80: note = Synthetic: >NC_039199.1-cand-10150-10229
  source 1..80: mol_type = other DNA
gtaacaagtgatatcaatagaacagcagttaccagcatcttaagtctttctccaaatcaacttttcagcgatagtgctat

SEQ ID NO: 17780 - DNA, 80 bp, synthetic construct
  misc_feature 1..80: note = Synthetic: >NC_039199.1-cand-10230-10309
  source 1..80: mol_type = other DNA
acactacagtagaaatgaagaagaggtcggaatcattgctgacaacataacacctgtttatcctcatggactgagagttt

SEQ ID NO: 17781 - DNA, 80 bp, synthetic construct
  misc_feature 1..80: note = Synthetic: >NC_039199.1-cand-10300-10379
  source 1..80: mol_type = other DNA
ctgagagttttgtatgaatcattaccttttcataaagctgaaaaagttgtgaatatgatatcaggaacgaaatccataac

SEQ ID NO: 17782 - DNA, 80 bp, synthetic construct
  misc_feature 1..80: note = Synthetic: >NC_039199.1-cand-10380-10459
  source 1..80: mol_type = other DNA
caacttattacagagaacatctgctattaatggtgaagatattgacagagctgtatccatgatgctggagaacctaggat

SEQ ID NO: 17783 - DNA, 80 bp, synthetic construct
  misc_feature 1..80: note = Synthetic: >NC_039199.1-cand-10460-10539
  source 1..80: mol_type = other DNA
tattatctagaatattgtcagtagttgttgatagtatagaaattccaaccaaatctaatggtaggctgatatgttgtcag

SEQ ID NO: 17784 - DNA, 80 bp, synthetic construct
  misc_feature 1..80: note = Synthetic: >NC_039199.1-cand-10540-10619
  source 1..80: mol_type = other DNA
atatctagaaccctaagggagacatcatggaataatatggaaatagttggagtaacatcccctagcatcactacatgcat

SEQ ID NO: 17785 - DNA, 80 bp, synthetic construct
  misc_feature 1..80: note = Synthetic: >NC_039199.1-cand-10620-10699
  source 1..80: mol_type = other DNA
ggatgtcatatatgcaactagctctcatttgaaagggataatcattgaaaagttcagcactgacagaactacaagaggtc

SEQ ID NO: 17786 - DNA, 80 bp, synthetic construct
  misc_feature 1..80: note = Synthetic: >NC_039199.1-cand-10700-10779
  source 1..80: mol_type = other DNA
aaagaggtccaaagagcccttgggtagggtcgagcactcaagagaaaaaattagttcctgtttataacagacaaattctt

SEQ ID NO: 17787 - DNA, 80 bp, synthetic construct
  misc_feature 1..80: note = Synthetic: >NC_039199.1-cand-10780-10859
  source 1..80: mol_type = other DNA
tcaaaacaacaaagagaacagctagaagcaattggaaaaatgagatgggtatataaagggacaccaggtttaagacgatt

SEQ ID NO: 17788 - DNA, 80 bp, synthetic construct
  misc_feature 1..80: note = Synthetic: >NC_039475.1-cand-0-79
  source 1..80: mol_type = other DNA
atgaagatggcgtctaacgacgcttccgctgccgttgctggcaaaaacaacaacaacgacaaggaaaaatcttcaagtga

SEQ ID NO: 17789 - DNA, 80 bp, synthetic construct
  misc_feature 1..80: note = Synthetic: >NC_039475.1-cand-40-119
  source 1..80: mol_type = other DNA
gcaaaaacaacaacaacgacaaggaaaaatcttcaagtgacagcttgtttgctaacatgtctgtcacttttaagaaagcc

SEQ ID NO: 17790 - DNA, 80 bp, synthetic construct
  misc_feature 1..80: note = Synthetic: >NC_039475.1-cand-140-219
  source 1..80: mol_type = other DNA
accgcccccgggagaaacaaaacaaatacaaaaaccaccaaggccaccgacaccggaattggtgaagagaatacctccac

SEQ ID NO: 17791 - DNA, 80 bp, synthetic construct
  misc_feature 1..80: note = Synthetic: >NC_039475.1-cand-220-299
  source 1..80: mol_type = other DNA
ccccacccaatggcgaggatgaaccagggatagtgtacaaggtgggagagggtgtgtctgggctgcccgacctaacaact

SEQ ID NO: 17792 - DNA, 80 bp, synthetic construct
  misc_feature 1..80: note = Synthetic: >NC_039475.1-cand-300-379
  source 1..80: mol_type = other DNA
gtggtacaacctgacgcacaaaacacagcttatagtgttcccccacttagccagagagaagtcggcgaagctaaagaacc

SEQ ID NO: 17793 - DNA, 80 bp, synthetic construct
  misc_feature 1..80: note = Synthetic: >NC_039475.1-cand-360-439
  source 1..80: mol_type = other DNA
gtcggcgaagctaaagaaccgctgcctggctccattctggaaatgtgggatggtgagatctaccactatgggctgtatgt

SEQ ID NO: 17794 - DNA, 80 bp, synthetic construct
  misc_feature 1..80: note = Synthetic: >NC_039475.1-cand-460-539
  source 1..80: mol_type = other DNA
gagtacacaaaccacctgctgcaataagccttgccaaaattgaaataacaccgctgtctctctactggagagtggtctac

SEQ ID NO: 17795 - DNA, 80 bp, synthetic construct
  misc_feature 1..80: note = Synthetic: >NC_039475.1-cand-540-619
  source 1..80: mol_type = other DNA
actccccagtatttgatagatccaggaactcttaagaacttgagtggagagactttcccatacacggcctttgacaacaa

SEQ ID NO: 17796 - DNA, 80 bp, synthetic construct
  misc_feature 1..80: note = Synthetic: >NC_039475.1-cand-620-699
  source 1..80: mol_type = other DNA
ctgttatgccttctgttgttgggtcctagacctcaacgactcctggcttagcaggagaatgatccaaagaacaactggat

SEQ ID NO: 17797 - DNA, 80 bp, synthetic construct
  misc_feature 1..80: note = Synthetic: >NC_039475.1-cand-700-779
  source 1..80: mol_type = other DNA
tcttcaaaccttatcaggattggaacagaaaacccttaccaaccatggatgaaccgaaaatcaagaaggccgcgaatgct

SEQ ID NO: 17798 - DNA, 80 bp, synthetic construct
  misc_feature 1..80: note = Synthetic: >NC_039475.1-cand-780-859
  source 1..80: mol_type = other DNA
gtcctatgcgctctctcctcactcttcactagacccattaaggacatcattggaaagcttagaccactgaacattcttaa

SEQ ID NO: 17799 - DNA, 80 bp, synthetic construct
  misc_feature 1..80: note = Synthetic: >NC_039475.1-cand-850-929
  source 1..80: mol_type = other DNA
acattcttaatatactggcaacctgcgattggacttttgcaggcatagtggaatccttgatccttcttgctgaactcttt

SEQ ID NO: 17800 - DNA, 80 bp, synthetic construct
  misc_feature 1..80: note = Synthetic: >NC_039475.1-cand-940-1019
  source 1..80: mol_type = other DNA
ggacacccccagatgtgtctgcgatgattgctcccttactcggtgactacgagatgcaaggccccgaagacctggccgtg

SEQ ID NO: 17801 - DNA, 80 bp, synthetic construct
  misc_feature 1..80: note = Synthetic: >NC_039475.1-cand-1020-1099
  source 1..80: mol_type = other DNA
gaacttgtgcccgtggtgatgggaggaataggtttggtgttaggattcaccaaagaaaagatcggcaagatgctttcatc

SEQ ID NO: 17802 - DNA, 80 bp, synthetic construct
  misc_feature 1..80: note = Synthetic: >NC_039475.1-cand-1110-1189
  source 1..80: mol_type = other DNA
acacttagggcctgcaaggatctaggatcttatggattggagatactcaaattggtcatgaagtggttcttccccaagaa

SEQ ID NO: 17803 - DNA, 80 bp, synthetic construct
  misc_feature 1..80: note = Synthetic: >NC_039475.1-cand-1190-1269
  source 1..80: mol_type = other DNA
ggaggaggctaacgaactagccatggtgagggccattgaggatgcagtcctggatttggaggcaatagaaaacaatcaca

SEQ ID NO: 17804 - DNA, 80 bp, synthetic construct
  misc_feature 1..80: note = Synthetic: >NC_039476.1-cand-5690-5769
  source 1..80: mol_type = other DNA
ctagaccttcccctgactttgacttcacatacctggtgccaccaacagtggagtctaaaacaaagccattcaccctccca

SEQ ID NO: 17805 - DNA, 80 bp, synthetic construct
  misc_feature 1..80: note = Synthetic: >NC_039476.1-cand-5790-5869
  source 1..80: mol_type = other DNA
ttccaattctaggttcccagtgtccatagaccagatgtacaccagccctaatgaaattatatcagtgcagtgtcaaaatg

SEQ ID NO: 17806 - DNA, 80 bp, synthetic construct
  misc_feature 1..80: note = Synthetic: >NC_039476.1-cand-5810-5889
  source 1..80: mol_type = other DNA
tgtccatagaccagatgtacaccagccctaatgaaattatatcagtgcagtgtcaaaatggtaggtgcacactggacggg

SEQ ID NO: 17807 - DNA, 80 bp, synthetic construct
  misc_feature 1..80: note = Synthetic: >NC_039476.1-cand-5920-5999
  source 1..80: mol_type = other DNA
agtggcatttgtgctttcaaaggtgaagtgaccgcccacttgcatgacaatgatcacctatataatgtcaccatcacaaa

SEQ ID NO: 17808 - DNA, 80 bp, synthetic construct
  misc_feature 1..80: note = Synthetic: >NC_039476.1-cand-6000-6079
  source 1..80: mol_type = other DNA
cttgaatgggtccccttttgatccctccgaggatatccctgcccctctgggtgtgcctgacttccagggtagggtttttg

SEQ ID NO: 17809 - DNA, 80 bp, synthetic construct
  misc_feature 1..80: note = Synthetic: >NC_039476.1-cand-6060-6139
  source 1..80: mol_type = other DNA
cttccagggtagggtttttggtatcatctcccaaagagataaacacaatagtcctgggcataatgaaccagcaaacaggg

SEQ ID NO: 17810 - DNA, 80 bp, synthetic construct
  misc_feature 1..80: note = Synthetic: >NC_039476.1-cand-6160-6239
  source 1..80: mol_type = other DNA
acttacacagcacagtacactccaaaacttggacaaattcaaattggcacatggcaaactgacgaccttacagtcaacca

SEQ ID NO: 17811 - DNA, 80 bp, synthetic construct
  misc_feature 1..80: note = Synthetic: >NC_039476.1-cand-6240-6319
  source 1..80: mol_type = other DNA
accagtcaaattcaccccagttggactcaatgacactgaacactttaaccaatgggtggtccctaggtatgctggtgccc

SEQ ID NO: 17812 - DNA, 80 bp, synthetic construct
  misc_feature 1..80: note = Synthetic: >NC_039476.1-cand-6320-6399
  source 1..80: mol_type = other DNA
taaacctcaatacaaaccttgccccttctgttgctccagtatttccaggagagcgcctgctcttcttcagatcatacatt

SEQ ID NO: 17813 - DNA, 80 bp, synthetic construct
  misc_feature 1..80: note = Synthetic: >NC_039476.1-cand-6410-6489
  source 1..80: mol_type = other DNA
gcggttatggaaacccagccattgattgcctactaccacaagagtgggtgcaacacttctatcaggaagcagccccttca

SEQ ID NO: 17814 - DNA, 80 bp, synthetic construct
  misc_feature 1..80: note = Synthetic: >NC_039476.1-cand-6490-6569
  source 1..80: mol_type = other DNA
atgagtgaggtggccctcgtcagatacatcaacccggacactggtcgggcactgtttgaggccaagctccacagagctgg

SEQ ID NO: 17815 - DNA, 80 bp, synthetic construct
  misc_feature 1..80: note = Synthetic: >NC_039476.1-cand-6570-6649
  source 1..80: mol_type = other DNA
tttcatgacagtctcgagcaacaccagtgccccggtggttgtgcctgccaacgggtacttcagatttgattcttgggtga

SEQ ID NO: 17816 - DNA, 80 bp, synthetic construct
  misc_feature 1..80: note = Synthetic: >NC_039476.1-cand-6650-6729
  source 1..80: mol_type = other DNA
accaattttattctctcgcccccatgggaactgggaatgggcgtagaagggttcaataatggctggagcttttgtagctg

SEQ ID NO: 17817 - DNA, 80 bp, synthetic construct
  misc_feature 1..80: note = Synthetic: >NC_039476.1-cand-6740-6819
  source 1..80: mol_type = other DNA
ggacgtgctcagcaatgggcttagttcactaatcaatgcaggtgctaatgcaataaatcagagggcagaatttgatttta

SEQ ID NO: 17818 - DNA, 80 bp, synthetic construct
  misc_feature 1..80: note = Synthetic: >NC_039476.1-cand-6820-6899
  source 1..80: mol_type = other DNA
atcagaaattgcagcaaaattcttttaatcatgataaggagatgttgcaggctcagattcaggcaactaagcagctgcag

SEQ ID NO: 17819 - DNA, 80 bp, synthetic construct
  misc_feature 1..80: note = Synthetic: >NC_039476.1-cand-6930-7009
  source 1..80: mol_type = other DNA
ttgaccgctggcggcttttcccctgctgatgcagccagaggtgctgtgaacgcgcccatgacacaggcgctggattggaa

SEQ ID NO: 17820 - DNA, 80 bp, synthetic construct
  misc_feature 1..80: note = Synthetic: >NC_040876.1-cand-5400-5479
  source 1..80: mol_type = other DNA
agctgggaatgcgttcacagctgggaaaatcatctttgccgccgtgccaccacattttcccgtagaaaatattagtgcag

SEQ ID NO: 17821 - DNA, 80 bp, synthetic construct
  misc_feature 1..80: note = Synthetic: >NC_040876.1-cand-5480-5559
  source 1..80: mol_type = other DNA
ctcaaataactatgtgcccccatgtaattgtcgatgtgagacaacttgaaccagtacttctgccccttcctgacataagg

SEQ ID NO: 17822 - DNA, 80 bp, synthetic construct
  misc_feature 1..80: note = Synthetic: >NC_040876.1-cand-5560-5639
  source 1..80: mol_type = other DNA
aacaggttcttccattacaaccaggagaacaccccccggatgagacttgtggctatgctttacacccccctaagggccaa

SEQ ID NO: 17823 - DNA, 80 bp, synthetic construct
  misc_feature 1..80: note = Synthetic: >NC_040876.1-cand-5640-5719
  source 1..80: mol_type = other DNA
ctctggtgaagatgtgtttactgtttcttgtagggttttgacccgacctgcccctgattttgaatttactttcctggtac

SEQ ID NO: 17824 - DNA, 80 bp, synthetic construct
  misc_feature 1..80: note = Synthetic: >NC_040876.1-cand-5720-5799
  source 1..80: mol_type = other DNA
caccaactgttgaatcaaagactaaacctttcacactgcccatattaactcttggtgagctatctaactccaggttccca

SEQ ID NO: 17825 - DNA, 80 bp, synthetic construct
  misc_feature 1..80: note = Synthetic: >NC_040876.1-cand-5800-5879
  source 1..80: mol_type = other DNA
gccccaatagatatgttgtacactgacccaaatgagggaatcgtagtccaaccacaaaatggcagatgcactcttgatgg

SEQ ID NO: 17826 - DNA, 80 bp, synthetic construct
  misc_feature 1..80: note = Synthetic: >NC_040876.1-cand-5850-5929
  source 1..80: mol_type = other DNA
accacaaaatggcagatgcactcttgatggcactctgcaaggcaccacacaactggtccccacccaaatttgtgctttca

SEQ ID NO: 17827 - DNA, 80 bp, synthetic construct
  misc_feature 1..80: note = Synthetic: >NC_040876.1-cand-5960-6039
  source 1..80: mol_type = other DNA
cttcagactcaaccgactcagcccctcggagaagggatcacccactccatgtgcaattaaagaatcttgatggcacgcag

SEQ ID NO: 17828 - DNA, 80 bp, synthetic construct
  misc_feature 1..80: note = Synthetic: >NC_040876.1-cand-6010-6089
  source 1..80: mol_type = other DNA
gtgcaattaaagaatcttgatggcacgcagtacgacccaactgatgaagtgccagcagtccttggtgccattgacttcaa

SEQ ID NO: 17829 - DNA, 80 bp, synthetic construct
  misc_feature 1..80: note = Synthetic: >NC_040876.1-cand-6120-6199
  source 1..80: mol_type = other DNA
agatgtgtcaggacaacaagtgggagcaactcgagctcatgaagtgcacatcaacacaaccgatcctaggtacacaccaa

SEQ ID NO: 17830 - DNA, 80 bp, synthetic construct
  misc_feature 1..80: note = Synthetic: >NC_040876.1-cand-6210-6289
  source 1..80: mol_type = other DNA
cattctcatgtactcagagtcggaagactttgtgactggacagccggtccgcttcacacccataggaatgggtgacaacg

SEQ ID NO: 17831 - DNA, 80 bp, synthetic construct
  misc_feature 1..80: note = Synthetic: >NC_040876.1-cand-6280-6359
  source 1..80: mol_type = other DNA
ggtgacaacgactggcaccagtgggagctgcctgactactctggacacctaaccctgaacatgaaccttgccccagcagt

SEQ ID NO: 17832 - DNA, 80 bp, synthetic construct
  misc_feature 1..80: note = Synthetic: >NC_040876.1-cand-6360-6439
  source 1..80: mol_type = other DNA
cgctcctgctttcccgggcgagaggattcttttcttcaggtcaatagtcccgtctgctggtggctatgggtctggacaaa

SEQ ID NO: 17833 - DNA, 80 bp, synthetic construct
  misc_feature 1..80: note = Synthetic: >NC_040876.1-cand-6440-6519
  source 1..80: mol_type = other DNA
tagattgcctcataccacaggagtgggttcagcatttctaccaggaagctgcaccatcccaatctgccgtggcactcatc

SEQ ID NO: 17834 - DNA, 80 bp, synthetic construct
  misc_feature 1..80: note = Synthetic: >NC_040876.1-cand-6520-6599
  source 1..80: mol_type = other DNA
aggtatgtcaatcctgacacaggcaggaacatctttgaggctaaattgcacagggaaggtttcatcaccgtggcaaattc

SEQ ID NO: 17835 - DNA, 80 bp, synthetic construct
  misc_feature 1..80: note = Synthetic: >NC_040876.1-cand-6600-6679
  source 1..80: mol_type = other DNA
tggtaataaccccattgttgtcccccctaatgggtattttaggtttgaggcttgggtgaaccaattttatactttgaccc

SEQ ID NO: 17836 - DNA, 80 bp, synthetic construct
  misc_feature 1..80: note = Synthetic: >NC_004911.1-cand-640-719
  source 1..80: mol_type = other DNA
aagaagcaaaagctgacaaaaaagagctacctaataagagcactgacactgaacacaatgacaaaagatgctgaaagggg

SEQ ID NO: 17837 - DNA, 80 bp, synthetic construct
  misc_feature 1..80: note = Synthetic: >NC_004912.1-cand-1490-1569
  source 1..80: mol_type = other DNA
aagaaggaagaaggaagacaaacctgtatgggttcattataaaaggaaggtcccatttgagaaatgatactgacgtggtg

SEQ ID NO: 17838 - DNA, 80 bp, synthetic construct
  misc_feature 1..80: note = Synthetic: >NC_003310.1-cand-158970-159049
  source 1..80: mol_type = other DNA
aagaatactccatagagttgattgtaaatacagatagtgaatcgactatagacataatactatctggatctacaccggaa

SEQ ID NO: 17839 - DNA, 80 bp, synthetic construct
  misc_feature 1..80: note = Synthetic: >NC_001611.1-cand-49870-49949
  source 1..80: mol_type = other DNA
aagaattcttatgatataaggaaacagcttttaggtactcatctactctacaagaattttggagagccttaacgatatca

SEQ ID NO: 17840 - DNA, 80 bp, synthetic construct
  misc_feature 1..80: note = Synthetic: >NC_001430.1-cand-5930-6009
  source 1..80: mol_type = other DNA
cagggtgagatagtatccattgagaaaactggagtctttataaatgcgccagctaaaaccaaattagaacctagtgtctt

SEQ ID NO: 17841 - DNA, 80 bp, synthetic construct
  misc_feature 1..80: note = Synthetic: >AdVB7-cand-5830-5909
  source 1..80: mol_type = other DNA
gtaagtgtaggccacgtgaccaggggtccccgccgggggggtataaaagggggcgggcctctgttcgtcctcactgtctt

SEQ ID NO: 17842 - DNA, 80 bp, synthetic construct
  misc_feature 1..80: note = Synthetic: >NC_003310.1-cand-16500-16579
  source 1..80: mol_type = other DNA
tagttttactatcataagtttataaattccacaagctactatggaatataccaaccatcttagtatagaacacatgtctt

SEQ ID NO: 17843 - DNA, 80 bp, synthetic construct
  misc_feature 1..80: note = Synthetic: >NC_039476.1-cand-170-249
  source 1..80: mol_type = other DNA
aagaccaccaactcccgagttggtcaagaggataccccctcctccacctaacggcgaagaagaagaagaaccagtcatta

SEQ ID NO: 17844 - DNA, 80 bp, synthetic construct
  misc_feature 1..80: note = Synthetic: >AdVB3-cand-6940-7019
  source 1..80: mol_type = other DNA
gcttttcttttcccacagctcgcggttaagaaggtattcttcgtgatccttccagtactcttcgaggggaaacccgtctt

SEQ ID NO: 17845 - DNA, 80 bp, synthetic construct
  misc_feature 1..80: note = Synthetic: >NC_003310.1-cand-96180-96259
  source 1..80: mol_type = other DNA
aagacttttataattcataagaatctacctagtagcgaaaactatatgtctgtagaaaaaatagctgatgatagaatagt

SEQ ID NO: 17846 - DNA, 80 bp, synthetic construct
  misc_feature 1..80: note = Synthetic: >NC_001611.1-cand-69660-69739
  source 1..80: mol_type = other DNA
ggcaggagatagatatccgtcattgcaatattccttctcgtaggcacacaatcgaatattgataaaatctccattctctt

SEQ ID NO: 17847 - DNA, 80 bp, synthetic construct
  misc_feature 1..80: note = Synthetic: >NC_003310.1-cand-92790-92869
  source 1..80: mol_type = other DNA
aagagatcgtatttttgttagagtatataacgttatgaaacgaattaattgttttataaacaaaaatataaagaaatcgt

SEQ ID NO: 17848 - DNA, 80 bp, synthetic construct
  misc_feature 1..80: note = Synthetic: >NC_006573.1-cand-580-659
  source 1..80: mol_type = other DNA
ccaaccattgtggtactgttgcaaatggtgtgttacagacttttatgaggatggcttggggtgggagctacattgctctt

SEQ ID NO: 17849 - DNA, 80 bp, synthetic construct
  misc_feature 1..80: note = Synthetic: >NC_003310.1-cand-45680-45759
  source 1..80: mol_type = other DNA
aagagtattctgatcaggattcctattcattttgaggatttaaaactctgattattgtctaatatggtctcaacacaaac

SEQ ID NO: 17850 - DNA, 80 bp, synthetic construct
  misc_feature 1..80: note = Synthetic: >NC_001611.1-cand-47540-47619
  source 1..80: mol_type = other DNA
ttatagtactttcacaagcgggtttagacggcaacatagaagcgtgtaaacgaaaactatatactatagtcagcactctt

SEQ ID NO: 17851 - DNA, 80 bp, synthetic construct
  misc_feature 1..80: note = Synthetic: >NC_003310.1-cand-36620-36699
  source 1..80: mol_type = other DNA
gacattagtagggatagaatgttgagctaatttttgtaaataactatctataaaaagattatacaaagttttaaactctt

SEQ ID NO: 17852 - DNA, 80 bp, synthetic construct
  misc_feature 1..80: note = Synthetic: >NC_001357.1-cand-3380-3459
  source 1..80: mol_type = other DNA
aagtacattttgggaataatgtaattgattgtaatgactctatgtgcagtaccagtgacgacacggtatccgctactcag

SEQ ID NO: 17853 - DNA, 80 bp, synthetic construct
  misc_feature 1..80: note = Synthetic: >AdVB7-cand-17200-17279
  source 1..80: mol_type = other DNA
aagtacggcccagcaagtcttctaatgcccaactatgctctgcacccatccatcattcccactccgggttacagaggcac

SEQ ID NO: 17854 - DNA, 80 bp, synthetic construct
  misc_feature 1..80: note = Synthetic: >NC_001611.1-cand-81960-82039
  source 1..80: mol_type = other DNA
aagtacggtaatagatttttcatattgaacggtatcttcttgatttctggttctaattccgcattaaatgatgaaactaa

SEQ ID NO: 17855 - DNA, 80 bp, synthetic construct
  misc_feature 1..80: note = Synthetic: >AdVB7-cand-13690-13769
  source 1..80: mol_type = other DNA
cccttttcactaaacagcgttcgcagcagtgaactggggagaataacccgcccgcgcttgatgggcgaggatgagtactt

SEQ ID NO: 17856 - DNA, 80 bp, synthetic construct
  misc_feature 1..80: note = Synthetic: >NC_021544.1-cand-0-79
  source 1..80: mol_type = other DNA
taaatagcccaaccggtgattcaagcatggatctgatcgagacagtgaacgcatgcgtaaaattgcaaaagcgagtactt

SEQ ID NO: 17857 - DNA, 80 bp, synthetic construct
  misc_feature 1..80: note = Synthetic: >NC_003310.1-cand-22390-22469
  source 1..80: mol_type = other DNA
aagtagagtcctcatgcttagtaatttaactattttagttaacaactattttttatgttaaatcaattagtaacaccgct

SEQ ID NO: 17858 - DNA, 80 bp, synthetic construct
  misc_feature 1..80: note = Synthetic: >NC_003310.1-cand-140330-140409
  source 1..80: mol_type = other DNA
catttataatctattagaagctgacaaaatttttttacacgcgtcagacaatgctttaataaatagttcaacatctactt

SEQ ID NO: 17859 - DNA, 80 bp, synthetic construct
  misc_feature 1..80: note = Synthetic: >NC_003310.1-cand-140570-140649
  source 1..80: mol_type = other DNA
aatattggctattagagcaccttctaagaaatctataatatctttgaaacacgatttaaaatcaaaccacgaatatactt

SEQ ID NO: 17860 - DNA, 80 bp, synthetic construct
  misc_feature 1..80: note = Synthetic: >AdVB3-cand-7100-7179
  source 1..80: mol_type = other DNA
tatgcttgggctgcattgcgcagcgaggtatgagtgagggcaaaagtgtccctgaccatgactttaaggaattgatactt

SEQ ID NO: 17861 - DNA, 80 bp, synthetic construct
  misc_feature 1..80: note = Synthetic: >NC_001722.1-cand-9940-10019
  source 1..80: mol_type = other DNA
gaggctgcagggactttccagaaggggctgtaaccaagggagggacatgggaggagctggtggggaacgccctcatactt

SEQ ID NO: 17862 - DNA, 80 bp, synthetic construct
  misc_feature 1..80: note = Synthetic: >NC_001611.1-cand-101710-101789
  source 1..80: mol_type = other DNA
ccagaacattgatgagacaataatctccgcaatacatttctcaaatgaataagtttattagacacgtggaagtttgactt

SEQ ID NO: 17863 - DNA, 80 bp, synthetic construct
  misc_feature 1..80: note = Synthetic: >NC_003310.1-cand-91270-91349
  source 1..80: mol_type = other DNA
aagtcactatttttataactaacgattacatcacctctaacatcatcatttaccaggatactgatcttcttttgtcgtaa

SEQ ID NO: 17864 - DNA, 80 bp, synthetic construct
  misc_feature 1..80: note = Synthetic: >AdVB3-cand-550-629
  source 1..80: mol_type = other DNA
aagtcagttctgcgctttgaaaatgagacacctgcgtttcctgccacaggagattatctccagtgaaaccgggattgaaa

SEQ ID NO: 17865 - DNA, 80 bp, synthetic construct
  misc_feature 1..80: note = Synthetic: >NC_003310.1-cand-116460-116539
  source 1..80: mol_type = other DNA
catattagcagtcattccatcatttaagaaggcgtcaaagataatagggagaaatgacattttggattctgttacgactt

SEQ ID NO: 17866 - DNA, 80 bp, synthetic construct
  misc_feature 1..80: note = Synthetic: >NC_003310.1-cand-114050-114129
  source 1..80: mol_type = other DNA
tgagactttagtcctatttcaatcgcttcatcctttttcgtatccggatccttttcttcagaataatagattgacgactt

SEQ ID NO: 17867 - DNA, 80 bp, synthetic construct
  misc_feature 1..80: note = Synthetic: >HCV.B4-cand-6440-6519
  source 1..80: mol_type = other DNA
aagtctaaatgactcagtggcaatgagacaaacttttggaaacctgtacaaaacattccacctgaacccaggcatagtga

SEQ ID NO: 17868 - DNA, 80 bp, synthetic construct
  misc_feature 1..80: note = Synthetic: >NC_035889.1-cand-1200-1279
  source 1..80: mol_type = other DNA
acaaggtgaagcctaccttgacaagcaatcagacactcaatatgtctgcaaaagaacgttagtggacagaggctggggaa

SEQ ID NO: 17869 - DNA, 80 bp, synthetic construct
  misc_feature 1..80: note = Synthetic: >NC_001430.1-cand-2660-2739
  source 1..80: mol_type = other DNA
acaagtacctcatccattcaaaagaatttcttcatctggactttgaacaccagagaacttgtccaaattaggaggaagat

SEQ ID NO: 17870 - DNA, 80 bp, synthetic construct
  misc_feature 1..80: note = Synthetic: >NC_001611.1-cand-89040-89119
  source 1..80: mol_type = other DNA
tactggaattagacaacaaggcacctataaattgggctcaagggtttatttattaatgctttagtgaaattttaacttgt

SEQ ID NO: 17871 - DNA, 80 bp, synthetic construct
  misc_feature 1..80: note = Synthetic: >NC_003310.1-cand-68740-68819
  source 1..80: mol_type = other DNA
gctaaactttatgtactaagtcctattctcgctgaggagttggataactttgagaggacgggagaattaactagtattgt

SEQ ID NO: 17872 - DNA, 80 bp, synthetic construct
  misc_feature 1..80: note = Synthetic: >NC_003310.1-cand-38510-38589
  source 1..80: mol_type = other DNA
acaatcaagaaaatagcttctcctcctatttgtggaagaaattgaactcctctagatgatctactgacgatagtatctcc

SEQ ID NO: 17873 - DNA, 80 bp, synthetic construct
  misc_feature 1..80: note = Synthetic: >NC_006573.1-cand-2420-2499
  source 1..80: mol_type = other DNA
atgaacattccaagagccttcttgacctttaaaatggatttgaggataccatccattgtctgaggtgacaccttgattgt

SEQ ID NO: 17874 - DNA, 80 bp, synthetic construct
  misc_feature 1..80: note = Synthetic: >NC_001611.1-cand-19150-19229
  source 1..80: mol_type = other DNA
catactaggagccatcatttcggctatcgacttaatatccctcttattttcgatagaaaatctagggagtttaagattgt

SEQ ID NO: 17875 - DNA, 80 bp, synthetic construct
  misc_feature 1..80: note = Synthetic: >NC_002058.3-cand-5040-5119
  source 1..80: mol_type = other DNA
acaatgattatcaatgagagaaacagaagatccaacattggcaattgtatggaggctttgtttcaaggaccactccagta

SEQ ID NO: 17876 - DNA, 80 bp, synthetic construct
  misc_feature 1..80: note = Synthetic: >NC_001611.1-cand-61190-61269
  source 1..80: mol_type = other DNA
acaatggaatacttcatttctaaaatagtattcgttttctaattctttaatgtgaaatcgtatactagaaagggaaaaat

SEQ ID NO: 17877 - DNA, 80 bp, synthetic construct
  misc_feature 1..80: note = Synthetic: >NC_001611.1-cand-46980-47059
  source 1..80: mol_type = other DNA
gtacgatcttgggatatcgaatctaggtatttctttagcgaaacagttacgtggatcgccacaatgataacatccattgt

SEQ ID NO: 17878 - DNA, 80 bp, synthetic construct
  misc_feature 1..80: note = Synthetic: >NC_003310.1-cand-125090-125169
  source 1..80: mol_type = other DNA
acaatgttctgtcttgtaattattattaaatatttttggacagtgtttggtatttgtcttagaacaacattttgccacgc

SEQ ID NO: 17879 - DNA, 80 bp, synthetic construct
  misc_feature 1..80: note = Synthetic: >NC_007375.1-cand-920-999
  source 1..80: mol_type = other DNA
acaattactggagacaacaccaaatggaatgagaatcaaaatcctcgagtgtttctggcgatgataacatacatcacaag

SEQ ID NO: 17880 - DNA, 80 bp, synthetic construct
  misc_feature 1..80: note = Synthetic: >NC_001611.1-cand-124010-124089
  source 1..80: mol_type = other DNA
acaattctggtccaagagctattcttggatgtgctcaagctaaacaagctatctcttgtctgagttcggatatacgaaat

SEQ ID NO: 17881 - DNA, 80 bp, synthetic construct
  misc_feature 1..80: note = Synthetic: >NC_003310.1-cand-74970-75049
  source 1..80: mol_type = other DNA
tgaatgacatcgaagattgtccaatatttttaatagctgctctttgtccattatttctatatttgactcgcaacaattgt

SEQ ID NO: 17882 - DNA, 80 bp, synthetic construct
  misc_feature 1..80: note = Synthetic: >NC_003310.1-cand-166630-166709
  source 1..80: mol_type = other DNA
acaatttctattattacagagtcatgcgacgtcggatttgattccatagatatagatgttataaacgactataaaattat

SEQ ID NO: 17883 - DNA, 80 bp, synthetic construct
  misc_feature 1..80: note = Synthetic: >NC_003310.1-cand-145890-145969
  source 1..80: mol_type = other DNA
gcgatcagatatttgctaataataagtggtattccattataactatcgacgataagcaatatcctattccatcaaattgt

SEQ ID NO: 17884 - DNA, 80 bp, synthetic construct
  misc_feature 1..80: note = Synthetic: >AdVB3-cand-2740-2819
  source 1..80: mol_type = other DNA
tagtttttatgcatgctggattgcaacatcaggtagggtgaagagtcagttgtctgtaaagaaatgcatgtttgagagat

SEQ ID NO: 17885 - DNA, 80 bp, synthetic construct
  misc_feature 1..80: note = Synthetic: >AdVB3-cand-2860-2939
  source 1..80: mol_type = other DNA
ccactgcgcggctacagaaactggctgctttattctaataaagggaaatgccagtgtaaagcataatatgatctgtggac

SEQ ID NO: 17886 - DNA, 80 bp, synthetic construct
  misc_feature 1..80: note = Synthetic: >AdVB3-cand-3010-3089
  source 1..80: mol_type = other DNA
tatcgtttcacatgcacgcaagaaatggcctgtatttgaacataatgtgattaccaagtgcaccatgcacataggtggtc

SEQ ID NO: 17887 - DNA, 80 bp, synthetic construct
  misc_feature 1..80: note = Synthetic: >AdVB3-cand-3310-3389
  source 1..80: mol_type = other DNA
cctgagacccgatcatttggtgcttgcctgcactggagcggagtttggttctagtggtgaagaaactgactaaagtgagt

SEQ ID NO: 17888 - DNA, 80 bp, synthetic construct
  misc_feature 1..80: note = Synthetic: >AdVB3-cand-3420-3499
  source 1..80: mol_type = other DNA
ggttggtaaggtggacaaattgggtaaattttgttaatttctgtcttgcagctgccatgagtggaagtgcttcttttgag

SEQ ID NO: 17889 - DNA, 80 bp, synthetic construct
  misc_feature 1..80: note = Synthetic: >AdVB3-cand-3910-3989
  source 1..80: mol_type = other DNA
ataaagaaatactgattatgaaacaaatgaatgtttatttgatttttcgcgcgcggtatgccctggaccatcggtctcga

SEQ ID NO: 17890 - DNA, 80 bp, synthetic construct
  misc_feature 1..80: note = Synthetic: >AdVB3-cand-4260-4339
  source 1..80: mol_type = other DNA
attatatgcattttggactggatcttaaggttggcaatgttgccgcctagatcccgtctcgggttcatattgtgcaggac

SEQ ID NO: 17891 - DNA, 80 bp, synthetic construct
  misc_feature 1..80: note = Synthetic: >AdVB3-cand-4510-4589
  source 1..80: mol_type = other DNA
ctgaaacatcatagttatgctcctgagtcaggtcatcataagccattttaataaactttgggcggagggtgccagattgg

SEQ ID NO: 17892 - DNA, 80 bp, synthetic construct
  misc_feature 1..80: note = Synthetic: >AdVB3-cand-4720-4799
  source 1..80: mol_type = other DNA
tgattaactgggatgagagcaaattcctaagcagctgagacttgccgcacccagtgggaccgtaaatgaccccaattacg

SEQ ID NO: 17893 - DNA, 80 bp, synthetic construct
  misc_feature 1..80: note = Synthetic: >AdVB3-cand-4770-4849
  source 1..80: mol_type = other DNA
ccagtgggaccgtaaatgaccccaattacgggttgcagatggtagtttagggagcgacagctgccgtcctcccggagcag

SEQ ID NO: 17894 - DNA, 80 bp, synthetic construct
  misc_feature 1..80: note = Synthetic: >AdVB3-cand-4950-5029
  source 1..80: mol_type = other DNA
gagaagtttttcagcggctttagcccgtcagccatgggcattttggaaagagtctgttgcaaaagctcgagccggtccca

SEQ ID NO: 17895 - DNA, 80 bp, synthetic construct
  misc_feature 1..80: note = Synthetic: >AdVB3-cand-5200-5279
  source 1..80: mol_type = other DNA
gtgcgcgcctggttgggcgcttgcgagggtgcgcttcagactcatcctgctggtcgagaaccgctgccgatcggcgccct

SEQ ID NO: 17896 - DNA, 80 bp, synthetic construct
  misc_feature 1..80: note = Synthetic: >AdVB3-cand-5300-5379
  source 1..80: mol_type = other DNA
tttaccataagttcgtagttaagcgccttggccgcgtggcctttggcacggagcttacctttggaagttttatggcaggc

SEQ ID NO: 17897 - DNA, 80 bp, synthetic construct
  misc_feature 1..80: note = Synthetic: >AdVB3-cand-5650-5729
  source 1..80: mol_type = other DNA
gcctcggtcctcttcgtagaggaacccagcccactctgatacaaaagcgcgtgtccaggccagcacaaaggaggccacgt

SEQ ID NO: 17898 - DNA, 80 bp, synthetic construct
  misc_feature 1..80: note = Synthetic: >AdVB3-cand-5760-5839
  source 1..80: mol_type = other DNA
ggtccaccttctctacggtatgtaaacacatgtccccctcctccacatccaagaatgtgattggcttgtaagtgtaggcc

SEQ ID NO: 17899 - DNA, 80 bp, synthetic construct
  misc_feature 1..80: note = Synthetic: >AiVC-cand-3360-3439
  source 1..80: mol_type = other DNA
ccaaacttctgtcccaccaacttctgaagctaccattccaatttccattccctatgcttcacccctttctgctattcctc

SEQ ID NO: 17900 - DNA, 80 bp, synthetic construct
  misc_feature 1..80: note = Synthetic: >AiVC-cand-3440-3519
  source 1..80: mol_type = other DNA
tctccttctttggtttctctgattttgcaggtggtcacgacgtggtcaacaccacgtttggaaccctgtacatcagagct

SEQ ID NO: 17901 - DNA, 80 bp, synthetic construct
  misc_feature 1..80: note = Synthetic: >AiVC-cand-3520-3599
  source 1..80: mol_type = other DNA
accttccagggagatgttccagccaccacctacatcaccatgactgctcagattgccttcggcaatttctgtggttatgt

SEQ ID NO: 17902 - DNA, 80 bp, synthetic construct
  misc_feature 1..80: note = Synthetic: >AiVC-cand-3600-3679
  source 1..80: mol_type = other DNA
tccccgtgcccctcctcctctcggaacatcacccactcctgctgctagctgtggtccgccctaagggccgttcccccatt

SEQ ID NO: 17903 - DNA, 80 bp, synthetic construct
  misc_feature 1..80: note = Synthetic: >AiVC-cand-3680-3759
  source 1..80: mol_type = other DNA
gtacgtcaatgcctgactaacgatgtaccaacccccacactctgtccagatgtgcgggtatacattgtcaaggtccagcg

SEQ ID NO: 17904 - DNA, 80 bp, synthetic construct
  misc_feature 1..80: note = Synthetic: >AiVC-cand-3760-3839
  source 1..80: mol_type = other DNA
catgacgtacacacattgggcattacgtgcggtacattcagaccgcacggaacaaatttccctctcccgccttggtctca

SEQ ID NO: 17905 - DNA, 80 bp, synthetic construct
  misc_feature 1..80: note = Synthetic: >AiVC-cand-3840-3919
  source 1..80: mol_type = other DNA
acgcctacgttgcatacgaagacccccagggcgtggtctaccaagaagtagaaccatgccactggatggttgccgttgca

SEQ ID NO: 17906 - DNA, 80 bp, synthetic construct
  misc_feature 1..80: note = Synthetic: >AiVC-cand-3920-3999
  source 1..80: mol_type = other DNA
atggtgggcacccgttgggactactctgctactaataactgtactcactttgtttctaacatcactggtgttgaactccc

SEQ ID NO: 17907 - DNA, 80 bp, synthetic construct
  misc_feature 1..80: note = Synthetic: >AiVC-cand-4000-4079
  source 1..80: mol_type = other DNA
caacactggtttttctctcctccttggcttgggcgctctcgccctcctgtctggttgcgcagccgtgcaagcgtcgaaag

SEQ ID NO: 17908 - DNA, 80 bp, synthetic construct
  misc_feature 1..80: note = Synthetic: >AiVC-cand-4080-4159
  source 1..80: mol_type = other DNA
gacgcgtgactcgacagggtctcctctctcttgaagctcctccagaggttgtccaggctgcaaaccgtgttgctgactca

SEQ ID NO: 17909 - DNA, 80 bp, synthetic construct
  misc_feature 1..80: note = Synthetic: >AiVC-cand-4160-4239
  source 1..80: mol_type = other DNA
attgagaccactgcttcggcagtgcgtgaggctgacctagccaggtctaccctcaacatctcaatggcagcaaaccgagt

SEQ ID NO: 17910 - DNA, 80 bp, synthetic construct
  misc_feature 1..80: note = Synthetic: >AiVC-cand-4240-4319
  source 1..80: mol_type = other DNA
cgctgactccattgaaaccaccgccaccgcagtgcgcgaggccgacctcgctagatcgactctcaacatctcaatggctg

SEQ ID NO: 17911 - DNA, 80 bp, synthetic construct
  misc_feature 1..80: note = Synthetic: >AiVC-cand-4320-4399
  source 1..80: mol_type = other DNA
catctgacatcagaatggcagcaacacaggtttcttccagtctgaacggcttcactgatatgctttcttctttttccaaa

SEQ ID NO: 17912 - DNA, 80 bp, synthetic construct
  misc_feature 1..80: note = Synthetic: >AiVC-cand-4400-4479
  source 1..80: mol_type = other DNA
accttcactcagggtgcttccaaaatgctgagtgatggtatctctactttccttacttgggtggccaaagtctttggtta

SEQ ID NO: 17913 - DNA, 80 bp, synthetic construct
  misc_feature 1..80: note = Synthetic: >AiVC-cand-4480-4559
  source 1..80: mol_type = other DNA
ccttcttgtcctctttggatctcccactccgatgtccatagctggtctattggtcatcatctgtgctgatcttgctcctc

SEQ ID NO: 17914 - DNA, 80 bp, synthetic construct
  misc_feature 1..80: note = Synthetic: >AiVC-cand-4560-4639
  source 1..80: mol_type = other DNA
aagcctctgaatacttccactcttgtagttctgtccttggttccctttactactggattgccaccaagcttggtctctct

SEQ ID NO: 17915 - DNA, 80 bp, synthetic construct
  misc_feature 1..80: note = Synthetic: >EVA71-cand-2720-2799
  source 1..80: mol_type = other DNA
gatagatctccctcttgagggcacaactaacccaaatggttatgccaactgggacatagatataacaggttacgcgcaaa

SEQ ID NO: 17916 - DNA, 80 bp, synthetic construct
  misc_feature 1..80: note = Synthetic: >EVA71-cand-2790-2869
  source 1..80: mol_type = other DNA
tacgcgcaaatgcgtagaaaggtggagctattcacctacatgcgctttgatgcagagttcacttttgttgcgtgcacacc

SEQ ID NO: 17917 - DNA, 80 bp, synthetic construct
  misc_feature 1..80: note = Synthetic: >EVA71-cand-2880-2959
  source 1..80: mol_type = other DNA
gttgtcccacaattgctccaatatatgtttgtgccacctggagcccctaagccagattctagggaatcccttgcatggca

SEQ ID NO: 17918 - DNA, 80 bp, synthetic construct
  misc_feature 1..80: note = Synthetic: >EVA71-cand-2960-3039
  source 1..80: mol_type = other DNA
aaccgccactaacccctcagtttttgtcaagctgtcagaccctccagcacaggtttcagttccattcatgtcacctgcga

SEQ ID NO: 17919 - DNA, 80 bp, synthetic construct
  misc_feature 1..80: note = Synthetic: >EVA71-cand-3030-3109
  source 1..80: mol_type = other DNA
tcacctgcgagtgcttatcaatggttttatgacggatatcccacattcggagaacacaaacaggagaaagatcttgaata

SEQ ID NO: 17920 - DNA, 80 bp, synthetic construct
  misc_feature 1..80: note = Synthetic: >EVA71-cand-3160-3239
  source 1..80: mol_type = other DNA
ggacctccaagtccaagtaccctttagtggttaggatttacatgagaatgaagcacgtcagggcgtggatacctcgcccg

SEQ ID NO: 17921 - DNA, 80 bp, synthetic construct
  misc_feature 1..80: note = Synthetic: >EVA71-cand-3200-3279
  source 1..80: mol_type = other DNA
catgagaatgaagcacgtcagggcgtggatacctcgcccgatgcgcaaccaaaactacctattcaaagccaacccaaatt

SEQ ID NO: 17922 - DNA, 80 bp, synthetic construct
  misc_feature 1..80: note = Synthetic: >EVA71-cand-3280-3359
  source 1..80: mol_type = other DNA
atgctggcaactccattaagccaactggtgccagtcgcacagcgatcaccactcttgggaaatttggacaacagtctggg

SEQ ID NO: 17923 - DNA, 80 bp, synthetic construct
  misc_feature 1..80: note = Synthetic: >EVA71-cand-3360-3439
  source 1..80: mol_type = other DNA
gccatttatgtgggcaactttagagtggtcaaccgacatcttgccactcacaatgattgggcaaatcttgtttgggaaga

SEQ ID NO: 17924 - DNA, 80 bp, synthetic construct
  misc_feature 1..80: note = Synthetic: >EVA71-cand-3430-3509
  source 1..80: mol_type = other DNA
tttgggaagacagctctcgcgacttgctcgtgtcatccaccaccgcccaaggttgtgacacgattgcccgttgcgattgc

SEQ ID NO: 17925 - DNA, 80 bp, synthetic construct
  misc_feature 1..80: note = Synthetic: >EVA71-cand-3520-3599
  source 1..80: mol_type = other DNA
tgtactattgtaactcgatgagaaaacactacccagtcagtttttcaaaacccagcctgatctatgtagaggctagcgag

SEQ ID NO: 17926 - DNA, 80 bp, synthetic construct
  misc_feature 1..80: note = Synthetic: >EVA71-cand-3600-3679
  source 1..80: mol_type = other DNA
tattacccagccaggtaccaatcacatctcatgctcgcagagggtcactcagaacctggtgattgcggtggtatccttag

SEQ ID NO: 17927 - DNA, 80 bp, synthetic construct
  misc_feature 1..80: note = Synthetic: >EVA71-cand-3680-3759
  source 1..80: mol_type = other DNA
gtgccaacatggcgtcgtcggcatagtgtctactggtggcaatgggctcgttggctttgcagacgtcagggacctcttgt

SEQ ID NO: 17928 - DNA, 80 bp, synthetic construct
  misc_feature 1..80: note = Synthetic: >EVA71-cand-3760-3839
  source 1..80: mol_type = other DNA
ggttagatgaagaagctatggaacagggcgtgtccgactacatcaagggtctcggagatgcttttggaacaggcttcact

SEQ ID NO: 17929 - DNA, 80 bp, synthetic construct
  misc_feature 1..80: note = Synthetic: >EVA71-cand-3840-3919
  source 1..80: mol_type = other DNA
gatgcagtctcaagggaggttgaagctctcaagaaccatcttatagggtctgaaggagcagttgagaaaattttaaagaa

SEQ ID NO: 17930 - DNA, 80 bp, synthetic construct
  misc_feature 1..80: note = Synthetic: >EVA71-cand-3920-3999
  source 1..80: mol_type = other DNA
tcttattaaactaatctctgcactagtgattgtgatcaggagtgattatgatatggttaccctcactgcaaccttagcgc

SEQ ID NO: 17931 - DNA, 80 bp, synthetic construct
  misc_feature 1..80: note = Synthetic: >EVB100-cand-5500-5579
  source 1..80: mol_type = other DNA
taagcctgggcccaccattttgatgaatgatcaagaagtgggcgtggttgatgccaaagagctggtggacaaagacggca

SEQ ID NO: 17932 - DNA, 80 bp, synthetic construct
  misc_feature 1..80: note = Synthetic: >EVB100-cand-5560-5639
  source 1..80: mol_type = other DNA
gctggtggacaaagacggcactaacctggaactaacactcttgaaactcaatagaaatgagaagttcagagacatccggg

SEQ ID NO: 17933 - DNA, 80 bp, synthetic construct
  misc_feature 1..80: note = Synthetic: >EVB100-cand-5660-5739
  source 1..80: mol_type = other DNA
gttgaggtcaatgaggctgtgcttgctataaacaccagcaagtttccaaacatgtacatcccagttggtcaagtaacaga

SEQ ID NO: 17934 - DNA, 80 bp, synthetic construct
  misc_feature 1..80: note = Synthetic: >EVB100-cand-5740-5819
  source 1..80: mol_type = other DNA
ctatggtttccttaacttgggtgggactcccaccaagcgcatgttaatgtataacttccccacacgcgcagggcaatgtg

SEQ ID NO: 17935 - DNA, 80 bp, synthetic construct
  misc_feature 1..80: note = Synthetic: >EVB100-cand-5820-5899
  source 1..80: mol_type = other DNA
gtggtgtcctaatgtcaacaggtaaagtccttgggatacacgttggtgggaacgggcatcaagggttttcggctgccctg

SEQ ID NO: 17936 - DNA, 80 bp, synthetic construct
  misc_feature 1..80: note = Synthetic: >EVB100-cand-5900-5979
  source 1..80: mol_type = other DNA
ttgcgccactacttcaatgatgaacagggcgaaattgagttcattgagagctctagggaagctggcttcccggtcattaa

SEQ ID NO: 17937 - DNA, 80 bp, synthetic construct
  misc_feature 1..80: note = Synthetic: >EVB100-cand-5980-6059
  source 1..80: mol_type = other DNA
cactcccagtaaaacaaagcttgagcccagtgtttttcatcatgtgtttgagggaaataaagaaccggcagtgttgagga

SEQ ID NO: 17938 - DNA, 80 bp, synthetic construct
  misc_feature 1..80: note = Synthetic: >EVB100-cand-6070-6149
  source 1..80: mol_type = other DNA
tagattgaaggccaattttgaagaagcaatcttctccaaatatattggaaatgtgaacacacacgtggatgagtacatga

SEQ ID NO: 17939 - DNA, 80 bp, synthetic construct
  misc_feature 1..80: note = Synthetic: >EVB100-cand-6140-6219
  source 1..80: mol_type = other DNA
gagtacatgatggaagctatcgaccattacgctggacagctagcaaccttggatatcagcacagaacccatgaaattgga

SEQ ID NO: 17940 - DNA, 80 bp, synthetic construct
  misc_feature 1..80: note = Synthetic: >EVB100-cand-6220-6299
  source 1..80: mol_type = other DNA
ggatgcagtctatggcactgaaggcttggaagcactggacctaactactagtgcagggtatccctatgttacccttggca

SEQ ID NO: 17941 - DNA, 80 bp, synthetic construct
  misc_feature 1..80: note = Synthetic: >EVB100-cand-6300-6379
  source 1..80: mol_type = other DNA
tcaaaaagagagacatcttgtccaagaagaccagggatttgacgaaactaaaagagtgcatggacaggtatgggctgaac

SEQ ID NO: 17942 - DNA, 80 bp, synthetic construct
  misc_feature 1..80: note = Synthetic: >EVB100-cand-6380-6459
  source 1..80: mol_type = other DNA
ctccccatggtcacttatgttaaggatgaattgagatcagcagaaaaggtggccaagggcaaatccaggcttattgaggc

SEQ ID NO: 17943 - DNA, 80 bp, synthetic construct
  misc_feature 1..80: note = Synthetic: >EVB100-cand-6540-6619
  source 1..80: mol_type = other DNA
taacaggcagtgcagttggctgcgatcctgatttattctggagcaagattccagtcatgctcgacggccacctcatcgcc

SEQ ID NO: 17944 - DNA, 80 bp, synthetic construct
  misc_feature 1..80: note = Synthetic: >EVB100-cand-6620-6699
  source 1..80: mol_type = other DNA
tttgactatagtggttacgatgccagccttagtccagtgtggtttgcttgcctgaaactgttgttagagaaattgggata

SEQ ID NO: 17945 - DNA, 80 bp, synthetic construct
  misc_feature 1..80: note = Synthetic: >EVB100-cand-6700-6779
  source 1..80: mol_type = other DNA
ttcacacaaagaaaccaactacatagactacttgtgcaactcccatcatctgtacagagacaaacactactttgtgagag

SEQ ID NO: 17946 - DNA, 80 bp, synthetic construct
  misc_feature 1..80: note = Synthetic: >EVB100-cand-6780-6859
  source 1..80: mol_type = other DNA
gagggatgccatctgggtgttccggaactagcatctttaattcaatgattaataacatcattattagaacgctgatgttg

SEQ ID NO: 17947 - DNA, 80 bp, synthetic construct
  misc_feature 1..80: note = Synthetic: >EVB77-cand-2490-2569
  source 1..80: mol_type = other DNA
cgtacaagacactcaaaagagcggcccatcaaactctgagcaggtcccagccttgaccgcagctgaaacgggccacacct

SEQ ID NO: 17948 - DNA, 80 bp, synthetic construct
  misc_feature 1..80: note = Synthetic: >EVB77-cand-2570-2649
  source 1..80: mol_type = other DNA
ctcaggtagaacccagtgacacaatacagaccagacacgtggtgaactaccactccaggtcagaatcaaccatagaaaat

SEQ ID NO: 17949 - DNA, 80 bp, synthetic construct
  misc_feature 1..80: note = Synthetic: >EVB77-cand-2620-2699
  source 1..80: mol_type = other DNA
cactccaggtcagaatcaaccatagaaaattttctgtgcaggtctgcatgtgtctacatcggcacctataattcaaaggg

SEQ ID NO: 17950 - DNA, 80 bp, synthetic construct
  misc_feature 1..80: note = Synthetic: >EVB77-cand-2730-2809
  source 1..80: mol_type = other DNA
cgtgtggacgattagtgtcaaagatatggcccagatgcgcaggaagtgtgaaattttcacatacttacgatttgacatgg

SEQ ID NO: 17951 - DNA, 80 bp, synthetic construct
  misc_feature 1..80: note = Synthetic: >EVB77-cand-2810-2889
  source 1..80: mol_type = other DNA
aagtgacctttgtgattacgagtacaaccaccaatggagggtcagtcagcaatgaagcccccatcacgcatcaggtgatg

SEQ ID NO: 17952 - DNA, 80 bp, synthetic construct
  misc_feature 1..80: note = Synthetic: >EVB77-cand-2890-2969
  source 1..80: mol_type = other DNA
tatgttccaccaggtgggccaatacctaagaaggtagacagttatgcatggcagacctccaccaatcctagcgtgttttg

SEQ ID NO: 17953 - DNA, 80 bp, synthetic construct
  misc_feature 1..80: note = Synthetic: >EVB77-cand-2970-3049
  source 1..80: mol_type = other DNA
gactgaagggagcacgccaccacgcatgtcaatcccatttatcagcatcggcaatgcatacagcatgttctatgatggct

SEQ ID NO: 17954 - DNA, 80 bp, synthetic construct
  misc_feature 1..80: note = Synthetic: >EVB77-cand-3050-3129
  source 1..80: mol_type = other DNA
ggtcaagttttaaagcaaccggagcatacggctattccaatctgaaccacatgggcaagctgtacataagacatgtggga

SEQ ID NO: 17955 - DNA, 80 bp, synthetic construct
  misc_feature 1..80: note = Synthetic: >EVB77-cand-3110-3189
  source 1..80: mol_type = other DNA
tgtacataagacatgtgggagcggtggagcgcactatcacaagtaaagtgcgggtgtacttcaagcccaagcacgtacgg

SEQ ID NO: 17956 - DNA, 80 bp, synthetic construct
  misc_feature 1..80: note = Synthetic: >EVB77-cand-3210-3289
  source 1..80: mol_type = other DNA
taggttgtgtccatatatcaggaaggccagtgttgactttgccgttacccccatcacagaccacagagcaaatatcaact

SEQ ID NO: 17957 - DNA, 80 bp, synthetic construct
  misc_feature 1..80: note = Synthetic: >EVB77-cand-3290-3369
  source 1..80: mol_type = other DNA
caacaacgaatctggcgaattgcggtgcttacggccaacaatctggagccatctatgtgagcaactacagagtggtgaat

SEQ ID NO: 17958 - DNA, 80 bp, synthetic construct
  misc_feature 1..80: note = Synthetic: >EVB77-cand-3370-3449
  source 1..80: mol_type = other DNA
agacacttggctacccacacagactggcaaaactgtgtgtgggaggactataatagggatctactcgttagcaccaccac

SEQ ID NO: 17959 - DNA, 80 bp, synthetic construct
  misc_feature 1..80: note = Synthetic: >EVB77-cand-3410-3489
  source 1..80: mol_type = other DNA
gggaggactataatagggatctactcgttagcaccaccacagcccatgggtgtgacgtcatagccaggtgccagtgcact

SEQ ID NO: 17960 - DNA, 80 bp, synthetic construct
  misc_feature 1..80: note = Synthetic: >EVB77-cand-3530-3609
  source 1..80: mol_type = other DNA
cggtgtcctttgaaggaccaggccttgttgaagttcaagagagtgagtactatccaaagagataccagtcccacgtgttg

SEQ ID NO: 17961 - DNA, 80 bp, synthetic construct
  misc_feature 1..80: note = Synthetic: >EVB77-cand-3560-3639
  source 1..80: mol_type = other DNA
aagttcaagagagtgagtactatccaaagagataccagtcccacgtgttgctcgccgctggattctctgaaccaggtgac

SEQ ID NO: 17962 - DNA, 80 bp, synthetic construct
  misc_feature 1..80: note = Synthetic: >EVB77-cand-3700-3779
  source 1..80: mol_type = other DNA
ggtgtcgtcggctttgctgacgtgcgtgacctcctgtggttggaggatgatgttatggagcagggagtgaaggactatgt

SEQ ID NO: 17963 - DNA, 80 bp, synthetic construct
  misc_feature 1..80: note = Synthetic: >EVB82-cand-6090-6169
  source 1..80: mol_type = other DNA
aaagccaacttcgaagaggccatattttccaaatacatcggaaatgtcaacacacatgtggatgaatacatgttggaagc

SEQ ID NO: 17964 - DNA, 80 bp, synthetic construct
  misc_feature 1..80: note = Synthetic: >EVB82-cand-6170-6249
  source 1..80: mol_type = other DNA
cattgaccactatgctgggcaactggccaccctagacattagcaccgagccaatgaaactagaggatgcagtgtacggaa

SEQ ID NO: 17965 - DNA, 80 bp, synthetic construct
  misc_feature 1..80: note = Synthetic: >EVB82-cand-6250-6329
  source 1..80: mol_type = other DNA
ctgaaggccttgaagctctcgatttaacaacaagtgcaggctacccctacgttgcactaggtatcaagaagagagatatc

SEQ ID NO: 17966 - DNA, 80 bp, synthetic construct
  misc_feature 1..80: note = Synthetic: >EVB82-cand-6330-6409
  source 1..80: mol_type = other DNA
ctctcaaagaagaccaaggacttgactaaattaaaggagtgcatggacaagtatggcttgaacttgccaatggtgaccta

SEQ ID NO: 17967 - DNA, 80 bp, synthetic construct
  misc_feature 1..80: note = Synthetic: >EVB82-cand-6410-6489
  source 1..80: mol_type = other DNA
tgtgaaggatgagctcaggtctgcagaaaaagtggcaaagggaaaatctaggctgattgaggcatctagtctaaatgact

SEQ ID NO: 17968 - DNA, 80 bp, synthetic construct
  misc_feature 1..80: note = Synthetic: >EVB82-cand-6490-6569
  source 1..80: mol_type = other DNA
cagtagcaatgagacaaacatttggcaatctgtacaaagctttccacctaaacccagggattgtgactggtagtgcggtc

SEQ ID NO: 17969 - DNA, 80 bp, synthetic construct
  misc_feature 1..80: note = Synthetic: >EVB82-cand-6570-6649
  source 1..80: mol_type = other DNA
ggatgtgacccagacctcttctggagcaaaataccagtgatgttggatggacatcttatagcattcgattattctggata

SEQ ID NO: 17970 - DNA, 80 bp, synthetic construct
  misc_feature 1..80: note = Synthetic: >EVB82-cand-6650-6729
  source 1..80: mol_type = other DNA
tgacgctagtttaagtcctgtatggtttgcctgtttaaaattgctacttgagaagcttgggtatacctataaggagacaa

SEQ ID NO: 17971 - DNA, 80 bp, synthetic construct
  misc_feature 1..80: note = Synthetic: >EVB82-cand-6710-6789
  source 1..80: mol_type = other DNA
gtatacctataaggagacaaactacattgactacttgtgcaactctcatcacctatacagggacaagcactactttgtga

SEQ ID NO: 17972 - DNA, 80 bp, synthetic construct
  misc_feature 1..80: note = Synthetic: >EVB82-cand-6800-6879
  source 1..80: mol_type = other DNA
gccctcagggtgttctggcaccagtatcttcaactcaatgatcaacaatatcataattaggacccttatgttgaaagtat

SEQ ID NO: 17973 - DNA, 80 bp, synthetic construct
  misc_feature 1..80: note = Synthetic: >EVB82-cand-6880-6959
  source 1..80: mol_type = other DNA
acaagggaattgatctggatcaattcaggatgattgcatatggagatgatgtgattgcatcatacccatggcctatagat

SEQ ID NO: 17974 - DNA, 80 bp, synthetic construct
  misc_feature 1..80: note = Synthetic: >EVB82-cand-6960-7039
  source 1..80: mol_type = other DNA
gcatctttgctcgctgaggctggcagaggctatgggctgatcatgacaccagcagataagggagagtgcttcaacgaggt

SEQ ID NO: 17975 - DNA, 80 bp, synthetic construct
  misc_feature 1..80: note = Synthetic: >EVB82-cand-7040-7119
  source 1..80: mol_type = other DNA
gacctggactaacgtcactttcctaaagaggtattttagggcagatgaacaatatcccttcttagtgcaccctgttatgc

SEQ ID NO: 17976 - DNA, 80 bp, synthetic construct
  misc_feature 1..80: note = Synthetic: >EVB82-cand-7120-7199
  source 1..80: mol_type = other DNA
ccatgaaagatatacatgagtcgattagatggaccaaagatccaaagaatacccaagaccacgtgcgctcactgtgctta

SEQ ID NO: 17977 - DNA, 80 bp, synthetic construct
  misc_feature 1..80: note = Synthetic: >EVB82-cand-7200-7279
  source 1..80: mol_type = other DNA
ttggcttggcacaatggagagcatgaatacgaggagtttattcgaaagattagaagcgtcccagttggacgttgtttgac

SEQ ID NO: 17978 - DNA, 80 bp, synthetic construct
  misc_feature 1..80: note = Synthetic: >EVB82-cand-7320-7399
  source 1..80: mol_type = other DNA
tccttctaaattagagacaatttgaaacaatttaaattggcttaaccctactgcgctaaccgaactagataacggcgtgg

SEQ ID NO: 17979 - DNA, 80 bp, synthetic construct
  misc_feature 1..80: note = Synthetic: >GU997097.1-cand-3090-3169
  source 1..80: mol_type = other DNA
gtctagaaagctccataggtatatagatagcatggaatcgaaatcagaagcggttgaggattttttatcatttttctctg

SEQ ID NO: 17980 - DNA, 80 bp, synthetic construct
  misc_feature 1..80: note = Synthetic: >GU997097.1-cand-3200-3279
  source 1..80: mol_type = other DNA
ggttacaagggaatttaaataaatgttcatccttgtttggtgttgctgtgtcacttttattcaagcgagtgtgggttgaa

SEQ ID NO: 17981 - DNA, 80 bp, synthetic construct
  misc_feature 1..80: note = Synthetic: >GU997097.1-cand-3280-3359
  source 1..80: mol_type = other DNA
ctgtttcctgaacttgagtgcttctttgagtttgctcatcactctgatgatgcattgtttatttatggctatttagaacc

SEQ ID NO: 17982 - DNA, 80 bp, synthetic construct
  misc_feature 1..80: note = Synthetic: >GU997097.1-cand-3360-3439
  source 1..80: mol_type = other DNA
agaggatgatggcacagattggttcatgtatgtatctcagcaaattcaagcagggcattatcactggcatgctgtcaatc

SEQ ID NO: 17983 - DNA, 80 bp, synthetic construct
  misc_feature 1..80: note = Synthetic: >GU997097.1-cand-3440-3519
  source 1..80: mol_type = other DNA
aagaaatgtggaagagcatgtttaacctacatgaacagctcctgctgatgggttcaattagggtgtcaccaaagaaaaca

SEQ ID NO: 17984 - DNA, 80 bp, synthetic construct
  misc_feature 1..80: note = Synthetic: >GU997097.1-cand-3520-3599
  source 1..80: mol_type = other DNA
acagtatcacctaccaatgccgaattcctgtccacattttttgagggctgcgcagtctcaatacctttcataaaaatact

SEQ ID NO: 17985 - DNA, 80 bp, synthetic construct
  misc_feature 1..80: note = Synthetic: >GU997097.1-cand-3600-3679
  source 1..80: mol_type = other DNA
cttaggttccttgtctgatttaccaggtcttgggttttttgatgatttggctgcatcccagagtagatgtgtgaaggctt

SEQ ID NO: 17986 - DNA, 80 bp, synthetic construct
  misc_feature 1..80: note = Synthetic: >GU997097.1-cand-3690-3769
  source 1..80: mol_type = other DNA
ggcatgtcctcagctagcacagttagccattgtattgtgcacaagtaaagtagagagactttacggaactgctgatggga

SEQ ID NO: 17987 - DNA, 80 bp, synthetic construct
  misc_feature 1..80: note = Synthetic: >GU997097.1-cand-3750-3829
  source 1..80: mol_type = other DNA
ttacggaactgctgatgggatgattaatagtcccatttcatttctaaaagttaataaggctcatataccaattgcattag

SEQ ID NO: 17988 - DNA, 80 bp, synthetic construct
  misc_feature 1..80: note = Synthetic: >GU997097.1-cand-3840-3919
  source 1..80: mol_type = other DNA
ctcaatgtctataatggaactggcaacagcagggataggtatggcagataagaatattctaaagaaggcattttactcat

SEQ ID NO: 17989 - DNA, 80 bp, synthetic construct
  misc_feature 1..80: note = Synthetic: >GU997097.1-cand-3920-3999
  source 1..80: mol_type = other DNA
ataaacatacaaaaagagatggtgatagatatattttagggttgtttaagttccttatgtctttaagtgatgatgtgttt

SEQ ID NO: 17990 - DNA, 80 bp, synthetic construct
  misc_feature 1..80: note = Synthetic: >GU997097.1-cand-4000-4079
  source 1..80: mol_type = other DNA
caacatgatagattaggtgagtttagttttgtaggtaaggtccaatggaaagtttttacccctaagtctgagtttgaatt

SEQ ID NO: 17991 - DNA, 80 bp, synthetic construct
  misc_feature 1..80: note = Synthetic: >GU997097.1-cand-4070-4149
  source 1..80: mol_type = other DNA
agtttgaattttatgaccagtattctatgacatatctgcaagcatggtccaaacagcaccctgtatatgattatataatt

SEQ ID NO: 17992 - DNA, 80 bp, synthetic construct
  misc_feature 1..80: note = Synthetic: >GU997097.1-cand-4160-4239
  source 1..80: mol_type = other DNA
gagataatttattagtgtatttagtacgtaaattaaatgaccctagtataattacagcaatgactatgcaatcacctctt

SEQ ID NO: 17993 - DNA, 80 bp, synthetic construct
  misc_feature 1..80: note = Synthetic: >GU997097.1-cand-4210-4289
  source 1..80: mol_type = other DNA
attacagcaatgactatgcaatcacctcttcaattaaggtttagaatgcaggctaaacaacatatgaaggtttgtaagct

SEQ ID NO: 17994 - DNA, 80 bp, synthetic construct
  misc_feature 1..80: note = Synthetic: >GU997097.1-cand-4320-4399
  source 1..80: mol_type = other DNA
tttggctgctgcagacagctttgcatcaacatatcaaccgaatgagaaggaccttgacctctttaacacactagttagtt

SEQ ID NO: 17995 - DNA, 80 bp, synthetic construct
  misc_feature 1..80: note = Synthetic: >HCV.A12-cand-4250-4329
  source 1..80: mol_type = other DNA
tcgaacctagagcaatccgcagcctcacaggaagaccttgaaataatgtttgggaatgtgtcataccttgcccatttttg

SEQ ID NO: 17996 - DNA, 80 bp, synthetic construct
  misc_feature 1..80: note = Synthetic: >HCV.A12-cand-4330-4409
  source 1..80: mol_type = other DNA
tcgcaaattccagccactctacgctgtagaagccaaaagaatctacgctttagaaaagaagatgaacaattacatgcagt

SEQ ID NO: 17997 - DNA, 80 bp, synthetic construct
  misc_feature 1..80: note = Synthetic: >HCV.A12-cand-4490-4569
  source 1..80: mol_type = other DNA
atcattgctcgagcgatagcagataaatatcattctagtgtatattcactacctccagacccagaccactttgatggtta

SEQ ID NO: 17998 - DNA, 80 bp, synthetic construct
  misc_feature 1..80: note = Synthetic: >HCV.A12-cand-4570-4649
  source 1..80: mol_type = other DNA
caaacaacaagtggtcacagtcatggatgacttgtgccaaaaccctgatggtaaggacatgtcgttattctgccagatgg

SEQ ID NO: 17999 - DNA, 80 bp, synthetic construct
  misc_feature 1..80: note = Synthetic: >HCV.A12-cand-4650-4729
  source 1..80: mol_type = other DNA
tgtctactgtggatttcatcccaccgatggcttccctcgaggagaaaggagtctctttcacatctaaatttgtcatcgcg

SEQ ID NO: 18000 - DNA, 80 bp, synthetic construct
  misc_feature 1..80: note = Synthetic: >HCV.A12-cand-4730-4809
  source 1..80: mol_type = other DNA
tccaccaacgccagtaacatcatagtgccaacagtgtccgactctgatgccatccgtcgcaggtttttcatggactgtga

SEQ ID NO: 18001 - DNA, 80 bp, synthetic construct
  misc_feature 1..80: note = Synthetic: >HCV.A12-cand-4810-4889
  source 1..80: mol_type = other DNA
catagaagtgacggactcatataaaacagatctgggcagattggacgctggccgagctgcaaaactgtgctctgagaata

SEQ ID NO: 18002 - DNA, 80 bp, synthetic construct
  misc_feature 1..80: note = Synthetic: >HCV.A12-cand-4890-4969
  source 1..80: mol_type = other DNA
acacagcaaattttaaacgctgtagtccactagtgtgtggaaaggctattcaactaagagatagaaagtccaaggttagg

SEQ ID NO: 18003 - DNA, 80 bp, synthetic construct
  misc_feature 1..80: note = Synthetic: >HCV.A12-cand-4970-5049
  source 1..80: mol_type = other DNA
tatagtgtggacacagtggtttctgagctcatgagagagtacaacaatagatctgccattggtaacactattgaagcctt

SEQ ID NO: 18004 - DNA, 80 bp, synthetic construct
  misc_feature 1..80: note = Synthetic: >HCV.A12-cand-5060-5139
  source 1..80: mol_type = other DNA
ccgcctaaatttagacccattaggatcagccttgaggaaaagccagctccggatgccatcagcgatctccttgctagcgt

SEQ ID NO: 18005 - DNA, 80 bp, synthetic construct
  misc_feature 1..80: note = Synthetic: >HCV.A12-cand-5090-5169
  source 1..80: mol_type = other DNA
cttgaggaaaagccagctccggatgccatcagcgatctccttgctagcgtggacagtgaggaagtacgccaatattgtag

SEQ ID NO: 18006 - DNA, 80 bp, synthetic construct
  misc_feature 1..80: note = Synthetic: >HCV.A12-cand-5220-5299
  source 1..80: mol_type = other DNA
tcaatagagcagtgctagttatgcaatccattgccacagtggtggcggttgtctcactagtgtacgttatctataagctc

SEQ ID NO: 18007 - DNA, 80 bp, synthetic construct
  misc_feature 1..80: note = Synthetic: >HCV.A12-cand-5300-5379
  source 1..80: mol_type = other DNA
tttgctgggttccaaggagcgtactctggtgctcccaaacaagtgcttaagaaacccatcctccgtacggcaacagtgca

SEQ ID NO: 18008 - DNA, 80 bp, synthetic construct
  misc_feature 1..80: note = Synthetic: >HCV.A12-cand-5390-5469
  source 1..80: mol_type = other DNA
ctcgatttcgctctctctctactaaggaggaatatcaggcaagtgcaaacagaccaaggacatttcaccatgctcggtgt

SEQ ID NO: 18009 - DNA, 80 bp, synthetic construct
  misc_feature 1..80: note = Synthetic: >HCV.A12-cand-5470-5549
  source 1..80: mol_type = other DNA
cagggaccgtttggctgttctcccacgccactcccaacccggtaaaacaatctgggtagagcacaaacttgtgaacatcc

SEQ ID NO: 18010 - DNA, 80 bp, synthetic construct
  misc_feature 1..80: note = Synthetic: >HCV.A12-cand-5580-5659
  source 1..80: mol_type = other DNA
gggtcaacctagaactaaccctaatcaccctcgacactaatgagaagttcagagacatcactaagttcatcccagagagc

SEQ ID NO: 18011 - DNA, 80 bp, synthetic construct
  misc_feature 1..80: note = Synthetic: >HCV.A12-cand-7000-7079
  source 1..80: mol_type = other DNA
tgcagacaaatccccttgctttaatgaagtcaattgggaaaacgcaacttttctcaagagaggtttcttgcctgatgagc

SEQ ID NO: 18012 - DNA, 80 bp, synthetic construct
  misc_feature 1..80: note = Synthetic: >HCV.A12-cand-7080-7159
  source 1..80: mol_type = other DNA
aattcccatttctgattcatcctactatgccaatgaaggagatccacgagtccattcggtggaccaaggatgcacgcaac

SEQ ID NO: 18013 - DNA, 80 bp, synthetic construct
  misc_feature 1..80: note = Synthetic: >HCV.A12-cand-7160-7239
  source 1..80: mol_type = other DNA
acacaagaccacgtgcgatccctatgcttattggcgtggcacaacggcaagcaagaatatgacaactttgtgagcacaat

SEQ ID NO: 18014 - DNA, 80 bp, synthetic construct
  misc_feature 1..80: note = Synthetic: >HCV.A12-cand-7240-7319
  source 1..80: mol_type = other DNA
caggtctgtcccagtaggaaaagcattggctatcccgaattatgagaatctgagacgtaattggctcgagttgttttaga

SEQ ID NO: 18015 - DNA, 80 bp, synthetic construct
  misc_feature 1..80: note = Synthetic: >HCV.A12-cand-7290-7369
  source 1..80: mol_type = other DNA
tgagacgtaattggctcgagttgttttagaggctaaactcacacctcaaccccaccagaaatctggtcgcgaatatgact

SEQ ID NO: 18016 - DNA, 80 bp, synthetic construct
  misc_feature 1..80: note = Synthetic: >HCV.A13-cand-60-139
  source 1..80: mol_type = other DNA
cggtacccttgtacgcctgttttatacccccttccccccgtaacttagaagacttaaaaaaccaagttcaatagaaaggg

SEQ ID NO: 18017 - DNA, 80 bp, synthetic construct
  misc_feature 1..80: note = Synthetic: >HCV.A13-cand-160-239
  source 1..80: mol_type = other DNA
cgaacaagcacttctgtttccccggtgatgttgtatagactgtccccacggttgaaagcgactgatccgttatccgctct

SEQ ID NO: 18018 - DNA, 80 bp, synthetic construct
  misc_feature 1..80: note = Synthetic: >HCV.A13-cand-640-719
  source 1..80: mol_type = other DNA
ccggtgaaagttagacacatcatttacctatttgttggattcactcctttgacttcaaacacacttcacttcatacgagt

SEQ ID NO: 18019 - DNA, 80 bp, synthetic construct
  misc_feature 1..80: note = Synthetic: >HCV.A13-cand-720-799
  source 1..80: mol_type = other DNA
tgtattactaattaggcaactttatcacaatgggagctcaagtttcatcacaaaaggttggagctcatgagaacaccaat

SEQ ID NO: 18020 - DNA, 80 bp, synthetic construct
  misc_feature 1..80: note = Synthetic: >HCV.A13-cand-800-879
  source 1..80: mol_type = other DNA
gttgccactggtgggtcaacagtgaattacaccaccataaattattacaaagactcagctagtaatgcagcctcaaaaca

SEQ ID NO: 18021 - DNA, 80 bp, synthetic construct
  misc_feature 1..80: note = Synthetic: >HCV.A13-cand-880-959
  source 1..80: mol_type = other DNA
agatttttcccaagatccatccaaattcacagaaccagtcaaagatgtactaataaagtcagcacctgctctgaactcac

SEQ ID NO: 18022 - DNA, 80 bp, synthetic construct
  misc_feature 1..80: note = Synthetic: >HCV.A13-cand-960-1039
  source 1..80: mol_type = other DNA
caaacatagaggcatgtggatatagtgacagagtaatgcaactgacccttggaaactccaccatcaccactcaggaagca

SEQ ID NO: 18023 - DNA, 80 bp, synthetic construct
  misc_feature 1..80: note = Synthetic: >HCV.A13-cand-1050-1129
  source 1..80: mol_type = other DNA
ttgtagcatatggagtgtggccctcctatctgagtgacaaggatgctaacccagtagaccaacccactgagccagatgtt

SEQ ID NO: 18024 - DNA, 80 bp, synthetic construct
  misc_feature 1..80: note = Synthetic: >HCV.A13-cand-1170-1249
  source 1..80: mol_type = other DNA
gcaaggagtccaagggatggtggtggaaactacctgatgccctgaaagacatgggattgtttggtcaaaacatgtattac

SEQ ID NO: 18025 - DNA, 80 bp, synthetic construct
  misc_feature 1..80: note = Synthetic: >HCV.A13-cand-1210-1289
  source 1..80: mol_type = other DNA
cctgaaagacatgggattgtttggtcaaaacatgtattaccactacttgggaagatcaggttacacagtgcatgtccagt

SEQ ID NO: 18026 - DNA, 80 bp, synthetic construct
  misc_feature 1..80: note = Synthetic: >HCV.A13-cand-1290-1369
  source 1..80: mol_type = other DNA
gcaatgcttcaaagttccaccaaggcacgcttggtgtgtttgccgtgcctgagtattgccttgcaggtgattccaattca

SEQ ID NO: 18027 - DNA, 80 bp, synthetic construct
  misc_feature 1..80: note = Synthetic: >HCV.A24-cand-5620-5699
  source 1..80: mol_type = other DNA
ggaaggaggtagaagtcctagatgctgaggcattggaagatcagtcaggcacaaatttggaaattaccatagtaaaacta

SEQ ID NO: 18028 - DNA, 80 bp, synthetic construct
  misc_feature 1..80: note = Synthetic: >HCV.A24-cand-5700-5779
  source 1..80: mol_type = other DNA
aaaagaaatgaaaaatttagagatattagaccacacatcccaacccagatcactgagacaaatgatggagtgttgatcgt

SEQ ID NO: 18029 - DNA, 80 bp, synthetic construct
  misc_feature 1..80: note = Synthetic: >HCV.A24-cand-5750-5829
  source 1..80: mol_type = other DNA
cactgagacaaatgatggagtgttgatcgtgaacactagtaagtaccctaacatgtatatccctgtaggtgctgtgaccg

SEQ ID NO: 18030 - DNA, 80 bp, synthetic construct
  misc_feature 1..80: note = Synthetic: >HCV.A24-cand-5850-5929
  source 1..80: mol_type = other DNA
ggtggccgacaaactgctcgcactttaatgtaccacttcccaacaagagcaggccagtgtggtggtgttgtcacgtgtac

SEQ ID NO: 18031 - DNA, 80 bp, synthetic construct
  misc_feature 1..80: note = Synthetic: >HCV.A24-cand-5930-6009
  source 1..80: mol_type = other DNA
tggcaaggtgattgggatacatgttggagggaacggttcacatgggtttgcagcagccctgaaacgatcttacttcactc

SEQ ID NO: 18032 - DNA, 80 bp, synthetic construct
  misc_feature 1..80: note = Synthetic: >HCV.A24-cand-6010-6089
  source 1..80: mol_type = other DNA
agagtcaaggtgagatccaatggatgagaccatcaaaagaagtagggtacccggtgattaacgcaccaagtaaaaccaaa

SEQ ID NO: 18033 - DNA, 80 bp, synthetic construct
  misc_feature 1..80: note = Synthetic: >HCV.A24-cand-6080-6159
  source 1..80: mol_type = other DNA
taaaaccaaacttgagcccagtgttttccattatgtgtttgagggtgtgaaagaaccagcagttcttaccaagaatgacc

SEQ ID NO: 18034 - DNA, 80 bp, synthetic construct
  misc_feature 1..80: note = Synthetic: >HCV.A24-cand-6160-6239
  source 1..80: mol_type = other DNA
ccaggctaaagacagactttgaagaggccattttctctaagtatgtgggtaacaagatcacagaagttgatgagtacatg

SEQ ID NO: 18035 - DNA, 80 bp, synthetic construct
  misc_feature 1..80: note = Synthetic: >HCV.A24-cand-6240-6319
  source 1..80: mol_type = other DNA
aaggaagccgtcgatcactatgcaggccaactcatgtctctggatatcaacacagaacaaatgtgtcttgaagatgcaat

SEQ ID NO: 18036 - DNA, 80 bp, synthetic construct
  misc_feature 1..80: note = Synthetic: >HCV.A24-cand-6320-6399
  source 1..80: mol_type = other DNA
gtatggcactgatggtcttgaagcattagatcttagcaccagtgctggttacccttatgtggcaatgggaaagaaaaaga

SEQ ID NO: 18037 - DNA, 80 bp, synthetic construct
  misc_feature 1..80: note = Synthetic: >HCV.A24-cand-6400-6479
  source 1..80: mol_type = other DNA
gagacattttgaacaaacagacccgagatacaaaggaaatgcagagacttttggacacctacggaattaacctaccccta

SEQ ID NO: 18038 - DNA, 80 bp, synthetic construct
  misc_feature 1..80: note = Synthetic: >HCV.A24-cand-6480-6559
  source 1..80: mol_type = other DNA
gtcacctatgtgaaagatgagctcaggtccaaaaccaaggtggagcaaggaaaatccaggttgattgaagcttctagtct

SEQ ID NO: 18039 - DNA, 80 bp, synthetic construct
  misc_feature 1..80: note = Synthetic: >HCV.A24-cand-6560-6639
  source 1..80: mol_type = other DNA
caatgactcagtggcaatgcgaatggcatttggaaacttatacgcagcatttcacaagaatccaggtgtagtgacaggat

SEQ ID NO: 18040 - DNA, 80 bp, synthetic construct
  misc_feature 1..80: note = Synthetic: >HCV.A24-cand-6640-6719
  source 1..80: mol_type = other DNA
cagctgtagggtgtgacccagacttgttttggagtaaaataccagttttgatggaggaaaagctgtttgcttttgattac

SEQ ID NO: 18041 - DNA, 80 bp, synthetic construct
  misc_feature 1..80: note = Synthetic: >HCV.A24-cand-6710-6789
  source 1..80: mol_type = other DNA
ttttgattacacaggctatgatgcttcactcagtcctgcatggtttgaggctctcaagatggttcttgaaaagattgggt

SEQ ID NO: 18042 - DNA, 80 bp, synthetic construct
  misc_feature 1..80: note = Synthetic: >HCV.A24-cand-6790-6869
  source 1..80: mol_type = other DNA
ttggtgacagaatagactacattgattacttaaaccactctcaccatctctacaaaaacaagacatactgtgtcaagggt

SEQ ID NO: 18043 - DNA, 80 bp, synthetic construct
  misc_feature 1..80: note = Synthetic: >HCV.A7-cand-2750-2829
  source 1..80: mol_type = other DNA
ggtttgcaaagtgggaaatagatataatgggctttgtgcaaatgaggcgcaaacttgagctcatgacatacatgagattc

SEQ ID NO: 18044 - DNA, 80 bp, synthetic construct
  misc_feature 1..80: note = Synthetic: >HCV.A7-cand-2780-2859
  source 1..80: mol_type = other DNA
gctttgtgcaaatgaggcgcaaacttgagctcatgacatacatgagattctccgccgagtttacatttgtagccagcact

SEQ ID NO: 18045 - DNA, 80 bp, synthetic construct
  misc_feature 1..80: note = Synthetic: >HCV.A7-cand-2920-2999
  source 1..80: mol_type = other DNA
ctgccaaccaagcgagattcatacgagtggcaaacatccaccaacccctctatcatcagcaaaatggcggatccacctgc

SEQ ID NO: 18046 - DNA, 80 bp, synthetic construct
  misc_feature 1..80: note = Synthetic: >HCV.A7-cand-2980-3059
  source 1..80: mol_type = other DNA
aaaatggcggatccacctgcccaagtatctgtcccattcctctctccagcatcagcgtaccagtggttctatgatggcta

SEQ ID NO: 18047 - DNA, 80 bp, synthetic construct
  misc_feature 1..80: note = Synthetic: >HCV.A7-cand-3060-3139
  source 1..80: mol_type = other DNA
ccccacatttgggaaacacccaatagaccaagacttccaatacggcatgtgcccaaacaacatgatgggcacattctgcg

SEQ ID NO: 18048 - DNA, 80 bp, synthetic construct
  misc_feature 1..80: note = Synthetic: >HCV.A7-cand-3140-3219
  source 1..80: mol_type = other DNA
tgcgcatgatcggtgaaggcaaaccgactcagtcagtcaccatacgcatatacatgagattaaaacacatccgtgcatgg

SEQ ID NO: 18049 - DNA, 80 bp, synthetic construct
  misc_feature 1..80: note = Synthetic: >HCV.A7-cand-3200-3279
  source 1..80: mol_type = other DNA
taaaacacatccgtgcatgggtgccgcgaccactgagaagtcaaaattacaccatgagaaattaccctaactacaatggg

SEQ ID NO: 18050 - DNA, 80 bp, synthetic construct
  misc_feature 1..80: note = Synthetic: >HCV.A7-cand-3280-3359
  source 1..80: mol_type = other DNA
ggtgcaataaaatgcacatcaaagagtagagctaccataacaactttaggaaaatttggacaacaatccggagcaatcta

SEQ ID NO: 18051 - DNA, 80 bp, synthetic construct
  misc_feature 1..80: note = Synthetic: >HCV.A7-cand-3380-3459
  source 1..80: mol_type = other DNA
tgaacaggcatctcgccacccacaatgactgggcaaacctagtgtgggaggacagctccagagatctgcttgtctcatcc

SEQ ID NO: 18052 - DNA, 80 bp, synthetic construct
  misc_feature 1..80: note = Synthetic: >HCV.A7-cand-3430-3509
  source 1..80: mol_type = other DNA
gacagctccagagatctgcttgtctcatccactactgctcaagggtgtgataccatcgcccgttgtgactgccaaactgg

SEQ ID NO: 18053 - DNA, 80 bp, synthetic construct
  misc_feature 1..80: note = Synthetic: >HCV.A7-cand-3540-3619
  source 1..80: mol_type = other DNA
ctatccagtcagcttctctaagcccagtttaatttttgtggaagctagtgagtactacccagcaaggtaccaatcacacc

SEQ ID NO: 18054 - DNA, 80 bp, synthetic construct
  misc_feature 1..80: note = Synthetic: >HCV.A7-cand-3620-3699
  source 1..80: mol_type = other DNA
tcatgctcgctgaaggtcactctgaaccaggtgactgtggtggaatcctcagatgccaacacggagttgtgggtatagtc

SEQ ID NO: 18055 - DNA, 80 bp, synthetic construct
  misc_feature 1..80: note = Synthetic: >HCV.A7-cand-3730-3809
  source 1..80: mol_type = other DNA
gctgatgtcagagaccttttgtggctagatgaagaagctatggaacaaggcgtgtctgattacatcaaaggactgggtga

SEQ ID NO: 18056 - DNA, 80 bp, synthetic construct
  misc_feature 1..80: note = Synthetic: >HCV.A7-cand-3790-3869
  source 1..80: mol_type = other DNA
tacatcaaaggactgggtgacgcctttggcacaggattcactgacgcagtttctagagaagtggaggccttgaagaatca

SEQ ID NO: 18057 - DNA, 80 bp, synthetic construct
  misc_feature 1..80: note = Synthetic: >HCV.A7-cand-3870-3949
  source 1..80: mol_type = other DNA
cctaatagggtcagagggagcggtggagaagatcctgaaaaacctggtgaagctcatttcagcactggtcatagtcatta

SEQ ID NO: 18058 - DNA, 80 bp, synthetic construct
  misc_feature 1..80: note = Synthetic: >HCV.A7-cand-3950-4029
  source 1..80: mol_type = other DNA
gaagtgattatgatatggtcactctcacagcaacccttgccctaattggatgtcacggtagcccttgggcctggatcaaa

SEQ ID NO: 18059 - DNA, 80 bp, synthetic construct
  misc_feature 1..80: note = Synthetic: >HQ537689.1-cand-6640-6719
  source 1..80: mol_type = other DNA
gtgacagtacatataaaaatgaaaattttaaagaatatataagacatgttgaagaatatgatctacagtttgtttttcaa

SEQ ID NO: 18060 - DNA, 80 bp, synthetic construct
  misc_feature 1..80: note = Synthetic: >HQ537689.1-cand-6720-6799
  source 1..80: mol_type = other DNA
ctatgcaaagttaccctaactgcagaagttatgacatatattcatgctatgaatccagatattttagaagattggcaatt

SEQ ID NO: 18061 - DNA, 80 bp, synthetic construct
  misc_feature 1..80: note = Synthetic: >HQ537689.1-cand-6800-6879
  source 1..80: mol_type = other DNA
tggtttaacacctcctccatctgctagtttacaggatacctataggtttgttacctctcaggctattacgtgtcaaaaaa

SEQ ID NO: 18062 - DNA, 80 bp, synthetic construct
  misc_feature 1..80: note = Synthetic: >HQ537689.1-cand-6880-6959
  source 1..80: mol_type = other DNA
cagtacctccaaaggaaaaggaagaccccttaggtaaatatacattttgggaagtggatttaaaggaaaaattttcagca

SEQ ID NO: 18063 - DNA, 80 bp, synthetic construct
  misc_feature 1..80: note = Synthetic: >HQ537689.1-cand-6960-7039
  source 1..80: mol_type = other DNA
gatttagatcagtttcctttgggacgcaagtttttattacaggcaggtcttaaagcaaaacctaaacttaaacgtgcagc

SEQ ID NO: 18064 - DNA, 80 bp, synthetic construct
  misc_feature 1..80: note = Synthetic: >HQ537689.1-cand-7040-7119
  source 1..80: mol_type = other DNA
ccccacatccacccgcacatcgtctgcaaaacgcaaaaaggttaaaaaataacactttgtgtaattgtgttatgttgttg

SEQ ID NO: 18065 - DNA, 80 bp, synthetic construct
  misc_feature 1..80: note = Synthetic: >HQ537689.1-cand-7120-7199
  source 1..80: mol_type = other DNA
ttttgttctgtctatgtactttgtgttgttgtgttgtgttgttgtttgttttttgtgtatgtgttacaatgtatgttatg

SEQ ID NO: 18066 - DNA, 80 bp, synthetic construct
  misc_feature 1..80: note = Synthetic: >HQ537689.1-cand-7200-7279
  source 1..80: mol_type = other DNA
ttgtatgttactgtgtttgttttatgtgtacttgtttgtgtgcatgttctatgtacttgtcagtttcctgtttgtgtata

SEQ ID NO: 18067 - DNA, 80 bp, synthetic construct
  misc_feature 1..80: note = Synthetic: >HQ537689.1-cand-7280-7359
  source 1..80: mol_type = other DNA
tgttaataaaacattgtgtgtatttgttaaactatttgtatgtatgttatgtatatgggtgtacctatatgagtaaggag

SEQ ID NO: 18068 - DNA, 80 bp, synthetic construct
  misc_feature 1..80: note = Synthetic: >HQ537689.1-cand-7360-7439
  source 1..80: mol_type = other DNA
ttgtattgcttgccctaccctgcattgcaatgtacctacctttatttccctatatttgtagtacctacatgtttagtatt

SEQ ID NO: 18069 - DNA, 80 bp, synthetic construct
  misc_feature 1..80: note = Synthetic: >HQ537689.1-cand-7440-7519
  source 1..80: mol_type = other DNA
gctttaccttttgacatactagtgtccatattgtacaatttcctccattttgtatgcctaaccgttttcggttacttggc

SEQ ID NO: 18070 - DNA, 80 bp, synthetic construct
  misc_feature 1..80: note = Synthetic: >HQ537689.1-cand-7520-7599
  source 1..80: mol_type = other DNA
atacataccctataacattggcagaacagttaatccttttctttcctgcactgtgtttgtctgtacttgctgcattggca

SEQ ID NO: 18071 - DNA, 80 bp, synthetic construct
  misc_feature 1..80: note = Synthetic: >HQ537689.1-cand-7600-7679
  source 1..80: mol_type = other DNA
tacataccctatgacattggcagaacagttaatccttttgtttcctgcactgtgtttgtctgtacttgctgcattgactc

SEQ ID NO: 18072 - DNA, 80 bp, synthetic construct
  misc_feature 1..80: note = Synthetic: >HQ537689.1-cand-7660-7739
  source 1..80: mol_type = other DNA
tgtacttgctgcattgactcatatatacatgcagtgcaattgcaaaatacttaattgtactaatagtttacacatgcttt

SEQ ID NO: 18073 - DNA, 80 bp, synthetic construct
  misc_feature 1..80: note = Synthetic: >HQ537689.1-cand-7740-7819
  source 1..80: mol_type = other DNA
taggcacatatttttactttactttcaaaccttaagtgcagttttggcttacacaattgctttgtatgccaaactatgcc

SEQ ID NO: 18074 - DNA, 80 bp, synthetic construct
  misc_feature 1..80: note = Synthetic: >HQ537689.1-cand-7820-7899
  source 1..80: mol_type = other DNA
ttgtaaaagtgagtcactacctgtttattaccaggtgtggactaaccgttttaggtcatattggtcatttataatctttt

SEQ ID NO: 18075 - DNA, 80 bp, synthetic construct
  misc_feature 1..80: note = Synthetic: >KC470281.1-cand-3660-3739
  source 1..80: mol_type = other DNA
atcaaccaatacaggaatattgactgtaacatatagttctgaatcacaacgccaaaaatttttggaaactgttaaaatac

SEQ ID NO: 18076 - DNA, 80 bp, synthetic construct
  misc_feature 1..80: note = Synthetic: >KC470281.1-cand-3730-3809
  source 1..80: mol_type = other DNA
gttaaaataccttccagtgtaactgtttcattaggatatatgacattataagtgttgtattgtaccacactgtatactgt

SEQ ID NO: 18077 - DNA, 80 bp, synthetic construct
  misc_feature 1..80: note = Synthetic: >KC470281.1-cand-3810-3889
  source 1..80: mol_type = other DNA
atgtatattgaatacataccaccatacatgtacatatgattgtactggtatttttggtgtggttttgtgtgtgcatgtat

SEQ ID NO: 18078 - DNA, 80 bp, synthetic construct
  misc_feature 1..80: note = Synthetic: >KC470281.1-cand-3890-3969
  source 1..80: mol_type = other DNA
atatgttgcactgtcccgcttctgcagtccatgcatgtgtgtgtgtatgtgtggatacttgtgtttgtgtttatattagt

SEQ ID NO: 18079 - DNA, 80 bp, synthetic construct
  misc_feature 1..80: note = Synthetic: >KC470281.1-cand-3970-4049
  source 1..80: mol_type = other DNA
acgtaccacaccattggaggtctttgctgtatatatacttttttttttactgcctatgtgggtattacacagttttgctc

SEQ ID NO: 18080 - DNA, 80 bp, synthetic construct
  misc_feature 1..80: note = Synthetic: >KC470281.1-cand-4060-4139
  source 1..80: mol_type = other DNA
gccttaagttttgtattgtgcatttgtattggtgtatatttttataaataaatatggtatcacaccgtgctgccaggcgc

SEQ ID NO: 18081 - DNA, 80 bp, synthetic construct
  misc_feature 1..80: note = Synthetic: >KC470281.1-cand-4140-4219
  source 1..80: mol_type = other DNA
aagcgtgcatctgcaactgaattatataaaacatgtaaacaatcaggcacatgtcctcctgatgttataaataaggttga

SEQ ID NO: 18082 - DNA, 80 bp, synthetic construct
  misc_feature 1..80: note = Synthetic: >KC470281.1-cand-4220-4299
  source 1..80: mol_type = other DNA
aggcaccacacttgcagataaaatattgcaatggaccagtttaggtatttttctgggtggcctaggcattggtactgggt

SEQ ID NO: 18083 - DNA, 80 bp, synthetic construct
  misc_feature 1..80: note = Synthetic: >KC470281.1-cand-4310-4389
  source 1..80: mol_type = other DNA
gggtcgtactgggtacattcctttaggtggtaaacctaatactgttgtagatgtttcgcctgcacgtccacctgtggtta

SEQ ID NO: 18084 - DNA, 80 bp, synthetic construct
  misc_feature 1..80: note = Synthetic: >KC470281.1-cand-4380-4459
  source 1..80: mol_type = other DNA
cctgtggttattgaacctgtgggtcctacagaaccctccattgtgcaattggtggaggattccagtgttattacatctgg

SEQ ID NO: 18085 - DNA, 80 bp, synthetic construct
  misc_feature 1..80: note = Synthetic: >KC470281.1-cand-4460-4539
  source 1..80: mol_type = other DNA
cacaccggtaccaacatttacaggcacttctgggtttgaaattacatcgtcttctaccactacacctgctgtgttagaca

SEQ ID NO: 18086 - DNA, 80 bp, synthetic construct
  misc_feature 1..80: note = Synthetic: >KC470281.1-cand-4540-4619
  source 1..80: mol_type = other DNA
ttaccccttcgtctgggtctgtgcaagtaagcagtactagttttactaaccctgcatttacagaccccactatcatagaa

SEQ ID NO: 18087 - DNA, 80 bp, synthetic construct
  misc_feature 1..80: note = Synthetic: >KC470281.1-cand-4620-4699
  source 1..80: mol_type = other DNA
gtgcctcaaacaggtgaagtctctggtaatgtgtttgtaagtacccccacatcgggaacacatggatatgaagaaatacc

SEQ ID NO: 18088 - DNA, 80 bp, synthetic construct
  misc_feature 1..80: note = Synthetic: >KC470281.1-cand-4680-4759
  source 1..80: mol_type = other DNA
catggatatgaagaaatacctatgcaggtatttgcaacacatggcactggtacagaacctattagtagtacacctatacc

SEQ ID NO: 18089 - DNA, 80 bp, synthetic construct
  misc_feature 1..80: note = Synthetic: >KC470281.1-cand-4860-4939
  source 1..80: mol_type = other DNA
acatttgataatcctgcttttgagcctgttgatactacacttacatatgaacctgctgacatagctcctgatccggattt

SEQ ID NO: 18090 - DNA, 80 bp, synthetic construct
  misc_feature 1..80: note = Synthetic: >KC470281.1-cand-4950-5029
  source 1..80: mol_type = other DNA
gttcgtttacataggcctgccttaacttctcgaagaggcacagtacgttttagcagagtaggcaaaaaggcaactatgtt

SEQ ID NO: 18091 - DNA, 80 bp, synthetic construct
  misc_feature 1..80: note = Synthetic: >NC_001434.1-cand-1620-1699
  source 1..80: mol_type = other DNA
ttgtggctcgtgcaggccggctgaccgccacagtaaaggtctcccaggtcgacgggcggatcgattgtgagacccttctc

SEQ ID NO: 18092 - DNA, 80 bp, synthetic construct
  misc_feature 1..80: note = Synthetic: >NC_001434.1-cand-1740-1819
  source 1..80: mol_type = other DNA
ttttagagactaatggcccagagcgccacaatctctcttttgatgccagtcagagcactatggccgccggccctttcagt

SEQ ID NO: 18093 - DNA, 80 bp, synthetic construct
  misc_feature 1..80: note = Synthetic: >NC_001434.1-cand-1780-1859
  source 1..80: mol_type = other DNA
tgatgccagtcagagcactatggccgccggccctttcagtctcacctatgccgcctctgctgctgggctggaggtgcgct

SEQ ID NO: 18094 - DNA, 80 bp, synthetic construct
  misc_feature 1..80: note = Synthetic: >NC_001434.1-cand-1860-1939
  source 1..80: mol_type = other DNA
atgtcgctgccgggcttgaccaccgggcggtttttgcccccggcgtttcaccccggtcagcccctggcgaggtcaccgcc

SEQ ID NO: 18095 - DNA, 80 bp, synthetic construct
  misc_feature 1..80: note = Synthetic: >NC_001434.1-cand-1940-2019
  source 1..80: mol_type = other DNA
ttttgttctgccctatacaggtttaatcgcgaggcccagcgcctttcgctcaccggtaatttttggttccatcctgaggg

SEQ ID NO: 18096 - DNA, 80 bp, synthetic construct
  misc_feature 1..80: note = Synthetic: >NC_001434.1-cand-2020-2099
  source 1..80: mol_type = other DNA
gctccttggcccctttgccccgttttcccccgggcatgtttgggagtcggctaatccattctgtggagagagcacacttt

SEQ ID NO: 18097 - DNA, 80 bp, synthetic construct
  misc_feature 1..80: note = Synthetic: >NC_001434.1-cand-2110-2189
  source 1..80: mol_type = other DNA
ttggtcggaggttgatgctgtttctagtccagcccagcccgacttaggttttatatctgagccttctatacctagtaggg

SEQ ID NO: 18098 - DNA, 80 bp, synthetic construct
  misc_feature 1..80: note = Synthetic: >NC_001434.1-cand-2190-2269
  source 1..80: mol_type = other DNA
ccgccacacttaccccggcggcccctctacccccccctgcaccggatccttcccctactccctctgctccggcgcgtggt

SEQ ID NO: 18099 - DNA, 80 bp, synthetic construct
  misc_feature 1..80: note = Synthetic: >NC_001434.1-cand-2270-2349
  source 1..80: mol_type = other DNA
gagccggctcctggcgctaccgcccgggccccggccataacccaccaggcggcccggcatcgccgcctgctctttaccta

SEQ ID NO: 18100 - DNA, 80 bp, synthetic construct
  misc_feature 1..80: note = Synthetic: >NC_001434.1-cand-2350-2429
  source 1..80: mol_type = other DNA
cccggatggctctaaggtattcgccggctcgctgtttgagtcgacatgtacctggctcgttaacgcgtctaatgttgacc

SEQ ID NO: 18101 - DNA, 80 bp, synthetic construct
  misc_feature 1..80: note = Synthetic: >NC_001434.1-cand-2430-2509
  source 1..80: mol_type = other DNA
accgccctggcggtgggctctgtcatgcattttaccaaaggtaccccgcatcctttgatgctgcctcttttgtgatgcgc

SEQ ID NO: 18102 - DNA, 80 bp, synthetic construct
  misc_feature 1..80: note = Synthetic: >NC_001434.1-cand-2520-2599
  source 1..80: mol_type = other DNA
ccgcctatacattaaccccccggccaataattcacgccgtcgctcctgattataggttggaacataacccaaagatgctt

SEQ ID NO: 18103 - DNA, 80 bp, synthetic construct
  misc_feature 1..80: note = Synthetic: >NC_001434.1-cand-2600-2679
  source 1..80: mol_type = other DNA
gaggctgcctaccgggagacttgctcccgcctcggtaccgctgcatacccactcctcgggaccggcatataccaggtgcc

SEQ ID NO: 18104 - DNA, 80 bp, synthetic construct
  misc_feature 1..80: note = Synthetic: >NC_001434.1-cand-2640-2719
  source 1..80: mol_type = other DNA
ctgcatacccactcctcgggaccggcatataccaggtgccgatcggtcccagttttgacgcctgggagcggaatcaccgc

SEQ ID NO: 18105 - DNA, 80 bp, synthetic construct
  misc_feature 1..80: note = Synthetic: >NC_001434.1-cand-2770-2849
  source 1..80: mol_type = other DNA
caataggccgacctgcccaactctcactataactgaggatgttgcacggacagcaaatctggctatcgaacttgactcag

SEQ ID NO: 18106 - DNA, 80 bp, synthetic construct
  misc_feature 1..80: note = Synthetic: >NC_001434.1-cand-2850-2929
  source 1..80: mol_type = other DNA
ccacagacgtcggccgggcctgtgccggctgtcgagtcacccccggcgttgtgcagtaccagtttaccgcaggtgtgcct

SEQ ID NO: 18107 - DNA, 80 bp, synthetic construct
  misc_feature 1..80: note = Synthetic: >NC_001526.4-cand-5180-5259
  source 1..80: mol_type = other DNA
aaatgcaggtgtggataatagagaatgtatatctatggattacaaacaaacacaattgtgtttaattggttgcaaaccac

SEQ ID NO: 18108 - DNA, 80 bp, synthetic construct
  misc_feature 1..80: note = Synthetic: >NC_001526.4-cand-5310-5389
  source 1..80: mol_type = other DNA
aatccaggtgattgtccaccattagagttaataaacacagttattcaggatggtgatatggttgatactggctttggtgc

SEQ ID NO: 18109 - DNA, 80 bp, synthetic construct
  misc_feature 1..80: note = Synthetic: >NC_001526.4-cand-5390-5469
  source 1..80: mol_type = other DNA
tatggactttactacattacaggctaacaaaagtgaagttccactggatatttgtacatctatttgcaaatatccagatt

SEQ ID NO: 18110 - DNA, 80 bp, synthetic construct
  misc_feature 1..80: note = Synthetic: >NC_001526.4-cand-5480-5559
  source 1..80: mol_type = other DNA
ggtgtcagaaccatatggcgacagcttatttttttatttacgaagggaacaaatgtttgttagacatttatttaataggg

SEQ ID NO: 18111 - DNA, 80 bp, synthetic construct
  misc_feature 1..80: note = Synthetic: >NC_001526.4-cand-5560-5639
  source 1..80: mol_type = other DNA
ctggtactgttggtgaaaatgtaccagacgatttatacattaaaggctctgggtctactgcaaatttagccagttcaaat

SEQ ID NO: 18112 - DNA, 80 bp, synthetic construct
  misc_feature 1..80: note = Synthetic: >NC_001526.4-cand-5640-5719
  source 1..80: mol_type = other DNA
tattttcctacacctagtggttctatggttacctctgatgcccaaatattcaataaaccttattggttacaacgagcaca

SEQ ID NO: 18113 - DNA, 80 bp, synthetic construct
  misc_feature 1..80: note = Synthetic: >NC_001526.4-cand-5750-5829
  source 1..80: mol_type = other DNA
ccaactatttgttactgttgttgatactacacgcagtacaaatatgtcattatgtgctgccatatctacttcagaaacta

SEQ ID NO: 18114 - DNA, 80 bp, synthetic construct
  misc_feature 1..80: note = Synthetic: >NC_001526.4-cand-5790-5869
  source 1..80: mol_type = other DNA
aatatgtcattatgtgctgccatatctacttcagaaactacatataaaaatactaactttaaggagtacctacgacatgg

SEQ ID NO: 18115 - DNA, 80 bp, synthetic construct
  misc_feature 1..80: note = Synthetic: >NC_001526.4-cand-5880-5959
  source 1..80: mol_type = other DNA
gatttacagtttatttttcaactgtgcaaaataaccttaactgcagacgttatgacatacatacattctatgaattccac

SEQ ID NO: 18116 - DNA, 80 bp, synthetic construct
  misc_feature 1..80: note = Synthetic: >NC_001526.4-cand-5960-6039
  source 1..80: mol_type = other DNA
tattttggaggactggaattttggtctacaacctcccccaggaggcacactagaagatacttataggtttgtaacatccc

SEQ ID NO: 18117 - DNA, 80 bp, synthetic construct
  misc_feature 1..80: note = Synthetic: >NC_001526.4-cand-6040-6119
  source 1..80: mol_type = other DNA
aggcaattgcttgtcaaaaacatacacctccagcacctaaagaagatccccttaaaaaatacactttttgggaagtaaat

SEQ ID NO: 18118 - DNA, 80 bp, synthetic construct
  misc_feature 1..80: note = Synthetic: >NC_001526.4-cand-6120-6199
  source 1..80: mol_type = other DNA
ttaaaggaaaagttttctgcagacctagatcagtttcctttaggacgcaaatttttactacaagcaggattgaaggccaa

SEQ ID NO: 18119 - DNA, 80 bp, synthetic construct
  misc_feature 1..80: note = Synthetic: >NC_001526.4-cand-6200-6279
  source 1..80: mol_type = other DNA
accaaaatttacattaggaaaacgaaaagctacacccaccacctcatctacctctacaactgctaaacgcaaaaaacgta

SEQ ID NO: 18120 - DNA, 80 bp, synthetic construct
  misc_feature 1..80: note = Synthetic: >NC_001526.4-cand-6280-6359
  source 1..80: mol_type = other DNA
agctgtaagtattgtatgtatgttgaattagtgttgtttgttgtgtatatgtttgtatgtgcttgtatgtgcttgtaaat

SEQ ID NO: 18121 - DNA, 80 bp, synthetic construct
  misc_feature 1..80: note = Synthetic: >NC_001526.4-cand-6370-6449
  source 1..80: mol_type = other DNA
atgtgtgtttgtatgtatggtataataaacacgtgtgtatgtgtttttaaatgcttgtgtaactattgtgtcatgcaaca

SEQ ID NO: 18122 - DNA, 80 bp, synthetic construct
  misc_feature 1..80: note = Synthetic: >NC_001526.4-cand-6450-6529
  source 1..80: mol_type = other DNA
taaataaacttattgtttcaacacctactaattgtgttgtggttattcattgtatataaactatatttgctacatcctgt

SEQ ID NO: 18123 - DNA, 80 bp, synthetic construct
  misc_feature 1..80: note = Synthetic: >NC_001526.4-cand-7810-7889
  source 1..80: mol_type = other DNA
gcacacacgtagacattcgtactttggaagacctgttaatgggcacactaggaattgtgtgccccatctgttctcagaaa

SEQ ID NO: 18124 - DNA, 80 bp, synthetic construct
  misc_feature 1..80: note = Synthetic: >NC_001538.1-cand-0-79
  source 1..80: mol_type = other DNA
gcaaaaattgcaaaagaatagggatttccccaaatagttttgctaggcctcagaaaaagcctccacacccttactacttg

SEQ ID NO: 18125 - DNA, 80 bp, synthetic construct
  misc_feature 1..80: note = Synthetic: >NC_001538.1-cand-110-189
  source 1..80: mol_type = other DNA
gcctcttatatattataaaaaaaaaggccacagggaggagctgcttacccatggaatgcagccaaaccatgacctcagga

SEQ ID NO: 18126 - DNA, 80 bp, synthetic construct
  misc_feature 1..80: note = Synthetic: >NC_001538.1-cand-220-299
  source 1..80: mol_type = other DNA
gccaaaccatgacctcaggaaggaaagtgcatgactcacagggaggagctgcttacccatggaatgcagccaaaccatga

SEQ ID NO: 18127 - DNA, 80 bp, synthetic construct
  misc_feature 1..80: note = Synthetic: >NC_001538.1-cand-270-349
  source 1..80: mol_type = other DNA
gcttacccatggaatgcagccaaaccatgacctcaggaaggaaagtgcatgacagacatgttttgcgagcctaggaatct

SEQ ID NO: 18128 - DNA, 80 bp, synthetic construct
  misc_feature 1..80: note = Synthetic: >NC_001538.1-cand-350-429
  source 1..80: mol_type = other DNA
tggccttgtccccagttaaactggacaaaggccatggttctgcgccagctgtcacgacaagcttcagtgaaagttggtaa

SEQ ID NO: 18129 - DNA, 80 bp, synthetic construct
  misc_feature 1..80: note = Synthetic: >NC_001538.1-cand-430-509
  source 1..80: mol_type = other DNA
aacctggactggaacaaaaaaaagagctcagaggatttttatttttattttagagcttttgctggaattttgtagaggtg

SEQ ID NO: 18130 - DNA, 80 bp, synthetic construct
  misc_feature 1..80: note = Synthetic: >NC_001538.1-cand-510-589
  source 1..80: mol_type = other DNA
aagacagtgtagacgggaaaaacaaaagtaccactgctttacctgctgtaaaagactctgtaaaagactcctaggtaagt

SEQ ID NO: 18131 - DNA, 80 bp, synthetic construct
  misc_feature 1..80: note = Synthetic: >NC_001538.1-cand-560-639
  source 1..80: mol_type = other DNA
aaagactctgtaaaagactcctaggtaagtaatccctttttttttgtatttccaggttcatgggtgctgctctagcactt

SEQ ID NO: 18132 - DNA, 80 bp, synthetic construct
  misc_feature 1..80: note = Synthetic: >NC_001538.1-cand-720-799
  source 1..80: mol_type = other DNA
tgctgctgctatagaagttcaaattgcatcccttgctactgtagagggcataacaagtacctcagaggctatagctgcta

SEQ ID NO: 18133 - DNA, 80 bp, synthetic construct
  misc_feature 1..80: note = Synthetic: >NC_001538.1-cand-760-839
  source 1..80: mol_type = other DNA
gtagagggcataacaagtacctcagaggctatagctgctataggcctaactcctcaaacatatgctgtaattgctggtgc

SEQ ID NO: 18134 - DNA, 80 bp, synthetic construct
  misc_feature 1..80: note = Synthetic: >NC_001538.1-cand-850-929
  source 1..80: mol_type = other DNA
attgctgggtttgctgctttaattcaaactgttagtggtattagttccttagctcaagtagggtataagttctttgatga

SEQ ID NO: 18135 - DNA, 80 bp, synthetic construct
  misc_feature 1..80: note = Synthetic: >NC_001538.1-cand-920-999
  source 1..80: mol_type = other DNA
tctttgatgattgggatcacaaagtttccactgtaggcctctatcagcaatcaggcatggctttggaattgtttaaccca

SEQ ID NO: 18136 - DNA, 80 bp, synthetic construct
  misc_feature 1..80: note = Synthetic: >NC_001538.1-cand-990-1069
  source 1..80: mol_type = other DNA
gtttaacccagatgagtactatgatattctgtttcctggtgtaaatacttttgttaataatattcaataccttgatccta

SEQ ID NO: 18137 - DNA, 80 bp, synthetic construct
  misc_feature 1..80: note = Synthetic: >NC_001538.1-cand-1080-1159
  source 1..80: mol_type = other DNA
tccttctttgtttgctactatttcccaggctttgtggcatgttattagggatgatataccttctataacctcacaggaat

SEQ ID NO: 18138 - DNA, 80 bp, synthetic construct
  misc_feature 1..80: note = Synthetic: >NC_001538.1-cand-1160-1239
  source 1..80: mol_type = other DNA
tgcagagaagaacagaaagattttttagagactccttggctagatttttggaggaaactacctggacaattgtaaatgcc

SEQ ID NO: 18139 - DNA, 80 bp, synthetic construct
  misc_feature 1..80: note = Synthetic: >NC_001538.1-cand-3880-3959
  source 1..80: mol_type = other DNA
tctgacactttttacactcctctacattgtattgaaattctaaatacatacctaataataaaaacacatcctcacacttt

SEQ ID NO: 18140 - DNA, 80 bp, synthetic construct
  misc_feature 1..80: note = Synthetic: >NC_001538.1-cand-3960-4039
  source 1..80: mol_type = other DNA
gtctctactgcatactcagtaattaatttccaagacacctgctttgtttcttcaggctcttctgggctaaaatcatgctc

SEQ ID NO: 18141 - DNA, 80 bp, synthetic construct
  misc_feature 1..80: note = Synthetic: >NC_001538.1-cand-4040-4119
  source 1..80: mol_type = other DNA
ctttaagcccccttgaatgctttcttctatagtatggtatggatctctagttaaggcactatatagtaagtattccttat

SEQ ID NO: 18142 - DNA, 80 bp, synthetic construct
  misc_feature 1..80: note = Synthetic: >NC_001538.1-cand-4120-4199
  source 1..80: mol_type = other DNA
taacacccttacaaattaaaaaactaaaggtacacagcttttgacagaaattattaattgcagaaactctatgtctatgt

SEQ ID NO: 18143 - DNA, 80 bp, synthetic construct
  misc_feature 1..80: note = Synthetic: >NC_001538.1-cand-4200-4279
  source 1..80: mol_type = other DNA
ggagttaaaaagaatataatattatgcccagcacacatgtgtctactaataaaagttacagaatatttttccataagttt

SEQ ID NO: 18144 - DNA, 80 bp, synthetic construct
  misc_feature 1..80: note = Synthetic: >NC_001538.1-cand-4280-4359
  source 1..80: mol_type = other DNA
tttatacagaatttgagctttttctttagtagtatacacagcaaagcaggcaagggttctattactaaatacagcttgac

SEQ ID NO: 18145 - DNA, 80 bp, synthetic construct
  misc_feature 1..80: note = Synthetic: >NC_001538.1-cand-4360-4439
  source 1..80: mol_type = other DNA
taagaaactggtgtagatcagagggaaagtctttagggtcttctacctttcttttttttttgggtggtgttgagtgttga

SEQ ID NO: 18146 - DNA, 80 bp, synthetic construct
  misc_feature 1..80: note = Synthetic: >NC_001538.1-cand-4440-4519
  source 1..80: mol_type = other DNA
gaatctgctgttgcttcttcatcactggcaaacatatcttcatggcaaaataaatcttcatcccatttttcattaaagga

SEQ ID NO: 18147 - DNA, 80 bp, synthetic construct
  misc_feature 1..80: note = Synthetic: >NC_001538.1-cand-4520-4599
  source 1..80: mol_type = other DNA
actccaccaggactcccactcttctgttccataggttggcacctataaaaaaaataattacttagggccttttaatattt

SEQ ID NO: 18148 - DNA, 80 bp, synthetic construct
  misc_feature 1..80: note = Synthetic: >NC_001538.1-cand-4600-4679
  source 1..80: mol_type = other DNA
tattatttatctaaatataagttagttaccttaaagctttagatctctgaagggagtttctccaattatttggacccacc

SEQ ID NO: 18149 - DNA, 80 bp, synthetic construct
  misc_feature 1..80: note = Synthetic: >NC_001538.1-cand-4680-4759
  source 1..80: mol_type = other DNA
attgcagagtttcttcagttaggtctaagccaaaccactgtgtgaagcagtcaatgcagtagcaatctatccaaaccaag

SEQ ID NO: 18150 - DNA, 80 bp, synthetic construct
  misc_feature 1..80: note = Synthetic: >NC_001538.1-cand-4750-4829
  source 1..80: mol_type = other DNA
ccaaaccaagggctcttttcttaaaaattttctatttaaatgccttaatctaagctgacatagcatgcaagggcagtgca

SEQ ID NO: 18151 - DNA, 80 bp, synthetic construct
  misc_feature 1..80: note = Synthetic: >NC_001538.1-cand-4830-4909
  source 1..80: mol_type = other DNA
cagaaggctttttggaacaaataggccattccttgcagtacagggtatctgggcaaagaggaaaatcagcacaaacctct

SEQ ID NO: 18152 - DNA, 80 bp, synthetic construct
  misc_feature 1..80: note = Synthetic: >NC_001538.1-cand-4910-4989
  source 1..80: mol_type = other DNA
gagctactccaggttccaaaatcaggctgatgagctacctttacatcctgctccatttttttatacaaagtattcattct

SEQ ID NO: 18153 - DNA, 80 bp, synthetic construct
  misc_feature 1..80: note = Synthetic: >NC_001538.1-cand-4990-5069
  source 1..80: mol_type = other DNA
cttcattttatcctcgtcgccccctttgtcagggtgaaattccttacacttccttaaataagcttttctcattaagggaa

SEQ ID NO: 18154 - DNA, 80 bp, synthetic construct
  misc_feature 1..80: note = Synthetic: >NC_001538.1-cand-5060-5139
  source 1..80: mol_type = other DNA
attaagggaagatttccccaggcagctctttcaaggcctaaaaggtccatgagctccatggattcttccctgttaagaac

SEQ ID NO: 18155 - DNA, 80 bp, synthetic construct
  misc_feature 1..80: note = Synthetic: >NC_001611.1-cand-135180-135259
  source 1..80: mol_type = other DNA
caatctgtactatgtgttaaaagattctacaagtaacaacaaaaaataaaataataataagtccttaacgaacgttgatg

SEQ ID NO: 18156 - DNA, 80 bp, synthetic construct
  misc_feature 1..80: note = Synthetic: >NC_001611.1-cand-135260-135339
  source 1..80: mol_type = other DNA
gacaccacgtttgttattactccaatgggtatgctgactataacagatacattatatgatgatctcgatatctcaataat

SEQ ID NO: 18157 - DNA, 80 bp, synthetic construct
  misc_feature 1..80: note = Synthetic: >NC_001611.1-cand-135420-135499
  source 1..80: mol_type = other DNA
aaaaatgctactttagctaagggtaaaatagttccttaggattctaatgatttggttagattcaacatttatagcatttg

SEQ ID NO: 18158 - DNA, 80 bp, synthetic construct
  misc_feature 1..80: note = Synthetic: >NC_001611.1-cand-135500-135579
  source 1..80: mol_type = other DNA
taccgcatacagatcaaaaataccatcatcatagcatgcgactatgataccatgttagatatagaaggtaaacatcagcc

SEQ ID NO: 18159 - DNA, 80 bp, synthetic construct
  misc_feature 1..80: note = Synthetic: >NC_001611.1-cand-135580-135659
  source 1..80: mol_type = other DNA
attttatctatttacatctattgatgtttttaacgctacaatcatagaagcgtataacctgtatacagctggagattatc

SEQ ID NO: 18160 - DNA, 80 bp, synthetic construct
  misc_feature 1..80: note = Synthetic: >NC_001611.1-cand-135740-135819
  source 1..80: mol_type = other DNA
tggatcataattgatgggaaatgcaatagtaattttttatcataaaagttgtaaagtaaataataaaacaataaatattg

SEQ ID NO: 18161 - DNA, 80 bp, synthetic construct
  misc_feature 1..80: note = Synthetic: >NC_001611.1-cand-135820-135899
  source 1..80: mol_type = other DNA
aactagtagtacgtatattgagcaatcagaaatgatactggtacctcttatcacagtgaccgtagttgcgggaacaatat

SEQ ID NO: 18162 - DNA, 80 bp, synthetic construct
  misc_feature 1..80: note = Synthetic: >NC_001611.1-cand-135980-136059
  source 1..80: mol_type = other DNA
aaaaagataaagagttctaattccagcaaatctagtaaatcaactgataacgaatcagactgggaggatcactgtagtgc

SEQ ID NO: 18163 - DNA, 80 bp, synthetic construct
  misc_feature 1..80: note = Synthetic: >NC_001611.1-cand-136030-136109
  source 1..80: mol_type = other DNA
cgaatcagactgggaggatcactgtagtgctatggaacaaaataatgacgtggataatatttctaggaatgagatattgg

SEQ ID NO: 18164 - DNA, 80 bp, synthetic construct
  misc_feature 1..80: note = Synthetic: >NC_001611.1-cand-136110-136189
  source 1..80: mol_type = other DNA
atgatgatagcttcgctggtagtttaatatgggataacgaatccaatgtcatagcgcctagcacagaacacatttacgat

SEQ ID NO: 18165 - DNA, 80 bp, synthetic construct
  misc_feature 1..80: note = Synthetic: >NC_001611.1-cand-136190-136269
  source 1..80: mol_type = other DNA
agtgttgctggaagcacgcggctaataaataatgattgtaatgaacaaactatttatcagaacactacagtaattaatga

SEQ ID NO: 18166 - DNA, 80 bp, synthetic construct
  misc_feature 1..80: note = Synthetic: >NC_001611.1-cand-136270-136349
  source 1..80: mol_type = other DNA
gacagagactattgaagtacttaatgaagataccaaacagaatcctagctattcgtccaatcctttcgtaaattataata

SEQ ID NO: 18167 - DNA, 80 bp, synthetic construct
  misc_feature 1..80: note = Synthetic: >NC_001611.1-cand-136350-136429
  source 1..80: mol_type = other DNA
aaaccagtatttgtagcaagtcaaatccgttcattacagaactcaacaataaatttagtgagaataatccgtttaggaga

SEQ ID NO: 18168 - DNA, 80 bp, synthetic construct
  misc_feature 1..80: note = Synthetic: >NC_001611.1-cand-136430-136509
  source 1..80: mol_type = other DNA
gcacatagcgatgattacctaaataagcaagaacatgatgatatagaatcatctgttgtatcattagtctgattagtttc

SEQ ID NO: 18169 - DNA, 80 bp, synthetic construct
  misc_feature 1..80: note = Synthetic: >NC_001611.1-cand-136510-136589
  source 1..80: mol_type = other DNA
ctttttataaaattgaagtaatatttagtattaattgctaccgttacattgtacaaatggagatattccctgtatttggc

SEQ ID NO: 18170 - DNA, 80 bp, synthetic construct
  misc_feature 1..80: note = Synthetic: >NC_001611.1-cand-136590-136669
  source 1..80: mol_type = other DNA
atttctaaaattagcaattttattgctaataatgactgtagatattatatagatacagaacatcattaaaaaattatacc

SEQ ID NO: 18171 - DNA, 80 bp, synthetic construct
  misc_feature 1..80: note = Synthetic: >NC_001672.1-cand-8390-8469
  source 1..80: mol_type = other DNA
cggtttggagaccagagagggccaaccaaggtgcctgaactcgacctgggagttggaacgaggtgtgtggtcttagctga

SEQ ID NO: 18172 - DNA, 80 bp, synthetic construct
  misc_feature 1..80: note = Synthetic: >NC_001672.1-cand-8470-8549
  source 1..80: mol_type = other DNA
ggacaaggtgaaagaacaagacgtacaagagaggatcagagcgttgcgggagcaatacagcgaaacctggcatatggacg

SEQ ID NO: 18173 - DNA, 80 bp, synthetic construct
  misc_feature 1..80: note = Synthetic: >NC_001672.1-cand-8500-8579
  source 1..80: mol_type = other DNA
gaggatcagagcgttgcgggagcaatacagcgaaacctggcatatggacgaggaacacccgtaccggacatggcagtact

SEQ ID NO: 18174 - DNA, 80 bp, synthetic construct
  misc_feature 1..80: note = Synthetic: >NC_001672.1-cand-8640-8719
  source 1..80: mol_type = other DNA
aacttctcagctggccatggaacgcacgggaagatgtggtgcgcatggctatgactgacacaacggctttcggacagcag

SEQ ID NO: 18175 - DNA, 80 bp, synthetic construct
  misc_feature 1..80: note = Synthetic: >NC_001672.1-cand-8720-8799
  source 1..80: mol_type = other DNA
agagtgttcaaagataaagttgacacaaaggcacaggagcctcagcccggtacaagagtcatcatgagagctgtaaatga

SEQ ID NO: 18176 - DNA, 80 bp, synthetic construct
  misc_feature 1..80: note = Synthetic: >NC_001672.1-cand-8800-8879
  source 1..80: mol_type = other DNA
ttggattttggaacgactggcgcagaaaagcaaaccgcgcatgtgcagcagggaagaattcatagcaaaagtgaaatcaa

SEQ ID NO: 18177 - DNA, 80 bp, synthetic construct
  misc_feature 1..80: note = Synthetic: >NC_001672.1-cand-8880-8959
  source 1..80: mol_type = other DNA
atgcagccttgggagcttggtcagatgagcaaaacagatgggcaagtgcaagagaggctgtagaggatcctgcattctgg

SEQ ID NO: 18178 - DNA, 80 bp, synthetic construct
  misc_feature 1..80: note = Synthetic: >NC_001672.1-cand-9000-9079
  source 1..80: mol_type = other DNA
gatgtgcgcactgcgtgtacaacatgatgggcaagagagaaaagaaactgggagagttcggagtggcgaaaggaagtcgg

SEQ ID NO: 18179 - DNA, 80 bp, synthetic construct
  misc_feature 1..80: note = Synthetic: >NC_001672.1-cand-9020-9099
  source 1..80: mol_type = other DNA
aacatgatgggcaagagagaaaagaaactgggagagttcggagtggcgaaaggaagtcgggccatttggtacatgtggct

SEQ ID NO: 18180 - DNA, 80 bp, synthetic construct
  misc_feature 1..80: note = Synthetic: >NC_001672.1-cand-9130-9209
  source 1..80: mol_type = other DNA
tggattcttgaatgaagaccattgggcctctagagagtccagtggagctggagttgagggaataagcttgaactacctgg

SEQ ID NO: 18181 - DNA, 80 bp, synthetic construct
  misc_feature 1..80: note = Synthetic: >NC_001672.1-cand-9220-9299
  source 1..80: mol_type = other DNA
caagaagttgtcaaccctgaatggaggactcttctatgcagatgacacagctggctgggacacgaaagttaccaatgcag

SEQ ID NO: 18182 - DNA, 80 bp, synthetic construct
  misc_feature 1..80: note = Synthetic: >NC_001672.1-cand-9300-9379
  source 1..80: mol_type = other DNA
acttagaggatgaagaacagatcctacggtacatggagggtgagcacaaacaattggcaaccacaataatgcaaaaagca

SEQ ID NO: 18183 - DNA, 80 bp, synthetic construct
  misc_feature 1..80: note = Synthetic: >NC_001672.1-cand-9380-9459
  source 1..80: mol_type = other DNA
taccatgccaaagtcgtgaaggtcgcgaggccttcccgtgatggaggctgcatcatggatgtcatcacaagaagagacca

SEQ ID NO: 18184 - DNA, 80 bp, synthetic construct
  misc_feature 1..80: note = Synthetic: >NC_001672.1-cand-9460-9539
  source 1..80: mol_type = other DNA
aagaggttcgggtcaggttgtgacctatgcccttaacaccctcaccaacataaaggtgcaattaatccgaatgatggaag

SEQ ID NO: 18185 - DNA, 80 bp, synthetic construct
  misc_feature 1..80: note = Synthetic: >NC_001672.1-cand-9550-9629
  source 1..80: mol_type = other DNA
catagaggcagcggatgcacacaacccgagactgcttcgagtggagcgctggctgaaagaacacggagaagagcgtcttg

SEQ ID NO: 18186 - DNA, 80 bp, synthetic construct
  misc_feature 1..80: note = Synthetic: >NC_001672.1-cand-9620-9699
  source 1..80: mol_type = other DNA
gagcgtcttggaagaatgctcgtcagtggtgacgattgtgtggtgaggcccttggatgacagatttggcaaagcacttta

SEQ ID NO: 18187 - DNA, 80 bp, synthetic construct
  misc_feature 1..80: note = Synthetic: >NC_001699.1-cand-1480-1559
  source 1..80: mol_type = other DNA
gaaaaggagaaaggaaggaccccgtgcaagttccaaaacttcttataagaggaggagtagaagttctagaagttaaaact

SEQ ID NO: 18188 - DNA, 80 bp, synthetic construct
  misc_feature 1..80: note = Synthetic: >NC_001699.1-cand-1640-1719
  source 1..80: mol_type = other DNA
taagtcaatatctatatcagatacatttgaaagtgactccccaaatagggacatgcttccttgttacagtgtggccagaa

SEQ ID NO: 18189 - DNA, 80 bp, synthetic construct
  misc_feature 1..80: note = Synthetic: >NC_001699.1-cand-1710-1789
  source 1..80: mol_type = other DNA
gtggccagaattccactacccaatctaaatgaggatctaacctgtggaaatatactcatgtgggaggctgtgaccttaaa

SEQ ID NO: 18190 - DNA, 80 bp, synthetic construct
  misc_feature 1..80: note = Synthetic: >NC_001699.1-cand-1810-1889
  source 1..80: mol_type = other DNA
caagtttgatgaatgtgcactctaatgggcaagcaactcatgacaatggtgcagggaagccagtgcagggcaccagcttt

SEQ ID NO: 18191 - DNA, 80 bp, synthetic construct
  misc_feature 1..80: note = Synthetic: >NC_001699.1-cand-1820-1899
  source 1..80: mol_type = other DNA
gaatgtgcactctaatgggcaagcaactcatgacaatggtgcagggaagccagtgcagggcaccagctttcatttttttt

SEQ ID NO: 18192 - DNA, 80 bp, synthetic construct
  misc_feature 1..80: note = Synthetic: >NC_001699.1-cand-1950-2029
  source 1..80: mol_type = other DNA
acaaagtacccagatggaacaatttttccaaagaatgccacagtgcaatctcaagtcatgaacacagagcacaaggcgta

SEQ ID NO: 18193 - DNA, 80 bp, synthetic construct
  misc_feature 1..80: note = Synthetic: >NC_001699.1-cand-2030-2109
  source 1..80: mol_type = other DNA
cctagataagaacaaagcatatcctgttgaatgttgggttcctgatcccaccagaaatgaaaacacaagatattttggga

SEQ ID NO: 18194 - DNA, 80 bp, synthetic construct
  misc_feature 1..80: note = Synthetic: >NC_001699.1-cand-2110-2189
  source 1..80: mol_type = other DNA
cactaacaggaggagaaaatgttcctccagttcttcatataacaaacactgccacaacagtgttgcttgatgaatttggt

SEQ ID NO: 18195 - DNA, 80 bp, synthetic construct
  misc_feature 1..80: note = Synthetic: >NC_001699.1-cand-2190-2269
  source 1..80: mol_type = other DNA
gttgggccactttgcaaaggtgacaacttatacttgtcagctgttgatgtctgtggcatgtttacaaacaggtctggttc

SEQ ID NO: 18196 - DNA, 80 bp, synthetic construct
  misc_feature 1..80: note = Synthetic: >NC_001699.1-cand-2270-2349
  source 1..80: mol_type = other DNA
ccagcagtggagaggactctccagatattttaaggtgcagctaaggaaaaggagggttaaaaacccctacccaatttctt

SEQ ID NO: 18197 - DNA, 80 bp, synthetic construct
  misc_feature 1..80: note = Synthetic: >NC_001699.1-cand-2340-2419
  source 1..80: mol_type = other DNA
ccaatttctttccttcttactgatttaattaacagaaggactcctagagttgatgggcagcctatgtatggcatggatgc

SEQ ID NO: 18198 - DNA, 80 bp, synthetic construct
  misc_feature 1..80: note = Synthetic: >NC_001699.1-cand-2380-2459
  source 1..80: mol_type = other DNA
ctcctagagttgatgggcagcctatgtatggcatggatgctcaagtagaggaggttagagtttttgagggaacagaggag

SEQ ID NO: 18199 - DNA, 80 bp, synthetic construct
  misc_feature 1..80: note = Synthetic: >NC_001699.1-cand-2500-2579
  source 1..80: mol_type = other DNA
atggacagttgcagacaaaaatgctgtaatcaaaagcctttattgtaatatgcagtacattttaataaagtataaccagc

SEQ ID NO: 18200 - DNA, 80 bp, synthetic construct
  misc_feature 1..80: note = Synthetic: >NC_001699.1-cand-2620-2699
  source 1..80: mol_type = other DNA
ggttttttgaaacattgaaagcctttacagatgtgaaaagtgcagttttcctgtgtgtctgcaccagaggcttctgagac

SEQ ID NO: 18201 - DNA, 80 bp, synthetic construct
  misc_feature 1..80: note = Synthetic: >NC_001699.1-cand-2660-2739
  source 1..80: mol_type = other DNA
tgcagttttcctgtgtgtctgcaccagaggcttctgagacctgggaaaagcattgtgattgtgattcagtgcttgatcca

SEQ ID NO: 18202 - DNA, 80 bp, synthetic construct
  misc_feature 1..80: note = Synthetic: >NC_001699.1-cand-2740-2819
  source 1..80: mol_type = other DNA
tgtccagagtcttctgcttcagaatcttcctctctaggaaagtcaagaatgggtctccccataccaacattagctttcat

SEQ ID NO: 18203 - DNA, 80 bp, synthetic construct
  misc_feature 1..80: note = Synthetic: >NC_001906.3-cand-9440-9519
  source 1..80: mol_type = other DNA
tgagtgatcttgtaggactgccgaaccagatctgtctacagaagacaacatcaacaatcttaaagcccaggctgatatcc

SEQ ID NO: 18204 - DNA, 80 bp, synthetic construct
  misc_feature 1..80: note = Synthetic: >NC_001906.3-cand-9470-9549
  source 1..80: mol_type = other DNA
tctgtctacagaagacaacatcaacaatcttaaagcccaggctgatatcctatactctaccaattaataccagagaaggg

SEQ ID NO: 18205 - DNA, 80 bp, synthetic construct
  misc_feature 1..80: note = Synthetic: >NC_001906.3-cand-9580-9659
  source 1..80: mol_type = other DNA
gataatggcttcttcgcctatagccatcttgaaaagatcggatcatgtactagaggaattgcaaaacaaaggataatagg

SEQ ID NO: 18206 - DNA, 80 bp, synthetic construct
  misc_feature 1..80: note = Synthetic: >NC_001906.3-cand-9690-9769
  source 1..80: mol_type = other DNA
ggtgccatcaatgtttatgaccaatgtttggacaccacccaatccaagcaccatccatcattgcagctcaacttaccatg

SEQ ID NO: 18207 - DNA, 80 bp, synthetic construct
  misc_feature 1..80: note = Synthetic: >NC_001906.3-cand-9750-9829
  source 1..80: mol_type = other DNA
ttgcagctcaacttaccatgaagatttttattacacattgtgcgcagtgtcccatgtgggagatcctatccttaacagta

SEQ ID NO: 18208 - DNA, 80 bp, synthetic construct
  misc_feature 1..80: note = Synthetic: >NC_001906.3-cand-9830-9909
  source 1..80: mol_type = other DNA
cttcctggacagagtcactgtctctgattcgtcttgctgtaagaccaaaaagtgatagtggagactacaatcagaaatac

SEQ ID NO: 18209 - DNA, 80 bp, synthetic construct
  misc_feature 1..80: note = Synthetic: >NC_001906.3-cand-9900-9979
  source 1..80: mol_type = other DNA
tcagaaatacatcgctataactaaagttgaaagagggaagtacgataaggtgatgccttacggtccatcaggtatcaagc

SEQ ID NO: 18210 - DNA, 80 bp, synthetic construct
  misc_feature 1..80: note = Synthetic: >NC_001906.3-cand-9990-10069
  source 1..80: mol_type = other DNA
attgtactttccggccgtcggttttttgccaaggaccgaatttcaatataatgactctaattgtcccataattcattgca

SEQ ID NO: 18211 - DNA, 80 bp, synthetic construct
  misc_feature 1..80: note = Synthetic: >NC_001906.3-cand-10070-10149
  source 1..80: mol_type = other DNA
agtacagcaaagcagaaaactgtaggctttcaatgggtgtcaactccaaaagtcattatattttgagatcaggactattg

SEQ ID NO: 18212 - DNA, 80 bp, synthetic construct
  misc_feature 1..80: note = Synthetic: >NC_001906.3-cand-10150-10229
  source 1..80: mol_type = other DNA
aagtataatctatctcttggaggagacatcatactccaatttatcgagattgctgacaatagattgaccatcggttctcc

SEQ ID NO: 18213 - DNA, 80 bp, synthetic construct
  misc_feature 1..80: note = Synthetic: >NC_001906.3-cand-10230-10309
  source 1..80: mol_type = other DNA
tagtaagatatacaattccctaggtcaacccgttttctaccaggcatcatattcttgggatacgatgattaaattaggcg

SEQ ID NO: 18214 - DNA, 80 bp, synthetic construct
  misc_feature 1..80: note = Synthetic: >NC_001906.3-cand-10310-10389
  source 1..80: mol_type = other DNA
atgttgataccgttgaccctctaagagtacagtggagaaataacagtgtgatttctagacctggacagtcacagtgtcct

SEQ ID NO: 18215 - DNA, 80 bp, synthetic construct
  misc_feature 1..80: note = Synthetic: >NC_001906.3-cand-10390-10469
  source 1..80: mol_type = other DNA
cgatttaatgtctgtcccgaggtatgctgggaagggacatataatgatgcttttctaatagaccggctaaactgggttag

SEQ ID NO: 18216 - DNA, 80 bp, synthetic construct
  misc_feature 1..80: note = Synthetic: >NC_001906.3-cand-10470-10549
  source 1..80: mol_type = other DNA
tgctggtgtttatttaaacagtaaccaaactgcagagaaccctgtgtttgccgtattcaaggataacgagatcctttacc

SEQ ID NO: 18217 - DNA, 80 bp, synthetic construct
  misc_feature 1..80: note = Synthetic: >NC_001906.3-cand-10550-10629
  source 1..80: mol_type = other DNA
aagttccactggctgaagatgacacaaatgcacaaaaaaccatcacagattgcttcttgctggagaatgtcatatggtgt

SEQ ID NO: 18218 - DNA, 80 bp, synthetic construct
  misc_feature 1..80: note = Synthetic: >NC_001906.3-cand-10630-10709
  source 1..80: mol_type = other DNA
atatcactagtagaaatatacgatacaggagacagtgtgataaggccaaaactatttgcagtcaagatacctgcccaatg

SEQ ID NO: 18219 - DNA, 80 bp, synthetic construct
  misc_feature 1..80: note = Synthetic: >NC_002058.3-cand-7190-7269
  source 1..80: mol_type = other DNA
gactaaagatcctaggaacactcaggatcacgttcgctctctgtgccttttagcttggcacaatggcgaagaagaatata

SEQ ID NO: 18220 - DNA, 80 bp, synthetic construct
  misc_feature 1..80: note = Synthetic: >NC_002058.3-cand-7270-7349
  source 1..80: mol_type = other DNA
acaaattcctagctaaaatcaggagtgtgccaattggaagagctttattgctcccagagtactcaacattgtaccgccgt

SEQ ID NO: 18221 - DNA, 80 bp, synthetic construct
  misc_feature 1..80: note = Synthetic: >NC_002058.3-cand-7330-7409
  source 1..80: mol_type = other DNA
actcaacattgtaccgccgttggcttgactcattttagtaaccctacctcagtcgaattggattgggtcatactgttgta

SEQ ID NO: 18222 - DNA, 80 bp, synthetic construct
  misc_feature 1..80: note = Synthetic: >NC_002204.1-cand-20-99
  source 1..80: mol_type = other DNA
atataaatccatattttcttttcatagatgtacctatacaggcagcaatttcaacaacattcccatacaccggtgttccc

SEQ ID NO: 18223 - DNA, 80 bp, synthetic construct
  misc_feature 1..80: note = Synthetic: >NC_002204.1-cand-100-179
  source 1..80: mol_type = other DNA
ccttattctcatggaacgggaacaggctacacaatagacaccgtgattagaacacacgagtactcaaacaagggaaaaca

SEQ ID NO: 18224 - DNA, 80 bp, synthetic construct
  misc_feature 1..80: note = Synthetic: >NC_002204.1-cand-180-259
  source 1..80: mol_type = other DNA
atacatttctgatgttacaggatgtgtaatggtagatccaacaaatgggccattacccgaagacaatgaaccgagtgcct

SEQ ID NO: 18225 - DNA, 80 bp, synthetic construct
  misc_feature 1..80: note = Synthetic: >NC_002204.1-cand-260-339
  source 1..80: mol_type = other DNA
atgcacaattggattgtgttctggaggctttggatagaatggatgaagaacatccaggtctgtttcaagcagggtcacag

SEQ ID NO: 18226 - DNA, 80 bp, synthetic construct
  misc_feature 1..80: note = Synthetic: >NC_002204.1-cand-310-389
  source 1..80: mol_type = other DNA
catccaggtctgtttcaagcagggtcacagaatgccatggaggcactaatggtcacaacagtggacaaattgactcaggg

SEQ ID NO: 18227 - DNA, 80 bp, synthetic construct
  misc_feature 1..80: note = Synthetic: >NC_002204.1-cand-420-499
  source 1..80: mol_type = other DNA
aaaccaacctgctgcaacggcactgaacacaacaataacctcttttaggttgaatgatttaaatggagccgacaagggtg

SEQ ID NO: 18228 - DNA, 80 bp, synthetic construct
  misc_feature 1..80: note = Synthetic: >NC_002204.1-cand-500-579
  source 1..80: mol_type = other DNA
gattagtgcccttttgccaagatatcattgattcattagacaaacctgaaatgattttcttcacagtaaagaatataaag

SEQ ID NO: 18229 - DNA, 80 bp, synthetic construct
  misc_feature 1..80: note = Synthetic: >NC_002204.1-cand-590-669
  source 1..80: mol_type = other DNA
ctgctaaaaacagaaagggtttccttataaaaagaatacctatgaaggtaaaagacagaataacaagagtggaatacatc

SEQ ID NO: 18230 - DNA, 80 bp, synthetic construct
  misc_feature 1..80: note = Synthetic: >NC_002204.1-cand-670-749
  source 1..80: mol_type = other DNA
aaaagagcattatcattaaacacaatgactaaagatgctgaaagaggcaaactaaaaagaagagcaattgccaccgctgg

SEQ ID NO: 18231 - DNA, 80 bp, synthetic construct
  misc_feature 1..80: note = Synthetic: >NC_002204.1-cand-740-819
  source 1..80: mol_type = other DNA
ccaccgctgggatacaaatcagaggatttgtattagtagttgaaaacttggctaaaaatatctgtgaaaatctagagcaa

SEQ ID NO: 18232 - DNA, 80 bp, synthetic construct
  misc_feature 1..80: note = Synthetic: >NC_002204.1-cand-820-899
  source 1..80: mol_type = other DNA
agtggtttacccgtaggtggaaacgaaaagaaggccaaactatcaaatgcagtggctaaaatgctcagtaattgtccacc

SEQ ID NO: 18233 - DNA, 80 bp, synthetic construct
  misc_feature 1..80: note = Synthetic: >NC_002204.1-cand-900-979
  source 1..80: mol_type = other DNA
aggagggatcagtatgactgtgacaggagacaatactaaatggaatgaatgcttaaatccaagaatctttttggctatga

SEQ ID NO: 18234 - DNA, 80 bp, synthetic construct
  misc_feature 1..80: note = Synthetic: >NC_002204.1-cand-980-1059
  source 1..80: mol_type = other DNA
ctgaaagaataaccagagacagcccaatttggttccgggatttttgtagtatagcaccggtcttgttctccaataaaata

SEQ ID NO: 18235 - DNA, 80 bp, synthetic construct
  misc_feature 1..80: note = Synthetic: >NC_003310.1-cand-13470-13549
  source 1..80: mol_type = other DNA
cggtagtgttgataaacgattgttatccgcggatacctcatctatcatgttgtctattttcttactttgttctattaacc

SEQ ID NO: 18236 - DNA, 80 bp, synthetic construct
  misc_feature 1..80: note = Synthetic: >NC_003310.1-cand-13550-13629
  source 1..80: mol_type = other DNA
tattagcattatatattatttgattataaaacttatattgcttattagcccaatctgtaaatatcggattattaacatat

SEQ ID NO: 18237 - DNA, 80 bp, synthetic construct
  misc_feature 1..80: note = Synthetic: >NC_003310.1-cand-13710-13789
  source 1..80: mol_type = other DNA
aatttctttttcgcagtcggttatatattctatataagatggatacgtatcacatatgtacttatagtctactaatatga

SEQ ID NO: 18238 - DNA, 80 bp, synthetic construct
  misc_feature 1..80: note = Synthetic: >NC_003310.1-cand-13790-13869
  source 1..80: mol_type = other DNA
agtacttaatacatattttcagtaacgatttagccttattacctattaataagtgcctgtcgttggataggtaatcaact

SEQ ID NO: 18239 - DNA, 80 bp, synthetic construct
  misc_feature 1..80: note = Synthetic: >NC_003310.1-cand-13870-13949
  source 1..80: mol_type = other DNA
gttttcttaatacattcgatggttggtaatttactcaaaataatttccaatatcttaatatatatttctgctatttctgg

SEQ ID NO: 18240 - DNA, 80 bp, synthetic construct
  misc_feature 1..80: note = Synthetic: >NC_003310.1-cand-13950-14029
  source 1..80: mol_type = other DNA
tatacatgcatgtgccattataacacaaataccaatacatgtagacccatatgttgttgttatattaatatctgcgccat

SEQ ID NO: 18241 - DNA, 80 bp, synthetic construct
  misc_feature 1..80: note = Synthetic: >NC_003310.1-cand-14030-14109
  source 1..80: mol_type = other DNA
tatctattaaccattctactagtgcaacactatgcgactcgatacaataataaagtatactacgtccatgtttatctatt

SEQ ID NO: 18242 - DNA, 80 bp, synthetic construct
  misc_feature 1..80: note = Synthetic: >NC_003310.1-cand-14110-14189
  source 1..80: mol_type = other DNA
ttgtttatatcatcgatatacggcttacaaatttttagtatcgataacacttctgactcgtgaataaataaggtagggaa

SEQ ID NO: 18243 - DNA, 80 bp, synthetic construct
  misc_feature 1..80: note = Synthetic: >NC_003310.1-cand-14190-14269
  source 1..80: mol_type = other DNA
taacggcataatatttattatgttatcatcattaacaactacgtttccattttttaaaatatactctacaactttaggat

SEQ ID NO: 18244 - DNA, 80 bp, synthetic construct
  misc_feature 1..80: note = Synthetic: >NC_003310.1-cand-14270-14349
  source 1..80: mol_type = other DNA
ccctattgtcaaatcttttaaaatatttatttatatgcttaaatctatataatatagctccttccctaatcatacatttg

SEQ ID NO: 18245 - DNA, 80 bp, synthetic construct
  misc_feature 1..80: note = Synthetic: >NC_003310.1-cand-14350-14429
  source 1..80: mol_type = other DNA
ataacattgatgtacactgtatgataagatacatattctgacaatagatcttgtatagaatctgtatatcttttaagaat

SEQ ID NO: 18246 - DNA, 80 bp, synthetic construct
  misc_feature 1..80: note = Synthetic: >NC_003310.1-cand-14430-14509
  source 1..80: mol_type = other DNA
tgaggatattatgacattattacgtaaactattacacaattctaaaatataaaacgtatcatgggcagataatagtttat

SEQ ID NO: 18247 - DNA, 80 bp, synthetic construct
  misc_feature 1..80: note = Synthetic: >NC_003310.1-cand-14510-14589
  source 1..80: mol_type = other DNA
ccactatataattatctattttatgatttttcttcctatattgtttacgtaaatagatagatagaatatgcattagttca

SEQ ID NO: 18248 - DNA, 80 bp, synthetic construct
  misc_feature 1..80: note = Synthetic: >NC_003310.1-cand-14590-14669
  source 1..80: mol_type = other DNA
ttaccgctatagttactatcgaataacacgtcaaatatttcccgtttaatatcgcatttgtcaacataataatagagtat

SEQ ID NO: 18249 - DNA, 80 bp, synthetic construct
  misc_feature 1..80: note = Synthetic: >NC_003310.1-cand-14670-14749
  source 1..80: mol_type = other DNA
ggtacgttcacgataagtataatgacacatttcgttttcgtgcgaaattaaatagtttatcacgtccaaagatgtcacat

SEQ ID NO: 18250 - DNA, 80 bp, synthetic construct
  misc_feature 1..80: note = Synthetic: >NC_003310.1-cand-14750-14829
  source 1..80: mol_type = other DNA
aaccatcttgtgacctagtaataatataataatagagaactgttttacccattctattatcataatcagtggtgtagtca

SEQ ID NO: 18251 - DNA, 80 bp, synthetic construct
  misc_feature 1..80: note = Synthetic: >NC_003310.1-cand-120650-120729
  source 1..80: mol_type = other DNA
tattgtgattataaagaccgaatacataacaggtagaatttataaacatcatgtcctgaagggttttagacttgtattcc

SEQ ID NO: 18252 - DNA, 80 bp, synthetic construct
  misc_feature 1..80: note = Synthetic: >NC_003310.1-cand-120730-120809
  source 1..80: mol_type = other DNA
tcgtaatctataccgtcccaaaacatggatttggtaactttgatagccgtagatctttgttccttcgccaacaggttaaa

SEQ ID NO: 18253 - DNA, 80 bp, synthetic construct
  misc_feature 1..80: note = Synthetic: >NC_003310.1-cand-120810-120889
  source 1..80: mol_type = other DNA
gaaattaataaagaatttgttgtttctatttatgtccacaaattgcacgtttggaagcgccacggttacattcactgcag

SEQ ID NO: 18254 - DNA, 80 bp, synthetic construct
  misc_feature 1..80: note = Synthetic: >NC_003310.1-cand-120890-120969
  source 1..80: mol_type = other DNA
cattttgaggatcgcgagtatgaagtacaatgttattgtttactggtatatctggaaagaaatctaccagtctaggaata

SEQ ID NO: 18255 - DNA, 80 bp, synthetic construct
  misc_feature 1..80: note = Synthetic: >NC_003310.1-cand-120970-121049
  source 1..80: mol_type = other DNA
agagattgatatcgcatagaaatagtaaagtttataatctcatcattgtagattactctgttaccattgtaataaattgg

SEQ ID NO: 18256 - DNA, 80 bp, synthetic construct
  misc_feature 1..80: note = Synthetic: >NC_003310.1-cand-121050-121129
  source 1..80: mol_type = other DNA
tactctatcataatcattgacaaagtactgttcatacatgatgagatgtttatatgttggcatagtagtgagatcgacgt

SEQ ID NO: 18257 - DNA, 80 bp, synthetic construct
  misc_feature 1..80: note = Synthetic: >NC_003310.1-cand-121120-121199
  source 1..80: mol_type = other DNA
agatcgacgtttggtaatggcaatgtattaagattaactccataatgtctagcagcatctgtgatgttataagtgatgtc

SEQ ID NO: 18258 - DNA, 80 bp, synthetic construct
  misc_feature 1..80: note = Synthetic: >NC_003310.1-cand-121210-121289
  source 1..80: mol_type = other DNA
tgatcttgtgctgttatatattgtctaacacctataagattatcaaaatcttgtctgcttaatacaccgttaacaatttt

SEQ ID NO: 18259 - DNA, 80 bp, synthetic construct
  misc_feature 1..80: note = Synthetic: >NC_003310.1-cand-121440-121519
  source 1..80: mol_type = other DNA
tctagctctgtattctgtatccgtcaatctaatattaagaaggtgttgagtgaaaggtggaagatcgtaaaagctgtgag

SEQ ID NO: 18260 - DNA, 80 bp, synthetic construct
  misc_feature 1..80: note = Synthetic: >NC_003310.1-cand-121520-121599
  source 1..80: mol_type = other DNA
tattaataatagggttagtttccgaactaatgttaattggatgattaataatatctatatttccagcgttaagtgtaaca

SEQ ID NO: 18261 - DNA, 80 bp, synthetic construct
  misc_feature 1..80: note = Synthetic: >NC_003310.1-cand-121600-121679
  source 1..80: mol_type = other DNA
ttaaacagttttaattcacgtgacgtggtatcaattaaataattaatgcccaatttggatatagtagcctgaagctcatc

SEQ ID NO: 18262 - DNA, 80 bp, synthetic construct
  misc_feature 1..80: note = Synthetic: >NC_003310.1-cand-121680-121759
  source 1..80: mol_type = other DNA
ttgtttagttacggatcctaatgagttattaagaaatacatcgaacggatgaacgaaggttgttttaagttgatcacata

SEQ ID NO: 18263 - DNA, 80 bp, synthetic construct
  misc_feature 1..80: note = Synthetic: >NC_003310.1-cand-121760-121839
  source 1..80: mol_type = other DNA
ctttgtaatctagacatagatgtggaagaacggtagaaactatacgaaatagatattcagagtcctctaattgatcaaga

SEQ ID NO: 18264 - DNA, 80 bp, synthetic construct
  misc_feature 1..80: note = Synthetic: >NC_003310.1-cand-121840-121919
  source 1..80: mol_type = other DNA
gtaactattgacttaataggcatcatttatttagtattaaatgacgaccgtaccagtgacagatatacaaaacgacttaa

SEQ ID NO: 18265 - DNA, 80 bp, synthetic construct
  misc_feature 1..80: note = Synthetic: >NC_003310.1-cand-121920-121999
  source 1..80: mol_type = other DNA
ttacagagttttcagaagataattatccatctaacaaaaattatgaaataactcttcgccaaatgtctattctaactcac

SEQ ID NO: 18266 - DNA, 80 bp, synthetic construct
  misc_feature 1..80: note = Synthetic: >NC_003310.1-cand-122000-122079
  source 1..80: mol_type = other DNA
gttaacaacgtggtagatagagaacataatgccgccgtagtgtcatctccagaggaaatatcatcacaacttaatgaaga

SEQ ID NO: 18267 - DNA, 80 bp, synthetic construct
  misc_feature 1..80: note = Synthetic: >NC_003310.1-cand-134750-134829
  source 1..80: mol_type = other DNA
atattatcggattcggtattgttactcgagaatagagttcgttatgctcctgatattcggaaatctgtggagtttcaggt

SEQ ID NO: 18268 - DNA, 80 bp, synthetic construct
  misc_feature 1..80: note = Synthetic: >NC_003310.1-cand-134830-134909
  source 1..80: mol_type = other DNA
tttggtggaagtgtaactgctacttggtgggatactgaaggatatttcagagagttgtggatgttcgggttcgacatcca

SEQ ID NO: 18269 - DNA, 80 bp, synthetic construct
  misc_feature 1..80: note = Synthetic: >NC_003310.1-cand-134910-134989
  source 1..80: mol_type = other DNA
ccgatggtgtcacgccactaatcggttcggtaacgtctgtggatggaggtgctacttctacagaacctgtagcctcagtt

SEQ ID NO: 18270 - DNA, 80 bp, synthetic construct
  misc_feature 1..80: note = Synthetic: >NC_003310.1-cand-134990-135069
  source 1..80: mol_type = other DNA
gtcaacggagatacatcttcaatgcgcggaaatgtataatttggtaatggtttctcatgtggatcttaagaagaagaggt

SEQ ID NO: 18271 - DNA, 80 bp, synthetic construct
  misc_feature 1..80: note = Synthetic: >NC_003310.1-cand-135070-135149
  source 1..80: mol_type = other DNA
aagatatctacgaaagataccgatcacgttctagttctcttttgtagaactttaactttttctttctcagcatctagttg

SEQ ID NO: 18272 - DNA, 80 bp, synthetic construct
  misc_feature 1..80: note = Synthetic: >NC_003310.1-cand-135150-135229
  source 1..80: mol_type = other DNA
atattccgacctcttcacgtttcacatgggttacctccgcagtttttacaagcgatttcacgttccagatcacgttcagc

SEQ ID NO: 18273 - DNA, 80 bp, synthetic construct
  misc_feature 1..80: note = Synthetic: >NC_003310.1-cand-135230-135309
  source 1..80: mol_type = other DNA
cttcatacgtctctccctctctctatcgagtttatcagagcagtctttctgaaggcgatcgaactccataaatttctcca

SEQ ID NO: 18274 - DNA, 80 bp, synthetic construct
  misc_feature 1..80: note = Synthetic: >NC_003310.1-cand-135300-135379
  source 1..80: mol_type = other DNA
aatttctccaacgctttgattgtttccatagatttccgaagtttagcttctaggacggcgattcttttttctttcgaatt

SEQ ID NO: 18275 - DNA, 80 bp, synthetic construct
  misc_feature 1..80: note = Synthetic: >NC_003310.1-cand-135390-135469
  source 1..80: mol_type = other DNA
aaccgtttccattaccaccatctctacgtttcttttctagatcggcaatctttctcaacatttcatccccatgccttttc

SEQ ID NO: 18276 - DNA, 80 bp, synthetic construct
  misc_feature 1..80: note = Synthetic: >NC_003310.1-cand-135470-135549
  source 1..80: mol_type = other DNA
attcctcgagtctatcgtcgtcgaaatatcgttccagctccttttcgacctcaataactttagcacgttgtctcatcaag

SEQ ID NO: 18277 - DNA, 80 bp, synthetic construct
  misc_feature 1..80: note = Synthetic: >NC_003310.1-cand-135550-135629
  source 1..80: mol_type = other DNA
ctctctcttgtagtactatcatttttatctgattccctggcacgtttaagatcttcatgtaattgagtcagctcttgaca

SEQ ID NO: 18278 - DNA, 80 bp, synthetic construct
  misc_feature 1..80: note = Synthetic: >NC_003310.1-cand-135630-135709
  source 1..80: mol_type = other DNA
caatctcttaactaacttcctctcttgcttcttcgtcatagtacttacaatcactatgggatccattgttaccacgtctg

SEQ ID NO: 18279 - DNA, 80 bp, synthetic construct
  misc_feature 1..80: note = Synthetic: >NC_003310.1-cand-135710-135789
  source 1..80: mol_type = other DNA
tactcggcgagctcacgtttaagagattcaatttccagtttgtacattgatttcattattacgtccgcagtcgttcaact

SEQ ID NO: 18280 - DNA, 80 bp, synthetic construct
  misc_feature 1..80: note = Synthetic: >NC_003310.1-cand-135790-135869
  source 1..80: mol_type = other DNA
gtatttcaagatctgagattctagattgtaatctctgtagcatttccacggcattcactcagttgtctttcaagatctga

SEQ ID NO: 18281 - DNA, 80 bp, synthetic construct
  misc_feature 1..80: note = Synthetic: >NC_003310.1-cand-135870-135949
  source 1..80: mol_type = other DNA
gattctagattggagtctgctaatctctgtaagatttcctcctccgctctcgatgcagtcggtcaacttattctctagtt

SEQ ID NO: 18282 - DNA, 80 bp, synthetic construct
  misc_feature 1..80: note = Synthetic: >NC_003310.1-cand-135950-136029
  source 1..80: mol_type = other DNA
ctctaatacgtgaacgcagtgcatcaacttcttgtgtgtcttcttgattgcgtgtgcattcatcgagtctagattcgaga

SEQ ID NO: 18283 - DNA, 80 bp, synthetic construct
  misc_feature 1..80: note = Synthetic: >NC_003310.1-cand-196480-196559
  source 1..80: mol_type = other DNA
actgctcacgttttttctctagtacataatttcacacaagtttttatacagacaaattaattctcgtccatatattttaa

SEQ ID NO: 18284 - DNA, 80 bp, synthetic construct
  misc_feature 1..80: note = Synthetic: >NC_003443.1-cand-10-89
  source 1..80: mol_type = other DNA
cagatggcatcgttatatgacgaattgcaaaaagattacgtaggtccggaaccactagattcggtgccggtaacgattcc

SEQ ID NO: 18285 - DNA, 80 bp, synthetic construct
  misc_feature 1..80: note = Synthetic: >NC_003443.1-cand-70-149
  source 1..80: mol_type = other DNA
tcggtgccggtaacgattccagttttatactatctgatcattctctatctctattaaggatatttctagtctaaagttca

SEQ ID NO: 18286 - DNA, 80 bp, synthetic construct
  misc_feature 1..80: note = Synthetic: >NC_003443.1-cand-150-229
  source 1..80: mol_type = other DNA
aaatgtcaagtgttttaaagacatttgaaagatttactatacaacaggagcttcaggagcaatctgatgacactccagta

SEQ ID NO: 18287 - DNA, 80 bp, synthetic construct
  misc_feature 1..80: note = Synthetic: >NC_003443.1-cand-230-309
  source 1..80: mol_type = other DNA
cctcttgagacaatcaaacctacaatcagggtatttgtcatcaataataatgatcctgtcgtaagatctagacttttatt

SEQ ID NO: 18288 - DNA, 80 bp, synthetic construct
  misc_feature 1..80: note = Synthetic: >NC_003443.1-cand-310-389
  source 1..80: mol_type = other DNA
ctttaatctacgaatcattatgagtaacactgcaagagagggacatagagctggtgctctcctcagtcttttatcactac

SEQ ID NO: 18289 - DNA, 80 bp, synthetic construct
  misc_feature 1..80: note = Synthetic: >NC_003443.1-cand-390-469
  source 1..80: mol_type = other DNA
cttctgcagctatgagtaatcacatcaaattagccatgcattcaccagaagccagcatagatagagtagagataacaggg

SEQ ID NO: 18290 - DNA, 80 bp, synthetic construct
  misc_feature 1..80: note = Synthetic: >NC_003443.1-cand-470-549
  source 1..80: mol_type = other DNA
tttgagaataattcattccgagtcattccagatgctcgatcaactatgtccagaggagaggtgctggcttttgaagcatt

SEQ ID NO: 18291 - DNA, 80 bp, synthetic construct
  misc_feature 1..80: note = Synthetic: >NC_003443.1-cand-550-629
  source 1..80: mol_type = other DNA
agctgaggacattcctgatacccttaatcaccaaactccatttgtaaataatgatgtagaagatgacatatttgatgaaa

SEQ ID NO: 18292 - DNA, 80 bp, synthetic construct
  misc_feature 1..80: note = Synthetic: >NC_003443.1-cand-630-709
  source 1..80: mol_type = other DNA
cagagaaattcttagatgtttgctacagtgtgcttatgcaggcatggatagtaacatgcaagtgtatgactgctcctgat

SEQ ID NO: 18293 - DNA, 80 bp, synthetic construct
  misc_feature 1..80: note = Synthetic: >NC_003443.1-cand-710-789
  source 1..80: mol_type = other DNA
caaccaccagtatcagtagcaaagatggctaaatatcaacaacaagggagaatcaatgctaggtatgtactacaacctga

SEQ ID NO: 18294 - DNA, 80 bp, synthetic construct
  misc_feature 1..80: note = Synthetic: >NC_003443.1-cand-790-869
  source 1..80: mol_type = other DNA
agcacaaagactaattcagaatgccatccgcaagtcaatggtagtaaggcatttcatgacttatgagcttcaactttcac

SEQ ID NO: 18295 - DNA, 80 bp, synthetic construct
  misc_feature 1..80: note = Synthetic: >NC_004162.2-cand-9070-9149
  source 1..80: mol_type = other DNA
cacattgctgtcacaacagtccggcaacgtaaagatcacagtcaatagtcagacggtgcggtataagtgtaattgcggtg

SEQ ID NO: 18296 - DNA, 80 bp, synthetic construct
  misc_feature 1..80: note = Synthetic: >NC_004162.2-cand-9150-9229
  source 1..80: mol_type = other DNA
gctcaaatgaaggactaataactacagataaagtgattaataactgcaaggttgatcaatgtcatgccgcggtcaccaat

SEQ ID NO: 18297 - DNA, 80 bp, synthetic construct
  misc_feature 1..80: note = Synthetic: >NC_004162.2-cand-9200-9279
  source 1..80: mol_type = other DNA
gttgatcaatgtcatgccgcggtcaccaatcacaaaaagtggcagtataactcccctctggtcccgcgtaacgctgaact

SEQ ID NO: 18298 - DNA, 80 bp, synthetic construct
  misc_feature 1..80: note = Synthetic: >NC_004162.2-cand-9320-9399
  source 1..80: mol_type = other DNA
gcaaatgtaacatgcatggtgcctaaagcaaggaaccccaccgtgacgtacgggaaaaaccaagtcatcatgctactgta

SEQ ID NO: 18299 - DNA, 80 bp, synthetic construct
  misc_feature 1..80: note = Synthetic: >NC_004162.2-cand-9400-9479
  source 1..80: mol_type = other DNA
tcctgaccacccaacactcctgtcctaccggagtatgggagaagaaccaaactatcaagaagagtgggtgacgcacaaga

SEQ ID NO: 18300 - DNA, 80 bp, synthetic construct
  misc_feature 1..80: note = Synthetic: >NC_004162.2-cand-9440-9519
  source 1..80: mol_type = other DNA
gaagaaccaaactatcaagaagagtgggtgacgcacaagaaggaggtcgtgctaaccgtgccgactgaagggctcgaggt

SEQ ID NO: 18301 - DNA, 80 bp, synthetic construct
  misc_feature 1..80: note = Synthetic: >NC_004162.2-cand-9560-9639
  source 1..80: mol_type = other DNA
ttatctgcaaacggtacagcccacggccacccgcatgagataatcttgtactattatgagctgtaccctactatgactgt

SEQ ID NO: 18302 - DNA, 80 bp, synthetic construct
  misc_feature 1..80: note = Synthetic: >NC_004162.2-cand-9610-9689
  source 1..80: mol_type = other DNA
ctattatgagctgtaccctactatgactgtagtagttgtgtcagtggcctcgttcatactcctgtcgatggtgggtatgg

SEQ ID NO: 18303 - DNA, 80 bp, synthetic construct
  misc_feature 1..80: note = Synthetic: >NC_004162.2-cand-9720-9799
  source 1..80: mol_type = other DNA
gatgcatcacaccatacgaactgacaccaggagctaccgtccctttcctgcttagcctaatatgctgcatcagaacagct

SEQ ID NO: 18304 - DNA, 80 bp, synthetic construct
  misc_feature 1..80: note = Synthetic: >NC_004162.2-cand-9800-9879
  source 1..80: mol_type = other DNA
aaagcggccacataccaagaggctgcggtatacctgtggaacgagcagcaacctttgttttggctacaagcccttattcc

SEQ ID NO: 18305 - DNA, 80 bp, synthetic construct
  misc_feature 1..80: note = Synthetic: >NC_004162.2-cand-9880-9959
  source 1..80: mol_type = other DNA
gctggcagccctgattgtcctatgcaactgtctgagactcttaccatgctgttgtaaaacgttggcttttttagccgtaa

SEQ ID NO: 18306 - DNA, 80 bp, synthetic construct
  misc_feature 1..80: note = Synthetic: >NC_004162.2-cand-9960-10039
  source 1..80: mol_type = other DNA
tgagcatcggtgcccacactgtgagcgcgtacgaacacgtaacagtgatcccgaacacggtgggagtaccgtataagact

SEQ ID NO: 18307 - DNA, 80 bp, synthetic construct
  misc_feature 1..80: note = Synthetic: >NC_004162.2-cand-10040-10119
  source 1..80: mol_type = other DNA
ctagtcaacagaccgggctacagccccatggtactggagatggagctactgtcagtcactttggagccaacgctatcgct

SEQ ID NO: 18308 - DNA, 80 bp, synthetic construct
  misc_feature 1..80: note = Synthetic: >NC_004162.2-cand-10120-10199
  source 1..80: mol_type = other DNA
tgattacatcacgtgcgaatacaaaaccgtcatcccgtctccgtacgtgaaatgctgcggtacagcagagtgcaaggaca

SEQ ID NO: 18309 - DNA, 80 bp, synthetic construct
  misc_feature 1..80: note = Synthetic: >NC_004162.2-cand-10170-10249
  source 1..80: mol_type = other DNA
aatgctgcggtacagcagagtgcaaggacaaaaacctacctgactacagctgtaaggtcttcaccggcgtctacccattt

SEQ ID NO: 18310 - DNA, 80 bp, synthetic construct
  misc_feature 1..80: note = Synthetic: >NC_004162.2-cand-10280-10359
  source 1..80: mol_type = other DNA
gctgaaaacacgcaattgagcgaagcacatgtggagaagtccgaatcatgcaaaacagaatttgcatcagcatacagggc

SEQ ID NO: 18311 - DNA, 80 bp, synthetic construct
  misc_feature 1..80: note = Synthetic: >NC_005062.1-cand-5460-5539
  source 1..80: mol_type = other DNA
tggatgaggcccactggacagaccctcacagcatagccgccagaggccacttatattcaatggcaaaagaaaacaaatgt

SEQ ID NO: 18312 - DNA, 80 bp, synthetic construct
  misc_feature 1..80: note = Synthetic: >NC_005062.1-cand-5550-5629
  source 1..80: mol_type = other DNA
tgatgacagcaacgccgccgggaaagagtgagcccttcccagagtccaatggagctatcaccagtgaagaaagacaaatc

SEQ ID NO: 18313 - DNA, 80 bp, synthetic construct
  misc_feature 1..80: note = Synthetic: >NC_005062.1-cand-5630-5709
  source 1..80: mol_type = other DNA
cctgaaggggaatggcgtgatggcttcgactggatcaccgagtacgaggggcggacagcatggttcgtcccttcaatagc

SEQ ID NO: 18314 - DNA, 80 bp, synthetic construct
  misc_feature 1..80: note = Synthetic: >NC_005062.1-cand-5720-5799
  source 1..80: mol_type = other DNA
gtcattgcccgtactctgagacaaaaagggaagagtgtgatttgcctaaacagcaagacctttgaaaaagactattccag

SEQ ID NO: 18315 - DNA, 80 bp, synthetic construct
  misc_feature 1..80: note = Synthetic: >NC_005062.1-cand-5770-5849
  source 1..80: mol_type = other DNA
cagcaagacctttgaaaaagactattccagagttagagatgagaaaccagattttgtggtgacaacagacatttcagaaa

SEQ ID NO: 18316 - DNA, 80 bp, synthetic construct
  misc_feature 1..80: note = Synthetic: >NC_005062.1-cand-5870-5949
  source 1..80: mol_type = other DNA
agtcgcgtcatagatgggcgaacgaacattaagccagaggaggttgatgggaaagttgaactcaccggaactagacgtgt

SEQ ID NO: 18317 - DNA, 80 bp, synthetic construct
  misc_feature 1..80: note = Synthetic: >NC_005062.1-cand-5950-6029
  source 1..80: mol_type = other DNA
gacaacggcctctgcagcccaacgccgagggagagtcggcaggcatgacggaagaacagacgagtatatctactctggcc

SEQ ID NO: 18318 - DNA, 80 bp, synthetic construct
  misc_feature 1..80: note = Synthetic: >NC_005062.1-cand-6020-6099
  source 1..80: mol_type = other DNA
tactctggccagtgtgacgatgatgacagcggacttgtgcagtggaaggaggcacagatactcctggacaatataacaac

SEQ ID NO: 18319 - DNA, 80 bp, synthetic construct
  misc_feature 1..80: note = Synthetic: >NC_005062.1-cand-6110-6189
  source 1..80: mol_type = other DNA
cctgtggcaaccttctatggacctgagcaggacaagatgccagaggtggctggccacttccgtctcactgaggagagaag

SEQ ID NO: 18320 - DNA, 80 bp, synthetic construct
  misc_feature 1..80: note = Synthetic: >NC_005062.1-cand-6190-6269
  source 1..80: mol_type = other DNA
aaagcactttcgacacctgctgacccattgtgacttcacaccgtggctggcatggcatgttgcggctaatgtgtccaacg

SEQ ID NO: 18321 - DNA, 80 bp, synthetic construct
  misc_feature 1..80: note = Synthetic: >NC_005062.1-cand-6270-6349
  source 1..80: mol_type = other DNA
tgacaagtcgaagctggacatgggaaggcccagaggaaaatgctgtggacgaggctaatggagacctggtgacattcaag

SEQ ID NO: 18322 - DNA, 80 bp, synthetic construct
  misc_feature 1..80: note = Synthetic: >NC_005062.1-cand-6350-6429
  source 1..80: mol_type = other DNA
agcccgaacggagcggaaagaaccctgagaccagtctggagagacgctcgcatgttcaaagaaggacgtgacataagaga

SEQ ID NO: 18323 - DNA, 80 bp, synthetic construct
  misc_feature 1..80: note = Synthetic: >NC_005062.1-cand-6380-6459
  source 1..80: mol_type = other DNA
ccagtctggagagacgctcgcatgttcaaagaaggacgtgacataagagagttcgtggcatatgcttcgggacggcggag

SEQ ID NO: 18324 - DNA, 80 bp, synthetic construct
  misc_feature 1..80: note = Synthetic: >NC_005062.1-cand-6510-6589
  source 1..80: mol_type = other DNA
acagatgcatgagtgccatggatgtcttttacacactgctttatgaggagcctggcagcagagcaatgaagatggcagag

SEQ ID NO: 18325 - DNA, 80 bp, synthetic construct
  misc_feature 1..80: note = Synthetic: >NC_005062.1-cand-6590-6669
  source 1..80: mol_type = other DNA
agagatgctccagaagccttcttaacgatggttgaaatggtggtgcttggcctggccactctgggagctgtctggtgtct

SEQ ID NO: 18326 - DNA, 80 bp, synthetic construct
  misc_feature 1..80: note = Synthetic: >NC_005062.1-cand-6670-6749
  source 1..80: mol_type = other DNA
ggttttgcggacttcaattagtcgcatgatgctaggcacgatggtgctgttggtctcgctggcattactttgggcgggcg

SEQ ID NO: 18327 - DNA, 80 bp, synthetic construct
  misc_feature 1..80: note = Synthetic: >NC_005233.1-cand-990-1069
  source 1..80: mol_type = other DNA
gttcattgcaggcatggcagagctaggtgcattctttgctgttctccaggatatgaggaacaccatcatggcgtcaaaaa

SEQ ID NO: 18328 - DNA, 80 bp, synthetic construct
  misc_feature 1..80: note = Synthetic: >NC_005233.1-cand-1060-1139
  source 1..80: mol_type = other DNA
gcgtcaaaaactatcggaacatctgaggagaagctaaagaagaaatcatctttttaccaatcttacctacggaggacaca

SEQ ID NO: 18329 - DNA, 80 bp, synthetic construct
  misc_feature 1..80: note = Synthetic: >NC_005233.1-cand-1160-1239
  source 1..80: mol_type = other DNA
accagcgcatcatcgtgctcttcatggttgactggggaaaagaggcagttgatagttttcatcttggtgatgatatggat

SEQ ID NO: 18330 - DNA, 80 bp, synthetic construct
  misc_feature 1..80: note = Synthetic: >NC_005233.1-cand-1260-1339
  source 1..80: mol_type = other DNA
acaggcattaattgatcaaaaagtgaaggaaatatctaatcaggaaccgcttaagctttaattgtatttgttgcattatc

SEQ ID NO: 18331 - DNA, 80 bp, synthetic construct
  misc_feature 1..80: note = Synthetic: >NC_005233.1-cand-1340-1419
  source 1..80: mol_type = other DNA
ccatgctttatgtaatcccacgtatgctgcattaactgcttggactggaattattatactactgattggtgaatgtattt

SEQ ID NO: 18332 - DNA, 80 bp, synthetic construct
  misc_feature 1..80: note = Synthetic: >NC_005233.1-cand-1440-1519
  source 1..80: mol_type = other DNA
tgggccatttatccgttatgtaatctcagggtggtttaggacgtcaccttaagtgacttttttctgtatatatggatgta

SEQ ID NO: 18333 - DNA, 80 bp, synthetic construct
  misc_feature 1..80: note = Synthetic: >NC_005233.1-cand-1530-1609
  source 1..80: mol_type = other DNA
gatctgtactaacatcttatttccttcttttcctttctttactaacaacaactacctacctcaaaacaacaacactacct

SEQ ID NO: 18334 - DNA, 80 bp, synthetic construct
  misc_feature 1..80: note = Synthetic: >NC_005233.1-cand-1580-1659
  source 1..80: mol_type = other DNA
actacctacctcaaaacaacaacactacctcaacaactactacctcattgatttgcttcctgaatgtctctttagggagt

SEQ ID NO: 18335 - DNA, 80 bp, synthetic construct
  misc_feature 1..80: note = Synthetic: >NC_005234.1-cand-10-89
  source 1..80: mol_type = other DNA
gcaagaaatagcagttaaataacagcatgatcatgtggggtttactattgacaatgattttgatcgattttggggcatcc

SEQ ID NO: 18336 - DNA, 80 bp, synthetic construct
  misc_feature 1..80: note = Synthetic: >NC_005234.1-cand-150-229
  source 1..80: mol_type = other DNA
agtgtaacaggtaaggtggagctgccaccccttctgcttacagatgcagaggccttggtcccggaaagttcttgtaacat

SEQ ID NO: 18337 - DNA, 80 bp, synthetic construct
  misc_feature 1..80: note = Synthetic: >NC_005234.1-cand-180-259
  source 1..80: mol_type = other DNA
cttctgcttacagatgcagaggccttggtcccggaaagttcttgtaacatggacaaccatcagtccatgtcaattataca

SEQ ID NO: 18338 - DNA, 80 bp, synthetic construct
  misc_feature 1..80: note = Synthetic: >NC_005234.1-cand-250-329
  source 1..80: mol_type = other DNA
caattatacaaaaagtgacaaaagtaagctggagaaaaaaggcagacaaagcccaagctgccaaggactcatttgagaca

SEQ ID NO: 18339 - DNA, 80 bp, synthetic construct
  misc_feature 1..80: note = Synthetic: >NC_005234.1-cand-330-409
  source 1..80: mol_type = other DNA
acatcaagtgaggttaacttaaagggaacatgtgcattgagtcataggatggttgaagaatcttacagaaataggagatc

SEQ ID NO: 18340 - DNA, 80 bp, synthetic construct
  misc_feature 1..80: note = Synthetic: >NC_005234.1-cand-410-489
  source 1..80: mol_type = other DNA
agtaatatgttatgacttgtcttgcaattcaacacattgcaagccaacgatgcatatgattgtacctgtgcactcatgca

SEQ ID NO: 18341 - DNA, 80 bp, synthetic construct
  misc_feature 1..80: note = Synthetic: >NC_005234.1-cand-490-569
  source 1..80: mol_type = other DNA
acatgatgaaaagctgcctggttgggcttgggccttatagaatccaaatcgtctatgagagaacctactgtacaactggt

SEQ ID NO: 18342 - DNA, 80 bp, synthetic construct
  misc_feature 1..80: note = Synthetic: >NC_005234.1-cand-550-629
  source 1..80: mol_type = other DNA
gaacctactgtacaactggtatactaacagaagggaagtgttttgtgccagaccagagtattgttaatgttatcaagaat

SEQ ID NO: 18343 - DNA, 80 bp, synthetic construct
  misc_feature 1..80: note = Synthetic: >NC_005301.3-cand-5630-5709
  source 1..80: mol_type = other DNA
taagctaaagaaactcggtgctatctcaacaaacatagagatcgggaaaagggattgcctagatctactcagcacagtag

SEQ ID NO: 18344 - DNA, 80 bp, synthetic construct
  misc_feature 1..80: note = Synthetic: >NC_005301.3-cand-5710-5789
  source 1..80: mol_type = other DNA
atgggctaacagaccagcagaaagaaaatattgtaaatgggatatttgagccctcaaagttatccttctaccattggaag

SEQ ID NO: 18345 - DNA, 80 bp, synthetic construct
  misc_feature 1..80: note = Synthetic: >NC_005301.3-cand-5790-5869
  source 1..80: mol_type = other DNA
gaactggtcaaaaaaaacattgatgaagttttactaactgaagatggaaatctgatcttctgctggctgaaaacaatctc

SEQ ID NO: 18346 - DNA, 80 bp, synthetic construct
  misc_feature 1..80: note = Synthetic: >NC_005301.3-cand-5870-5949
  source 1..80: mol_type = other DNA
ttcttcagtcaaaggaagcctaaagaagagactcaaattcatgaatatacattctccagaattgatgccggaaaactgtc

SEQ ID NO: 18347 - DNA, 80 bp, synthetic construct
  misc_feature 1..80: note = Synthetic: >NC_005301.3-cand-5950-6029
  source 1..80: mol_type = other DNA
tcttttctagtgaggaattcaatgagttaattaagttgaagaaactcctcctcaatgaacaacaagatgaacaggagctg

SEQ ID NO: 18348 - DNA, 80 bp, synthetic construct
  misc_feature 1..80: note = Synthetic: >NC_005301.3-cand-6030-6109
  source 1..80: mol_type = other DNA
aaacaagatcttttgatatcttcttggatcaagtgcataacagcttgcaaggattttgcaagcatcaatgacaagattca

SEQ ID NO: 18349 - DNA, 80 bp, synthetic construct
  misc_feature 1..80: note = Synthetic: >NC_005301.3-cand-6110-6189
  source 1..80: mol_type = other DNA
gaagttcatttaccacctgtctgaagagctatatgacataaggctgcagcatctggaactgtcaaagcttaagcaagagc

SEQ ID NO: 18350 - DNA, 80 bp, synthetic construct
  misc_feature 1..80: note = Synthetic: >NC_005301.3-cand-6190-6269
  source 1..80: mol_type = other DNA
accctagtgtcagcttcacaaaagaagaagtcttaataaagcggctggagaaaaatttccttaagcagcataatttagag

SEQ ID NO: 18351 - DNA, 80 bp, synthetic construct
  misc_feature 1..80: note = Synthetic: >NC_005301.3-cand-6270-6349
  source 1..80: mol_type = other DNA
attatggaaactgtgaatcttgtattctttgcagccctctcagctccctggtgcttacactataaagcactagagtctta

SEQ ID NO: 18352 - DNA, 80 bp, synthetic construct
  misc_feature 1..80: note = Synthetic: >NC_005301.3-cand-6350-6429
  source 1..80: mol_type = other DNA
tttggtgagacatccagaaatacttgactgtggatctaaggaggactgcaaactcaccttgcttgatctgtcagtttcta

SEQ ID NO: 18353 - DNA, 80 bp, synthetic construct
  misc_feature 1..80: note = Synthetic: >NC_005301.3-cand-6430-6509
  source 1..80: mol_type = other DNA
agctcttggtttgtttgtatcaaaaagatgatgaggagctgataaatagctcaagtttgaaacttgggtttttagtgaaa

SEQ ID NO: 18354 - DNA, 80 bp, synthetic construct
  misc_feature 1..80: note = Synthetic: >NC_005301.3-cand-6490-6569
  source 1..80: mol_type = other DNA
aacttgggtttttagtgaaatatgttgtcaccttgttcacatccaatggtgaacctttttcactcagtctcaatgacggg

SEQ ID NO: 18355 - DNA, 80 bp, synthetic construct
  misc_feature 1..80: note = Synthetic: >NC_005301.3-cand-6590-6669
  source 1..80: mol_type = other DNA
caagactactgacgaaaagttactacatcaaacaaagatagtttttgctaaaattggtttatctgggaacagttatgact

SEQ ID NO: 18356 - DNA, 80 bp, synthetic construct
  misc_feature 1..80: note = Synthetic: >NC_005301.3-cand-6660-6739
  source 1..80: mol_type = other DNA
agttatgactttatctggactacccaaatgatagcaaacagcaattttaacgtctgcaaaagattaacgggaaggagtac

SEQ ID NO: 18357 - DNA, 80 bp, synthetic construct
  misc_feature 1..80: note = Synthetic: >NC_005301.3-cand-6750-6829
  source 1..80: mol_type = other DNA
ctccctagaagcgttagaagcaaggtcatatatgagatggtaaaattagtgggagaaacaggcatggcaatactacaaca

SEQ ID NO: 18358 - DNA, 80 bp, synthetic construct
  misc_feature 1..80: note = Synthetic: >NC_005301.3-cand-6830-6909
  source 1..80: mol_type = other DNA
attagcttttgcacaagcactaaattatgagcaccgcttctatgcggtcttagcacctaaagcgcaactaggaggagcaa

SEQ ID NO: 18359 - DNA, 80 bp, synthetic construct
  misc_feature 1..80: note = Synthetic: >NC_006572.1-cand-6020-6099
  source 1..80: mol_type = other DNA
cttttgtgtttcttgtagtgacaccaatctgtcgttcacacttaagaatgaggagccaagccattctgatcctaacagct

SEQ ID NO: 18360 - DNA, 80 bp, synthetic construct
  misc_feature 1..80: note = Synthetic: >NC_006572.1-cand-6100-6179
  source 1..80: mol_type = other DNA
cgccgtgacatttaagatcctttaagtgggccaaaaggatgattgcgtcaaaagtcagcattagttttcttctggtgttc

SEQ ID NO: 18361 - DNA, 80 bp, synthetic construct
  misc_feature 1..80: note = Synthetic: >NC_006572.1-cand-6180-6259
  source 1..80: mol_type = other DNA
aataactttagtgattttattttattcaacagtgacttccatccaggcacagagctttggaagtgattctgcaagcagct

SEQ ID NO: 18362 - DNA, 80 bp, synthetic construct
  misc_feature 1..80: note = Synthetic: >NC_006572.1-cand-6260-6339
  source 1..80: mol_type = other DNA
gtctcgatcaactccctcttgcctataacggtcgtagtcaccatagagcgctgttaccataggcgaggattttacaaacc

SEQ ID NO: 18363 - DNA, 80 bp, synthetic construct
  misc_feature 1..80: note = Synthetic: >NC_006572.1-cand-6340-6419
  source 1..80: mol_type = other DNA
tctcttttagaggatcaatctctgagggtgtgtccccctctctgtcaatataaaggttgttgaaatctctcaagagctgt

SEQ ID NO: 18364 - DNA, 80 bp, synthetic construct
  misc_feature 1..80: note = Synthetic: >NC_006572.1-cand-6420-6499
  source 1..80: mol_type = other DNA
cgcctatctgtcctgacaaattgtctttctatctcaccctctttaagcttattcctaaaagcatgaaattctgatacaat

SEQ ID NO: 18365 - DNA, 80 bp, synthetic construct
  misc_feature 1..80: note = Synthetic: >NC_006572.1-cand-6500-6579
  source 1..80: mol_type = other DNA
ctcttttttcacatcaagaatggacattttgttattgatgcctctgtggcagagctccaacaccctctcataatgatcag

SEQ ID NO: 18366 - DNA, 80 bp, synthetic construct
  misc_feature 1..80: note = Synthetic: >NC_006572.1-cand-6580-6659
  source 1..80: mol_type = other DNA
atcgagaatctgtcaaaacattgaggctctcaatgcccgatgttctcactcctgcttttgttaaagattcacaaagcctt

SEQ ID NO: 18367 - DNA, 80 bp, synthetic construct
  misc_feature 1..80: note = Synthetic: >NC_006572.1-cand-6660-6739
  source 1..80: mol_type = other DNA
gagtactcagattcttcaaacatttttgatgactgctgcgagaattcaagtaagctaaataggatatgcctaaacctctc

SEQ ID NO: 18368 - DNA, 80 bp, synthetic construct
  misc_feature 1..80: note = Synthetic: >NC_006572.1-cand-6740-6819
  source 1..80: mol_type = other DNA
attggcccattctggaaacaaatcagtgtagaaattggttctgccgtctatcaagggcaacagaatgatgtcaacagatg

SEQ ID NO: 18369 - DNA, 80 bp, synthetic construct
  misc_feature 1..80: note = Synthetic: >NC_006572.1-cand-6820-6899
  source 1..80: mol_type = other DNA
ataagtcaggctttaaagactctagcttaatggtatcttctttatacttttgctcaaagtttattggtgaagtcctgaca

SEQ ID NO: 18370 - DNA, 80 bp, synthetic construct
  misc_feature 1..80: note = Synthetic: >NC_006572.1-cand-6900-6979
  source 1..80: mol_type = other DNA
aagcattccagtaatattaatgtgttcccactgaatttgaatccatctggcaccacaaatggtagaccagggcacagaac

SEQ ID NO: 18371 - DNA, 80 bp, synthetic construct
  misc_feature 1..80: note = Synthetic: >NC_006572.1-cand-6980-7059
  source 1..80: mol_type = other DNA
accttgtctctgcagaaggatttcaacagaaaggtcttctgagttgtgctcacaaccattggctttgcaactgtctatct

SEQ ID NO: 18372 - DNA, 80 bp, synthetic construct
  misc_feature 1..80: note = Synthetic: >NC_006572.1-cand-7060-7139
  source 1..80: mol_type = other DNA
caatacagagtgacaacaacttaaggccctcaattaatagcattctcggctctgtctgaactaggaaggctagcttctgt

SEQ ID NO: 18373 - DNA, 80 bp, synthetic construct
  misc_feature 1..80: note = Synthetic: >NC_006572.1-cand-7140-7219
  source 1..80: mol_type = other DNA
tttgaaagcctctcatcctctaagaggtacctgctcacaagatctttgctctcggacagcaactcctccatcaccacaca

SEQ ID NO: 18374 - DNA, 80 bp, synthetic construct
  misc_feature 1..80: note = Synthetic: >NC_006573.1-cand-10-89
  source 1..80: mol_type = other DNA
ctaggcatttttggttgcgcaattcaagtgtcctatttaaaatgggacaaatagtgacattcttccaggaagtgcctcat

SEQ ID NO: 18375 - DNA, 80 bp, synthetic construct
  misc_feature 1..80: note = Synthetic: >NC_006577.2-cand-4930-5009
  source 1..80: mol_type = other DNA
ataatgacgttcgtgattatttgttgtctaagatgactagtcttcctaaagattggcgtcttatcaataaatttgatgtt

SEQ ID NO: 18376 - DNA, 80 bp, synthetic construct
  misc_feature 1..80: note = Synthetic: >NC_006577.2-cand-5010-5089
  source 1..80: mol_type = other DNA
attaacggtgttaaaactgttaagtattttgagtgtcctaattctatttatatatgtagtcagggtaaagactttggtta

SEQ ID NO: 18377 - DNA, 80 bp, synthetic construct
  misc_feature 1..80: note = Synthetic: >NC_006577.2-cand-5090-5169
  source 1..80: mol_type = other DNA
tgtatgtgatggttctttttataaagcaactgttaatcaagtttgtgttttattagctaagaagatagatgttttgctta

SEQ ID NO: 18378 - DNA, 80 bp, synthetic construct
  misc_feature 1..80: note = Synthetic: >NC_006577.2-cand-5170-5249
  source 1..80: mol_type = other DNA
ctgtagatggtgttaattttaaatctatttctcttactgtaggtgaagtttttggtaaaatacttggtaatgttttctgt

SEQ ID NO: 18379 - DNA, 80 bp, synthetic construct
  misc_feature 1..80: note = Synthetic: >NC_006577.2-cand-5250-5329
  source 1..80: mol_type = other DNA
gatggcattgatgttactaagttaaagtgtagtgatttttatgccgataaaattttatatcagtatgaaaatttgtcttt

SEQ ID NO: 18380 - DNA, 80 bp, synthetic construct
  misc_feature 1..80: note = Synthetic: >NC_006577.2-cand-5330-5409
  source 1..80: mol_type = other DNA
agctgatatttctgctgtacaaagttcatttgggtttgatcagcaacaattgcttgcttattataattttttaacagtat

SEQ ID NO: 18381 - DNA, 80 bp, synthetic construct
  misc_feature 1..80: note = Synthetic: >NC_006577.2-cand-5410-5489
  source 1..80: mol_type = other DNA
gtaaatggtctgtagttgttaacggtccatttttttcttttgaacagtctcataataattgttatgtgaatgtagcttgt

SEQ ID NO: 18382 - DNA, 80 bp, synthetic construct
  misc_feature 1..80: note = Synthetic: >NC_006577.2-cand-5490-5569
  source 1..80: mol_type = other DNA
cttatgttgcagcatattaatcttaaatttaataaatggcagtggcaggaagcatggtatgaatttcgtgctggcagacc

SEQ ID NO: 18383 - DNA, 80 bp, synthetic construct
  misc_feature 1..80: note = Synthetic: >NC_006577.2-cand-5560-5639
  source 1..80: mol_type = other DNA
ctggcagaccacataggttagttgctcttgttttagctaaaggtcattttaaatttgatgaaccatcagatgctactgat

SEQ ID NO: 18384 - DNA, 80 bp, synthetic construct
  misc_feature 1..80: note = Synthetic: >NC_006577.2-cand-5640-5719
  source 1..80: mol_type = other DNA
tttattcgtgttgttttgaaacaagctgatttatcaggtgcaatttgtgaattagaacttatttgtgattgtggtattaa

SEQ ID NO: 18385 - DNA, 80 bp, synthetic construct
  misc_feature 1..80: note = Synthetic: >NC_006577.2-cand-5720-5799
  source 1..80: mol_type = other DNA
acaagaaagtcgtgttggtgttgatgctgttatgcattttggtacattagcaaagactgatctttttaatggttataaga

SEQ ID NO: 18386 - DNA, 80 bp, synthetic construct
  misc_feature 1..80: note = Synthetic: >NC_006577.2-cand-5800-5879
  source 1..80: mol_type = other DNA
ttggctgtaattgtgcaggtagaattgtccattgtactaaattgaatgtaccatttttgatttgttctaatactcctctg

SEQ ID NO: 18387 - DNA, 80 bp, synthetic construct
  misc_feature 1..80: note = Synthetic: >NC_006577.2-cand-5880-5959
  source 1..80: mol_type = other DNA
agtaaggatttacctgatgatgttgttgcagctaacatgtttatgggtgtaggtgtaggccattatacacatttgaaatg

SEQ ID NO: 18388 - DNA, 80 bp, synthetic construct
  misc_feature 1..80: note = Synthetic: >NC_006577.2-cand-5960-6039
  source 1..80: mol_type = other DNA
tggttcaccttaccaacattatgatgcttgtagtgttaaaaaatatacaggtgttagtggttgtttaactgactgcttgt

SEQ ID NO: 18389 - DNA, 80 bp, synthetic construct
  misc_feature 1..80: note = Synthetic: >NC_006577.2-cand-6040-6119
  source 1..80: mol_type = other DNA
atcttaaaaatttaacccagacttttacatctatgttgactaattattttttggatgatgttgaaatggttgcttataac

SEQ ID NO: 18390 - DNA, 80 bp, synthetic construct
  misc_feature 1..80: note = Synthetic: >NC_006577.2-cand-6120-6199
  source 1..80: mol_type = other DNA
cctgatctttcacaatattattgtgataatggtaagtattatacaaaacctattataaaggctcagtttaaaccatttgc

SEQ ID NO: 18391 - DNA, 80 bp, synthetic construct
  misc_feature 1..80: note = Synthetic: >NC_006577.2-cand-10040-10119
  source 1..80: mol_type = other DNA
gtataataagtatcgttactatagtggtaaaatggatactgctgcctatagagaagcggcgtgttctcagttagctaaag

SEQ ID NO: 18392 - DNA, 80 bp, synthetic construct
  misc_feature 1..80: note = Synthetic: >NC_006577.2-cand-10120-10199
  source 1..80: mol_type = other DNA
ctatggaaacatttaatcacaataatggtaatgatgtcttataccaacctcctacagcatctgtttctacatcttttttg

SEQ ID NO: 18393 - DNA, 80 bp, synthetic construct
  misc_feature 1..80: note = Synthetic: >NC_006577.2-cand-10200-10279
  source 1..80: mol_type = other DNA
caatcaggtattgtaaagatggtatctcctacgtcaaaaattgaaccttgtattgttagtgttacttatggtagtatgac

SEQ ID NO: 18394 - DNA, 80 bp, synthetic construct
  misc_feature 1..80: note = Synthetic: >NC_006577.2-cand-10280-10359
  source 1..80: mol_type = other DNA
tttgaatggtttatggttagatgacaaagtttattgtcctcgtcatgttatatgttcatcctctaatatgaacgaacctg

SEQ ID NO: 18395 - DNA, 80 bp, synthetic construct
  misc_feature 1..80: note = Synthetic: >NC_006577.2-cand-10370-10449
  source 1..80: mol_type = other DNA
cttattgtgtagagttactctaggtgattttactataatgtctggtcggatgagtttaacagttgtgtcttaccagatgc

SEQ ID NO: 18396 - DNA, 80 bp, synthetic construct
  misc_feature 1..80: note = Synthetic: >NC_006577.2-cand-10450-10529
  source 1..80: mol_type = other DNA
agggctgtcaacttgttttgacagtctctttacaaaatccttacactccaaaatatacttttggtaatgttaaacctggt

SEQ ID NO: 18397 - DNA, 80 bp, synthetic construct
  misc_feature 1..80: note = Synthetic: >NC_006577.2-cand-10490-10569
  source 1..80: mol_type = other DNA
ttacactccaaaatatacttttggtaatgttaaacctggtgaaacttttactgttttagctgcgtataatggccgaccac

SEQ ID NO: 18398 - DNA, 80 bp, synthetic construct
  misc_feature 1..80: note = Synthetic: >NC_006577.2-cand-10610-10689
  source 1..80: mol_type = other DNA
taaaggttcttttttgtgtgggtcatgtggatctgttggttatgtattaacaggtgatagtgttaagtttgtatatatgc

SEQ ID NO: 18399 - DNA, 80 bp, synthetic construct
  misc_feature 1..80: note = Synthetic: >NC_006577.2-cand-10690-10769
  source 1..80: mol_type = other DNA
atcaattagagctcagtactggttgtcacactggcactgattttactggtaatttttatggtccatatagagatgctcaa

SEQ ID NO: 18400 - DNA, 80 bp, synthetic construct
  misc_feature 1..80: note = Synthetic: >NC_006577.2-cand-10770-10849
  source 1..80: mol_type = other DNA
gttgtacagttgccagttaaggactacgtccagactgttaatgttattgcttggctctatgcagctatacttaataattg

SEQ ID NO: 18401 - DNA, 80 bp, synthetic construct
  misc_feature 1..80: note = Synthetic: >NC_006577.2-cand-10850-10929
  source 1..80: mol_type = other DNA
tgcttggtttgtacaaaatgatgtttgttctactgaagattttaatgtttgggctatggcaaatggttttagccaagtaa

SEQ ID NO: 18402 - DNA, 80 bp, synthetic construct
  misc_feature 1..80: note = Synthetic: >NC_006577.2-cand-10930-11009
  source 1..80: mol_type = other DNA
aagcagatcttgtcttagatgctttggcttcaatgacaggtgtttctattgaaactttattggctgctattaagcgtcta

SEQ ID NO: 18403 - DNA, 80 bp, synthetic construct
  misc_feature 1..80: note = Synthetic: >NC_006577.2-cand-11010-11089
  source 1..80: mol_type = other DNA
tatatgggatttcaaggtcgtcaaatactaggaagttgtacttttgaagatgaattggcaccttctgacgtttatcaaca

SEQ ID NO: 18404 - DNA, 80 bp, synthetic construct
  misc_feature 1..80: note = Synthetic: >NC_006577.2-cand-11090-11169
  source 1..80: mol_type = other DNA
attggctggtgttaaattgcaatctaaaacaaaaagatttattaaagaaacaatttattggattttgatatctacatttt

SEQ ID NO: 18405 - DNA, 80 bp, synthetic construct
  misc_feature 1..80: note = Synthetic: >NC_006577.2-cand-11170-11249
  source 1..80: mol_type = other DNA
tgtttagttgtataatttctgcatttgttaaatggactatatttatgtatattaatacacatatgattggtgttacatta

SEQ ID NO: 18406 - DNA, 80 bp, synthetic construct
  misc_feature 1..80: note = Synthetic: >NC_006577.2-cand-11250-11329
  source 1..80: mol_type = other DNA
tgtgtactttgttttgttagttttatgatgttactagttaaacataagcatttttatttgactatgtatataattcctgt

SEQ ID NO: 18407 - DNA, 80 bp, synthetic construct
  misc_feature 1..80: note = Synthetic: >NC_006577.2-cand-16450-16529
  source 1..80: mol_type = other DNA
ccatgttatggcaactaatcataaatatgttttgagtgtctcaccttacgtttgtaatgcacctaactgtgatgtgagtg

SEQ ID NO: 18408 - DNA, 80 bp, synthetic construct
  misc_feature 1..80: note = Synthetic: >NC_006577.2-cand-16530-16609
  source 1..80: mol_type = other DNA
atgtcaccaaattatatttgggcggtatgtcttactattgtgaaaaccataaaccccattattcatttaagttagttatg

SEQ ID NO: 18409 - DNA, 80 bp, synthetic construct
  misc_feature 1..80: note = Synthetic: >NC_006577.2-cand-16610-16689
  source 1..80: mol_type = other DNA
aatggtatggtctttggtttgtataaacaatcttgcacgggttcaccttatatagatgattttaataagatagctagttg

SEQ ID NO: 18410 - DNA, 80 bp, synthetic construct
  misc_feature 1..80: note = Synthetic: >NC_006577.2-cand-16690-16769
  source 1..80: mol_type = other DNA
taaatggacagaagttgatgattatgttctggcaaatgagtgtattgaacgtttaaagttatttgctgcagaaactcaaa

SEQ ID NO: 18411 - DNA, 80 bp, synthetic construct
  misc_feature 1..80: note = Synthetic: >NC_006577.2-cand-16770-16849
  source 1..80: mol_type = other DNA
aggcaactgaagaggcttttaaacaaagctatgcttctgctaccattcaagagattgttagtgatagagaagttattttg

SEQ ID NO: 18412 - DNA, 80 bp, synthetic construct
  misc_feature 1..80: note = Synthetic: >NC_006577.2-cand-16850-16929
  source 1..80: mol_type = other DNA
tgttgggagacaggtaaagttaaaccaccacttaataaaaattatgttttcacaggctaccattttactagtactggtaa

SEQ ID NO: 18413 - DNA, 80 bp, synthetic construct
  misc_feature 1..80: note = Synthetic: >NC_006577.2-cand-16930-17009
  source 1..80: mol_type = other DNA
gacagttttaggtgagtatgtttttgataaaagtgaattaactaacggtgtgtattaccgcgctacaactacttataaac

SEQ ID NO: 18414 - DNA, 80 bp, synthetic construct
  misc_feature 1..80: note = Synthetic: >NC_006577.2-cand-17010-17089
  source 1..80: mol_type = other DNA
tttctataggtgatgtttttgttttaacatcacattctgtagctagtttaagtgcacctacacttgtcccacaagagaac

SEQ ID NO: 18415 - DNA, 80 bp, synthetic construct
  misc_feature 1..80: note = Synthetic: >NC_006577.2-cand-17090-17169
  source 1..80: mol_type = other DNA
tatgctagtataagattttctagtgtttatagtgttccattggtgtttcaaaataatgttgctaattatcagcacattgg

SEQ ID NO: 18416 - DNA, 80 bp, synthetic construct
  misc_feature 1..80: note = Synthetic: >NC_006577.2-cand-17170-17249
  source 1..80: mol_type = other DNA
aatgaaacgttattgcactgttcaaggtccccctggtacgggaaagtctcatcttgctataggtctagctgtttattact

SEQ ID NO: 18417 - DNA, 80 bp, synthetic construct
  misc_feature 1..80: note = Synthetic: >NC_006577.2-cand-17250-17329
  source 1..80: mol_type = other DNA
acacagcacgtgtagtttatactgctgctagtcatgctgctgtagatgcattgtgtgaaaaagcttataagtttttaaat

SEQ ID NO: 18418 - DNA, 80 bp, synthetic construct
  misc_feature 1..80: note = Synthetic: >NC_006577.2-cand-17330-17409
  source 1..80: mol_type = other DNA
attaacgattgtacacgtattattcctgctaaagttcgtgtagattgttatgataagtttaaaattaatgataccacttg

SEQ ID NO: 18419 - DNA, 80 bp, synthetic construct
  misc_feature 1..80: note = Synthetic: >NC_006577.2-cand-17410-17489
  source 1..80: mol_type = other DNA
taagtatgtttttaccacaataaatgcattaccagagttggttacagatattgttgttgttgatgaagttagtatgctta

SEQ ID NO: 18420 - DNA, 80 bp, synthetic construct
  misc_feature 1..80: note = Synthetic: >NC_006577.2-cand-17500-17579
  source 1..80: mol_type = other DNA
attgtctgttataaatgctcgtattaaagctaaacattatgtatatattggagatcctgctcaattacctgcaccacgtg

SEQ ID NO: 18421 - DNA, 80 bp, synthetic construct
  misc_feature 1..80: note = Synthetic: >NC_006577.2-cand-17580-17659
  source 1..80: mol_type = other DNA
tgctgttgagcaagggttctttagaacctaggcacttcaattctattactaaaataatgtgttgtttaggtcctgatatc

SEQ ID NO: 18422 - DNA, 80 bp, synthetic construct
  misc_feature 1..80: note = Synthetic: >NC_006577.2-cand-17660-17739
  source 1..80: mol_type = other DNA
tttttgggaaattgttataggtgtcctaaagaaattgtagaaactgtttcagcattggtttatgataataaactcaaggc

SEQ ID NO: 18423 - DNA, 80 bp, synthetic construct
  misc_feature 1..80: note = Synthetic: >NC_006577.2-cand-26740-26819
  source 1..80: mol_type = other DNA
tgagatgaatcttattcaagagtctattaagtctttgaataatagttatatcaatcttaaagatataggtacatatgaaa

SEQ ID NO: 18424 - DNA, 80 bp, synthetic construct
  misc_feature 1..80: note = Synthetic: >NC_006577.2-cand-26820-26899
  source 1..80: mol_type = other DNA
tgtatgtaaaatggccttggtatgtttggctactaatttctttttcatttataatattccttgtattgctcttttttata

SEQ ID NO: 18425 - DNA, 80 bp, synthetic construct
  misc_feature 1..80: note = Synthetic: >NC_006577.2-cand-26900-26979
  source 1..80: mol_type = other DNA
tgttgttgtactggttgtggttctgcatgttttagtaaatgtcataattgttgtgatgagtatggtggtcatcatgattt

SEQ ID NO: 18426 - DNA, 80 bp, synthetic construct
  misc_feature 1..80: note = Synthetic: >NC_006577.2-cand-26980-27059
  source 1..80: mol_type = other DNA
tgttatcaaaacatctcatgatgattagaatctcttgtcagatctcattaaatctaaactttatttatggacgtttggag

SEQ ID NO: 18427 - DNA, 80 bp, synthetic construct
  misc_feature 1..80: note = Synthetic: >NC_006577.2-cand-27060-27139
  source 1..80: mol_type = other DNA
acctagctacacacattctcttgttattagagaatttggtgttacaaaccttgaagatttgtgtctaaagtataattact

SEQ ID NO: 18428 - DNA, 80 bp, synthetic construct
  misc_feature 1..80: note = Synthetic: >NC_006577.2-cand-27140-27219
  source 1..80: mol_type = other DNA
gtcaacctattgttggttactgtattgtacctttaaatgtttggtgtcgcaagtttggcaaatttgcttctcactttaca

SEQ ID NO: 18429 - DNA, 80 bp, synthetic construct
  misc_feature 1..80: note = Synthetic: >NC_006577.2-cand-27220-27299
  source 1..80: mol_type = other DNA
ttacgtagtcacgatatttcccatagtaataattttggtgttgtaactagttttactacttatggtaatactgtttctga

SEQ ID NO: 18430 - DNA, 80 bp, synthetic construct
  misc_feature 1..80: note = Synthetic: >NC_006577.2-cand-27300-27379
  source 1..80: mol_type = other DNA
ggctgtgtctagattagttgaatcagcttctgaatttattgtttggcgtgcagaggcacttaataagtatggttgattta

SEQ ID NO: 18431 - DNA, 80 bp, synthetic construct
  misc_feature 1..80: note = Synthetic: >NC_006577.2-cand-27380-27459
  source 1..80: mol_type = other DNA
tttttcaatgatactgcttggtacataggacagattttagttttagttttattttgtcttatttctttaatctttgttgt

SEQ ID NO: 18432 - DNA, 80 bp, synthetic construct
  misc_feature 1..80: note = Synthetic: >NC_006577.2-cand-27460-27539
  source 1..80: mol_type = other DNA
tgcttttttagcaactattaagctttgtatgcaactttgtggtttttgtaatttctttattatttcaccttcggcttacg

SEQ ID NO: 18433 - DNA, 80 bp, synthetic construct
  misc_feature 1..80: note = Synthetic: >NC_006577.2-cand-27540-27619
  source 1..80: mol_type = other DNA
tttataaaagaggtatgcagttgtataagtcttatagtgaacaagttataccacccacttcagattatttaatctaaatc

SEQ ID NO: 18434 - DNA, 80 bp, synthetic construct
  misc_feature 1..80: note = Synthetic: >NC_006577.2-cand-27630-27709
  source 1..80: mol_type = other DNA
gaataaatcttttcttcctcaatttacttctgatcaagctgttacattcttaaaagaatggaatttctctttgggtgtaa

SEQ ID NO: 18435 - DNA, 80 bp, synthetic construct
  misc_feature 1..80: note = Synthetic: >NC_006577.2-cand-27710-27789
  source 1..80: mol_type = other DNA
tactactttttattactatcatattgcagttcggttatacgagccgtagtatgtttgtttatcttatcaagatgattatt

SEQ ID NO: 18436 - DNA, 80 bp, synthetic construct
  misc_feature 1..80: note = Synthetic: >NC_006577.2-cand-27790-27869
  source 1..80: mol_type = other DNA
ctttggcttatgtggccattgactatcaccttgactatatttaattgtttttatgctttgaataatgcttttcttgcatt

SEQ ID NO: 18437 - DNA, 80 bp, synthetic construct
  misc_feature 1..80: note = Synthetic: >NC_006577.2-cand-27870-27949
  source 1..80: mol_type = other DNA
ttctatagtgtttactattatttctattgttatatggattctttattttgttaatagtattcggctttttattagaactg

SEQ ID NO: 18438 - DNA, 80 bp, synthetic construct
  misc_feature 1..80: note = Synthetic: >NC_006577.2-cand-27950-28029
  source 1..80: mol_type = other DNA
gcagttggtggagttttaatccagagaccaataatcttatgtgtattgatatgaaaggcaagatgtttgttaggccagtt

SEQ ID NO: 18439 - DNA, 80 bp, synthetic construct
  misc_feature 1..80: note = Synthetic: >NC_009826.1-cand-4310-4389
  source 1..80: mol_type = other DNA
gtcttggcgacggccattccccccggcagtgtaacgacgccccaccccaacattgaggaggtggccctgccttcggaggg

SEQ ID NO: 18440 - DNA, 80 bp, synthetic construct
  misc_feature 1..80: note = Synthetic: >NC_009826.1-cand-4420-4499
  source 1..80: mol_type = other DNA
ccttgttcttataaagggcggtaggcatctcatcttctgccactctaagaaaaaatgtgatgaacttgccaaacaattga

SEQ ID NO: 18441 - DNA, 80 bp, synthetic construct
  misc_feature 1..80: note = Synthetic: >NC_009826.1-cand-4500-4579
  source 1..80: mol_type = other DNA
ccagtctgggcgtgaatgccgtggcatattatagaggtctagacgtcgccgtcatacccgcgacaggagacgtagtcgtg

SEQ ID NO: 18442 - DNA, 80 bp, synthetic construct
  misc_feature 1..80: note = Synthetic: >NC_009826.1-cand-4580-4659
  source 1..80: mol_type = other DNA
tgcagcactgacgcgctcatgacgggttttaccggcgactttgattctgtcatagactgcaactccgccgtcactcagac

SEQ ID NO: 18443 - DNA, 80 bp, synthetic construct
  misc_feature 1..80: note = Synthetic: >NC_009826.1-cand-4660-4739
  source 1..80: mol_type = other DNA
ggtggacttcagtctggatcccaccttcaccattgagactactacagtgccccaggacgcagtgtccagaagccagcgta

SEQ ID NO: 18444 - DNA, 80 bp, synthetic construct
  misc_feature 1..80: note = Synthetic: >NC_009826.1-cand-4800-4879
  source 1..80: mol_type = other DNA
cgtccggcattttcgactctgtggtgctctgtgagtgctacgatgccgggtgtgcatggtatgatctgactcctgctgag

SEQ ID NO: 18445 - DNA, 80 bp, synthetic construct
  misc_feature 1..80: note = Synthetic: >NC_009826.1-cand-4830-4909
  source 1..80: mol_type = other DNA
gtgagtgctacgatgccgggtgtgcatggtatgatctgactcctgctgagactaccgtgaggttgcgtgcttacctgaac

SEQ ID NO: 18446 - DNA, 80 bp, synthetic construct
  misc_feature 1..80: note = Synthetic: >NC_009826.1-cand-4870-4949
  source 1..80: mol_type = other DNA
tcctgctgagactaccgtgaggttgcgtgcttacctgaacacccccgggctccctgtctgtcaagaacatctggaattct

SEQ ID NO: 18447 - DNA, 80 bp, synthetic construct
  misc_feature 1..80: note = Synthetic: >NC_009826.1-cand-5020-5099
  source 1..80: mol_type = other DNA
aaacttcccataccttgtggcataccaagcaacagtctgtgttcgtgcgaaggcgcccccccccagctgggatacaatgt

SEQ ID NO: 18448 - DNA, 80 bp, synthetic construct
  misc_feature 1..80: note = Synthetic: >NC_009826.1-cand-5080-5159
  source 1..80: mol_type = other DNA
ccccagctgggatacaatgtggaagtgcatgatctgtctcaaaccgactttaactggccccactcccctcctgtacaggc

SEQ ID NO: 18449 - DNA, 80 bp, synthetic construct
  misc_feature 1..80: note = Synthetic: >NC_009826.1-cand-5170-5249
  source 1..80: mol_type = other DNA
tcagaatgagatcacactgacacaccccatcaccaagtacatcatggcttgcatgtccgcagacttggaggtcattacca

SEQ ID NO: 18450 - DNA, 80 bp, synthetic construct
  misc_feature 1..80: note = Synthetic: >NC_009826.1-cand-5270-5349
  source 1..80: mol_type = other DNA
ggtgttgtggcggccttagcggcctactgcttgacggtgggctcggtggccatagtcggtagaatcatcctatctgggag

SEQ ID NO: 18451 - DNA, 80 bp, synthetic construct
  misc_feature 1..80: note = Synthetic: >NC_009826.1-cand-5330-5409
  source 1..80: mol_type = other DNA
agaatcatcctatctgggagacctgcgatcacccctgacagggaggtactataccagcaatttgatgagatggaggagtg

SEQ ID NO: 18452 - DNA, 80 bp, synthetic construct
  misc_feature 1..80: note = Synthetic: >NC_009826.1-cand-5410-5489
  source 1..80: mol_type = other DNA
ctcagcctccttgccctatgtggacgaggcacgtgccatcgccgggcaatttaaggagaaagtgcttggcctcattggca

SEQ ID NO: 18453 - DNA, 80 bp, synthetic construct
  misc_feature 1..80: note = Synthetic: >NC_009826.1-cand-5490-5569
  source 1..80: mol_type = other DNA
cggctggccagaaagctgaaactctgaaaccggcagctacgtccatgtggagcaaggccgagcagttctgggcaaagcat

SEQ ID NO: 18454 - DNA, 80 bp, synthetic construct
  misc_feature 1..80: note = Synthetic: >NC_009826.1-cand-5570-5649
  source 1..80: mol_type = other DNA
atgtggaactttgtcagtgggatccaataccttgctggcctttcgaccttgccgggtaatcccgccgtggccacgttgat

SEQ ID NO: 18455 - DNA, 80 bp, synthetic construct
  misc_feature 1..80: note = Synthetic: >NC_009827.1-cand-5430-5509
  source 1..80: mol_type = other DNA
cggttgtccctgatcgggaggtcctgtaccagcagtttgatgagatggaggagtgctctaagcacatcccctacctagtt

SEQ ID NO: 18456 - DNA, 80 bp, synthetic construct
  misc_feature 1..80: note = Synthetic: >NC_009827.1-cand-5510-5589
  source 1..80: mol_type = other DNA
gagggtcagcagattgctgagcagttcaagcaaaaggtccttgggctgctccaggccggcaccaaacatgcagaagaact

SEQ ID NO: 18457 - DNA, 80 bp, synthetic construct
  misc_feature 1..80: note = Synthetic: >NC_009827.1-cand-5590-5669
  source 1..80: mol_type = other DNA
gaaacccgctatccattccacgtggcccagggtggaggagttctggaggaaacacatgtggaactttgttagtgggattc

SEQ ID NO: 18458 - DNA, 80 bp, synthetic construct
  misc_feature 1..80: note = Synthetic: >NC_009827.1-cand-5670-5749
  source 1..80: mol_type = other DNA
agtacctggcgggcttatcaacactaccaggtagtccggcggtggcgtcgctaatgtcattcacagcgtccttgactagt

SEQ ID NO: 18459 - DNA, 80 bp, synthetic construct
  misc_feature 1..80: note = Synthetic: >NC_009827.1-cand-5750-5829
  source 1..80: mol_type = other DNA
cctctaaggacctcccagaccctgttgctcaacatattgggcggctggatagcttcccaagtagctcccccctccgcgtc

SEQ ID NO: 18460 - DNA, 80 bp, synthetic construct
  misc_feature 1..80: note = Synthetic: >NC_009827.1-cand-5800-5879
  source 1..80: mol_type = other DNA
agcttcccaagtagctcccccctccgcgtccacagctttcgtcgtgagcggcttagcaggcgccacggtggccagcatag

SEQ ID NO: 18461 - DNA, 80 bp, synthetic construct
  misc_feature 1..80: note = Synthetic: >NC_009827.1-cand-5920-5999
  source 1..80: mol_type = other DNA
ggccggtgtggcgggtgcactggtcgcctttaagatcatgagcggcgagtgtccatcaacagaggacatggtgaacttgc

SEQ ID NO: 18462 - DNA, 80 bp, synthetic construct
  misc_feature 1..80: note = Synthetic: >NC_009827.1-cand-5990-6069
  source 1..80: mol_type = other DNA
gtgaacttgctacccgccttgctgtcgccgggtgcccttgtggtgggagttgtgtgtgctgccatcctgagacgccacgt

SEQ ID NO: 18463 - DNA, 80 bp, synthetic construct
  misc_feature 1..80: note = Synthetic: >NC_009827.1-cand-6040-6119
  source 1..80: mol_type = other DNA
tgtgtgtgctgccatcctgagacgccacgttggcccctctgaaggcgctaaccagtggatgaacaggctaatagcctttg

SEQ ID NO: 18464 - DNA, 80 bp, synthetic construct
  misc_feature 1..80: note = Synthetic: >NC_009827.1-cand-6150-6229
  source 1..80: mol_type = other DNA
actatgtgcccgagacggacgcatcaaacaaagtcacccaaatactcagttcacttaccatcactagcctgttacgcagg

SEQ ID NO: 18465 - DNA, 80 bp, synthetic construct
  misc_feature 1..80: note = Synthetic: >NC_009827.1-cand-6230-6309
  source 1..80: mol_type = other DNA
ctacaccagtggattcacgaggatacgtccacgccttgcgcgtcctcatggctgcgagacgtgtgggactgggtgtgtac

SEQ ID NO: 18466 - DNA, 80 bp, synthetic construct
  misc_feature 1..80: note = Synthetic: >NC_009827.1-cand-6310-6389
  source 1..80: mol_type = other DNA
agtgctatctgacttcaagacctggctcaaggccaaaataacgccccgcatacctggaatcccctttatatcttgccagg

SEQ ID NO: 18467 - DNA, 80 bp, synthetic construct
  misc_feature 1..80: note = Synthetic: >NC_009827.1-cand-6450-6529
  source 1..80: mol_type = other DNA
ctcaaattgctggacacgtgaagaacgggtctatgaagatcacaggaccccggatgtgcagcaacacttggcatggaacg

SEQ ID NO: 18468 - DNA, 80 bp, synthetic construct
  misc_feature 1..80: note = Synthetic: >NC_009827.1-cand-6470-6549
  source 1..80: mol_type = other DNA
aagaacgggtctatgaagatcacaggaccccggatgtgcagcaacacttggcatggaacgtttccgatcaacgccacaac

SEQ ID NO: 18469 - DNA, 80 bp, synthetic construct
  misc_feature 1..80: note = Synthetic: >NC_009827.1-cand-6550-6629
  source 1..80: mol_type = other DNA
taccagccctagtgtgccggtaccggcccccaactacaaacgcgctctctggcgagtttccgctgaggagtacgttgaag

SEQ ID NO: 18470 - DNA, 80 bp, synthetic construct
  misc_feature 1..80: note = Synthetic: >NC_009827.1-cand-6630-6709
  source 1..80: mol_type = other DNA
tagagaggcacggcgaccgtcactatgtggtgggagtcactgctgatggccttaaatgcccttgccaagttcccggacct

SEQ ID NO: 18471 - DNA, 80 bp, synthetic construct
  misc_feature 1..80: note = Synthetic: >NC_019843.3-cand-3210-3289
  source 1..80: mol_type = other DNA
agaaggtgaatcagagtgcatttctgagacttcaactgaacaagttgacgtttctcatgagacttctgacgacgagtggg

SEQ ID NO: 18472 - DNA, 80 bp, synthetic construct
  misc_feature 1..80: note = Synthetic: >NC_019843.3-cand-3290-3369
  source 1..80: mol_type = other DNA
ctgctgcagttgatgaagcgttccctctcgatgaagcagaagatgttactgaatctgtgcaagaagaagcacaaccagta

SEQ ID NO: 18473 - DNA, 80 bp, synthetic construct
  misc_feature 1..80: note = Synthetic: >NC_019843.3-cand-3370-3449
  source 1..80: mol_type = other DNA
gaagtacctgttgaagatattgcgcaggttgtcatagctgacaccttacaggaaactcctgttgtgcctgatactgttga

SEQ ID NO: 18474 - DNA, 80 bp, synthetic construct
  misc_feature 1..80: note = Synthetic: >NC_019843.3-cand-3450-3529
  source 1..80: mol_type = other DNA
agtcccaccgcaagtggtgaaacttccgtctgcacctcagactatccagcccgaggtaaaagaagttgcacctgtctatg

SEQ ID NO: 18475 - DNA, 80 bp, synthetic construct
  misc_feature 1..80: note = Synthetic: >NC_019843.3-cand-3530-3609
  source 1..80: mol_type = other DNA
aggctgataccgaacagacacagaatgttactgttaaacctaagaggttacgcaaaaagcgtaatgttgaccctttgtcc

SEQ ID NO: 18476 - DNA, 80 bp, synthetic construct
  misc_feature 1..80: note = Synthetic: >NC_019843.3-cand-3600-3679
  source 1..80: mol_type = other DNA
ccctttgtccaattttgaacataaggttattacagagtgcgttaccatagttttaggtgacgcaattcaagtagccaagt

SEQ ID NO: 18477 - DNA, 80 bp, synthetic construct
  misc_feature 1..80: note = Synthetic: >NC_019843.3-cand-3690-3769
  source 1..80: mol_type = other DNA
gtctgtgttagttaatgctgctaacacacatcttaagcatggcggtggtatcgctggtgctattaatgcggcttcaaaag

SEQ ID NO: 18478 - DNA, 80 bp, synthetic construct
  misc_feature 1..80: note = Synthetic: >NC_019843.3-cand-3770-3849
  source 1..80: mol_type = other DNA
gggctgtccaaaaagagtcagatgagtatattctggctaaagggccgttacaagtaggagattcagttctcttgcaaggc

SEQ ID NO: 18479 - DNA, 80 bp, synthetic construct
  misc_feature 1..80: note = Synthetic: >NC_019843.3-cand-3850-3929
  source 1..80: mol_type = other DNA
cattctctagctaagaatatcctgcatgtcgtaggcccagatgcccgcgctaaacaggatgtttctctccttagtaagtg

SEQ ID NO: 18480 - DNA, 80 bp, synthetic construct
  misc_feature 1..80: note = Synthetic: >NC_019843.3-cand-3930-4009
  source 1..80: mol_type = other DNA
ctataaggctatgaatgcatatcctcttgtagtcactcctcttgtttcagcaggcatatttggtgtaaaaccagctgtgt

SEQ ID NO: 18481 - DNA, 80 bp, synthetic construct
  misc_feature 1..80: note = Synthetic: >NC_019843.3-cand-4010-4089
  source 1..80: mol_type = other DNA
cttttgattatcttattagggaggctaagactagagttttagtcgtcgttaattcccaagatgtctataagagtcttacc

SEQ ID NO: 18482 - DNA, 80 bp, synthetic construct
  misc_feature 1..80: note = Synthetic: >NC_019843.3-cand-4090-4169
  source 1..80: mol_type = other DNA
atagttgacattccacagagtttgactttttcatatgatgggttacgtggcgcaatacgtaaagctaaagattatggttt

SEQ ID NO: 18483 - DNA, 80 bp, synthetic construct
  misc_feature 1..80: note = Synthetic: >NC_019843.3-cand-4170-4249
  source 1..80: mol_type = other DNA
tactgtttttgtgtgcacagacaactctgctaacactaaagttcttaggaacaagggtgttgattatactaagaagtttc

SEQ ID NO: 18484 - DNA, 80 bp, synthetic construct
  misc_feature 1..80: note = Synthetic: >NC_019843.3-cand-4250-4329
  source 1..80: mol_type = other DNA
ttacagttgacggtgtgcaatattattgctacacgtctaaggacactttagatgatatcttacaacaggctaataagtct

SEQ ID NO: 18485 - DNA, 80 bp, synthetic construct
  misc_feature 1..80: note = Synthetic: >NC_019843.3-cand-4330-4409
  source 1..80: mol_type = other DNA
gttggtattatatctatgcctttgggatatgtgtctcatggtttagacttaatgcaagcagggagtgtcgtgcgtagagt

SEQ ID NO: 18486 - DNA, 80 bp, synthetic construct
  misc_feature 1..80: note = Synthetic: >NC_019843.3-cand-4410-4489
  source 1..80: mol_type = other DNA
taacgtgccctacgtgtgtctcctagctaataaagagcaagaagctattttgatgtctgaagacgttaagttaaaccctt

SEQ ID NO: 18487 - DNA, 80 bp, synthetic construct
  misc_feature 1..80: note = Synthetic: >NC_030791.1-cand-2820-2899
  source 1..80: mol_type = other DNA
tcatcctattagttaccttgggaccgcactacaagagacttctagcccttattctctggtgggtcacatatttccttaca

SEQ ID NO: 18488 - DNA, 80 bp, synthetic construct
  misc_feature 1..80: note = Synthetic: >NC_030791.1-cand-2860-2939
  source 1..80: mol_type = other DNA
tctagcccttattctctggtgggtcacatatttccttacaaggtgtgaagcagcactccaaacgtgggtccctcctctca

SEQ ID NO: 18489 - DNA, 80 bp, synthetic construct
  misc_feature 1..80: note = Synthetic: >NC_030791.1-cand-2980-3059
  source 1..80: mol_type = other DNA
gctgtgctatccaggccttgtctttgacatcacaaaatggttgctggtcatgatgtgccctctctacctcctccagttgt

SEQ ID NO: 18490 - DNA, 80 bp, synthetic construct
  misc_feature 1..80: note = Synthetic: >NC_030791.1-cand-3050-3129
  source 1..80: mol_type = other DNA
ctccagttgtgtttggtgaggactccatactttgtgagggcccaggccctcatcagagtgtgttctctcttcaaaacgct

SEQ ID NO: 18491 - DNA, 80 bp, synthetic construct
  misc_feature 1..80: note = Synthetic: >NC_030791.1-cand-3140-3219
  source 1..80: mol_type = other DNA
cggtacgtgcaggccgcgctgctcactattggccgctggaccggcacttatatttataaccatctcgcccccctggaaac

SEQ ID NO: 18492 - DNA, 80 bp, synthetic construct
  misc_feature 1..80: note = Synthetic: >NC_030791.1-cand-3220-3299
  source 1..80: mol_type = other DNA
atgggccgccggcggcctacgggatttggccgttgcagtcgagcccgtgatattctcccccatggagaagaagatcatag

SEQ ID NO: 18493 - DNA, 80 bp, synthetic construct
  misc_feature 1..80: note = Synthetic: >NC_030791.1-cand-3310-3389
  source 1..80: mol_type = other DNA
ggagaccactgcttgtggcgacattctttgtggcctgcctgtctcagctcggctcggcagggaagtcctgctagggcccg

SEQ ID NO: 18494 - DNA, 80 bp, synthetic construct
  misc_feature 1..80: note = Synthetic: >NC_030791.1-cand-3380-3459
  source 1..80: mol_type = other DNA
ctagggcccgcggatgactacaggtccatgggatggcaactcctggctccaatctcagcatacgcacagcagacccgcgg

SEQ ID NO: 18495 - DNA, 80 bp, synthetic construct
  misc_feature 1..80: note = Synthetic: >NC_030791.1-cand-3460-3539
  source 1..80: mol_type = other DNA
tctcatctctacccttgtcgtgagcctcactggccgtgataagaacgagactgccggcgaggtgcaggtgttgtccacct

SEQ ID NO: 18496 - DNA, 80 bp, synthetic construct
  misc_feature 1..80: note = Synthetic: >NC_030791.1-cand-3470-3549
  source 1..80: mol_type = other DNA
acccttgtcgtgagcctcactggccgtgataagaacgagactgccggcgaggtgcaggtgttgtccacctcaacgcagac

SEQ ID NO: 18497 - DNA, 80 bp, synthetic construct
  misc_feature 1..80: note = Synthetic: >NC_030791.1-cand-3630-3709
  source 1..80: mol_type = other DNA
ggcctgtcctccagatgtacacgtcagtcagtgacgatctggtgggctggcctgccccgcctggctccaagtccctcgag

SEQ ID NO: 18498 - DNA, 80 bp, synthetic construct
  misc_feature 1..80: note = Synthetic: >NC_030791.1-cand-3700-3779
  source 1..80: mol_type = other DNA
gtccctcgagccctgctcgtgcgggtcagcagacctttacttggtgacgcgcaatgctgacgtccttcctcttaggagga

SEQ ID NO: 18499 - DNA, 80 bp, synthetic construct
  misc_feature 1..80: note = Synthetic: >NC_030791.1-cand-3780-3859
  source 1..80: mol_type = other DNA
agggtgacggtacagcgtccctactgtccccgcgccctgtgtcctcccttaaaggctcctcgggagggcctgtcttgtgc

SEQ ID NO: 18500 - DNA, 80 bp, synthetic construct
  misc_feature 1..80: note = Synthetic: >NC_030791.1-cand-3860-3939
  source 1..80: mol_type = other DNA
ccccaaagtcattgcgttggcatcttcagagctgctgtctgcacccgcggtgtagccaaagcagttcagtttgttcccat

SEQ ID NO: 18501 - DNA, 80 bp, synthetic construct
  misc_feature 1..80: note = Synthetic: >NC_030791.1-cand-3940-4019
  source 1..80: mol_type = other DNA
cgagaagatgcaggtggcccagaggtcgccatcattcagtgacaatagcacccctccagcggtgcccagcacctatcaag

SEQ ID NO: 18502 - DNA, 80 bp, synthetic construct
  misc_feature 1..80: note = Synthetic: >NC_030791.1-cand-4020-4099
  source 1..80: mol_type = other DNA
taggctatttacatgcccccactggcagcggcaagagcactaaggtccctgcggcgtatgccagccagggctacaaagtg

SEQ ID NO: 18503 - DNA, 80 bp, synthetic construct
  misc_feature 1..80: note = Synthetic: >NC_030791.1-cand-5440-5519
  source 1..80: mol_type = other DNA
agaggttttataccagcactttgatgagatggaagagtgctccaaagctcctgaattgctgaaacacgcccaaaccatcg

SEQ ID NO: 18504 - DNA, 80 bp, synthetic construct
  misc_feature 1..80: note = Synthetic: >NC_030791.1-cand-5520-5599
  source 1..80: mol_type = other DNA
gcggaatgttcaaggacaaggccctcgccgtcttggatacgctcaagccggccgcccaggctgctgttcccattgtggag

SEQ ID NO: 18505 - DNA, 80 bp, synthetic construct
  misc_feature 1..80: note = Synthetic: >NC_030791.1-cand-5600-5679
  source 1..80: mol_type = other DNA
accaacttccaaaaggtggagaagctgtggaatcagcatatgtggaacttcataagcggcattcaatacctagctgggct

SEQ ID NO: 18506 - DNA, 80 bp, synthetic construct
  misc_feature 1..80: note = Synthetic: >NC_030791.1-cand-5680-5759
  source 1..80: mol_type = other DNA
atccacactgccaggtaatccaactgtggcctcactgatggccttcaccgcctcagttactagcccccttgctacatcga

SEQ ID NO: 18507 - DNA, 80 bp, synthetic construct
  misc_feature 1..80: note = Synthetic: >NC_030791.1-cand-5760-5839
  source 1..80: mol_type = other DNA
ccacactactagtcaacatcctgggtgggtggttcgcaagccagttagcgccgccgtctgctgccacgactttcgtggtc

SEQ ID NO: 18508 - DNA, 80 bp, synthetic construct
  misc_feature 1..80: note = Synthetic: >NC_030791.1-cand-5860-5939
  source 1..80: mol_type = other DNA
agtgggtagtgttggcttgggcaaggtcttagttgatgtcctggccggctatggcgccggcatagctggcgccctggtgg

SEQ ID NO: 18509 - DNA, 80 bp, synthetic construct
  misc_feature 1..80: note = Synthetic: >NC_030791.1-cand-5920-5999
  source 1..80: mol_type = other DNA
catagctggcgccctggtggccttcaaaatcatgtctggagaggtccctagcacagaggatctggcaaacctcttacctg

SEQ ID NO: 18510 - DNA, 80 bp, synthetic construct
  misc_feature 1..80: note = Synthetic: >NC_030791.1-cand-6000-6079
  source 1..80: mol_type = other DNA
ccatactctcacctggagctttagttgtgggagttgtttgtgccgcgatcatcaaacggcataccggcactagtgaggga

SEQ ID NO: 18511 - DNA, 80 bp, synthetic construct
  misc_feature 1..80: note = Synthetic: >NC_030791.1-cand-6080-6159
  source 1..80: mol_type = other DNA
gtcacgcagtggatgaaccgtctcattgcgttcgcctcccgtggaaatcacgtgtcgccgacccactacatacaggatga

SEQ ID NO: 18512 - DNA, 80 bp, synthetic construct
  misc_feature 1..80: note = Synthetic: >NC_030791.1-cand-6190-6269
  source 1..80: mol_type = other DNA
cagctcccttaccatcaccagcctcataaaacgagtactggcctgggcgcagactgaytattctgcgccctgtgccggga

SEQ ID NO: 18513 - DNA, 80 bp, synthetic construct
  misc_feature 1..80: note = Synthetic: >NC_030791.1-cand-6230-6309
  source 1..80: mol_type = other DNA
gcctgggcgcagactgaytattctgcgccctgtgccgggagctggctccgggaggtgtgggactgggtttgcatggtcct

SEQ ID NO: 18514 - DNA, 80 bp, synthetic construct
  misc_feature 1..80: note = Synthetic: >NC_030791.1-cand-6310-6389
  source 1..80: mol_type = other DNA
atccgactttgcatcttggttgaaggccaaggtacttcccagccttccagggatcccattcctatcctgtcagaaagggt

SEQ ID NO: 18515 - DNA, 80 bp, synthetic construct
  misc_feature 1..80: note = Synthetic: >NC_030791.1-cand-6360-6439
  source 1..80: mol_type = other DNA
ggatcccattcctatcctgtcagaaagggtataaaggtgagtggcggaacgatggcatcatgaacaccaagtgcccgtgt

SEQ ID NO: 18516 - DNA, 80 bp, synthetic construct
  misc_feature 1..80: note = Synthetic: >NC_030791.1-cand-6520-6599
  source 1..80: mol_type = other DNA
aaccttccctattaattcccataccacgggaccaagttctcctgtaccctcccaytgttatcaaagggccttgtggaggg

SEQ ID NO: 18517 - DNA, 80 bp, synthetic construct
  misc_feature 1..80: note = Synthetic: >NC_030791.1-cand-6550-6629
  source 1..80: mol_type = other DNA
accaagttctcctgtaccctcccaytgttatcaaagggccttgtggagggtatctgcracggagtacgtcgagatccttc

SEQ ID NO: 18518 - DNA, 80 bp, synthetic construct
  misc_feature 1..80: note = Synthetic: >NC_030791.1-cand-6630-6709
  source 1..80: mol_type = other DNA
gtcacaatgaccagcattaygtggtgggagtgacggcggaggacctcaagtgcccgtgtcaggttccttcccccgaattc

SEQ ID NO: 18519 - DNA, 80 bp, synthetic construct
  misc_feature 1..80: note = Synthetic: >NC_034516.1-cand-1120-1199
  source 1..80: mol_type = other DNA
gcacaatagaactaccgggttattatgaagcaatacacccttgcaatgtcttttgtgtcttttcaggccctggtgcatca

SEQ ID NO: 18520 - DNA, 80 bp, synthetic construct
  misc_feature 1..80: note = Synthetic: >NC_034516.1-cand-1200-1279
  source 1..80: mol_type = other DNA
tgtgaggcattctcagaaggagggattttcaatatcacatcaccaacatgccttgtttctaaacaaaatagatttcgagc

SEQ ID NO: 18521 - DNA, 80 bp, synthetic construct
  misc_feature 1..80: note = Synthetic: >NC_034516.1-cand-1280-1359
  source 1..80: mol_type = other DNA
tgctgaacaacaaataacatttgtatgccaacgggttgacatggatattatcatttactgcaatggacaaagaaaggtga

SEQ ID NO: 18522 - DNA, 80 bp, synthetic construct
  misc_feature 1..80: note = Synthetic: >NC_034516.1-cand-1370-1449
  source 1..80: mol_type = other DNA
aactcttgttatcggtcagtgcatttattctattacaagtctattttctttattgccatctgtggcccattcgattgcaa

SEQ ID NO: 18523 - DNA, 80 bp, synthetic construct
  misc_feature 1..80: note = Synthetic: >NC_034516.1-cand-1450-1529
  source 1..80: mol_type = other DNA
ttgaattgtgtgtccckggttttcatgggtgggcaactgcagccttgcttacaactttttgttttggttggttgttaata

SEQ ID NO: 18524 - DNA, 80 bp, synthetic construct
  misc_feature 1..80: note = Synthetic: >NC_034516.1-cand-1530-1609
  source 1..80: mol_type = other DNA
ccttcaataacctatattgtactccttatcttgaaatttattgcagcaatcttccataacaccacccaagaaaataagtt

SEQ ID NO: 18525 - DNA, 80 bp, synthetic construct
  misc_feature 1..80: note = Synthetic: >NC_034516.1-cand-1620-1699
  source 1..80: mol_type = other DNA
ctaagaaaaataaaggaagagtttgaaaaaactaaaggttccatggtttgtgacatctgtaaatatgagtgcgagactgg

SEQ ID NO: 18526 - DNA, 80 bp, synthetic construct
  misc_feature 1..80: note = Synthetic: >NC_034516.1-cand-1690-1769
  source 1..80: mol_type = other DNA
gcgagactgggaaagaattaaaagcacacaatctttcatgtaatcaatctcaatgcccttactgttttacccattgtgag

SEQ ID NO: 18527 - DNA, 80 bp, synthetic construct
  misc_feature 1..80: note = Synthetic: >NC_034516.1-cand-1770-1849
  source 1..80: mol_type = other DNA
atgacagagagtgcattccaagctcattataaagtctgtcaggctactcacaggtttcgagaagacttgaagaaaactat

SEQ ID NO: 18528 - DNA, 80 bp, synthetic construct
  misc_feature 1..80: note = Synthetic: >NC_034516.1-cand-1850-1929
  source 1..80: mol_type = other DNA
aaccccccaaactatcagccctggctgttataggactttaaatctattccgatataagagcagatgctatatcctaacag

SEQ ID NO: 18529 - DNA, 80 bp, synthetic construct
  misc_feature 1..80: note = Synthetic: >NC_034516.1-cand-1930-2009
  source 1..80: mol_type = other DNA
tttggttgtgcttgttgattctggagtctattgcatgggcagctagtgcctctgagacttcattgaaccctctctggact

SEQ ID NO: 18530 - DNA, 80 bp, synthetic construct
  misc_feature 1..80: note = Synthetic: >NC_034516.1-cand-2010-2089
  source 1..80: mol_type = other DNA
gacaatgctcatggagtaggtagcgttccaatgcatacagatctggaacttgatttctcattaccatcaagctcaaaata

SEQ ID NO: 18531 - DNA, 80 bp, synthetic construct
  misc_feature 1..80: note = Synthetic: >NC_034516.1-cand-2090-2169
  source 1..80: mol_type = other DNA
cacatataaaaggaaattgactagtcccactaatcctgaacaagctgtttcactccatattgagattgaaagtcaaggaa

SEQ ID NO: 18532 - DNA, 80 bp, synthetic construct
  misc_feature 1..80: note = Synthetic: >NC_034516.1-cand-2170-2249
  source 1..80: mol_type = other DNA
ttgcagccgatgtccactcactaggccactggtatgatgctaggttaaatttgaagacatcttttcattgttatggtgca

SEQ ID NO: 18533 - DNA, 80 bp, synthetic construct
  misc_feature 1..80: note = Synthetic: >NC_034516.1-cand-2240-2319
  source 1..80: mol_type = other DNA
ttatggtgcatgcacaaaataccagtacccttggcatactgccaagtgccactttgaacatgatttccagtatgaaaata

SEQ ID NO: 18534 - DNA, 80 bp, synthetic construct
  misc_feature 1..80: note = Synthetic: >NC_034516.1-cand-2340-2419
  source 1..80: mol_type = other DNA
gactgccctggtgttgggacaggctgtactgcctgtggtctctatttagatcagttgaaacctgttggtagtgcttataa

SEQ ID NO: 18535 - DNA, 80 bp, synthetic construct
  misc_feature 1..80: note = Synthetic: >NC_039477.1-cand-1830-1909
  source 1..80: mol_type = other DNA
aggagaattgatttcctggtgtacgctgaggcaccagaagtagaaaaggcaaaacgggactttcctggtcagccagatat

SEQ ID NO: 18536 - DNA, 80 bp, synthetic construct
  misc_feature 1..80: note = Synthetic: >NC_039477.1-cand-2230-2309
  source 1..80: mol_type = other DNA
aactcaaacaagcaattaggaatgtgaccatcaagaggtgccggatcatctacggtggctccacgtatgaccttgaatct

SEQ ID NO: 18537 - DNA, 80 bp, synthetic construct
  misc_feature 1..80: note = Synthetic: >NC_039477.1-cand-2300-2379
  source 1..80: mol_type = other DNA
ccttgaatctgatggcaagggcaaagttttggtggaaaaggtcaagaacacctctgtgcagaccaacaacgagttggccg

SEQ ID NO: 18538 - DNA, 80 bp, synthetic construct
  misc_feature 1..80: note = Synthetic: >NC_039477.1-cand-2470-2549
  source 1..80: mol_type = other DNA
ctgcgtttgtcaccacgcgcattgcacgccgcatgaacatacaagaactctggtcgaagccacaattagatcaaaatgaa

SEQ ID NO: 18539 - DNA, 80 bp, synthetic construct
  misc_feature 1..80: note = Synthetic: >NC_039477.1-cand-2990-3069
  source 1..80: mol_type = other DNA
aagtgttgactacaatgagaaactggactttgaggcccccccaagcatatggtctaggattgtgagctttggttctggct

SEQ ID NO: 18540 - DNA, 80 bp, synthetic construct
  misc_feature 1..80: note = Synthetic: >NC_039477.1-cand-3180-3259
  source 1..80: mol_type = other DNA
ggtgaattttgccgattcagattcccaaaaccaattagaccagatgtgacaggaatgatcttggaagaaggtgcgcctga

SEQ ID NO: 18541 - DNA, 80 bp, synthetic construct
  misc_feature 1..80: note = Synthetic: >NC_039477.1-cand-3380-3459
  source 1..80: mol_type = other DNA
tatgttgctcactggatcaaatgctaaaggaatggacttgggaacaactcctggtgactgtggctgtccttacatctata

SEQ ID NO: 18542 - DNA, 80 bp, synthetic construct
  misc_feature 1..80: note = Synthetic: >NC_039477.1-cand-3620-3699
  source 1..80: mol_type = other DNA
tgcaccaaaattgagcaccaaaaccaaattttggaggtcatcgaacacgccccttccaccagggacatatgagcctgcct

SEQ ID NO: 18543 - DNA, 80 bp, synthetic construct
  misc_feature 1..80: note = Synthetic: >NC_039477.1-cand-3710-3789
  source 1..80: mol_type = other DNA
ccgtgacccgcgtgttaagggtgggccctccttgcagcaggtaatgagagaccagttgaagccattcactgaacccaggg

SEQ ID NO: 18544 - DNA, 80 bp, synthetic construct
  misc_feature 1..80: note = Synthetic: >NC_039477.1-cand-4010-4089
  source 1..80: mol_type = other DNA
cctaatgtttgaggaagggaaacacatgacaccagtgtatacagcagcactcaaggacgagctagtcaagactgagaaaa

SEQ ID NO: 18545 - DNA, 80 bp, synthetic construct
  misc_feature 1..80: note = Synthetic: >NC_039477.1-cand-4130-4209
  source 1..80: mol_type = other DNA
cttgtccaccatgatccggtgcgctaggtcatttggtggactcatggacgagatgaaggcacactgcatatcactcccag

SEQ ID NO: 18546 - DNA, 80 bp, synthetic construct
  misc_feature 1..80: note = Synthetic: >NC_039477.1-cand-4250-4329
  source 1..80: mol_type = other DNA
atttgagaaacattccagatacaaataccactatgatgcagactactctcgttgggattcaacacaacagagggcagtgc

SEQ ID NO: 18547 - DNA, 80 bp, synthetic construct
  misc_feature 1..80: note = Synthetic: >NC_039477.1-cand-4410-4489
  source 1..80: mol_type = other DNA
cctagtgtagtagatgtaggagactttaaaatcacaataaatgaagggctcccatctggtgtgccatgcacttctcaatg

SEQ ID NO: 18548 - DNA, 80 bp, synthetic construct
  misc_feature 1..80: note = Synthetic: >NC_039477.1-cand-4650-4729
  source 1..80: mol_type = other DNA
ttgaaggagtacggcctgaaaccaacccgcccagacaagaccgagggacccctgatcatcagtgaagatttgaacggact

SEQ ID NO: 18549 - DNA, 80 bp, synthetic construct
  misc_feature 1..80: note = Synthetic: >NC_039477.1-cand-4810-4889
  source 1..80: mol_type = other DNA
tgtactggactagaggaccaaatcatgaagaccccaatgagacaatgataccccattctcaaagacccatacagctcatg

SEQ ID NO: 18550 - DNA, 80 bp, synthetic construct
  misc_feature 1..80: note = Synthetic: >NC_039477.1-cand-4970-5049
  source 1..80: mol_type = other DNA
aggtgggatggacttttacgtgccaaggcaggaacccatgttcaggtggatgaggttttctgacttgagcacgtgggagg

SEQ ID NO: 18551 - DNA, 80 bp, synthetic construct
  misc_feature 1..80: note = Synthetic: >NC_039897.1-cand-5380-5459
  source 1..80: mol_type = other DNA
taaatgatgatggcgtctaaggacgccccaacaaacatggatggcaccagtggtgccggccagctggtaccagaggcaaa

SEQ ID NO: 18552 - DNA, 80 bp, synthetic construct
  misc_feature 1..80: note = Synthetic: >NC_039897.1-cand-5500-5579
  source 1..80: mol_type = other DNA
gcaacagctgccgcaaccgctggccaagttaatatgattgacccctggataatgaataattatgtgcaagcccctcaagg

SEQ ID NO: 18553 - DNA, 80 bp, synthetic construct
  misc_feature 1..80: note = Synthetic: >NC_039897.1-cand-5540-5619
  source 1..80: mol_type = other DNA
acccctggataatgaataattatgtgcaagcccctcaaggtgaattcaccatatcgcctaacaacacaccaggtgatatt

SEQ ID NO: 18554 - DNA, 80 bp, synthetic construct
  misc_feature 1..80: note = Synthetic: >NC_039897.1-cand-5620-5699
  source 1..80: mol_type = other DNA
ttgtttgatttacaattaggcccccaccttaaccctttcttatcccatttggcccaaatgtataatggctgggttggcaa

SEQ ID NO: 18555 - DNA, 80 bp, synthetic construct
  misc_feature 1..80: note = Synthetic: >NC_039897.1-cand-5700-5779
  source 1..80: mol_type = other DNA
tatgaaagtgaaggttttattggctggtaatgccttcacggctggtaaaataatcattagctgtataccccctggctttg

SEQ ID NO: 18556 - DNA, 80 bp, synthetic construct
  misc_feature 1..80: note = Synthetic: >NC_039897.1-cand-5780-5859
  source 1..80: mol_type = other DNA
ttgcacaaaatgtttctatcgctcaagctactatgttcccccatgttatagctgatgtcagagttttggaacccattgag

SEQ ID NO: 18557 - DNA, 80 bp, synthetic construct
  misc_feature 1..80: note = Synthetic: >NC_039897.1-cand-5860-5939
  source 1..80: mol_type = other DNA
gtgccattggaagatgtgaggaatgtgctgttccacaacaatgacaacacaccaaccatgaggttggtgtgcatgctcta

SEQ ID NO: 18558 - DNA, 80 bp, synthetic construct
  misc_feature 1..80: note = Synthetic: >NC_039897.1-cand-5940-6019
  source 1..80: mol_type = other DNA
cacccccttgcgagctagtggcagctcgtctggaactgacccctttgtgattgctgggcgtgttttgacatgcccgagcc

SEQ ID NO: 18559 - DNA, 80 bp, synthetic construct
  misc_feature 1..80: note = Synthetic: >NC_039897.1-cand-6020-6099
  source 1..80: mol_type = other DNA
ccgattttagctttttgtttttggtcccccccaatgtagaacaaaagactaaaccttttagtgtcccaaatcttccattg

SEQ ID NO: 18560 - DNA, 80 bp, synthetic construct
  misc_feature 1..80: note = Synthetic: >NC_039897.1-cand-6100-6179
  source 1..80: mol_type = other DNA
aatactctttcaaattcgagagtcccctctctaattaaatcaatgatggtatccagggaccatgggcagatggttcagtt

SEQ ID NO: 18561 - DNA, 80 bp, synthetic construct
  misc_feature 1..80: note = Synthetic: >NC_039897.1-cand-6180-6259
  source 1..80: mol_type = other DNA
tcaaaatggtagggtcaccctagatgggcaactgcaaggcaccacgcccacatcagctagccagctgtgtaaaatcaggg

SEQ ID NO: 18562 - DNA, 80 bp, synthetic construct
  misc_feature 1..80: note = Synthetic: >NC_039897.1-cand-6260-6339
  source 1..80: mol_type = other DNA
gcagtgtcttccatgctaatggtgggaatgggtataacctgacagaattggatgggagcccataccatgcatttgaaagc

SEQ ID NO: 18563 - DNA, 80 bp, synthetic construct
  misc_feature 1..80: note = Synthetic: >NC_039897.1-cand-6340-6419
  source 1..80: mol_type = other DNA
cccgcaccaatagggtttccagatttaggtgaatgtgactggcacatggaggcttcccctaccacccaattcaatactgg

SEQ ID NO: 18564 - DNA, 80 bp, synthetic construct
  misc_feature 1..80: note = Synthetic: >NC_039897.1-cand-6420-6499
  source 1..80: mol_type = other DNA
tgatgttataaaacaaattaatgtcaaacaagaatcagcatttgccccccaccttggtaccatacaggcagacggcctga

SEQ ID NO: 18565 - DNA, 80 bp, synthetic construct
  misc_feature 1..80: note = Synthetic: >NC_039897.1-cand-6500-6579
  source 1..80: mol_type = other DNA
gtgatgtgagtgtcaacactaacatgatagctaaattgggatgggtgtcacccgtcagtgatggacacaaaggagatgtc

SEQ ID NO: 18566 - DNA, 80 bp, synthetic construct
  misc_feature 1..80: note = Synthetic: >NC_039897.1-cand-6580-6659
  source 1..80: mol_type = other DNA
gacccgtgggtcattccacgctatgggtcgactttgactgaggctgcccaattagcccctccaatataccccccaggctt

SEQ ID NO: 18567 - DNA, 80 bp, synthetic construct
  misc_feature 1..80: note = Synthetic: >NC_044045.1-cand-1770-1849
  source 1..80: mol_type = other DNA
atcataattacaaccaatcttgtcaaccccgcccccctcgattacgtcaactttgaggcttgctgtagacgaattgactt

SEQ ID NO: 18568 - DNA, 80 bp, synthetic construct
  misc_feature 1..80: note = Synthetic: >NC_044045.1-cand-1850-1929
  source 1..80: mol_type = other DNA
ccttgtctatgccgaggcaccagacattgagaaagtcaaaaaggatttccctgggcaaccagacatgtggcgtgaccatt

SEQ ID NO: 18569 - DNA, 80 bp, synthetic construct
  misc_feature 1..80: note = Synthetic: >NC_044045.1-cand-1930-2009
  source 1..80: mol_type = other DNA
tcaaagctgattcgtcacatataaagttgtcattagccccacagggtggtttcgacaaaaacggaaacacccctcatggg

SEQ ID NO: 18570 - DNA, 80 bp, synthetic construct
  misc_feature 1..80: note = Synthetic: >NC_044045.1-cand-2010-2089
  source 1..80: mol_type = other DNA
aagggcaccatgaaaaccctcacgctgcattcactcactgcacgtgtgatgggcttagtgtgtgagagaaaggacgagtt

SEQ ID NO: 18571 - DNA, 80 bp, synthetic construct
  misc_feature 1..80: note = Synthetic: >NC_044045.1-cand-2110-2189
  source 1..80: mol_type = other DNA
tgcaggtttacaactttgacacaaacaaagtctctgcatttagaaaattggcagctgacaacaagtatagttttgtggag

SEQ ID NO: 18572 - DNA, 80 bp, synthetic construct
  misc_feature 1..80: note = Synthetic: >NC_044045.1-cand-2170-2249
  source 1..80: mol_type = other DNA
acaagtatagttttgtggagacaatgaaagttggtgcggtcctcaagaatgtgcgaaccctggaggacctaaaatctgcc

SEQ ID NO: 18573 - DNA, 80 bp, synthetic construct
  misc_feature 1..80: note = Synthetic: >NC_044045.1-cand-2210-2289
  source 1..80: mol_type = other DNA
cctcaagaatgtgcgaaccctggaggacctaaaatctgccctcaaaggagtcaagttcaaggagtgtgaaataatctaca

SEQ ID NO: 18574 - DNA, 80 bp, synthetic construct
  misc_feature 1..80: note = Synthetic: >NC_044045.1-cand-2330-2409
  source 1..80: mol_type = other DNA
tgtctcggtctccaagatcaaggatgttgcatcacagacagccaatgaagtgcatacagcgctcctgagactgaggcagg

SEQ ID NO: 18575 - DNA, 80 bp, synthetic construct
  misc_feature 1..80: note = Synthetic: >NC_044045.1-cand-2420-2499
  source 1..80: mol_type = other DNA
atattacatcagctgcttccaagatcttatctatacactgatccaggttgctggagcctcatttgtggtgcacaggatct

SEQ ID NO: 18576 - DNA, 80 bp, synthetic construct
  misc_feature 1..80: note = Synthetic: >NC_044045.1-cand-2500-2579
  source 1..80: mol_type = other DNA
caaagagattctcctgggaccgttggattaaacccagtgagagccctcaagaggaagaacaacctagcagtgaggaggcc

SEQ ID NO: 18577 - DNA, 80 bp, synthetic construct
  misc_feature 1..80: note = Synthetic: >NC_044045.1-cand-2570-2649
  source 1..80: mol_type = other DNA
tgaggaggccacaggaagatgggaaattgagccaaaggacacagaccctgaaggtaagaagggtaaaaacaagaagggaa

SEQ ID NO: 18578 - DNA, 80 bp, synthetic construct
  misc_feature 1..80: note = Synthetic: >NC_044045.1-cand-2660-2739
  source 1..80: mol_type = other DNA
acacacagccttctctagcaagggtcttagtgatgaagagtacgatgagttcaagagaatcagagaggagaagaacggca

SEQ ID NO: 18579 - DNA, 80 bp, synthetic construct
  misc_feature 1..80: note = Synthetic: >NC_044045.1-cand-2740-2819
  source 1..80: mol_type = other DNA
agtactctatagaagaatacctccaggaccgtgatagattttatgaggaagtggcagtcgcaagggccacggaagaagac

SEQ ID NO: 18580 - DNA, 80 bp, synthetic construct
  misc_feature 1..80: note = Synthetic: >NC_044045.1-cand-2810-2889
  source 1..80: mol_type = other DNA
ggaagaagacttctgtgaagaagaggtggcaaaaattagacagagaattttcagacccacaaagaaacagaggaaggagg

SEQ ID NO: 18581 - DNA, 80 bp, synthetic construct
  misc_feature 1..80: note = Synthetic: >NC_044045.1-cand-2900-2979
  source 1..80: mol_type = other DNA
ccttggactagtcaccggttcggaaatcaggaagagaagaccagatgacttccaacccaaaggtaatttgtgggctgatg

SEQ ID NO: 18582 - DNA, 80 bp, synthetic construct
  misc_feature 1..80: note = Synthetic: >NC_044045.1-cand-2980-3059
  source 1..80: mol_type = other DNA
acaccaggagcgtggactacaacgagaagctggaatttgaagcccctccaagtgtgtggtcacgcatcgtaccccttggt

SEQ ID NO: 18583 - DNA, 80 bp, synthetic construct
  misc_feature 1..80: note = Synthetic: >NC_003310.1-cand-67610-67689
  source 1..80: mol_type = other DNA
gtggattctctactctagataaaatcactgactttcacgaaagaccagtcattctatctcttcctaggatagctttagtt

SEQ ID NO: 18584 - DNA, 80 bp, synthetic construct
  misc_feature 1..80: note = Synthetic: >NC_001611.1-cand-58540-58619
  source 1..80: mol_type = other DNA
agaattaataaacaaacaaccaaaaaaatatggaattgtattttctacccataagttatctctaacaaaactatttagtt

SEQ ID NO: 18585 - DNA, 80 bp, synthetic construct
  misc_feature 1..80: note = Synthetic: >NC_001611.1-cand-67710-67789
  source 1..80: mol_type = other DNA
tactgttcccgtcaatagagcaaaagtagttcaacataatattaaacactcgttcgatctaaaattgcatttgattagtt

SEQ ID NO: 18586 - DNA, 80 bp, synthetic construct
  misc_feature 1..80: note = Synthetic: >NC_003310.1-cand-137930-138009
  source 1..80: mol_type = other DNA
aactacaatcgggtaattataagatcgtagatctcccatgtggtggaatactaccatctatcgcatgtggatggacagta

SEQ ID NO: 18587 - DNA, 80 bp, synthetic construct
  misc_feature 1..80: note = Synthetic: >NC_007372.1-cand-2050-2129
  source 1..80: mol_type = other DNA
tagccaaaggggaattcttgaggatgaacagatgtaccaaaagtgctgcaacttgttcgagaaatttttccctagtagtt

SEQ ID NO: 18588 - DNA, 80 bp, synthetic construct
  misc_feature 1..80: note = Synthetic: >NC_003310.1-cand-131480-131559
  source 1..80: mol_type = other DNA
cgcattagccacgttcactgtaaatatctttaaagaggtaatgaccaaagagggtatatccatcactaaaataagtagtt

SEQ ID NO: 18589 - DNA, 80 bp, synthetic construct
  misc_feature 1..80: note = Synthetic: >NC_003310.1-cand-140650-140729
  source 1..80: mol_type = other DNA
ctacgaagaaagttagtttacccataggagatataactataaatggagatctagatacaaaatccggatctatgatagtt

SEQ ID NO: 18590 - DNA, 80 bp, synthetic construct
  misc_feature 1..80: note = Synthetic: >NC_039476.1-cand-1300-1379
  source 1..80: mol_type = other DNA
caacatacatgaaaacactggacatggaggaggagaaagccaggaggttgtccacaaaatctgcatcccctgacatagtt

SEQ ID NO: 18591 - DNA, 80 bp, synthetic construct
  misc_feature 1..80: note = Synthetic: >NC_001611.1-cand-5800-5879
  source 1..80: mol_type = other DNA
attcctttcattaacaatttaacgatgtctatatctatatgagatgacttaatataatattgaagagctgtacaatagtt

SEQ ID NO: 18592 - DNA, 80 bp, synthetic construct
  misc_feature 1..80: note = Synthetic: >NC_001611.1-cand-119520-119599
  source 1..80: mol_type = other DNA
aactatttagaaattgaaatagaggaagacacattatttgacgacgagttatactctattatagaacgctctttcgatga

SEQ ID NO: 18593 - DNA, 80 bp, synthetic construct
  misc_feature 1..80: note = Synthetic: >NC_007359.1-cand-1980-2059
  source 1..80: mol_type = other DNA
aactcgaggggttttcagctgaatcaagaaaattgcttctcattgttcaggcacttagggacaacctggaacctggaacc

SEQ ID NO: 18594 - DNA, 80 bp, synthetic construct
  misc_feature 1..80: note = Synthetic: >AdVB3-cand-8620-8699
  source 1..80: mol_type = other DNA
ctgaaagagagttcaacagaatcaatctcggtatcgttgacggcggcttgcctaaggatttcttgcacgtcgccagagtt

SEQ ID NO: 18595 - DNA, 80 bp, synthetic construct
  misc_feature 1..80: note = Synthetic: >NC_001722.1-cand-350-429
  source 1..80: mol_type = other DNA
aactgaaagcaagagggataccatatagtgaataacaggaacaaccatacttggtcaaggcaggaagtagctactaagaa

SEQ ID NO: 18596 - DNA, 80 bp, synthetic construct
  misc_feature 1..80: note = Synthetic: >NC_001611.1-cand-15680-15759
  source 1..80: mol_type = other DNA
aatatattatttttatgttattttgttaaaaataatcatcgaatactttgtaagatactccttcatgaacataatcagtt

SEQ ID NO: 18597 - DNA, 80 bp, synthetic construct
  misc_feature 1..80: note = Synthetic: >NC_001611.1-cand-58300-58379
  source 1..80: mol_type = other DNA
aactggaggaaccggagtgggtaagacgtcacaggtacccaagttattgctttggtttaattatttatttggtggattct

SEQ ID NO: 18598 - DNA, 80 bp, synthetic construct
  misc_feature 1..80: note = Synthetic: >NC_007367.1-cand-320-399
  source 1..80: mol_type = other DNA
taggaaacttaagagggagataacgttccatggggccaaagaaatagctctcagttattctgctggtgcacttgccagtt

SEQ ID NO: 18599 - DNA, 80 bp, synthetic construct
  misc_feature 1..80: note = Synthetic: >NC_003310.1-cand-55330-55409
  source 1..80: mol_type = other DNA
acagtatctagccatatctaaagctatgtttagattataatccttatacatctgagctaaatcaatgtcatcctttccga

SEQ ID NO: 18600 - DNA, 80 bp, synthetic construct
  misc_feature 1..80: note = Synthetic: >NC_001611.1-cand-113540-113619
  source 1..80: mol_type = other DNA
acagtccggttcttaatattgtattgtttatactcaagatatttgttaaacgaattaaaattatttaatttaatacattc

SEQ ID NO: 18601 - DNA, 80 bp, synthetic construct
  misc_feature 1..80: note = Synthetic: >AdVB7-cand-3750-3829
  source 1..80: mol_type = other DNA
cccttcaaccctggctgaggacaagctacttgttctgttggctcagctcgaggccttaacccaacgcttaggcgaactgt

SEQ ID NO: 18602 - DNA, 80 bp, synthetic construct
  misc_feature 1..80: note = Synthetic: >NC_003310.1-cand-38110-38189
  source 1..80: mol_type = other DNA
acagtttttaatttctttggtaatgaaattattcacaatatcagtatcttctttatctaccagagattttactaacttga

SEQ ID NO: 18603 - DNA, 80 bp, synthetic construct
  misc_feature 1..80: note = Synthetic: >AdVB7-cand-20290-20369
  source 1..80: mol_type = other DNA
acatacaagtgcctcaaaaattctttgctgtcaagaacctacttcttctacctggctcctacacctatgagtggaacttc

SEQ ID NO: 18604 - DNA, 80 bp, synthetic construct
  misc_feature 1..80: note = Synthetic: >NC_001611.1-cand-148270-148349
  source 1..80: mol_type = other DNA
acatacagcgaatggaatatcgattagatttcctagatttactaggattagagaagataaaacgtggaaagaatctactc

SEQ ID NO: 18605 - DNA, 80 bp, synthetic construct
  misc_feature 1..80: note = Synthetic: >NC_003310.1-cand-127390-127469
  source 1..80: mol_type = other DNA
ttccgagtttggattctttgttcatttgctcggcagtaatcaacaatatgcaaatagagcaattactagggagggtatgt

SEQ ID NO: 18606 - DNA, 80 bp, synthetic construct
  misc_feature 1..80: note = Synthetic: >NC_001611.1-cand-90310-90389
  source 1..80: mol_type = other DNA
acatacgagacatgttagtagattcagtagagaccgatacctatccggataaacttccgtttaaaaatggtgtattggac

SEQ ID NO: 18607 - DNA, 80 bp, synthetic construct
  misc_feature 1..80: note = Synthetic: >AdVB7-cand-34960-35039
  source 1..80: mol_type = other DNA
acatagcctctgggtataattatgcttaatcttaagtatagcaaagccacccctcgcggatacaaagtaaaaggcacagg

SEQ ID NO: 18608 - DNA, 80 bp, synthetic construct
  misc_feature 1..80: note = Synthetic: >AdVB7-cand-7990-8069
  source 1..80: mol_type = other DNA
gagttgtacctgacttcctttgacgagaaatttcagtggaaaattgaggcctggcgtttgtacctggcgctctactatgt

SEQ ID NO: 18609 - DNA, 80 bp, synthetic construct
  misc_feature 1..80: note = Synthetic: >NC_001611.1-cand-76100-76179
  source 1..80: mol_type = other DNA
acatatgagacaaacgctgatagataatccagataataacctcctgaaaatggccaaagcgggttataaagtaaatccca

SEQ ID NO: 18610 - DNA, 80 bp, synthetic construct
  misc_feature 1..80: note = Synthetic: >NC_001611.1-cand-39800-39879
  source 1..80: mol_type = other DNA
gtattctataccaatattattctttgattcgaatttagtttcttcgatattggattttgtattacctatattcttgatgt

SEQ ID NO: 18611 - DNA, 80 bp, synthetic construct
  misc_feature 1..80: note = Synthetic: >NC_003310.1-cand-80880-80959
  source 1..80: mol_type = other DNA
gataatagatacggaacgggactatggacgcatgataagaataattttgcagcattggaagtaactaaactatgtgatgt

SEQ ID NO: 18612 - DNA, 80 bp, synthetic construct
  misc_feature 1..80: note = Synthetic: >NC_004910.1-cand-1760-1839
  source 1..80: mol_type = other DNA
tttcaatctttagtaccaaaggctgccagaagccaatatagtggatttgtgagaacgctattccagcagatgcgtgatgt

SEQ ID NO: 18613 - DNA, 80 bp, synthetic construct
  misc_feature 1..80: note = Synthetic: >NC_003310.1-cand-149170-149249
  source 1..80: mol_type = other DNA
acatccagacgtgatgtgtatagaacatgtagagatcacgctacccgtgtacgtgcaactggtaattaaaataaaaagta

SEQ ID NO: 18614 - DNA, 80 bp, synthetic construct
  misc_feature 1..80: note = Synthetic: >NC_001611.1-cand-56310-56389
  source 1..80: mol_type = other DNA
acatcctccggagtattaatgggcttagtaaacagtccatcgttgcaataataaaagttatccaagttaaaggatattat

SEQ ID NO: 18615 - DNA, 80 bp, synthetic construct
  misc_feature 1..80: note = Synthetic: >AdVB3-cand-18090-18169
  source 1..80: mol_type = other DNA
aaccttctcagacacatcgacccgccaccttggacttgcctcctccccctgcttctgcggcacctgttcccaaacctgtc

SEQ ID NO: 18616 - DNA, 80 bp, synthetic construct
  misc_feature 1..80: note = Synthetic: >AdVB3-cand-18140-18219
  source 1..80: mol_type = other DNA
gcttctgcggcacctgttcccaaacctgtcgctaccagaaagcccaccgccgtacagcccgtcgccgtagccagaccgcg

SEQ ID NO: 18617 - DNA, 80 bp, synthetic construct
  misc_feature 1..80: note = Synthetic: >AdVB3-cand-18470-18549
  source 1..80: mol_type = other DNA
gcacatcgccggacaggatgcttcggagtacctgagtccgggtctggtgcagttcgcccgtgcaacagacacctacttca

SEQ ID NO: 18618 - DNA, 80 bp, synthetic construct
  misc_feature 1..80: note = Synthetic: >AdVB3-cand-18560-18639
  source 1..80: mol_type = other DNA
caaatttagaaaccccacagtggcgcccacccacgatgtgaccaccgatcgtagccagcgcctgatgctgcgcttcgtgc

SEQ ID NO: 18619 - DNA, 80 bp, synthetic construct
  misc_feature 1..80: note = Synthetic: >AdVB3-cand-18640-18719
  source 1..80: mol_type = other DNA
ccgttgaccgggaagacaatacctactcttacaaagttcgctacacgctggctgtaggcgacaacagagtgcttgacatg

SEQ ID NO: 18620 - DNA, 80 bp, synthetic construct
  misc_feature 1..80: note = Synthetic: >AdVB3-cand-18750-18829
  source 1..80: mol_type = other DNA
cttgatagaggtcctagcttcaagccatattccggcacagcttacaattcactcgctcctaagggcgcgcccaatacatc

SEQ ID NO: 18621 - DNA, 80 bp, synthetic construct
  misc_feature 1..80: note = Synthetic: >AdVB3-cand-18800-18879
  source 1..80: mol_type = other DNA
actcgctcctaagggcgcgcccaatacatctcagtggatagttacaacgaatcgagacaatgcagtaactaccaccacaa

SEQ ID NO: 18622 - DNA, 80 bp, synthetic construct
  misc_feature 1..80: note = Synthetic: >AdVB3-cand-18880-18959
  source 1..80: mol_type = other DNA
acacatttggcattgcttccatgaagggagacaatattactaaagaaggtttgcaaattgggaaagacattaccactact

SEQ ID NO: 18623 - DNA, 80 bp, synthetic construct
  misc_feature 1..80: note = Synthetic: >AdVB3-cand-19040-19119
  source 1..80: mol_type = other DNA
tgatggaacaaatgaaaagtttggtggaagagcccttaaaccagctaccaacatgaagccatgctacgggtcttttgcaa

SEQ ID NO: 18624 - DNA, 80 bp, synthetic construct
  misc_feature 1..80: note = Synthetic: >AdVB3-cand-19060-19139
  source 1..80: mol_type = other DNA
ttggtggaagagcccttaaaccagctaccaacatgaagccatgctacgggtcttttgcaagacctacaaacataaaaggg

SEQ ID NO: 18625 - DNA, 80 bp, synthetic construct
  misc_feature 1..80: note = Synthetic: >AdVB3-cand-19200-19279
  source 1..80: mol_type = other DNA
ccagatattgatatggaatttttcgatggtagagatgctgttgcaggagctttagcgcctgaaattgtgctttatacgga

SEQ ID NO: 18626 - DNA, 80 bp, synthetic construct
  misc_feature 1..80: note = Synthetic: >AdVB3-cand-19280-19359
  source 1..80: mol_type = other DNA
aaatgtaaatttggaaactccagacagtcatgtggtatataaaccaggaacgtctgataactctcatgcaaatttgggtc

SEQ ID NO: 18627 - DNA, 80 bp, synthetic construct
  misc_feature 1..80: note = Synthetic: >AdVB3-cand-19440-19519
  source 1..80: mol_type = other DNA
aatatgggagttttggctggccaagcatcacaactgaatgcagtggttgacttgcaggacagaaatactgaactgtcata

SEQ ID NO: 18628 - DNA, 80 bp, synthetic construct
  misc_feature 1..80: note = Synthetic: >AdVB3-cand-19670-19749
  source 1..80: mol_type = other DNA
aggaccagggcacaggtatcaaggcattaaagttaaaaccgatgacgctaatggatgggaaaaagatgctaatgttgata

SEQ ID NO: 18629 - DNA, 80 bp, synthetic construct
  misc_feature 1..80: note = Synthetic: >AdVB3-cand-19750-19829
  source 1..80: mol_type = other DNA
cagctaatgaaatagccataggaaacaacctggctatggaaattaatatccaagctaacctttggagaagttttctgtac

SEQ ID NO: 18630 - DNA, 80 bp, synthetic construct
  misc_feature 1..80: note = Synthetic: >AdVB3-cand-19910-19989
  source 1..80: mol_type = other DNA
tgagtacatgaacgggcgagtggtatccccatctctggttgattcatacatcaacatcggcgccaggtggtctcttgacc

SEQ ID NO: 18631 - DNA, 80 bp, synthetic construct
  misc_feature 1..80: note = Synthetic: >AdVB7-cand-31110-31189
  source 1..80: mol_type = other DNA
gccaagatatcctacgagatcaccgctactgaccatcgcctctcttacgaacttggcccccaacgacaaaaatttacatg

SEQ ID NO: 18632 - DNA, 80 bp, synthetic construct
  misc_feature 1..80: note = Synthetic: >AdVB7-cand-31160-31239
  source 1..80: mol_type = other DNA
acttggcccccaacgacaaaaatttacatgcatggtgggaatcacccctatagttatcactcagcaaagtggagatacta

SEQ ID NO: 18633 - DNA, 80 bp, synthetic construct
  misc_feature 1..80: note = Synthetic: >AdVB7-cand-31270-31349
  source 1..80: mol_type = other DNA
tcgagtgcacctacaccctgctaaagaccctatgcggcctaagagacctgctacccatgaattaaaaattaataaaaaat

SEQ ID NO: 18634 - DNA, 80 bp, synthetic construct
  misc_feature 1..80: note = Synthetic: >AdVB7-cand-31340-31419
  source 1..80: mol_type = other DNA
aataaaaaatcacttacttgaaatcagcaataaggtctctgttgaaattttctcccagcagcacctcacttccctcttcc

SEQ ID NO: 18635 - DNA, 80 bp, synthetic construct
  misc_feature 1..80: note = Synthetic: >AdVB7-cand-31390-31469
  source 1..80: mol_type = other DNA
tctcccagcagcacctcacttccctcttcccaactctggtattctaaaccccgttcagcggcatactttctccatacttt

SEQ ID NO: 18636 - DNA, 80 bp, synthetic construct
  misc_feature 1..80: note = Synthetic: >AdVB7-cand-31500-31579
  source 1..80: mol_type = other DNA
tgtacccacaatcttcatgtctttcttcccagatgaccaagagagtccggctcagtgattccttcaaccctgtctacccc

SEQ ID NO: 18637 - DNA, 80 bp, synthetic construct
  misc_feature 1..80: note = Synthetic: >AdVB7-cand-31580-31659
  source 1..80: mol_type = other DNA
tatgaagatgaaagcacctcccaacacccctttataaacccagggtttatttccccaaatggctttacacaaagcccaga

SEQ ID NO: 18638 - DNA, 80 bp, synthetic construct
  misc_feature 1..80: note = Synthetic: >AdVB7-cand-31650-31729
  source 1..80: mol_type = other DNA
aaagcccagacggagttcttactttaaaatgtttaaccccactaacaaccacaggcgggtctctacagttaaaagtggga

SEQ ID NO: 18639 - DNA, 80 bp, synthetic construct
  misc_feature 1..80: note = Synthetic: >AdVB7-cand-31740-31819
  source 1..80: mol_type = other DNA
caatagatgacaccgacggttttttgaaagaaaacataagtgccaccacaccactcgttaagactggtcactctataggt

SEQ ID NO: 18640 - DNA, 80 bp, synthetic construct
  misc_feature 1..80: note = Synthetic: >AdVB7-cand-31820-31899
  source 1..80: mol_type = other DNA
ttgtcgctaggacccggattagaaacaaatgaaaacaaactttgtgccaaattgggagaaggacttacattcaattccaa

SEQ ID NO: 18641 - DNA, 80 bp, synthetic construct
  misc_feature 1..80: note = Synthetic: >AdVB7-cand-31900-31979
  source 1..80: mol_type = other DNA
caacatttgcattaatgacaatattaacaccctatggacaggagttaaccccaccagagccaactgtcaaataatggcct

SEQ ID NO: 18642 - DNA, 80 bp, synthetic construct
  misc_feature 1..80: note = Synthetic: >AdVB7-cand-31980-32059
  source 1..80: mol_type = other DNA
ccagtgaatctaatgattgcaaattaattctaacactagttaaaactggagccctcgtcactgcatttgtttatgttata

SEQ ID NO: 18643 - DNA, 80 bp, synthetic construct
  misc_feature 1..80: note = Synthetic: >AdVB7-cand-32060-32139
  source 1..80: mol_type = other DNA
ggagtatctaacgattttaatatgctaactacacataaaaatataaatttcactgcagagctgttttttgattctactgg

SEQ ID NO: 18644 - DNA, 80 bp, synthetic construct
  misc_feature 1..80: note = Synthetic: >AdVB7-cand-32140-32219
  source 1..80: mol_type = other DNA
taatttattaactagcctttcatccctaaaaactccacttaatcataaatcagggcaaaacatggctactggtgccctta

SEQ ID NO: 18645 - DNA, 80 bp, synthetic construct
  misc_feature 1..80: note = Synthetic: >AdVB7-cand-32220-32299
  source 1..80: mol_type = other DNA
ctaatgctaaaggtttcatgcccagcacaactgcctatcctttcaatgttaattccagagaaaaagaaaactacatttac

SEQ ID NO: 18646 - DNA, 80 bp, synthetic construct
  misc_feature 1..80: note = Synthetic: >AdVB7-cand-32300-32379
  source 1..80: mol_type = other DNA
ggaacttgttactacacagctagtgatcacactgcttttcccattgacatatctgtcatgcttaaccaaagagcattaaa

SEQ ID NO: 18647 - DNA, 80 bp, synthetic construct
  misc_feature 1..80: note = Synthetic: >AdVE4-cand-3450-3529
  source 1..80: mol_type = other DNA
gactaaaatctgtgcttttctgtgtgttgcagcagcatgagcggaagcggctcctttgagggagggatattcagccctta

SEQ ID NO: 18648 - DNA, 80 bp, synthetic construct
  misc_feature 1..80: note = Synthetic: >AdVE4-cand-3570-3649
  source 1..80: mol_type = other DNA
aatgtgatgggatccacggtggacggccggcccgtgcagcctgcgaactcttcaaccctgacctatgcaaccctgagctc

SEQ ID NO: 18649 - DNA, 80 bp, synthetic construct
  misc_feature 1..80: note = Synthetic: >AdVE4-cand-3650-3729
  source 1..80: mol_type = other DNA
ctcgtctgtggacgcagctgccgccgcagctgctgcttctgccgccagcgtcgtgcgcggaatggccatgggcgccggct

SEQ ID NO: 18650 - DNA, 80 bp, synthetic construct
  misc_feature 1..80: note = Synthetic: >AdVE4-cand-3730-3809
  source 1..80: mol_type = other DNA
actatggcactctggtggccaactcaagttccactaataatcccgccagcctgaatgaggagaagctgctactgctgatg

SEQ ID NO: 18651 - DNA, 80 bp, synthetic construct
  misc_feature 1..80: note = Synthetic: >AdVE4-cand-3800-3879
  source 1..80: mol_type = other DNA
actgctgatggcccagcttgaggccttgagccagcgtctgggcgagctgacccaacaggtggctcagctgcaggagcaga

SEQ ID NO: 18652 - DNA, 80 bp, synthetic construct
  misc_feature 1..80: note = Synthetic: >AdVE4-cand-3880-3959
  source 1..80: mol_type = other DNA
cgcgggccgcggttgccacggtgaaatcaaaataaaaaatcaatcaataaataaacaaacacagttgttgattttaaaaa

SEQ ID NO: 18653 - DNA, 80 bp, synthetic construct
  misc_feature 1..80: note = Synthetic: >AdVE4-cand-3960-4039
  source 1..80: mol_type = other DNA
aaaaaaaatcaaagtctaaatctttatttgatttttcgcgcacggtaggccctggaccaccggcctcgatcattgagcac

SEQ ID NO: 18654 - DNA, 80 bp, synthetic construct
  misc_feature 1..80: note = Synthetic: >AdVE4-cand-4030-4109
  source 1..80: mol_type = other DNA
cattgagcacccggtggattttttccaagacccggtagaggtgggattggatgttgaggtacatgggcatgagcccgtcc

SEQ ID NO: 18655 - DNA, 80 bp, synthetic construct
  misc_feature 1..80: note = Synthetic: >AdVE4-cand-4190-4269
  source 1..80: mol_type = other DNA
ggcgtggtgttgcacaatatctttgaggaggagactgatggccacgggcagccctttggtgtaggtgtttacaaacctgt

SEQ ID NO: 18656 - DNA, 80 bp, synthetic construct
  misc_feature 1..80: note = Synthetic: >AdVE4-cand-4200-4279
  source 1..80: mol_type = other DNA
tgcacaatatctttgaggaggagactgatggccacgggcagccctttggtgtaggtgtttacaaacctgttgagctggga

SEQ ID NO: 18657 - DNA, 80 bp, synthetic construct
  misc_feature 1..80: note = Synthetic: >AdVE4-cand-4300-4379
  source 1..80: mol_type = other DNA
ttaaatgcattttggcctggatctttaaattggcgatgttaccgcccagatcccgcctgggattcatgttgtgcagaacc

SEQ ID NO: 18658 - DNA, 80 bp, synthetic construct
  misc_feature 1..80: note = Synthetic: >AdVE4-cand-4410-4489
  source 1..80: mol_type = other DNA
aatttgtcatgcaacttggaagggaaggcatgaaagaatttggagacgcccttgtgaccgcccaggttttccatgcactc

SEQ ID NO: 18659 - DNA, 80 bp, synthetic construct
  misc_feature 1..80: note = Synthetic: >AdVE4-cand-4450-4529
  source 1..80: mol_type = other DNA
tggagacgcccttgtgaccgcccaggttttccatgcactcatccatgataatggcaatgggcccgtgggcagcggcttgg

SEQ ID NO: 18660 - DNA, 80 bp, synthetic construct
  misc_feature 1..80: note = Synthetic: >AdVE4-cand-4460-4539
  source 1..80: mol_type = other DNA
cttgtgaccgcccaggttttccatgcactcatccatgataatggcaatgggcccgtgggcagcggcttgggcgaagacgt

SEQ ID NO: 18661 - DNA, 80 bp, synthetic construct
  misc_feature 1..80: note = Synthetic: >AdVE4-cand-4610-4689
  source 1..80: mol_type = other DNA
gcgaagggtgcccgattgggggacaaaggtaccctcgatcccgggggcgtagtttccctcacaaatctgcatctcccatg

SEQ ID NO: 18662 - DNA, 80 bp, synthetic construct
  misc_feature 1..80: note = Synthetic: >AdVE4-cand-4690-4769
  source 1..80: mol_type = other DNA
ccttgagctccgagggtggaatcatatccacctgcggggcgataaaaaaaacggtttccggagagggggagataagctgg

SEQ ID NO: 18663 - DNA, 80 bp, synthetic construct
  misc_feature 1..80: note = Synthetic: >EVA76-cand-3480-3559
  source 1..80: mol_type = other DNA
gcccatggttgtgacaagattgccagatgcaagtgcagagctggagtgtacttttgcaaatcaatgaacagacactaccc

SEQ ID NO: 18664 - DNA, 80 bp, synthetic construct
  misc_feature 1..80: note = Synthetic: >EVA76-cand-3560-3639
  source 1..80: mol_type = other DNA
tgtcacctttggtgaaccagccttcttccatgtagatgctaatgagtactacccagaaagatatcaatcacatgtgatct

SEQ ID NO: 18665 - DNA, 80 bp, synthetic construct
  misc_feature 1..80: note = Synthetic: >EVA76-cand-3640-3719
  source 1..80: mol_type = other DNA
catcagctggcattgccttaccaggtgattgtggaggtattctcaggtgtgaacacggagtcattgggatcgtctcaatt

SEQ ID NO: 18666 - DNA, 80 bp, synthetic construct
  misc_feature 1..80: note = Synthetic: >EVA76-cand-3730-3809
  source 1..80: mol_type = other DNA
acctagttggcttcgcagatatcagagacctactgtggctagatgatgaggttatggaacaaggagttacagactacata

SEQ ID NO: 18667 - DNA, 80 bp, synthetic construct
  misc_feature 1..80: note = Synthetic: >EVA76-cand-3810-3889
  source 1..80: mol_type = other DNA
aaaggattaggtgatgcttttggaactggcttcactgattcaatctctagggaaatcaatcaactcaaaaattacctatt

SEQ ID NO: 18668 - DNA, 80 bp, synthetic construct
  misc_feature 1..80: note = Synthetic: >EVA76-cand-3890-3969
  source 1..80: mol_type = other DNA
aggctcagaaaatgtggtggagaaaattttgaaagctctaatcaaagttgtctcagcactggtgattgtggttagaagtg

SEQ ID NO: 18669 - DNA, 80 bp, synthetic construct
  misc_feature 1..80: note = Synthetic: >EVA76-cand-3970-4049
  source 1..80: mol_type = other DNA
actatgacctagtgacattaactgctaccttggcacttatagggtgccatggaagcccgtggaaatggctcaaacacaaa

SEQ ID NO: 18670 - DNA, 80 bp, synthetic construct
  misc_feature 1..80: note = Synthetic: >EVA76-cand-4130-4209
  source 1..80: mol_type = other DNA
tgctagaggtttagaatggatctcaaacaaaatcagtaaattcattgattggattaaagacaaaatcatcccagccgcca

SEQ ID NO: 18671 - DNA, 80 bp, synthetic construct
  misc_feature 1..80: note = Synthetic: >EVA76-cand-4220-4299
  source 1..80: mol_type = other DNA
ggaatttctaaacaatctaaagcaactcacactccttgagaatcagatttccaacattgagcaatctgctgccagtcagg

SEQ ID NO: 18672 - DNA, 80 bp, synthetic construct
  misc_feature 1..80: note = Synthetic: >EVA76-cand-4300-4379
  source 1..80: mol_type = other DNA
gtgacttagaacaactctttgggaacgtttcatatctagcccattactgcagaaaattccaaccactgtatgccgctgaa

SEQ ID NO: 18673 - DNA, 80 bp, synthetic construct
  misc_feature 1..80: note = Synthetic: >EVA76-cand-4460-4539
  source 1..80: mol_type = other DNA
cttaattgttagaggcgctcctgggactggaaagtcattagcaactggcatcatctctcgagccattgctgaaaaatacc

SEQ ID NO: 18674 - DNA, 80 bp, synthetic construct
  misc_feature 1..80: note = Synthetic: >EVA76-cand-4540-4619
  source 1..80: mol_type = other DNA
actccagtgtgtactctctaccaccagaccccgaccattttgatggttacaaacaacaagtagttacagtcatggatgac

SEQ ID NO: 18675 - DNA, 80 bp, synthetic construct
  misc_feature 1..80: note = Synthetic: >EVA76-cand-4620-4699
  source 1..80: mol_type = other DNA
ttgtgtcaaaacccagatggtaaagatatggctctattttgccaaatggtttctacagttgatttcattcccccaatggc

SEQ ID NO: 18676 - DNA, 80 bp, synthetic construct
  misc_feature 1..80: note = Synthetic: >EVA76-cand-4700-4779
  source 1..80: mol_type = other DNA
atcgttagaagagaagggtgtctccttcacctctaaatttgtgattgcttccacaaacatgagcaacatcatagtcccca

SEQ ID NO: 18677 - DNA, 80 bp, synthetic construct
  misc_feature 1..80: note = Synthetic: >EVA76-cand-4780-4859
  source 1..80: mol_type = other DNA
cagtgtcagatgctgatgctattagaaggagattctacatggattgtgacatagaagtcactgattcatacaaattggag

SEQ ID NO: 18678 - DNA, 80 bp, synthetic construct
  misc_feature 1..80: note = Synthetic: >EVA76-cand-4860-4939
  source 1..80: mol_type = other DNA
tctggaaggcttgatgcaggtagagctgcaaaattgtgctcagaaaacaacactgccaacttcaagaaatgcagcccctt

SEQ ID NO: 18679 - DNA, 80 bp, synthetic construct
  misc_feature 1..80: note = Synthetic: >EVB69-cand-550-629
  source 1..80: mol_type = other DNA
ggtgtccgtgtttccttttattctcaaactggctgcttatggtgacaatctcagagttgttaccatatagctattggatt

SEQ ID NO: 18680 - DNA, 80 bp, synthetic construct
  misc_feature 1..80: note = Synthetic: >EVB69-cand-630-709
  source 1..80: mol_type = other DNA
ggccatccggtgagcaacagagcaattgtctaccaatttgttggatttattccactcaatctagcggttttcagaacatt

SEQ ID NO: 18681 - DNA, 80 bp, synthetic construct
  misc_feature 1..80: note = Synthetic: >EVB69-cand-690-769
  source 1..80: mol_type = other DNA
ctagcggttttcagaacattgaattatattctaaccctcaacaagacgaaatgggagcccaagtgtcaacacagaagacg

SEQ ID NO: 18682 - DNA, 80 bp, synthetic construct
  misc_feature 1..80: note = Synthetic: >EVB69-cand-790-869
  source 1..80: mol_type = other DNA
gaatgctagtgggaattccatcattcactacacgaacattaactactacaaagatgcagcatccaactcggccaacagac

SEQ ID NO: 18683 - DNA, 80 bp, synthetic construct
  misc_feature 1..80: note = Synthetic: >EVB69-cand-870-949
  source 1..80: mol_type = other DNA
aggacttcacgcaagaccccagcaaatttgcagaaccaatgaaagatgtgatgataaagacactcccagcattaaactca

SEQ ID NO: 18684 - DNA, 80 bp, synthetic construct
  misc_feature 1..80: note = Synthetic: >EVB69-cand-950-1029
  source 1..80: mol_type = other DNA
ccaaccgtcgaggaatgtggctatagtgacagggcgaggtcaataaccctcggtaattcaaccattactacacaagagtg

SEQ ID NO: 18685 - DNA, 80 bp, synthetic construct
  misc_feature 1..80: note = Synthetic: >EVB69-cand-1030-1109
  source 1..80: mol_type = other DNA
tgctaacgtggtagccgcgtacggagaatggccatcatacttatcagatggcgaagcaacggcagaggaccagccgaccc

SEQ ID NO: 18686 - DNA, 80 bp, synthetic construct
  misc_feature 1..80: note = Synthetic: >EVB69-cand-1110-1189
  source 1..80: mol_type = other DNA
aaccggacgtagcgacatgcagattttataccttagattcagtggagtggcaaaaggaatctgcaggatggtggtggaag

SEQ ID NO: 18687 - DNA, 80 bp, synthetic construct
  misc_feature 1..80: note = Synthetic: >EVB69-cand-1220-1299
  source 1..80: mol_type = other DNA
tttggtcaaaacatgcactatcactatttaggtaggacgggatacaccatacatgtacagtgtaatgcctcaaagttcca

SEQ ID NO: 18688 - DNA, 80 bp, synthetic construct
  misc_feature 1..80: note = Synthetic: >EVB69-cand-1260-1339
  source 1..80: mol_type = other DNA
gatacaccatacatgtacagtgtaatgcctcaaagttccaccaaggatgtgtgcttgtggtgtgtgtgcccgaagcagag

SEQ ID NO: 18689 - DNA, 80 bp, synthetic construct
  misc_feature 1..80: note = Synthetic: >EVB69-cand-1350-1429
  source 1..80: mol_type = other DNA
cacaagttgaatacaccgtaaacgccagtgctctgtctgaaggtgaacgagcctcactgttcaccaaggacaaatccaca

SEQ ID NO: 18690 - DNA, 80 bp, synthetic construct
  misc_feature 1..80: note = Synthetic: >EVB69-cand-1400-1479
  source 1..80: mol_type = other DNA
gcctcactgttcaccaaggacaaatccacaaatcaacatggcgtgcagactatagtgcataatgcagccatgggcgtggg

SEQ ID NO: 18691 - DNA, 80 bp, synthetic construct
  misc_feature 1..80: note = Synthetic: >EVB69-cand-1510-1589
  source 1..80: mol_type = other DNA
gtggatcaacttgcgcacaaacaatagtgccacaatagtaatgccgtacattaatagtgtacccatggacaacatgtaca

SEQ ID NO: 18692 - DNA, 80 bp, synthetic construct
  misc_feature 1..80: note = Synthetic: >EVB69-cand-1590-1669
  source 1..80: mol_type = other DNA
ggcattacaatttcacactaatgatcatacccttcgctaaactggagtacgcggacacagcatccagctatgtgcccata

SEQ ID NO: 18693 - DNA, 80 bp, synthetic construct
  misc_feature 1..80: note = Synthetic: >EVB69-cand-1650-1729
  source 1..80: mol_type = other DNA
catccagctatgtgcccataacagtgacagtagcaccgatgtgcgctgaatacaacggactgcgattgggagtgacacag

SEQ ID NO: 18694 - DNA, 80 bp, synthetic construct
  misc_feature 1..80: note = Synthetic: >EVB69-cand-1750-1829
  source 1..80: mol_type = other DNA
accagggagcactcaatttctcacttcagacgatttccaatcgccttccgccatgcctcagttcgacgtgacaccagaga

SEQ ID NO: 18695 - DNA, 80 bp, synthetic construct
  misc_feature 1..80: note = Synthetic: >EVB77-cand-1210-1289
  source 1..80: mol_type = other DNA
aaagacatgggactgtttggccaaaacatgtattatcactacttaggaagagcaggctacacgatacatgtccagtgcaa

SEQ ID NO: 18696 - DNA, 80 bp, synthetic construct
  misc_feature 1..80: note = Synthetic: >EVB77-cand-1290-1369
  source 1..80: mol_type = other DNA
cgcatcccgcttccaccagggttgcttgttagtggtctgcgtgccagaagctgaaatgggtagctcggtacccggaagcg

SEQ ID NO: 18697 - DNA, 80 bp, synthetic construct
  misc_feature 1..80: note = Synthetic: >EVB77-cand-1370-1449
  source 1..80: mol_type = other DNA
cgtttgccgtggaagaaatcaccaagggtgaggaagcaatggagttcacagcaggtaaccaccagggtaccaccaccagt

SEQ ID NO: 18698 - DNA, 80 bp, synthetic construct
  misc_feature 1..80: note = Synthetic: >EVB77-cand-1450-1529
  source 1..80: mol_type = other DNA
gtccaaaaggcagtttgcaacgcaggtcttggcgtgggtgttggaaatttaaccatttttccacatcaatggattaacct

SEQ ID NO: 18699 - DNA, 80 bp, synthetic construct
  misc_feature 1..80: note = Synthetic: >EVB77-cand-1530-1609
  source 1..80: mol_type = other DNA
gcgaactaataattgtgccactatagtaatgccatatataaactgtgtcccgatggataccatgtaccgacactacaatt

SEQ ID NO: 18700 - DNA, 80 bp, synthetic construct
  misc_feature 1..80: note = Synthetic: >EVB77-cand-1610-1689
  source 1..80: mol_type = other DNA
tcaccctaatggtgattccctttgtacaattgagatccgatggagggaccacgtatgtgcctataaccgtcaccgtggca

SEQ ID NO: 18701 - DNA, 80 bp, synthetic construct
  misc_feature 1..80: note = Synthetic: >EVB77-cand-1690-1769
  source 1..80: mol_type = other DNA
ccaatgtgcgcagaatacaatggtttgaggttatcagcacatcaagggcttccagttctcaacacgccaggaagcaatca

SEQ ID NO: 18702 - DNA, 80 bp, synthetic construct
  misc_feature 1..80: note = Synthetic: >EVB77-cand-1770-1849
  source 1..80: mol_type = other DNA
gtttttgaccactgatgattaccaatctccatgcgccatgcctgaatatgatgtaactccattaatgcacataccgggcg

SEQ ID NO: 18703 - DNA, 80 bp, synthetic construct
  misc_feature 1..80: note = Synthetic: >EVB77-cand-1850-1929
  source 1..80: mol_type = other DNA
aggtttccaatttgatggaaattgctgaggtggattctgtggttcctgtgaacaatctgagtgacaaggtcaacacaatt

SEQ ID NO: 18704 - DNA, 80 bp, synthetic construct
  misc_feature 1..80: note = Synthetic: >EVB77-cand-1930-2009
  source 1..80: mol_type = other DNA
gagaccttcgggattccagtgagtgcaagtgatagcgcgcaaaccgcagctattttcacattccaactcgatccaggcag

SEQ ID NO: 18705 - DNA, 80 bp, synthetic construct
  misc_feature 1..80: note = Synthetic: >EVB77-cand-2010-2089
  source 1..80: mol_type = other DNA
gagccctgttctaaagaggacgcttctgggcgagattctcaactactacgcgcattggtcaggtagtataaaattaacat

SEQ ID NO: 18706 - DNA, 80 bp, synthetic construct
  misc_feature 1..80: note = Synthetic: >EVB77-cand-2070-2149
  source 1..80: mol_type = other DNA
aggtagtataaaattaacattccttttttgtggctcggcaatggctaccggcaagattttgttagcgtactcccctcctg

SEQ ID NO: 18707 - DNA, 80 bp, synthetic construct
  misc_feature 1..80: note = Synthetic: >EVB77-cand-2170-2249
  source 1..80: mol_type = other DNA
agaaaagatgcaatgctgggcacgcatgtaatttgggacatagggttgcagtccagctgcgtgttgtgtgtaccatggat

SEQ ID NO: 18708 - DNA, 80 bp, synthetic construct
  misc_feature 1..80: note = Synthetic: >EVB77-cand-2250-2329
  source 1..80: mol_type = other DNA
tagtcaaacgcattacaggttagtggaccaggatgaatacacggcagctggttacatatcagggtggtaccaaaccaact

SEQ ID NO: 18709 - DNA, 80 bp, synthetic construct
  misc_feature 1..80: note = Synthetic: >EVB77-cand-2330-2409
  source 1..80: mol_type = other DNA
tgattgtgccacccagcactccaaccaagtgtgagatcttgtgcttcgtttccgcatgtaatgacttctcagtgcgaatg

SEQ ID NO: 18710 - DNA, 80 bp, synthetic construct
  misc_feature 1..80: note = Synthetic: >EVB77-cand-2410-2489
  source 1..80: mol_type = other DNA
ctgcgggacaccccattcatagagcaagaagcggcattgcaaggtgacgatgataggccccagggcacccgcggtagcac

SEQ ID NO: 18711 - DNA, 80 bp, synthetic construct
  misc_feature 1..80: note = Synthetic: >EVB83-cand-50-129
  source 1..80: mol_type = other DNA
tctggtatcacggtacctttgtgcgcctgttttacagcccctcccccaaacaagaacttagaagcaccacacacacgatc

SEQ ID NO: 18712 - DNA, 80 bp, synthetic construct
  misc_feature 1..80: note = Synthetic: >EVB83-cand-130-209
  source 1..80: mol_type = other DNA
aatagcgggcgtagcataccagctacgtcttgatcaagcacttctgtttccccggaccgagtatcaatagactactaacg

SEQ ID NO: 18713 - DNA, 80 bp, synthetic construct
  misc_feature 1..80: note = Synthetic: >EVB83-cand-210-289
  source 1..80: mol_type = other DNA
tggtcgaaggagaaaacgttcgttacccggccagctacttcgaaaagcctagtaacaccatggaaattgcggagtgtttc

SEQ ID NO: 18714 - DNA, 80 bp, synthetic construct
  misc_feature 1..80: note = Synthetic: >EVB83-cand-390-469
  source 1..80: mol_type = other DNA
cgtaggacgcttcaatatggacatggtgcgaagagcccattgagctagttggtagtcctccggcccctgaatgcggctaa

SEQ ID NO: 18715 - DNA, 80 bp, synthetic construct
  misc_feature 1..80: note = Synthetic: >EVB83-cand-420-499
  source 1..80: mol_type = other DNA
aagagcccattgagctagttggtagtcctccggcccctgaatgcggctaatcctaactgcggagcgctcgcctccaaacc

SEQ ID NO: 18716 - DNA, 80 bp, synthetic construct
  misc_feature 1..80: note = Synthetic: >EVB83-cand-610-689
  source 1..80: mol_type = other DNA
ttaccatatagctattggattggccatccagtgtctaacagagcaattatatacctctttgttggatttgtgccgctaaa

SEQ ID NO: 18717 - DNA, 80 bp, synthetic construct
  misc_feature 1..80: note = Synthetic: >EVB83-cand-690-769
  source 1..80: mol_type = other DNA
caagacaaattaccaaactttgtgccttattgttaaattaaacacaacgagatgggagcacaggtttccacgcaaaagac

SEQ ID NO: 18718 - DNA, 80 bp, synthetic construct
  misc_feature 1..80: note = Synthetic: >EVB83-cand-780-859
  source 1..80: mol_type = other DNA
gagactggcctgaatgctagtggtaactcagttatacactacacaaacataaatttttacaaagatgcagcctccaactc

SEQ ID NO: 18719 - DNA, 80 bp, synthetic construct
  misc_feature 1..80: note = Synthetic: >EVB83-cand-850-929
  source 1..80: mol_type = other DNA
cctccaactcagctaatagacaagacttttctcaggatcccagcaagttcactgaacctatgaaagatttaatggttaag

SEQ ID NO: 18720 - DNA, 80 bp, synthetic construct
  misc_feature 1..80: note = Synthetic: >EVB83-cand-930-1009
  source 1..80: mol_type = other DNA
acactccccgcactgaactctcctacagtcgaagagtgcggatacagtgacagagtgcgggcgattacactaggcaactc

SEQ ID NO: 18721 - DNA, 80 bp, synthetic construct
  misc_feature 1..80: note = Synthetic: >EVB83-cand-1010-1089
  source 1..80: mol_type = other DNA
caccatcaccacgcaagaatgtgctaacgttgtggtaggttatggtgtatggccaacatacctggctgataatgaagcca

SEQ ID NO: 18722 - DNA, 80 bp, synthetic construct
  misc_feature 1..80: note = Synthetic: >EVB83-cand-1090-1169
  source 1..80: mol_type = other DNA
cagccgaggatcaaccaacccaacctgacgtagccacttgtcgcttctatactctagactcggtggattgggagaaaacg

SEQ ID NO: 18723 - DNA, 80 bp, synthetic construct
  misc_feature 1..80: note = Synthetic: >EVB83-cand-1170-1249
  source 1..80: mol_type = other DNA
tcagcaggatggtggtggaagttcccagacgcacttaaagacatgggcttgtttgggcagaacatgttgtaccactacct

SEQ ID NO: 18724 - DNA, 80 bp, synthetic construct
  misc_feature 1..80: note = Synthetic: >EVB83-cand-1260-1339
  source 1..80: mol_type = other DNA
ggttacaccatacacgttcagtgtaacgcatccaagtttcaccaagggtgcttacttgtagtgtgcgtgcctgaggcaca

SEQ ID NO: 18725 - DNA, 80 bp, synthetic construct
  misc_feature 1..80: note = Synthetic: >EVB83-cand-1330-1409
  source 1..80: mol_type = other DNA
ctgaggcacagatgggatcagcggaaccaaacaaagcattcctaaatgaagttttgagcaaaggagaaaatgcgtccacc

SEQ ID NO: 18726 - DNA, 80 bp, synthetic construct
  misc_feature 1..80: note = Synthetic: >EVB83-cand-1410-1489
  source 1..80: mol_type = other DNA
ttcacacccgaagctagcacgcagggcattcagacatacgtgtgtaacgctgggatgggtgtggcagtaggaaatctgac

SEQ ID NO: 18727 - DNA, 80 bp, synthetic construct
  misc_feature 1..80: note = Synthetic: >EVB85-cand-7260-7339
  source 1..80: mol_type = other DNA
gctgtttgaccctacctgctttttcaacattgcgcaggaagtggctggattctttttaaattggagcacgatttgattta

SEQ ID NO: 18728 - DNA, 80 bp, synthetic construct
  misc_feature 1..80: note = Synthetic: >EVB86-cand-40-119
  source 1..80: mol_type = other DNA
cgctagcacactggtattacggtacccttgtgcgcctgttttatttacccctcccccacgcaacctagaagcatgactta

SEQ ID NO: 18729 - DNA, 80 bp, synthetic construct
  misc_feature 1..80: note = Synthetic: >EVB86-cand-120-199
  source 1..80: mol_type = other DNA
agcggtcaatagatggctcagtatgccaactgagttatgaccaagcacttctgttaccccggaccgagtatcaataggct

SEQ ID NO: 18730 - DNA, 80 bp, synthetic construct
  misc_feature 1..80: note = Synthetic: >EVB86-cand-210-289
  source 1..80: mol_type = other DNA
ctgaaggagaaagtgttcgttacccggccagttacttcgagaaacctagtatcatcatgaaggttgcgaggcgtttcgct

SEQ ID NO: 18731 - DNA, 80 bp, synthetic construct
  misc_feature 1..80: note = Synthetic: >EVB86-cand-380-459
  source 1..80: mol_type = other DNA
ggcaacccatgggacgcttcaatattgacatggtgcgaagagtctattgagctaactggtagtcctccggcccctgaatg

SEQ ID NO: 18732 - DNA, 80 bp, synthetic construct
  misc_feature 1..80: note = Synthetic: >EVB86-cand-620-699
  source 1..80: mol_type = other DNA
attggattggccatccagtgactaacagagcaattgtctacctgttcgttggttacgtaccactaaattataaagttttg

SEQ ID NO: 18733 - DNA, 80 bp, synthetic construct
  misc_feature 1..80: note = Synthetic: >EVB86-cand-700-779
  source 1..80: mol_type = other DNA
aacacacttaattttattatagcacttaacaccttaaaatgggagcacaagtttcaacacagaagacgggtgcgcatgag

SEQ ID NO: 18734 - DNA, 80 bp, synthetic construct
  misc_feature 1..80: note = Synthetic: >EVB86-cand-780-859
  source 1..80: mol_type = other DNA
accagcttgagcgcaaacggaagctcaactattcactacactaacattaacttctacaaagatgcagcttctaactcagc

SEQ ID NO: 18735 - DNA, 80 bp, synthetic construct
  misc_feature 1..80: note = Synthetic: >EVB86-cand-860-939
  source 1..80: mol_type = other DNA
aaatcgccaggacttttcacaagaccctagtaagttcactgagccattgaaggatgtgatgatcaaatcattgccagcac

SEQ ID NO: 18736 - DNA, 80 bp, synthetic construct
  misc_feature 1..80: note = Synthetic: >EVB86-cand-940-1019
  source 1..80: mol_type = other DNA
tgaactcaccatccgccgaagagtgtgggtatagtgacagagttagatcgctaacactaggtaattcaactataacaaca

SEQ ID NO: 18737 - DNA, 80 bp, synthetic construct
  misc_feature 1..80: note = Synthetic: >EVB86-cand-970-1049
  source 1..80: mol_type = other DNA
atagtgacagagttagatcgctaacactaggtaattcaactataacaacacaagaaagtgccaatgtagtaatagggtac

SEQ ID NO: 18738 - DNA, 80 bp, synthetic construct
  misc_feature 1..80: note = Synthetic: >EVB86-cand-1090-1169
  source 1..80: mol_type = other DNA
cagaagatcaacccacacaacccgacgtggctacatgcagattctacaccttggagtcagtgaagtgggagaaagcatca

SEQ ID NO: 18739 - DNA, 80 bp, synthetic construct
  misc_feature 1..80: note = Synthetic: >EVB86-cand-1130-1209
  source 1..80: mol_type = other DNA
attctacaccttggagtcagtgaagtgggagaaagcatcagcaggatggtggtggaagtttccagaagcgttaaaggaca

SEQ ID NO: 18740 - DNA, 80 bp, synthetic construct
  misc_feature 1..80: note = Synthetic: >EVB86-cand-1220-1299
  source 1..80: mol_type = other DNA
tgggcaaaacatgtattaccactacctcggacgctctgggtacaccatacacgtacagtgcaacgcgtccaggtttcatc

SEQ ID NO: 18741 - DNA, 80 bp, synthetic construct
  misc_feature 1..80: note = Synthetic: >EVB86-cand-1310-1389
  source 1..80: mol_type = other DNA
actggttgtgtgcgtaccagaagccgagatgggtaatttcaacatacagggtgccttgaccgcggcagatttgactaatg

SEQ ID NO: 18742 - DNA, 80 bp, synthetic construct
  misc_feature 1..80: note = Synthetic: >EVB86-cand-1410-1489
  source 1..80: mol_type = other DNA
actaccgacccagcacaaggtactggaaacggagtccaaacggcagtgtgcaatgctgcaatgggtgtgggagtgggaaa

SEQ ID NO: 18743 - DNA, 80 bp, synthetic construct
  misc_feature 1..80: note = Synthetic: >EVB88-cand-6420-6499
  source 1..80: mol_type = other DNA
atgtgaaggatgaactgagatcagcagagaaggtggccaagggcaaatccaggctaattgaagcatcgagtctgaatgac

SEQ ID NO: 18744 - DNA, 80 bp, synthetic construct
  misc_feature 1..80: note = Synthetic: >EVB88-cand-6500-6579
  source 1..80: mol_type = other DNA
tcagtggccatgaggcagacctttggaaacttgtacaagacattccacctgaacccaggcatagtgacaggcagtgcagt

SEQ ID NO: 18745 - DNA, 80 bp, synthetic construct
  misc_feature 1..80: note = Synthetic: >EVB88-cand-6580-6659
  source 1..80: mol_type = other DNA
tgggtgtgaccctgatctattctggagcaaaattccagtcatgcttgatggccacctcattgcctttgactacagtggct

SEQ ID NO: 18746 - DNA, 80 bp, synthetic construct
  misc_feature 1..80: note = Synthetic: >EVB88-cand-6640-6719
  source 1..80: mol_type = other DNA
tgcctttgactacagtggctatgatgccagcctaagtccagtgtggtttgcatgcctgaaactgttgttagagaaattgg

SEQ ID NO: 18747 - DNA, 80 bp, synthetic construct
  misc_feature 1..80: note = Synthetic: >EVB88-cand-6740-6819
  source 1..80: mol_type = other DNA
aactacatagattacttatgcaactcccaccatctgtacagagacaaacactactttgtaagaggaggaatgccatctgg

SEQ ID NO: 18748 - DNA, 80 bp, synthetic construct
  misc_feature 1..80: note = Synthetic: >EVB88-cand-6810-6889
  source 1..80: mol_type = other DNA
tgccatctgggtgctcaggaaccagcatcttcaactcaatgattaacaacattatcattagaacactaatgttgaaggtg

SEQ ID NO: 18749 - DNA, 80 bp, synthetic construct
  misc_feature 1..80: note = Synthetic: >EVB88-cand-6900-6979
  source 1..80: mol_type = other DNA
tagacctggaccaattcaggatgatagcatatggtgatgacgtcattgcatcatatccacatcccatcgacgcatcactg

SEQ ID NO: 18750 - DNA, 80 bp, synthetic construct
  misc_feature 1..80: note = Synthetic: >EVB88-cand-7000-7079
  source 1..80: mol_type = other DNA
gtatggcttgatcatgacaccagctgacaagggagagtgtttcaatgaagtgacatggaccaacgtcacattcctgaaaa

SEQ ID NO: 18751 - DNA, 80 bp, synthetic construct
  misc_feature 1..80: note = Synthetic: >EVB88-cand-7080-7159
  source 1..80: mol_type = other DNA
gatacttcagagcagatgagcaataccctttccttgtccatccggtaatgccaatgaaggacatccatgaatccatcagg

SEQ ID NO: 18752 - DNA, 80 bp, synthetic construct
  misc_feature 1..80: note = Synthetic: >EVB88-cand-7160-7239
  source 1..80: mol_type = other DNA
tggaccaaagatcccaaaaacacacaagatcatgtgcgatccttgtgcctattggcctggcacaatggagagcaagaata

SEQ ID NO: 18753 - DNA, 80 bp, synthetic construct
  misc_feature 1..80: note = Synthetic: >EVB88-cand-7240-7319
  source 1..80: mol_type = other DNA
tgaggagtttgtgtccaagatcagaagcgtcccagtcgggcgctgtttgaccttacctgcgttctcaaccttacgcagga

SEQ ID NO: 18754 - DNA, 80 bp, synthetic construct
  misc_feature 1..80: note = Synthetic: >EVB88-cand-7320-7399
  source 1..80: mol_type = other DNA
aatggctagattccttttaaaattagagtacaatttgatataattccaattggcttaaccctaccacactcaccgaacta

SEQ ID NO: 18755 - DNA, 80 bp, synthetic construct
  misc_feature 1..80: note = Synthetic: >EVD68-cand-40-119
  source 1..80: mol_type = other DNA
ggctagtactctggtatctcggtacctttgtacgcctgttttaattccctccccaacgtaacttagaagcttttaaacca

SEQ ID NO: 18756 - DNA, 80 bp, synthetic construct
  misc_feature 1..80: note = Synthetic: >EVD68-cand-120-199
  source 1..80: mol_type = other DNA
aagctcaataggtggagcgcaaaccagcgctcttatgagcaagcacttctgtctccccggtgtggttgtatagactgtcc

SEQ ID NO: 18757 - DNA, 80 bp, synthetic construct
  misc_feature 1..80: note = Synthetic: >EVD68-cand-200-279
  source 1..80: mol_type = other DNA
ccacggttgaaaacaacttatccgttaaccgctatagtacttcgagaaacctagtattgccttcggagtgttgatgcgtt

SEQ ID NO: 18758 - DNA, 80 bp, synthetic construct
  misc_feature 1..80: note = Synthetic: >EVD68-cand-280-359
  source 1..80: mol_type = other DNA
gcgctcagcacactaacccgtgtgtagcttgggtcgatgagtctggacgtaccccactggcgacagtggtccaggctgcg

SEQ ID NO: 18759 - DNA, 80 bp, synthetic construct
  misc_feature 1..80: note = Synthetic: >HCV.A15-cand-4730-4809
  source 1..80: mol_type = other DNA
cctccttagaggagaaaggcatattgttcacctcaaattatgtcctggcctccaccaattcgagtaggatcgcaccaccc

SEQ ID NO: 18760 - DNA, 80 bp, synthetic construct
  misc_feature 1..80: note = Synthetic: >HCV.A15-cand-4810-4889
  source 1..80: mol_type = other DNA
acagtagcacacagtgatgcattggccaggcgctttgcatttgatatggacatccaagtcatgaatgagtattcaagaga

SEQ ID NO: 18761 - DNA, 80 bp, synthetic construct
  misc_feature 1..80: note = Synthetic: >HCV.A15-cand-4890-4969
  source 1..80: mol_type = other DNA
cgggaaattaaacatggccatggccacagaaatgtgcaaaaattgtcatcaaccggcaaacttcaaaagatgttgcccac

SEQ ID NO: 18762 - DNA, 80 bp, synthetic construct
  misc_feature 1..80: note = Synthetic: >HCV.A15-cand-4970-5049
  source 1..80: mol_type = other DNA
tggtgtgtggaaaagccatacagctaatggataaggcatccagagtcaggtacagtgttgatcagatcactacaatggtt

SEQ ID NO: 18763 - DNA, 80 bp, synthetic construct
  misc_feature 1..80: note = Synthetic: >HCV.A15-cand-5050-5129
  source 1..80: mol_type = other DNA
atcaatgagaggaacagaagatctaatattggcaactgcatggaagcactctttcaaggtcctcttcaatacaaagactt

SEQ ID NO: 18764 - DNA, 80 bp, synthetic construct
  misc_feature 1..80: note = Synthetic: >HCV.A15-cand-5130-5209
  source 1..80: mol_type = other DNA
gaaaatagacatcaagaccacacctccccccgagtgtatcaatgatctgctccaggcggtcgattctcaagaagtgaggg

SEQ ID NO: 18765 - DNA, 80 bp, synthetic construct
  misc_feature 1..80: note = Synthetic: >HCV.A15-cand-5230-5309
  source 1..80: mol_type = other DNA
tggatcgtgaacatcactagtgctgttcagactgagaggaatatcaacagggcaatgaccatcctgcaagcagtcacaac

SEQ ID NO: 18766 - DNA, 80 bp, synthetic construct
  misc_feature 1..80: note = Synthetic: >HCV.A15-cand-5290-5369
  source 1..80: mol_type = other DNA
atcctgcaagcagtcacaacatttgccgcggttgctggagtggtgtatgtgatgtacaagctcttcgcagggcaccaagg

SEQ ID NO: 18767 - DNA, 80 bp, synthetic construct
  misc_feature 1..80: note = Synthetic: >HCV.A15-cand-5370-5449
  source 1..80: mol_type = other DNA
agcttacacaggacttcccaataagagacctaatgtccctaccatcagaactgccaaggttcagggtcctgggtttgact

SEQ ID NO: 18768 - DNA, 80 bp, synthetic construct
  misc_feature 1..80: note = Synthetic: >HCV.A15-cand-5450-5529
  source 1..80: mol_type = other DNA
atgcagtagccatggcaaagaggaacattctcacagcaactaccagtaagggagaattcacaatgcttggagtgcacgat

SEQ ID NO: 18769 - DNA, 80 bp, synthetic construct
  misc_feature 1..80: note = Synthetic: >HCV.A15-cand-5530-5609
  source 1..80: mol_type = other DNA
aacgtggccattctaccaacccacgcatcaccaggtgaaacaatagtcattgatggcaaagaggttgaggtgttggatgc

SEQ ID NO: 18770 - DNA, 80 bp, synthetic construct
  misc_feature 1..80: note = Synthetic: >HCV.A15-cand-5610-5689
  source 1..80: mol_type = other DNA
caaggctctggaggaccaggccgggaccaacctagaaattaccattatcactcttaaaagaaatgagaagttcagagata

SEQ ID NO: 18771 - DNA, 80 bp, synthetic construct
  misc_feature 1..80: note = Synthetic: >HCV.A15-cand-5770-5849
  source 1..80: mol_type = other DNA
tatgttcctgttggtgctgtgactgagcagggatatctcaatctcggtggacgccagactgctcgcaccctgatgtacaa

SEQ ID NO: 18772 - DNA, 80 bp, synthetic construct
  misc_feature 1..80: note = Synthetic: >HCV.A15-cand-5850-5929
  source 1..80: mol_type = other DNA
cttcccaacaagggcaggtcagtgtggaggagttatcacgtgcactggtaaggtcatcgggatgcatgttggtgggaacg

SEQ ID NO: 18773 - DNA, 80 bp, synthetic construct
  misc_feature 1..80: note = Synthetic: >HCV.A15-cand-5930-6009
  source 1..80: mol_type = other DNA
gttcacatgggttcgcagcagccctaaaacgatcctatttcactcagagtcaaggtgagatccagtggatgagaccatca

SEQ ID NO: 18774 - DNA, 80 bp, synthetic construct
  misc_feature 1..80: note = Synthetic: >HCV.A15-cand-6010-6089
  source 1..80: mol_type = other DNA
aaagaagtgggctaccccatcatcaatgccccgtctaaaaccaaactggagcccagtgcattccactatgtgtttgaagg

SEQ ID NO: 18775 - DNA, 80 bp, synthetic construct
  misc_feature 1..80: note = Synthetic: >HCV.A16-cand-750-829
  source 1..80: mol_type = other DNA
tcacaagtctccactcagcgatccgggtcacatgagaactcaaactctgcatcggagggctcgaccataaattacacaac

SEQ ID NO: 18776 - DNA, 80 bp, synthetic construct
  misc_feature 1..80: note = Synthetic: >HCV.A16-cand-780-859
  source 1..80: mol_type = other DNA
catgagaactcaaactctgcatcggagggctcgaccataaattacacaactataaactactacaaggatgcatacgctgc

SEQ ID NO: 18777 - DNA, 80 bp, synthetic construct
  misc_feature 1..80: note = Synthetic: >HCV.A16-cand-880-959
  source 1..80: mol_type = other DNA
tgtcccaagacccgaagaaatttactgaccctgtcatggacgttatacatgagatggccccaccgctaaagtctccaagc

SEQ ID NO: 18778 - DNA, 80 bp, synthetic construct
  misc_feature 1..80: note = Synthetic: >HCV.A16-cand-960-1039
  source 1..80: mol_type = other DNA
gctgaggcatgtggttacagtgatcgtgtggctcagcttaccattgggaactccaccatcacgacacaggaagcagctaa

SEQ ID NO: 18779 - DNA, 80 bp, synthetic construct
  misc_feature 1..80: note = Synthetic: >HCV.A16-cand-1060-1139
  source 1..80: mol_type = other DNA
agtggcctgagtactgcccagacacagatgcaacggcagtcgacaaacccacacgacctgacgtgtcagtgaacagattt

SEQ ID NO: 18780 - DNA, 80 bp, synthetic construct
  misc_feature 1..80: note = Synthetic: >HCV.A16-cand-1120-1199
  source 1..80: mol_type = other DNA
acgtgtcagtgaacagatttttcacgttagacactaaatcttgggccaaggattcaaagggttggtattggaaattccct

SEQ ID NO: 18781 - DNA, 80 bp, synthetic construct
  misc_feature 1..80: note = Synthetic: >HCV.A16-cand-1200-1279
  source 1..80: mol_type = other DNA
gatgttttgacagaggtaggtgtttttggtcaaaatgctcagttccactacctgtatcgatctgggttttgcgtgcacgt

SEQ ID NO: 18782 - DNA, 80 bp, synthetic construct
  misc_feature 1..80: note = Synthetic: >HCV.A16-cand-1280-1359
  source 1..80: mol_type = other DNA
tcagtgcaacgcaagtaaatttcaccaaggtgctttactggtggctgtgctgcctgagtatgtactcggcactatcgcag

SEQ ID NO: 18783 - DNA, 80 bp, synthetic construct
  misc_feature 1..80: note = Synthetic: >HCV.A16-cand-1360-1439
  source 1..80: mol_type = other DNA
gagggaccgggaacgagaattctcatcctccctacgccactacacagcctggtcaggttggtgcagttctgacgcaccct

SEQ ID NO: 18784 - DNA, 80 bp, synthetic construct
  misc_feature 1..80: note = Synthetic: >HCV.A16-cand-1440-1519
  source 1..80: mol_type = other DNA
tacgtgctagatgcagggatccctttgagccaattaactgtgtgcccacaccagtggattaacttaagaactaataattg

SEQ ID NO: 18785 - DNA, 80 bp, synthetic construct
  misc_feature 1..80: note = Synthetic: >HCV.A16-cand-1520-1599
  source 1..80: mol_type = other DNA
tgcaaccattatagttccatatatgaacacagttccttttgactcagctctcaaccactgcaactttggtctactggtca

SEQ ID NO: 18786 - DNA, 80 bp, synthetic construct
  misc_feature 1..80: note = Synthetic: >HCV.A16-cand-1610-1689
  source 1..80: mol_type = other DNA
gccattggatttcaacacaggtgccacatctgaaattcccattacagtcaccatagctcccatgtgtgcggaatttgcgg

SEQ ID NO: 18787 - DNA, 80 bp, synthetic construct
  misc_feature 1..80: note = Synthetic: >HCV.A16-cand-1690-1769
  source 1..80: mol_type = other DNA
gtctgcgccaggcagtaaagcaaggtataccaacagagctcaaacctggtaccaatcagtttcttactactgatgatggt

SEQ ID NO: 18788 - DNA, 80 bp, synthetic construct
  misc_feature 1..80: note = Synthetic: >HCV.A16-cand-1740-1819
  source 1..80: mol_type = other DNA
accaatcagtttcttactactgatgatggtgtctccgcaccaattctgccaggtttccatccaactccacctatacacat

SEQ ID NO: 18789 - DNA, 80 bp, synthetic construct
  misc_feature 1..80: note = Synthetic: >HCV.A16-cand-1850-1929
  source 1..80: mol_type = other DNA
atgcagagtggagaccatcctggaagttaacaacctaaagaccaatgagaccacccccatgcagcgcttgtgctttccag

SEQ ID NO: 18790 - DNA, 80 bp, synthetic construct
  misc_feature 1..80: note = Synthetic: >HCV.A16-cand-1930-2009
  source 1..80: mol_type = other DNA
tgtcggtgcagagtaaaacgggcgaattatgtgctgcctttagagcagaccctggaagagatggtccgtggcagtccaca

SEQ ID NO: 18791 - DNA, 80 bp, synthetic construct
  misc_feature 1..80: note = Synthetic: >HCV.A19-cand-3240-3319
  source 1..80: mol_type = other DNA
tgtaaaagtgtggtgccctagaccacccagagctgttgcttacaatggaccaactgtgaatttttcagaaaacccatcag

SEQ ID NO: 18792 - DNA, 80 bp, synthetic construct
  misc_feature 1..80: note = Synthetic: >HCV.A19-cand-3320-3399
  source 1..80: mol_type = other DNA
ttatgacacaggtcgctgatatcagaacttatggatttggacaccaaaacaaggcagtctacactgccggatataaaatt

SEQ ID NO: 18793 - DNA, 80 bp, synthetic construct
  misc_feature 1..80: note = Synthetic: >HCV.A19-cand-3400-3479
  source 1..80: mol_type = other DNA
tgtaattaccatttggccactccagaagacatggaaaaagctgtcaacatcatgtgggacagagatcttctagtctgtga

SEQ ID NO: 18794 - DNA, 80 bp, synthetic construct
  misc_feature 1..80: note = Synthetic: >HCV.A19-cand-3480-3559
  source 1..80: mol_type = other DNA
gagtggtgcacaaggcaccgacaccattgcaaggtgttcatgcaaagcaggaatttactactgtgagtctaagaggaaat

SEQ ID NO: 18795 - DNA, 80 bp, synthetic construct
  misc_feature 1..80: note = Synthetic: >HCV.A19-cand-3560-3639
  source 1..80: mol_type = other DNA
attaccccattacagtttgtggaccaacattccaatacatggaggctaatgacttctatccagctagataccagtcccac

SEQ ID NO: 18796 - DNA, 80 bp, synthetic construct
  misc_feature 1..80: note = Synthetic: >HCV.A19-cand-3640-3719
  source 1..80: mol_type = other DNA
atgttaattggttatggctttgccaatcctggtgactgtggtgggatcctcagatgtcaacatggagtgatgggcatcat

SEQ ID NO: 18797 - DNA, 80 bp, synthetic construct
  misc_feature 1..80: note = Synthetic: >HCV.A19-cand-3720-3799
  source 1..80: mol_type = other DNA
cactgctggtggtgaaggagtcgtggcgtttgcagacattagagacctgtacatgtatgaggaggaagccatggaacaag

SEQ ID NO: 18798 - DNA, 80 bp, synthetic construct
  misc_feature 1..80: note = Synthetic: >HCV.A19-cand-3800-3879
  source 1..80: mol_type = other DNA
gtgtcacagattatgtcaatagactaggaatggcatttggtgctggctttagcgctgaagtggctaacaaaatctcagaa

SEQ ID NO: 18799 - DNA, 80 bp, synthetic construct
  misc_feature 1..80: note = Synthetic: >HCV.A19-cand-3880-3959
  source 1..80: mol_type = other DNA
attcagagcacagttcagagtgttcttacagaaaaactcctgaaaaatctcataaaaattgtttcagcccttgttattgt

SEQ ID NO: 18800 - DNA, 80 bp, synthetic construct
  misc_feature 1..80: note = Synthetic: >HCV.A19-cand-3960-4039
  source 1..80: mol_type = other DNA
agccagaaattatgaagattcaattacagtcttggccacactctccttactaggatgtgatgcctctccatggcaatggc

SEQ ID NO: 18801 - DNA, 80 bp, synthetic construct
  misc_feature 1..80: note = Synthetic: >HCV.A19-cand-4040-4119
  source 1..80: mol_type = other DNA
ttaaggagaaactctgtaacatgattggcgtcccttacgtcatgagacaaggagactcctggttaaagaagtttacagaa

SEQ ID NO: 18802 - DNA, 80 bp, synthetic construct
  misc_feature 1..80: note = Synthetic: >HCV.A19-cand-4120-4199
  source 1..80: mol_type = other DNA
gcttgtaatgctgccaaaggattggaatggattgcaaacaaaatcagtaagttcattgattggattaaggaaaaagtgct

SEQ ID NO: 18803 - DNA, 80 bp, synthetic construct
  misc_feature 1..80: note = Synthetic: >HCV.A19-cand-4200-4279
  source 1..80: mol_type = other DNA
cccagaggcgaaagataaactggaatatctttctaaattaaaacaacttgaaatgatagaaaatcagatggctacactac

SEQ ID NO: 18804 - DNA, 80 bp, synthetic construct
  misc_feature 1..80: note = Synthetic: >HCV.A19-cand-4280-4359
  source 1..80: mol_type = other DNA
atcaatcatgtcccagtcaagaggaacaggaagttctttttaacaacatcaggtggctagcaataaaagcaagaaagttt

SEQ ID NO: 18805 - DNA, 80 bp, synthetic construct
  misc_feature 1..80: note = Synthetic: >HCV.A19-cand-4360-4439
  source 1..80: mol_type = other DNA
gcacctttgtatgcagctgaagcccgtagaatatttaagttggaaacatctatcaacaattatgtacaattcaagaccaa

SEQ ID NO: 18806 - DNA, 80 bp, synthetic construct
  misc_feature 1..80: note = Synthetic: >HCV.A19-cand-4440-4519
  source 1..80: mol_type = other DNA
acaccgcattgaaccagtatgtttgttgattcatggaacccccggtacaggcaaatcagttgctacaggcctcattggaa

SEQ ID NO: 18807 - DNA, 80 bp, synthetic construct
  misc_feature 1..80: note = Synthetic: >HCV.A2-cand-120-199
  source 1..80: mol_type = other DNA
cccgatcaatagtaggtgtagcactccagctgcatcgagatcaagcacttctgtctccccggaccgagtatcaatagact

SEQ ID NO: 18808 - DNA, 80 bp, synthetic construct
  misc_feature 1..80: note = Synthetic: >HCV.A2-cand-280-359
  source 1..80: mol_type = other DNA
gtgtttcgctcagcacttcccccgtgtagatcaggctgatgagtcaccgcgatccccacaggtgactgtggcggtggctg

SEQ ID NO: 18809 - DNA, 80 bp, synthetic construct
  misc_feature 1..80: note = Synthetic: >HCV.A2-cand-380-459
  source 1..80: mol_type = other DNA
ggcaacccataggacgctctaatacagacatggtgcgaagagcctattgagctaattggtagtcctccggcccctgaatg

SEQ ID NO: 18810 - DNA, 80 bp, synthetic construct
  misc_feature 1..80: note = Synthetic: >HCV.A2-cand-420-499
  source 1..80: mol_type = other DNA
agcctattgagctaattggtagtcctccggcccctgaatgcggctaatcctaactgcggagcacatgccctcaaaccagg

SEQ ID NO: 18811 - DNA, 80 bp, synthetic construct
  misc_feature 1..80: note = Synthetic: >HCV.A2-cand-600-679
  source 1..80: mol_type = other DNA
agaattgttaccatatagctattggattggccatccggtgactaacaaatcgctcatataccagtttgttggttttgttc

SEQ ID NO: 18812 - DNA, 80 bp, synthetic construct
  misc_feature 1..80: note = Synthetic: >HCV.A2-cand-660-739
  source 1..80: mol_type = other DNA
ccagtttgttggttttgttcccttatcacatacagctcataacaccctcttatatttactacaattgaatagcaagaaat

SEQ ID NO: 18813 - DNA, 80 bp, synthetic construct
  misc_feature 1..80: note = Synthetic: >HCV.A2-cand-760-839
  source 1..80: mol_type = other DNA
agcgctccggttcccatgaaacgagcaacgtagcacgagacggatccaccatcaacttcaccaacataaactattacaag

SEQ ID NO: 18814 - DNA, 80 bp, synthetic construct
  misc_feature 1..80: note = Synthetic: >HCV.A2-cand-820-899
  source 1..80: mol_type = other DNA
ccaacataaactattacaaggactcctatgctgcttcagcggctaaacatgatttcacccaggatccgggtaaatttaca

SEQ ID NO: 18815 - DNA, 80 bp, synthetic construct
  misc_feature 1..80: note = Synthetic: >HCV.A2-cand-890-969
  source 1..80: mol_type = other DNA
taaatttacacagcccgttcttgatgctcttcgcgaggctgtaccaccactacagtcacccagtgcagaggcatgtggct

SEQ ID NO: 18816 - DNA, 80 bp, synthetic construct
  misc_feature 1..80: note = Synthetic: >HCV.A2-cand-970-1049
  source 1..80: mol_type = other DNA
acagtgatagggtagcccaattgactgttggcaactccacaatcacgactcaggaggctgcaaatatcatagtatcttac

SEQ ID NO: 18817 - DNA, 80 bp, synthetic construct
  misc_feature 1..80: note = Synthetic: >HCV.A2-cand-1050-1129
  source 1..80: mol_type = other DNA
gctgagtggccagagtactgccctgatacagacgccacagcggtagataagcccactcgccccgatgtgtcagtgaacag

SEQ ID NO: 18818 - DNA, 80 bp, synthetic construct
  misc_feature 1..80: note = Synthetic: >HCV.A2-cand-1130-1209
  source 1..80: mol_type = other DNA
attctatactatgccggcaacattatgggagacagagtcaaaaggttggtattggaagttccctgacctgctcaatgaga

SEQ ID NO: 18819 - DNA, 80 bp, synthetic construct
  misc_feature 1..80: note = Synthetic: >HCV.A2-cand-1220-1299
  source 1..80: mol_type = other DNA
cggacagaacgcacagtaccactacttgtacagatcaggcttttgcattcacgtacaatgtaatgccagcaagtttcacc

SEQ ID NO: 18820 - DNA, 80 bp, synthetic construct
  misc_feature 1..80: note = Synthetic: >HCV.A2-cand-1290-1369
  source 1..80: mol_type = other DNA
aagtttcaccagggtgctctcctagtagctgtgatcccggaattcgttgttgctgagcaggacgccactcaaaaacctaa

SEQ ID NO: 18821 - DNA, 80 bp, synthetic construct
  misc_feature 1..80: note = Synthetic: >HCV.A2-cand-1370-1449
  source 1..80: mol_type = other DNA
tacagcaaaacaccccgctttagaagccacacaacctggaaagaaaggcagggcatttatacatccatacgttcttgatt

SEQ ID NO: 18822 - DNA, 80 bp, synthetic construct
  misc_feature 1..80: note = Synthetic: >HCV.A2-cand-1470-1549
  source 1..80: mol_type = other DNA
gctctagtgttcccccatcagtggataaatctgcgcaccaacaattgtgctacaattgtggttccttacatcaacgcatt

SEQ ID NO: 18823 - DNA, 80 bp, synthetic construct
  misc_feature 1..80: note = Synthetic: >HCV.B2-cand-2220-2299
  source 1..80: mol_type = other DNA
tccagctgtgtgttgtgtgtgccctggattagccaaacacattacaggtacacagtaaaagatgagtatactgatagtgg

SEQ ID NO: 18824 - DNA, 80 bp, synthetic construct
  misc_feature 1..80: note = Synthetic: >HCV.B2-cand-2290-2369
  source 1..80: mol_type = other DNA
ctgatagtggttacattacttgctggtatcaaacaaatgtcatagcaccggctgatgcactatccacgtgctacataatg

SEQ ID NO: 18825 - DNA, 80 bp, synthetic construct
  misc_feature 1..80: note = Synthetic: >HCV.B2-cand-2370-2449
  source 1..80: mol_type = other DNA
tgcatggtttctgcctgtaacgacttttcagtgcgcatgttgcgtgacacccgattcatcaagcaaacagctttctatca

SEQ ID NO: 18826 - DNA, 80 bp, synthetic construct
  misc_feature 1..80: note = Synthetic: >HCV.B2-cand-2450-2529
  source 1..80: mol_type = other DNA
aagcccagtggaagattccatcgagaggagcataggcagggtagctgacactattggcagtggaccgtctaactcagagg

SEQ ID NO: 18827 - DNA, 80 bp, synthetic construct
  misc_feature 1..80: note = Synthetic: >HCV.B2-cand-2530-2609
  source 1..80: mol_type = other DNA
ccataccagcactcactgcagtcgagacaggacacacttcacaagttacgcccagtgacacgatgcagaccaggcatgtg

SEQ ID NO: 18828 - DNA, 80 bp, synthetic construct
  misc_feature 1..80: note = Synthetic: >HCV.B2-cand-2610-2689
  source 1..80: mol_type = other DNA
cgcaactaccactcaagatcggaatccagtgtggagaacttcctcgcgcggtcggcatgtgtgttctatacaacatacac

SEQ ID NO: 18829 - DNA, 80 bp, synthetic construct
  misc_feature 1..80: note = Synthetic: >HCV.B2-cand-2690-2769
  source 1..80: mol_type = other DNA
caacagcaagaatgccgccaaagagaaaaagttcgcgacgtggaaggtgagtgttagacaagctgcgcagttgagaagga

SEQ ID NO: 18830 - DNA, 80 bp, synthetic construct
  misc_feature 1..80: note = Synthetic: >HCV.B2-cand-2770-2849
  source 1..80: mol_type = other DNA
agctggagatgttcacgtacttgcgctgtgacattgagctcacattcgtcataaccagcgcacaagatccatcgactgcc

SEQ ID NO: 18831 - DNA, 80 bp, synthetic construct
  misc_feature 1..80: note = Synthetic: >HCV.B2-cand-2850-2929
  source 1..80: mol_type = other DNA
accaatctagacgtgccagtgctaacccatcagataatgtatgtcccgcctggtggcccagtcccagagactgtggacga

SEQ ID NO: 18832 - DNA, 80 bp, synthetic construct
  misc_feature 1..80: note = Synthetic: >HCV.B2-cand-2930-3009
  source 1..80: mol_type = other DNA
ctacaattggcagacatcaacaaaccccagtctcttttggaccgaagggaatgcacctccacgcatgtcgattcccttta

SEQ ID NO: 18833 - DNA, 80 bp, synthetic construct
  misc_feature 1..80: note = Synthetic: >HCV.B2-cand-3010-3089
  source 1..80: mol_type = other DNA
tgagcataggcaatgcatacagcatgttttatgatggatggtctgagtttagacatgatggtgtgtatggtttgaacacg

SEQ ID NO: 18834 - DNA, 80 bp, synthetic construct
  misc_feature 1..80: note = Synthetic: >HCV.B2-cand-3090-3169
  source 1..80: mol_type = other DNA
ctcaataacatgggcacaatatacgccagacatgtcaatgctgataacccaggtagtattaccagcacagtgagaatata

SEQ ID NO: 18835 - DNA, 80 bp, synthetic construct
  misc_feature 1..80: note = Synthetic: >HCV.B2-cand-3170-3249
  source 1..80: mol_type = other DNA
cttcaagcccaaacatgtcaaggcgtgggtcccgcgcccaccccgtctagctcaatatctcaaagccaacaatgtgaatt

SEQ ID NO: 18836 - DNA, 80 bp, synthetic construct
  misc_feature 1..80: note = Synthetic: >HCV.B2-cand-3210-3289
  source 1..80: mol_type = other DNA
ccccgtctagctcaatatctcaaagccaacaatgtgaattttgagataactgatgtgacagagaagagggacagtctcgt

SEQ ID NO: 18837 - DNA, 80 bp, synthetic construct
  misc_feature 1..80: note = Synthetic: >HCV.B2-cand-3330-3409
  source 1..80: mol_type = other DNA
gtgggaaattatagagtggtgaatagacacctagccacacacaatgattggcagaattgtgtgtgggaggattataacag

SEQ ID NO: 18838 - DNA, 80 bp, synthetic construct
  misc_feature 1..80: note = Synthetic: >HCV.B2-cand-3390-3469
  source 1..80: mol_type = other DNA
gtgtgggaggattataacagagaccttttagtgagcaccactacagcccatggatgtgacgtcattgccaggtgtcaatg

SEQ ID NO: 18839 - DNA, 80 bp, synthetic construct
  misc_feature 1..80: note = Synthetic: >HCV.B5-cand-1020-1099
  source 1..80: mol_type = other DNA
ctcaggagtgtgcaaatgtggtggtaggatatggagtgtggcccacctatttaaaggatgatgaagcaacagcagaagac

SEQ ID NO: 18840 - DNA, 80 bp, synthetic construct
  misc_feature 1..80: note = Synthetic: >HCV.B5-cand-1100-1179
  source 1..80: mol_type = other DNA
caacccactcaaccagacgtggccacgtgcaggttttacacacttgaatccgtaatgtggcaacagagctcaccgggatg

SEQ ID NO: 18841 - DNA, 80 bp, synthetic construct
  misc_feature 1..80: note = Synthetic: >HCV.B5-cand-1180-1259
  source 1..80: mol_type = other DNA
gtggtggaaatttcccgacgcactgtcaaacatgggtttgttcgggcaaaacatgcaataccattaccttggaagagctg

SEQ ID NO: 18842 - DNA, 80 bp, synthetic construct
  misc_feature 1..80: note = Synthetic: >HCV.B5-cand-1220-1299
  source 1..80: mol_type = other DNA
ttcgggcaaaacatgcaataccattaccttggaagagctggatacacggtgcacgtgcagtgcaacgcatccaaatttca

SEQ ID NO: 18843 - DNA, 80 bp, synthetic construct
  misc_feature 1..80: note = Synthetic: >HCV.B5-cand-1340-1419
  source 1..80: mol_type = other DNA
atggggtgcgccacgttagccaataaacctgaccagaagagcctgagcaacggggagaccgccaacatgtttgaatccca

SEQ ID NO: 18844 - DNA, 80 bp, synthetic construct
  misc_feature 1..80: note = Synthetic: >HCV.B5-cand-1480-1559
  source 1..80: mol_type = other DNA
agttggcaatctgaccatattcccgcatcagtggattaacctgcgcactaacaatagtgcgacgattgtcatgccataca

SEQ ID NO: 18845 - DNA, 80 bp, synthetic construct
  misc_feature 1..80: note = Synthetic: >HCV.B5-cand-1500-1579
  source 1..80: mol_type = other DNA
tcccgcatcagtggattaacctgcgcactaacaatagtgcgacgattgtcatgccatacataaatagtgtgcccatggat

SEQ ID NO: 18846 - DNA, 80 bp, synthetic construct
  misc_feature 1..80: note = Synthetic: >HCV.B5-cand-1580-1659
  source 1..80: mol_type = other DNA
aacatgttcaggcacaataacttcacccttatgatcatcccatttgccccgctgagttatagcacaggtgctaccacata

SEQ ID NO: 18847 - DNA, 80 bp, synthetic construct
  misc_feature 1..80: note = Synthetic: >HCV.B5-cand-1660-1739
  source 1..80: mol_type = other DNA
cgtgccaattacagtgacagtggcgccaatgtgtgctgaatacaatgggttgcgcttggccggcaagcagggcctgccca

SEQ ID NO: 18848 - DNA, 80 bp, synthetic construct
  misc_feature 1..80: note = Synthetic: >HCV.B5-cand-1740-1819
  source 1..80: mol_type = other DNA
caatgttaacacctggtagcaaccagtttctcacatctgatgatttccagtctccttcagccatgccacagtttgacgtc

SEQ ID NO: 18849 - DNA, 80 bp, synthetic construct
  misc_feature 1..80: note = Synthetic: >HCV.B5-cand-1820-1899
  source 1..80: mol_type = other DNA
acccctgaaatggatatcccagggcaggtgaacaacttgatggaaatcgcagaagtggactccgtggtacctgttaacaa

SEQ ID NO: 18850 - DNA, 80 bp, synthetic construct
  misc_feature 1..80: note = Synthetic: >HCV.B5-cand-1910-1989
  source 1..80: mol_type = other DNA
aaagtgttatccattgagtcataccagatccctgttcaatcgaactcaacaaacggttcccaggtctttgggtttccact

SEQ ID NO: 18851 - DNA, 80 bp, synthetic construct
  misc_feature 1..80: note = Synthetic: >HCV.B5-cand-1950-2029
  source 1..80: mol_type = other DNA
cgaactcaacaaacggttcccaggtctttgggtttccactgatcccaggagctagtagtgtattgaacaggacactgttg

SEQ ID NO: 18852 - DNA, 80 bp, synthetic construct
  misc_feature 1..80: note = Synthetic: >HCV.B5-cand-2040-2119
  source 1..80: mol_type = other DNA
tgaattactacacccattggtcaggcagcatcaagttaacattcatgttctgtgggtcagcaatggcaacgggtaaattc

SEQ ID NO: 18853 - DNA, 80 bp, synthetic construct
  misc_feature 1..80: note = Synthetic: >HCV.B5-cand-2120-2199
  source 1..80: mol_type = other DNA
ctgctagcgtattcaccaccaggtgctggtgcaccgactacacggaaggaggcaatgctgggcactcatgtgatctggga

SEQ ID NO: 18854 - DNA, 80 bp, synthetic construct
  misc_feature 1..80: note = Synthetic: >HCV.B5-cand-2210-2289
  source 1..80: mol_type = other DNA
caatcgagctgcgtgttgtgcatcccatggatcagccaaacgcactacagatacgtggtggtggatgaatatactgctgg

SEQ ID NO: 18855 - DNA, 80 bp, synthetic construct
  misc_feature 1..80: note = Synthetic: >HCV.B5-cand-3550-3629
  source 1..80: mol_type = other DNA
gagtgagtactaccctaagagataccagacacatgtcctgcttgccgtgggcttttcagagccaggagactgtggaggta

SEQ ID NO: 18856 - DNA, 80 bp, synthetic construct
  misc_feature 1..80: note = Synthetic: >HCV.B5-cand-3630-3709
  source 1..80: mol_type = other DNA
tcctgagatgcgaacatggtgtcgttggtatcgtaaccatgggtggtgagggcgttgtcggctttgccgacgtgcgtgac

SEQ ID NO: 18857 - DNA, 80 bp, synthetic construct
  misc_feature 1..80: note = Synthetic: >HCV.B5-cand-3710-3789
  source 1..80: mol_type = other DNA
cttctatggttggaggatgatgcaatggagcagggtgtgaaagactacgtggaacagcttggaaatgcttttggctctgg

SEQ ID NO: 18858 - DNA, 80 bp, synthetic construct
  misc_feature 1..80: note = Synthetic: >HCV.B5-cand-3790-3869
  source 1..80: mol_type = other DNA
cttcaccaaccaaatttgtgagcaggttaaccttctcaaagaaacattgattggtcaagattccatcctggagaagtccc

SEQ ID NO: 18859 - DNA, 80 bp, synthetic construct
  misc_feature 1..80: note = Synthetic: >HCV.B5-cand-3960-4039
  source 1..80: mol_type = other DNA
ttggctgcacttcatcaccgtggcgctggcttaagcaaaaggtgtcacaatattacgggatacccatggctgagcgtcaa

SEQ ID NO: 18860 - DNA, 80 bp, synthetic construct
  misc_feature 1..80: note = Synthetic: >HCV.B5-cand-4040-4119
  source 1..80: mol_type = other DNA
aacaacgggtggctcaagaagttcacggaaatgaccaatgcttgcaaagggatggaatggatcgcaatcaaaatccaaaa

SEQ ID NO: 18861 - DNA, 80 bp, synthetic construct
  misc_feature 1..80: note = Synthetic: >HCV.B5-cand-4120-4199
  source 1..80: mol_type = other DNA
atttatagattggctcaaggttaaaatcttaccggaagtgaaggagaagcatgaattcttgaccaggcttaagcaactcc

SEQ ID NO: 18862 - DNA, 80 bp, synthetic construct
  misc_feature 1..80: note = Synthetic: >HCV.B5-cand-4200-4279
  source 1..80: mol_type = other DNA
cacttctggaaagccaaattgccaccattgagcaaagtgcaccatcccagggtgaccaggagcagcttttctcaaatgtc

SEQ ID NO: 18863 - DNA, 80 bp, synthetic construct
  misc_feature 1..80: note = Synthetic: >HCV.B5-cand-4280-4359
  source 1..80: mol_type = other DNA
caatactttgcccactattgcagaaaatacgctcctctatacgctgctgaggccaaaagagtgttcgcccttgaaaagaa

SEQ ID NO: 18864 - DNA, 80 bp, synthetic construct
  misc_feature 1..80: note = Synthetic: >HCV.B5-cand-4350-4429
  source 1..80: mol_type = other DNA
ttgaaaagaaaatgagcaattacatacagttcaagtccaaatgccgtattgaacctgtatgcttgctcctgcatgggagc

SEQ ID NO: 18865 - DNA, 80 bp, synthetic construct
  misc_feature 1..80: note = Synthetic: >HCV.B5-cand-4440-4519
  source 1..80: mol_type = other DNA
gaaaatcagtcgccaccaacctaattgggcgatcactggctgagaagcttaacagctcagtgtactccttgccaccagac

SEQ ID NO: 18866 - DNA, 80 bp, synthetic construct
  misc_feature 1..80: note = Synthetic: >HCV.B5-cand-4520-4599
  source 1..80: mol_type = other DNA
ccagatcactttgatggttacaaacaacaggccgtcgtgatcatggatgacctatgccaaaacccagatgggaaggacgt

SEQ ID NO: 18867 - DNA, 80 bp, synthetic construct
  misc_feature 1..80: note = Synthetic: >HCV.B5-cand-4600-4679
  source 1..80: mol_type = other DNA
gtccctgttttgtcaaatggtgtccagtgtggattttgtaccaccaatggctgcactggaagagaaaggcattctattca

SEQ ID NO: 18868 - DNA, 80 bp, synthetic construct
  misc_feature 1..80: note = Synthetic: >HCV.B5-cand-4660-4739
  source 1..80: mol_type = other DNA
agagaaaggcattctattcacctccccttttgtcctggcatccacaaatgcaggctccattaatgcaccaacagtctcag

SEQ ID NO: 18869 - DNA, 80 bp, synthetic construct
  misc_feature 1..80: note = Synthetic: >HCV.B5-cand-4740-4819
  source 1..80: mol_type = other DNA
acagcagggctctagccaggaggttccactttgacatgaacattgaggttatttcaatgtacagtcaaaatggaaaaatc

SEQ ID NO: 18870 - DNA, 80 bp, synthetic construct
  misc_feature 1..80: note = Synthetic: >HCV.B5-cand-5010-5089
  source 1..80: mol_type = other DNA
ttgaggcactgttccaaggcccaccagtgtacagggagatcaagattagtgttgcacctgaaacccccccaccaccagca

SEQ ID NO: 18871 - DNA, 80 bp, synthetic construct
  misc_feature 1..80: note = Synthetic: >LR861845.1-cand-1900-1979
  source 1..80: mol_type = other DNA
agtggatacaaagactgacaattattcaacatggtattgacgatagtaattttgatttgtcagacatggtgcaatgggca

SEQ ID NO: 18872 - DNA, 80 bp, synthetic construct
  misc_feature 1..80: note = Synthetic: >LR861845.1-cand-1980-2059
  source 1..80: mol_type = other DNA
tttgataatgaccttacagatgaaagtgatatggcatttcaatatgcccaattagcagactgcaacagtaatgcagctgc

SEQ ID NO: 18873 - DNA, 80 bp, synthetic construct
  misc_feature 1..80: note = Synthetic: >LR861845.1-cand-2060-2139
  source 1..80: mol_type = other DNA
atttttaaaaagtaactgccaagccaaatatttaaaagattgtgctgtaatgtgtagacattataaaagagcacaaaaac

SEQ ID NO: 18874 - DNA, 80 bp, synthetic construct
  misc_feature 1..80: note = Synthetic: >LR861845.1-cand-2110-2189
  source 1..80: mol_type = other DNA
tgtgtagacattataaaagagcacaaaaacgccaaatgaatatgtctcaatggattaaatatagatgttccaaaatagat

SEQ ID NO: 18875 - DNA, 80 bp, synthetic construct
  misc_feature 1..80: note = Synthetic: >LR861845.1-cand-2220-2299
  source 1..80: mol_type = other DNA
ttcctaagatatcagggagtagaatttattagctttttaagggcactaaaggaatttcttaaaggaacaccaaaaaaaaa

SEQ ID NO: 18876 - DNA, 80 bp, synthetic construct
  misc_feature 1..80: note = Synthetic: >LR861845.1-cand-2300-2379
  source 1..80: mol_type = other DNA
ttgtatactgttatatggacctgcaaatacaggaaaatcgtattttggaatgagttttatacatttcctacaaggtgcaa

SEQ ID NO: 18877 - DNA, 80 bp, synthetic construct
  misc_feature 1..80: note = Synthetic: >LR861845.1-cand-2380-2459
  source 1..80: mol_type = other DNA
taatatcatttgtaaattcaaacagccatttttggttagaaccgttagcagatactaaggtagccatgttggatgatgcc

SEQ ID NO: 18878 - DNA, 80 bp, synthetic construct
  misc_feature 1..80: note = Synthetic: >LR861845.1-cand-2460-2539
  source 1..80: mol_type = other DNA
acacacacgtgttggacatattttgataattatatgagaaatgcattagatggtaatcctataagtatagacagaaagca

SEQ ID NO: 18879 - DNA, 80 bp, synthetic construct
  misc_feature 1..80: note = Synthetic: >LR861845.1-cand-2540-2619
  source 1..80: mol_type = other DNA
taaaccattattacagctaaaatgtcctccaatcctattaacatccaatattgatccagcaaaagataataaatggccat

SEQ ID NO: 18880 - DNA, 80 bp, synthetic construct
  misc_feature 1..80: note = Synthetic: >LR861845.1-cand-2620-2699
  source 1..80: mol_type = other DNA
atttagaaagtagggtgacggtatttacatttccacatgcatttccatttgataaaaatggtaatccagtatatgaaata

SEQ ID NO: 18881 - DNA, 80 bp, synthetic construct
  misc_feature 1..80: note = Synthetic: >LR861845.1-cand-2700-2779
  source 1..80: mol_type = other DNA
aatgataaaaattggaaatgtttttttgaaaggacatggtccagattagatttgcacgaggacgatgaagatgcagacac

SEQ ID NO: 18882 - DNA, 80 bp, synthetic construct
  misc_feature 1..80: note = Synthetic: >LR861845.1-cand-2780-2859
  source 1..80: mol_type = other DNA
cgaaggaatccctttcggaacgtttaagtgcgttacaggacaaaatactagaccactatgaaaatgacagtaaagacata

SEQ ID NO: 18883 - DNA, 80 bp, synthetic construct
  misc_feature 1..80: note = Synthetic: >LR861845.1-cand-2860-2939
  source 1..80: mol_type = other DNA
aacagccaaataagttattggcaacttatacgttgggaaaatgcaatactatttacagcaagggaacatggtattaccaa

SEQ ID NO: 18884 - DNA, 80 bp, synthetic construct
  misc_feature 1..80: note = Synthetic: >LR861845.1-cand-2940-3019
  source 1..80: mol_type = other DNA
actaaaccaccaggtggtgcctcctattaacatttcaaaaagcaaagcacataaagctattgaactgcaaatggccttaa

SEQ ID NO: 18885 - DNA, 80 bp, synthetic construct
  misc_feature 1..80: note = Synthetic: >LR861845.1-cand-3020-3099
  source 1..80: mol_type = other DNA
agggccttgcacaaagcaagtataacaatgaggaatggacactgcaagatacatgcgaggaactatggaatacagaaccg

SEQ ID NO: 18886 - DNA, 80 bp, synthetic construct
  misc_feature 1..80: note = Synthetic: >LR861845.1-cand-3100-3179
  source 1..80: mol_type = other DNA
tcgcagtgttttaaaaaaggcggtaaaaccgtgcacgtatactttgatggcaacaaggacaactgtatgaactatgtagt

SEQ ID NO: 18887 - DNA, 80 bp, synthetic construct
  misc_feature 1..80: note = Synthetic: >LR861845.1-cand-7100-7179
  source 1..80: mol_type = other DNA
catctactgcatctaggcctgccaaacgtgtacgtatacgtagtaagaaataatatgttagcacatatatgtatgtttgt

SEQ ID NO: 18888 - DNA, 80 bp, synthetic construct
  misc_feature 1..80: note = Synthetic: >LR861845.1-cand-7180-7259
  source 1..80: mol_type = other DNA
atgtatggttttgtatgttgtatgtatgtatgtatttgtgtgatatattactgtattttgtttgtttgcgtgcgtgtatg

SEQ ID NO: 18889 - DNA, 80 bp, synthetic construct
  misc_feature 1..80: note = Synthetic: >LR861845.1-cand-7260-7339
  source 1..80: mol_type = other DNA
tatgaatgtgccttgtggcatgtatggtgttactgtacataattgtggtattaaataaagtatgctaatagtgttgtgta

SEQ ID NO: 18890 - DNA, 80 bp, synthetic construct
  misc_feature 1..80: note = Synthetic: >LR861845.1-cand-7340-7419
  source 1..80: mol_type = other DNA
gggttgcacccttgtgagtaacaatactatttgtgtgtatgtgtattgctttgtaccctatattctttcctgtatttcaa

SEQ ID NO: 18891 - DNA, 80 bp, synthetic construct
  misc_feature 1..80: note = Synthetic: >LR861845.1-cand-7420-7499
  source 1..80: mol_type = other DNA
gttataaacttgcatactacacagcatccattttacttataatcctccattttgctgtgcaaccgatttcggttgcctgt

SEQ ID NO: 18892 - DNA, 80 bp, synthetic construct
  misc_feature 1..80: note = Synthetic: >LR861845.1-cand-7500-7579
  source 1..80: mol_type = other DNA
ggcttatatgtgaccttttaaacataatacctaaactggcacatttacaacccctacatagtttaacctactggcgcgcc

SEQ ID NO: 18893 - DNA, 80 bp, synthetic construct
  misc_feature 1..80: note = Synthetic: >LR861845.1-cand-7690-7769
  source 1..80: mol_type = other DNA
ggcacatattttagtctgtttttacctgtgctaattgtataattggcgtgtagaaccactttcttatccaacaatctgtc

SEQ ID NO: 18894 - DNA, 80 bp, synthetic construct
  misc_feature 1..80: note = Synthetic: >LR861845.1-cand-7770-7849
  source 1..80: mol_type = other DNA
tacttgttacataaactataaactgactcacttatacatacatagtttatgcaaccgaaaaaggttgggccctataacac

SEQ ID NO: 18895 - DNA, 80 bp, synthetic construct
  misc_feature 1..80: note = Synthetic: >LR862007.1-cand-10-89
  source 1..80: mol_type = other DNA
cggtgcatataaaggtagttgaaaagaaaagggcaacggcatggcacgctttgaggatcctacacaacgaccatacaaac

SEQ ID NO: 18896 - DNA, 80 bp, synthetic construct
  misc_feature 1..80: note = Synthetic: >LR862007.1-cand-80-159
  source 1..80: mol_type = other DNA
ccatacaaactgcctgatttgagcacaacattgaatattcctctgcatgatattcgcatcaattgtgtgttttgcaaagg

SEQ ID NO: 18897 - DNA, 80 bp, synthetic construct
  misc_feature 1..80: note = Synthetic: >LR862007.1-cand-170-249
  source 1..80: mol_type = other DNA
gaaagagaggtatttgaatttgcttttaatgacttatttatagtgtatagagactgtacaccgtatgcagcgtgtctgaa

SEQ ID NO: 18898 - DNA, 80 bp, synthetic construct
  misc_feature 1..80: note = Synthetic: >LR862007.1-cand-250-329
  source 1..80: mol_type = other DNA
atgcatttcattttatgcaagagtaagagaattaagatattatagagattccgtgtatggagaaacattagaggctgaaa

SEQ ID NO: 18899 - DNA, 80 bp, synthetic construct
  misc_feature 1..80: note = Synthetic: >LR862007.1-cand-330-409
  source 1..80: mol_type = other DNA
ccaagacaccgttacatgagctgctgatacgctgttatagatgcctaaaacctctatgtccaacagataaattaaagcat

SEQ ID NO: 18900 - DNA, 80 bp, synthetic construct
  misc_feature 1..80: note = Synthetic: >LR862007.1-cand-410-489
  source 1..80: mol_type = other DNA
ataactgaaaaaagaagattccataatatagctggaatatatacaggacagtgtcgtgggtgtcggacccgagcaagaca

SEQ ID NO: 18901 - DNA, 80 bp, synthetic construct
  misc_feature 1..80: note = Synthetic: >LR862007.1-cand-490-569
  source 1..80: mol_type = other DNA
cctaagacagcaacgacaagcgcgtagtgaaacactggtgtaaaacaatgcatggaccaaaagcaacactttgtgacatt

SEQ ID NO: 18902 - DNA, 80 bp, synthetic construct
  misc_feature 1..80: note = Synthetic: >LR862007.1-cand-570-649
  source 1..80: mol_type = other DNA
gttttagatttggaaccacaaaattatgaggaagttgaccttgtgtgctacgagcaattacctgactccgactccgagaa

SEQ ID NO: 18903 - DNA, 80 bp, synthetic construct
  misc_feature 1..80: note = Synthetic: >MG717392.1-cand-1310-1389
  source 1..80: mol_type = other DNA
cagaggataaattttatgtgccaacgtgttgaccaggatgttatagtatattgtaacggtcagaagaaagttatcttcac

SEQ ID NO: 18904 - DNA, 80 bp, synthetic construct
  misc_feature 1..80: note = Synthetic: >MG717392.1-cand-1370-1449
  source 1..80: mol_type = other DNA
cagaagaaagttatcttcactaaaacattagtcattggccagtgcatctatacattcaccagtcttttttctttgattcc

SEQ ID NO: 18905 - DNA, 80 bp, synthetic construct
  misc_feature 1..80: note = Synthetic: >MG717392.1-cand-1480-1559
  source 1..80: mol_type = other DNA
gtgtgtacctggcctgcatggctgggctacaactgcactactaatcaccttttgttttggatggttactaatacctacta

SEQ ID NO: 18906 - DNA, 80 bp, synthetic construct
  misc_feature 1..80: note = Synthetic: >MG717392.1-cand-1560-1639
  source 1..80: mol_type = other DNA
tcacaatgataatattaaaaatattaaggctccttacattttcctgttcgcactattctacagaatccaagtttaaagca

SEQ ID NO: 18907 - DNA, 80 bp, synthetic construct
  misc_feature 1..80: note = Synthetic: >MG717392.1-cand-1640-1719
  source 1..80: mol_type = other DNA
atccttgaaagggttaaagttgagtaccagaaaacaatgggttcaatggtatgtgatgtgtgtcaccatgagtgtgaaac

SEQ ID NO: 18908 - DNA, 80 bp, synthetic construct
  misc_feature 1..80: note = Synthetic: >MG717392.1-cand-1720-1799
  source 1..80: mol_type = other DNA
agcaaaagagctagaaactcataagaaaagctgtcctgaaggtcagtgtccatactgcatgacaatgacagaatccacag

SEQ ID NO: 18909 - DNA, 80 bp, synthetic construct
  misc_feature 1..80: note = Synthetic: >MG717392.1-cand-1800-1879
  source 1..80: mol_type = other DNA
agagtgctcttcaggctcatttttcaatttgtaagcttacaaataggtttcaggaaaatttaaaaaaatcacttaaacgc

SEQ ID NO: 18910 - DNA, 80 bp, synthetic construct
  misc_feature 1..80: note = Synthetic: >MG717392.1-cand-1870-1949
  source 1..80: mol_type = other DNA
acttaaacgccctgaagttaaacaaggatgctatagaacattgggtgtttttagatataagagtaggtgttatgttggtc

SEQ ID NO: 18911 - DNA, 80 bp, synthetic construct
  misc_feature 1..80: note = Synthetic: >MG717392.1-cand-1960-2039
  source 1..80: mol_type = other DNA
ggtccttcttacaactgaactcatagtttgggcagctagtgctgacacccctctgatggaatcaggatggtcagacacag

SEQ ID NO: 18912 - DNA, 80 bp, synthetic construct
  misc_feature 1..80: note = Synthetic: >MG717392.1-cand-2040-2119
  source 1..80: mol_type = other DNA
ctcatggtgtaggtattgtgcctatgaagactgacttggaattagattttgctttagcttcatcatcctcttatagctat

SEQ ID NO: 18913 - DNA, 80 bp, synthetic construct
  misc_feature 1..80: note = Synthetic: >MG717392.1-cand-2120-2199
  source 1..80: mol_type = other DNA
aggcggaaacttgtgaaccctgctaataaggaagaaaccctgccttttcacttccaactagataagcaggtcgttcatgc

SEQ ID NO: 18914 - DNA, 80 bp, synthetic construct
  misc_feature 1..80: note = Synthetic: >MG717392.1-cand-2190-2269
  source 1..80: mol_type = other DNA
tcgttcatgctgagatacaaaacttaggacactggatggatggcacatttaacatcaagacagcattccactgctatggg

SEQ ID NO: 18915 - DNA, 80 bp, synthetic construct
  misc_feature 1..80: note = Synthetic: >MG717392.1-cand-2280-2359
  source 1..80: mol_type = other DNA
agtatgcatacccatggcagactgccaagtgtttctttgaaaaggattatcaatatgagacaagctggggttgcaatcct

SEQ ID NO: 18916 - DNA, 80 bp, synthetic construct
  misc_feature 1..80: note = Synthetic: >MG717392.1-cand-2380-2459
  source 1..80: mol_type = other DNA
aactggctgtactgcttgcggagtgtatttagataaattaagatcagttgggaaggcttataagattgtttctctcaaat

SEQ ID NO: 18917 - DNA, 80 bp, synthetic construct
  misc_feature 1..80: note = Synthetic: >MG717392.1-cand-2450-2529
  source 1..80: mol_type = other DNA
tctctcaaatttacaaggaaggtttgtatacagttaggtacagaacaaacctgtaaacatatagatgtgaatgattgtct

SEQ ID NO: 18918 - DNA, 80 bp, synthetic construct
  misc_feature 1..80: note = Synthetic: >MG717392.1-cand-2530-2609
  source 1..80: mol_type = other DNA
tgtcacaccatctgtaaaggtttgtttgatcggtaccatttcaaaactgcaacccggagatacacttttgtttctaggcc

SEQ ID NO: 18919 - DNA, 80 bp, synthetic construct
  misc_feature 1..80: note = Synthetic: >NC_001611.1-cand-17980-18059
  source 1..80: mol_type = other DNA
ttgtataggagtcagacttgtattcaacatgcttttctataatcatttttagctatttcggcatcatccaatagtacatt

SEQ ID NO: 18920 - DNA, 80 bp, synthetic construct
  misc_feature 1..80: note = Synthetic: >NC_001611.1-cand-18060-18139
  source 1..80: mol_type = other DNA
ttccagattagcagaatagatattaatgtcgtatttgaacagagcctgtaacacctcaatgtctttattatctatagcca

SEQ ID NO: 18921 - DNA, 80 bp, synthetic construct
  misc_feature 1..80: note = Synthetic: >NC_001611.1-cand-18140-18219
  source 1..80: mol_type = other DNA
atttaatgtccggaatgaagagaaggaaattattggtgtttgacggcgtcatatagtcgagcaaaagaatcatcatatcc

SEQ ID NO: 18922 - DNA, 80 bp, synthetic construct
  misc_feature 1..80: note = Synthetic: >NC_001611.1-cand-18220-18299
  source 1..80: mol_type = other DNA
acgtgtccatttttatagtggtgtgaatacaactaaggagaatagccagatcaaaagtagatggtatttctgaaagaaag

SEQ ID NO: 18923 - DNA, 80 bp, synthetic construct
  misc_feature 1..80: note = Synthetic: >NC_001611.1-cand-18300-18379
  source 1..80: mol_type = other DNA
tatgatataatacttacatcattaagcatgacggtatgataaaatgaagttttccatccagttttcccatagaacataag

SEQ ID NO: 18924 - DNA, 80 bp, synthetic construct
  misc_feature 1..80: note = Synthetic: >NC_001611.1-cand-18380-18459
  source 1..80: mol_type = other DNA
tctccaatttttcttaaaacagttttaccgtttgtatgttaccactatcaaccacataatacaatacagtgttcccttgt

SEQ ID NO: 18925 - DNA, 80 bp, synthetic construct
  misc_feature 1..80: note = Synthetic: >NC_001611.1-cand-18460-18539
  source 1..80: mol_type = other DNA
cattaaattgtgaatcatccagtccactgaatagcaaaatttttactattttggtatcttccaatgtggctgcctaatgt

SEQ ID NO: 18926 - DNA, 80 bp, synthetic construct
  misc_feature 1..80: note = Synthetic: >NC_001611.1-cand-18540-18619
  source 1..80: mol_type = other DNA
aatggaaattcattctctagaagattttttaatgctccagcgttcaacaacgtacatactagacgcatgttattatcagc

SEQ ID NO: 18927 - DNA, 80 bp, synthetic construct
  misc_feature 1..80: note = Synthetic: >NC_001611.1-cand-18620-18699
  source 1..80: mol_type = other DNA
tattgcataatacaaggcactatgtccatggacatccgccttaaatgtatctttactagagagaaagcttttcagctgct

SEQ ID NO: 18928 - DNA, 80 bp, synthetic construct
  misc_feature 1..80: note = Synthetic: >NC_001611.1-cand-18780-18859
  source 1..80: mol_type = other DNA
cagaattaataatatctctaatagatttgattagtagatatatggctatcgcaaaacaacatatacacatttaataaaaa

SEQ ID NO: 18929 - DNA, 80 bp, synthetic construct
  misc_feature 1..80: note = Synthetic: >NC_001611.1-cand-18860-18939
  source 1..80: mol_type = other DNA
taatattcattaaggagattcagattccgccgtatccataaacaatattaaggagattctaccttacccataaacaatat

SEQ ID NO: 18930 - DNA, 80 bp, synthetic construct
  misc_feature 1..80: note = Synthetic: >NC_001611.1-cand-18940-19019
  source 1..80: mol_type = other DNA
aaatccagtaatatcatgtctaatgatgaacacaaatggtgtattaaattccagttcttcaggagatgatctcaccgtag

SEQ ID NO: 18931 - DNA, 80 bp, synthetic construct
  misc_feature 1..80: note = Synthetic: >NC_001611.1-cand-19390-19469
  source 1..80: mol_type = other DNA
tgtatttccttgtaatttagtaactacgctcatcatgggaaccgttttcgtgccgtacttattagtaaaactagtattgt

SEQ ID NO: 18932 - DNA, 80 bp, synthetic construct
  misc_feature 1..80: note = Synthetic: >NC_001611.1-cand-19470-19549
  source 1..80: mol_type = other DNA
gtgttttagtgatatcaaatggatattgccacgtacctttaaaatatatagtattaatgattgcccatagagtattattg

SEQ ID NO: 18933 - DNA, 80 bp, synthetic construct
  misc_feature 1..80: note = Synthetic: >NC_001611.1-cand-19550-19629
  source 1..80: mol_type = other DNA
tcgagcatagtagaatctactacattagacatacctgatctacgttctactatggaattaattttattaaccgcatctcg

SEQ ID NO: 18934 - DNA, 80 bp, synthetic construct
  misc_feature 1..80: note = Synthetic: >NC_001611.1-cand-19620-19699
  source 1..80: mol_type = other DNA
ccgcatctcgtctaaagtttaatctatataggccgaatctatgatattgttgataatacgacggtttaatacacacagta

SEQ ID NO: 18935 - DNA, 80 bp, synthetic construct
  misc_feature 1..80: note = Synthetic: >NC_001611.1-cand-26960-27039
  source 1..80: mol_type = other DNA
tgttattaacctccgcatacgcattacagtttttttctagcttggatacggcactaggtacatcatttagatctattcct

SEQ ID NO: 18936 - DNA, 80 bp, synthetic construct
  misc_feature 1..80: note = Synthetic: >NC_001611.1-cand-27720-27799
  source 1..80: mol_type = other DNA
gtagttcgtagattttaatgtataacagagccatctgtaaaaagataaactttatgtattgtaccaaagatttaaatcct

SEQ ID NO: 18937 - DNA, 80 bp, synthetic construct
  misc_feature 1..80: note = Synthetic: >NC_001611.1-cand-27850-27929
  source 1..80: mol_type = other DNA
gggaaaaattataatatttcctctttcgtattcgtagttagttcgcttttcatgttcgaaaaagtgaaacatgcggttaa

SEQ ID NO: 18938 - DNA, 80 bp, synthetic construct
  misc_feature 1..80: note = Synthetic: >NC_001611.1-cand-28160-28239
  source 1..80: mol_type = other DNA
gccaatgcacacacgattaattttttttcgtctccctttagattgttgtatagaaattttggtaccgtgaactccgccgt

SEQ ID NO: 18939 - DNA, 80 bp, synthetic construct
  misc_feature 1..80: note = Synthetic: >NC_001611.1-cand-28390-28469
  source 1..80: mol_type = other DNA
tgatgaattaatgtaatcattctcttctatctttagtagtgtttccctattaaaattcttaaaataatttaacaatctaa

SEQ ID NO: 18940 - DNA, 80 bp, synthetic construct
  misc_feature 1..80: note = Synthetic: >NC_001611.1-cand-28590-28669
  source 1..80: mol_type = other DNA
atgaatcattggcaacacccatttattgtacaaaaagccccaatttacaaataaaagtccaggtttgatagagacaaact

SEQ ID NO: 18941 - DNA, 80 bp, synthetic construct
  misc_feature 1..80: note = Synthetic: >NC_001611.1-cand-28630-28709
  source 1..80: mol_type = other DNA
caatttacaaataaaagtccaggtttgatagagacaaactattaactatcgtgtctctgtttttaacacctccacagttt

SEQ ID NO: 18942 - DNA, 80 bp, synthetic construct
  misc_feature 1..80: note = Synthetic: >NC_001611.1-cand-28880-28959
  source 1..80: mol_type = other DNA
gttagcatacaaattacaataatgcagaaactcagttaacatacaggaattatagtaagccaattccaattgctgtccgt

SEQ ID NO: 18943 - DNA, 80 bp, synthetic construct
  misc_feature 1..80: note = Synthetic: >NC_001611.1-cand-28960-29039
  source 1..80: mol_type = other DNA
attgtattagagtatcgatatgagtaatggtgtccttgcgtttttctgatagaatgcgagcagcgattttggcgttatca

SEQ ID NO: 18944 - DNA, 80 bp, synthetic construct
  misc_feature 1..80: note = Synthetic: >NC_001611.1-cand-29040-29119
  source 1..80: mol_type = other DNA
tttgatgatatgtttggaatgacgaatcctgtttctactaactttttggtaggacaaagtgaaacaatcaagaagatagc

SEQ ID NO: 18945 - DNA, 80 bp, synthetic construct
  misc_feature 1..80: note = Synthetic: >NC_001611.1-cand-29280-29359
  source 1..80: mol_type = other DNA
tgtccaagatagagagctcctttggtgaatccatctctatgtttcagtttaaccaagaaacagtcagctggtctaaaatt

SEQ ID NO: 18946 - DNA, 80 bp, synthetic construct
  misc_feature 1..80: note = Synthetic: >NC_001611.1-cand-29360-29439
  source 1..80: mol_type = other DNA
tccatctctatctaatacagcatccaacttgatgtcaggaactatgaccggtttaatgttatatgtaacattaagtaaat

SEQ ID NO: 18947 - DNA, 80 bp, synthetic construct
  misc_feature 1..80: note = Synthetic: >NC_001611.1-cand-29440-29519
  source 1..80: mol_type = other DNA
ccttaagttcataatcatcactgtcatcagttatgtacgatccaaacaatgtttctaccgacatagtggatacgaagata

SEQ ID NO: 18948 - DNA, 80 bp, synthetic construct
  misc_feature 1..80: note = Synthetic: >NC_001611.1-cand-29600-29679
  source 1..80: mol_type = other DNA
gttcatttttttaggagtatgacgcctagccagcatggaagagaattttctagatcctctcttcaacatctttaatctca

SEQ ID NO: 18949 - DNA, 80 bp, synthetic construct
  misc_feature 1..80: note = Synthetic: >NC_001611.1-cand-29680-29759
  source 1..80: mol_type = other DNA
atgggatgcaaaaccccatggtgtaacaactaacgataaaaataatattgtttttcactttttataattttaccatttga

SEQ ID NO: 18950 - DNA, 80 bp, synthetic construct
  misc_feature 1..80: note = Synthetic: >NC_001611.1-cand-29760-29839
  source 1..80: mol_type = other DNA
ctcatgacttcattgatatctttatacgagctacgaatatataattctttataactgaactgagatatatacactggatc

SEQ ID NO: 18951 - DNA, 80 bp, synthetic construct
  misc_feature 1..80: note = Synthetic: >NC_001611.1-cand-36740-36819
  source 1..80: mol_type = other DNA
tgtactctcttccctctatcatgttcacaactggtgtccacgatgataaatatctagagggaatataatatagtccatag

SEQ ID NO: 18952 - DNA, 80 bp, synthetic construct
  misc_feature 1..80: note = Synthetic: >NC_001611.1-cand-36980-37059
  source 1..80: mol_type = other DNA
taatgaggcttttaaacgcagagttctccaacaagtcaaaacataatactctgttggttttcttatatacaatattacga

SEQ ID NO: 18953 - DNA, 80 bp, synthetic construct
  misc_feature 1..80: note = Synthetic: >NC_001611.1-cand-37220-37299
  source 1..80: mol_type = other DNA
cgaacattaaccgtttcatcatcattggacaaaatccatatttcttaatgtaaagagtgatcaaatcattatgtttattg

SEQ ID NO: 18954 - DNA, 80 bp, synthetic construct
  misc_feature 1..80: note = Synthetic: >NC_001611.1-cand-37550-37629
  source 1..80: mol_type = other DNA
ctatataattattttgtaagatgatgttaactatgtgatctatataagtagtgtaataatttatgtatttcgatatatgt

SEQ ID NO: 18955 - DNA, 80 bp, synthetic construct
  misc_feature 1..80: note = Synthetic: >NC_001611.1-cand-37790-37869
  source 1..80: mol_type = other DNA
agtttttgacactatcttctgtcaattgattcttattcactatatctaagaaacggatagcgtccctaggacgaactact

SEQ ID NO: 18956 - DNA, 80 bp, synthetic construct
  misc_feature 1..80: note = Synthetic: >NC_001611.1-cand-37870-37949
  source 1..80: mol_type = other DNA
gccattaatatctctattatagcttctggatataattcatctattataccagaattaataggaactattccgtatttatc

SEQ ID NO: 18957 - DNA, 80 bp, synthetic construct
  misc_feature 1..80: note = Synthetic: >NC_001611.1-cand-38030-38109
  source 1..80: mol_type = other DNA
tagtgactatttcgttctctgaaaattggtaactcattctatatatgctttccttgttgatgaaggataggatatactca

SEQ ID NO: 18958 - DNA, 80 bp, synthetic construct
  misc_feature 1..80: note = Synthetic: >NC_001611.1-cand-38110-38189
  source 1..80: mol_type = other DNA
atagaatttgtaccaacaaactgttctcttatgaatcgtatatcatcatctgaaataatcatgtaaggcatacatttaac

SEQ ID NO: 18959 - DNA, 80 bp, synthetic construct
  misc_feature 1..80: note = Synthetic: >NC_001611.1-cand-38360-38439
  source 1..80: mol_type = other DNA
tataaaggactttgggtagataagtgggatgaaatcctattttaattaatgcaatagccttgtcctcgtgcagatatcca

SEQ ID NO: 18960 - DNA, 80 bp, synthetic construct
  misc_feature 1..80: note = Synthetic: >NC_001611.1-cand-38520-38599
  source 1..80: mol_type = other DNA
ctagtcgcgttaatagtactaaaatttgtatttttaatctatctcaataaaaaattaatatttatgatttaatgtataac

SEQ ID NO: 18961 - DNA, 80 bp, synthetic construct
  misc_feature 1..80: note = Synthetic: >NC_001611.1-cand-38600-38679
  source 1..80: mol_type = other DNA
tttactaactgttattgataactagaatcagaatctaatgatgacgtaaccaagaagtttatctacagccaatttagctg

SEQ ID NO: 18962 - DNA, 80 bp, synthetic construct
  misc_feature 1..80: note = Synthetic: >NC_001611.1-cand-38840-38919
  source 1..80: mol_type = other DNA
ggtgacagggttagcatttttccaatcaataatttttttagccggaataacatcatcaaaagacttatgatcctctctca

SEQ ID NO: 18963 - DNA, 80 bp, synthetic construct
  misc_feature 1..80: note = Synthetic: >NC_001611.1-cand-38920-38999
  source 1..80: mol_type = other DNA
ttgatttttcgcgggatacatcatctattatgacgtcagccatagtcatagcatccggcttatccgcctcagttgtcata

SEQ ID NO: 18964 - DNA, 80 bp, synthetic construct
  misc_feature 1..80: note = Synthetic: >NC_001611.1-cand-39000-39079
  source 1..80: mol_type = other DNA
aaccaacgaggaggaatatcgtcggagctgtacaccatagcactacgttgaagatcgtacagagctttattaacttctcg

SEQ ID NO: 18965 - DNA, 80 bp, synthetic construct
  misc_feature 1..80: note = Synthetic: >NC_001611.1-cand-39080-39159
  source 1..80: mol_type = other DNA
cttctccatattaagttgtctagttagttgtacagcagtaactccttcaagtccaatgtttttaatagcctcacatacaa

SEQ ID NO: 18966 - DNA, 80 bp, synthetic construct
  misc_feature 1..80: note = Synthetic: >NC_001611.1-cand-39160-39239
  source 1..80: mol_type = other DNA
tctctgcgtcagaacgctcgtcaatatagatcttagacatttttagagagaactaccgcaactagtaataaaactaatct

SEQ ID NO: 18967 - DNA, 80 bp, synthetic construct
  misc_feature 1..80: note = Synthetic: >NC_001611.1-cand-46740-46819
  source 1..80: mol_type = other DNA
tatttcagaacacagaactagttctctctcataatccatttccatcagtgactgtatcctcaaacatcctctatcgacgg

SEQ ID NO: 18968 - DNA, 80 bp, synthetic construct
  misc_feature 1..80: note = Synthetic: >NC_001611.1-cand-47140-47219
  source 1..80: mol_type = other DNA
ttgagaaattcatccatagtggcgttttgtatgttgcgtttctttggctcttctattaaccacatatctgcgacggagca

SEQ ID NO: 18969 - DNA, 80 bp, synthetic construct
  misc_feature 1..80: note = Synthetic: >NC_001611.1-cand-47430-47509
  source 1..80: mol_type = other DNA
atgactttcgaaccaattaatacaccgaacatccatttctagaatttagaaatatattttcatttaaatgaatcccaaac

SEQ ID NO: 18970 - DNA, 80 bp, synthetic construct
  misc_feature 1..80: note = Synthetic: >NC_001611.1-cand-47620-47699
  source 1..80: mol_type = other DNA
ccatgtcctgcctgcagacgacacgcaactatcgctatagaggacaataatattatgtctagcaatgatctaaattatat

SEQ ID NO: 18971 - DNA, 80 bp, synthetic construct
  misc_feature 1..80: note = Synthetic: >NC_001611.1-cand-47790-47869
  source 1..80: mol_type = other DNA
acccattataaaacttatgattagttacgactgaaataaccgcatgattattttttggtataattctacacggcatagtt

SEQ ID NO: 18972 - DNA, 80 bp, synthetic construct
  misc_feature 1..80: note = Synthetic: >NC_001611.1-cand-47870-47949
  source 1..80: mol_type = other DNA
tctgtaactatgaattctacccccgttacatttgtataatctttaacaaacagtaagggctcgtcaaatacgtaaaactc

SEQ ID NO: 18973 - DNA, 80 bp, synthetic construct
  misc_feature 1..80: note = Synthetic: >NC_001611.1-cand-48190-48269
  source 1..80: mol_type = other DNA
aaatgacgttgatggacagatgatgcaaataagaaggtacaatacctttgtctaccatctcctccaattcatgctctatt

SEQ ID NO: 18974 - DNA, 80 bp, synthetic construct
  misc_feature 1..80: note = Synthetic: >NC_001611.1-cand-48350-48429
  source 1..80: mol_type = other DNA
gatggcgacataattgttcaaaactgccaatctataatagatggtggccacaatatattctatgatggtattgaagaaga

SEQ ID NO: 18975 - DNA, 80 bp, synthetic construct
  misc_feature 1..80: note = Synthetic: >NC_001611.1-cand-48430-48509
  source 1..80: mol_type = other DNA
taacaaccttggcatattgatcatttgatacggacatggtatcaacagatagcttgaatgaaagagactcagtaatcgga

SEQ ID NO: 18976 - DNA, 80 bp, synthetic construct
  misc_feature 1..80: note = Synthetic: >NC_001611.1-cand-48510-48589
  source 1..80: mol_type = other DNA
ataagtgttttctcaatggagtgtccgtataccaacatgtctgatattttgatgtacaccatcaaattgtttagttttct

SEQ ID NO: 18977 - DNA, 80 bp, synthetic construct
  misc_feature 1..80: note = Synthetic: >NC_001611.1-cand-48590-48669
  source 1..80: mol_type = other DNA
ctttttatcctcattaaacagcatttctgtcaatggaccccaacatctttgaccgattaagttttgattgattcttccat

SEQ ID NO: 18978 - DNA, 80 bp, synthetic construct
  misc_feature 1..80: note = Synthetic: >NC_001611.1-cand-48670-48749
  source 1..80: mol_type = other DNA
gtaaggcgtatctagtcagatcgtataatctagccaacaatccatcgtcggtgtttaggtcacatcgtatactttttaat

SEQ ID NO: 18979 - DNA, 80 bp, synthetic construct
  misc_feature 1..80: note = Synthetic: >NC_001611.1-cand-48750-48829
  source 1..80: mol_type = other DNA
tctctatagaagagagacacacacctggaacaattacagacagtaatttctttattatctacagatgtaagatacttgaa

SEQ ID NO: 18980 - DNA, 80 bp, synthetic construct
  misc_feature 1..80: note = Synthetic: >NC_001611.1-cand-48830-48909
  source 1..80: mol_type = other DNA
gacattcctatgatgatgtagaatttttgataacactgtattgatggtatctgttaccataataccttttatggcggaca

SEQ ID NO: 18981 - DNA, 80 bp, synthetic construct
  misc_feature 1..80: note = Synthetic: >NC_001611.1-cand-48910-48989
  source 1..80: mol_type = other DNA
gtgtcagagcacaggatttccaatcttttgcaattttcagtaccattatctttgttttgatatctatattagatagcatg

SEQ ID NO: 18982 - DNA, 80 bp, synthetic construct
  misc_feature 1..80: note = Synthetic: >NC_001611.1-cand-48990-49069
  source 1..80: mol_type = other DNA
gtgcgtctgacaacacagggattaagacgaaaagatgaaatgattctatctacatcttcaatagataccttgctattttt

SEQ ID NO: 18983 - DNA, 80 bp, synthetic construct
  misc_feature 1..80: note = Synthetic: >NC_001796.2-cand-7490-7569
  source 1..80: mol_type = other DNA
tgtaaactcagacttggtacctgacttaaatcccaggttctctcatactttcaacataaatgacaataggaagtcatgtt

SEQ ID NO: 18984 - DNA, 80 bp, synthetic construct
  misc_feature 1..80: note = Synthetic: >NC_001796.2-cand-7570-7649
  source 1..80: mol_type = other DNA
ctctagcactcctaaatacagatgtatatcaactgtgttcaactcccaaagttgatgaaagatcagattatgcatcatca

SEQ ID NO: 18985 - DNA, 80 bp, synthetic construct
  misc_feature 1..80: note = Synthetic: >NC_001796.2-cand-7640-7719
  source 1..80: mol_type = other DNA
tgcatcatcaggcatagaagatattgtacttgatattgtcaattatgatggctcaatctcaacaacaagatttaagaata

SEQ ID NO: 18986 - DNA, 80 bp, synthetic construct
  misc_feature 1..80: note = Synthetic: >NC_001796.2-cand-7720-7799
  source 1..80: mol_type = other DNA
ataacataagctttgatcaaccctatgctgcactatacccatctgttggaccagggatatattacaaaggcaaaataata

SEQ ID NO: 18987 - DNA, 80 bp, synthetic construct
  misc_feature 1..80: note = Synthetic: >NC_001796.2-cand-7800-7879
  source 1..80: mol_type = other DNA
tttctcgggtatggaggtcttgaacatccaataaatgagaatgtaatctgcaacacaactgagtgtcccgggaaaacaca

SEQ ID NO: 18988 - DNA, 80 bp, synthetic construct
  misc_feature 1..80: note = Synthetic: >NC_001796.2-cand-7880-7959
  source 1..80: mol_type = other DNA
gagagactgcaatcaggcatcttatagtccatggttttcagataggaggatggtcaactccatcattgttgttgacaaag

SEQ ID NO: 18989 - DNA, 80 bp, synthetic construct
  misc_feature 1..80: note = Synthetic: >NC_001796.2-cand-7940-8019
  source 1..80: mol_type = other DNA
catcattgttgttgacaaaggcttaaactcaattccaaaattaaaggtatggacaatatctatgagacaaaattactggg

SEQ ID NO: 18990 - DNA, 80 bp, synthetic construct
  misc_feature 1..80: note = Synthetic: >NC_001796.2-cand-8040-8119
  source 1..80: mol_type = other DNA
ctactaggtaacaagatctatatatatacaagatctacaagttggcatagcaaattacaattaggaataattgatattac

SEQ ID NO: 18991 - DNA, 80 bp, synthetic construct
  misc_feature 1..80: note = Synthetic: >NC_001796.2-cand-8110-8189
  source 1..80: mol_type = other DNA
ttgatattactgattacagtgatataaggataaaatggacatggcataatgtgctatcaagaccaggaaacgatgaatgt

SEQ ID NO: 18992 - DNA, 80 bp, synthetic construct
  misc_feature 1..80: note = Synthetic: >NC_001796.2-cand-8200-8279
  source 1..80: mol_type = other DNA
attcatgtccaaatggatgtataacaggagtatatactgatgcgtatccactaaatcccacagggagcattgtgtcatct

SEQ ID NO: 18993 - DNA, 80 bp, synthetic construct
  misc_feature 1..80: note = Synthetic: >NC_001796.2-cand-8280-8359
  source 1..80: mol_type = other DNA
gtcatactagactcacagaaatcgagagtgaacccagtcataacttactcaacagcaactgaaagagtaaacgagctggc

SEQ ID NO: 18994 - DNA, 80 bp, synthetic construct
  misc_feature 1..80: note = Synthetic: >NC_001796.2-cand-8360-8439
  source 1..80: mol_type = other DNA
catcagaaacagaacactctcagctggatatacaacaacaagctgcattacacactatgacaaaggatattgttttcata

SEQ ID NO: 18995 - DNA, 80 bp, synthetic construct
  misc_feature 1..80: note = Synthetic: >NC_001796.2-cand-8440-8519
  source 1..80: mol_type = other DNA
tagtagaaataaatcagaaaagttcaaacacatttcaacctatgttgttcaaaacagagattccaaaaagctgcagtcaa

SEQ ID NO: 18996 - DNA, 80 bp, synthetic construct
  misc_feature 1..80: note = Synthetic: >NC_001796.2-cand-8520-8599
  source 1..80: mol_type = other DNA
tcataattaaccataatatgcattaacctatctataatacaagtatatgataagtaatcagcaatcagacaatggacaaa

SEQ ID NO: 18997 - DNA, 80 bp, synthetic construct
  misc_feature 1..80: note = Synthetic: >NC_001796.2-cand-8600-8679
  source 1..80: mol_type = other DNA
aggaaaatataaaaaacttaggagcaaagcgtgctcggaaaatggacactgaatctaacaatggcactgtatctgacata

SEQ ID NO: 18998 - DNA, 80 bp, synthetic construct
  misc_feature 1..80: note = Synthetic: >NC_001796.2-cand-8680-8759
  source 1..80: mol_type = other DNA
ctctatcctgagtgtcaccttaactctcctatcgttaaaggtaaaatagcacaattacacactattatgagtctacctca

SEQ ID NO: 18999 - DNA, 80 bp, synthetic construct
  misc_feature 1..80: note = Synthetic: >NC_001796.2-cand-12620-12699
  source 1..80: mol_type = other DNA
aaaccaaagataccaatcttatttaccaacaaataatgttaacaggattaagtgttttcgaatatttatttagattaaaa

SEQ ID NO: 19000 - DNA, 80 bp, synthetic construct
  misc_feature 1..80: note = Synthetic: >NC_001796.2-cand-12700-12779
  source 1..80: mol_type = other DNA
gaaaccacaggacacaatcctatagttatgcatctgcacattgaagatgaatgttgtattaaagaaagttttaatgatga

SEQ ID NO: 19001 - DNA, 80 bp, synthetic construct
  misc_feature 1..80: note = Synthetic: >NC_001796.2-cand-12780-12859
  source 1..80: mol_type = other DNA
acatattaatccagagtctacattagaattaattcgatatcctgaaagtaatgaatttatttatgataaagacccactca

SEQ ID NO: 19002 - DNA, 80 bp, synthetic construct
  misc_feature 1..80: note = Synthetic: >NC_001796.2-cand-12860-12939
  source 1..80: mol_type = other DNA
aagatgtggatttgtcaaaacttatggttattaaagaccattcttatacaattgatatgaattattgggatgatactgac

SEQ ID NO: 19003 - DNA, 80 bp, synthetic construct
  misc_feature 1..80: note = Synthetic: >NC_001796.2-cand-12940-13019
  source 1..80: mol_type = other DNA
atcatacatgcaatttcaatatgtactgcaattacaatagcagatactatgtcacaattagatcgagataatttaaaaga

SEQ ID NO: 19004 - DNA, 80 bp, synthetic construct
  misc_feature 1..80: note = Synthetic: >NC_001796.2-cand-13020-13099
  source 1..80: mol_type = other DNA
gataatagtcattgcaaatgacgatgatattaatagcttaatcactgaatttttgactcttgacatacttgtatttctta

SEQ ID NO: 19005 - DNA, 80 bp, synthetic construct
  misc_feature 1..80: note = Synthetic: >NC_001796.2-cand-13100-13179
  source 1..80: mol_type = other DNA
agacatttggtggattattagtaaatcaatttgcatacactctttatagtttaaaaatagaaggtagagatctcatttgg

SEQ ID NO: 19006 - DNA, 80 bp, synthetic construct
  misc_feature 1..80: note = Synthetic: >NC_001796.2-cand-13180-13259
  source 1..80: mol_type = other DNA
gattatataatgagaacactgagagatacttcacattcaatattaaaagtattatctaatgcattatctcatcctaaagt

SEQ ID NO: 19007 - DNA, 80 bp, synthetic construct
  misc_feature 1..80: note = Synthetic: >NC_001796.2-cand-13260-13339
  source 1..80: mol_type = other DNA
atttaagaggttctgggattgtggagttttaaaccctatttatggtcctaatactgctagtcaagaccagataaaacttg

SEQ ID NO: 19008 - DNA, 80 bp, synthetic construct
  misc_feature 1..80: note = Synthetic: >NC_001796.2-cand-13340-13419
  source 1..80: mol_type = other DNA
ctctctctatatgtgaatatgcactagatctatttatgagagaatggttgaatggtgtatcacttgaaatatacatttgt

SEQ ID NO: 19009 - DNA, 80 bp, synthetic construct
  misc_feature 1..80: note = Synthetic: >NC_001796.2-cand-13420-13499
  source 1..80: mol_type = other DNA
gacagtgatatggaagttgcaaatgataggaaacaagcctttatttctagacatctttcatttgtttgttgtttagcaga

SEQ ID NO: 19010 - DNA, 80 bp, synthetic construct
  misc_feature 1..80: note = Synthetic: >NC_001796.2-cand-13500-13579
  source 1..80: mol_type = other DNA
aattgcatcttttggacctaacctgttaaacttaacatacttagagagacttgatctattgaaacaatatcttgaattaa

SEQ ID NO: 19011 - DNA, 80 bp, synthetic construct
  misc_feature 1..80: note = Synthetic: >NC_001796.2-cand-13580-13659
  source 1..80: mol_type = other DNA
atattaaagaagaccctactcttaaatatgtacaaatatctggattattaattaaatcgttcccatcaactgtaacatac

SEQ ID NO: 19012 - DNA, 80 bp, synthetic construct
  misc_feature 1..80: note = Synthetic: >NC_001796.2-cand-13660-13739
  source 1..80: mol_type = other DNA
gtaagaaagactgcaatcaaatatttaaggattcgcggtattagtccacctgaagtaattgatgattgggatccgataga

SEQ ID NO: 19013 - DNA, 80 bp, synthetic construct
  misc_feature 1..80: note = Synthetic: >NC_001796.2-cand-13740-13819
  source 1..80: mol_type = other DNA
agatgaaaatatgctggataacattgtcaaaactataaatgataactgtaataaagataataaagggaataaaattaaca

SEQ ID NO: 19014 - DNA, 80 bp, synthetic construct
  misc_feature 1..80: note = Synthetic: >NC_001796.2-cand-13830-13909
  source 1..80: mol_type = other DNA
actagcacttaagaactatcaagtccttaaaatcagatctataacaagtgattctgatgataatgatagactagatgcta

SEQ ID NO: 19015 - DNA, 80 bp, synthetic construct
  misc_feature 1..80: note = Synthetic: >NC_001802.1-cand-1140-1219
  source 1..80: mol_type = other DNA
aaataaaatagtaagaatgtatagccctaccagcattctggacataagacaaggaccaaaggaaccctttagagactatg

SEQ ID NO: 19016 - DNA, 80 bp, synthetic construct
  misc_feature 1..80: note = Synthetic: >NC_001802.1-cand-1220-1299
  source 1..80: mol_type = other DNA
tagaccggttctataaaactctaagagccgagcaagcttcacaggaggtaaaaaattggatgacagaaaccttgttggtc

SEQ ID NO: 19017 - DNA, 80 bp, synthetic construct
  misc_feature 1..80: note = Synthetic: >NC_001802.1-cand-1300-1379
  source 1..80: mol_type = other DNA
caaaatgcgaacccagattgtaagactattttaaaagcattgggaccagcggctacactagaagaaatgatgacagcatg

SEQ ID NO: 19018 - DNA, 80 bp, synthetic construct
  misc_feature 1..80: note = Synthetic: >NC_001802.1-cand-1380-1459
  source 1..80: mol_type = other DNA
tcagggagtaggaggacccggccataaggcaagagttttggctgaagcaatgagccaagtaacaaattcagctaccataa

SEQ ID NO: 19019 - DNA, 80 bp, synthetic construct
  misc_feature 1..80: note = Synthetic: >NC_001802.1-cand-1460-1539
  source 1..80: mol_type = other DNA
tgatgcagagaggcaattttaggaaccaaagaaagattgttaagtgtttcaattgtggcaaagaagggcacacagccaga

SEQ ID NO: 19020 - DNA, 80 bp, synthetic construct
  misc_feature 1..80: note = Synthetic: >NC_001802.1-cand-1540-1619
  source 1..80: mol_type = other DNA
aattgcagggcccctaggaaaaagggctgttggaaatgtggaaaggaaggacaccaaatgaaagattgtactgagagaca

SEQ ID NO: 19021 - DNA, 80 bp, synthetic construct
  misc_feature 1..80: note = Synthetic: >NC_001802.1-cand-1600-1679
  source 1..80: mol_type = other DNA
aaagattgtactgagagacaggctaattttttagggaagatctggccttcctacaagggaaggccagggaattttcttca

SEQ ID NO: 19022 - DNA, 80 bp, synthetic construct
  misc_feature 1..80: note = Synthetic: >NC_001802.1-cand-1640-1719
  source 1..80: mol_type = other DNA
tctggccttcctacaagggaaggccagggaattttcttcagagcagaccagagccaacagccccaccagaagagagcttc

SEQ ID NO: 19023 - DNA, 80 bp, synthetic construct
  misc_feature 1..80: note = Synthetic: >NC_001802.1-cand-1760-1839
  source 1..80: mol_type = other DNA
agccgatagacaaggaactgtatcctttaacttccctcaggtcactctttggcaacgacccctcgtcacaataaagatag

SEQ ID NO: 19024 - DNA, 80 bp, synthetic construct
  misc_feature 1..80: note = Synthetic: >NC_001802.1-cand-1850-1929
  source 1..80: mol_type = other DNA
aaaggaagctctattagatacaggagcagatgatacagtattagaagaaatgagtttgccaggaagatggaaaccaaaaa

SEQ ID NO: 19025 - DNA, 80 bp, synthetic construct
  misc_feature 1..80: note = Synthetic: >NC_001802.1-cand-1940-2019
  source 1..80: mol_type = other DNA
aattggaggttttatcaaagtaagacagtatgatcagatactcatagaaatctgtggacataaagctataggtacagtat

SEQ ID NO: 19026 - DNA, 80 bp, synthetic construct
  misc_feature 1..80: note = Synthetic: >NC_001802.1-cand-1980-2059
  source 1..80: mol_type = other DNA
ctcatagaaatctgtggacataaagctataggtacagtattagtaggacctacacctgtcaacataattggaagaaatct

SEQ ID NO: 19027 - DNA, 80 bp, synthetic construct
  misc_feature 1..80: note = Synthetic: >NC_001802.1-cand-2060-2139
  source 1..80: mol_type = other DNA
gttgactcagattggttgcactttaaattttcccattagccctattgagactgtaccagtaaaattaaagccaggaatgg

SEQ ID NO: 19028 - DNA, 80 bp, synthetic construct
  misc_feature 1..80: note = Synthetic: >NC_001802.1-cand-2130-2209
  source 1..80: mol_type = other DNA
ccaggaatggatggcccaaaagttaaacaatggccattgacagaagaaaaaataaaagcattagtagaaatttgtacaga

SEQ ID NO: 19029 - DNA, 80 bp, synthetic construct
  misc_feature 1..80: note = Synthetic: >NC_001802.1-cand-2210-2289
  source 1..80: mol_type = other DNA
gatggaaaaggaagggaaaatttcaaaaattgggcctgaaaatccatacaatactccagtatttgccataaagaaaaaag

SEQ ID NO: 19030 - DNA, 80 bp, synthetic construct
  misc_feature 1..80: note = Synthetic: >NC_001802.1-cand-2290-2369
  source 1..80: mol_type = other DNA
acagtactaaatggagaaaattagtagatttcagagaacttaataagagaactcaagacttctgggaagttcaattagga

SEQ ID NO: 19031 - DNA, 80 bp, synthetic construct
  misc_feature 1..80: note = Synthetic: >NC_001803.1-cand-7480-7559
  source 1..80: mol_type = other DNA
ttatttaagtagattcctagtttatagttatataaaacaattgaataccagattaacttactatttgtaaaaaatgagaa

SEQ ID NO: 19032 - DNA, 80 bp, synthetic construct
  misc_feature 1..80: note = Synthetic: >NC_001803.1-cand-7600-7679
  source 1..80: mol_type = other DNA
aattcgaggtcattgcttgaatggtaagaggtgtcattttagtcataattattttgaatggccaccccatgcactgcttg

SEQ ID NO: 19033 - DNA, 80 bp, synthetic construct
  misc_feature 1..80: note = Synthetic: >NC_001803.1-cand-7680-7759
  source 1..80: mol_type = other DNA
taagacaaaactttatgttaaacagaatacttaagtctatggataaaagcatcgatactttatcagaaataagtggagct

SEQ ID NO: 19034 - DNA, 80 bp, synthetic construct
  misc_feature 1..80: note = Synthetic: >NC_001803.1-cand-7760-7839
  source 1..80: mol_type = other DNA
gcagagttggacagaacagaagagtatgccctcggtgtagttggagtgctagagagttatataggatctataaataatat

SEQ ID NO: 19035 - DNA, 80 bp, synthetic construct
  misc_feature 1..80: note = Synthetic: >NC_001803.1-cand-7840-7919
  source 1..80: mol_type = other DNA
aactaaacaatcagcatgtgttgccatgagcaaactcctcactgaactcaacagtgatgacatcaaaaaactgagggaca

SEQ ID NO: 19036 - DNA, 80 bp, synthetic construct
  misc_feature 1..80: note = Synthetic: >NC_001803.1-cand-7920-7999
  source 1..80: mol_type = other DNA
atgaagagccaaattcacccaagataagagtgtacaatactgtcatatcatatattgaaagcaacaggaaaaacaataaa

SEQ ID NO: 19037 - DNA, 80 bp, synthetic construct
  misc_feature 1..80: note = Synthetic: >NC_001803.1-cand-8000-8079
  source 1..80: mol_type = other DNA
caaactatccatctgttaaaaagattgccagcagacgtattgaagaaaaccataaaaaccacattggatatccacaagag

SEQ ID NO: 19038 - DNA, 80 bp, synthetic construct
  misc_feature 1..80: note = Synthetic: >NC_001803.1-cand-8080-8159
  source 1..80: mol_type = other DNA
cataaccatcaataacccaaaagaatcaactgttagtgatataaacgaccatgccaaaaataatgatactacctgacaaa

SEQ ID NO: 19039 - DNA, 80 bp, synthetic construct
  misc_feature 1..80: note = Synthetic: >NC_001803.1-cand-8160-8239
  source 1..80: mol_type = other DNA
tatccttgtagtataaattccatactaataacaagtagttgtagagttactatgtataatcaaaagaacacactatattt

SEQ ID NO: 19040 - DNA, 80 bp, synthetic construct
  misc_feature 1..80: note = Synthetic: >NC_001803.1-cand-8240-8319
  source 1..80: mol_type = other DNA
caatcaaaacaaccaaaataaccatatatactcaccgaatcaaccattcaatgaaatccattggacctctcaagacttga

SEQ ID NO: 19041 - DNA, 80 bp, synthetic construct
  misc_feature 1..80: note = Synthetic: >NC_001803.1-cand-8320-8399
  source 1..80: mol_type = other DNA
ttgatgcaattcaaaattttctacaacatctaggtattactgatgatatatacacaatatatatattagtgtcataacac

SEQ ID NO: 19042 - DNA, 80 bp, synthetic construct
  misc_feature 1..80: note = Synthetic: >NC_001803.1-cand-8400-8479
  source 1..80: mol_type = other DNA
tcaatcctaatgcttaccacatcatcaaactattaactcaaacaattcaagccatgggacaaaatggatcccattattaa

SEQ ID NO: 19043 - DNA, 80 bp, synthetic construct
  misc_feature 1..80: note = Synthetic: >NC_001803.1-cand-8480-8559
  source 1..80: mol_type = other DNA
tggaaattctgctaatgtgtatctaaccgatagttatttaaaaggtgttatttctttctcagaatgtaatgctttaggaa

SEQ ID NO: 19044 - DNA, 80 bp, synthetic construct
  misc_feature 1..80: note = Synthetic: >NC_001803.1-cand-8560-8639
  source 1..80: mol_type = other DNA
gttacatattcaatggtccttatctcaaaaatgattataccaacttaattagtagacaaaatccattaatagaacacata

SEQ ID NO: 19045 - DNA, 80 bp, synthetic construct
  misc_feature 1..80: note = Synthetic: >NC_001803.1-cand-8640-8719
  source 1..80: mol_type = other DNA
aatctaaagaaactaaatataacacagtccttaatgtctaagtatcataaaggtgaaataaaaatagaagaacctactta

SEQ ID NO: 19046 - DNA, 80 bp, synthetic construct
  misc_feature 1..80: note = Synthetic: >NC_001803.1-cand-8720-8799
  source 1..80: mol_type = other DNA
ttttcagtcattacttatgacatacaagagtatgacctcgttagaacagattactaccactaatttacttaaaaagataa

SEQ ID NO: 19047 - DNA, 80 bp, synthetic construct
  misc_feature 1..80: note = Synthetic: >NC_002645.1-cand-4700-4779
  source 1..80: mol_type = other DNA
agaagacttgttgtgtgtcgctgatgacaaacccattgttttgtttactgactctatgcttactttggatgaccgtggtt

SEQ ID NO: 19048 - DNA, 80 bp, synthetic construct
  misc_feature 1..80: note = Synthetic: >NC_002645.1-cand-4780-4859
  source 1..80: mol_type = other DNA
tagctctagacaatgcacttagtggtgtgcttagtgctgctattaaggattgtgttgacataaataaagctataccttct

SEQ ID NO: 19049 - DNA, 80 bp, synthetic construct
  misc_feature 1..80: note = Synthetic: >NC_002645.1-cand-4860-4939
  source 1..80: mol_type = other DNA
ggtaatcttattaagtttgatataggttctgttgttgtctacatgtgtgttgtgccatccgaaaaggacaaacatttaga

SEQ ID NO: 19050 - DNA, 80 bp, synthetic construct
  misc_feature 1..80: note = Synthetic: >NC_002645.1-cand-4940-5019
  source 1..80: mol_type = other DNA
taataatgttcaacgatgcacacgtaagttgaatagacttatgtgtgatatagtttgtactataccagctgactacatct

SEQ ID NO: 19051 - DNA, 80 bp, synthetic construct
  misc_feature 1..80: note = Synthetic: >NC_002645.1-cand-5020-5099
  source 1..80: mol_type = other DNA
tgccattggtgttgtctagtttgacttgtaatgtttcttttgtaggtgaacttaaagctgctgaagctaaagttataact

SEQ ID NO: 19052 - DNA, 80 bp, synthetic construct
  misc_feature 1..80: note = Synthetic: >NC_002645.1-cand-5100-5179
  source 1..80: mol_type = other DNA
ataaaggtgacagaggatggtgttaatgttcatgatgtgaccgtgacaacagacaagtcatttgaacaacaagttggtgt

SEQ ID NO: 19053 - DNA, 80 bp, synthetic construct
  misc_feature 1..80: note = Synthetic: >NC_002645.1-cand-5180-5259
  source 1..80: mol_type = other DNA
tattgctgataaggacaaagatctttctggtgcagtaccaagtgatcttaacacatctgaattgcttactaaagcaatag

SEQ ID NO: 19054 - DNA, 80 bp, synthetic construct
  misc_feature 1..80: note = Synthetic: >NC_002645.1-cand-5260-5339
  source 1..80: mol_type = other DNA
atgttgattgggtcgaattttatggctttaaagatgctgttacttttgcaacagttgatcatagtgcttttgcctatgaa

SEQ ID NO: 19055 - DNA, 80 bp, synthetic construct
  misc_feature 1..80: note = Synthetic: >NC_002645.1-cand-5340-5419
  source 1..80: mol_type = other DNA
agtgctgttgttaatggtattagagtgttaaaaactagtgataataattgttgggtgaatgctgtttgtattgcactaca

SEQ ID NO: 19056 - DNA, 80 bp, synthetic construct
  misc_feature 1..80: note = Synthetic: >NC_002645.1-cand-5420-5499
  source 1..80: mol_type = other DNA
gtattcgaaaccccattttatttcacaaggtcttgatgctgcgtggaataaatttgttttaggcgatgttgaaatttttg

SEQ ID NO: 19057 - DNA, 80 bp, synthetic construct
  misc_feature 1..80: note = Synthetic: >NC_002645.1-cand-5500-5579
  source 1..80: mol_type = other DNA
ttgcatttgtttactatgttgcaagactaatgaaaggtgacaagggtgatgctgaagacactttgactaagttgtctaag

SEQ ID NO: 19058 - DNA, 80 bp, synthetic construct
  misc_feature 1..80: note = Synthetic: >NC_002645.1-cand-5580-5659
  source 1..80: mol_type = other DNA
tatcttgctaatgaagctcaagttcaattagaacattatagttcttgtgttgaatgtgatgctaaatttaaaaactctgt

SEQ ID NO: 19059 - DNA, 80 bp, synthetic construct
  misc_feature 1..80: note = Synthetic: >NC_002645.1-cand-5660-5739
  source 1..80: mol_type = other DNA
tgcatctatcaattctgctatagtttgtgctagtgtcaaacgtgatggtgtgcaagttggttattgtgtccatggtatta

SEQ ID NO: 19060 - DNA, 80 bp, synthetic construct
  misc_feature 1..80: note = Synthetic: >NC_002645.1-cand-5740-5819
  source 1..80: mol_type = other DNA
agtactattcacgtgttagaagtgttagaggtagagctattatagtcagtgtcgaacagcttgaaccgtgtgctcagtct

SEQ ID NO: 19061 - DNA, 80 bp, synthetic construct
  misc_feature 1..80: note = Synthetic: >NC_002645.1-cand-5820-5899
  source 1..80: mol_type = other DNA
agacttttgagtggtgttgcttatactgctttttctggacctgttgacaaaggtcattatactgtttatgatactgcaaa

SEQ ID NO: 19062 - DNA, 80 bp, synthetic construct
  misc_feature 1..80: note = Synthetic: >NC_002645.1-cand-5900-5979
  source 1..80: mol_type = other DNA
gaaatcaatgtatgatggtgatcgttttgttaaacatgatctttctctgctgtctgtcacatcagttgttatggttggtg

SEQ ID NO: 19063 - DNA, 80 bp, synthetic construct
  misc_feature 1..80: note = Synthetic: >NC_002728.1-cand-3100-3179
  source 1..80: mol_type = other DNA
agcatcaaattgtacacatcagatgacgaagaggcagatcagcttgaattcgaagatgagtttgcaggaagctcaagtga

SEQ ID NO: 19064 - DNA, 80 bp, synthetic construct
  misc_feature 1..80: note = Synthetic: >NC_002728.1-cand-3180-3259
  source 1..80: mol_type = other DNA
agtgatagtcggcatttctcctgaagatgaagagccttcaagtgttggcggaaaacccaatgaatccattggacgtacaa

SEQ ID NO: 19065 - DNA, 80 bp, synthetic construct
  misc_feature 1..80: note = Synthetic: >NC_002728.1-cand-3260-3339
  source 1..80: mol_type = other DNA
tcgaaggccaatcaatccgagacaaccttcaagccaaggacaacaaatcaacagatgtaccaggagcaggaccgaaagat

SEQ ID NO: 19066 - DNA, 80 bp, synthetic construct
  misc_feature 1..80: note = Synthetic: >NC_002728.1-cand-3340-3419
  source 1..80: mol_type = other DNA
tcagcagtgaaggaagaaccaccccagaagaggctacctatgttagctgaagaatttgagtgctctggatcggaagaccc

SEQ ID NO: 19067 - DNA, 80 bp, synthetic construct
  misc_feature 1..80: note = Synthetic: >NC_002728.1-cand-3420-3499
  source 1..80: mol_type = other DNA
aatcattcgggagctgctgaaggagaactcactcataaattgtcagcaagggaaagatgctcagcctccatatcattgga

SEQ ID NO: 19068 - DNA, 80 bp, synthetic construct
  misc_feature 1..80: note = Synthetic: >NC_002728.1-cand-3500-3579
  source 1..80: mol_type = other DNA
gcatcgagaggtcaataagcccggataaaactgagatcgtcaacggtgctgtgcaaactgctgacaggcaaagaccagga

SEQ ID NO: 19069 - DNA, 80 bp, synthetic construct
  misc_feature 1..80: note = Synthetic: >NC_002728.1-cand-3580-3659
  source 1..80: mol_type = other DNA
actccgatgccaaagtcccgaggtattcccattaaaaagggcacagacgcgaaatatccatctgctgggacggaaaacgt

SEQ ID NO: 19070 - DNA, 80 bp, synthetic construct
  misc_feature 1..80: note = Synthetic: >NC_002728.1-cand-3660-3739
  source 1..80: mol_type = other DNA
gcctgggtcgaagagtggtgcaacccggcatgttcgaggatcacccccctaccaagaaggcaagagtgtcaatgcggaga

SEQ ID NO: 19071 - DNA, 80 bp, synthetic construct
  misc_feature 1..80: note = Synthetic: >NC_002728.1-cand-3740-3819
  source 1..80: mol_type = other DNA
atgtccaactgaatgcttccactgcggttaaggaaactgataagtcagaagtaaaccccgtagacgacaacgactcactt

SEQ ID NO: 19072 - DNA, 80 bp, synthetic construct
  misc_feature 1..80: note = Synthetic: >NC_002728.1-cand-3820-3899
  source 1..80: mol_type = other DNA
gatgataaatacatcatgccttcagatgatttctcaaacactttcttcccgcacgacactgatcgcttgaattatcacgc

SEQ ID NO: 19073 - DNA, 80 bp, synthetic construct
  misc_feature 1..80: note = Synthetic: >NC_002728.1-cand-3900-3979
  source 1..80: mol_type = other DNA
agatcatttaggtgattatgaccttgaaaccctgtgtgaagagtcggttctaatgggagtgatcaactctataaaattaa

SEQ ID NO: 19074 - DNA, 80 bp, synthetic construct
  misc_feature 1..80: note = Synthetic: >NC_002728.1-cand-3980-4059
  source 1..80: mol_type = other DNA
ttaatctggatatgcgcttaaatcacattgaagaacaagttaaagagatcccaaagatcatcaataagcttgagtccatt

SEQ ID NO: 19075 - DNA, 80 bp, synthetic construct
  misc_feature 1..80: note = Synthetic: >NC_002728.1-cand-4050-4129
  source 1..80: mol_type = other DNA
tgagtccattgacagagttctggccaagactaacaccgcactctcaaccattgaaggacacctggtttccatgatgataa

SEQ ID NO: 19076 - DNA, 80 bp, synthetic construct
  misc_feature 1..80: note = Synthetic: >NC_002728.1-cand-4170-4249
  source 1..80: mol_type = other DNA
taatcctgagcttaaaccagtgataggaagagacattctagagcagcaatctcttttttcttttgacaatgtcaagaatt

SEQ ID NO: 19077 - DNA, 80 bp, synthetic construct
  misc_feature 1..80: note = Synthetic: >NC_002728.1-cand-4200-4279
  source 1..80: mol_type = other DNA
agacattctagagcagcaatctcttttttcttttgacaatgtcaagaatttcagagatggatcgttgacaaacgaaccgt

SEQ ID NO: 19078 - DNA, 80 bp, synthetic construct
  misc_feature 1..80: note = Synthetic: >NC_002728.1-cand-4290-4369
  source 1..80: mol_type = other DNA
tgtacagttgagagaagatcttattcttcctgaacttaattttgaggagacaaatgcatctcaatttgttcctatggcag

SEQ ID NO: 19079 - DNA, 80 bp, synthetic construct
  misc_feature 1..80: note = Synthetic: >NC_003310.1-cand-158250-158329
  source 1..80: mol_type = other DNA
atttttgatggtggtttaagtttaaaaaagattttgttattgtagtatgataatatcaaaaagatggatataaagaattg

SEQ ID NO: 19080 - DNA, 80 bp, synthetic construct
  misc_feature 1..80: note = Synthetic: >NC_003310.1-cand-158330-158409
  source 1..80: mol_type = other DNA
gtcagtgtataataaattatatgtaggaggaggaatatctgatgatgttcaaactaatacatctgaaacatacgataaag

SEQ ID NO: 19081 - DNA, 80 bp, synthetic construct
  misc_feature 1..80: note = Synthetic: >NC_003310.1-cand-158410-158489
  source 1..80: mol_type = other DNA
aaaaagattgttggacattggataatggtcacttggtaccacataattatataatgtataaatgcgaaccggttaaacat

SEQ ID NO: 19082 - DNA, 80 bp, synthetic construct
  misc_feature 1..80: note = Synthetic: >NC_003310.1-cand-158490-158569
  source 1..80: mol_type = other DNA
agatatccattggaaaaaaacacagtacacgaatgattttctaaagtatttggaaagttttataggtagttgatagaaca

SEQ ID NO: 19083 - DNA, 80 bp, synthetic construct
  misc_feature 1..80: note = Synthetic: >NC_003310.1-cand-158570-158649
  source 1..80: mol_type = other DNA
aaatacataattttgtaaaaataaatcactttttatactaatatgacacaattaccaatacttttgttactaatatcatt

SEQ ID NO: 19084 - DNA, 80 bp, synthetic construct
  misc_feature 1..80: note = Synthetic: >NC_003310.1-cand-158650-158729
  source 1..80: mol_type = other DNA
agtatacgttacaccttctcctcagacatctaaaaaaataggtgatgatgcaactatatcatgtagtcgaaataatacaa

SEQ ID NO: 19085 - DNA, 80 bp, synthetic construct
  misc_feature 1..80: note = Synthetic: >NC_003310.1-cand-158730-158809
  source 1..80: mol_type = other DNA
attactacgttgttatgagtgcttggtataaggagcccaattccattattctcttagctgccaaaagcgacgtcttgtat

SEQ ID NO: 19086 - DNA, 80 bp, synthetic construct
  misc_feature 1..80: note = Synthetic: >NC_003310.1-cand-158810-158889
  source 1..80: mol_type = other DNA
tttgataattataccaaggataaaatatcttacgactctccatacgatgatctagttacaactatcacaattaaatcatt

SEQ ID NO: 19087 - DNA, 80 bp, synthetic construct
  misc_feature 1..80: note = Synthetic: >NC_003310.1-cand-159050-159129
  source 1..80: mol_type = other DNA
actatttctgagaaaccagaggatatagataattctaattgctcgtctgtattcgaaatcgcgactccggaaccaattac

SEQ ID NO: 19088 - DNA, 80 bp, synthetic construct
  misc_feature 1..80: note = Synthetic: >NC_003310.1-cand-159130-159209
  source 1..80: mol_type = other DNA
tgataatgtagaagaccatacagacaccgtcacatacactagtgatagcattaatacagtaaatgcatcatctggagaat

SEQ ID NO: 19089 - DNA, 80 bp, synthetic construct
  misc_feature 1..80: note = Synthetic: >NC_003310.1-cand-159210-159289
  source 1..80: mol_type = other DNA
ccacaacagacgagactccggaaccaattactgataaagaagaagatcatacagtaacagacactgtctcatacactaca

SEQ ID NO: 19090 - DNA, 80 bp, synthetic construct
  misc_feature 1..80: note = Synthetic: >NC_003310.1-cand-159290-159369
  source 1..80: mol_type = other DNA
gtaagtacatcatctggaattgtcactactaaatcaaccaccgatgatgcggatctttatgatacatacaatgataatga

SEQ ID NO: 19091 - DNA, 80 bp, synthetic construct
  misc_feature 1..80: note = Synthetic: >NC_003310.1-cand-159370-159449
  source 1..80: mol_type = other DNA
tacagtaccgccaactactgtaggtggtagtacaacctctattagcaattataaaaccaaggactttgtagaaatatttg

SEQ ID NO: 19092 - DNA, 80 bp, synthetic construct
  misc_feature 1..80: note = Synthetic: >NC_003310.1-cand-159450-159529
  source 1..80: mol_type = other DNA
gtattaccacattaattatattgtcggcagtggcgattttctgtattacgtattatatatgtaataaacacccacgtaaa

SEQ ID NO: 19093 - DNA, 80 bp, synthetic construct
  misc_feature 1..80: note = Synthetic: >NC_003310.1-cand-159530-159609
  source 1..80: mol_type = other DNA
tacaaaacagagaacaaagtctagatttttgacttacataaatatctgggataataaaatctatcatattgagaggacca

SEQ ID NO: 19094 - DNA, 80 bp, synthetic construct
  misc_feature 1..80: note = Synthetic: >NC_003310.1-cand-159610-159689
  source 1..80: mol_type = other DNA
tctggttcaggaaagacagccataaccaaaagactgttaaaagactatgggaatatatttggatttgtggtgtcccatac

SEQ ID NO: 19095 - DNA, 80 bp, synthetic construct
  misc_feature 1..80: note = Synthetic: >NC_003310.1-cand-173240-173319
  source 1..80: mol_type = other DNA
ctatatgactgataagagacgtgttattacatcctggttaaacattaatcctgtcaaggaagaagatgctacaacgttta

SEQ ID NO: 19096 - DNA, 80 bp, synthetic construct
  misc_feature 1..80: note = Synthetic: >NC_003310.1-cand-173320-173399
  source 1..80: mol_type = other DNA
cgtgtatggcgtttactattcctagcatcagcaaaacagttactgttagtataacgtgaatgtatgttgttacatttcca

SEQ ID NO: 19097 - DNA, 80 bp, synthetic construct
  misc_feature 1..80: note = Synthetic: >NC_003310.1-cand-173410-173489
  source 1..80: mol_type = other DNA
gtttataagaatttttatacattatcttccaacaaacaattgacgaacgtattgctatgattaactcccacaatactatg

SEQ ID NO: 19098 - DNA, 80 bp, synthetic construct
  misc_feature 1..80: note = Synthetic: >NC_003310.1-cand-173490-173569
  source 1..80: mol_type = other DNA
catattattaatcattaacttgcagactatacctagtagtgctattttgacatactcatgttcttgtgtaattgcagtat

SEQ ID NO: 19099 - DNA, 80 bp, synthetic construct
  misc_feature 1..80: note = Synthetic: >NC_003310.1-cand-173570-173649
  source 1..80: mol_type = other DNA
ctatattattaaagtacgtaaatctagctatagttttattatttaattttagataatatactgtctccgtatttttaaaa

SEQ ID NO: 19100 - DNA, 80 bp, synthetic construct
  misc_feature 1..80: note = Synthetic: >NC_003310.1-cand-173650-173729
  source 1..80: mol_type = other DNA
aattgccacatcctttattaaatcatgaatgggaatttctgtgtcatcgttagtatattgtgaacaacaagagctgatat

SEQ ID NO: 19101 - DNA, 80 bp, synthetic construct
  misc_feature 1..80: note = Synthetic: >NC_003310.1-cand-173730-173809
  source 1..80: mol_type = other DNA
ctataggaaagggtggaatgcgatacattgatctatgtagttttaaaacataagcgaactttgaagaatttatataaatc

SEQ ID NO: 19102 - DNA, 80 bp, synthetic construct
  misc_feature 1..80: note = Synthetic: >NC_003310.1-cand-173810-173889
  source 1..80: mol_type = other DNA
atctcacgagatattgttctctgtcatattcatacacctgcataaactttctatacatcttacaatgtgttattttatga

SEQ ID NO: 19103 - DNA, 80 bp, synthetic construct
  misc_feature 1..80: note = Synthetic: >NC_003310.1-cand-173890-173969
  source 1..80: mol_type = other DNA
tcatatttacatatttactggtatatcaaagatgttagattagttaatgggaatcgtctataataatgaatattaaacaa

SEQ ID NO: 19104 - DNA, 80 bp, synthetic construct
  misc_feature 1..80: note = Synthetic: >NC_003310.1-cand-173970-174049
  source 1..80: mol_type = other DNA
ttataggaggaatttatacctacaaaaacatcataaaaatgagtcatcgtccgatttatgttttaaatatactaacatta

SEQ ID NO: 19105 - DNA, 80 bp, synthetic construct
  misc_feature 1..80: note = Synthetic: >NC_003310.1-cand-174050-174129
  source 1..80: mol_type = other DNA
ctaccttcagaaattatatacgaaatattatacatgctgacaattaacgatctttataatatatagtatccacctaccaa

SEQ ID NO: 19106 - DNA, 80 bp, synthetic construct
  misc_feature 1..80: note = Synthetic: >NC_003310.1-cand-174140-174219
  source 1..80: mol_type = other DNA
tattttttctcatgtgatgtgtgtaaaaaactgatattatataattatcttagtacctatgatgaagatgaagatgatgg

SEQ ID NO: 19107 - DNA, 80 bp, synthetic construct
  misc_feature 1..80: note = Synthetic: >NC_003310.1-cand-174220-174299
  source 1..80: mol_type = other DNA
tccgtatatattttgtatcattatcgttattgctattccatagttacgccatagacatcgaaaatgaaatcaccgaattc

SEQ ID NO: 19108 - DNA, 80 bp, synthetic construct
  misc_feature 1..80: note = Synthetic: >NC_003310.1-cand-174300-174379
  source 1..80: mol_type = other DNA
ttcaataaaatgagagatactctaccagctaaagactctaaatggttgaatccagtatgtatgtttggaggcacaatgaa

SEQ ID NO: 19109 - DNA, 80 bp, synthetic construct
  misc_feature 1..80: note = Synthetic: >NC_003310.1-cand-174380-174459
  source 1..80: mol_type = other DNA
tgatatggccgctctaggagagccattcagtgcaaagtgtcctcctattgaagacagtcttttatcgcatagatataaag

SEQ ID NO: 19110 - DNA, 80 bp, synthetic construct
  misc_feature 1..80: note = Synthetic: >NC_003310.1-cand-174460-174539
  source 1..80: mol_type = other DNA
actatgtggttaaatgggaaaggctagaaaagaatagacggcgacaggtttctaataaacgtgtcaaacatggtgattta

SEQ ID NO: 19111 - DNA, 80 bp, synthetic construct
  misc_feature 1..80: note = Synthetic: >NC_004421.1-cand-2560-2639
  source 1..80: mol_type = other DNA
cccctgttgattatctacctgctgaagttcacgattggcttgagtatgctcaccggcccggctgggcagacatgttcaac

SEQ ID NO: 19112 - DNA, 80 bp, synthetic construct
  misc_feature 1..80: note = Synthetic: >NC_004421.1-cand-2640-2719
  source 1..80: mol_type = other DNA
tggaccacagcagatactcaggacactcgccttgctcttgtccccgtttcacccgcttggctctctgcatctggcacacc

SEQ ID NO: 19113 - DNA, 80 bp, synthetic construct
  misc_feature 1..80: note = Synthetic: >NC_004421.1-cand-2720-2799
  source 1..80: mol_type = other DNA
catctccttcgtcctggacctcttcacacagtggcgtggtgaactcaccctgtccctcctcttcacagggtcttcccagc

SEQ ID NO: 19114 - DNA, 80 bp, synthetic construct
  misc_feature 1..80: note = Synthetic: >NC_004421.1-cand-2800-2879
  source 1..80: mol_type = other DNA
attacggccgcctagttgtatgctactcaccgccaagcggcgctcctcccgctaccatcacggaagcgatgcgcggcacc

SEQ ID NO: 19115 - DNA, 80 bp, synthetic construct
  misc_feature 1..80: note = Synthetic: >NC_004421.1-cand-2880-2959
  source 1..80: mol_type = other DNA
tacactgtgtgggacatcaattcttcctccactcttgacttcaccattcctttcatctcccaatcctactggaaaatcac

SEQ ID NO: 19116 - DNA, 80 bp, synthetic construct
  misc_feature 1..80: note = Synthetic: >NC_004421.1-cand-2960-3039
  source 1..80: mol_type = other DNA
caacatctcggcccccgactctctactcgcctcctttggcaccctcactctctgggtggtggccccccttgttgcacctt

SEQ ID NO: 19117 - DNA, 80 bp, synthetic construct
  misc_feature 1..80: note = Synthetic: >NC_004421.1-cand-3020-3099
  source 1..80: mol_type = other DNA
ggccccccttgttgcaccttctgcagcacctcccagtgctaccatccacgccttcttatctgcttccaactccttttctg

SEQ ID NO: 19118 - DNA, 80 bp, synthetic construct
  misc_feature 1..80: note = Synthetic: >NC_004421.1-cand-3140-3219
  source 1..80: mol_type = other DNA
ggatggtatcgaggccccaactcccgtttccaacctggagaatggtgaagcggctcacacacctgagccacgcaccactt

SEQ ID NO: 19119 - DNA, 80 bp, synthetic construct
  misc_feature 1..80: note = Synthetic: >NC_004421.1-cand-3200-3279
  source 1..80: mol_type = other DNA
acctgagccacgcaccactttccagtactctgacaatccctccactcctgagaccaacctgcgccgttacttctctgtgt

SEQ ID NO: 19120 - DNA, 80 bp, synthetic construct
  misc_feature 1..80: note = Synthetic: >NC_004421.1-cand-3300-3379
  source 1..80: mol_type = other DNA
gggaacaagtacggcatcactgccactgctggcgtccactcagtaacttacaacccggttgagtggatcgccaacgcgca

SEQ ID NO: 19121 - DNA, 80 bp, synthetic construct
  misc_feature 1..80: note = Synthetic: >NC_004421.1-cand-3360-3439
  source 1..80: mol_type = other DNA
gagtggatcgccaacgcgcaggttggcgacaccctccccatcttgctttccactttcacctacttccgcggcgatccccg

SEQ ID NO: 19122 - DNA, 80 bp, synthetic construct
  misc_feature 1..80: note = Synthetic: >NC_004421.1-cand-3440-3519
  source 1..80: mol_type = other DNA
ggttgccttcaccatctccaacccggcagcctacaccgcgcaagtcaccttccactattttccccccggcgcaacaccct

SEQ ID NO: 19123 - DNA, 80 bp, synthetic construct
  misc_feature 1..80: note = Synthetic: >NC_004421.1-cand-3520-3599
  source 1..80: mol_type = other DNA
atgacgccacctctcccaatgcttccactgacctggctaactgtttcaccgtcgatgctcagatcccaccgacatcgatg

SEQ ID NO: 19124 - DNA, 80 bp, synthetic construct
  misc_feature 1..80: note = Synthetic: >NC_004421.1-cand-3600-3679
  source 1..80: mol_type = other DNA
gacacagtctgcctgtccttcccctacctttcagttctttctgctattcccacttcctactttggattctctaacttcca

SEQ ID NO: 19125 - DNA, 80 bp, synthetic construct
  misc_feature 1..80: note = Synthetic: >NC_004421.1-cand-3680-3759
  source 1..80: mol_type = other DNA
gggcggtagcgatgtgctcaacaccacgcttggaactattgtgatctatgttgggtggcagggcgatgcccctacgggca

SEQ ID NO: 19126 - DNA, 80 bp, synthetic construct
  misc_feature 1..80: note = Synthetic: >NC_004421.1-cand-3760-3839
  source 1..80: mol_type = other DNA
ccgctcttactatctatcagaagatcgcttttggcaacttccgtggtttcgttcctcgcaacccgcccaaacttactgcc

SEQ ID NO: 19127 - DNA, 80 bp, synthetic construct
  misc_feature 1..80: note = Synthetic: >NC_004421.1-cand-7720-7799
  source 1..80: mol_type = other DNA
tcatccaacatcctgacttctctcctgacaactaccggattcttgcttatggcgatgatgtcatctacgggtgtgatcct

SEQ ID NO: 19128 - DNA, 80 bp, synthetic construct
  misc_feature 1..80: note = Synthetic: >NC_004421.1-cand-7800-7879
  source 1..80: mol_type = other DNA
ccgatccatcctagatacatcaaggagttctacgacaaacatacacctctcgtcgtgactcccgccaataaaggctctga

SEQ ID NO: 19129 - DNA, 80 bp, synthetic construct
  misc_feature 1..80: note = Synthetic: >NC_004421.1-cand-7880-7959
  source 1..80: mol_type = other DNA
ctttcctgattcttctaccctctacgacgtcaccttcctcaaacgatggtttgttccggatgaccagcgtccattctaca

SEQ ID NO: 19130 - DNA, 80 bp, synthetic construct
  misc_feature 1..80: note = Synthetic: >NC_004421.1-cand-7960-8039
  source 1..80: mol_type = other DNA
tccaccctgtgatggacccggacacctatgagcagtctgtcatgtggttgcgtggcggtgactttcaggatcttgtcacc

SEQ ID NO: 19131 - DNA, 80 bp, synthetic construct
  misc_feature 1..80: note = Synthetic: >NC_004421.1-cand-8040-8119
  source 1..80: mol_type = other DNA
tctctctgctaccttgccttccactctggcccgaagacctacgggcgctggtgcgaacgtgttcgtgaacagtgcttgaa

SEQ ID NO: 19132 - DNA, 80 bp, synthetic construct
  misc_feature 1..80: note = Synthetic: >NC_004421.1-cand-8120-8199
  source 1..80: mol_type = other DNA
gacttctggcttcgctccaactttcctaccctatgaatacctccagcttcgctggctcaatctctgtgcagcttgacctc

SEQ ID NO: 19133 - DNA, 80 bp, synthetic construct
  misc_feature 1..80: note = Synthetic: >NC_004421.1-cand-8200-8279
  source 1..80: mol_type = other DNA
agaactctggcctcccactgttcgtcctggtagaatagacaagcttttcactatccctaagaccactctctccgtggcat

SEQ ID NO: 19134 - DNA, 80 bp, synthetic construct
  misc_feature 1..80: note = Synthetic: >NC_004421.1-cand-8280-8359
  source 1..80: mol_type = other DNA
tttcctctcagtgtcctgctccctcacgggactgcacccaggaactgtgagcttccccccctgtccttgaaatttctatt

SEQ ID NO: 19135 - DNA, 80 bp, synthetic construct
  misc_feature 1..80: note = Synthetic: >NC_004905.2-cand-0-79
  source 1..80: mol_type = other DNA
gggttaataatcactcactgagtgacatcaacatcatggcgtcgcaaggcaccaaacgatcctatgaacagatggaaact

SEQ ID NO: 19136 - DNA, 80 bp, synthetic construct
  misc_feature 1..80: note = Synthetic: >NC_004905.2-cand-90-169
  source 1..80: mol_type = other DNA
gccagaatgccactgagatcagggcatctgttggaagaatggttggtggaattgggaggttttacgtacagatgtgcact

SEQ ID NO: 19137 - DNA, 80 bp, synthetic construct
  misc_feature 1..80: note = Synthetic: >NC_004905.2-cand-170-249
  source 1..80: mol_type = other DNA
gaactcaaactcagcgaccaagaaggaaggttgatccagaacagtataacaatagagagaatggttctctccgcatttga

SEQ ID NO: 19138 - DNA, 80 bp, synthetic construct
  misc_feature 1..80: note = Synthetic: >NC_004905.2-cand-210-289
  source 1..80: mol_type = other DNA
acagtataacaatagagagaatggttctctccgcatttgatgaaaggaggaacaggtacctagaggaacatcccagtgcg

SEQ ID NO: 19139 - DNA, 80 bp, synthetic construct
  misc_feature 1..80: note = Synthetic: >NC_004905.2-cand-330-409
  source 1..80: mol_type = other DNA
ggagagacgggaaatgggtgagagagctgattctgtatgacaaagaggagataaggagaatttggcgtcaagcgaacaat

SEQ ID NO: 19140 - DNA, 80 bp, synthetic construct
  misc_feature 1..80: note = Synthetic: >NC_004905.2-cand-410-489
  source 1..80: mol_type = other DNA
ggagaagacgcaactgctggtctcactcatatgatgatctggcattccaacctaaatgatgccacataccagagaacaag

SEQ ID NO: 19141 - DNA, 80 bp, synthetic construct
  misc_feature 1..80: note = Synthetic: >NC_004905.2-cand-490-569
  source 1..80: mol_type = other DNA
agccctcgtgcggactggaatggaccccagaatgtgctctctgatgcaaggatcaaccctcccgaggagatctggagctg

SEQ ID NO: 19142 - DNA, 80 bp, synthetic construct
  misc_feature 1..80: note = Synthetic: >NC_004905.2-cand-570-649
  source 1..80: mol_type = other DNA
ctggtgcagcaataaagggagtcgggacaatggtaatggaactaattcggatgataaagcgaggcattaatgaccggaac

SEQ ID NO: 19143 - DNA, 80 bp, synthetic construct
  misc_feature 1..80: note = Synthetic: >NC_004911.1-cand-1450-1529
  source 1..80: mol_type = other DNA
agcaaaaagaagtcttacataaatcggacaggaacatttgagttcacaagctttttctaccgctatgggtttgtagccaa

SEQ ID NO: 19144 - DNA, 80 bp, synthetic construct
  misc_feature 1..80: note = Synthetic: >NC_004911.1-cand-1540-1619
  source 1..80: mol_type = other DNA
gagctgcccagctttggagtttccggaattaatgaatcggctgacatgagcattggagttacagtgataaagaataatat

SEQ ID NO: 19145 - DNA, 80 bp, synthetic construct
  misc_feature 1..80: note = Synthetic: >NC_004911.1-cand-1620-1699
  source 1..80: mol_type = other DNA
gataaacaacgaccttggaccagcaacagcccagatggctcttcagctgttcattaaagactacagatacacctaccgat

SEQ ID NO: 19146 - DNA, 80 bp, synthetic construct
  misc_feature 1..80: note = Synthetic: >NC_004911.1-cand-1710-1789
  source 1..80: mol_type = other DNA
tgatacacaaattcaaactagaagatcatttgaattgaagaagctgtgggagcagacccgctcaaaggcaggactgttgg

SEQ ID NO: 19147 - DNA, 80 bp, synthetic construct
  misc_feature 1..80: note = Synthetic: >NC_004911.1-cand-1790-1869
  source 1..80: mol_type = other DNA
tttcagatggagggccgaatttatacaacatccggaatcttcacattccagaagtttgcttgaagtgggagttgatggat

SEQ ID NO: 19148 - DNA, 80 bp, synthetic construct
  misc_feature 1..80: note = Synthetic: >NC_004911.1-cand-1880-1959
  source 1..80: mol_type = other DNA
agggaagactgtgtaaccctctgaacccgtttgtcagtcataaggaagttgaatccgtcaacaatgctgtggtaatgcca

SEQ ID NO: 19149 - DNA, 80 bp, synthetic construct
  misc_feature 1..80: note = Synthetic: >NC_004911.1-cand-1970-2049
  source 1..80: mol_type = other DNA
cggccaagagcatggaatatgatgccgttgcaactacacattcatggattcccaagagaaatcgctccattctcaacact

SEQ ID NO: 19150 - DNA, 80 bp, synthetic construct
  misc_feature 1..80: note = Synthetic: >NC_004911.1-cand-2150-2229
  source 1..80: mol_type = other DNA
tttccagcatgatggaggccatggtgtctagggcccgaattgatgcacggattgacttcgagtctggaaggattaagaaa

SEQ ID NO: 19151 - DNA, 80 bp, synthetic construct
  misc_feature 1..80: note = Synthetic: >NC_004912.1-cand-90-169
  source 1..80: mol_type = other DNA
ggaagacccgaaaattgaaacaaataagttcgctgcaatatgcacacacttagaagtctgcttcatgtattcagacttcc

SEQ ID NO: 19152 - DNA, 80 bp, synthetic construct
  misc_feature 1..80: note = Synthetic: >NC_004912.1-cand-160-239
  source 1..80: mol_type = other DNA
tcagacttccatttcattgacgaacgaggcgaatcaataattgtggaatctggtgatccaaatgcattgttgaagcacag

SEQ ID NO: 19153 - DNA, 80 bp, synthetic construct
  misc_feature 1..80: note = Synthetic: >NC_004912.1-cand-240-319
  source 1..80: mol_type = other DNA
gtttgaaataattgaaggaagagaccgagcaatggcctggacagtggtgaatagcatctgcaacacaacaggagtcgata

SEQ ID NO: 19154 - DNA, 80 bp, synthetic construct
  misc_feature 1..80: note = Synthetic: >NC_004912.1-cand-330-409
  source 1..80: mol_type = other DNA
tcttccggatctatacgactacaaggaaaaccgattcactgaaattggtgtgacacggagggaagttcacatatattact

SEQ ID NO: 19155 - DNA, 80 bp, synthetic construct
  misc_feature 1..80: note = Synthetic: >NC_004912.1-cand-420-499
  source 1..80: mol_type = other DNA
taacaagataaaatccgagaaaacacatatccacatcttttcattcactggagaagaaatggccactaaagctgactaca

SEQ ID NO: 19156 - DNA, 80 bp, synthetic construct
  misc_feature 1..80: note = Synthetic: >NC_004912.1-cand-490-569
  source 1..80: mol_type = other DNA
gctgactacacccttgatgaagagagcagggcaagaataaaaaccagactattcaccataagacaggaaatggcaagcag

SEQ ID NO: 19157 - DNA, 80 bp, synthetic construct
  misc_feature 1..80: note = Synthetic: >NC_004912.1-cand-660-739
  source 1..80: mol_type = other DNA
cgaccaaagtctcccacctaacttctccagccttgaaaactttagagcctatgtggatggattcaaaccgaacggctgca

SEQ ID NO: 19158 - DNA, 80 bp, synthetic construct
  misc_feature 1..80: note = Synthetic: >NC_004912.1-cand-830-909
  source 1..80: mol_type = other DNA
atggacctccctgctcccagcggtcgaaattcttgctgatggatgctctgaaattaagcattgaggacccgagccatgag

SEQ ID NO: 19159 - DNA, 80 bp, synthetic construct
  misc_feature 1..80: note = Synthetic: >NC_005062.1-cand-4150-4229
  source 1..80: mol_type = other DNA
tggaattaggctgctggctttttgggaactggcttcacgcagggacagacggtcattcagtgaaccgttgaccgttgtgg

SEQ ID NO: 19160 - DNA, 80 bp, synthetic construct
  misc_feature 1..80: note = Synthetic: >NC_005062.1-cand-4240-4319
  source 1..80: mol_type = other DNA
gaccttggcaagcggcatgatgcgacacacatcccaggaggccctctgtgccttggcagcggcttcgtttctcctgctga

SEQ ID NO: 19161 - DNA, 80 bp, synthetic construct
  misc_feature 1..80: note = Synthetic: >NC_005062.1-cand-4320-4399
  source 1..80: mol_type = other DNA
tgctggtcttgggaacgaggaagatgcaactagtcgctgagtggagtggttgtgtggaatggcacccagacctggccgat

SEQ ID NO: 19162 - DNA, 80 bp, synthetic construct
  misc_feature 1..80: note = Synthetic: >NC_005062.1-cand-4400-4479
  source 1..80: mol_type = other DNA
gagggtggagaaatcagcttgcgagtccgacaggacgctttgggaaattttcacctgacagagctggagaaggaggagag

SEQ ID NO: 19163 - DNA, 80 bp, synthetic construct
  misc_feature 1..80: note = Synthetic: >NC_005062.1-cand-4480-4559
  source 1..80: mol_type = other DNA
aatgatggccttctggctactggccggcttgacggcctcggccttacactggacaggaatccttgtagtgatgggattgt

SEQ ID NO: 19164 - DNA, 80 bp, synthetic construct
  misc_feature 1..80: note = Synthetic: >NC_005062.1-cand-4550-4629
  source 1..80: mol_type = other DNA
atgggattgtggaccatgtcggaaatgttgaggtcggcacgcaggtctgacttagtcttctccggacagagcggctcaga

SEQ ID NO: 19165 - DNA, 80 bp, synthetic construct
  misc_feature 1..80: note = Synthetic: >NC_005062.1-cand-4640-4719
  source 1..80: mol_type = other DNA
cagcctttcgaggtcagagatggtgtctataggattctgagtcccggcctgctttggggacaccgccaggtcggagttgg

SEQ ID NO: 19166 - DNA, 80 bp, synthetic construct
  misc_feature 1..80: note = Synthetic: >NC_005062.1-cand-4720-4799
  source 1..80: mol_type = other DNA
ctttggttctaagggcgtcctccacacaatgtggcacgtgactaggggagctgccatattcattgacaatgcagtggctg

SEQ ID NO: 19167 - DNA, 80 bp, synthetic construct
  misc_feature 1..80: note = Synthetic: >NC_005062.1-cand-4850-4929
  source 1..80: mol_type = other DNA
tggagcctggaggagaaatggaaaggagaaaaggttcaagttcatgcctttcctccaggaagagctcatgaagtgcatca

SEQ ID NO: 19168 - DNA, 80 bp, synthetic construct
  misc_feature 1..80: note = Synthetic: >NC_005062.1-cand-4880-4959
  source 1..80: mol_type = other DNA
aaggttcaagttcatgcctttcctccaggaagagctcatgaagtgcatcagtgccaacctggagaattggttctggatac

SEQ ID NO: 19169 - DNA, 80 bp, synthetic construct
  misc_feature 1..80: note = Synthetic: >NC_005062.1-cand-4950-5029
  source 1..80: mol_type = other DNA
ttctggatactggaaggaggattggtgcaatacccattgatctggcgaaagggacatccggcagccccatactcaacgcc

SEQ ID NO: 19170 - DNA, 80 bp, synthetic construct
  misc_feature 1..80: note = Synthetic: >NC_005062.1-cand-5040-5119
  source 1..80: mol_type = other DNA
tggttgggttatatgggaatggactgagaacaaatgagacttatgtcagcagcatcgcccaaggagaagtggaaaaaagc

SEQ ID NO: 19171 - DNA, 80 bp, synthetic construct
  misc_feature 1..80: note = Synthetic: >NC_005062.1-cand-5120-5199
  source 1..80: mol_type = other DNA
cggcccaacttgcctcaagcagttgtgggcacaggctggacttcgaagggaacgatcacagtgctggacatgcaccctgg

SEQ ID NO: 19172 - DNA, 80 bp, synthetic construct
  misc_feature 1..80: note = Synthetic: >NC_005062.1-cand-5200-5279
  source 1..80: mol_type = other DNA
atcagggaagactcacagagttctcccagagctcatccgtcaatgcatagataaacgtctgagaacactggtgttggctc

SEQ ID NO: 19173 - DNA, 80 bp, synthetic construct
  misc_feature 1..80: note = Synthetic: >NC_005062.1-cand-5270-5349
  source 1..80: mol_type = other DNA
gtgttggctccaactcgcgtggtactcaaggaaatggagcgtgcattgagtggaaaaagagtgaggtttcattcacctgc

SEQ ID NO: 19174 - DNA, 80 bp, synthetic construct
  misc_feature 1..80: note = Synthetic: >NC_005062.1-cand-5370-5449
  source 1..80: mol_type = other DNA
gaaacgctatcgttgatgtgatgtgtcatgcgacctacgtcaacagaaggctgctgcctcagggacgccaaaattgggaa

SEQ ID NO: 19175 - DNA, 80 bp, synthetic construct
  misc_feature 1..80: note = Synthetic: >NC_005062.1-cand-10610-10689
  source 1..80: mol_type = other DNA
cttccgggaggagggaagagagaaattggcagctctcttcaggaaatttcctcctcctataccaaattccccctcatctg

SEQ ID NO: 19176 - DNA, 80 bp, synthetic construct
  misc_feature 1..80: note = Synthetic: >NC_005077.1-cand-10-89
  source 1..80: mol_type = other DNA
taggcgtttttactcacgcaataatttgtccacactattgttgggtgtgacctagcataatgggacagttaatcagtttc

SEQ ID NO: 19177 - DNA, 80 bp, synthetic construct
  misc_feature 1..80: note = Synthetic: >NC_005077.1-cand-90-169
  source 1..80: mol_type = other DNA
tttcaggacataccgatcttctttgaagaagcactcaatgtagccttggctgtggttacactgcttgctattataaaggg

SEQ ID NO: 19178 - DNA, 80 bp, synthetic construct
  misc_feature 1..80: note = Synthetic: >NC_005077.1-cand-170-249
  source 1..80: mol_type = other DNA
cattgtgaatgtttggaaatcaggaattcttcagctgtttgtgttcttggttctggcgggaaggtcatgctctttcaaag

SEQ ID NO: 19179 - DNA, 80 bp, synthetic construct
  misc_feature 1..80: note = Synthetic: >NC_005077.1-cand-250-329
  source 1..80: mol_type = other DNA
ttggtcatcatacaaattttgagtcatttacagttaagctaggaggtgtcttccatgaattaccttcactatgtagggtc

SEQ ID NO: 19180 - DNA, 80 bp, synthetic construct
  misc_feature 1..80: note = Synthetic: >NC_005077.1-cand-330-409
  source 1..80: mol_type = other DNA
aacaactcttacagtctaattaggctttctcataacagtaatcaggcattatcagttgagtatgtggatgtgcaccctgt

SEQ ID NO: 19181 - DNA, 80 bp, synthetic construct
  misc_feature 1..80: note = Synthetic: >NC_005077.1-cand-410-489
  source 1..80: mol_type = other DNA
cctctgttcgtccagtccaaccatactcgacaactacactcaatgtataaaaggctctccagagtttgattggattcttg

SEQ ID NO: 19182 - DNA, 80 bp, synthetic construct
  misc_feature 1..80: note = Synthetic: >NC_005077.1-cand-490-569
  source 1..80: mol_type = other DNA
ggtggacaattaagggattgggacatgactttttgagggatccaagaatctgctgtgagcctaaaaagacaactaatgct

SEQ ID NO: 19183 - DNA, 80 bp, synthetic construct
  misc_feature 1..80: note = Synthetic: >NC_005077.1-cand-570-649
  source 1..80: mol_type = other DNA
gaatttacattccaattgaatttaacagatagtcctgagacccatcactataggagcaagattgaggtaggcatccgaca

SEQ ID NO: 19184 - DNA, 80 bp, synthetic construct
  misc_feature 1..80: note = Synthetic: >NC_005077.1-cand-640-719
  source 1..80: mol_type = other DNA
gcatccgacatttattcgggaactacataactaatgatagctattcaaaaatgtctgtggttatgaggaacactacctgg

SEQ ID NO: 19185 - DNA, 80 bp, synthetic construct
  misc_feature 1..80: note = Synthetic: >NC_005077.1-cand-710-789
  source 1..80: mol_type = other DNA
cactacctgggaaggtcaatgctcaaatagtcatgtgaatacactgagatttcttgttaaaaatgcaggttaccttgttg

SEQ ID NO: 19186 - DNA, 80 bp, synthetic construct
  misc_feature 1..80: note = Synthetic: >NC_005077.1-cand-790-869
  source 1..80: mol_type = other DNA
gaagaaaaccactggcattttttagttggtcactttctgacccaaagggtaatgacatgccaggtggttactgtcttgaa

SEQ ID NO: 19187 - DNA, 80 bp, synthetic construct
  misc_feature 1..80: note = Synthetic: >NC_005077.1-cand-890-969
  source 1..80: mol_type = other DNA
ggatttgaagtgctttggcaacacagctgtcgccaagtgtaatttgaatcatgattctgagttctgtgacatgttgaggc

SEQ ID NO: 19188 - DNA, 80 bp, synthetic construct
  misc_feature 1..80: note = Synthetic: >NC_005077.1-cand-950-1029
  source 1..80: mol_type = other DNA
gttctgtgacatgttgaggctgtttgatttcaataagaatgccattgaaaaactgaacaaccaaactaaaactgctgtca

SEQ ID NO: 19189 - DNA, 80 bp, synthetic construct
  misc_feature 1..80: note = Synthetic: >NC_005077.1-cand-1020-1099
  source 1..80: mol_type = other DNA
actgctgtcaacatgttgactcactcaataaatagtctaatatctgataatttattgatgagaaacaaactgaaggagat

SEQ ID NO: 19190 - DNA, 80 bp, synthetic construct
  misc_feature 1..80: note = Synthetic: >NC_005077.1-cand-1100-1179
  source 1..80: mol_type = other DNA
tttgaaggtcccatattgcaactacacaagattctggtacataaaccacacgaaatctggtgagcactcactgcctcggt

SEQ ID NO: 19191 - DNA, 80 bp, synthetic construct
  misc_feature 1..80: note = Synthetic: >NC_005228.1-cand-570-649
  source 1..80: mol_type = other DNA
gaaaagacatattgtgtgtcaggacaattaattgaagggaattgctttaacccgctgcacactattgctatatctcaacc

SEQ ID NO: 19192 - DNA, 80 bp, synthetic construct
  misc_feature 1..80: note = Synthetic: >NC_005228.1-cand-650-729
  source 1..80: mol_type = other DNA
aactcatacctatgatattatgacactagctgtgcattgcttttttatttcaaaaaaaggtggtacagatgacacgttaa

SEQ ID NO: 19193 - DNA, 80 bp, synthetic construct
  misc_feature 1..80: note = Synthetic: >NC_005228.1-cand-740-819
  source 1..80: mol_type = other DNA
gcagtttgaaaccctagttgagaaaacaggttgtacagagaatgcacttaaaggttattatgcatgtattttaggcacaa

SEQ ID NO: 19194 - DNA, 80 bp, synthetic construct
  misc_feature 1..80: note = Synthetic: >NC_005228.1-cand-820-899
  source 1..80: mol_type = other DNA
gttctgaagtggtatatgttcctgcaatggatgattataggtcatcagagatattgtctaggatgaccacagcaccccat

SEQ ID NO: 19195 - DNA, 80 bp, synthetic construct
  misc_feature 1..80: note = Synthetic: >NC_005228.1-cand-900-979
  source 1..80: mol_type = other DNA
ggagaagaccatgacatagaccctaatgccattagctcactgaggattgtaggacaacttactggtaaggcaccttctac

SEQ ID NO: 19196 - DNA, 80 bp, synthetic construct
  misc_feature 1..80: note = Synthetic: >NC_005228.1-cand-980-1059
  source 1..80: mol_type = other DNA
tgagtcttcagacactgtacaagggatagcatttgcaggaacaccactatatacttctacttcaatacttgtgcgaaaag

SEQ ID NO: 19197 - DNA, 80 bp, synthetic construct
  misc_feature 1..80: note = Synthetic: >NC_005228.1-cand-1060-1139
  source 1..80: mol_type = other DNA
aggacccaatttatttatggtcacctggtatcattcctgaaggtaatcattcacaatgcgataagaagaccctcccactt

SEQ ID NO: 19198 - DNA, 80 bp, synthetic construct
  misc_feature 1..80: note = Synthetic: >NC_005228.1-cand-1140-1219
  source 1..80: mol_type = other DNA
acatggacaggctttataactctaccaggagagattgagaaaacaactcagtgcacagtcttctgtacattatctggccc

SEQ ID NO: 19199 - DNA, 80 bp, synthetic construct
  misc_feature 1..80: note = Synthetic: >NC_005228.1-cand-1220-1299
  source 1..80: mol_type = other DNA
gggggcagactgtgaagcctattcagatacaggtatcttcaacataagttcacctacgtgcttagttaatagagtacaga

SEQ ID NO: 19200 - DNA, 80 bp, synthetic construct
  misc_feature 1..80: note = Synthetic: >NC_005228.1-cand-1310-1389
  source 1..80: mol_type = other DNA
ggcagagcagcaggtaaagtttgtttgtcaaagggttgatttagacattactgtatattgtaatggtgtaaaaaaagtga

SEQ ID NO: 19201 - DNA, 80 bp, synthetic construct
  misc_feature 1..80: note = Synthetic: >NC_005228.1-cand-1400-1479
  source 1..80: mol_type = other DNA
aaccttagtaataggacaatgtatatacacatttactagtatattttcattgatgccaggtgttgcacattctcttgcag

SEQ ID NO: 19202 - DNA, 80 bp, synthetic construct
  misc_feature 1..80: note = Synthetic: >NC_005228.1-cand-1480-1559
  source 1..80: mol_type = other DNA
ttgaattatgtgttcctgggctgcatggatgggcaactatctctttattgattacattttgctttggctggctagctatt

SEQ ID NO: 19203 - DNA, 80 bp, synthetic construct
  misc_feature 1..80: note = Synthetic: >NC_005228.1-cand-1560-1639
  source 1..80: mol_type = other DNA
cctctattatctatgattattataaggtttctattaattttcacttacttatgctcaaaatatagtactgattctaaatt

SEQ ID NO: 19204 - DNA, 80 bp, synthetic construct
  misc_feature 1..80: note = Synthetic: >NC_005228.1-cand-1640-1719
  source 1..80: mol_type = other DNA
taaacttataattgaaaaggtgaaacaggaataccagaaaacaatgggttctatggtttgtgaagtttgtcaacaaggat

SEQ ID NO: 19205 - DNA, 80 bp, synthetic construct
  misc_feature 1..80: note = Synthetic: >NC_005228.1-cand-1720-1799
  source 1..80: mol_type = other DNA
gtgagactgcaaaggagctagaatctcacaaaaaaagctgtccacatggacagtgtccatactgtctcaacccaactgaa

SEQ ID NO: 19206 - DNA, 80 bp, synthetic construct
  misc_feature 1..80: note = Synthetic: >NC_005228.1-cand-1800-1879
  source 1..80: mol_type = other DNA
gctactgagtctgccctacaggctcattttaaagtctgtaagttgacaactaggtttcaagagaatttaaagaaatcatt

SEQ ID NO: 19207 - DNA, 80 bp, synthetic construct
  misc_feature 1..80: note = Synthetic: >NC_005301.3-cand-8210-8289
  source 1..80: mol_type = other DNA
tcgtagtaggacaagttccacagctgaggatagcagcagtgtgagcgacacaactgctgcttcccatgactcaggatcat

SEQ ID NO: 19208 - DNA, 80 bp, synthetic construct
  misc_feature 1..80: note = Synthetic: >NC_005301.3-cand-8290-8369
  source 1..80: mol_type = other DNA
catcctcaagcttctcttttgagctcaatagacccctgtctgaaactgaactacagttcattaaagcactaagtagtctc

SEQ ID NO: 19209 - DNA, 80 bp, synthetic construct
  misc_feature 1..80: note = Synthetic: >NC_005301.3-cand-8370-8449
  source 1..80: mol_type = other DNA
aagtcaacacaagcctgtgaagtgattcaaaatagaattacaggtctttattgcaacagcaacgaaggacctcttgatag

SEQ ID NO: 19210 - DNA, 80 bp, synthetic construct
  misc_feature 1..80: note = Synthetic: >NC_005301.3-cand-8450-8529
  source 1..80: mol_type = other DNA
gcataatgtcatttacagcagcagaatggcagactcttgcgattggctaaaggatggtaaaaggagagggaatctagaac

SEQ ID NO: 19211 - DNA, 80 bp, synthetic construct
  misc_feature 1..80: note = Synthetic: >NC_005301.3-cand-8510-8589
  source 1..80: mol_type = other DNA
aaggagagggaatctagaactagcgaataggatccaatctgtactgtgtattctgatagcaggatattacaggtcatttg

SEQ ID NO: 19212 - DNA, 80 bp, synthetic construct
  misc_feature 1..80: note = Synthetic: >NC_005301.3-cand-8610-8689
  source 1..80: mol_type = other DNA
caggtaaaggcatcattgaatagagacgacaataaaatcatagaggatcctatgatacaactaattccagaaaagctgag

SEQ ID NO: 19213 - DNA, 80 bp, synthetic construct
  misc_feature 1..80: note = Synthetic: >NC_005301.3-cand-8690-8769
  source 1..80: mol_type = other DNA
gagagagttagaaaggttaggtgtttctagaatggaagtcgatgagctaatgccaagcattagtcctgatgacaccttag

SEQ ID NO: 19214 - DNA, 80 bp, synthetic construct
  misc_feature 1..80: note = Synthetic: >NC_005301.3-cand-8770-8849
  source 1..80: mol_type = other DNA
cccagcttgtagcgaaaaaactcattagcctcaatgtttcgacagaagaatactcagctgaggtatctagactcaaacaa

SEQ ID NO: 19215 - DNA, 80 bp, synthetic construct
  misc_feature 1..80: note = Synthetic: >NC_005301.3-cand-8850-8929
  source 1..80: mol_type = other DNA
acactgacagcccgaaatgttttgcacgggttagctggagggattaaggagctttcgcttccaatatatacaatattcat

SEQ ID NO: 19216 - DNA, 80 bp, synthetic construct
  misc_feature 1..80: note = Synthetic: >NC_005301.3-cand-8930-9009
  source 1..80: mol_type = other DNA
gaaatcttacttctttaaagacaatgttttcctgtcactaacagatagatggtctaccaagcacagtacaaactatcgtg

SEQ ID NO: 19217 - DNA, 80 bp, synthetic construct
  misc_feature 1..80: note = Synthetic: >NC_005301.3-cand-9010-9089
  source 1..80: mol_type = other DNA
atagttgtggcaaacaattaaaaggtagaataattaccaagtatactcactggttggacacttttctgggctgctctgtc

SEQ ID NO: 19218 - DNA, 80 bp, synthetic construct
  misc_feature 1..80: note = Synthetic: >NC_005301.3-cand-9090-9169
  source 1..80: mol_type = other DNA
tccatcaacaggcatactactgttaaagagccctccttattcaatccgaacatcagatgtgtgaatctgatcacatttga

SEQ ID NO: 19219 - DNA, 80 bp, synthetic construct
  misc_feature 1..80: note = Synthetic: >NC_005301.3-cand-9170-9249
  source 1..80: mol_type = other DNA
ggacggcctgagagaactatcagtgatacagagtcaccttaaagtctttgaaaatgagttcaccaacttaaatcttcaat

SEQ ID NO: 19220 - DNA, 80 bp, synthetic construct
  misc_feature 1..80: note = Synthetic: >NC_005301.3-cand-9250-9329
  source 1..80: mol_type = other DNA
tctctgatccgaacagacagaaacttagaatagttgagtctagacctgcagaatctgagctagaggcaaaccgtgcagta

SEQ ID NO: 19221 - DNA, 80 bp, synthetic construct
  misc_feature 1..80: note = Synthetic: >NC_005301.3-cand-9330-9409
  source 1..80: mol_type = other DNA
attgtcaagaccaaattgttttcagcaactgaacaagttcgactatccaacaaccctgcagttgtcatgggctacctatt

SEQ ID NO: 19222 - DNA, 80 bp, synthetic construct
  misc_feature 1..80: note = Synthetic: >NC_005301.3-cand-9410-9489
  source 1..80: mol_type = other DNA
ggatgaatcagcaatttcagaagtcaagcctaccaaggttgacttctcaaatttacttaaagaccgcttcaaaataatgc

SEQ ID NO: 19223 - DNA, 80 bp, synthetic construct
  misc_feature 1..80: note = Synthetic: >NC_005302.1-cand-1350-1429
  source 1..80: mol_type = other DNA
tttgaagttcaaaaaacagggttcaacattcaggacatggacatagtggcctctgagcacttgctacaccaatcccttgt

SEQ ID NO: 19224 - DNA, 80 bp, synthetic construct
  misc_feature 1..80: note = Synthetic: >NC_005302.1-cand-1430-1509
  source 1..80: mol_type = other DNA
tggcaagcaatccccattccagaacgcctacaacgtcaagggcaatgccaccagtgctaacatcatttaaaatacaaact

SEQ ID NO: 19225 - DNA, 80 bp, synthetic construct
  misc_feature 1..80: note = Synthetic: >NC_005302.1-cand-1510-1589
  source 1..80: mol_type = other DNA
gctctgtactcaacttccttccttctgaaccgccatccataattgcaatacttaatcatgcttttttacttgcttatgta

SEQ ID NO: 19226 - DNA, 80 bp, synthetic construct
  misc_feature 1..80: note = Synthetic: >NC_005302.1-cand-1580-1659
  source 1..80: mol_type = other DNA
tgcttatgtaaccttattttattaacctttctctattttctcttgttttaaacacttaaagggctgtgcggcaacggtat

SEQ ID NO: 19227 - DNA, 80 bp, synthetic construct
  misc_feature 1..80: note = Synthetic: >NC_005831.2-cand-0-79
  source 1..80: mol_type = other DNA
aagaatttttctatctatagatagagaattttcttatttagactttgtgtctactcttctcaactaaacgaaatttttct

SEQ ID NO: 19228 - DNA, 80 bp, synthetic construct
  misc_feature 1..80: note = Synthetic: >NC_005831.2-cand-80-159
  source 1..80: mol_type = other DNA
agtgctgtcatttgttatggcagtcctagtgtaattgaaatttcgtcaagtttgtaaactggttaggcaagtgttgtatt

SEQ ID NO: 19229 - DNA, 80 bp, synthetic construct
  misc_feature 1..80: note = Synthetic: >NC_005831.2-cand-160-239
  source 1..80: mol_type = other DNA
ttctgtgtctaagcactggtgattctgttcactagtgcatacattgatatttaagtggtgttccgtcactgcttattgtg

SEQ ID NO: 19230 - DNA, 80 bp, synthetic construct
  misc_feature 1..80: note = Synthetic: >NC_005831.2-cand-240-319
  source 1..80: mol_type = other DNA
gaagcaacgttctgtcgttgtggaaaccaataactgctaaccatgttttacaatcaagtgacacttgctgttgcaagtga

SEQ ID NO: 19231 - DNA, 80 bp, synthetic construct
  misc_feature 1..80: note = Synthetic: >NC_005831.2-cand-320-399
  source 1..80: mol_type = other DNA
ttcggaaatttcaggttttggttttgccattccttctgtagccgttcgcacctatagcgaagccgctgcacaaggttttc

SEQ ID NO: 19232 - DNA, 80 bp, synthetic construct
  misc_feature 1..80: note = Synthetic: >NC_005831.2-cand-400-479
  source 1..80: mol_type = other DNA
aggcatgccgttttgttgcttttggcttacaggattgtgtaaccggtattaatgatgatgattatgtcattgcattgact

SEQ ID NO: 19233 - DNA, 80 bp, synthetic construct
  misc_feature 1..80: note = Synthetic: >NC_005831.2-cand-480-559
  source 1..80: mol_type = other DNA
ggtactaatcagctctgtgccaaaattttacctttttctgatagaccccttaatttgcgaggttggctcattttttctaa

SEQ ID NO: 19234 - DNA, 80 bp, synthetic construct
  misc_feature 1..80: note = Synthetic: >NC_005831.2-cand-560-639
  source 1..80: mol_type = other DNA
cagcaattatgttcttcaggactttgatgttgtttttggccatggtgcaggaagtgtggtttttgtggataagtacatgt

SEQ ID NO: 19235 - DNA, 80 bp, synthetic construct
  misc_feature 1..80: note = Synthetic: >NC_005831.2-cand-640-719
  source 1..80: mol_type = other DNA
gtggttttgatggtaaacctgtgttacctaaaaacatgtgggaatttagggattactttaataataatactgatagtatt

SEQ ID NO: 19236 - DNA, 80 bp, synthetic construct
  misc_feature 1..80: note = Synthetic: >NC_005831.2-cand-730-809
  source 1..80: mol_type = other DNA
gtgtcacttatcaactagcatgggatgttatacgtaaagacctttcttatgaacagcaaaatgttttagccattgagagc

SEQ ID NO: 19237 - DNA, 80 bp, synthetic construct
  misc_feature 1..80: note = Synthetic: >NC_005831.2-cand-810-889
  source 1..80: mol_type = other DNA
attcattaccttggtactacaggtcatactttgaagtctggttgcaaacttactaatgctaagccgcctaaatattcttc

SEQ ID NO: 19238 - DNA, 80 bp, synthetic construct
  misc_feature 1..80: note = Synthetic: >NC_005831.2-cand-890-969
  source 1..80: mol_type = other DNA
taaggttgttttgagtggtgaatggaatgctgtgtatagggcgtttggttcaccatttattacaaatggtatgtcattgc

SEQ ID NO: 19239 - DNA, 80 bp, synthetic construct
  misc_feature 1..80: note = Synthetic: >NC_006313.1-cand-1610-1689
  source 1..80: mol_type = other DNA
ctcatggtccacatagtcagattgccttatgtgtgcagaagcacactcactctgtttaactatgtatatgaaatgatttc

SEQ ID NO: 19240 - DNA, 80 bp, synthetic construct
  misc_feature 1..80: note = Synthetic: >NC_006313.1-cand-1690-1769
  source 1..80: mol_type = other DNA
taccacgcaaaagatgacctattatgcctagattctcattcatcatatccaatgctatacatacatccaggaatttgaca

SEQ ID NO: 19241 - DNA, 80 bp, synthetic construct
  misc_feature 1..80: note = Synthetic: >NC_006313.1-cand-1770-1849
  source 1..80: mol_type = other DNA
tgtgatgggttcatcatctgattgaattgcaaatcactcataaacggtgctagatgttcttcaaataaatagggatagtt

SEQ ID NO: 19242 - DNA, 80 bp, synthetic construct
  misc_feature 1..80: note = Synthetic: >NC_006313.1-cand-1850-1929
  source 1..80: mol_type = other DNA
ccttttaatagagtgtaaaatatgatttagacttagtctatcttcaatatgtttttgaatcttgggcttgacagcccaaa

SEQ ID NO: 19243 - DNA, 80 bp, synthetic construct
  misc_feature 1..80: note = Synthetic: >NC_006313.1-cand-1930-2009
  source 1..80: mol_type = other DNA
agagatttggattacttaaaataggaggtgcagaaggagatttcacatcagagaaaacccattctccgatttcacatgcg

SEQ ID NO: 19244 - DNA, 80 bp, synthetic construct
  misc_feature 1..80: note = Synthetic: >NC_006313.1-cand-1980-2059
  source 1..80: mol_type = other DNA
gagaaaacccattctccgatttcacatgcgttagtgagaactaatgtgaagtaatcccataaaatagatcttgcaaattg

SEQ ID NO: 19245 - DNA, 80 bp, synthetic construct
  misc_feature 1..80: note = Synthetic: >NC_006313.1-cand-2060-2139
  source 1..80: mol_type = other DNA
tgaaatttttgctagagaatcctgacagtaaacaacacctggccattccaaacatatacagcatccacacttattcacat

SEQ ID NO: 19246 - DNA, 80 bp, synthetic construct
  misc_feature 1..80: note = Synthetic: >NC_006313.1-cand-2140-2219
  source 1..80: mol_type = other DNA
tattgtacaattctttcagatacataaaacctcctttgccgtctctcacacatttactacccatacttttacagaaccct

SEQ ID NO: 19247 - DNA, 80 bp, synthetic construct
  misc_feature 1..80: note = Synthetic: >NC_006313.1-cand-2220-2299
  source 1..80: mol_type = other DNA
atgaaacctgaggccacagatgactgaaatgctgacttatttattgattctgctaaaatcttttttgccccctttataaa

SEQ ID NO: 19248 - DNA, 80 bp, synthetic construct
  misc_feature 1..80: note = Synthetic: >NC_006313.1-cand-2300-2379
  source 1..80: mol_type = other DNA
gttctttgacattctggattgtagtgtctttatcagacttggtacactttctctttccaagattcttttactagacataa

SEQ ID NO: 19249 - DNA, 80 bp, synthetic construct
  misc_feature 1..80: note = Synthetic: >NC_006313.1-cand-2380-2459
  source 1..80: mol_type = other DNA
tttttgtccttaaaaccagtctcaaatctccaaaagtggacggattcaaccatttatgccttaaagcctcaacaatgtca

SEQ ID NO: 19250 - DNA, 80 bp, synthetic construct
  misc_feature 1..80: note = Synthetic: >NC_006313.1-cand-2460-2539
  source 1..80: mol_type = other DNA
ttttcagcaaatcctgcatacaataaaaaccctcttaaagcttcatcaccccccctgccaatcaaaccaatcaaattttc

SEQ ID NO: 19251 - DNA, 80 bp, synthetic construct
  misc_feature 1..80: note = Synthetic: >NC_006313.1-cand-2540-2619
  source 1..80: mol_type = other DNA
ttcaaacacatgacccttctttatttccaaaaatacttttcttgcccccctccttatcaaacgaagcagttcctgattgc

SEQ ID NO: 19252 - DNA, 80 bp, synthetic construct
  misc_feature 1..80: note = Synthetic: >NC_006313.1-cand-2620-2699
  source 1..80: mol_type = other DNA
caaaagaattctctatatttctctggagacgataacccctcgatccatctgtccaatctttgacatcttggttgacaatg

SEQ ID NO: 19253 - DNA, 80 bp, synthetic construct
  misc_feature 1..80: note = Synthetic: >NC_006313.1-cand-2700-2779
  source 1..80: mol_type = other DNA
gtcaggaaaggcgtctctttatagccagaatagctaatcaatcgattcaccctctctgatattcttgagacaatatccac

SEQ ID NO: 19254 - DNA, 80 bp, synthetic construct
  misc_feature 1..80: note = Synthetic: >NC_006313.1-cand-2780-2859
  source 1..80: mol_type = other DNA
tcctacaccattggccacacactgatcacaaatggtatcaatagtctctgctaattgagttggtgttttacacttcacat

SEQ ID NO: 19255 - DNA, 80 bp, synthetic construct
  misc_feature 1..80: note = Synthetic: >NC_007369.1-cand-320-399
  source 1..80: mol_type = other DNA
gggcccatatacaggagagtagatggaaaatggatgagggaactcgtcctttatgacaaagaagagataaggcgaatctg

SEQ ID NO: 19256 - DNA, 80 bp, synthetic construct
  misc_feature 1..80: note = Synthetic: >NC_007369.1-cand-370-449
  source 1..80: mol_type = other DNA
ttatgacaaagaagagataaggcgaatctggcgccaagccaacaatggtgaggatgcgacagctggtctaactcacataa

SEQ ID NO: 19257 - DNA, 80 bp, synthetic construct
  misc_feature 1..80: note = Synthetic: >NC_007369.1-cand-460-539
  source 1..80: mol_type = other DNA
ttccaatttgaatgatgcaacataccagaggacaagagctcttgttcgaactggaatggatcccagaatgtgctctctga

SEQ ID NO: 19258 - DNA, 80 bp, synthetic construct
  misc_feature 1..80: note = Synthetic: >NC_007369.1-cand-550-629
  source 1..80: mol_type = other DNA
gactctccctagaaggtccggagctgcaggtgctgcagtcaaaggaatcgggacaatggtgatggaactgatcagaatgg

SEQ ID NO: 19259 - DNA, 80 bp, synthetic construct
  misc_feature 1..80: note = Synthetic: >NC_007369.1-cand-640-719
  source 1..80: mol_type = other DNA
gatcaacgatcgaaatttctggagaggtgagaatgggcggaaaacaagaagtgcttatgagagaatgtgcaacattctta

SEQ ID NO: 19260 - DNA, 80 bp, synthetic construct
  misc_feature 1..80: note = Synthetic: >NC_007369.1-cand-890-969
  source 1..80: mol_type = other DNA
gcagtatccagtgggtacgacttcgaaaaagagggatattccttggtgggaatagaccctttcaaactacttcaaaatag

SEQ ID NO: 19261 - DNA, 80 bp, synthetic construct
  misc_feature 1..80: note = Synthetic: >NC_007369.1-cand-940-1019
  source 1..80: mol_type = other DNA
aatagaccctttcaaactacttcaaaatagccaaatatacagcctaatcagacctaacgagaatccagcacacaagagtc

SEQ ID NO: 19262 - DNA, 80 bp, synthetic construct
  misc_feature 1..80: note = Synthetic: >NC_007369.1-cand-1020-1099
  source 1..80: mol_type = other DNA
agctggtgtggatggcatgccattctgctgcatttgaagatttaagattgttaagcttcatcagagggacaaaagtatct

SEQ ID NO: 19263 - DNA, 80 bp, synthetic construct
  misc_feature 1..80: note = Synthetic: >NC_007369.1-cand-1110-1189
  source 1..80: mol_type = other DNA
aactgtcaactagaggagtacaaattgcttcaaatgagaacatggataatatgggatcgagcactcttgaactgagaagc

SEQ ID NO: 19264 - DNA, 80 bp, synthetic construct
  misc_feature 1..80: note = Synthetic: >NC_007369.1-cand-1200-1279
  source 1..80: mol_type = other DNA
ccataaggaccaggagtggaggaaacactaatcaacagagggcctccgcaggccaaaccagtgtgcaacctacgttttct

SEQ ID NO: 19265 - DNA, 80 bp, synthetic construct
  misc_feature 1..80: note = Synthetic: >NC_007369.1-cand-1280-1359
  source 1..80: mol_type = other DNA
gtacaaagaaacctcccatttgaaaagtcaaccatcatggcagcattcactggaaatacggagggaaggacttcagacat

SEQ ID NO: 19266 - DNA, 80 bp, synthetic construct
  misc_feature 1..80: note = Synthetic: >NC_007369.1-cand-1330-1409
  source 1..80: mol_type = other DNA
tggaaatacggagggaaggacttcagacatgagggcagaaatcataagaatgatggaaggtgcaaaaccagaagaagtgt

SEQ ID NO: 19267 - DNA, 80 bp, synthetic construct
  misc_feature 1..80: note = Synthetic: >NC_007369.1-cand-1450-1529
  source 1..80: mol_type = other DNA
ggcaacgaacccgatcgtgccctcttttgatatgagtaatgaaggatcttatttcttcggagacaatgcagaagagtacg

SEQ ID NO: 19268 - DNA, 80 bp, synthetic construct
  misc_feature 1..80: note = Synthetic: >NC_007370.1-cand-50-129
  source 1..80: mol_type = other DNA
aggtagattgctttctttggcatatccggaaacaagttgtagaccaagaactgagtgatgccccattccttgatcggctt

SEQ ID NO: 19269 - DNA, 80 bp, synthetic construct
  misc_feature 1..80: note = Synthetic: >NC_007370.1-cand-160-239
  source 1..80: mol_type = other DNA
ggcaatactctcggtctagacatcaaagcagccacccatgttggaaagcaaattgtagaaaagattctgaaagaagaatc

SEQ ID NO: 19270 - DNA, 80 bp, synthetic construct
  misc_feature 1..80: note = Synthetic: >NC_007370.1-cand-220-299
  source 1..80: mol_type = other DNA
aagattctgaaagaagaatctgatgaggcacttaaaatgaccatggtctccacacctgcttcgcgatacataactgacat

SEQ ID NO: 19271 - DNA, 80 bp, synthetic construct
  misc_feature 1..80: note = Synthetic: >NC_007373.1-cand-1650-1729
  source 1..80: mol_type = other DNA
agtcggttttggtcaatacctatcaatggatcatcagaaattgggaagctgtcaaaattcaatggtctcagaatcctgca

SEQ ID NO: 19272 - DNA, 80 bp, synthetic construct
  misc_feature 1..80: note = Synthetic: >NC_007373.1-cand-1730-1809
  source 1..80: mol_type = other DNA
atgttgtacaacaaaatggaatttgaaccatttcaatctttagtccccaaggccattagaagccaatacagtgggtttgt

SEQ ID NO: 19273 - DNA, 80 bp, synthetic construct
  misc_feature 1..80: note = Synthetic: >NC_007373.1-cand-1810-1889
  source 1..80: mol_type = other DNA
cagaactctattccaacaaatgagagacgtacttgggacatttgacaccacccagataataaagcttctcccttttgcag

SEQ ID NO: 19274 - DNA, 80 bp, synthetic construct
  misc_feature 1..80: note = Synthetic: >NC_007373.1-cand-1860-1939
  source 1..80: mol_type = other DNA
cccagataataaagcttctcccttttgcagccgctccaccaaagcaaagcagaatgcagttctcttcactgactgtaaat

SEQ ID NO: 19275 - DNA, 80 bp, synthetic construct
  misc_feature 1..80: note = Synthetic: >NC_007373.1-cand-1990-2069
  source 1..80: mol_type = other DNA
caactacaacaagaccactaaaagactaacaattctcggaaaagatgccggcactttaattgaagacccagatgaaagca

SEQ ID NO: 19276 - DNA, 80 bp, synthetic construct
  misc_feature 1..80: note = Synthetic: >NC_007373.1-cand-2080-2159
  source 1..80: mol_type = other DNA
ggagtccgccgtcttgagagggtttctcattataggtaaggaagacagaagatacggaccagcattaagcatcaatgaac

SEQ ID NO: 19277 - DNA, 80 bp, synthetic construct
  misc_feature 1..80: note = Synthetic: >NC_007373.1-cand-2180-2259
  source 1..80: mol_type = other DNA
gaaaaggctaatgtgctaatcgggcaaggagacgtggtgttggtaatgaaacgaaaacgggactctagcatacttactga

SEQ ID NO: 19278 - DNA, 80 bp, synthetic construct
  misc_feature 1..80: note = Synthetic: >NC_007374.1-cand-0-79
  source 1..80: mol_type = other DNA
aaagcaggggttataccatagacaaccaaaagcataacaatggccatcatttatctcatactcctgttcacagcagtgag

SEQ ID NO: 19279 - DNA, 80 bp, synthetic construct
  misc_feature 1..80: note = Synthetic: >NC_007374.1-cand-90-169
  source 1..80: mol_type = other DNA
atatgcattggataccatgccaataattccacagaaaaggtcgacacaattctagagcggaatgtcactgtgactcatgc

SEQ ID NO: 19280 - DNA, 80 bp, synthetic construct
  misc_feature 1..80: note = Synthetic: >NC_007374.1-cand-160-239
  source 1..80: mol_type = other DNA
tgactcatgccaaggacatccttgagaagacccataacggaaagctatgcaaactaaacggaatccctccacttgaacta

SEQ ID NO: 19281 - DNA, 80 bp, synthetic construct
  misc_feature 1..80: note = Synthetic: >NC_007374.1-cand-260-339
  source 1..80: mol_type = other DNA
atggctccttggaaatccagaatgtgataggcttctaagtgtgccagaatggtcctatataatggagaaagaaaacccga

SEQ ID NO: 19282 - DNA, 80 bp, synthetic construct
  misc_feature 1..80: note = Synthetic: >NC_007374.1-cand-340-419
  source 1..80: mol_type = other DNA
gatacagtttgtgttacccaggcagcttcaatgactatgaagaattgaaacatctcctcagcagcgtgaaacattttgag

SEQ ID NO: 19283 - DNA, 80 bp, synthetic construct
  misc_feature 1..80: note = Synthetic: >NC_007374.1-cand-420-499
  source 1..80: mol_type = other DNA
aaagttaagattttgcccaaagatagatggacacagcatacaacaactggaggttcatgggcctgcgcggtgtcaggtaa

SEQ ID NO: 19284 - DNA, 80 bp, synthetic construct
  misc_feature 1..80: note = Synthetic: >NC_007374.1-cand-500-579
  source 1..80: mol_type = other DNA
accatcattcttcaggaacatggtctggctgacacgtaaaggatcaaattatccggttgccaaaggatcgtacaacaata

SEQ ID NO: 19285 - DNA, 80 bp, synthetic construct
  misc_feature 1..80: note = Synthetic: >NC_007374.1-cand-610-689
  source 1..80: mol_type = other DNA
gagtgcaccatcctaatgatgaggcagaacaaagagcattgtaccagaatgtgggaacctatgtttccgtagccacatca

SEQ ID NO: 19286 - DNA, 80 bp, synthetic construct
  misc_feature 1..80: note = Synthetic: >NC_007374.1-cand-660-739
  source 1..80: mol_type = other DNA
gtgggaacctatgtttccgtagccacatcaacattgtacaaaaggtcaatcccagaaatagcagcaaggcctaaagtgaa

SEQ ID NO: 19287 - DNA, 80 bp, synthetic construct
  misc_feature 1..80: note = Synthetic: >NC_007375.1-cand-1710-1789
  source 1..80: mol_type = other DNA
gggacacacaaattcagacaaggagatcattcgagctaaagaagctgtgggagcaaacccgctcaaaggcaggacttttg

SEQ ID NO: 19288 - DNA, 80 bp, synthetic construct
  misc_feature 1..80: note = Synthetic: >NC_007375.1-cand-1760-1839
  source 1..80: mol_type = other DNA
gagcaaacccgctcaaaggcaggacttttggtgtcggatggaggatcaaacttatacaatatccggaatctccacattcc

SEQ ID NO: 19289 - DNA, 80 bp, synthetic construct
  misc_feature 1..80: note = Synthetic: >NC_007375.1-cand-1800-1879
  source 1..80: mol_type = other DNA
gaggatcaaacttatacaatatccggaatctccacattccagaagtctgcttgaaatgggagctaatggatgaagactat

SEQ ID NO: 19290 - DNA, 80 bp, synthetic construct
  misc_feature 1..80: note = Synthetic: >NC_007375.1-cand-1920-1999
  source 1..80: mol_type = other DNA
ataaggaaattgagtctgtaaacaatgctgtggtaatgccagctcacggtccagccaagagcatggaatatgatgctgtt

SEQ ID NO: 19291 - DNA, 80 bp, synthetic construct
  misc_feature 1..80: note = Synthetic: >NC_007375.1-cand-1980-2059
  source 1..80: mol_type = other DNA
gcatggaatatgatgctgttgctactacacactcctggacccctaagaggaaccgctccattctcaacacaagccaaagg

SEQ ID NO: 19292 - DNA, 80 bp, synthetic construct
  misc_feature 1..80: note = Synthetic: >NC_007375.1-cand-2080-2159
  source 1..80: mol_type = other DNA
gatgtatcagaagtgttgcaatctatttgagaaattcttccctagcagttcgtacaggagaccagttggaatttccagca

SEQ ID NO: 19293 - DNA, 80 bp, synthetic construct
  misc_feature 1..80: note = Synthetic: >NC_007375.1-cand-2170-2249
  source 1..80: mol_type = other DNA
catggtgtctagggctcggattgatgcacggattgacttcgagtctggacggattaagaaagaggagttcgctgagatca

SEQ ID NO: 19294 - DNA, 80 bp, synthetic construct
  misc_feature 1..80: note = Synthetic: >NC_007376.1-cand-160-239
  source 1..80: mol_type = other DNA
gtattcagattttcatttcatcaatgagcaaggcgagtcaataatggtagagcttgatgatccaaatgcacttttgaagc

SEQ ID NO: 19295 - DNA, 80 bp, synthetic construct
  misc_feature 1..80: note = Synthetic: >NC_007376.1-cand-240-319
  source 1..80: mol_type = other DNA
acagatttgaaataatagagggaagagatcgcacaatggcctggacagtagtaaacagtatttgcaacaccacaggagct

SEQ ID NO: 19296 - DNA, 80 bp, synthetic construct
  misc_feature 1..80: note = Synthetic: >NC_007376.1-cand-320-399
  source 1..80: mol_type = other DNA
gagaaaccgaagtttctgccagatttgtatgattacaaggagaatagattcatcgagattggagtgacaaggagagaagt

SEQ ID NO: 19297 - DNA, 80 bp, synthetic construct
  misc_feature 1..80: note = Synthetic: >NC_007376.1-cand-390-469
  source 1..80: mol_type = other DNA
ggagagaagtccacatatactatcttgaaaaggccaataaaattaaatctgagaatacacacatccacattttctcattc

SEQ ID NO: 19298 - DNA, 80 bp, synthetic construct
  misc_feature 1..80: note = Synthetic: >NC_007376.1-cand-490-569
  source 1..80: mol_type = other DNA
aaaggccgactacactctcgatgaggaaagcagggctaggatcaaaaccagactattcaccataagacaagaaatggcca

SEQ ID NO: 19299 - DNA, 80 bp, synthetic construct
  misc_feature 1..80: note = Synthetic: >NC_007376.1-cand-730-809
  source 1..80: mol_type = other DNA
accgaacggctacattgagggcaagctttctcaaatgtccaaagaagtaaatgcaaaaattgaaccttttctgaaaacaa

SEQ ID NO: 19300 - DNA, 80 bp, synthetic construct
  misc_feature 1..80: note = Synthetic: >NC_007376.1-cand-820-899
  source 1..80: mol_type = other DNA
aattagacttccggatgggcctccttgttttcagcggtccaaattcctgctgatggatgctttaaaattaagcattgagg

SEQ ID NO: 19301 - DNA, 80 bp, synthetic construct
  misc_feature 1..80: note = Synthetic: >NC_007376.1-cand-920-999
  source 1..80: mol_type = other DNA
ggaataccactatatgatgcgatcaagtgcatgagaacattctttggatggaaagaaccctatattgttaaaccacacga

SEQ ID NO: 19302 - DNA, 80 bp, synthetic construct
  misc_feature 1..80: note = Synthetic: >NC_007376.1-cand-1000-1079
  source 1..80: mol_type = other DNA
aaagggaataaatccaaattatctgctgtcatggaagcaagtactggcggaactgcaggacattgagaatgaggagaaga

SEQ ID NO: 19303 - DNA, 80 bp, synthetic construct
  misc_feature 1..80: note = Synthetic: >NC_009823.1-cand-3670-3749
  source 1..80: mol_type = other DNA
tagtagggtggcccagcccccctgggactaaatctttggagccgtgcacgtgtggagcggtcgacctgtacctggtcacg

SEQ ID NO: 19304 - DNA, 80 bp, synthetic construct
  misc_feature 1..80: note = Synthetic: >NC_009823.1-cand-3700-3779
  source 1..80: mol_type = other DNA
aatctttggagccgtgcacgtgtggagcggtcgacctgtacctggtcacgcggaacgctgatgtcatcccggctcgaaga

SEQ ID NO: 19305 - DNA, 80 bp, synthetic construct
  misc_feature 1..80: note = Synthetic: >NC_009823.1-cand-3830-3909
  source 1..80: mol_type = other DNA
gaaggggtcctcaggaggcccggtgctatgccccaggggccacgctgtcggagtcttccgggcagctgtgtgctctcggg

SEQ ID NO: 19306 - DNA, 80 bp, synthetic construct
  misc_feature 1..80: note = Synthetic: >NC_009823.1-cand-3910-3989
  source 1..80: mol_type = other DNA
gcgtggctaagtccatagatttcatccccgttgagacactcgacatcgtcacgcggtcccccacctttagtgacaacagc

SEQ ID NO: 19307 - DNA, 80 bp, synthetic construct
  misc_feature 1..80: note = Synthetic: >NC_009823.1-cand-3990-4069
  source 1..80: mol_type = other DNA
acaccacctgctgtgccccagacctatcaggtcgggtacttgcatgccccgactggcagtggaaagagcaccaaagttcc

SEQ ID NO: 19308 - DNA, 80 bp, synthetic construct
  misc_feature 1..80: note = Synthetic: >NC_009823.1-cand-4010-4089
  source 1..80: mol_type = other DNA
gacctatcaggtcgggtacttgcatgccccgactggcagtggaaagagcaccaaagttcctgtcgcatatgctgctcagg

SEQ ID NO: 19309 - DNA, 80 bp, synthetic construct
  misc_feature 1..80: note = Synthetic: >NC_009823.1-cand-4150-4229
  source 1..80: mol_type = other DNA
tgtctaaggcacatggcatcaatcccaacattaggactggagtcaggactgtgacgaccggggcgcccatcacgtactcc

SEQ ID NO: 19310 - DNA, 80 bp, synthetic construct
  misc_feature 1..80: note = Synthetic: >NC_009823.1-cand-4260-4339
  source 1..80: mol_type = other DNA
tgtgcgggcggcgcctacgacatcatcatatgtgatgaatgccatgccgtggactctaccaccatccttggcatcggaac

SEQ ID NO: 19311 - DNA, 80 bp, synthetic construct
  misc_feature 1..80: note = Synthetic: >NC_009823.1-cand-4280-4359
  source 1..80: mol_type = other DNA
catcatcatatgtgatgaatgccatgccgtggactctaccaccatccttggcatcggaacagtccttgatcaagcagaga

SEQ ID NO: 19312 - DNA, 80 bp, synthetic construct
  misc_feature 1..80: note = Synthetic: >NC_009823.1-cand-4390-4469
  source 1..80: mol_type = other DNA
cagctacgccccctgggtcagtgacaaccccccaccccaacatagaggaggtggcccttgggcaggagggcgagatcccc

SEQ ID NO: 19313 - DNA, 80 bp, synthetic construct
  misc_feature 1..80: note = Synthetic: >NC_009823.1-cand-4470-4549
  source 1..80: mol_type = other DNA
ttctatgggagggcgattcccctgtcttacatcaagggaggaagacatctgatcttctgccattcaaagaaaaagtgtga

SEQ ID NO: 19314 - DNA, 80 bp, synthetic construct
  misc_feature 1..80: note = Synthetic: >NC_009823.1-cand-4580-4659
  source 1..80: mol_type = other DNA
cttgaactcagtggcatactacagagggttggacgtctccgtaataccaactcagggagacgtagtggtcgtcgccaccg

SEQ ID NO: 19315 - DNA, 80 bp, synthetic construct
  misc_feature 1..80: note = Synthetic: >NC_009823.1-cand-4600-4679
  source 1..80: mol_type = other DNA
acagagggttggacgtctccgtaataccaactcagggagacgtagtggtcgtcgccaccgacgccctcatgacagggtat

SEQ ID NO: 19316 - DNA, 80 bp, synthetic construct
  misc_feature 1..80: note = Synthetic: >NC_009823.1-cand-4710-4789
  source 1..80: mol_type = other DNA
aacgtagcggtcactcaagttgtagacttcagtttagaccccacattcaccataaccacacagattgtccctcaagacgc

SEQ ID NO: 19317 - DNA, 80 bp, synthetic construct
  misc_feature 1..80: note = Synthetic: >NC_009823.1-cand-4830-4909
  source 1..80: mol_type = other DNA
agactgggcatttataggtatgtttccactggtgagcgagcctcaggaatgtttgacagtgtagtgctctgtgagtgcta

SEQ ID NO: 19318 - DNA, 80 bp, synthetic construct
  misc_feature 1..80: note = Synthetic: >NC_009823.1-cand-4840-4919
  source 1..80: mol_type = other DNA
tttataggtatgtttccactggtgagcgagcctcaggaatgtttgacagtgtagtgctctgtgagtgctacgacgcaggg

SEQ ID NO: 19319 - DNA, 80 bp, synthetic construct
  misc_feature 1..80: note = Synthetic: >NC_009823.1-cand-8770-8849
  source 1..80: mol_type = other DNA
tgtctgtggcgctgggcccacaaggccgccgcagatactacctgaccagagaccctaccactccaatcgcccgggctgcc

SEQ ID NO: 19320 - DNA, 80 bp, synthetic construct
  misc_feature 1..80: note = Synthetic: >NC_009823.1-cand-8850-8929
  source 1..80: mol_type = other DNA
tgggaaacagttagacactcccctgtcaattcatggctgggaaacatcatccagtacgccccgaccatatgggctcgcat

SEQ ID NO: 19321 - DNA, 80 bp, synthetic construct
  misc_feature 1..80: note = Synthetic: >NC_009823.1-cand-8930-9009
  source 1..80: mol_type = other DNA
ggtcctgatgacacacttcttctccattctcatggctcaagacacgctggaccagaacctcaactttgagatgtacggag

SEQ ID NO: 19322 - DNA, 80 bp, synthetic construct
  misc_feature 1..80: note = Synthetic: >NC_009823.1-cand-9010-9089
  source 1..80: mol_type = other DNA
cggtgtactccgtgagtcccttggacctcccagctataattgaaaggttacatgggcttgacgctttttctctgcacaca

SEQ ID NO: 19323 - DNA, 80 bp, synthetic construct
  misc_feature 1..80: note = Synthetic: >NC_009823.1-cand-9060-9139
  source 1..80: mol_type = other DNA
catgggcttgacgctttttctctgcacacatacactccccacgaactgacacgggtggcttcagccctcagaaaacttgg

SEQ ID NO: 19324 - DNA, 80 bp, synthetic construct
  misc_feature 1..80: note = Synthetic: >NC_009823.1-cand-9210-9289
  source 1..80: mol_type = other DNA
agagcggccgtttgcggtcgatatctcttcaattgggcggtgaagaccaagctcaaactcactccattgccggaagcgcg

SEQ ID NO: 19325 - DNA, 80 bp, synthetic construct
  misc_feature 1..80: note = Synthetic: >NC_009823.1-cand-9250-9329
  source 1..80: mol_type = other DNA
tgaagaccaagctcaaactcactccattgccggaagcgcgcctcctggatttatccagctggttcaccgtcggcgccggc

SEQ ID NO: 19326 - DNA, 80 bp, synthetic construct
  misc_feature 1..80: note = Synthetic: >NC_009823.1-cand-9330-9409
  source 1..80: mol_type = other DNA
gggggcgacatttatcacagcgtgtcgcgtgcccgaccccgcttattgctctttggcctactcctactttttgtaggggt

SEQ ID NO: 19327 - DNA, 80 bp, synthetic construct
  misc_feature 1..80: note = Synthetic: >NC_009823.1-cand-9410-9489
  source 1..80: mol_type = other DNA
aggccttttcctactccccgctcggtagagcggcacacattagctacactccatagctaactgtcccttttttttttttt

SEQ ID NO: 19328 - DNA, 80 bp, synthetic construct
  misc_feature 1..80: note = Synthetic: >NC_009823.1-cand-9570-9649
  source 1..80: mol_type = other DNA
tcttttccttctttcttaccttattttactttctttcctggtggctccatcttagccctagtcacggctagctgtgaaag

SEQ ID NO: 19329 - DNA, 80 bp, synthetic construct
  misc_feature 1..80: note = Synthetic: >NC_009824.1-cand-10-89
  source 1..80: mol_type = other DNA
aggcgacactccaccatggatcactcccctgtgaggaacttctgtcttcacgcggaaagcgcctagccatggcgttagta

SEQ ID NO: 19330 - DNA, 80 bp, synthetic construct
  misc_feature 1..80: note = Synthetic: >NC_009824.1-cand-180-259
  source 1..80: mol_type = other DNA
cgggtcctttcttggagcaacccgctcaatacccagaaatttgggcgtgcccccgcgagatcactagccgagtagtgttg

SEQ ID NO: 19331 - DNA, 80 bp, synthetic construct
  misc_feature 1..80: note = Synthetic: >NC_009824.1-cand-370-449
  source 1..80: mol_type = other DNA
aagaaacaccatccgtcgcccacaggacgtcaagttcccgggtggcggacagatcgttggtggagtatacgtgttgccgc

SEQ ID NO: 19332 - DNA, 80 bp, synthetic construct
  misc_feature 1..80: note = Synthetic: >NC_009824.1-cand-490-569
  source 1..80: mol_type = other DNA
ttctgaacggtcacagcctcgcggacgacgacagcctatccccaaggcgcgtcggagcgaaggccggtcctgggctcagc

SEQ ID NO: 19333 - DNA, 80 bp, synthetic construct
  misc_feature 1..80: note = Synthetic: >NC_009824.1-cand-570-649
  source 1..80: mol_type = other DNA
ccgggtacccttggcccctctatggtaacgagggctgcgggtgggcagggtggctcctgtccccacgcggctcccgtcca

SEQ ID NO: 19334 - DNA, 80 bp, synthetic construct
  misc_feature 1..80: note = Synthetic: >NC_009824.1-cand-650-729
  source 1..80: mol_type = other DNA
tcctggggcccaaatgacccccggcggaggtcccgcaatttgggtaaagtcatcgataccctaacgtgcggattcgccga

SEQ ID NO: 19335 - DNA, 80 bp, synthetic construct
  misc_feature 1..80: note = Synthetic: >NC_010277.2-cand-1160-1239
  source 1..80: mol_type = other DNA
aaaagaaaagcatcatccacctgtaaaacacccaaaagacaatgtatacctaagccgggatgctgccctaatgttgcctc

SEQ ID NO: 19336 - DNA, 80 bp, synthetic construct
  misc_feature 1..80: note = Synthetic: >NC_010277.2-cand-1240-1319
  source 1..80: mol_type = other DNA
agttccaaaactgcttgttaaaggaggagtggaagtattatctgtggttactggagaagatagcattacccaaattgagt

SEQ ID NO: 19337 - DNA, 80 bp, synthetic construct
  misc_feature 1..80: note = Synthetic: >NC_010277.2-cand-1320-1399
  source 1..80: mol_type = other DNA
tgtatttgaatccaagaatgggagttaattcccctgatcttcctactacttcaaactggtatacttatacttatgacctg

SEQ ID NO: 19338 - DNA, 80 bp, synthetic construct
  misc_feature 1..80: note = Synthetic: >NC_010277.2-cand-1400-1479
  source 1..80: mol_type = other DNA
cagccaaagggatcatctccagatcagcccatcaaggaaaatttgccagcttacagtgtggcaagagtgtctctgccaat

SEQ ID NO: 19339 - DNA, 80 bp, synthetic construct
  misc_feature 1..80: note = Synthetic: >NC_010277.2-cand-1480-1559
  source 1..80: mol_type = other DNA
gctaaatgaggatattacctgtgacacattgcagatgtgggaggcaatatctgttaaaacagaagtagttggaataagtt

SEQ ID NO: 19340 - DNA, 80 bp, synthetic construct
  misc_feature 1..80: note = Synthetic: >NC_010277.2-cand-1550-1629
  source 1..80: mol_type = other DNA
ggaataagttctttaattaatgttcattattgggacatgaaaagagttcatgattatggtgctggtattcctgtgtcagg

SEQ ID NO: 19341 - DNA, 80 bp, synthetic construct
  misc_feature 1..80: note = Synthetic: >NC_010277.2-cand-1660-1739
  source 1..80: mol_type = other DNA
agaacctctggatttgcaaggcctagttttagattaccagactgagtatccaaaaactacaaatggtgggcctattacaa

SEQ ID NO: 19342 - DNA, 80 bp, synthetic construct
  misc_feature 1..80: note = Synthetic: >NC_010277.2-cand-1720-1799
  source 1..80: mol_type = other DNA
aaatggtgggcctattacaattgaaactgtattgggaagaaaaatgacacctaaaaatcagggcctagatccacaagcta

SEQ ID NO: 19343 - DNA, 80 bp, synthetic construct
  misc_feature 1..80: note = Synthetic: >NC_010277.2-cand-1780-1859
  source 1..80: mol_type = other DNA
gggcctagatccacaagctaaagcaaaattagataaagatggaaattatcctatagaagtatggtgtcctgatccttcta

SEQ ID NO: 19344 - DNA, 80 bp, synthetic construct
  misc_feature 1..80: note = Synthetic: >NC_010277.2-cand-1850-1929
  source 1..80: mol_type = other DNA
gatccttctaaaaatgaaaacagtagatactatgggtctattcagacaggctctcagactcctacagttcttcaatttag

SEQ ID NO: 19345 - DNA, 80 bp, synthetic construct
  misc_feature 1..80: note = Synthetic: >NC_010277.2-cand-1930-2009
  source 1..80: mol_type = other DNA
taatactctaactactgtccttttagatgagaatggagtgggccctctatgcaaaggagatggcctatttattagctgtg

SEQ ID NO: 19346 - DNA, 80 bp, synthetic construct
  misc_feature 1..80: note = Synthetic: >NC_010277.2-cand-2030-2109
  source 1..80: mol_type = other DNA
tttaaaaccagtggaaaaatggctcttcatgggttgcctagatattttaatgttactttgagaaaaagatgggtgaaaaa

SEQ ID NO: 19347 - DNA, 80 bp, synthetic construct
  misc_feature 1..80: note = Synthetic: >NC_010277.2-cand-2090-2169
  source 1..80: mol_type = other DNA
agaaaaagatgggtgaaaaacccctacccagtagttaatttaataaactcactcttcagcaacttaatgccaaaagtgtc

SEQ ID NO: 19348 - DNA, 80 bp, synthetic construct
  misc_feature 1..80: note = Synthetic: >NC_010277.2-cand-2140-2219
  source 1..80: mol_type = other DNA
actcttcagcaacttaatgccaaaagtgtcaggccaacctatggaaggaaaagataatcaggtagaagaggttagaatat

SEQ ID NO: 19349 - DNA, 80 bp, synthetic construct
  misc_feature 1..80: note = Synthetic: >NC_010277.2-cand-2250-2329
  source 1..80: mol_type = other DNA
ctgatattgtcagatttttagataaatttgggcaggagaaaactgtttacccaaagccctctgttgccccagcagcagta

SEQ ID NO: 19350 - DNA, 80 bp, synthetic construct
  misc_feature 1..80: note = Synthetic: >NC_010277.2-cand-2330-2409
  source 1..80: mol_type = other DNA
acattccaaagtaatcagcaggataagggcaaggcgccactgaaaggacctcaaaaggcctctcaaaaagaaagccaaac

SEQ ID NO: 19351 - DNA, 80 bp, synthetic construct
  misc_feature 1..80: note = Synthetic: >NC_014396.1-cand-3470-3549
  source 1..80: mol_type = other DNA
ggtttggagggcctcttaaaactatactcctcatttgcctgtatgttgcattatcaattgggctctttttcctccttata

SEQ ID NO: 19352 - DNA, 80 bp, synthetic construct
  misc_feature 1..80: note = Synthetic: >NC_014396.1-cand-3550-3629
  source 1..80: mol_type = other DNA
tatcttggaagaacaggcctctctaaaatgtggcttgctgccactaagaaggcctcatagatcagtacgtgtaaaagcaa

SEQ ID NO: 19353 - DNA, 80 bp, synthetic construct
  misc_feature 1..80: note = Synthetic: >NC_014396.1-cand-3630-3709
  source 1..80: mol_type = other DNA
tatgttgaaataagtagacataagcaaacctaattatgtaagtattgtacagataggtcaaattattggaatatccaagc

SEQ ID NO: 19354 - DNA, 80 bp, synthetic construct
  misc_feature 1..80: note = Synthetic: >NC_014396.1-cand-3680-3759
  source 1..80: mol_type = other DNA
agataggtcaaattattggaatatccaagcttagaaacttatgcaataatactttagatgtaagcttagttgtaatttgg

SEQ ID NO: 19355 - DNA, 80 bp, synthetic construct
  misc_feature 1..80: note = Synthetic: >NC_014396.1-cand-3790-3869
  source 1..80: mol_type = other DNA
gtgcttgtgaatattctagttggcgtaatcgtcttttgccagattagctgggaattaaactaactctttgaagttgcacc

SEQ ID NO: 19356 - DNA, 80 bp, synthetic construct
  misc_feature 1..80: note = Synthetic: >NC_014397.1-cand-0-79
  source 1..80: mol_type = other DNA
aaaggcgcccaatcatggattctatattatcaaaacagctggttgacaagactggttttgttagagtgccaatcaagcat

SEQ ID NO: 19357 - DNA, 80 bp, synthetic construct
  misc_feature 1..80: note = Synthetic: >NC_014397.1-cand-80-159
  source 1..80: mol_type = other DNA
tttgactgtacaatgctaactctggcacttccaacatttgatgtttccaagatggtagatagaattaccatagacttcaa

SEQ ID NO: 19358 - DNA, 80 bp, synthetic construct
  misc_feature 1..80: note = Synthetic: >NC_014397.1-cand-160-239
  source 1..80: mol_type = other DNA
tctggatgatatacaaggagcatctgaaataggctcaactttgctaccctccatgtcgatagatgtggaagatatggcca

SEQ ID NO: 19359 - DNA, 80 bp, synthetic construct
  misc_feature 1..80: note = Synthetic: >NC_014397.1-cand-240-319
  source 1..80: mol_type = other DNA
attttgttcacgatttcacctttggccacttagctgacaagactgacagactgttaatgcgtgagtttcccatgatgaat

SEQ ID NO: 19360 - DNA, 80 bp, synthetic construct
  misc_feature 1..80: note = Synthetic: >NC_014397.1-cand-320-399
  source 1..80: mol_type = other DNA
gacgggtttgatcatttgagccctgacatgatcattaaaactacatctggcatgtacaacatcgttgagttcaccacctt

SEQ ID NO: 19361 - DNA, 80 bp, synthetic construct
  misc_feature 1..80: note = Synthetic: >NC_014397.1-cand-410-489
  source 1..80: mol_type = other DNA
gaaagaggtgcattccaggctgccatgactaaactcgctaagtatgaggttccttgtgagaacagatctcagggcaggac

SEQ ID NO: 19362 - DNA, 80 bp, synthetic construct
  misc_feature 1..80: note = Synthetic: >NC_014397.1-cand-480-559
  source 1..80: mol_type = other DNA
agggcaggactgttgttctttatgttgttagtgcttatcggcatggtgtatggtctaatctggagctagaggactctgaa

SEQ ID NO: 19363 - DNA, 80 bp, synthetic construct
  misc_feature 1..80: note = Synthetic: >NC_014397.1-cand-560-639
  source 1..80: mol_type = other DNA
gcagaggagatggtttataggtacagacttgctcttagtgtgatggatgagctaaggaccttgttcccagaactgtcatc

SEQ ID NO: 19364 - DNA, 80 bp, synthetic construct
  misc_feature 1..80: note = Synthetic: >NC_014397.1-cand-640-719
  source 1..80: mol_type = other DNA
cacagatgaggaactagggaagactgagagagagttgctagccatggtctcctccatccaaataaattggtcagtcacag

SEQ ID NO: 19365 - DNA, 80 bp, synthetic construct
  misc_feature 1..80: note = Synthetic: >NC_014397.1-cand-720-799
  source 1..80: mol_type = other DNA
aatctgtgtttccacccttcagcagagaaatgtttgacaggtttagatcctcccctcccgattcagagtatatcacgagg

SEQ ID NO: 19366 - DNA, 80 bp, synthetic construct
  misc_feature 1..80: note = Synthetic: >NC_014397.1-cand-800-879
  source 1..80: mol_type = other DNA
atagtgagcagatgcctaataaattctcaagagaaactcatcaatagttccttctttgctgaagggaatgataaggctct

SEQ ID NO: 19367 - DNA, 80 bp, synthetic construct
  misc_feature 1..80: note = Synthetic: >NC_014397.1-cand-6040-6119
  source 1..80: mol_type = other DNA
agcccattacaaggacatcagttcattatctatgattgctcatcccttaatggataagtttgttgattatgctatttcta

SEQ ID NO: 19368 - DNA, 80 bp, synthetic construct
  misc_feature 1..80: note = Synthetic: >NC_014397.1-cand-6150-6229
  source 1..80: mol_type = other DNA
tagaaacaggtcggtgctccagcaaagactatgatttatcaaaggttctcttcagaactctacagagaccagaagaaagc

SEQ ID NO: 19369 - DNA, 80 bp, synthetic construct
  misc_feature 1..80: note = Synthetic: >NC_014397.1-cand-6230-6309
  source 1..80: mol_type = other DNA
attaggatagatgatctggaattatatgaggagacagatgtggcggatgacatgctaggctaagaccagtaagcaaagtc

SEQ ID NO: 19370 - DNA, 80 bp, synthetic construct
  misc_feature 1..80: note = Synthetic: >NC_014397.1-cand-6310-6389
  source 1..80: mol_type = other DNA
aggcttagatttagggatactatgctagtattggaatccatgtgggttctgatactagcatagtgctacaatattgggcg

SEQ ID NO: 19371 - DNA, 80 bp, synthetic construct
  misc_feature 1..80: note = Synthetic: >NC_014406.1-cand-0-79
  source 1..80: mol_type = other DNA
ctgcttgagtagtctctgaatgaaatgttaaaatcccagacagcaggtgaaatccctgtgcaggcttacgcaactgggca

SEQ ID NO: 19372 - DNA, 80 bp, synthetic construct
  misc_feature 1..80: note = Synthetic: >NC_014406.1-cand-80-159
  source 1..80: mol_type = other DNA
gggccatttaagctcccttatctctctaattataggaggcaataaaggccaccaggccacctcaatgtatgagaaaaaag

SEQ ID NO: 19373 - DNA, 80 bp, synthetic construct
  misc_feature 1..80: note = Synthetic: >NC_014406.1-cand-160-239
  source 1..80: mol_type = other DNA
gagaggaaatagggcaaccaaaggtcaaaaggaagttattaggcgagaaaagcccgccaaattttttcccagtcataact

SEQ ID NO: 19374 - DNA, 80 bp, synthetic construct
  misc_feature 1..80: note = Synthetic: >NC_014406.1-cand-240-319
  source 1..80: mol_type = other DNA
gaggttgaccaccgttgacacaacaccctaattagtaagttcttcaatttctgttttattttgttttaactcttcagtga

SEQ ID NO: 19375 - DNA, 80 bp, synthetic construct
  misc_feature 1..80: note = Synthetic: >NC_014406.1-cand-320-399
  source 1..80: mol_type = other DNA
cctcaccgcctgttgaccctggtcttaatttctacttaacaggtaagccatgggaattctatttagtcttcctgaaatta

SEQ ID NO: 19376 - DNA, 80 bp, synthetic construct
  misc_feature 1..80: note = Synthetic: >NC_014406.1-cand-340-419
  source 1..80: mol_type = other DNA
ggtcttaatttctacttaacaggtaagccatgggaattctatttagtcttcctgaaattatagcagctgctgctgttgga

SEQ ID NO: 19377 - DNA, 80 bp, synthetic construct
  misc_feature 1..80: note = Synthetic: >NC_014406.1-cand-480-559
  source 1..80: mol_type = other DNA
gctacattagaggctctacagtctgctgctgctttatccagtgaagcaactgcagctctagctgtatctaatgaggctgc

SEQ ID NO: 19378 - DNA, 80 bp, synthetic construct
  misc_feature 1..80: note = Synthetic: >NC_014406.1-cand-560-639
  source 1..80: mol_type = other DNA
cattgtattgtcaacagttcctgagttgtcccagaccctctttggagcacaattactactgtcttctgtagcaggcgttg

SEQ ID NO: 19379 - DNA, 80 bp, synthetic construct
  misc_feature 1..80: note = Synthetic: >NC_014406.1-cand-670-749
  source 1..80: mol_type = other DNA
gggaactgtacaaggcgccagaaggaccaggtggactcggcccaagagttggaaacaccaccatggcacttcaactgtgg

SEQ ID NO: 19380 - DNA, 80 bp, synthetic construct
  misc_feature 1..80: note = Synthetic: >NC_014406.1-cand-690-769
  source 1..80: mol_type = other DNA
gaaggaccaggtggactcggcccaagagttggaaacaccaccatggcacttcaactgtggttgccacaagtttggtcttg

SEQ ID NO: 19381 - DNA, 80 bp, synthetic construct
  misc_feature 1..80: note = Synthetic: >NC_014406.1-cand-800-879
  source 1..80: mol_type = other DNA
gcttatcaacatgcttcgtgaagtgccgtctcccacagagatcctcagtgacattgtcagaggaatatggacttcctact

SEQ ID NO: 19382 - DNA, 80 bp, synthetic construct
  misc_feature 1..80: note = Synthetic: >NC_014406.1-cand-840-919
  source 1..80: mol_type = other DNA
atcctcagtgacattgtcagaggaatatggacttcctactatagagcaggcagggagataatccaaagaacagcttctag

SEQ ID NO: 19383 - DNA, 80 bp, synthetic construct
  misc_feature 1..80: note = Synthetic: >NC_021541.1-cand-10-89
  source 1..80: mol_type = other DNA
tcctttcaatttttcagttggttactgaaggatattgaaaggaatctactgtacaccagtttggtatatacaagtccaag

SEQ ID NO: 19384 - DNA, 80 bp, synthetic construct
  misc_feature 1..80: note = Synthetic: >NC_021541.1-cand-100-179
  source 1..80: mol_type = other DNA
gttcgatatgaagaaagtgaaaaatcaagattatggaaatcgaaagaaactaacgttttatctccagaggaaattctgag

SEQ ID NO: 19385 - DNA, 80 bp, synthetic construct
  misc_feature 1..80: note = Synthetic: >NC_021541.1-cand-190-269
  source 1..80: mol_type = other DNA
gataagctagattctttatcatgtattcatgacaaaattgaagaactgttacgcatacggtatttcactgtatacgtcga

SEQ ID NO: 19386 - DNA, 80 bp, synthetic construct
  misc_feature 1..80: note = Synthetic: >NC_021541.1-cand-250-329
  source 1..80: mol_type = other DNA
tatttcactgtatacgtcgaggacaaatctgataagaggaacataattttaacctggttgagcagaactataacagactt

SEQ ID NO: 19387 - DNA, 80 bp, synthetic construct
  misc_feature 1..80: note = Synthetic: >NC_021541.1-cand-350-429
  source 1..80: mol_type = other DNA
attctatcaagttgattgagctacaggcaagacagtggaggatagataatgctaacttcctacgaccttatcattataat

SEQ ID NO: 19388 - DNA, 80 bp, synthetic construct
  misc_feature 1..80: note = Synthetic: >NC_021541.1-cand-440-519
  source 1..80: mol_type = other DNA
atgaatatcttcgagataacgaaattgagttgttagacactggtgataataaatggaaatcagacactctacagggatta

SEQ ID NO: 19389 - DNA, 80 bp, synthetic construct
  misc_feature 1..80: note = Synthetic: >NC_021541.1-cand-520-599
  source 1..80: mol_type = other DNA
ctccctaatttctatcatcgtacgcatactctagtgggatctattctttatgcaattaattccagactggacaaatattc

SEQ ID NO: 19390 - DNA, 80 bp, synthetic construct
  misc_feature 1..80: note = Synthetic: >NC_021541.1-cand-600-679
  source 1..80: mol_type = other DNA
tactgatcaaaagcgtgctttatcttacttgttgcacgttattcaaaaatgcttttctgaaggttatctcgagatgtcta

SEQ ID NO: 19391 - DNA, 80 bp, synthetic construct
  misc_feature 1..80: note = Synthetic: >NC_021541.1-cand-680-759
  source 1..80: mol_type = other DNA
gagatagaaaatggaatcatacattggatgagttgagaaactcaagatttcatttatacaacgcaaaaataatacacgcc

SEQ ID NO: 19392 - DNA, 80 bp, synthetic construct
  misc_feature 1..80: note = Synthetic: >NC_021541.1-cand-760-839
  source 1..80: mol_type = other DNA
gcttgtgctatgatttcgttagctcattctgatcacattgatttggagttcctatgtcaaatcattaccgtgtatagcat

SEQ ID NO: 19393 - DNA, 80 bp, synthetic construct
  misc_feature 1..80: note = Synthetic: >NC_021541.1-cand-840-919
  source 1..80: mol_type = other DNA
aattccagctaacgcagcaaaattactttcgtcaccaatgacaatgtatgtgggagtcgtgacttttagctcgcatcaag

SEQ ID NO: 19394 - DNA, 80 bp, synthetic construct
  misc_feature 1..80: note = Synthetic: >NC_021541.1-cand-920-999
  source 1..80: mol_type = other DNA
tggcatcaactggtaacgcctccgaatgctctcctactactattcaaaacaacgtttacgttgacaaagctcaatatgat

SEQ ID NO: 19395 - DNA, 80 bp, synthetic construct
  misc_feature 1..80: note = Synthetic: >NC_021541.1-cand-1000-1079
  source 1..80: mol_type = other DNA
gaatggagcaacatgtttaactctgaccctcttaatgcctctaaattattacgtctgatgaatagcaatctaaagacttc

SEQ ID NO: 19396 - DNA, 80 bp, synthetic construct
  misc_feature 1..80: note = Synthetic: >NC_021541.1-cand-1090-1169
  source 1..80: mol_type = other DNA
ttttcactaatttttaattgtttttcagctactttccatgtaggccaccgtatagataatgctcaagatgccataacaga

SEQ ID NO: 19397 - DNA, 80 bp, synthetic construct
  misc_feature 1..80: note = Synthetic: >NC_021541.1-cand-1170-1249
  source 1..80: mol_type = other DNA
tcaggttacagctacatacacatcagacattgatcgagaaatgtatgataattactactataggttgaagaatatgctta

SEQ ID NO: 19398 - DNA, 80 bp, synthetic construct
  misc_feature 1..80: note = Synthetic: >NC_021541.1-cand-1260-1339
  source 1..80: mol_type = other DNA
aatacaatacgttgaagatcatattgctaaacagtatgttgacgttacagccgaatccctttcagctttggccaattcat

SEQ ID NO: 19399 - DNA, 80 bp, synthetic construct
  misc_feature 1..80: note = Synthetic: >NC_027026.1-cand-5560-5639
  source 1..80: mol_type = other DNA
gtccgtgtcacgatctcaggctcgggcttatttgcagggaagcttgtgtgtgggatacttcctcctggagttaatcccac

SEQ ID NO: 19400 - DNA, 80 bp, synthetic construct
  misc_feature 1..80: note = Synthetic: >NC_027026.1-cand-5660-5739
  source 1..80: mol_type = other DNA
ttctgccacacgctttggtagatgcccgcgtgactgaaccagcatgcttcaacgtgcctgatgtccgcgccgtcgactac

SEQ ID NO: 19401 - DNA, 80 bp, synthetic construct
  misc_feature 1..80: note = Synthetic: >NC_027026.1-cand-5720-5799
  source 1..80: mol_type = other DNA
atgtccgcgccgtcgactaccatcgcactgacggcgatgaggcaactgcaacacttggcatttgggtgctccaaccacta

SEQ ID NO: 19402 - DNA, 80 bp, synthetic construct
  misc_feature 1..80: note = Synthetic: >NC_027026.1-cand-5800-5879
  source 1..80: mol_type = other DNA
atcaaccccttctccactgaagctgtttcaaccgcttggatttcaattgagaccaaaccaggtggtgattttgatctttg

SEQ ID NO: 19403 - DNA, 80 bp, synthetic construct
  misc_feature 1..80: note = Synthetic: >NC_027026.1-cand-5880-5959
  source 1..80: mol_type = other DNA
cttgatgaaacctcctaaccaagccatggataacggcacatctccatcgttcctcttgccacgccgtttacaacgttcaa

SEQ ID NO: 19404 - DNA, 80 bp, synthetic construct
  misc_feature 1..80: note = Synthetic: >NC_027026.1-cand-5960-6039
  source 1..80: mol_type = other DNA
gaggcaaccgcgctggtggctatgcagttggaatggtcattgtgggctcagcacaccaggtgaaccgccacttcactgct

SEQ ID NO: 19405 - DNA, 80 bp, synthetic construct
  misc_feature 1..80: note = Synthetic: >NC_027026.1-cand-6040-6119
  source 1..80: mol_type = other DNA
cttggcacaacatttggttggtctaccgcaccttacgaacccatgcgatgtgcttttggtggagtacatcaagggcgtga

SEQ ID NO: 19406 - DNA, 80 bp, synthetic construct
  misc_feature 1..80: note = Synthetic: >NC_027026.1-cand-6130-6209
  source 1..80: mol_type = other DNA
aaaattggctactactgggaggttggtgctgaccagcgtggcccgctttttccaaacattgttaatcattggcctgattt

SEQ ID NO: 19407 - DNA, 80 bp, synthetic construct
  misc_feature 1..80: note = Synthetic: >NC_027026.1-cand-6210-6289
  source 1..80: mol_type = other DNA
tgcagtcaacaccaaatacacatggccagatgccgactatataccccatagtgcggttgttggaaccttggtttccttcc

SEQ ID NO: 19408 - DNA, 80 bp, synthetic construct
  misc_feature 1..80: note = Synthetic: >NC_027026.1-cand-6290-6369
  source 1..80: mol_type = other DNA
aggacaatggagatgtttctgaggatcaagtggctactgcatttgcaatttcaatgaacactccaagtgggagcacaact

SEQ ID NO: 19409 - DNA, 80 bp, synthetic construct
  misc_feature 1..80: note = Synthetic: >NC_027026.1-cand-6380-6459
  source 1..80: mol_type = other DNA
cagtcagagaagcatttgatccatccacaatgcatttggtccgcaccaatggtaccactcaaccatctgggtggccaacc

SEQ ID NO: 19410 - DNA, 80 bp, synthetic construct
  misc_feature 1..80: note = Synthetic: >NC_027026.1-cand-6420-6499
  source 1..80: mol_type = other DNA
ccgcaccaatggtaccactcaaccatctgggtggccaaccggctcaaacactggaaatggttacttcacaccaatgtggg

SEQ ID NO: 19411 - DNA, 80 bp, synthetic construct
  misc_feature 1..80: note = Synthetic: >NC_027026.1-cand-6550-6629
  source 1..80: mol_type = other DNA
gctaattatacatttggaggctctggccaaaacaacatagtcttgtgggttgaaagaatcttctcagaccatcctggtaa

SEQ ID NO: 19412 - DNA, 80 bp, synthetic construct
  misc_feature 1..80: note = Synthetic: >NC_027026.1-cand-6630-6709
  source 1..80: mol_type = other DNA
aaccacactttactcatcacaattggacagcactgcggccattttccagtcaggcccagtcaatatacctgagaacatga

SEQ ID NO: 19413 - DNA, 80 bp, synthetic construct
  misc_feature 1..80: note = Synthetic: >NC_027026.1-cand-6740-6819
  source 1..80: mol_type = other DNA
ctgactttcaagttggcatccgtcgtgatggctacatggtcacatctggaacaattggtactcagcaggagcttgaccct

SEQ ID NO: 19414 - DNA, 80 bp, synthetic construct
  misc_feature 1..80: note = Synthetic: >NC_027026.1-cand-6790-6869
  source 1..80: mol_type = other DNA
acaattggtactcagcaggagcttgaccctgacaccactttcacttatgttggacttttccccctttctgcctcattggt

SEQ ID NO: 19415 - DNA, 80 bp, synthetic construct
  misc_feature 1..80: note = Synthetic: >NC_029646.1-cand-5810-5889
  source 1..80: mol_type = other DNA
tacctatagatgagctctacaccagtcccaatgagagtctggtggtgcaaccccagaacgggagatgcgcactagatggg

SEQ ID NO: 19416 - DNA, 80 bp, synthetic construct
  misc_feature 1..80: note = Synthetic: >NC_029646.1-cand-5970-6049
  source 1..80: mol_type = other DNA
aaaccatgtttggaatatgcaggtcaccaacatcaacgggaccccttttgatccaacagaggatgtcccggctcctctag

SEQ ID NO: 19417 - DNA, 80 bp, synthetic construct
  misc_feature 1..80: note = Synthetic: >NC_029646.1-cand-6010-6089
  source 1..80: mol_type = other DNA
accccttttgatccaacagaggatgtcccggctcctctaggcactccagatttctctggcaagctctttggtgtactaag

SEQ ID NO: 19418 - DNA, 80 bp, synthetic construct
  misc_feature 1..80: note = Synthetic: >NC_029646.1-cand-6090-6169
  source 1..80: mol_type = other DNA
ccagagagaccatgataatgcctgcaggagtcatgatgcagtaattgcaaccaactctgccaaatttaccccaaaattgg

SEQ ID NO: 19419 - DNA, 80 bp, synthetic construct
  misc_feature 1..80: note = Synthetic: >NC_029646.1-cand-6170-6249
  source 1..80: mol_type = other DNA
gcgctatacaaattggcacatgggaagaagacgatgtgcacatcaaccaacctactaagtttactccagttggcttgttt

SEQ ID NO: 19420 - DNA, 80 bp, synthetic construct
  misc_feature 1..80: note = Synthetic: >NC_029646.1-cand-6250-6329
  source 1..80: mol_type = other DNA
gaagatggaggtttcaaccagtggacactccccaattattctggagccttaacacttaatatgggattggcccctcctgt

SEQ ID NO: 19421 - DNA, 80 bp, synthetic construct
  misc_feature 1..80: note = Synthetic: >NC_029646.1-cand-6340-6419
  source 1..80: mol_type = other DNA
ttccctggtgaacaaattcttttctttagatcccacattcctcttaaaggaggtgtggcggacccagttattgattgtct

SEQ ID NO: 19422 - DNA, 80 bp, synthetic construct
  misc_feature 1..80: note = Synthetic: >NC_029646.1-cand-6410-6489
  source 1..80: mol_type = other DNA
ttgattgtctcttgcctcaagaatggatccaacatctttaccaagagtcggccccctcacaatcagatgtagcactgatt

SEQ ID NO: 19423 - DNA, 80 bp, synthetic construct
  misc_feature 1..80: note = Synthetic: >NC_029646.1-cand-6490-6569
  source 1..80: mol_type = other DNA
aggtttacaaatccagacacaggacgtgttctatttgaagcaaaattacacaggagtggttacatcacagtggccaatac

SEQ ID NO: 19424 - DNA, 80 bp, synthetic construct
  misc_feature 1..80: note = Synthetic: >NC_029646.1-cand-6570-6649
  source 1..80: mol_type = other DNA
tggtagcagaccgattgtggtaccagctaatggttacttcaggtttgactcttgggttaatcaattctattctcttgccc

SEQ ID NO: 19425 - DNA, 80 bp, synthetic construct
  misc_feature 1..80: note = Synthetic: >NC_029646.1-cand-6630-6709
  source 1..80: mol_type = other DNA
tcaattctattctcttgcccccatgggaactggaaatgggcgcagaagggtgcagtaatggctggagcttttatagcggg

SEQ ID NO: 19426 - DNA, 80 bp, synthetic construct
  misc_feature 1..80: note = Synthetic: >NC_029646.1-cand-6760-6839
  source 1..80: mol_type = other DNA
gggctaatgcaataaatcaaaaagtagactttgaaaacaacaagcaactacagcaggcttctttcaaccatgataaagag

SEQ ID NO: 19427 - DNA, 80 bp, synthetic construct
  misc_feature 1..80: note = Synthetic: >NC_029646.1-cand-6780-6859
  source 1..80: mol_type = other DNA
aaagtagactttgaaaacaacaagcaactacagcaggcttctttcaaccatgataaagagatgctgcaagctcaagtcca

SEQ ID NO: 19428 - DNA, 80 bp, synthetic construct
  misc_feature 1..80: note = Synthetic: >NC_029646.1-cand-6820-6899
  source 1..80: mol_type = other DNA
ctttcaaccatgataaagagatgctgcaagctcaagtccaggccaccaaacagctgcaggctgatatgattgcaatcaga

SEQ ID NO: 19429 - DNA, 80 bp, synthetic construct
  misc_feature 1..80: note = Synthetic: >NC_029646.1-cand-6950-7029
  source 1..80: mol_type = other DNA
ggcagttaatgcacctatgactcaggttttagactggaatgggaccagatattgggcccccggagccacgaaaaccacta

SEQ ID NO: 19430 - DNA, 80 bp, synthetic construct
  misc_feature 1..80: note = Synthetic: >NC_029646.1-cand-7020-7099
  source 1..80: mol_type = other DNA
aaaaccactactttctccggtggattcaccaatgtttctcatgccagaactgtcgacctgaccaagaagacatcagccac

SEQ ID NO: 19431 - DNA, 80 bp, synthetic construct
  misc_feature 1..80: note = Synthetic: >NC_029647.1-cand-3460-3539
  source 1..80: mol_type = other DNA
ctgccgcgggcagaggcgggaatacagtcatctgcgcggtgcaaacaggtgatggtgaagccgtactagaaggaaacact

SEQ ID NO: 19432 - DNA, 80 bp, synthetic construct
  misc_feature 1..80: note = Synthetic: >NC_029647.1-cand-3540-3619
  source 1..80: mol_type = other DNA
gataacggcacatactgcggcgccccaatagtgtcaaaaggtaatgcaccccagctatcctcaaagacaaaattctggag

SEQ ID NO: 19433 - DNA, 80 bp, synthetic construct
  misc_feature 1..80: note = Synthetic: >NC_029647.1-cand-3590-3669
  source 1..80: mol_type = other DNA
ccagctatcctcaaagacaaaattctggaggagctctgtcgagcctctcccgcctggcacgtttgagcccgcctacctcg

SEQ ID NO: 19434 - DNA, 80 bp, synthetic construct
  misc_feature 1..80: note = Synthetic: >NC_029647.1-cand-3700-3779
  source 1..80: mol_type = other DNA
cctcactttaccaggtgatgagggaccaacttaaacatttcacagctcctcgtgggagaccagtcaaaccccacctcttg

SEQ ID NO: 19435 - DNA, 80 bp, synthetic construct
  misc_feature 1..80: note = Synthetic: >NC_029647.1-cand-3780-3859
  source 1..80: mol_type = other DNA
caggctgcagtcaagacaatcgagaacgtgctggaacagaccattgaccccccaacaccatggacatatgcccaggcttg

SEQ ID NO: 19436 - DNA, 80 bp, synthetic construct
  misc_feature 1..80: note = Synthetic: >NC_029647.1-cand-3860-3939
  source 1..80: mol_type = other DNA
ccagtcgcttgacaagacaacgtcgagtggctggccccaccatgtgcagaaaaacacccattggaatggtgaagcattta

SEQ ID NO: 19437 - DNA, 80 bp, synthetic construct
  misc_feature 1..80: note = Synthetic: >NC_029647.1-cand-3940-4019
  source 1..80: mol_type = other DNA
caggacccttggccgaccaagccagcaaggccaatctaatgtatgaacaagggaagtccatgaccccccagtacactgct

SEQ ID NO: 19438 - DNA, 80 bp, synthetic construct
  misc_feature 1..80: note = Synthetic: >NC_029647.1-cand-4000-4079
  source 1..80: mol_type = other DNA
tgaccccccagtacactgctgcccttaaggatgaactagtgaaaccagacaaagtgtacaaaaaggtcaagaaaaggctg

SEQ ID NO: 19439 - DNA, 80 bp, synthetic construct
  misc_feature 1..80: note = Synthetic: >NC_029647.1-cand-4100-4179
  source 1..80: mol_type = other DNA
aaccatggtccggtgcgccagagcattcggcccgttcactgacgcacttaagaagtgctgcacccaacttccagtcaaag

SEQ ID NO: 19440 - DNA, 80 bp, synthetic construct
  misc_feature 1..80: note = Synthetic: >NC_029647.1-cand-4180-4259
  source 1..80: mol_type = other DNA
ttggactcaacattaatgaagagggacccatcatctttgagaaacacgcccaatatgagctccactatgatgcagattat

SEQ ID NO: 19441 - DNA, 80 bp, synthetic construct
  misc_feature 1..80: note = Synthetic: >NC_029647.1-cand-4260-4339
  source 1..80: mol_type = other DNA
tcgcggtgggattccacccagcaacgggaggtcctcgccgccgcacttggcatcatgacaaaattcactgctgagccaca

SEQ ID NO: 19442 - DNA, 80 bp, synthetic construct
  misc_feature 1..80: note = Synthetic: >NC_029647.1-cand-4350-4429
  source 1..80: mol_type = other DNA
gttgtggcagaagacttgatttccccaagtatgcttgatgttggcgactatgtcgtccaggtcaatgaagggctaccctc

SEQ ID NO: 19443 - DNA, 80 bp, synthetic construct
  misc_feature 1..80: note = Synthetic: >NC_029647.1-cand-4440-4519
  source 1..80: mol_type = other DNA
tgcacctcacagttaaacagtattgcccattggatcatcacccttacatccatggctgaggccactggcctggatcctga

SEQ ID NO: 19444 - DNA, 80 bp, synthetic construct
  misc_feature 1..80: note = Synthetic: >NC_029647.1-cand-4520-4599
  source 1..80: mol_type = other DNA
catcgtccaggctaacagctacttctccttctatggtgatgatgaaattgtgtcaacagacataaaattcaatccagagg

SEQ ID NO: 19445 - DNA, 80 bp, synthetic construct
  misc_feature 1..80: note = Synthetic: >NC_029647.1-cand-4600-4679
  source 1..80: mol_type = other DNA
tcctcaccctgaaacttaaagcaattggccttgtcccaacccgcccagacaagacagaaggcccattggtggtgtcaaac

SEQ ID NO: 19446 - DNA, 80 bp, synthetic construct
  misc_feature 1..80: note = Synthetic: >NC_029647.1-cand-4680-4759
  source 1..80: mol_type = other DNA
aaattagaaggtctgacttttctgaggcgcaccataactagagacaaagtgggcttctttggtcggttggataaggattc

SEQ ID NO: 19447 - DNA, 80 bp, synthetic construct
  misc_feature 1..80: note = Synthetic: >NC_034517.1-cand-1340-1419
  source 1..80: mol_type = other DNA
tcatgaatcattcactacaaagcacacttacgttgataatgtcctagaaaaattctttaagaatgaaacacaacgatatc

SEQ ID NO: 19448 - DNA, 80 bp, synthetic construct
  misc_feature 1..80: note = Synthetic: >NC_034517.1-cand-1420-1499
  source 1..80: mol_type = other DNA
ttattgatgtgttaaagaaaacaacagcatggcacatagggcatatgataagggacattactgagagtttaattgcacat

SEQ ID NO: 19449 - DNA, 80 bp, synthetic construct
  misc_feature 1..80: note = Synthetic: >NC_034517.1-cand-1500-1579
  source 1..80: mol_type = other DNA
tctggattaaggaggtctaaatattggtcattgcatgcatacaacaatggcagtgtgatattattcattctgccctccaa

SEQ ID NO: 19450 - DNA, 80 bp, synthetic construct
  misc_feature 1..80: note = Synthetic: >NC_034517.1-cand-1580-1659
  source 1..80: mol_type = other DNA
gtctttagaggttgcagggtcatttgtgcggtttgttactgcttttaagatgggtcctggtttggtggataaggataatc

SEQ ID NO: 19451 - DNA, 80 bp, synthetic construct
  misc_feature 1..80: note = Synthetic: >NC_034517.1-cand-1700-1779
  source 1..80: mol_type = other DNA
ttctaaagtaatgagtttagatttgaaccggctcttagcacttaatattgcatttgagaaggcacttgttgcaaccgcaa

SEQ ID NO: 19452 - DNA, 80 bp, synthetic construct
  misc_feature 1..80: note = Synthetic: >NC_034517.1-cand-1730-1809
  source 1..80: mol_type = other DNA
gctcttagcacttaatattgcatttgagaaggcacttgttgcaaccgcaacatggtttcaatactatacggaggaccagg

SEQ ID NO: 19453 - DNA, 80 bp, synthetic construct
  misc_feature 1..80: note = Synthetic: >NC_034517.1-cand-1810-1889
  source 1..80: mol_type = other DNA
gacagttccccttgcagcatgctgtaagatctgtctttgcatatcattttctcctgtcagtgtgtcagaaaatgaaaatc

SEQ ID NO: 19454 - DNA, 80 bp, synthetic construct
  misc_feature 1..80: note = Synthetic: >NC_034517.1-cand-1890-1969
  source 1..80: mol_type = other DNA
tgtgctatattcgataaccttaggtacctgattcctgctgtgacatcgttgtattcaggtttcccatccttgatcgagaa

SEQ ID NO: 19455 - DNA, 80 bp, synthetic construct
  misc_feature 1..80: note = Synthetic: >NC_034517.1-cand-1970-2049
  source 1..80: mol_type = other DNA
actttttgaacgaccctttaagagctcattggaagtttatatttactataacattaaaagtctcttagttgccctagcac

SEQ ID NO: 19456 - DNA, 80 bp, synthetic construct
  misc_feature 1..80: note = Synthetic: >NC_034517.1-cand-2040-2119
  source 1..80: mol_type = other DNA
gccctagcacaaaataataaagctagattttactcaaaagttaaactgttgggtttgactgttgaccaatctacagttgg

SEQ ID NO: 19457 - DNA, 80 bp, synthetic construct
  misc_feature 1..80: note = Synthetic: >NC_034517.1-cand-2130-2209
  source 1..80: mol_type = other DNA
atttatccatcattcttatcacgtgtggtgtacaagcattatcgtagcttgatatctgaggtaacaacttgctttttcct

SEQ ID NO: 19458 - DNA, 80 bp, synthetic construct
  misc_feature 1..80: note = Synthetic: >NC_034517.1-cand-2210-2289
  source 1..80: mol_type = other DNA
atttgaaaaaggcttgcacggtaatgtgaatgaagaggctaaaattcatctcgaaacagttgagtgggccatcaaattca

SEQ ID NO: 19459 - DNA, 80 bp, synthetic construct
  misc_feature 1..80: note = Synthetic: >NC_034517.1-cand-2320-2399
  source 1..80: mol_type = other DNA
ttgttgaaggtggttacacacttgatgatctatgtcagcatcctgaacttgttgagcaacagctatattgccaggaagct

SEQ ID NO: 19460 - DNA, 80 bp, synthetic construct
  misc_feature 1..80: note = Synthetic: >NC_034517.1-cand-2370-2449
  source 1..80: mol_type = other DNA
gttgagcaacagctatattgccaggaagctgtggaattagctgcagcagagcttaatcttattttattaacaaagtctca

SEQ ID NO: 19461 - DNA, 80 bp, synthetic construct
  misc_feature 1..80: note = Synthetic: >NC_034517.1-cand-2440-2519
  source 1..80: mol_type = other DNA
caaagtctcaagtcgttgcaaacagcatgttatcaaaatactgggaaacaccatactttagccagacaagaaacataagt

SEQ ID NO: 19462 - DNA, 80 bp, synthetic construct
  misc_feature 1..80: note = Synthetic: >NC_034517.1-cand-2530-2609
  source 1..80: mol_type = other DNA
tgtctggacaagtgcaggaagatggccacttatcttcatctgtaacaatcattgaagccatcagatacttgtctaactca

SEQ ID NO: 19463 - DNA, 80 bp, synthetic construct
  misc_feature 1..80: note = Synthetic: >NC_034526.1-cand-0-79
  source 1..80: mol_type = other DNA
agtagactccctaaagagcactgcaaacaaagaaggaaaaaatggcaacactagaggagatccaaaaggaaatcaacatc

SEQ ID NO: 19464 - DNA, 80 bp, synthetic construct
  misc_feature 1..80: note = Synthetic: >NC_034526.1-cand-80-159
  source 1..80: mol_type = other DNA
catgagggtcaactaattatagcaaagcaaaaggtgaaggatgctgaaaaacagtatgagaaggatcctgatgaccttaa

SEQ ID NO: 19465 - DNA, 80 bp, synthetic construct
  misc_feature 1..80: note = Synthetic: >NC_034526.1-cand-170-249
  source 1..80: mol_type = other DNA
ctcagtgatagagaaggaattgctcattccatccagagcaaaatagatgagttgcggagacaacttgctgatagggttgc

SEQ ID NO: 19466 - DNA, 80 bp, synthetic construct
  misc_feature 1..80: note = Synthetic: >NC_034526.1-cand-270-349
  source 1..80: mol_type = other DNA
aagaacgagatccaaccggtgttgaaccaggagatcatctcagagaaaaatccatgctcagttatggaaatgttatcgac

SEQ ID NO: 19467 - DNA, 80 bp, synthetic construct
  misc_feature 1..80: note = Synthetic: >NC_034526.1-cand-340-419
  source 1..80: mol_type = other DNA
tgttatcgacttgaaccatctagatattgatgaaccaactgggcagactgcagactggctgagtattgtgatttacttga

SEQ ID NO: 19468 - DNA, 80 bp, synthetic construct
  misc_feature 1..80: note = Synthetic: >NC_034526.1-cand-420-499
  source 1..80: mol_type = other DNA
cttcatttgtggtgccaattttgttgaaggcactttatatgcttacaacaagagggaggcaaactactaaggataacaag

SEQ ID NO: 19469 - DNA, 80 bp, synthetic construct
  misc_feature 1..80: note = Synthetic: >NC_034526.1-cand-500-579
  source 1..80: mol_type = other DNA
ggaatgaggattaggtttaaggacgacagctcttttgaagatgtcaatgggattagaaagcctaagcatctgtttttatc

SEQ ID NO: 19470 - DNA, 80 bp, synthetic construct
  misc_feature 1..80: note = Synthetic: >NC_034526.1-cand-580-659
  source 1..80: mol_type = other DNA
gatgccaaatgcacaatctagtatgaaggctgaagaaattactccaggaagattccgcactgcagtttgtggattgtatc

SEQ ID NO: 19471 - DNA, 80 bp, synthetic construct
  misc_feature 1..80: note = Synthetic: >NC_034526.1-cand-660-739
  source 1..80: mol_type = other DNA
cagcacagataaaagcaagaaatatggtcagcccagtgatgagtgttattggctttattactctagccagagactggact

SEQ ID NO: 19472 - DNA, 80 bp, synthetic construct
  misc_feature 1..80: note = Synthetic: >NC_034526.1-cand-740-819
  source 1..80: mol_type = other DNA
gaaagaattgaaaattggcttgaccaaccttgcaaatttatgtctgaaccatctcagacttcattgcagaagggccctgc

SEQ ID NO: 19473 - DNA, 80 bp, synthetic construct
  misc_feature 1..80: note = Synthetic: >NC_034526.1-cand-820-899
  source 1..80: mol_type = other DNA
aacaaatagagactatctaaaccaaaggcaggcctcccttgcacaaatggaaacaaaagaagctcaggctgtcagacaac

SEQ ID NO: 19474 - DNA, 80 bp, synthetic construct
  misc_feature 1..80: note = Synthetic: >NC_034526.1-cand-900-979
  source 1..80: mol_type = other DNA
aagcagttgatgctggttgtaatttagtggaccacattgactcaccatcatcaatttgggtatttgcaggagcacctgat

SEQ ID NO: 19475 - DNA, 80 bp, synthetic construct
  misc_feature 1..80: note = Synthetic: >NC_034526.1-cand-990-1069
  source 1..80: mol_type = other DNA
caacctgcctgttcatatcaggtatggctgaactaggagctttcttttcaatactgcaggatatgagaaatacaattatg

SEQ ID NO: 19476 - DNA, 80 bp, synthetic construct
  misc_feature 1..80: note = Synthetic: >NC_034526.1-cand-1070-1149
  source 1..80: mol_type = other DNA
gcatcaaaaactgtcgggacatctgaggaaaagcttaggaagaaatcgtcattctaccagtcttaccttagaagaacgca

SEQ ID NO: 19477 - DNA, 80 bp, synthetic construct
  misc_feature 1..80: note = Synthetic: >NC_034526.1-cand-1120-1199
  source 1..80: mol_type = other DNA
attctaccagtcttaccttagaagaacgcaatctatgggaatacaacttgatcagaggataattatcatgttcatggtgg

SEQ ID NO: 19478 - DNA, 80 bp, synthetic construct
  misc_feature 1..80: note = Synthetic: >NC_034526.1-cand-1250-1329
  source 1..80: mol_type = other DNA
cctgaactgcgatcatttgctcaggcattgattgatcagaaagtgaaagagatatctaatcaggaaccacttaagattta

SEQ ID NO: 19479 - DNA, 80 bp, synthetic construct
  misc_feature 1..80: note = Synthetic: >NC_039475.1-cand-3830-3909
  source 1..80: mol_type = other DNA
agcaaagaagactatcatcaatgttctggaacaaaccattgacccccctcaaaagtggtcatatgcccaagcttgtgcat

SEQ ID NO: 19480 - DNA, 80 bp, synthetic construct
  misc_feature 1..80: note = Synthetic: >NC_039475.1-cand-3910-3989
  source 1..80: mol_type = other DNA
ccctcgacaagacaacctccagtggatacccgcaccacgtccggaagaatgactattggagtggtgaatccttcacagga

SEQ ID NO: 19481 - DNA, 80 bp, synthetic construct
  misc_feature 1..80: note = Synthetic: >NC_039475.1-cand-3990-4069
  source 1..80: mol_type = other DNA
aaacttgcagatcaggcttcaaaagcaaatctcatgtatgaggaaggcaagcacatgcaaccagtttacaccgcagcact

SEQ ID NO: 19482 - DNA, 80 bp, synthetic construct
  misc_feature 1..80: note = Synthetic: >NC_039475.1-cand-4050-4129
  source 1..80: mol_type = other DNA
ccagtttacaccgcagcactcaaagacgagctcgtgaaaactgacaaaatttatggcaaaatcaagaaaagactcctgtg

SEQ ID NO: 19483 - DNA, 80 bp, synthetic construct
  misc_feature 1..80: note = Synthetic: >NC_039475.1-cand-4150-4229
  source 1..80: mol_type = other DNA
tgattcgatgcgccagagcatttggtggtctcatggatgaattcaaagcaaattgtattacactccctatcagagttggt

SEQ ID NO: 19484 - DNA, 80 bp, synthetic construct
  misc_feature 1..80: note = Synthetic: >NC_039475.1-cand-4230-4309
  source 1..80: mol_type = other DNA
atgaatatgaatgaagatggtcccataatatttgagaaacactccaggtacaggtaccactatgatgctgattactcccg

SEQ ID NO: 19485 - DNA, 80 bp, synthetic construct
  misc_feature 1..80: note = Synthetic: >NC_039475.1-cand-4310-4389
  source 1..80: mol_type = other DNA
ctgggactccacacaacagcgggcagtgctggaagcggcacttgaaatcatggtgagattttctgctgagccacagctgg

SEQ ID NO: 19486 - DNA, 80 bp, synthetic construct
  misc_feature 1..80: note = Synthetic: >NC_039475.1-cand-4390-4469
  source 1..80: mol_type = other DNA
cacaaatagtggcagaggacctgctgtcaccaagtgtggttgatgtgggcgatttcaaaatcgctatcaatgaaggccta

SEQ ID NO: 19487 - DNA, 80 bp, synthetic construct
  misc_feature 1..80: note = Synthetic: >NC_039475.1-cand-4480-4559
  source 1..80: mol_type = other DNA
tgccttgcacctcacaatggaattctattgcccactggttacttaccttgtgtgccctttctgaagtgacaggattaggt

SEQ ID NO: 19488 - DNA, 80 bp, synthetic construct
  misc_feature 1..80: note = Synthetic: >NC_039475.1-cand-4560-4639
  source 1..80: mol_type = other DNA
cctgacatcatacaagctaactccatgtactctttctatggtgatgatgagattgtgagcacagacataaaattggaccc

SEQ ID NO: 19489 - DNA, 80 bp, synthetic construct
  misc_feature 1..80: note = Synthetic: >NC_039475.1-cand-4620-4699
  source 1..80: mol_type = other DNA
acagacataaaattggacccagagaaattgaccgcaaagctcaaagaatatggccttaaacccactcggcccgacaaaac

SEQ ID NO: 19490 - DNA, 80 bp, synthetic construct
  misc_feature 1..80: note = Synthetic: >NC_039475.1-cand-4730-4809
  source 1..80: mol_type = other DNA
gaatgggttgactttcctccgccggacagtcacccgtgatccagcaggttggtttggaaagttggaccaaaactccatcc

SEQ ID NO: 19491 - DNA, 80 bp, synthetic construct
  misc_feature 1..80: note = Synthetic: >NC_039475.1-cand-4810-4889
  source 1..80: mol_type = other DNA
tcaggcagttgtactggacaagaggacccaaccatgaagaccccagtgagaccatgataccacacgcacaaagacctgtg

SEQ ID NO: 19492 - DNA, 80 bp, synthetic construct
  misc_feature 1..80: note = Synthetic: >NC_039475.1-cand-4890-4969
  source 1..80: mol_type = other DNA
cagctcatggcactactaggagaatcctccctacatggaccctcattttacagcaaggttagcaaattagtcatatctga

SEQ ID NO: 19493 - DNA, 80 bp, synthetic construct
  misc_feature 1..80: note = Synthetic: >NC_039475.1-cand-4970-5049
  source 1..80: mol_type = other DNA
acttaaagagggaggaatggatttttatgtgcccagacaagagtcaatgtccagatggatgaggttctcagatctaagca

SEQ ID NO: 19494 - DNA, 80 bp, synthetic construct
  misc_feature 1..80: note = Synthetic: >NC_039475.1-cand-5050-5129
  source 1..80: mol_type = other DNA
catgggagggcgatcgcaatctggctcccagttttgtgaatgaagatggcgtcgaatgacgccgctccatctaatgatgg

SEQ ID NO: 19495 - DNA, 80 bp, synthetic construct
  misc_feature 1..80: note = Synthetic: >NC_039477.1-cand-5050-5129
  source 1..80: mol_type = other DNA
gcgatcgcaatctggctcccaatttcgtgaatgaagatggcgtcgagtgacgccaacccatctgatgggtccgcagccaa

SEQ ID NO: 19496 - DNA, 80 bp, synthetic construct
  misc_feature 1..80: note = Synthetic: >NC_039477.1-cand-5130-5209
  source 1..80: mol_type = other DNA
cctcgtaccagaggtcaacaatgaggttatggctttggagcccgttgttggtgccgctattgcggcacctgtagcgggcc

SEQ ID NO: 19497 - DNA, 80 bp, synthetic construct
  misc_feature 1..80: note = Synthetic: >NC_039477.1-cand-5180-5259
  source 1..80: mol_type = other DNA
gtgccgctattgcggcacctgtagcgggccaacaaaatgtaattgacccctggattagaaataattttgtacaagcccct

SEQ ID NO: 19498 - DNA, 80 bp, synthetic construct
  misc_feature 1..80: note = Synthetic: >NC_039477.1-cand-5290-5369
  source 1..80: mol_type = other DNA
gctccaggtgaaatactatggagcgcgcccctaggccctgacctaaatccctacctatcccatttggccagaatgtacaa

SEQ ID NO: 19499 - DNA, 80 bp, synthetic construct
  misc_feature 1..80: note = Synthetic: >NC_039477.1-cand-5330-5409
  source 1..80: mol_type = other DNA
acctaaatccctacctatcccatttggccagaatgtacaatggttatgcaggtggttttgaagtgcaagtaattctcgcg

SEQ ID NO: 19500 - DNA, 80 bp, synthetic construct
  misc_feature 1..80: note = Synthetic: >NC_039477.1-cand-5450-5529
  source 1..80: mol_type = other DNA
tcccaccaaattttccaactgaaggcttaagtcctagccaggtcactatgttcccccatataatagtagatgttagacaa

SEQ ID NO: 19501 - DNA, 80 bp, synthetic construct
  misc_feature 1..80: note = Synthetic: >NC_039477.1-cand-5530-5609
  source 1..80: mol_type = other DNA
ttagaacctgtgctgattcccttacccgatgttaggaataatttctatcattataatcagtcaaatgactccactattaa

SEQ ID NO: 19502 - DNA, 80 bp, synthetic construct
  misc_feature 1..80: note = Synthetic: >NC_039477.1-cand-5570-5649
  source 1..80: mol_type = other DNA
atttctatcattataatcagtcaaatgactccactattaagttgatagcaatgttgtatacaccacttagggctaataat

SEQ ID NO: 19503 - DNA, 80 bp, synthetic construct
  misc_feature 1..80: note = Synthetic: >NC_039477.1-cand-5690-5769
  source 1..80: mol_type = other DNA
cgagaccatcccccgattttgatttcatatttttagtgccacctacagttgagtcaagaactaaaccattctctgtccca

SEQ ID NO: 19504 - DNA, 80 bp, synthetic construct
  misc_feature 1..80: note = Synthetic: >NC_039477.1-cand-5770-5849
  source 1..80: mol_type = other DNA
gttttaactgttgaggagatgaccaattcaagattccccattcctttggaaaagttgttcacgggccccagcagtgcctt

SEQ ID NO: 19505 - DNA, 80 bp, synthetic construct
  misc_feature 1..80: note = Synthetic: >NC_039477.1-cand-5850-5929
  source 1..80: mol_type = other DNA
tgttgttcaaccacaaaacggcaggtgcacaactgatggcgtgctcctaggcaccacccaactgtctcctgtcaacatct

SEQ ID NO: 19506 - DNA, 80 bp, synthetic construct
  misc_feature 1..80: note = Synthetic: >NC_039477.1-cand-5950-6029
  source 1..80: mol_type = other DNA
acccacatcacaggtagtcgcaactacacaatgaatttggcttctcaaaattggaacaactatgacccaacagaagaaat

SEQ ID NO: 19507 - DNA, 80 bp, synthetic construct
  misc_feature 1..80: note = Synthetic: >NC_039477.1-cand-6010-6089
  source 1..80: mol_type = other DNA
tatgacccaacagaagaaatcccagcccctctaggaactccagattttgtgggaaagattcaaggcatgctcacccaaac

SEQ ID NO: 19508 - DNA, 80 bp, synthetic construct
  misc_feature 1..80: note = Synthetic: >NC_039477.1-cand-6090-6169
  source 1..80: mol_type = other DNA
cacaaggacagatggttcaacacgcggccacaaagctacagtgtacactgggagcgccgactttgctccaaaactgggta

SEQ ID NO: 19509 - DNA, 80 bp, synthetic construct
  misc_feature 1..80: note = Synthetic: >NC_039477.1-cand-6170-6249
  source 1..80: mol_type = other DNA
gagttcaatttgaaactgacacagaccatgattttgaagctaatcaaaacacaaagttcaccccagtcggtgtcatccaa

SEQ ID NO: 19510 - DNA, 80 bp, synthetic construct
  misc_feature 1..80: note = Synthetic: >NC_039477.1-cand-6250-6329
  source 1..80: mol_type = other DNA
gatggtagcaccacccaccgaaacgaaccccaacagtgggtgctcccaagttactcaggcagaaatactcacaatgtaca

SEQ ID NO: 19511 - DNA, 80 bp, synthetic construct
  misc_feature 1..80: note = Synthetic: >NC_039897.1-cand-6660-6739
  source 1..80: mol_type = other DNA
tggtgaggccattgtgtttttcatgtcggacttccctattgcccatggtactaatggcttgagtgtgccttgcaccatac

SEQ ID NO: 19512 - DNA, 80 bp, synthetic construct
  misc_feature 1..80: note = Synthetic: >NC_039897.1-cand-6710-6789
  source 1..80: mol_type = other DNA
ctaatggcttgagtgtgccttgcaccataccccaagaatttgtcacccattttgtcaatgaacaggcccctactagaggg

SEQ ID NO: 19513 - DNA, 80 bp, synthetic construct
  misc_feature 1..80: note = Synthetic: >NC_039897.1-cand-6820-6899
  source 1..80: mol_type = other DNA
gacactcataggaatcttggtgaattcaaattatatcctgatggcttcatgacgtgtgtgcctaattccagtggtactgg

SEQ ID NO: 19514 - DNA, 80 bp, synthetic construct
  misc_feature 1..80: note = Synthetic: >NC_039897.1-cand-6900-6979
  source 1..80: mol_type = other DNA
cccacaaactctcccaatcaatggtgtctttgtttttgtgtcctgggtttccagattttatcaattaaagcctgtgggaa

SEQ ID NO: 19515 - DNA, 80 bp, synthetic construct
  misc_feature 1..80: note = Synthetic: >NC_039897.1-cand-7000-7079
  source 1..80: mol_type = other DNA
cttgggattaggagatcataatggctcaagccatacttggagccatagcagcaacagcagctggcagcgctgttggtgct

SEQ ID NO: 19516 - DNA, 80 bp, synthetic construct
  misc_feature 1..80: note = Synthetic: >NC_039897.1-cand-7080-7159
  source 1..80: mol_type = other DNA
ggtatacaagctggaactgaagctgccctacaacaccaaaggttccagcaagatttgaccttacaaaagaattcctttat

SEQ ID NO: 19517 - DNA, 80 bp, synthetic construct
  misc_feature 1..80: note = Synthetic: >NC_039897.1-cand-7160-7239
  source 1..80: mol_type = other DNA
ccatgacaaagagatgatgggcctacaggttgatgcttcaactgcactccttcagaacagtttgggtacaaggtacaata

SEQ ID NO: 19518 - DNA, 80 bp, synthetic construct
  misc_feature 1..80: note = Synthetic: >NC_039897.1-cand-7210-7289
  source 1..80: mol_type = other DNA
ttcagaacagtttgggtacaaggtacaatatgttgaccaaagcagggatgacatccgcggacgcggcacgcatggttgtg

SEQ ID NO: 19519 - DNA, 80 bp, synthetic construct
  misc_feature 1..80: note = Synthetic: >NC_039897.1-cand-7320-7399
  source 1..80: mol_type = other DNA
aatgggactaggattgccgcacctatgtcaactgcgacgacacttaggtctggtggtttcatgaccgtaccaactgttta

SEQ ID NO: 19520 - DNA, 80 bp, synthetic construct
  misc_feature 1..80: note = Synthetic: >NC_039897.1-cand-7410-7489
  source 1..80: mol_type = other DNA
aagaataaacaatcaattggtggtggtttttccaatgtaaattatgatccctcagtctcctcctctcggacttctcagtg

SEQ ID NO: 19521 - DNA, 80 bp, synthetic construct
  misc_feature 1..80: note = Synthetic: >NC_039897.1-cand-7480-7559
  source 1..80: mol_type = other DNA
cttctcagtgggtttcttctcaaaattcaatgcgttccaccttggaaccatttcacccaggtgccctaagaaccacatgg

SEQ ID NO: 19522 - DNA, 80 bp, synthetic construct
  misc_feature 1..80: note = Synthetic: >NC_039897.1-cand-7560-7639
  source 1..80: mol_type = other DNA
gttactccacctgggtcaacttctacttctacaatttccacagtttctactgtgccaaaattctttaatacagaaaggtt

SEQ ID NO: 19523 - DNA, 80 bp, synthetic construct
  misc_feature 1..80: note = Synthetic: >NC_039897.1-cand-7580-7659
  source 1..80: mol_type = other DNA
ttctacttctacaatttccacagtttctactgtgccaaaattctttaatacagaaaggttacccttattcgcgaacaggg

SEQ ID NO: 19524 - DNA, 80 bp, synthetic construct
  misc_feature 1..80: note = Synthetic: >NC_040876.1-cand-0-79
  source 1..80: mol_type = other DNA
atgaagatggcgtctaatgacgctaccactgcctttggcagccaaaactctgtcaatgacagtatcaacaccgccccttc

SEQ ID NO: 19525 - DNA, 80 bp, synthetic construct
  misc_feature 1..80: note = Synthetic: >NC_040876.1-cand-70-149
  source 1..80: mol_type = other DNA
ccgccccttctaataaagaagaggttggtgcattctccaacatcaaagttggttttaagaaaatgctgggtgccgttccc

SEQ ID NO: 19526 - DNA, 80 bp, synthetic construct
  misc_feature 1..80: note = Synthetic: >NC_040876.1-cand-170-249
  source 1..80: mol_type = other DNA
tagtgatcagcactgccccacagttaagatcgggaccaaaacgttaacagttccccctgagcccccaaatggtgaagaca

SEQ ID NO: 19527 - DNA, 80 bp, synthetic construct
  misc_feature 1..80: note = Synthetic: >NC_044045.1-cand-4310-4389
  source 1..80: mol_type = other DNA
gcagcaaagatgcatcttgtctgctgccatggaggttatggtgaaattctcagctgaaccggaattggcacaggtggtgg

SEQ ID NO: 19528 - DNA, 80 bp, synthetic construct
  misc_feature 1..80: note = Synthetic: >NC_044045.1-cand-4390-4469
  source 1..80: mol_type = other DNA
ctgaagacctactcgccccgagccaactcgacgtgggcgattttgtggtgtcagttcaggaaggccttccttcaggtgtc

SEQ ID NO: 19529 - DNA, 80 bp, synthetic construct
  misc_feature 1..80: note = Synthetic: >NC_044045.1-cand-4470-4549
  source 1..80: mol_type = other DNA
ccatgtacctcccagtggaactctatagcacactggatcattacccttagtgcaatgtcagaagtctctggtctctcccc

SEQ ID NO: 19530 - DNA, 80 bp, synthetic construct
  misc_feature 1..80: note = Synthetic: >NC_044045.1-cand-4550-4629
  source 1..80: mol_type = other DNA
agatgtgatccaagcccactcatgcttctctttttatggtgatgatgagatagttagcacagatattaatctggacccag

SEQ ID NO: 19531 - DNA, 80 bp, synthetic construct
  misc_feature 1..80: note = Synthetic: >NC_044045.1-cand-4630-4709
  source 1..80: mol_type = other DNA
caaaattaaccttgaaacttagggaatatggattggtccccaccagaccagacaaaactgagggcccactagtcattaca

SEQ ID NO: 19532 - DNA, 80 bp, synthetic construct
  misc_feature 1..80: note = Synthetic: >NC_044045.1-cand-4710-4789
  source 1..80: mol_type = other DNA
gagaacctccacgggttgaccttcctacgcaggcacatcacacgagaccctgctggatggtttggtaagttagaccagga

SEQ ID NO: 19533 - DNA, 80 bp, synthetic construct
  misc_feature 1..80: note = Synthetic: >NC_044045.1-cand-4790-4869
  source 1..80: mol_type = other DNA
ttcaattttgagacagctctattggaccagaggacccaaccatgagaatccctatgagagcatggttccgcactcacagc

SEQ ID NO: 19534 - DNA, 80 bp, synthetic construct
  misc_feature 1..80: note = Synthetic: >NC_044045.1-cand-4870-4949
  source 1..80: mol_type = other DNA
gcgcgacccagctaatggcgttgttgggtgaggcatcgctacacggtccccagttttacaagaaagttagcaagatggtc

SEQ ID NO: 19535 - DNA, 80 bp, synthetic construct
  misc_feature 1..80: note = Synthetic: >NC_044045.1-cand-4950-5029
  source 1..80: mol_type = other DNA
atcaatgagatcaaaagtggtggtctggaattttacgtgcccagacaggaggccatgttcagatggatgagattctctga

SEQ ID NO: 19536 - DNA, 80 bp, synthetic construct
  misc_feature 1..80: note = Synthetic: >NC_044045.1-cand-5030-5109
  source 1..80: mol_type = other DNA
cctcagcacgtgggagggcgatcgcaatctggctcccgacggtgtgaatgaggatggcgtcgagtgacgcgcccgtttct

SEQ ID NO: 19537 - DNA, 80 bp, synthetic construct
  misc_feature 1..80: note = Synthetic: >NC_044045.1-cand-5110-5189
  source 1..80: mol_type = other DNA
ggcaccgatggtgcggcaggactcgttccagagagtcaacaagaagtcttgcctttagagcccgtcgcgggagtccagct

SEQ ID NO: 19538 - DNA, 80 bp, synthetic construct
  misc_feature 1..80: note = Synthetic: >NC_044045.1-cand-5190-5269
  source 1..80: mol_type = other DNA
ggctgctcccgttgcagggcaaagtaacataattgacccctggattagaatgaattttgtgcaagccccggccggtgagt

SEQ ID NO: 19539 - DNA, 80 bp, synthetic construct
  misc_feature 1..80: note = Synthetic: >NC_044045.1-cand-5270-5349
  source 1..80: mol_type = other DNA
tcactgtgtcccctcggaacgcaccgggtgaggtacttattgatttagaattaggaccagaattaaacccctatctcaac

SEQ ID NO: 19540 - DNA, 80 bp, synthetic construct
  misc_feature 1..80: note = Synthetic: >NC_044045.1-cand-5330-5409
  source 1..80: mol_type = other DNA
aattaaacccctatctcaaccaccttgcaagaatgtataatgggtatgtaggaggaatggaggtggaagttgttcttgcc

SEQ ID NO: 19541 - DNA, 80 bp, synthetic construct
  misc_feature 1..80: note = Synthetic: >NC_044045.1-cand-5410-5489
  source 1..80: mol_type = other DNA
gggaatgcgttcacggcaggtaagatcttgtttgcagctgtgccccccagcttcccaacccatggtatctctgcagcaca

SEQ ID NO: 19542 - DNA, 80 bp, synthetic construct
  misc_feature 1..80: note = Synthetic: >NC_044045.1-cand-5490-5569
  source 1..80: mol_type = other DNA
ggctactatgctaccccatgtgattgtggatgtcaggcagttggagcctgttcggctccccctccctgacgtcaggaatg

SEQ ID NO: 19543 - DNA, 80 bp, synthetic construct
  misc_feature 1..80: note = Synthetic: >NC_044046.1-cand-4460-4539
  source 1..80: mol_type = other DNA
ttgcacctcccagtggaactcaattagtcactggttgctaacactgtgtgccctttctgaagtgacaaacctatcacctg

SEQ ID NO: 19544 - DNA, 80 bp, synthetic construct
  misc_feature 1..80: note = Synthetic: >NC_044046.1-cand-4540-4619
  source 1..80: mol_type = other DNA
atgtagtgcaagccaactcaatgttctcattctatggtgatgatgaaatagtgagcacagatataaaagttgaccctgct

SEQ ID NO: 19545 - DNA, 80 bp, synthetic construct
  misc_feature 1..80: note = Synthetic: >NC_044046.1-cand-4620-4699
  source 1..80: mol_type = other DNA
aaattaacagcaaagctgaaggagtatggtctgaggccgacacgcccagacaaaactgagggacccttagttttgagtga

SEQ ID NO: 19546 - DNA, 80 bp, synthetic construct
  misc_feature 1..80: note = Synthetic: >NC_044046.1-cand-4670-4749
  source 1..80: mol_type = other DNA
caaaactgagggacccttagttttgagtgagaacctggctggactgacgtttctacgaaggtcaatcacccgagacccag

SEQ ID NO: 19547 - DNA, 80 bp, synthetic construct
  misc_feature 1..80: note = Synthetic: >NC_044046.1-cand-4780-4859
  source 1..80: mol_type = other DNA
ccattttaagacaaatgtactggaccaaaggacccaaccacgatgaccctaatgaaaccatggtcccgcactcccaacga

SEQ ID NO: 19548 - DNA, 80 bp, synthetic construct
  misc_feature 1..80: note = Synthetic: >NC_044046.1-cand-4860-4939
  source 1..80: mol_type = other DNA
ccagtacaactgatggcacttttgggtgaggcagcactgcacggtccttccttctacagtaaaatcagcaaattggtaat

SEQ ID NO: 19549 - DNA, 80 bp, synthetic construct
  misc_feature 1..80: note = Synthetic: >NC_044046.1-cand-4960-5039
  source 1..80: mol_type = other DNA
gaatggatttttacgtgcccaggcaagaaccaatgttcagatggatgagattctcggatctgagcacgtgggagggagat

SEQ ID NO: 19550 - DNA, 80 bp, synthetic construct
  misc_feature 1..80: note = Synthetic: >NC_044046.1-cand-5020-5099
  source 1..80: mol_type = other DNA
tgagcacgtgggagggagatcgcaatctggctcccagttttgtgaatgaagatggcgtctaaggacgcatcgccatctac

SEQ ID NO: 19551 - DNA, 80 bp, synthetic construct
  misc_feature 1..80: note = Synthetic: >NC_044046.1-cand-5100-5179
  source 1..80: mol_type = other DNA
ggatggtacagccaacctcgttccagagagtcaacaggaggttttggctttgcaaccagttgctggcgcacaaatagctg

SEQ ID NO: 19552 - DNA, 80 bp, synthetic construct
  misc_feature 1..80: note = Synthetic: >NC_044046.1-cand-5180-5259
  source 1..80: mol_type = other DNA
cacctgtagctgggcaattcaatgtaattgacccctggatatatcaaaattttgtgcaggcgcctgagggagagttcacc

SEQ ID NO: 19553 - DNA, 80 bp, synthetic construct
  misc_feature 1..80: note = Synthetic: >NC_044046.1-cand-5260-5339
  source 1..80: mol_type = other DNA
gtgtcaccccgtaactccacaggtgaaatcctaatgaatttggaattaggtccacagttgaatccttatttggcccactt

SEQ ID NO: 19554 - DNA, 80 bp, synthetic construct
  misc_feature 1..80: note = Synthetic: >NC_044046.1-cand-5340-5419
  source 1..80: mol_type = other DNA
ggcacgcatgtacaatgcttatgctggcggttttgaagtgcaagtgctgctggccggcaatgctttcaccgcgggtaaga

SEQ ID NO: 19555 - DNA, 80 bp, synthetic construct
  misc_feature 1..80: note = Synthetic: >NC_044046.1-cand-5420-5499
  source 1..80: mol_type = other DNA
taattgtgtgtgccgtgcctccaaacttccctctgcaaaatatatcagctgcacaggccacacaacttccccatgttgtg

SEQ ID NO: 19556 - DNA, 80 bp, synthetic construct
  misc_feature 1..80: note = Synthetic: >NC_044046.1-cand-5500-5579
  source 1..80: mol_type = other DNA
gttgatgtgagacaattggaacccgtggtcctacctctcccagacgtgcgtgcgggcttctaccattacaatcaggttga

SEQ ID NO: 19557 - DNA, 80 bp, synthetic construct
  misc_feature 1..80: note = Synthetic: >NC_044046.1-cand-5580-5659
  source 1..80: mol_type = other DNA
agagtcccgtatgcgtttggtggccattttgtacactccattgaggactaattctgcaggtgacgatgcatttacagtct

SEQ ID NO: 19558 - DNA, 80 bp, synthetic construct
  misc_feature 1..80: note = Synthetic: >NC_044046.1-cand-5660-5739
  source 1..80: mol_type = other DNA
cctgccgcatcctcaccagaccagcacctgattttagcttctttttcttaataccccccacaatagaatctaaaacaaca

SEQ ID NO: 19559 - DNA, 80 bp, synthetic construct
  misc_feature 1..80: note = Synthetic: >NC_001611.1-cand-120810-120889
  source 1..80: mol_type = other DNA
ttagtaacgccattatggataatctatttacctttctacatgaaatagaagatagatataccagaactatttttaacttt

SEQ ID NO: 19560 - DNA, 80 bp, synthetic construct
  misc_feature 1..80: note = Synthetic: >NC_003310.1-cand-16580-16659
  source 1..80: mol_type = other DNA
aaagttattaattaattacatgttgttttatatatcgctacgaatttaaacagagaaatcagttaggaagaaaaaattat

SEQ ID NO: 19561 - DNA, 80 bp, synthetic construct
  misc_feature 1..80: note = Synthetic: >EVD70-cand-4020-4099
  source 1..80: mol_type = other DNA
aaagtttgctcatatcttggcatcccatacacaataagacagagtgattcttggctcaagaagttcacagaggcatgcaa

SEQ ID NO: 19562 - DNA, 80 bp, synthetic construct
  misc_feature 1..80: note = Synthetic: >NC_003310.1-cand-98970-99049
  source 1..80: mol_type = other DNA
caacaatagttattacttttctctacaacgacgattggaggatttagttcctgataagttatgggaaccagggtttattt

SEQ ID NO: 19563 - DNA, 80 bp, synthetic construct
  misc_feature 1..80: note = Synthetic: >NC_003310.1-cand-126200-126279
  source 1..80: mol_type = other DNA
aaataactcatttatatattaaaaaatgtcactattaaagatggagtataatctttatgccgaactaaaaaaaatgactt

SEQ ID NO: 19564 - DNA, 80 bp, synthetic construct
  misc_feature 1..80: note = Synthetic: >NC_003310.1-cand-44390-44469
  source 1..80: mol_type = other DNA
cgataaacattgtttgtattctccagatgtcagcatctgatacaacaatatatgtgcacataaacctctggcacttattt

SEQ ID NO: 19565 - DNA, 80 bp, synthetic construct
  misc_feature 1..80: note = Synthetic: >AdVB3-cand-13120-13199
  source 1..80: mol_type = other DNA
atgtatgctagtaacaggcctttcattaacaaactgctggactacctgcacagggcggccgccatgaactctgattattt

SEQ ID NO: 19566 - DNA, 80 bp, synthetic construct
  misc_feature 1..80: note = Synthetic: >NC_001611.1-cand-47460-47539
  source 1..80: mol_type = other DNA
atccatttctagaatttagaaatatattttcatttaaatgaatcccaaacattggggaagagccgcttggaccattattt

SEQ ID NO: 19567 - DNA, 80 bp, synthetic construct
  misc_feature 1..80: note = Synthetic: >NC_001611.1-cand-48030-48109
  source 1..80: mol_type = other DNA
attggtcaatgtgaatgtattcacttaacaattccacaaatttatttattaactccgaggcacatacatcgtcggtattt

SEQ ID NO: 19568 - DNA, 80 bp, synthetic construct
  misc_feature 1..80: note = Synthetic: >NC_003310.1-cand-96890-96969
  source 1..80: mol_type = other DNA
aaatactactattgagtaaatcagttattttttttatatcgatattgatggacatttttatagttaaggataataagtat

SEQ ID NO: 19569 - DNA, 80 bp, synthetic construct
  misc_feature 1..80: note = Synthetic: >NC_003310.1-cand-150910-150989
  source 1..80: mol_type = other DNA
aaatacttgattcctaggtccacacaagctgccaatatagtctgtgttccataatagtttactttcatgatttcattatc

SEQ ID NO: 19570 - DNA, 80 bp, synthetic construct
  misc_feature 1..80: note = Synthetic: >NC_001611.1-cand-36900-36979
  source 1..80: mol_type = other DNA
aacacaaattatattattagacttttcgtatgtaatgtctttcatgttataagtttttaatcctggaatagaatctattt

SEQ ID NO: 19571 - DNA, 80 bp, synthetic construct
  misc_feature 1..80: note = Synthetic: >NC_003310.1-cand-114450-114529
  source 1..80: mol_type = other DNA
aaatagcgggtataatagcagaaagctataacttacttcaacgaggaaggttacctctagtttcagaattttctgacgaa

SEQ ID NO: 19572 - DNA, 80 bp, synthetic construct
  misc_feature 1..80: note = Synthetic: >NC_001611.1-cand-78120-78199
  source 1..80: mol_type = other DNA
aaatataacataggtgatgactccttatttttagacattagatatgccaaaatcatagccccgcttctatttactcccgc

SEQ ID NO: 19573 - DNA, 80 bp, synthetic construct
  misc_feature 1..80: note = Synthetic: >NC_001611.1-cand-3150-3229
  source 1..80: mol_type = other DNA
atttcataaaagttattgtactatcgatgtcaacacattctacattttttaatcgtctatatagtatttttctgatattt

SEQ ID NO: 19574 - DNA, 80 bp, synthetic construct
  misc_feature 1..80: note = Synthetic: >NC_003310.1-cand-39630-39709
  source 1..80: mol_type = other DNA
ccatttttaacgtagttgggacgtcctgcagggtattgttttgaagaaatgatatcgagaacagatttgatacgatattt

SEQ ID NO: 19575 - DNA, 80 bp, synthetic construct
  misc_feature 1..80: note = Synthetic: >NC_001611.1-cand-113380-113459
  source 1..80: mol_type = other DNA
actaacgtgattattattgtcataaacattattgaacaggcattgctaaaacttggatttgacgaaatcaaaggactgag

SEQ ID NO: 19576 - DNA, 80 bp, synthetic construct
  misc_feature 1..80: note = Synthetic: >NC_001611.1-cand-27120-27199
  source 1..80: mol_type = other DNA
actaagtctagtattactcatgcatttgttagttattcggagcgcgcaatttttaaactgtcctataacctctcctatat

SEQ ID NO: 19577 - DNA, 80 bp, synthetic construct
  misc_feature 1..80: note = Synthetic: >NC_003310.1-cand-57520-57599
  source 1..80: mol_type = other DNA
actttaatgtgtgaaaacagtacgccacatgcttccatgacagtgtgtaacactttggatacaaaatgtttgacattagt

SEQ ID NO: 19578 - DNA, 80 bp, synthetic construct
  misc_feature 1..80: note = Synthetic: >NC_003310.1-cand-104690-104769
  source 1..80: mol_type = other DNA
actaattaatagtaaatgagcttttacagatctagtataattagtcagattattaagtataatagacgactagctaagtc

SEQ ID NO: 19579 - DNA, 80 bp, synthetic construct
  misc_feature 1..80: note = Synthetic: >NC_007377.1-cand-570-649
  source 1..80: mol_type = other DNA
actacagctaaggctatggagcaaatggctggatcgagtgagcaagcagcagaggccatggaggttgctagtcaggccag

SEQ ID NO: 19580 - DNA, 80 bp, synthetic construct
  misc_feature 1..80: note = Synthetic: >NC_001611.1-cand-86480-86559
  source 1..80: mol_type = other DNA
actagaggaccgttgggaattttatcgaactacgtcaagactcttcttatttctatgtattgttccaaaacatttttaga

SEQ ID NO: 19581 - DNA, 80 bp, synthetic construct
  misc_feature 1..80: note = Synthetic: >EVD70-cand-5700-5779
  source 1..80: mol_type = other DNA
actagcaagttcccaaatatgtatataccagtaggacaaacactaaattatggtttccttaatcttggggggacccccac

SEQ ID NO: 19582 - DNA, 80 bp, synthetic construct
  misc_feature 1..80: note = Synthetic: >NC_007378.1-cand-850-929
  source 1..80: mol_type = other DNA
actagcatctttattggagatgtgccacagcacacagattggcgggacaaggatggtggacattcttaggcagaacccaa

SEQ ID NO: 19583 - DNA, 80 bp, synthetic construct
  misc_feature 1..80: note = Synthetic: >NC_003310.1-cand-101890-101969
  source 1..80: mol_type = other DNA
actagtaaaatgaaatcgtctttagaggatctattagatgtgtataattctcctgaaaacgatgatggcagtcaattgat

SEQ ID NO: 19584 - DNA, 80 bp, synthetic construct
  misc_feature 1..80: note = Synthetic: >NC_001611.1-cand-84700-84779
  source 1..80: mol_type = other DNA
cttaaaatagctctagctaaaggcatagattacgaatatataaaagacgcttgttaataagtaaatgaaaaaaaactagt

SEQ ID NO: 19585 - DNA, 80 bp, synthetic construct
  misc_feature 1..80: note = Synthetic: >AdVB3-cand-28510-28589
  source 1..80: mol_type = other DNA
gtggcattttccattgcttattgcttggtaacatgcatcatcactgctatcatttgtgtgtgcatacacttgcttatagt

SEQ ID NO: 19586 - DNA, 80 bp, synthetic construct
  misc_feature 1..80: note = Synthetic: >NC_001611.1-cand-144090-144169
  source 1..80: mol_type = other DNA
gggtgcttccagaggaaactaatatcggttgcacggttaatacgccggttagtatgacttacttgtataataagtatagt

SEQ ID NO: 19587 - DNA, 80 bp, synthetic construct
  misc_feature 1..80: note = Synthetic: >NC_001611.1-cand-61110-61189
  source 1..80: mol_type = other DNA
actatattaagattatctatcatgtctattctcccaccgttatataaatcgcctccgctaagaaacgttagtatatccat

SEQ ID NO: 19588 - DNA, 80 bp, synthetic construct
  misc_feature 1..80: note = Synthetic: >NC_001611.1-cand-91490-91569
  source 1..80: mol_type = other DNA
tgctcatatatttatagaagatattacatatctaaatgaataccggaatcatagatttatttgataatcatgttgatagt

SEQ ID NO: 19589 - DNA, 80 bp, synthetic construct
  misc_feature 1..80: note = Synthetic: >NC_003310.1-cand-105010-105089
  source 1..80: mol_type = other DNA
actatcgtcatttttttctctagatccagctactgctgataatgatagaataaacgctatttatccgggtggtataccca

SEQ ID NO: 19590 - DNA, 80 bp, synthetic construct
  misc_feature 1..80: note = Synthetic: >NC_003310.1-cand-99210-99289
  source 1..80: mol_type = other DNA
actatcgttggaaaatggtgctattagaatttacaaaactggtaatccacatagttgtaaagttaaaattgttccgttgg

SEQ ID NO: 19591 - DNA, 80 bp, synthetic construct
  misc_feature 1..80: note = Synthetic: >NC_003310.1-cand-64960-65039
  source 1..80: mol_type = other DNA
ttcgtcaaatgaataaacaatttcacaaatggatgttaatgtattagtaggaaattttttgacgctagtggaattgaaga

SEQ ID NO: 19592 - DNA, 80 bp, synthetic construct
  misc_feature 1..80: note = Synthetic: >AF482713.1-cand-310-389
  source 1..80: mol_type = other DNA
gaaaagtcatccttaaggtatggcaatgtcctggatgtcaactccattgatctggaagaaccaagtggacagactgctga

SEQ ID NO: 19593 - DNA, 80 bp, synthetic construct
  misc_feature 1..80: note = Synthetic: >AF482713.1-cand-410-489
  source 1..80: mol_type = other DNA
atatactaggctttgcaatcccaatcatcctaaaggccttgtatatgctttctacccgcgggcgtcagactgtcaaagac

SEQ ID NO: 19594 - DNA, 80 bp, synthetic construct
  misc_feature 1..80: note = Synthetic: >AF482713.1-cand-470-549
  source 1..80: mol_type = other DNA
ggcgtcagactgtcaaagacaataaagggactagaatacggtttaaggatgattcatcatttgaagaggtcaatggcatc

SEQ ID NO: 19595 - DNA, 80 bp, synthetic construct
  misc_feature 1..80: note = Synthetic: >AF482713.1-cand-550-629
  source 1..80: mol_type = other DNA
cgaaagcccaagcacttgtatgtgtccatgccaacagcacagtcaacaatgaaggctgaggagataacaccagggaggtt

SEQ ID NO: 19596 - DNA, 80 bp, synthetic construct
  misc_feature 1..80: note = Synthetic: >AF482713.1-cand-630-709
  source 1..80: mol_type = other DNA
cagaacaattgcatgtggcctcttccctgcacaagttaaggcaagaaacatcattagtcctgtcatgggagttattggat

SEQ ID NO: 19597 - DNA, 80 bp, synthetic construct
  misc_feature 1..80: note = Synthetic: >AF482713.1-cand-710-789
  source 1..80: mol_type = other DNA
ttagcttctttgtaaaagattggatggaaaggatagaagactttttggcagctgaatgtcctttcctaccaaagccaaag

SEQ ID NO: 19598 - DNA, 80 bp, synthetic construct
  misc_feature 1..80: note = Synthetic: >AF482713.1-cand-790-869
  source 1..80: mol_type = other DNA
gctccatctgaagcattcatggccactaacaaagcctattttttaaatagacaaaggcaagtgaatgagtcaaaagtcca

SEQ ID NO: 19599 - DNA, 80 bp, synthetic construct
  misc_feature 1..80: note = Synthetic: >AF482713.1-cand-870-949
  source 1..80: mol_type = other DNA
ggatatagttgacctcattgaccatgcggagactgagtcagcaacattgtttacggatattgctactccacactcagtgt

SEQ ID NO: 19600 - DNA, 80 bp, synthetic construct
  misc_feature 1..80: note = Synthetic: >AF482713.1-cand-960-1039
  source 1..80: mol_type = other DNA
atgtgcaccagatcgttgtccaccaacagccttatatgtcgccggtgttccagaattgggtgcattctttgccattttgc

SEQ ID NO: 19601 - DNA, 80 bp, synthetic construct
  misc_feature 1..80: note = Synthetic: >AF482713.1-cand-1040-1119
  source 1..80: mol_type = other DNA
aggacatgcgaaacacaattatggcttcaaagtctgttgggacagctgaagaaaaactcaagaaaaaatctgccttctac

SEQ ID NO: 19602 - DNA, 80 bp, synthetic construct
  misc_feature 1..80: note = Synthetic: >AF482713.1-cand-1070-1149
  source 1..80: mol_type = other DNA
agtctgttgggacagctgaagaaaaactcaagaaaaaatctgccttctaccagtcatacttgagaaggacacaatctatg

SEQ ID NO: 19603 - DNA, 80 bp, synthetic construct
  misc_feature 1..80: note = Synthetic: >AF482713.1-cand-1200-1279
  source 1..80: mol_type = other DNA
gaaagaagcagtgaaccactttcatcttggtgatgatatggatcctgagctcagacagctcgctcaatccttgattgata

SEQ ID NO: 19604 - DNA, 80 bp, synthetic construct
  misc_feature 1..80: note = Synthetic: >AF482713.1-cand-1280-1359
  source 1..80: mol_type = other DNA
ctaaggtgaaggagatttccaatcaagagccattaaagctgtgagagttgaaactatcaaagccatcactgccataggag

SEQ ID NO: 19605 - DNA, 80 bp, synthetic construct
  misc_feature 1..80: note = Synthetic: >AF482713.1-cand-1360-1439
  source 1..80: mol_type = other DNA
ccaatactagttgatatctaagaatcaggttggttagatggattttctgggcttgtgccaatcatttaatcatctcagga

SEQ ID NO: 19606 - DNA, 80 bp, synthetic construct
  misc_feature 1..80: note = Synthetic: >AF482713.1-cand-1440-1519
  source 1..80: mol_type = other DNA
ctctctaatgtgattaatacgggttgatcatgagggtggtaagtgggtttcatttactaacaatgggtaagggaacacta

SEQ ID NO: 19607 - DNA, 80 bp, synthetic construct
  misc_feature 1..80: note = Synthetic: >AF482713.1-cand-1490-1569
  source 1..80: mol_type = other DNA
catttactaacaatgggtaagggaacactactatcttttgcactagggttaagggccattattctatatttgcactaatg

SEQ ID NO: 19608 - DNA, 80 bp, synthetic construct
  misc_feature 1..80: note = Synthetic: >AdVE4-cand-7370-7449
  source 1..80: mol_type = other DNA
ggcacctcggcccggttgttgatgacctgggcagcgagcacgatctcgtcgaagccgttaatgttgtggcccacaatgta

SEQ ID NO: 19609 - DNA, 80 bp, synthetic construct
  misc_feature 1..80: note = Synthetic: >AdVE4-cand-7400-7479
  source 1..80: mol_type = other DNA
gcagcgagcacgatctcgtcgaagccgttaatgttgtggcccacaatgtatagttccacaaaccgcgggcggcccttgac

SEQ ID NO: 19610 - DNA, 80 bp, synthetic construct
  misc_feature 1..80: note = Synthetic: >AdVE4-cand-7570-7649
  source 1..80: mol_type = other DNA
ggcgcggaggaaggaagtccagagatccacggccagggcggtttgtagacggtcccggtactggcgaaactgctgaccca

SEQ ID NO: 19611 - DNA, 80 bp, synthetic construct
  misc_feature 1..80: note = Synthetic: >AdVE4-cand-7580-7659
  source 1..80: mol_type = other DNA
aaggaagtccagagatccacggccagggcggtttgtagacggtcccggtactggcgaaactgctgacccacggccatttt

SEQ ID NO: 19612 - DNA, 80 bp, synthetic construct
  misc_feature 1..80: note = Synthetic: >AdVE4-cand-7690-7769
  source 1..80: mol_type = other DNA
gtcgccgtgccagcgatcccattttagctggagggcgagatcgagggcaagcttcacaagccggtcgtccccggagagtt

SEQ ID NO: 19613 - DNA, 80 bp, synthetic construct
  misc_feature 1..80: note = Synthetic: >AdVE4-cand-7700-7779
  source 1..80: mol_type = other DNA
cagcgatcccattttagctggagggcgagatcgagggcaagcttcacaagccggtcgtccccggagagtttcatgaccag

SEQ ID NO: 19614 - DNA, 80 bp, synthetic construct
  misc_feature 1..80: note = Synthetic: >AdVE4-cand-7800-7879
  source 1..80: mol_type = other DNA
tgccgaaggaccccatccaggtgtaggtttccacatcgtaggtgaggaagagcctttcggtgcgaggatgcgagccgatg

SEQ ID NO: 19615 - DNA, 80 bp, synthetic construct
  misc_feature 1..80: note = Synthetic: >AdVE4-cand-7900-7979
  source 1..80: mol_type = other DNA
ccaccagttggaggaatggctgttgatgtgatgaaagtagaaatgccgacggcgcgccgaacattcgtgcttgtgtttat

SEQ ID NO: 19616 - DNA, 80 bp, synthetic construct
  misc_feature 1..80: note = Synthetic: >AdVE4-cand-7980-8059
  source 1..80: mol_type = other DNA
acaagcggccacagtgctcgcaacgctgcacgggatgcacgtgctgcacaagctgtacctgggttcctttgacgaggaat

SEQ ID NO: 19617 - DNA, 80 bp, synthetic construct
  misc_feature 1..80: note = Synthetic: >AdVE4-cand-8060-8139
  source 1..80: mol_type = other DNA
ttcagtgggaagtggagttgtggtgcctgcatctggtgctgtactacgttgtggtggttggcctggccctcttctgcctc

SEQ ID NO: 19618 - DNA, 80 bp, synthetic construct
  misc_feature 1..80: note = Synthetic: >AdVE4-cand-8140-8219
  source 1..80: mol_type = other DNA
gatggtggtcatgcttacaagcccgcgcgggaggcaggtccagacctcggcgcggacgggtcgaagagcaaggacgaggg

SEQ ID NO: 19619 - DNA, 80 bp, synthetic construct
  misc_feature 1..80: note = Synthetic: >AdVE4-cand-8220-8299
  source 1..80: mol_type = other DNA
cgcgcaggccggagctgtccagggacctaagacgctgcggagtcaggtcagtgggcagcggcggcgcgcggttaacttgc

SEQ ID NO: 19620 - DNA, 80 bp, synthetic construct
  misc_feature 1..80: note = Synthetic: >AdVE4-cand-8300-8379
  source 1..80: mol_type = other DNA
ataagtttttccagggcgcgcgggaggtccagatggtacttgatctccaccgcgccgttagtggcgacgtcgatggcttg

SEQ ID NO: 19621 - DNA, 80 bp, synthetic construct
  misc_feature 1..80: note = Synthetic: >AdVE4-cand-8320-8399
  source 1..80: mol_type = other DNA
cgggaggtccagatggtacttgatctccaccgcgccgttagtggcgacgtcgatggcttgcagggtcccgtgcccctggg

SEQ ID NO: 19622 - DNA, 80 bp, synthetic construct
  misc_feature 1..80: note = Synthetic: >AdVE4-cand-8530-8609
  source 1..80: mol_type = other DNA
acgtcggctccgcgcgcgggcaggttctggtactgcgtccggagaagactggcgtgagcgacgacgcgacggttgacgtc

SEQ ID NO: 19623 - DNA, 80 bp, synthetic construct
  misc_feature 1..80: note = Synthetic: >AdVE4-cand-8540-8619
  source 1..80: mol_type = other DNA
cgcgcgcgggcaggttctggtactgcgtccggagaagactggcgtgagcgacgacgcgacggttgacgtcctggatctgt

SEQ ID NO: 19624 - DNA, 80 bp, synthetic construct
  misc_feature 1..80: note = Synthetic: >AdVE4-cand-35810-35889
  source 1..80: mol_type = other DNA
ctaacctaattgtccgcttttgtgctcaatatatagccctaacctacactgacgtaaaggccaaggtctaaaaatacccg

SEQ ID NO: 19625 - DNA, 80 bp, synthetic construct
  misc_feature 1..80: note = Synthetic: >AdVE4-cand-35890-35969
  source 1..80: mol_type = other DNA
ccaacacgcccagaaaccggtgacacactaaaaaaatacgtacacttcctcaaacacccatactggcgttatttccgggt

SEQ ID NO: 19626 - DNA, 80 bp, synthetic construct
  misc_feature 1..80: note = Synthetic: >AdVE4-cand-35970-36049
  source 1..80: mol_type = other DNA
tcccacgctacgtcacctttaaacgactttcaaattccgtcgaccgttaaacacatcagttactccgcccctaacagtcg

SEQ ID NO: 19627 - DNA, 80 bp, synthetic construct
  misc_feature 1..80: note = Synthetic: >AdVE4-cand-36050-36129
  source 1..80: mol_type = other DNA
ccgctgttacgcccaattagcgcgccctattcccaaatttaataatggtgtttaaaccacacctggttttacgtcacatt

SEQ ID NO: 19628 - DNA, 80 bp, synthetic construct
  misc_feature 1..80: note = Synthetic: >AdVE4-cand-36130-36209
  source 1..80: mol_type = other DNA
taacacaataacttgcaacataactcctcccacataagttacgtcacctcccagcattaccccaccccttttagccattt

SEQ ID NO: 19629 - DNA, 80 bp, synthetic construct
  misc_feature 1..80: note = Synthetic: >AdVE4-cand-36210-36289
  source 1..80: mol_type = other DNA
actccacggccaatcaccacacagcgcgcacttttttaaatcacctcatttacatattggcacacattccatctataagg

SEQ ID NO: 19630 - DNA, 80 bp, synthetic construct
  misc_feature 1..80: note = Synthetic: >AiVC-cand-20-99
  source 1..80: mol_type = other DNA
cggccccctcaccctcttttccggtggccacccgcccgggccaccgttacttcactccactccttcgggactggtttgga

SEQ ID NO: 19631 - DNA, 80 bp, synthetic construct
  misc_feature 1..80: note = Synthetic: >AiVC-cand-80-159
  source 1..80: mol_type = other DNA
tccttcgggactggtttggaggaacataacagggcttcccatccctgtttaccccttattccactcacccttacccttga

SEQ ID NO: 19632 - DNA, 80 bp, synthetic construct
  misc_feature 1..80: note = Synthetic: >AiVC-cand-150-229
  source 1..80: mol_type = other DNA
ttacccttgaccaaccctatccacaccccactgactgactcctttggattttgacctcagaatgcctacttgacctccca

SEQ ID NO: 19633 - DNA, 80 bp, synthetic construct
  misc_feature 1..80: note = Synthetic: >AiVC-cand-230-309
  source 1..80: mol_type = other DNA
cttgcctctcccttctcggattgccggtggtgcctggcggaaaaagcacaagtgtgttgcaggctaccaaactcctaccc

SEQ ID NO: 19634 - DNA, 80 bp, synthetic construct
  misc_feature 1..80: note = Synthetic: >AiVC-cand-310-389
  source 1..80: mol_type = other DNA
gacaaaggtgcgtgtccgcgtgctgagtaatgggataggagatgcctacaacaggctcgcccatgagtagagcatggact

SEQ ID NO: 19635 - DNA, 80 bp, synthetic construct
  misc_feature 1..80: note = Synthetic: >AiVC-cand-390-469
  source 1..80: mol_type = other DNA
gcggtgcatgtgacttcggtcaccacgggcatagcattgctcacccgtgaatcaagtcatcgagatttctctgacctctg

SEQ ID NO: 19636 - DNA, 80 bp, synthetic construct
  misc_feature 1..80: note = Synthetic: >AiVC-cand-470-549
  source 1..80: mol_type = other DNA
aagtgcactgtggttgcgtggctgggaatccacgcttgaccatgtactgcttgatagagtcgcggctggccgactcatgg

SEQ ID NO: 19637 - DNA, 80 bp, synthetic construct
  misc_feature 1..80: note = Synthetic: >AiVC-cand-550-629
  source 1..80: mol_type = other DNA
gttaaagtcagttgacaagacacatggcttcttcaattctggtttctgactccgtctttgcccccatccttacccacaag

SEQ ID NO: 19638 - DNA, 80 bp, synthetic construct
  misc_feature 1..80: note = Synthetic: >AiVC-cand-630-709
  source 1..80: mol_type = other DNA
ctctcccgacggatcaggcgacaccccgtcgcttggcatcctagggagaactcccggctgtcttacatcacagccatgga

SEQ ID NO: 19639 - DNA, 80 bp, synthetic construct
  misc_feature 1..80: note = Synthetic: >AiVC-cand-710-789
  source 1..80: mol_type = other DNA
agagttggatgcttgttacatcaacgagcaacaccggctcttcccccttccccgtccctctcactggtacaactgtctct

SEQ ID NO: 19640 - DNA, 80 bp, synthetic construct
  misc_feature 1..80: note = Synthetic: >EVA71-cand-4000-4079
  source 1..80: mol_type = other DNA
tgataggttgtcatggcagtccttgggcttggatcaaagccaaaacagcctccatcttaggtatccctattgctcaaaag

SEQ ID NO: 19641 - DNA, 80 bp, synthetic construct
  misc_feature 1..80: note = Synthetic: >EVA71-cand-4140-4219
  source 1..80: mol_type = other DNA
tggatttccaacaagatcagcaaatttattgattggcttaaggagaaaatagtaccagcagctagggagaaggttgaatt

SEQ ID NO: 19642 - DNA, 80 bp, synthetic construct
  misc_feature 1..80: note = Synthetic: >EVA71-cand-4180-4259
  source 1..80: mol_type = other DNA
aggagaaaatagtaccagcagctagggagaaggttgaattcctaaacaacttgaaacagctgccactgctagagaatcag

SEQ ID NO: 19643 - DNA, 80 bp, synthetic construct
  misc_feature 1..80: note = Synthetic: >EVA71-cand-4260-4339
  source 1..80: mol_type = other DNA
atctcaaacttggaacagtctgctgcctcacaagaggaccttgaagccatgtttgggaatgtgtcgtacctagctcactt

SEQ ID NO: 19644 - DNA, 80 bp, synthetic construct
  misc_feature 1..80: note = Synthetic: >EVA71-cand-4340-4419
  source 1..80: mol_type = other DNA
ctgtcgcaagttccaaccgctatacgccacggaagctaaaagagtctatgccctggagaagagaatgaataactacatgc

SEQ ID NO: 19645 - DNA, 80 bp, synthetic construct
  misc_feature 1..80: note = Synthetic: >EVA71-cand-4380-4459
  source 1..80: mol_type = other DNA
agagtctatgccctggagaagagaatgaataactacatgcagttcaagagcaaacaccgtattgaacctgtatgtctcat

SEQ ID NO: 19646 - DNA, 80 bp, synthetic construct
  misc_feature 1..80: note = Synthetic: >EVA71-cand-4500-4579
  source 1..80: mol_type = other DNA
ggtatcattgctcgagcaatcgctgataagtaccactccagcgtgtactcgctcccaccagacccggatcattttgacgg

SEQ ID NO: 19647 - DNA, 80 bp, synthetic construct
  misc_feature 1..80: note = Synthetic: >EVA71-cand-4580-4659
  source 1..80: mol_type = other DNA
ttacaagcaacaggtggttacagtgatggatgatctgtgtcaaaaccccgatggcaaggatatgtcattattctgtcaaa

SEQ ID NO: 19648 - DNA, 80 bp, synthetic construct
  misc_feature 1..80: note = Synthetic: >EVA71-cand-4660-4739
  source 1..80: mol_type = other DNA
tggtatccaccgtagacttcattccaccaatggcttctcttgaggagaagggagtttccttcacctctaagtttgtcatc

SEQ ID NO: 19649 - DNA, 80 bp, synthetic construct
  misc_feature 1..80: note = Synthetic: >EVA71-cand-4740-4819
  source 1..80: mol_type = other DNA
gcatccactaatgccagtaacatcatagtgccaacagtgtctgattctgacgctattcgccgcaggttctacatggactg

SEQ ID NO: 19650 - DNA, 80 bp, synthetic construct
  misc_feature 1..80: note = Synthetic: >EVA71-cand-4820-4899
  source 1..80: mol_type = other DNA
tgacattgaagtgacagactcgtacaaaacagatctaggtagactggatgcagggcgagccgctaaactgtgctctgaaa

SEQ ID NO: 19651 - DNA, 80 bp, synthetic construct
  misc_feature 1..80: note = Synthetic: >EVA71-cand-4900-4979
  source 1..80: mol_type = other DNA
acaacactgcaaatttcaaacgttgcagcccattagtgtgtgggaaagctatccaacttagagataggaagtctaaagtc

SEQ ID NO: 19652 - DNA, 80 bp, synthetic construct
  misc_feature 1..80: note = Synthetic: >EVA71-cand-4980-5059
  source 1..80: mol_type = other DNA
agatacagtgtggacacggtggtttcagaacttattagggaatacaacaataggtccgctattggcaacacaattgaagc

SEQ ID NO: 19653 - DNA, 80 bp, synthetic construct
  misc_feature 1..80: note = Synthetic: >EVA71-cand-5060-5139
  source 1..80: mol_type = other DNA
tcttttccaaggtccacccaagttcaggccaattaggattagtcttgaagagaaaccagccccagacgctattagcgatc

SEQ ID NO: 19654 - DNA, 80 bp, synthetic construct
  misc_feature 1..80: note = Synthetic: >EVA71-cand-5140-5219
  source 1..80: mol_type = other DNA
tccttgctagtgtagatagtgaagaagtgcgccagtactgcagggatcaaggctggattattcctgaaactcccaccaat

SEQ ID NO: 19655 - DNA, 80 bp, synthetic construct
  misc_feature 1..80: note = Synthetic: >EVA71-cand-5230-5309
  source 1..80: mol_type = other DNA
accttaatagagcagtgcttgtcatgcaatccatcgccacagtagtggcagttgtctcactggtgtatgtcatctacaag

SEQ ID NO: 19656 - DNA, 80 bp, synthetic construct
  misc_feature 1..80: note = Synthetic: >EVB87-cand-4010-4089
  source 1..80: mol_type = other DNA
tcaaacagaaagtgtctcaatattatggaatacccatggccgagagacaaagcaacgggtggctaaaaaagttcacggag

SEQ ID NO: 19657 - DNA, 80 bp, synthetic construct
  misc_feature 1..80: note = Synthetic: >EVB87-cand-4090-4169
  source 1..80: mol_type = other DNA
atgaccaatgcctgtaaagggatggagtggatagccgtcaagatccagaagtttatagaatggttaaaggttaaagttct

SEQ ID NO: 19658 - DNA, 80 bp, synthetic construct
  misc_feature 1..80: note = Synthetic: >EVB87-cand-4170-4249
  source 1..80: mol_type = other DNA
accggaagttaaggaaaaacatgaattcctcaacagactcaagcaattaccccttctggagagccagattgctacaattg

SEQ ID NO: 19659 - DNA, 80 bp, synthetic construct
  misc_feature 1..80: note = Synthetic: >EVB87-cand-4250-4329
  source 1..80: mol_type = other DNA
agcagagtgccccctcacagagcgaccaggagcaactgttctcaaatgtccaatactttgcacattactgtaggaagtat

SEQ ID NO: 19660 - DNA, 80 bp, synthetic construct
  misc_feature 1..80: note = Synthetic: >EVB87-cand-4410-4489
  source 1..80: mol_type = other DNA
atgccgtattgaacctgtctgtcttttgctccacgggagccccggtgctggcaagtctgtagcgaccaacctgatcgggc

SEQ ID NO: 19661 - DNA, 80 bp, synthetic construct
  misc_feature 1..80: note = Synthetic: >EVB87-cand-4500-4579
  source 1..80: mol_type = other DNA
ggaaaaactcaatggttcagtgtactctctaccaccagaccctgaccattttgatggctacaagcaacaagctgttgtga

SEQ ID NO: 19662 - DNA, 80 bp, synthetic construct
  misc_feature 1..80: note = Synthetic: >EVB87-cand-4580-4659
  source 1..80: mol_type = other DNA
ttatggatgacttgtgccaaaacccagacgggaaggacgtgtcactgttctgccaaatggtatctagtgtcgactttgtc

SEQ ID NO: 19663 - DNA, 80 bp, synthetic construct
  misc_feature 1..80: note = Synthetic: >EVB87-cand-4680-4759
  source 1..80: mol_type = other DNA
agaaaagggtatccttttcacgtcaccattcgtcctcgcttctaccaatgcgggatccattaacgctcctactgtgtcag

SEQ ID NO: 19664 - DNA, 80 bp, synthetic construct
  misc_feature 1..80: note = Synthetic: >EVB87-cand-4760-4839
  source 1..80: mol_type = other DNA
acagcagagccctagcaaggaggttccacttcgatatgaatatcgaagttatttcaatgtacagccagaatggtaagatc

SEQ ID NO: 19665 - DNA, 80 bp, synthetic construct
  misc_feature 1..80: note = Synthetic: >EVB87-cand-4840-4919
  source 1..80: mol_type = other DNA
aacatgccaatgtcagtcaaaacttgtgatgatgattgttgtcccgttaattttaaaaagtgctgccctctagtgtgtgg

SEQ ID NO: 19666 - DNA, 80 bp, synthetic construct
  misc_feature 1..80: note = Synthetic: >EVB87-cand-4920-4999
  source 1..80: mol_type = other DNA
taaagccatccagtttattgacaggagaacacaagtgcgctactcactggacatgctcgtgactgagatgttcagagaat

SEQ ID NO: 19667 - DNA, 80 bp, synthetic construct
  misc_feature 1..80: note = Synthetic: >EVB87-cand-5000-5079
  source 1..80: mol_type = other DNA
acaaccacagacatagcgtgggtgccactcttgaagccctttttcaaggcccaccagtgtatagagaaatcaagatcagt

SEQ ID NO: 19668 - DNA, 80 bp, synthetic construct
  misc_feature 1..80: note = Synthetic: >EVB87-cand-5080-5159
  source 1..80: mol_type = other DNA
gttacaccggaaacccctccaccaccggcaattgcagatctattaaagtcagtggacagtgaggcagttagagaatattg

SEQ ID NO: 19669 - DNA, 80 bp, synthetic construct
  misc_feature 1..80: note = Synthetic: >EVB87-cand-5170-5249
  source 1..80: mol_type = other DNA
gggtggttggtacccgagaacaactcaaccctgcaaattgagaaacacgtgagtagagccttcatttgcctacaagcgct

SEQ ID NO: 19670 - DNA, 80 bp, synthetic construct
  misc_feature 1..80: note = Synthetic: >EVB87-cand-5240-5319
  source 1..80: mol_type = other DNA
tacaagcgctcaccacatttgtttcagtggcaggaattatatacatcatttacaagctgtttgccggcttccaaggcgct

SEQ ID NO: 19671 - DNA, 80 bp, synthetic construct
  misc_feature 1..80: note = Synthetic: >EVB87-cand-5300-5379
  source 1..80: mol_type = other DNA
ttgccggcttccaaggcgcttacaccgggttgcccaaccaaaaacccaaagtgccaaccttacgacaagcaaaagtccag

SEQ ID NO: 19672 - DNA, 80 bp, synthetic construct
  misc_feature 1..80: note = Synthetic: >HCV.A17-cand-1510-1589
  source 1..80: mol_type = other DNA
ggaacgcctttgtgttcccacaccaaatcattaacctgcgcacaaacaactgcgccacacttgtgttgccatatgtgaac

SEQ ID NO: 19673 - DNA, 80 bp, synthetic construct
  misc_feature 1..80: note = Synthetic: >HCV.A17-cand-1630-1709
  source 1..80: mol_type = other DNA
gaattgcaatcatacccctgtcaaaacttgactttgccccagacgcctcagtagagttgcccataaccgtgaccattgca

SEQ ID NO: 19674 - DNA, 80 bp, synthetic construct
  misc_feature 1..80: note = Synthetic: >HCV.A17-cand-1670-1749
  source 1..80: mol_type = other DNA
agacgcctcagtagagttgcccataaccgtgaccattgcacccatgtgttgtgaattcaacgggcttagaaacatcacca

SEQ ID NO: 19675 - DNA, 80 bp, synthetic construct
  misc_feature 1..80: note = Synthetic: >HCV.A17-cand-1750-1829
  source 1..80: mol_type = other DNA
taccagcaacccaaggcctgccagtgatgaacacacctggtagtaaccagtacctgacagctgacaacttccaatcacca

SEQ ID NO: 19676 - DNA, 80 bp, synthetic construct
  misc_feature 1..80: note = Synthetic: >HCV.A17-cand-1830-1909
  source 1..80: mol_type = other DNA
tgcgcactgccagagtttgatgtaacacaaccaatagacatcccaggcgaagtcaaaaacatcatggagattgcagaaat

SEQ ID NO: 19677 - DNA, 80 bp, synthetic construct
  misc_feature 1..80: note = Synthetic: >HCV.A17-cand-1910-1989
  source 1..80: mol_type = other DNA
cgacaccatgataccacttgatctctcagaaacaaagaaaaacacaatggaaatgtacagagtacaattgcaggcaaccc

SEQ ID NO: 19678 - DNA, 80 bp, synthetic construct
  misc_feature 1..80: note = Synthetic: >HCV.A17-cand-1990-2069
  source 1..80: mol_type = other DNA
ccactaacagagatgccccaatattgtgtttatcactgtccccagctagtgacccaagattatcatatactatgctggga

SEQ ID NO: 19679 - DNA, 80 bp, synthetic construct
  misc_feature 1..80: note = Synthetic: >HCV.A17-cand-2070-2149
  source 1..80: mol_type = other DNA
gagattttaaactactacacacactgggctgggtccctgaagttctcctttctgttctgtggatccatgatggctacggg

SEQ ID NO: 19680 - DNA, 80 bp, synthetic construct
  misc_feature 1..80: note = Synthetic: >HCV.A17-cand-2180-2259
  source 1..80: mol_type = other DNA
ggcacaacctccaaaaacccgaaaagatgcaatgctgggcacacacttgatttgggatatcggactacaatcatcttgca

SEQ ID NO: 19681 - DNA, 80 bp, synthetic construct
  misc_feature 1..80: note = Synthetic: >HCV.A17-cand-2230-2309
  source 1..80: mol_type = other DNA
tttgggatatcggactacaatcatcttgcacaatggtggttccatggattagcaacacagcataccggcgaactgtgaag

SEQ ID NO: 19682 - DNA, 80 bp, synthetic construct
  misc_feature 1..80: note = Synthetic: >HCV.A17-cand-2310-2389
  source 1..80: mol_type = other DNA
gacgactttactgaaggtggatacataagcatgttctaccagacaaaaatagttgtaccagcatccacccccacaacaat

SEQ ID NO: 19683 - DNA, 80 bp, synthetic construct
  misc_feature 1..80: note = Synthetic: >HCV.A17-cand-2390-2469
  source 1..80: mol_type = other DNA
ggacatcataggttttgtgtcagcatgcaatgactttagtgtcaggttactgcgggacacaacacacatatcacaaacag

SEQ ID NO: 19684 - DNA, 80 bp, synthetic construct
  misc_feature 1..80: note = Synthetic: >HCV.A17-cand-2480-2559
  source 1..80: mol_type = other DNA
gggcattgaagacttgatacaacaagttgcaaccaacgctctgcaaatctcacaaccaacacgcccggcactgccagcaa

SEQ ID NO: 19685 - DNA, 80 bp, synthetic construct
  misc_feature 1..80: note = Synthetic: >HCV.A17-cand-2560-2639
  source 1..80: mol_type = other DNA
caaatactctcccaaacacacaacagtcagcaccagcacactcacaagaggtgcctgccctgacagcagtggaaacaggg

SEQ ID NO: 19686 - DNA, 80 bp, synthetic construct
  misc_feature 1..80: note = Synthetic: >HCV.A17-cand-2640-2719
  source 1..80: mol_type = other DNA
gctacaaaccctttggaaccatcagacacagtacaaacaagacatgtcattcaaaccaggtcaaggtctgaatccacagt

SEQ ID NO: 19687 - DNA, 80 bp, synthetic construct
  misc_feature 1..80: note = Synthetic: >HCV.A17-cand-2720-2799
  source 1..80: mol_type = other DNA
ggagtccttctttgcgcgcggtgcatgcgtgacgatcatgacagttgaaaacttcaacgccaccgaaacggcagacaaga

SEQ ID NO: 19688 - DNA, 80 bp, synthetic construct
  misc_feature 1..80: note = Synthetic: >HCV.A17-cand-4080-4159
  source 1..80: mol_type = other DNA
caatggctcaagaagaaggcttgtgacattctagaaatcccatacgttatgcggcaaggtgacagctggctcaagaaatt

SEQ ID NO: 19689 - DNA, 80 bp, synthetic construct
  misc_feature 1..80: note = Synthetic: >HCV.A17-cand-4160-4239
  source 1..80: mol_type = other DNA
cacagaagcatgtaacgctgctaaagggctagagtgggtatcaaacaagatatccaaattcattgattggttaaaagaga

SEQ ID NO: 19690 - DNA, 80 bp, synthetic construct
  misc_feature 1..80: note = Synthetic: >HCV.A17-cand-4240-4319
  source 1..80: mol_type = other DNA
aaatcatcccacaagccagagacaaattagagtttgtgaccaaactgaaacaactggaaatgctagagaaccaaattgcc

SEQ ID NO: 19691 - DNA, 80 bp, synthetic construct
  misc_feature 1..80: note = Synthetic: >HCV.A17-cand-4320-4399
  source 1..80: mol_type = other DNA
accattcaccagtcttgtccaagtcaagaacatcaggaaattctgtttaacaacgtgagatggttgtccatacaatcaaa

SEQ ID NO: 19692 - DNA, 80 bp, synthetic construct
  misc_feature 1..80: note = Synthetic: >HCV.A17-cand-4480-4559
  source 1..80: mol_type = other DNA
agagcaaacaccgtattgaaccagtatgtttattagtgcatggcagtcctggaacaggcaaatcagtggccacaaacttg

SEQ ID NO: 19693 - DNA, 80 bp, synthetic construct
  misc_feature 1..80: note = Synthetic: >HCV.A17-cand-4560-4639
  source 1..80: mol_type = other DNA
attgctagagcaatagcagagaaagaaaacacatccacttactcactaccaccagacccatcccacttcgatggatacaa

SEQ ID NO: 19694 - DNA, 80 bp, synthetic construct
  misc_feature 1..80: note = Synthetic: >HCV.A17-cand-4640-4719
  source 1..80: mol_type = other DNA
acaacaaggagtagtgatcatggacgacttaaatcaaaatccagatggagctgacatgaaactgttttgtcagatggttt

SEQ ID NO: 19695 - DNA, 80 bp, synthetic construct
  misc_feature 1..80: note = Synthetic: >HCV.A17-cand-4720-4799
  source 1..80: mol_type = other DNA
ccacagtagaattcattccaccaatggcctcattagaggaaaagggcattttgttcacatcaaactacgtgttagcttcc

SEQ ID NO: 19696 - DNA, 80 bp, synthetic construct
  misc_feature 1..80: note = Synthetic: >HCV.A17-cand-4800-4879
  source 1..80: mol_type = other DNA
accaactccagcagcatcacaccaccaacagtggcacacagtgacgcactagccagaagattcgcatttgacatggatat

SEQ ID NO: 19697 - DNA, 80 bp, synthetic construct
  misc_feature 1..80: note = Synthetic: >HCV.A17-cand-4870-4949
  source 1..80: mol_type = other DNA
acatggatatccaagtcatgggtgaatactccagagatggaaagctgaacatggcaatggctacagagatgtgcaagaat

SEQ ID NO: 19698 - DNA, 80 bp, synthetic construct
  misc_feature 1..80: note = Synthetic: >HCV.A17-cand-4950-5029
  source 1..80: mol_type = other DNA
tgccaccaaccagcaaacttcaaaaggtgctgcccactggtgtgtgggaaagcgatccaattgatggacaagtcatccag

SEQ ID NO: 19699 - DNA, 80 bp, synthetic construct
  misc_feature 1..80: note = Synthetic: >HCV.A17-cand-5030-5109
  source 1..80: mol_type = other DNA
agtcaggtacagcattgaccaaattaccaccatgatcatcaacgagagaaacagaaggtctaacattggcaactgcatgg

SEQ ID NO: 19700 - DNA, 80 bp, synthetic construct
  misc_feature 1..80: note = Synthetic: >HCV.A17-cand-5110-5189
  source 1..80: mol_type = other DNA
aagcattgttccaaggaccactccagtacaaagacctaaagatagacatcaagaccacacccccacccgagtgtataaat

SEQ ID NO: 19701 - DNA, 80 bp, synthetic construct
  misc_feature 1..80: note = Synthetic: >HCV.A17-cand-5190-5269
  source 1..80: mol_type = other DNA
gacctactgcaagcggtcgactcccaggaagtgagagactactgtgagaagaaaggatggatagtcaacatcactagcca

SEQ ID NO: 19702 - DNA, 80 bp, synthetic construct
  misc_feature 1..80: note = Synthetic: >HCV.A17-cand-5260-5339
  source 1..80: mol_type = other DNA
tcactagccaggttcaaacagagagaaacatcaacagagcaatgaccatactacaagctgtcaccacttttgctgctgtt

SEQ ID NO: 19703 - DNA, 80 bp, synthetic construct
  misc_feature 1..80: note = Synthetic: >HCV.A17-cand-5350-5429
  source 1..80: mol_type = other DNA
tgtatgtgatgtacaagctctttgcaggacaccagggagcctacaccggactacccaacaagaagcccaatgtaccaacc

SEQ ID NO: 19704 - DNA, 80 bp, synthetic construct
  misc_feature 1..80: note = Synthetic: >HCV.B3-cand-2950-3029
  source 1..80: mol_type = other DNA
tgttctggaccgagggcaatgcaccgccgcgcatgtccataccgttcttgagcattggcaacgcctattcaaatttctat

SEQ ID NO: 19705 - DNA, 80 bp, synthetic construct
  misc_feature 1..80: note = Synthetic: >HCV.B3-cand-3060-3139
  source 1..80: mol_type = other DNA
gtgtatggcataaacactctaaacaacatgggaaccctatacgcaagacatgtcaacgctgggagcacgggaccaataaa

SEQ ID NO: 19706 - DNA, 80 bp, synthetic construct
  misc_feature 1..80: note = Synthetic: >HCV.B3-cand-3110-3189
  source 1..80: mol_type = other DNA
tgtcaacgctgggagcacgggaccaataaaaagcaccattagaatctacttcaaaccaaagcacgttaaagcgtggatac

SEQ ID NO: 19707 - DNA, 80 bp, synthetic construct
  misc_feature 1..80: note = Synthetic: >HCV.B3-cand-3190-3269
  source 1..80: mol_type = other DNA
ccagacctcctagattatgccagtatgagaaggcaaagaatgttaacttccaacccagtggagtgacaacaactaggcag

SEQ ID NO: 19708 - DNA, 80 bp, synthetic construct
  misc_feature 1..80: note = Synthetic: >HCV.B3-cand-3230-3309
  source 1..80: mol_type = other DNA
tgttaacttccaacccagtggagtgacaacaactaggcagagcatcaccacaatgacaaatactggagcatttgggcaac

SEQ ID NO: 19709 - DNA, 80 bp, synthetic construct
  misc_feature 1..80: note = Synthetic: >HCV.B3-cand-3350-3429
  source 1..80: mol_type = other DNA
tagacacctagcaacccacgctgattggcagaactgtgtgtgggaagattacaacagagacctcttagtgagcaccacca

SEQ ID NO: 19710 - DNA, 80 bp, synthetic construct
  misc_feature 1..80: note = Synthetic: >HCV.B3-cand-3390-3469
  source 1..80: mol_type = other DNA
tgggaagattacaacagagacctcttagtgagcaccaccacagcacatggatgtgacactatagccagatgtcagtgcac

SEQ ID NO: 19711 - DNA, 80 bp, synthetic construct
  misc_feature 1..80: note = Synthetic: >HCV.B3-cand-3510-3589
  source 1..80: mol_type = other DNA
ccagttagttttgaaggaccaggtctggttgaggtgcaagagagtgaatactaccccaagagataccaatcccacgtgct

SEQ ID NO: 19712 - DNA, 80 bp, synthetic construct
  misc_feature 1..80: note = Synthetic: >HCV.B3-cand-3590-3669
  source 1..80: mol_type = other DNA
actagcagcaggtttttctgaaccaggtgactgtggcggtatcctgaggtgtgagcatggtgtcattggcattgtgacca

SEQ ID NO: 19713 - DNA, 80 bp, synthetic construct
  misc_feature 1..80: note = Synthetic: >HCV.B3-cand-3670-3749
  source 1..80: mol_type = other DNA
tgggaggtgaaggcgtggtcggctttgctgacgtccgtgacctcctgtggttggaagatgatgcaatggaacagggagtc

SEQ ID NO: 19714 - DNA, 80 bp, synthetic construct
  misc_feature 1..80: note = Synthetic: >HCV.B3-cand-3750-3829
  source 1..80: mol_type = other DNA
aaggactacgtggaacagcttggaaatgcttttggctcaggctttaccaaccaaatatgtgagcaggtcaacctcctgaa

SEQ ID NO: 19715 - DNA, 80 bp, synthetic construct
  misc_feature 1..80: note = Synthetic: >HCV.B3-cand-3830-3909
  source 1..80: mol_type = other DNA
agaatcactagtgggtcaagattccatcttagaaaaatctctcaaagccctagtcaagatcatatcagcactagtaattg

SEQ ID NO: 19716 - DNA, 80 bp, synthetic construct
  misc_feature 1..80: note = Synthetic: >HCV.B3-cand-3910-3989
  source 1..80: mol_type = other DNA
tggtgagaaaccacgatgatctgatcacagtgactgccaccctggccctcattggttgcacctcgtcaccgtggcggtgg

SEQ ID NO: 19717 - DNA, 80 bp, synthetic construct
  misc_feature 1..80: note = Synthetic: >HCV.B3-cand-3990-4069
  source 1..80: mol_type = other DNA
ctcaagcagaaagtgtcacaatattatggaatccccatggctgagcgccaaaacaatagctggcttaagaaatttacaga

SEQ ID NO: 19718 - DNA, 80 bp, synthetic construct
  misc_feature 1..80: note = Synthetic: >HCV.B3-cand-4070-4149
  source 1..80: mol_type = other DNA
aatgaccaatgcttgcaagggtatggagtggatagccgtcaaaattcagaaattcattgaatggctcaaagtaaagattt

SEQ ID NO: 19719 - DNA, 80 bp, synthetic construct
  misc_feature 1..80: note = Synthetic: >HCV.B3-cand-4150-4229
  source 1..80: mol_type = other DNA
tgccagaggtcaaggaaaaacacgaattcctgaacagacttaaacaactccccctattagaaagtcagattgccaccatt

SEQ ID NO: 19720 - DNA, 80 bp, synthetic construct
  misc_feature 1..80: note = Synthetic: >LR862007.1-cand-5790-5869
  source 1..80: mol_type = other DNA
tagacaggatgttcctaaggtgtctgcatatcaatacagagtatttagggttaagttacctgatcccaataaatttggcc

SEQ ID NO: 19721 - DNA, 80 bp, synthetic construct
  misc_feature 1..80: note = Synthetic: >LR862007.1-cand-5860-5939
  source 1..80: mol_type = other DNA
aaatttggccttccagataacacagtatatgatcctaactctcaacgcttggtctgggcctgtgtaggtgttgaaatcgg

SEQ ID NO: 19722 - DNA, 80 bp, synthetic construct
  misc_feature 1..80: note = Synthetic: >LR862007.1-cand-5960-6039
  source 1..80: mol_type = other DNA
taggactcagtggtcatccattatataataaattggatgacactgaaaactctcatgtagcatctgctgttgataccaaa

SEQ ID NO: 19723 - DNA, 80 bp, synthetic construct
  misc_feature 1..80: note = Synthetic: >LR862007.1-cand-6030-6109
  source 1..80: mol_type = other DNA
tgataccaaagatacacgtgataatgtatctgtggattataaacaaactcagctgtgtattattggctgtgtacctgcca

SEQ ID NO: 19724 - DNA, 80 bp, synthetic construct
  misc_feature 1..80: note = Synthetic: >LR862007.1-cand-6110-6189
  source 1..80: mol_type = other DNA
ttggagaacactggacaaagggcactgcttgtaagcctactactgtggttcagggcgattgtcctccactagaattaata

SEQ ID NO: 19725 - DNA, 80 bp, synthetic construct
  misc_feature 1..80: note = Synthetic: >LR862007.1-cand-6150-6229
  source 1..80: mol_type = other DNA
tactgtggttcagggcgattgtcctccactagaattaataaatacaccaattgaagatggtgatatggtagacacaggat

SEQ ID NO: 19726 - DNA, 80 bp, synthetic construct
  misc_feature 1..80: note = Synthetic: >LR862007.1-cand-6340-6419
  source 1..80: mol_type = other DNA
tatggagacagtatgtttttttgtttaaggcgagaacaggtttttgccagacatttttggaatagatctggtactatggg

SEQ ID NO: 19727 - DNA, 80 bp, synthetic construct
  misc_feature 1..80: note = Synthetic: >LR862007.1-cand-6420-6499
  source 1..80: mol_type = other DNA
tgatcaacttcctgaatcactatatattaaaggtactgacatacgtgccaacccaggcagttatttatattccccttccc

SEQ ID NO: 19728 - DNA, 80 bp, synthetic construct
  misc_feature 1..80: note = Synthetic: >LR862007.1-cand-6500-6579
  source 1..80: mol_type = other DNA
caagtgggtctgtggttacttctgattcacaattatttaataaaccatattggctgcacaaggctcagggtttaaacaat

SEQ ID NO: 19729 - DNA, 80 bp, synthetic construct
  misc_feature 1..80: note = Synthetic: >LR862007.1-cand-6580-6659
  source 1..80: mol_type = other DNA
ggtatatgttggcacaatcaattgtttttaacagttgtagatactactcgcagcaccaatctttctgtgtgtgcttctac

SEQ ID NO: 19730 - DNA, 80 bp, synthetic construct
  misc_feature 1..80: note = Synthetic: >LR862007.1-cand-6660-6739
  source 1..80: mol_type = other DNA
tacttcttctattcctaatgtatacacacctaccagttttaaagaatatgccagacatgtggaggaatttgatttgcagt

SEQ ID NO: 19731 - DNA, 80 bp, synthetic construct
  misc_feature 1..80: note = Synthetic: >LR862007.1-cand-6740-6819
  source 1..80: mol_type = other DNA
ttatatttcaactgtgtaaaataacattaactacagaggtaatgtcatacattcataatatgaataccactattttggag

SEQ ID NO: 19732 - DNA, 80 bp, synthetic construct
  misc_feature 1..80: note = Synthetic: >LR862007.1-cand-6820-6899
  source 1..80: mol_type = other DNA
gattggaattttggtgttacaccacctcctactgctagtttagttgacacataccgttttgttcaatctgctgctgtaac

SEQ ID NO: 19733 - DNA, 80 bp, synthetic construct
  misc_feature 1..80: note = Synthetic: >LR862007.1-cand-6900-6979
  source 1..80: mol_type = other DNA
ttgtcaaaaggacaccgcaccgccagttaaacaggacccttatgacaaactaaagttttggcctgtagatcttaaggaaa

SEQ ID NO: 19734 - DNA, 80 bp, synthetic construct
  misc_feature 1..80: note = Synthetic: >LR862007.1-cand-6980-7059
  source 1..80: mol_type = other DNA
ggttttctgcagatcttgatcagtttcctttgggacgtaaatttttattgcaattgggagctagacctaagcccactata

SEQ ID NO: 19735 - DNA, 80 bp, synthetic construct
  misc_feature 1..80: note = Synthetic: >LR862007.1-cand-7090-7169
  source 1..80: mol_type = other DNA
acctttaccccatcaccaaaacgtgttaagcgtcgcaagtcttccagaaaatagtgttgtttgttatgtgtttgtatgtg

SEQ ID NO: 19736 - DNA, 80 bp, synthetic construct
  misc_feature 1..80: note = Synthetic: >NC_001611.1-cand-23460-23539
  source 1..80: mol_type = other DNA
ctacagacgttaatatagacacgcgtaataaattgatgacgtcatgtctattatgtatacctttccagtatatgagtaaa

SEQ ID NO: 19737 - DNA, 80 bp, synthetic construct
  misc_feature 1..80: note = Synthetic: >NC_001611.1-cand-23540-23619
  source 1..80: mol_type = other DNA
taactatagaagttaaactgtgaatgtcaaggtctaggcaaaccctcgtaacttgatctttattttttgtgtatttttga

SEQ ID NO: 19738 - DNA, 80 bp, synthetic construct
  misc_feature 1..80: note = Synthetic: >NC_001611.1-cand-23620-23699
  source 1..80: mol_type = other DNA
cgtaaatgtgtgcgaaaatacggagataactttttcaatattgtagaattgactattatattgcctccatagcattaata

SEQ ID NO: 19739 - DNA, 80 bp, synthetic construct
  misc_feature 1..80: note = Synthetic: >NC_001611.1-cand-23700-23779
  source 1..80: mol_type = other DNA
attgttttgaatttcttagtcatagacaatgctaatatattcttacagtacatagtattgacaaatatcggcatttatgt

SEQ ID NO: 19740 - DNA, 80 bp, synthetic construct
  misc_feature 1..80: note = Synthetic: >NC_001611.1-cand-23840-23919
  source 1..80: mol_type = other DNA
tttggtattcacccacacgtttttcgaaaaaattagttttaccttctaatgatatattttccatgaaatcggatggattg

SEQ ID NO: 19741 - DNA, 80 bp, synthetic construct
  misc_feature 1..80: note = Synthetic: >NC_001611.1-cand-23920-23999
  source 1..80: mol_type = other DNA
gtaacattatagattcttttaaatcccaattcagaaatcaatctatctgcgacaaactccatatatgttttcatcatttc

SEQ ID NO: 19742 - DNA, 80 bp, synthetic construct
  misc_feature 1..80: note = Synthetic: >NC_001611.1-cand-24000-24079
  source 1..80: mol_type = other DNA
acaattcattcctataagtttaactggaagagccacagtaagaaattcttgttcaatagagaccgcgtctgttataatag

SEQ ID NO: 19743 - DNA, 80 bp, synthetic construct
  misc_feature 1..80: note = Synthetic: >NC_001611.1-cand-24080-24159
  source 1..80: mol_type = other DNA
atcttactgtttcttcactcggtggatacaataaatgtttaaacatcaaacatgcgaaatcgcagtgtagaccctcgtct

SEQ ID NO: 19744 - DNA, 80 bp, synthetic construct
  misc_feature 1..80: note = Synthetic: >NC_001611.1-cand-24160-24239
  source 1..80: mol_type = other DNA
ctactaattaattcgttggaaaacgtgagtccgggcattaggccacgctttttaagccaaaatatggacgcaaatgatcc

SEQ ID NO: 19745 - DNA, 80 bp, synthetic construct
  misc_feature 1..80: note = Synthetic: >NC_001611.1-cand-24240-24319
  source 1..80: mol_type = other DNA
agaaaagaaaattccttctactgccgcaaaggcaataagtctttctccataaccggcgctgtcatgtatccacttttgag

SEQ ID NO: 19746 - DNA, 80 bp, synthetic construct
  misc_feature 1..80: note = Synthetic: >NC_001611.1-cand-24800-24879
  source 1..80: mol_type = other DNA
ttggatcttttgtacatcgctattatcgcaatcactacaataattataattattattgatagcattgttattagcactat

SEQ ID NO: 19747 - DNA, 80 bp, synthetic construct
  misc_feature 1..80: note = Synthetic: >NC_001611.1-cand-24880-24959
  source 1..80: mol_type = other DNA
cataattaaattattgatattcatgggtgctgaataatcgttattatcatcattatcattttgtaattgtgacatcatac

SEQ ID NO: 19748 - DNA, 80 bp, synthetic construct
  misc_feature 1..80: note = Synthetic: >NC_001611.1-cand-24960-25039
  source 1..80: mol_type = other DNA
tagataaatcgtttgcgcgattgttgtgggaaacgggcatggaggatgaattatcgttattattatttaaagcctcccat

SEQ ID NO: 19749 - DNA, 80 bp, synthetic construct
  misc_feature 1..80: note = Synthetic: >NC_001611.1-cand-25040-25119
  source 1..80: mol_type = other DNA
tcggattcacaaatatgacgcgcgttcaacattttatggaaactataattttgtgaaaacaggtaacaagaaaactcgtc

SEQ ID NO: 19750 - DNA, 80 bp, synthetic construct
  misc_feature 1..80: note = Synthetic: >NC_001611.1-cand-25120-25199
  source 1..80: mol_type = other DNA
atcgttatttttaacgatagtaaaccgattaaacgtcgcgctaatttctaacgctagcgactctattggatatggatttc

SEQ ID NO: 19751 - DNA, 80 bp, synthetic construct
  misc_feature 1..80: note = Synthetic: >NC_001611.1-cand-25200-25279
  source 1..80: mol_type = other DNA
cagatatatatcttttcagctcccctacgtatctataatcatctgtgggaaatggaaggtatttccatctatctagtgtt

SEQ ID NO: 19752 - DNA, 80 bp, synthetic construct
  misc_feature 1..80: note = Synthetic: >NC_001611.1-cand-39240-39319
  source 1..80: mol_type = other DNA
attttatcatttttttattcatcatcttctggtggttcatcgttcctatcgaatgtgactctgattaacccatcatctat

SEQ ID NO: 19753 - DNA, 80 bp, synthetic construct
  misc_feature 1..80: note = Synthetic: >NC_001611.1-cand-39560-39639
  source 1..80: mol_type = other DNA
cggtgtattgtatttctcgttgagaacgttaaagtaatcattgtaactcacatcctttattttatctatattgtattcta

SEQ ID NO: 19754 - DNA, 80 bp, synthetic construct
  misc_feature 1..80: note = Synthetic: >NC_001611.1-cand-39720-39799
  source 1..80: mol_type = other DNA
tcacatagtgttttatattccaaatttgtggcaatgaacggtttatttctatacgatagtttgtttctagaatcctttga

SEQ ID NO: 19755 - DNA, 80 bp, synthetic construct
  misc_feature 1..80: note = Synthetic: >NC_001611.1-cand-39960-40039
  source 1..80: mol_type = other DNA
cggatattagtagcggctaccgccattgatgtttgttcattggatgagtaactactaatgtatacattttccatttataa

SEQ ID NO: 19756 - DNA, 80 bp, synthetic construct
  misc_feature 1..80: note = Synthetic: >NC_001611.1-cand-40040-40119
  source 1..80: mol_type = other DNA
cacgtatgtattaactttgttcatttatattttttcattattatgttgatattaacaaaagtgaatatatatatgttaat

SEQ ID NO: 19757 - DNA, 80 bp, synthetic construct
  misc_feature 1..80: note = Synthetic: >NC_001611.1-cand-40120-40199
  source 1..80: mol_type = other DNA
aattgtattgtggttatatggctacaatttcataatgagcggaagtcagtgtccgatgattaatgacgatagatttactc

SEQ ID NO: 19758 - DNA, 80 bp, synthetic construct
  misc_feature 1..80: note = Synthetic: >NC_001611.1-cand-40200-40279
  source 1..80: mol_type = other DNA
tgaaaagaaagtatcaaatcgatagtgtagagtcgacaatgaaaatggataagaagaggacaaagtttcaaaatagagcc

SEQ ID NO: 19759 - DNA, 80 bp, synthetic construct
  misc_feature 1..80: note = Synthetic: >NC_001611.1-cand-40270-40349
  source 1..80: mol_type = other DNA
aaatagagccaaaatggtaaaagaaataaatcagacaataagagcagcacaaactcattacgagacattgaaactaggat

SEQ ID NO: 19760 - DNA, 80 bp, synthetic construct
  misc_feature 1..80: note = Synthetic: >NC_001611.1-cand-40350-40429
  source 1..80: mol_type = other DNA
acataaaatttaagaaaatgattaggactactactttagaagatataacaacatctattccaaatattcagaaaatttat

SEQ ID NO: 19761 - DNA, 80 bp, synthetic construct
  misc_feature 1..80: note = Synthetic: >NC_001611.1-cand-40430-40509
  source 1..80: mol_type = other DNA
aaactattctcggacatttcagccattggcaaagtatcacagaatccgagtaaaatggcatatgctttactgctttacat

SEQ ID NO: 19762 - DNA, 80 bp, synthetic construct
  misc_feature 1..80: note = Synthetic: >NC_001611.1-cand-40510-40589
  source 1..80: mol_type = other DNA
gttccccaatttgtttggagatgaccatagattcattctttatagaatgtttccaatgagtaaaatcaaacacaagatct

SEQ ID NO: 19763 - DNA, 80 bp, synthetic construct
  misc_feature 1..80: note = Synthetic: >NC_001611.1-cand-40590-40669
  source 1..80: mol_type = other DNA
tctctcctttcaaacttaatcttattagaatattagtggaagaaagattctataataatgaatgcagatctaataaatgg

SEQ ID NO: 19764 - DNA, 80 bp, synthetic construct
  misc_feature 1..80: note = Synthetic: >NC_001611.1-cand-40670-40749
  source 1..80: mol_type = other DNA
agaataattggaacacaagttgataaaatgttgatagctgaatctgataaatatacaatagatgcaaggtatcgcctaag

SEQ ID NO: 19765 - DNA, 80 bp, synthetic construct
  misc_feature 1..80: note = Synthetic: >NC_001611.1-cand-40750-40829
  source 1..80: mol_type = other DNA
acctatatatagaatcaagggaaaatctgaagaagataccctcttcatcaaacagatggtagaccaatgtgtgacatccc

SEQ ID NO: 19766 - DNA, 80 bp, synthetic construct
  misc_feature 1..80: note = Synthetic: >NC_001611.1-cand-40830-40909
  source 1..80: mol_type = other DNA
aggaattggtggaaaaagtgttgaagatactgtttagagatttgttcaagagtggagaatacaaagcgtacagatacgat

SEQ ID NO: 19767 - DNA, 80 bp, synthetic construct
  misc_feature 1..80: note = Synthetic: >NC_001611.1-cand-40910-40989
  source 1..80: mol_type = other DNA
gatgacgtagaaaatggattcattggattggataaactaaaattaaacattgttcatgatatagttgaaccatgtatgcc

SEQ ID NO: 19768 - DNA, 80 bp, synthetic construct
  misc_feature 1..80: note = Synthetic: >NC_001611.1-cand-51610-51689
  source 1..80: mol_type = other DNA
catttaagttcaccaaacaacttttaaatacaaatatatcaatagtagtagaataagaactataaaaaaaataataatta

SEQ ID NO: 19769 - DNA, 80 bp, synthetic construct
  misc_feature 1..80: note = Synthetic: >NC_001611.1-cand-51690-51769
  source 1..80: mol_type = other DNA
accaataccaaccccaacaaccggtattattagttgatgtgacagttttctcatcacttagaacagatttaacaatttct

SEQ ID NO: 19770 - DNA, 80 bp, synthetic construct
  misc_feature 1..80: note = Synthetic: >NC_001611.1-cand-51770-51849
  source 1..80: mol_type = other DNA
ataaagtctgtcaaatcatcttccggagaacccataaatacaccaaatatagcggcgtacaacttatccatttatacatt

SEQ ID NO: 19771 - DNA, 80 bp, synthetic construct
  misc_feature 1..80: note = Synthetic: >NC_001611.1-cand-51850-51929
  source 1..80: mol_type = other DNA
gaatattggcttttctttatcactatcttcatcatattcatcatcgatatcaacaagtcccaaattacgagccaaatctt

SEQ ID NO: 19772 - DNA, 80 bp, synthetic construct
  misc_feature 1..80: note = Synthetic: >NC_001611.1-cand-51930-52009
  source 1..80: mol_type = other DNA
cttctacattttcagtcattgatacacgttcactatctccagagagtccgataacgttagccaccacttctctatcaatg

SEQ ID NO: 19773 - DNA, 80 bp, synthetic construct
  misc_feature 1..80: note = Synthetic: >NC_001611.1-cand-52010-52089
  source 1..80: mol_type = other DNA
attagtttcttaagtgcaaatgtaatttttgtttcagttccggatctatagaaaactacaggtgtgataattgccttggc

SEQ ID NO: 19774 - DNA, 80 bp, synthetic construct
  misc_feature 1..80: note = Synthetic: >NC_001611.1-cand-52150-52229
  source 1..80: mol_type = other DNA
taattctccagtcgaaacatattctaccatggctccgtttaatttgttaatgaagatggattcatccttaaatgttttct

SEQ ID NO: 19775 - DNA, 80 bp, synthetic construct
  misc_feature 1..80: note = Synthetic: >NC_001611.1-cand-52620-52699
  source 1..80: mol_type = other DNA
tttcaactctctttttgattaccttactcatgattaaacctaaataattatactttgtaatataatgatatatattttca

SEQ ID NO: 19776 - DNA, 80 bp, synthetic construct
  misc_feature 1..80: note = Synthetic: >NC_001611.1-cand-52700-52779
  source 1..80: mol_type = other DNA
ctttatctcatttgaaaataaaaatgtttttgtttaaccgctgcatgatgtacagatttcggaatcacaaaccaccagtg

SEQ ID NO: 19777 - DNA, 80 bp, synthetic construct
  misc_feature 1..80: note = Synthetic: >NC_001611.1-cand-53330-53409
  source 1..80: mol_type = other DNA
tacaacattccaaagatcatattgtagaataccgttactggcgtacgatcctacatatgtatcgtatggtccttccttct

SEQ ID NO: 19778 - DNA, 80 bp, synthetic construct
  misc_feature 1..80: note = Synthetic: >NC_001611.1-cand-53410-53489
  source 1..80: mol_type = other DNA
cagctagttcacaactcgcctctaatgcaccgtaataaatggtttcgaagatcttcttatttagatcttgtgcttccagg

SEQ ID NO: 19779 - DNA, 80 bp, synthetic construct
  misc_feature 1..80: note = Synthetic: >NC_001611.1-cand-53570-53649
  source 1..80: mol_type = other DNA
agagatttcagcttctggaataggataataattaatatctataattttattgaggtttctgacaattactttgaccacat

SEQ ID NO: 19780 - DNA, 80 bp, synthetic construct
  misc_feature 1..80: note = Synthetic: >NC_001611.1-cand-53650-53729
  source 1..80: mol_type = other DNA
ccttcagtttgagaaaatcaaattgtccatctattacaaacatgttcaatgcaatagatgccagattacaaacggctacc

SEQ ID NO: 19781 - DNA, 80 bp, synthetic construct
  misc_feature 1..80: note = Synthetic: >NC_001611.1-cand-53880-53959
  source 1..80: mol_type = other DNA
cagacgacacgagcctttattatagatttgtatctcttttctctttcgtatagtgtatacaatcgttcaaactcgtctcc

SEQ ID NO: 19782 - DNA, 80 bp, synthetic construct
  misc_feature 1..80: note = Synthetic: >NC_001611.1-cand-54280-54359
  source 1..80: mol_type = other DNA
cacgaatattactaattgatagacctatcccccctgccattttagagattaatgcgcatcgttttaacgtatcatagatg

SEQ ID NO: 19783 - DNA, 80 bp, synthetic construct
  misc_feature 1..80: note = Synthetic: >NC_001611.1-cand-54360-54439
  source 1..80: mol_type = other DNA
ccctctatactatcatccatcatgttaagtagaaaacagctagacatttggtgacgactagttcccgcattaaataaggt

SEQ ID NO: 19784 - DNA, 80 bp, synthetic construct
  misc_feature 1..80: note = Synthetic: >NC_001611.1-cand-66140-66219
  source 1..80: mol_type = other DNA
tgtaaacatttgggccattatacctcttagtgcatcagtgttctaccgcggagccgaaaatattgtgtttaatcttccgg

SEQ ID NO: 19785 - DNA, 80 bp, synthetic construct
  misc_feature 1..80: note = Synthetic: >NC_001611.1-cand-66460-66539
  source 1..80: mol_type = other DNA
atctagaatggttgttgggctttattaagtgtattagtcagcatcagcatttgactattatgtttaaagatgacaatatt

SEQ ID NO: 19786 - DNA, 80 bp, synthetic construct
  misc_feature 1..80: note = Synthetic: >NC_001611.1-cand-66940-67019
  source 1..80: mol_type = other DNA
catataggaccactagcaaaagataaagaggataaagtaaagaaaagatatccagagtttagattagttaatacaggacc

SEQ ID NO: 19787 - DNA, 80 bp, synthetic construct
  misc_feature 1..80: note = Synthetic: >NC_001611.1-cand-67020-67099
  source 1..80: mol_type = other DNA
cggtggtctttcggcattattaagacaatcgtataatggaaccgcacccaactgctgtcacacttttaatcgtactcatt

SEQ ID NO: 19788 - DNA, 80 bp, synthetic construct
  misc_feature 1..80: note = Synthetic: >NC_001611.1-cand-67140-67219
  source 1..80: mol_type = other DNA
gggtgcagtattagaatcgtgttggccagacgttcacgataccggaaaatgcgatgttaatttatttgactggtgtcagg

SEQ ID NO: 19789 - DNA, 80 bp, synthetic construct
  misc_feature 1..80: note = Synthetic: >NC_001611.1-cand-69100-69179
  source 1..80: mol_type = other DNA
gtagcatactttttctttaccttaagaatatccatcgtttgcttggtcaatagcgacaggtgattttttatcaaccattc

SEQ ID NO: 19790 - DNA, 80 bp, synthetic construct
  misc_feature 1..80: note = Synthetic: >NC_001611.1-cand-69400-69479
  source 1..80: mol_type = other DNA
gaatatatgtcacgtttatacatcgaatataaaataactacagtttgaaaaataacagtatcatttaaacatttaacttg

SEQ ID NO: 19791 - DNA, 80 bp, synthetic construct
  misc_feature 1..80: note = Synthetic: >NC_001611.1-cand-69740-69819
  source 1..80: mol_type = other DNA
ctctgcatttattatcttgtcttggtggtgggctaggctgtagtcttggtctattattaccatcgttgttgaatctattt

SEQ ID NO: 19792 - DNA, 80 bp, synthetic construct
  misc_feature 1..80: note = Synthetic: >NC_001611.1-cand-70060-70139
  source 1..80: mol_type = other DNA
gatctatgctttctatttttaatatagtacctagaacaatgtcaaaatatgagttggagttaattcataacgagaatatc

SEQ ID NO: 19793 - DNA, 80 bp, synthetic construct
  misc_feature 1..80: note = Synthetic: >NC_001611.1-cand-70150-70229
  source 1..80: mol_type = other DNA
tgtttaccacaatgtataatataagaaacaatttgggtttaggtgatgataaactaactattgaagccattgaaaactat

SEQ ID NO: 19794 - DNA, 80 bp, synthetic construct
  misc_feature 1..80: note = Synthetic: >NC_001611.1-cand-70460-70539
  source 1..80: mol_type = other DNA
aatatctaaatatgcgggaattaatgtcctgaatgtgtattctccttccacatccatgagattgaatgccatttacggat

SEQ ID NO: 19795 - DNA, 80 bp, synthetic construct
  misc_feature 1..80: note = Synthetic: >NC_001611.1-cand-70540-70619
  source 1..80: mol_type = other DNA
tcaccaataaaaataaactagaaaaacttagtactaataaggaactagaattgtatagttctagccctcttcaagaaccc

SEQ ID NO: 19796 - DNA, 80 bp, synthetic construct
  misc_feature 1..80: note = Synthetic: >NC_001611.1-cand-71500-71579
  source 1..80: mol_type = other DNA
gcgaaaaataattattctttattgtcatcatgaacggcgggcatattcagttgataattggccccatgttttcaggtaaa

SEQ ID NO: 19797 - DNA, 80 bp, synthetic construct
  misc_feature 1..80: note = Synthetic: >NC_001611.1-cand-71980-72059
  source 1..80: mol_type = other DNA
taggtacagaaaccaagatagaaataataggaggaattgatatgtatcaatcggtgtgtagaaagtgttacatcgactca

SEQ ID NO: 19798 - DNA, 80 bp, synthetic construct
  misc_feature 1..80: note = Synthetic: >NC_001611.1-cand-72460-72539
  source 1..80: mol_type = other DNA
agtaactcggttcgttgatgaggaatatctacgatccatcaaaaaacaactgcatccttctaagattattttaatttctg

SEQ ID NO: 19799 - DNA, 80 bp, synthetic construct
  misc_feature 1..80: note = Synthetic: >NC_001611.1-cand-72540-72619
  source 1..80: mol_type = other DNA
atgtgcgatccaaacgaggaggaaatgaacctagtactgaggatttactaagtaattacgctctacaaaatgtcatgatt

SEQ ID NO: 19800 - DNA, 80 bp, synthetic construct
  misc_feature 1..80: note = Synthetic: >NC_001611.1-cand-79250-79329
  source 1..80: mol_type = other DNA
tgaaatcagtggagtagtaaatgcgtacataactcctggataacgtttaacagctgccgttcctattctagaccaaaaat

SEQ ID NO: 19801 - DNA, 80 bp, synthetic construct
  misc_feature 1..80: note = Synthetic: >NC_001611.1-cand-79330-79409
  source 1..80: mol_type = other DNA
ttggtttcatgttttcaaagcggtgttctgcaacaagacgaggatcgtgttctacgtatttggcagagttatccattatt

SEQ ID NO: 19802 - DNA, 80 bp, synthetic construct
  misc_feature 1..80: note = Synthetic: >NC_001611.1-cand-79490-79569
  source 1..80: mol_type = other DNA
ttcatctacaatgttcagcgccgtagtaactctaataatataggctgacaagctaacatcataccctcctgtatatgtga

SEQ ID NO: 19803 - DNA, 80 bp, synthetic construct
  misc_feature 1..80: note = Synthetic: >NC_001611.1-cand-79570-79649
  source 1..80: mol_type = other DNA
atatgacatgatttttgtccattactagctcggttttaactttattgcctgtaataatttctctcatctgtaggatatct

SEQ ID NO: 19804 - DNA, 80 bp, synthetic construct
  misc_feature 1..80: note = Synthetic: >NC_001611.1-cand-79650-79729
  source 1..80: mol_type = other DNA
attttcttgtcatgcattgcctttaagactggacgaagaaacgtaatatcctcaataacgttatcattttctacaataac

SEQ ID NO: 19805 - DNA, 80 bp, synthetic construct
  misc_feature 1..80: note = Synthetic: >NC_001611.1-cand-79820-79899
  source 1..80: mol_type = other DNA
tgtacacatggtgttacaaaaccctgaaaagaagtgagtatacttgtcatcatttctaatgtttcctccagtccagtgta

SEQ ID NO: 19806 - DNA, 80 bp, synthetic construct
  misc_feature 1..80: note = Synthetic: >NC_001611.1-cand-79900-79979
  source 1..80: mol_type = other DNA
taaacgcataatccttgtaatgatctggatcatccttgactatcacaacatttcttttttctggcataacttcgttgtcc

SEQ ID NO: 19807 - DNA, 80 bp, synthetic construct
  misc_feature 1..80: note = Synthetic: >NC_001611.1-cand-80060-80139
  source 1..80: mol_type = other DNA
cacaacaataacaggagttttattcacagtcgccatttagttattgaaattaatcatatacaactctctaatacgagtta

SEQ ID NO: 19808 - DNA, 80 bp, synthetic construct
  misc_feature 1..80: note = Synthetic: >NC_001611.1-cand-80300-80379
  source 1..80: mol_type = other DNA
ttgcgcatgttcgtgatctatgagttcttcttcgaatggcataggatctccgaatctgaaaatgtataaataggagttag

SEQ ID NO: 19809 - DNA, 80 bp, synthetic construct
  misc_feature 1..80: note = Synthetic: >NC_001611.1-cand-80540-80619
  source 1..80: mol_type = other DNA
tagctctttgaactgtttaagagatgcatcagttggttccacggatggagtaggtgcaacaattttttgttcgacatatg

SEQ ID NO: 19810 - DNA, 80 bp, synthetic construct
  misc_feature 1..80: note = Synthetic: >NC_001611.1-cand-80620-80699
  source 1..80: mol_type = other DNA
tatgtactggagccattgtcttaactataatggtgcttgtatcgaaaaactttaatgtagatagcggaagctcttcgccg

SEQ ID NO: 19811 - DNA, 80 bp, synthetic construct
  misc_feature 1..80: note = Synthetic: >NC_001611.1-cand-81340-81419
  source 1..80: mol_type = other DNA
taattacgtcagctgcatctaaattaaatataggtatatttattccacacactctacaatatgccacaccatcttcataa

SEQ ID NO: 19812 - DNA, 80 bp, synthetic construct
  misc_feature 1..80: note = Synthetic: >NC_001611.1-cand-81880-81959
  source 1..80: mol_type = other DNA
tgggaataccgatgtgtctacataaatatgcaaagtctaaatattttttagagaatcttaattggtccaaattcttttcc

SEQ ID NO: 19813 - DNA, 80 bp, synthetic construct
  misc_feature 1..80: note = Synthetic: >NC_001611.1-cand-82200-82279
  source 1..80: mol_type = other DNA
cttgtgctaatctcttctttaacagtctgttcaaatttatatcctatatacgaaaaaatagcaaccaatgtttgatcatt

SEQ ID NO: 19814 - DNA, 80 bp, synthetic construct
  misc_feature 1..80: note = Synthetic: >NC_001611.1-cand-82280-82359
  source 1..80: mol_type = other DNA
cgcgtcaatattctgttctattgtagtgtataacaatcttatatcttcttccgtgatagctgatacgttataaaggttga

SEQ ID NO: 19815 - DNA, 80 bp, synthetic construct
  misc_feature 1..80: note = Synthetic: >NC_001611.1-cand-82360-82439
  source 1..80: mol_type = other DNA
taacgaaaatatttttatttcgtgagataaagtcatcgtaggattttggacttatattcgcgtctagtagatatgctttt

SEQ ID NO: 19816 - DNA, 80 bp, synthetic construct
  misc_feature 1..80: note = Synthetic: >NC_001611.1-cand-93490-93569
  source 1..80: mol_type = other DNA
accttccagttacattggaaccacatgagctgacgttagacataaaaactaatattaggaatgccgtatataagacgtat

SEQ ID NO: 19817 - DNA, 80 bp, synthetic construct
  misc_feature 1..80: note = Synthetic: >NC_001611.1-cand-93630-93709
  source 1..80: mol_type = other DNA
ttacctctcggcgaaatagttaataattctgtagttataaacgttccgtgtgtaataacctacgcgtattatcacgttgg

SEQ ID NO: 19818 - DNA, 80 bp, synthetic construct
  misc_feature 1..80: note = Synthetic: >NC_001611.1-cand-94040-94119
  source 1..80: mol_type = other DNA
aaacatgtctctctcaaatcagacaaccatctcataaaatagttctcgcgtgctggagaggtagttgctgctcgtataat

SEQ ID NO: 19819 - DNA, 80 bp, synthetic construct
  misc_feature 1..80: note = Synthetic: >NC_001611.1-cand-94120-94199
  source 1..80: mol_type = other DNA
ctccccagaataatatacttctgtgtcatcgttcaatttatacggatttctatagttctctgttatataatgcggtttgc

SEQ ID NO: 19820 - DNA, 80 bp, synthetic construct
  misc_feature 1..80: note = Synthetic: >NC_001611.1-cand-94190-94269
  source 1..80: mol_type = other DNA
tgcggtttgccctcatgattagacaacgacaatagtgttctgaatttagatagttgatcagaatgaatgtttattggcgt

SEQ ID NO: 19821 - DNA, 80 bp, synthetic construct
  misc_feature 1..80: note = Synthetic: >NC_001611.1-cand-94350-94429
  source 1..80: mol_type = other DNA
gcaaattgtctagataaaatactgaatcaaacggtgcagacgtattggcggttctaatggaatccaattgattgactatc

SEQ ID NO: 19822 - DNA, 80 bp, synthetic construct
  misc_feature 1..80: note = Synthetic: >NC_001611.1-cand-94430-94509
  source 1..80: mol_type = other DNA
ttttgaaaatatacatttttatgatccgatacttgtaagaatatagaaataatgataagtccatcatcgtgtttttttgc

SEQ ID NO: 19823 - DNA, 80 bp, synthetic construct
  misc_feature 1..80: note = Synthetic: >NC_001611.1-cand-94510-94589
  source 1..80: mol_type = other DNA
ctcttcataagaactatattttttcttattccaatgaacaagattaatctctccagagtatttgtacacatctatcaagt

SEQ ID NO: 19824 - DNA, 80 bp, synthetic construct
  misc_feature 1..80: note = Synthetic: >NC_001611.1-cand-94590-94669
  source 1..80: mol_type = other DNA
gattggatccataatcgtcttcctttccccaatatatatgtagtgatgataacacatattcattgggaagaaaccctcca

SEQ ID NO: 19825 - DNA, 80 bp, synthetic construct
  misc_feature 1..80: note = Synthetic: >NC_001611.1-cand-94750-94829
  source 1..80: mol_type = other DNA
tatgtttaacggctttaatcgcgcgttagaaattgcttttttagtttctatattaataggagatagttgttgtgacatag

SEQ ID NO: 19826 - DNA, 80 bp, synthetic construct
  misc_feature 1..80: note = Synthetic: >NC_001611.1-cand-95310-95389
  source 1..80: mol_type = other DNA
acaacacaggataaattatttaataaagtgtatataggttattgcatgtcgtgttttattaatcaatcattagaggattt

SEQ ID NO: 19827 - DNA, 80 bp, synthetic construct
  misc_feature 1..80: note = Synthetic: >NC_001611.1-cand-95390-95469
  source 1..80: mol_type = other DNA
atcacatactagtatttacaatgtagaaattagaaagattaaatcattaaatgattgtattaacgatgataaatacgaat

SEQ ID NO: 19828 - DNA, 80 bp, synthetic construct
  misc_feature 1..80: note = Synthetic: >NC_001611.1-cand-95710-95789
  source 1..80: mol_type = other DNA
tagttttctctattctgaaataattagaactagaaacatgtctagaaagaaacgattatttctaaattattccaattatt

SEQ ID NO: 19829 - DNA, 80 bp, synthetic construct
  misc_feature 1..80: note = Synthetic: >NC_001611.1-cand-95900-95979
  source 1..80: mol_type = other DNA
gagaacgttccagagtgtctatccagggaaatcaaagaagaagttaatatagacaattcttttgtattcatagacactcg

SEQ ID NO: 19830 - DNA, 80 bp, synthetic construct
  misc_feature 1..80: note = Synthetic: >NC_001611.1-cand-96270-96349
  source 1..80: mol_type = other DNA
aatttaccatcgtgtatttttataacgggattgtccggcatatcatgtagatagttaccatctacatcgtatactcgacc

SEQ ID NO: 19831 - DNA, 80 bp, synthetic construct
  misc_feature 1..80: note = Synthetic: >NC_001611.1-cand-96350-96429
  source 1..80: mol_type = other DNA
atctacgcctttaaatcctctatttattgacattaatctattagaattggaataccaaatattagtaccctcaattagtt

SEQ ID NO: 19832 - DNA, 80 bp, synthetic construct
  misc_feature 1..80: note = Synthetic: >NC_001722.1-cand-5880-5959
  source 1..80: mol_type = other DNA
gtagtacaacaaaatgacagaccccagagaaagggtaccgccaggaaacagtggagaagagaccattggagaggccttcg

SEQ ID NO: 19833 - DNA, 80 bp, synthetic construct
  misc_feature 1..80: note = Synthetic: >NC_001722.1-cand-5960-6039
  source 1..80: mol_type = other DNA
agtggctagagaggaccatagaagccttaaacagggaggcagtgaaccatctgccccgagagctcattttccaggtgtgg

SEQ ID NO: 19834 - DNA, 80 bp, synthetic construct
  misc_feature 1..80: note = Synthetic: >NC_001722.1-cand-6040-6119
  source 1..80: mol_type = other DNA
caaaggtcctggagatattggcatgatgaacaagggatgtcagcaagctacacaaagtatagatatttgtgcctaatgca

SEQ ID NO: 19835 - DNA, 80 bp, synthetic construct
  misc_feature 1..80: note = Synthetic: >NC_001722.1-cand-6080-6159
  source 1..80: mol_type = other DNA
cagcaagctacacaaagtatagatatttgtgcctaatgcaaaaagctatatttacacatttcaagagagggtgcacttgc

SEQ ID NO: 19836 - DNA, 80 bp, synthetic construct
  misc_feature 1..80: note = Synthetic: >NC_001722.1-cand-6200-6279
  source 1..80: mol_type = other DNA
gacctccccctcctccccctccaggtctagtctaatgactgaagcaccaacagagtttcccccagaagatgggaccccac

SEQ ID NO: 19837 - DNA, 80 bp, synthetic construct
  misc_feature 1..80: note = Synthetic: >NC_001722.1-cand-6280-6359
  source 1..80: mol_type = other DNA
ggagggacttagggagtgactgggtaatagaaactctgagggaaataaaggaagaagccttaagacattttgatccccgc

SEQ ID NO: 19838 - DNA, 80 bp, synthetic construct
  misc_feature 1..80: note = Synthetic: >NC_001722.1-cand-6360-6439
  source 1..80: mol_type = other DNA
ttgctaattgctcttggctactatatccataatagacatggagacacccttgaaggcgccagagagctcattaaaaccct

SEQ ID NO: 19839 - DNA, 80 bp, synthetic construct
  misc_feature 1..80: note = Synthetic: >NC_001722.1-cand-6440-6519
  source 1..80: mol_type = other DNA
acaacgagccctcttcgtgcacttcagagcgggatgtaaccgctcaagaattggctaaacaaggagaagaactccttgcc

SEQ ID NO: 19840 - DNA, 80 bp, synthetic construct
  misc_feature 1..80: note = Synthetic: >NC_001722.1-cand-6520-6599
  source 1..80: mol_type = other DNA
cagctgcaccgacccctagagccatgcactaacaaatgctattgtaagcgatgcagtttccattgccagctgtgtttctc

SEQ ID NO: 19841 - DNA, 80 bp, synthetic construct
  misc_feature 1..80: note = Synthetic: >NC_001722.1-cand-6610-6689
  source 1..80: mol_type = other DNA
ctcggaatatcatatgagcgaaagggcagacgaagaaggactccaaggaaaactaagactccttcgccttctgcaccaga

SEQ ID NO: 19842 - DNA, 80 bp, synthetic construct
  misc_feature 1..80: note = Synthetic: >NC_001722.1-cand-6680-6759
  source 1..80: mol_type = other DNA
ctgcaccagacaagtgagtatggagcctggtaggaatcagctgtttgttgtcattttactaacaagtgcttgcttagtat

SEQ ID NO: 19843 - DNA, 80 bp, synthetic construct
  misc_feature 1..80: note = Synthetic: >NC_001722.1-cand-6760-6839
  source 1..80: mol_type = other DNA
attgtagccagtatgtgactgttttctatggcatacccgcgtggaaaaatgcatctattcccttattttgtgcaactaaa

SEQ ID NO: 19844 - DNA, 80 bp, synthetic construct
  misc_feature 1..80: note = Synthetic: >NC_001722.1-cand-6860-6939
  source 1..80: mol_type = other DNA
catacagtgcttgccagacaatgatgattatcaggaaataattttaaatgtgacagaggcttttgatgcatggaataata

SEQ ID NO: 19845 - DNA, 80 bp, synthetic construct
  misc_feature 1..80: note = Synthetic: >NC_001722.1-cand-6910-6989
  source 1..80: mol_type = other DNA
tgacagaggcttttgatgcatggaataatacagtgacagaacaagcagtagaagatgtctggcatctatttgagacatca

SEQ ID NO: 19846 - DNA, 80 bp, synthetic construct
  misc_feature 1..80: note = Synthetic: >NC_001722.1-cand-6990-7069
  source 1..80: mol_type = other DNA
ataaaaccatgtgtcaagctaacacctctatgtgtggcaatgaattgtagcagggttcaagggaataccacgaccccgaa

SEQ ID NO: 19847 - DNA, 80 bp, synthetic construct
  misc_feature 1..80: note = Synthetic: >NC_001722.1-cand-7070-7149
  source 1..80: mol_type = other DNA
tcccaggacctcgagttccacaacctcgagaccacccacatccgcagcctccataataaatgaaacttctaactgcatag

SEQ ID NO: 19848 - DNA, 80 bp, synthetic construct
  misc_feature 1..80: note = Synthetic: >NC_001906.3-cand-4300-4379
  source 1..80: mol_type = other DNA
ctcaacttcagtgagacaaatgcatcacaatttgttcctttggcagatgatgcatctaaggatgtcgtgagaactatgat

SEQ ID NO: 19849 - DNA, 80 bp, synthetic construct
  misc_feature 1..80: note = Synthetic: >NC_001906.3-cand-4380-4459
  source 1..80: mol_type = other DNA
taggactcacatcaaggacagagagttgaggtctgagttgatggattatctaaatcgagcagaaacagatgaagaggttc

SEQ ID NO: 19850 - DNA, 80 bp, synthetic construct
  misc_feature 1..80: note = Synthetic: >NC_001906.3-cand-4460-4539
  source 1..80: mol_type = other DNA
aggaggtggccaatacagtcaatgatattattgatgggaacatctaaacatgtcagtaatttgatagagtagcagtcaga

SEQ ID NO: 19851 - DNA, 80 bp, synthetic construct
  misc_feature 1..80: note = Synthetic: >NC_001906.3-cand-4540-4619
  source 1..80: mol_type = other DNA
ccaagatcatatattagaggtacacatcataatggccagtgtcttaatctcaaccattcataaaccgtcagtgtttccct

SEQ ID NO: 19852 - DNA, 80 bp, synthetic construct
  misc_feature 1..80: note = Synthetic: >NC_001906.3-cand-4620-4699
  source 1..80: mol_type = other DNA
tataaactccattatgtagtttattaatatctagagctattctttattaagtaataaatctgtattagattattatataa

SEQ ID NO: 19853 - DNA, 80 bp, synthetic construct
  misc_feature 1..80: note = Synthetic: >NC_001906.3-cand-4700-4779
  source 1..80: mol_type = other DNA
tctctataatcaacacgcctattacttcatgcacttactatcaccatttaataatagttcagatcacccctcaaaatctg

SEQ ID NO: 19854 - DNA, 80 bp, synthetic construct
  misc_feature 1..80: note = Synthetic: >NC_001906.3-cand-4780-4859
  source 1..80: mol_type = other DNA
ggttgtgccaagtcattttcctcaccatataatccacgcagtatgcattcaaatactaaaccacattcagacagagttag

SEQ ID NO: 19855 - DNA, 80 bp, synthetic construct
  misc_feature 1..80: note = Synthetic: >NC_001906.3-cand-4860-4939
  source 1..80: mol_type = other DNA
acattcaagcaatcaataactatattaactataagaatgatgaatcagccctgcgccaacaaggcaatgtcaatcacttg

SEQ ID NO: 19856 - DNA, 80 bp, synthetic construct
  misc_feature 1..80: note = Synthetic: >NC_001906.3-cand-4950-5029
  source 1..80: mol_type = other DNA
tagaccccagaatccattaagaaaaacttaggagacaggtataatattctcatacctgtccattcaccttggacttaaag

SEQ ID NO: 19857 - DNA, 80 bp, synthetic construct
  misc_feature 1..80: note = Synthetic: >NC_001906.3-cand-5020-5099
  source 1..80: mol_type = other DNA
ggacttaaagagagacaatcattcagccccgtccaagacacacctgagtggccagaaccatggattttagtgtgagtgat

SEQ ID NO: 19858 - DNA, 80 bp, synthetic construct
  misc_feature 1..80: note = Synthetic: >NC_001906.3-cand-5100-5179
  source 1..80: mol_type = other DNA
aaccttgatgatccaatagaaggtgtttcagattttagtcccacctcatgggagaatggagggtatctagataaagtgga

SEQ ID NO: 19859 - DNA, 80 bp, synthetic construct
  misc_feature 1..80: note = Synthetic: >NC_001906.3-cand-5180-5259
  source 1..80: mol_type = other DNA
gccagaaattgataagcatggcagtatgatacctaagtacaagatctataccccaggtgcaaatgagaggaaattcaaca

SEQ ID NO: 19860 - DNA, 80 bp, synthetic construct
  misc_feature 1..80: note = Synthetic: >NC_001906.3-cand-5260-5339
  source 1..80: mol_type = other DNA
actacatgtacatgatttgctatggcttcgtcgaagacgttgagagatcaccagaatctgggaagcgcaagaaaatcagg

SEQ ID NO: 19861 - DNA, 80 bp, synthetic construct
  misc_feature 1..80: note = Synthetic: >NC_001906.3-cand-5360-5439
  source 1..80: mol_type = other DNA
tggtgttggcaagagcacttctcaccctcaggatcttttagaagagctatgttctttgaaagtcactgtcagaagaacag

SEQ ID NO: 19862 - DNA, 80 bp, synthetic construct
  misc_feature 1..80: note = Synthetic: >NC_001906.3-cand-5450-5529
  source 1..80: mol_type = other DNA
agagaaaattgtgttcgggtcctctggcccgcttcatcatctcttaccatggaagaagattctgactggcggatcaatat

SEQ ID NO: 19863 - DNA, 80 bp, synthetic construct
  misc_feature 1..80: note = Synthetic: >NC_001906.3-cand-5530-5609
  source 1..80: mol_type = other DNA
tcaatgctgtcaaggtttgccgcaatgtggatcagattcaactggagaatcaacaatcattgaggatttttttcttgagt

SEQ ID NO: 19864 - DNA, 80 bp, synthetic construct
  misc_feature 1..80: note = Synthetic: >NC_002208.1-cand-1530-1609
  source 1..80: mol_type = other DNA
atgcagatgtcaaaggaaatctactcaaaatgatgaatgattcaatggcaaagaaaaccagtggaaatgctttcattggg

SEQ ID NO: 19865 - DNA, 80 bp, synthetic construct
  misc_feature 1..80: note = Synthetic: >NC_002208.1-cand-1620-1699
  source 1..80: mol_type = other DNA
ttcaaatatcagacaaaaacaaagtcaatcccattgagattccaattaagcagaccatccccaatttcttctttgggagg

SEQ ID NO: 19866 - DNA, 80 bp, synthetic construct
  misc_feature 1..80: note = Synthetic: >NC_002208.1-cand-1670-1749
  source 1..80: mol_type = other DNA
cagaccatccccaatttcttctttgggagggacacagcagaggattatgatgacctcgattattaaagcaataaaataga

SEQ ID NO: 19867 - DNA, 80 bp, synthetic construct
  misc_feature 1..80: note = Synthetic: >NC_002208.1-cand-1750-1829
  source 1..80: mol_type = other DNA
cactatggctgtgactgtttcagtacgtttgggatgtgggtgtttactcttattgaaataaatgtaaaaaatgctgttgt

SEQ ID NO: 19868 - DNA, 80 bp, synthetic construct
  misc_feature 1..80: note = Synthetic: >NC_002209.1-cand-0-79
  source 1..80: mol_type = other DNA
gaagcagagcatattcttagaactgaagtgaacaggccaaaaatgaacaatgctaccttcaactgtacaaacattaaccc

SEQ ID NO: 19869 - DNA, 80 bp, synthetic construct
  misc_feature 1..80: note = Synthetic: >NC_002209.1-cand-100-179
  source 1..80: mol_type = other DNA
gtattattatcactatatgtgtcagcctcattgtcatacttattgtattcggatgtattgctaaaattttcatcaacaaa

SEQ ID NO: 19870 - DNA, 80 bp, synthetic construct
  misc_feature 1..80: note = Synthetic: >NC_002209.1-cand-160-239
  source 1..80: mol_type = other DNA
ctaaaattttcatcaacaaaaacaactgcaccaacaatgtcattagagtgcacaaacgcatcaaatgcccagactgtgaa

SEQ ID NO: 19871 - DNA, 80 bp, synthetic construct
  misc_feature 1..80: note = Synthetic: >NC_002209.1-cand-250-329
  source 1..80: mol_type = other DNA
acaaaagagatgacatttccacccccagagccggagtggacataccctcgtttatcttgccagggctcaacctttcagaa

SEQ ID NO: 19872 - DNA, 80 bp, synthetic construct
  misc_feature 1..80: note = Synthetic: >NC_002209.1-cand-330-409
  source 1..80: mol_type = other DNA
ggcactcctaattagccctcataggttcggagagatcaaaggaaactcagctcccttgataataagagaaccttttgttg

SEQ ID NO: 19873 - DNA, 80 bp, synthetic construct
  misc_feature 1..80: note = Synthetic: >NC_002209.1-cand-380-459
  source 1..80: mol_type = other DNA
ctcccttgataataagagaaccttttgttgcttgtggaccaaaagaatgcagacactttgctctgacccattatgcagct

SEQ ID NO: 19874 - DNA, 80 bp, synthetic construct
  misc_feature 1..80: note = Synthetic: >NC_002209.1-cand-500-579
  source 1..80: mol_type = other DNA
acaagctgaggcatctagtatcagtcaaattgggaaaaatcccaactgtggaaaactccattttccacatggcagcttgg

SEQ ID NO: 19875 - DNA, 80 bp, synthetic construct
  misc_feature 1..80: note = Synthetic: >NC_002209.1-cand-590-669
  source 1..80: mol_type = other DNA
catgccatgatggtagagaatggacatatatcggagttgatggtcctgacaatgatgcattggtcaaaataaaatatgga

SEQ ID NO: 19876 - DNA, 80 bp, synthetic construct
  misc_feature 1..80: note = Synthetic: >NC_002209.1-cand-660-739
  source 1..80: mol_type = other DNA
aaaatatggagaagcatatactgacacatatcattcctatgcacacaacatcctaagaacacaagaaagtgcctgcaatt

SEQ ID NO: 19877 - DNA, 80 bp, synthetic construct
  misc_feature 1..80: note = Synthetic: >NC_002209.1-cand-750-829
  source 1..80: mol_type = other DNA
agattgttatcttatgataacagacggctcagcttcaggaattagtaaatgcagatttcttaaaattagagagggtcgaa

SEQ ID NO: 19878 - DNA, 80 bp, synthetic construct
  misc_feature 1..80: note = Synthetic: >NC_002209.1-cand-810-889
  source 1..80: mol_type = other DNA
taaaattagagagggtcgaataataaaagaaatacttccaacaggaagagtggagcacactgaagagtgcacatgcgggt

SEQ ID NO: 19879 - DNA, 80 bp, synthetic construct
  misc_feature 1..80: note = Synthetic: >NC_002209.1-cand-890-969
  source 1..80: mol_type = other DNA
tcgccagcaataaaaccatagaatgtgcctgtagagacaacagttacacagcaaaaagaccctttgtcaaattaaatgtg

SEQ ID NO: 19880 - DNA, 80 bp, synthetic construct
  misc_feature 1..80: note = Synthetic: >NC_002640.1-cand-2410-2489
  source 1..80: mol_type = other DNA
gttcaagcagacatgggttgtgtggcgtcatggagtgggaaagaattgaagtgtggaagcggaatttttgtggttgacaa

SEQ ID NO: 19881 - DNA, 80 bp, synthetic construct
  misc_feature 1..80: note = Synthetic: >NC_002640.1-cand-2490-2569
  source 1..80: mol_type = other DNA
cgtgcacacttggacagaacagtacaaatttcaaccagagtccccagcgagactagcgtctgcaatattaaatgcccaca

SEQ ID NO: 19882 - DNA, 80 bp, synthetic construct
  misc_feature 1..80: note = Synthetic: >NC_002640.1-cand-2580-2659
  source 1..80: mol_type = other DNA
ctgtggaattagatcaaccacgaggctggaaaatgtcatgtggaagcaaataaccaacgagctaaactatgttctctggg

SEQ ID NO: 19883 - DNA, 80 bp, synthetic construct
  misc_feature 1..80: note = Synthetic: >NC_002640.1-cand-2610-2689
  source 1..80: mol_type = other DNA
aaatgtcatgtggaagcaaataaccaacgagctaaactatgttctctgggaaggaggacatgacctcactgtagtggctg

SEQ ID NO: 19884 - DNA, 80 bp, synthetic construct
  misc_feature 1..80: note = Synthetic: >NC_002640.1-cand-2780-2859
  source 1..80: mol_type = other DNA
caaaaatcttcaccccagaagcaagaaatagcacatttttaatagacggaccagacacctctgaatgccccaatgaacga

SEQ ID NO: 19885 - DNA, 80 bp, synthetic construct
  misc_feature 1..80: note = Synthetic: >NC_002640.1-cand-2810-2889
  source 1..80: mol_type = other DNA
gcacatttttaatagacggaccagacacctctgaatgccccaatgaacgaagagcatggaactctcttgaggtggaagac

SEQ ID NO: 19886 - DNA, 80 bp, synthetic construct
  misc_feature 1..80: note = Synthetic: >NC_002640.1-cand-2890-2969
  source 1..80: mol_type = other DNA
tatggatttggcatgttcacgaccaacatatggatgaaattccgagaaggaagttcagaagtgtgtgaccacaggttaat

SEQ ID NO: 19887 - DNA, 80 bp, synthetic construct
  misc_feature 1..80: note = Synthetic: >NC_002640.1-cand-2970-3049
  source 1..80: mol_type = other DNA
gtcagctgcaattaaagatcagaaagctgtgcatgctgacatgggttattggatagagagctcaaaaaaccagacctggc

SEQ ID NO: 19888 - DNA, 80 bp, synthetic construct
  misc_feature 1..80: note = Synthetic: >NC_002640.1-cand-3050-3129
  source 1..80: mol_type = other DNA
agatagagaaagcatctcttattgaagtgaaaacatgtctgtggcccaagacccacacactgtggagcaatggagtgctg

SEQ ID NO: 19889 - DNA, 80 bp, synthetic construct
  misc_feature 1..80: note = Synthetic: >NC_002640.1-cand-3130-3209
  source 1..80: mol_type = other DNA
gaaagccagatgctcattccaaaatcatatgcgggccctttttcacagcacaattaccgccagggctatgccacgcaaac

SEQ ID NO: 19890 - DNA, 80 bp, synthetic construct
  misc_feature 1..80: note = Synthetic: >NC_002640.1-cand-3220-3299
  source 1..80: mol_type = other DNA
tggcacttaggcaaattagagatagactttggagaatgccccggaacaacagtcacaattcaggaggattgtgaccatag

SEQ ID NO: 19891 - DNA, 80 bp, synthetic construct
  misc_feature 1..80: note = Synthetic: >NC_002640.1-cand-3300-3379
  source 1..80: mol_type = other DNA
aggcccatctttgaggaccaccactgcatctggaaaactagtcacgcaatggtgctgccgctcctgcacgatgcctccct

SEQ ID NO: 19892 - DNA, 80 bp, synthetic construct
  misc_feature 1..80: note = Synthetic: >NC_002640.1-cand-3380-3459
  source 1..80: mol_type = other DNA
taaggttcttgggagaagatgggtgctggtatgggatggagattaggcccttgagtgaaaaagaagagaacatggtcaaa

SEQ ID NO: 19893 - DNA, 80 bp, synthetic construct
  misc_feature 1..80: note = Synthetic: >NC_002640.1-cand-3460-3539
  source 1..80: mol_type = other DNA
tcacaggtgacggccggacagggcacatcagaaactttttctatgggtctgttgtgcctgaccttgtttgtggaagaatg

SEQ ID NO: 19894 - DNA, 80 bp, synthetic construct
  misc_feature 1..80: note = Synthetic: >NC_002640.1-cand-3540-3619
  source 1..80: mol_type = other DNA
cttgaggagaagagtcactaggaaacacatgatattagttgtggtgatcactctttgtgctatcatcctgggaggcctca

SEQ ID NO: 19895 - DNA, 80 bp, synthetic construct
  misc_feature 1..80: note = Synthetic: >NC_002640.1-cand-3660-3739
  source 1..80: mol_type = other DNA
cactatgtctggtagaataggaggacagatccacctagccatcatggcagtgttcaagatgtcaccaggatacgtgctgg

SEQ ID NO: 19896 - DNA, 80 bp, synthetic construct
  misc_feature 1..80: note = Synthetic: >NC_002728.1-cand-10800-10879
  source 1..80: mol_type = other DNA
aaagacatgtgatgtaaacaaaattgttgtaattaaataagtcctcagctgaatacttttttaagattagcaatagcatg

SEQ ID NO: 19897 - DNA, 80 bp, synthetic construct
  misc_feature 1..80: note = Synthetic: >NC_002728.1-cand-10880-10959
  source 1..80: mol_type = other DNA
tttttccagttattggatagttgataatataattctgaaactgggttaataaataatcttgatcggtgatctttgagaac

SEQ ID NO: 19898 - DNA, 80 bp, synthetic construct
  misc_feature 1..80: note = Synthetic: >NC_002728.1-cand-10960-11039
  source 1..80: mol_type = other DNA
aatgatatcatatagttcatcaagtgataatcaattctttatatgtacactttagagtatattttgagacttagtatttt

SEQ ID NO: 19899 - DNA, 80 bp, synthetic construct
  misc_feature 1..80: note = Synthetic: >NC_002728.1-cand-11040-11119
  source 1..80: mol_type = other DNA
cggcccgaatgttaaatttaatagttcatacataacctaaactcaagttctaagcataatgataacaattaatgcgaact

SEQ ID NO: 19900 - DNA, 80 bp, synthetic construct
  misc_feature 1..80: note = Synthetic: >NC_002728.1-cand-11120-11199
  source 1..80: mol_type = other DNA
tgtcttgatgtaaggaagatttgatattaactgagactccacttgatatagtagagctgaatcttgtaaataaattataa

SEQ ID NO: 19901 - DNA, 80 bp, synthetic construct
  misc_feature 1..80: note = Synthetic: >NC_002728.1-cand-11200-11279
  source 1..80: mol_type = other DNA
tgaatagtttattcaaagattatcattcatattagtgtaaattaagaaaaacttaggacccaggtccttgattatgccaa

SEQ ID NO: 19902 - DNA, 80 bp, synthetic construct
  misc_feature 1..80: note = Synthetic: >NC_002728.1-cand-11280-11359
  source 1..80: mol_type = other DNA
ttttctcgagaaatcattcaattgaccatagactgaaagcgttgttacctagttcttcagaagagatcttattagaatta

SEQ ID NO: 19903 - DNA, 80 bp, synthetic construct
  misc_feature 1..80: note = Synthetic: >NC_002728.1-cand-11360-11439
  source 1..80: mol_type = other DNA
atttatatgatctaattcccttaaaaactgaataccaaaaaacaaaaatggccgatgaattatcaatatccgacatcatt

SEQ ID NO: 19904 - DNA, 80 bp, synthetic construct
  misc_feature 1..80: note = Synthetic: >NC_002728.1-cand-11440-11519
  source 1..80: mol_type = other DNA
taccctgaatgtcatttggatagtcctatagtctctggtaaactaatatcagctattgaatatgctcaattgagacacaa

SEQ ID NO: 19905 - DNA, 80 bp, synthetic construct
  misc_feature 1..80: note = Synthetic: >NC_002728.1-cand-11520-11599
  source 1..80: mol_type = other DNA
tcagcccagtgatgataaaagactgtctgagaatattaggttaaaccttcacgggaaaagaaagagtctatacatattaa

SEQ ID NO: 19906 - DNA, 80 bp, synthetic construct
  misc_feature 1..80: note = Synthetic: >NC_002728.1-cand-11600-11679
  source 1..80: mol_type = other DNA
gacaatccaaacagggtgattacattagaaacaacataaaaaacctaaaggaattcatgcatattgcgtaccctgaatgc

SEQ ID NO: 19907 - DNA, 80 bp, synthetic construct
  misc_feature 1..80: note = Synthetic: >NC_002728.1-cand-11680-11759
  source 1..80: mol_type = other DNA
aataacattctattctccatcacatcccaaggcatgactagcaaacttgataacatcatgaaaaagtcattcaaagcata

SEQ ID NO: 19908 - DNA, 80 bp, synthetic construct
  misc_feature 1..80: note = Synthetic: >NC_002728.1-cand-11760-11839
  source 1..80: mol_type = other DNA
caatatcattagtaagaaagtaattgggatgctgcaaaatatcactagaaatctcataactcaagatagaagagatgaaa

SEQ ID NO: 19909 - DNA, 80 bp, synthetic construct
  misc_feature 1..80: note = Synthetic: >NC_002728.1-cand-11870-11949
  source 1..80: mol_type = other DNA
gggatttagggaagaatatgagtcaatctaaatggtatgagtgttttttgttttggtttactatcaaaacagagatgcga

SEQ ID NO: 19910 - DNA, 80 bp, synthetic construct
  misc_feature 1..80: note = Synthetic: >NC_002728.1-cand-11920-11999
  source 1..80: mol_type = other DNA
ttttggtttactatcaaaacagagatgcgagcagtgatcaagaattcgcaaaagccgaaattccgttcagattcatgcat

SEQ ID NO: 19911 - DNA, 80 bp, synthetic construct
  misc_feature 1..80: note = Synthetic: >NC_002728.1-cand-12000-12079
  source 1..80: mol_type = other DNA
aatacacatgcgagacaaaagtactgaaataatcctaaatccgaatcttatctgcattttcaaatcagacaaaactggaa

SEQ ID NO: 19912 - DNA, 80 bp, synthetic construct
  misc_feature 1..80: note = Synthetic: >NC_003310.1-cand-148920-148999
  source 1..80: mol_type = other DNA
aaagaatgttctagcggctattcctaacagaacatttgcaaagattaatccgggtgaagttattcccctcatcactaatc

SEQ ID NO: 19913 - DNA, 80 bp, synthetic construct
  misc_feature 1..80: note = Synthetic: >NC_003310.1-cand-149250-149329
  source 1..80: mol_type = other DNA
atattcatatgtagtgtcaattttaaatgatgatgatgaaatggataatatccatattgacgatgtcaataatgccggta

SEQ ID NO: 19914 - DNA, 80 bp, synthetic construct
  misc_feature 1..80: note = Synthetic: >NC_003310.1-cand-149310-149389
  source 1..80: mol_type = other DNA
cgatgtcaataatgccggtattgacatacagttcatcgatttttagatttcattcagaggatattgaattatgttatggg

SEQ ID NO: 19915 - DNA, 80 bp, synthetic construct
  misc_feature 1..80: note = Synthetic: >NC_003310.1-cand-149630-149709
  source 1..80: mol_type = other DNA
tcatgtctcattaaaaatttggtaacgagtacatctactatattaacatctaaacataagacttattctctatatcggtc

SEQ ID NO: 19916 - DNA, 80 bp, synthetic construct
  misc_feature 1..80: note = Synthetic: >NC_003310.1-cand-149710-149789
  source 1..80: mol_type = other DNA
cacgtgtattgctataataggatacgattctattatatggtataaagatataaatgacaggtataatgacatctatgatt

SEQ ID NO: 19917 - DNA, 80 bp, synthetic construct
  misc_feature 1..80: note = Synthetic: >NC_003310.1-cand-149950-150029
  source 1..80: mol_type = other DNA
acttggaaaagataactattgatgtcacaccaaaaaagaaaaaagaaaaggatgtattattagcgcaatcagttgctgtc

SEQ ID NO: 19918 - DNA, 80 bp, synthetic construct
  misc_feature 1..80: note = Synthetic: >NC_003310.1-cand-150030-150109
  source 1..80: mol_type = other DNA
gaagaggcaaaagatgtcaaggtggaagaaaaaaatattatcgatattgaagatgacgatgatatggatatagaaaacac

SEQ ID NO: 19919 - DNA, 80 bp, synthetic construct
  misc_feature 1..80: note = Synthetic: >NC_003310.1-cand-150110-150189
  source 1..80: mol_type = other DNA
gtaatacgatctataaaaataaggtattaaatactttttatttacggtactcttgtagtggtgataccactaatcgattt

SEQ ID NO: 19920 - DNA, 80 bp, synthetic construct
  misc_feature 1..80: note = Synthetic: >NC_003310.1-cand-150190-150269
  source 1..80: mol_type = other DNA
ttttttaaaaaaaatacttattctgattcttctagccatttccgtgttcgttcgaatgccacatcgacgtcaaagatagg

SEQ ID NO: 19921 - DNA, 80 bp, synthetic construct
  misc_feature 1..80: note = Synthetic: >NC_003310.1-cand-150270-150349
  source 1..80: mol_type = other DNA
ggagtagttgaaatctagttctgcattgttggtacgcacctcaaatgtagtgttggatatcttcaacgtatagttgttga

SEQ ID NO: 19922 - DNA, 80 bp, synthetic construct
  misc_feature 1..80: note = Synthetic: >NC_003310.1-cand-150510-150589
  source 1..80: mol_type = other DNA
aaagtaagcatttcctttaatcgcagatcccggatactggatatattttgcagccaacacgtgcatccatgcaacatttc

SEQ ID NO: 19923 - DNA, 80 bp, synthetic construct
  misc_feature 1..80: note = Synthetic: >NC_003310.1-cand-150590-150669
  source 1..80: mol_type = other DNA
ctacatatacccggctatgcacagcgtcatcatcgactgtacgatacataatgttaccgtgttgcttacattgctcgtaa

SEQ ID NO: 19924 - DNA, 80 bp, synthetic construct
  misc_feature 1..80: note = Synthetic: >NC_003310.1-cand-150670-150749
  source 1..80: mol_type = other DNA
aagactttcgtcaatttgtctccttctccgtaaattccagtgggtcttaggcaacaagtatacaattttgcgccattcat

SEQ ID NO: 19925 - DNA, 80 bp, synthetic construct
  misc_feature 1..80: note = Synthetic: >NC_003310.1-cand-150750-150829
  source 1..80: mol_type = other DNA
gattacggaattattggctttcataaccagttgctcggccatacgtttactttttgcgtatacatgtcctggtgatatat

SEQ ID NO: 19926 - DNA, 80 bp, synthetic construct
  misc_feature 1..80: note = Synthetic: >NC_003310.1-cand-150830-150909
  source 1..80: mol_type = other DNA
cataaagggtatgctcatgaccgatgaatggattaccgtgtttatttggtcctattgcttccatgctactagtatagatc

SEQ ID NO: 19927 - DNA, 80 bp, synthetic construct
  misc_feature 1..80: note = Synthetic: >NC_003310.1-cand-150990-151069
  source 1..80: mol_type = other DNA
agtgtattttccaaatacatccactagagcagccgtatgaataatcagatttaccccatctagcgcttctctcaccttat

SEQ ID NO: 19928 - DNA, 80 bp, synthetic construct
  misc_feature 1..80: note = Synthetic: >NC_003310.1-cand-187260-187339
  source 1..80: mol_type = other DNA
tatgcctcattcagaaacggtaactgtagtaggagactgtctctctaatctcgatgtatatataatatataccaatacgg

SEQ ID NO: 19929 - DNA, 80 bp, synthetic construct
  misc_feature 1..80: note = Synthetic: >NC_003310.1-cand-187340-187419
  source 1..80: mol_type = other DNA
acgcgatatattccgacatgaatggcgtcgcttatcatatgttatatcctaaatgttgatcatattccacaaatgattgt

SEQ ID NO: 19930 - DNA, 80 bp, synthetic construct
  misc_feature 1..80: note = Synthetic: >NC_003310.1-cand-187420-187499
  source 1..80: mol_type = other DNA
gaacgagattaaatcatctaacaaataattagtttttatgacattaacatataataaataaattaatcattattgactta

SEQ ID NO: 19931 - DNA, 80 bp, synthetic construct
  misc_feature 1..80: note = Synthetic: >NC_003310.1-cand-187500-187579
  source 1..80: mol_type = other DNA
acgatgacgaaagttatcatcatcttaggattcttgattattaatacaaattcgttgtgtctatgaaatgtgaacaatgt

SEQ ID NO: 19932 - DNA, 80 bp, synthetic construct
  misc_feature 1..80: note = Synthetic: >NC_003310.1-cand-187580-187659
  source 1..80: mol_type = other DNA
gtctcatattataatacacaagaattaaagtgttgtaaactatctaagccaggaacatattcagatcatcgatgtgataa

SEQ ID NO: 19933 - DNA, 80 bp, synthetic construct
  misc_feature 1..80: note = Synthetic: >NC_003310.1-cand-187660-187739
  source 1..80: mol_type = other DNA
atacagcgataccatctgtggacattgtccaagtgacacattcacgtcaatatataatcgttctcctcggtgtcatagtt

SEQ ID NO: 19934 - DNA, 80 bp, synthetic construct
  misc_feature 1..80: note = Synthetic: >NC_003310.1-cand-187740-187819
  source 1..80: mol_type = other DNA
gtagaggtcacaccttgtacacctaccacaaatagaatctgtcattgtgactcgaatagttatcgtctccttaaagcttc

SEQ ID NO: 19935 - DNA, 80 bp, synthetic construct
  misc_feature 1..80: note = Synthetic: >NC_003310.1-cand-187820-187899
  source 1..80: mol_type = other DNA
tgatggtaactgtgttacatgtgctcctaaaacaaaatatggtcgtgtgtacggaaagaaaggagaaaatgatatggaat

SEQ ID NO: 19936 - DNA, 80 bp, synthetic construct
  misc_feature 1..80: note = Synthetic: >NC_003310.1-cand-187900-187979
  source 1..80: mol_type = other DNA
accatttgtaagaaatgtcggaagggtacttattcagatattgtatctgactctgatcaatgtaaacctatgacaagata

SEQ ID NO: 19937 - DNA, 80 bp, synthetic construct
  misc_feature 1..80: note = Synthetic: >NC_003310.1-cand-187980-188059
  source 1..80: mol_type = other DNA
agacttactcgcatctactggatagacataaatatcctcctcgtaataatgaaatataatataatatacactaattatta

SEQ ID NO: 19938 - DNA, 80 bp, synthetic construct
  misc_feature 1..80: note = Synthetic: >NC_003310.1-cand-188060-188139
  source 1..80: mol_type = other DNA
atatcaatcgagtattaacatataagttatttttaaaccccttttgggttccgtcctaaacggcgtttcggtctgtgtcg

SEQ ID NO: 19939 - DNA, 80 bp, synthetic construct
  misc_feature 1..80: note = Synthetic: >NC_003310.1-cand-188140-188219
  source 1..80: mol_type = other DNA
ccaccatggtcacaccgagcctctgcgtgctcctccatcgaggacgacttcaactatgacagctcggtggcgtctgccag

SEQ ID NO: 19940 - DNA, 80 bp, synthetic construct
  misc_feature 1..80: note = Synthetic: >NC_003310.1-cand-188220-188299
  source 1..80: mol_type = other DNA
cgtgcacatacgaatggcatttctaagaaaagtctacggtatccttgtctacaatttcctttaacaacggcaacagctgc

SEQ ID NO: 19941 - DNA, 80 bp, synthetic construct
  misc_feature 1..80: note = Synthetic: >NC_003310.1-cand-188300-188379
  source 1..80: mol_type = other DNA
agtatttttatactttgaatgcattcggacatttatacaagggagtcctgttctaatattggcatcaatgttcggatcta

SEQ ID NO: 19942 - DNA, 80 bp, synthetic construct
  misc_feature 1..80: note = Synthetic: >NC_003310.1-cand-188380-188459
  source 1..80: mol_type = other DNA
taggcttgattttcgcattgactttacacagacataaacatcccctgaatctgtacctactttgtggatttacactgtta

SEQ ID NO: 19943 - DNA, 80 bp, synthetic construct
  misc_feature 1..80: note = Synthetic: >NC_003310.1-cand-188460-188539
  source 1..80: mol_type = other DNA
gaatctctaacgctggcctctgttgttactttctatgatgcgcgtatcgttatacaagctttcatgttgactactgcagt

SEQ ID NO: 19944 - DNA, 80 bp, synthetic construct
  misc_feature 1..80: note = Synthetic: >NC_004297.1-cand-880-959
  source 1..80: mol_type = other DNA
ttggttcagtgcaaggacccaccaatacaaagtcatactccgtaaactgcaacctttccatatcaacaacaatctcaaca

SEQ ID NO: 19945 - DNA, 80 bp, synthetic construct
  misc_feature 1..80: note = Synthetic: >NC_004297.1-cand-1000-1079
  source 1..80: mol_type = other DNA
cattaatgatctcggtgtcaacataccatgctgatttgcccttgaaagtaggtcctgacaaaaccagtctccaacagtct

SEQ ID NO: 19946 - DNA, 80 bp, synthetic construct
  misc_feature 1..80: note = Synthetic: >NC_004297.1-cand-1080-1159
  source 1..80: mol_type = other DNA
gacaagacacacggactcactgcacctgagtacataacggttacatcatgtactagatacttggcctgttgattcattga

SEQ ID NO: 19947 - DNA, 80 bp, synthetic construct
  misc_feature 1..80: note = Synthetic: >NC_004297.1-cand-1160-1239
  source 1..80: mol_type = other DNA
gccagtatactcaaggtggatggcaaagctttccttaaaactagcatcttgacttttaacacggaacctcactgtctgac

SEQ ID NO: 19948 - DNA, 80 bp, synthetic construct
  misc_feature 1..80: note = Synthetic: >NC_004297.1-cand-1240-1319
  source 1..80: mol_type = other DNA
tcagttttgcagaccctggaggtagtgaagctacggcatcaaagaaatcctccaatgagtcaaacttaggatcaactaaa

SEQ ID NO: 19949 - DNA, 80 bp, synthetic construct
  misc_feature 1..80: note = Synthetic: >NC_004297.1-cand-1320-1399
  source 1..80: mol_type = other DNA
cctgatgcgatcaattgattttgattgaatctagctggctcaatatcaaagtctatccaagcataacccatcatcagatc

SEQ ID NO: 19950 - DNA, 80 bp, synthetic construct
  misc_feature 1..80: note = Synthetic: >NC_004297.1-cand-1400-1479
  source 1..80: mol_type = other DNA
atgcttaaacattggcctttcaacacctttgtgaataactttctctacaaatgaagaaaatggacccattctatgcaacc

SEQ ID NO: 19951 - DNA, 80 bp, synthetic construct
  misc_feature 1..80: note = Synthetic: >NC_004297.1-cand-1480-1559
  source 1..80: mol_type = other DNA
cttcaccctctggaactgatgtcttgtgtggaaaccacgtgaaggaccccaatgttcttgtagtcgcaacaaatggtctc

SEQ ID NO: 19952 - DNA, 80 bp, synthetic construct
  misc_feature 1..80: note = Synthetic: >NC_004297.1-cand-1560-1639
  source 1..80: mol_type = other DNA
acgtaagactcaaaataaatttgcctcatgaaattgtcaacagcatcactagtgctcactactctttcttccaccatggg

SEQ ID NO: 19953 - DNA, 80 bp, synthetic construct
  misc_feature 1..80: note = Synthetic: >NC_004297.1-cand-1620-1699
  source 1..80: mol_type = other DNA
actctttcttccaccatgggttcatgtgtcctactgtgagacaacctcaattcagatgataacacaatgtaatgttcctc

SEQ ID NO: 19954 - DNA, 80 bp, synthetic construct
  misc_feature 1..80: note = Synthetic: >NC_004297.1-cand-1700-1779
  source 1..80: mol_type = other DNA
tcttttccattttactatgtgtgagacaagagacaaggcttcacagttaacatccaacgctacacagagatctagaaatt

SEQ ID NO: 19955 - DNA, 80 bp, synthetic construct
  misc_feature 1..80: note = Synthetic: >NC_004297.1-cand-1780-1859
  source 1..80: mol_type = other DNA
ttattctgggtgaccacttcattttggttgacgctagatcgctcatgaatggtaatatgtgtttctcaaacactgatggg

SEQ ID NO: 19956 - DNA, 80 bp, synthetic construct
  misc_feature 1..80: note = Synthetic: >NC_004297.1-cand-1860-1939
  source 1..80: mol_type = other DNA
tacagccttcttaaagaatgaatgatgtgattcaaaccaaccctatcctccaatagttttgatgcagttggctttaaggg

SEQ ID NO: 19957 - DNA, 80 bp, synthetic construct
  misc_feature 1..80: note = Synthetic: >NC_004297.1-cand-1940-2019
  source 1..80: mol_type = other DNA
aaaatagtcacaagggttatgtttgaaaaaatcaaacaccttaactgtcttaggttcccctaagacccatgcacccagtt

SEQ ID NO: 19958 - DNA, 80 bp, synthetic construct
  misc_feature 1..80: note = Synthetic: >NC_004297.1-cand-2020-2099
  source 1..80: mol_type = other DNA
ctattgcagttgataaggagatgcacatataatcccataacaagggtctgaaataactgaccacactttcacctccactt

SEQ ID NO: 19959 - DNA, 80 bp, synthetic construct
  misc_feature 1..80: note = Synthetic: >NC_005062.1-cand-330-409
  source 1..80: mol_type = other DNA
tcaaacaggcgatggcagcactccggaagataaagaaggcggtcagcaccctgatgattggcttgcaaaaacgagggaaa

SEQ ID NO: 19960 - DNA, 80 bp, synthetic construct
  misc_feature 1..80: note = Synthetic: >NC_005062.1-cand-410-489
  source 1..80: mol_type = other DNA
aggaggtcaacaacagattggacaggatggctgctggtagccatgctgcttagcatcgcactagccgcaaccgtgagaaa

SEQ ID NO: 19961 - DNA, 80 bp, synthetic construct
  misc_feature 1..80: note = Synthetic: >NC_005062.1-cand-490-569
  source 1..80: mol_type = other DNA
agagggagacggcaccacagtcatcagagccgaaggaaaggacgcagctacccaggtacgcgtggagaatggcacctgtg

SEQ ID NO: 19962 - DNA, 80 bp, synthetic construct
  misc_feature 1..80: note = Synthetic: >NC_005062.1-cand-600-679
  source 1..80: mol_type = other DNA
gtgaagactccttgtcatacgaatgtgtgaccatagatcaaggagaagaacccgtggacgtggactgtttctgcaggaac

SEQ ID NO: 19963 - DNA, 80 bp, synthetic construct
  misc_feature 1..80: note = Synthetic: >NC_005062.1-cand-650-729
  source 1..80: mol_type = other DNA
cccgtggacgtggactgtttctgcaggaacgtggatcgtgtctaccttgagtatgggagatgtggaaaacaggagggaac

SEQ ID NO: 19964 - DNA, 80 bp, synthetic construct
  misc_feature 1..80: note = Synthetic: >NC_005062.1-cand-700-779
  source 1..80: mol_type = other DNA
gtatgggagatgtggaaaacaggagggaacacgatcacgacgctcagttctaatcccttcccacgctcagaaggacctga

SEQ ID NO: 19965 - DNA, 80 bp, synthetic construct
  misc_feature 1..80: note = Synthetic: >NC_005062.1-cand-810-889
  source 1..80: mol_type = other DNA
acactatacggtctcacctcacccgagttgagggctgggtgtggaagaataaatcactcacgctggcagtggtagtcatt

SEQ ID NO: 19966 - DNA, 80 bp, synthetic construct
  misc_feature 1..80: note = Synthetic: >NC_005062.1-cand-890-969
  source 1..80: mol_type = other DNA
gtgtggatgaccgtggaaagtgcggtaaccaggattgtcatcgtgtcagcactgctctgcttagccccagcgtacgcctc

SEQ ID NO: 19967 - DNA, 80 bp, synthetic construct
  misc_feature 1..80: note = Synthetic: >NC_005062.1-cand-970-1049
  source 1..80: mol_type = other DNA
acgatgcacgcatctggaaaatagggactttgtgactggcacccagggaaccacacgcgtgacgctggtgctggaacttg

SEQ ID NO: 19968 - DNA, 80 bp, synthetic construct
  misc_feature 1..80: note = Synthetic: >NC_005062.1-cand-1050-1129
  source 1..80: mol_type = other DNA
gtggatgtgtcactatcacagctgaagggaaaccgtcaatggacgtgtggcttgactccatctatcaagaaaaccccgcc

SEQ ID NO: 19969 - DNA, 80 bp, synthetic construct
  misc_feature 1..80: note = Synthetic: >NC_005062.1-cand-1120-1199
  source 1..80: mol_type = other DNA
aaaccccgccaagacacgtgagtactgcctgcacgcaaaactatcaaacaccaaggtcgcggcaaggtgtccagcaatgg

SEQ ID NO: 19970 - DNA, 80 bp, synthetic construct
  misc_feature 1..80: note = Synthetic: >NC_005062.1-cand-1270-1349
  source 1..80: mol_type = other DNA
gggaaatcactgtggactgtttgggaagggcagtattgtcacctgtgtcaaggcgtcgtgtgaggcaaagaagaaagcca

SEQ ID NO: 19971 - DNA, 80 bp, synthetic construct
  misc_feature 1..80: note = Synthetic: >NC_005062.1-cand-1290-1369
  source 1..80: mol_type = other DNA
ttgggaagggcagtattgtcacctgtgtcaaggcgtcgtgtgaggcaaagaagaaagccacaggacatgtgtacgacgct

SEQ ID NO: 19972 - DNA, 80 bp, synthetic construct
  misc_feature 1..80: note = Synthetic: >NC_005062.1-cand-1370-1449
  source 1..80: mol_type = other DNA
aacaagatagtgtacacagtcaaggttgagccacatacaggaaactatgtcgcggccaatgaaacccacagtgggaggaa

SEQ ID NO: 19973 - DNA, 80 bp, synthetic construct
  misc_feature 1..80: note = Synthetic: >NC_005062.1-cand-1450-1529
  source 1..80: mol_type = other DNA
aaccgcattgttcacagtctcttcggaaaaaacaattctaaccatgggcgaatacggagacgtgtcgctgatgtgcagag

SEQ ID NO: 19974 - DNA, 80 bp, synthetic construct
  misc_feature 1..80: note = Synthetic: >NC_005062.1-cand-1530-1609
  source 1..80: mol_type = other DNA
tcgctagtggcgtcgatctggcacaaaccgttgttcttgagctcgacaagacagcagaacacctccccacggcatggcag

SEQ ID NO: 19975 - DNA, 80 bp, synthetic construct
  misc_feature 1..80: note = Synthetic: >NC_005062.1-cand-9320-9399
  source 1..80: mol_type = other DNA
atcctgcgttacatggaaggtgaacacaaacagctggcagccactgttatgcaaaaggcatatcatgccaaggttgtgaa

SEQ ID NO: 19976 - DNA, 80 bp, synthetic construct
  misc_feature 1..80: note = Synthetic: >NC_005062.1-cand-9400-9479
  source 1..80: mol_type = other DNA
ggtagccaggccctcccgagatggagggtgcatcatggacgtcatcacaagacgggaccaacgaggatcaggccaagtgg

SEQ ID NO: 19977 - DNA, 80 bp, synthetic construct
  misc_feature 1..80: note = Synthetic: >NC_005062.1-cand-9460-9539
  source 1..80: mol_type = other DNA
acgaggatcaggccaagtggtcacatacgccctcaataccctcaccaacataaaggtgcagctaattcgcatgatggaag

SEQ ID NO: 19978 - DNA, 80 bp, synthetic construct
  misc_feature 1..80: note = Synthetic: >NC_005062.1-cand-9560-9639
  source 1..80: mol_type = other DNA
acagactcacacaaccccaggctgctacgagtggagaggtggctgcgtgaccacggagaagaacgccttggaagaatgct

SEQ ID NO: 19979 - DNA, 80 bp, synthetic construct
  misc_feature 1..80: note = Synthetic: >NC_005062.1-cand-9640-9719
  source 1..80: mol_type = other DNA
gatcagtggagatgattgtgtggtgagacccatagatgacaggtttagcaaggccctctacttcttgaatgatatggcca

SEQ ID NO: 19980 - DNA, 80 bp, synthetic construct
  misc_feature 1..80: note = Synthetic: >NC_005062.1-cand-9720-9799
  source 1..80: mol_type = other DNA
agactagaaaggacatcggcgaatgggagcattcagctggcttctcaagctgggaggaggttcccttctgctcgcaccat

SEQ ID NO: 19981 - DNA, 80 bp, synthetic construct
  misc_feature 1..80: note = Synthetic: >NC_005062.1-cand-9790-9869
  source 1..80: mol_type = other DNA
ctcgcaccatttccatgagttggtgatgaaggacggacgcaccctggtcgtgccatgccgagatcaggacgaactggtgg

SEQ ID NO: 19982 - DNA, 80 bp, synthetic construct
  misc_feature 1..80: note = Synthetic: >NC_005062.1-cand-9890-9969
  source 1..80: mol_type = other DNA
gggtgtggttggagtgtccgcgagacagcttgtttgtccaaggcttacggccaaatgtggctgctgagctacttccacag

SEQ ID NO: 19983 - DNA, 80 bp, synthetic construct
  misc_feature 1..80: note = Synthetic: >NC_005062.1-cand-9990-10069
  source 1..80: mol_type = other DNA
ggtttgccatttgctcggcagtccctaaggactgggttcctactggtcggacaacatggagcgttcacgccagtggagcc

SEQ ID NO: 19984 - DNA, 80 bp, synthetic construct
  misc_feature 1..80: note = Synthetic: >NC_005062.1-cand-10040-10119
  source 1..80: mol_type = other DNA
acaacatggagcgttcacgccagtggagcctggatgactacagagaacatgctagatgtgtggaatcgagtgtggatcct

SEQ ID NO: 19985 - DNA, 80 bp, synthetic construct
  misc_feature 1..80: note = Synthetic: >NC_005062.1-cand-10120-10199
  source 1..80: mol_type = other DNA
ggacaaccccttcatggagaacaaagaaaaggttggtgaatggagagacattccataccttcccaagtcacaagacatga

SEQ ID NO: 19986 - DNA, 80 bp, synthetic construct
  misc_feature 1..80: note = Synthetic: >NC_005062.1-cand-10170-10249
  source 1..80: mol_type = other DNA
ttccataccttcccaagtcacaagacatgatgtgctcgtcactggttggaagacgggaaagagcagagtgggcaaagaac

SEQ ID NO: 19987 - DNA, 80 bp, synthetic construct
  misc_feature 1..80: note = Synthetic: >NC_005062.1-cand-10280-10359
  source 1..80: mol_type = other DNA
atgctgggccctgagaggtatagtgactacctttcctgcatggaccggcatgaactgcactgggagctcaaagtggagag

SEQ ID NO: 19988 - DNA, 80 bp, synthetic construct
  misc_feature 1..80: note = Synthetic: >NC_005062.1-cand-10350-10429
  source 1..80: mol_type = other DNA
aagtggagagctcaataatctaaccacagacaaccatagagcaaaagcaccatttcgtgagacccccctgccagttgaag

SEQ ID NO: 19989 - DNA, 80 bp, synthetic construct
  misc_feature 1..80: note = Synthetic: >NC_005062.1-cand-10440-10519
  source 1..80: mol_type = other DNA
gccggtggtagaaaaccccccaacagggtgccaaacggcaacacgccagtgagagtggcgacgggaacatggtcgctccc

SEQ ID NO: 19990 - DNA, 80 bp, synthetic construct
  misc_feature 1..80: note = Synthetic: >NC_005062.1-cand-10520-10599
  source 1..80: mol_type = other DNA
gacgtagggcactctatccaattttgtgagaccccccgcaccatggaaggccaaacatggtgcatgaagggaaaggcccc

SEQ ID NO: 19991 - DNA, 80 bp, synthetic construct
  misc_feature 1..80: note = Synthetic: >NC_005228.1-cand-1880-1959
  source 1..80: mol_type = other DNA
aagtacatatgagcctaaacgtggcctctatcgaacactctccatgtttagatacaaaagcaaatgctatgtgggtttgg

SEQ ID NO: 19992 - DNA, 80 bp, synthetic construct
  misc_feature 1..80: note = Synthetic: >NC_005228.1-cand-1960-2039
  source 1..80: mol_type = other DNA
tttggtgtattttgttaactatggagttgatagtgtgggcagctagtgctgagacaataaatcttgaacctggatggaca

SEQ ID NO: 19993 - DNA, 80 bp, synthetic construct
  misc_feature 1..80: note = Synthetic: >NC_005228.1-cand-2040-2119
  source 1..80: mol_type = other DNA
gacacagcccatggctcagggataatcccacttaagactgatttagaattggatttttccctaccatcttctgcaacata

SEQ ID NO: 19994 - DNA, 80 bp, synthetic construct
  misc_feature 1..80: note = Synthetic: >NC_005228.1-cand-2120-2199
  source 1..80: mol_type = other DNA
cacatatagaagagaactacaaaatcctgcaaatgaacaagaaaagataccattccattttcaaatggagagacaagtta

SEQ ID NO: 19995 - DNA, 80 bp, synthetic construct
  misc_feature 1..80: note = Synthetic: >NC_005228.1-cand-2200-2279
  source 1..80: mol_type = other DNA
tacatgctgaaatacagcatttaggtcactggatggatggcacttttaatttgaaaactgcgtttcattgctatggctct

SEQ ID NO: 19996 - DNA, 80 bp, synthetic construct
  misc_feature 1..80: note = Synthetic: >NC_005228.1-cand-2270-2349
  source 1..80: mol_type = other DNA
ctatggctcttgtataaaatatgcttatccttggcagacagcaaagtgttttcttgagaaggattttgaatttgaaactg

SEQ ID NO: 19997 - DNA, 80 bp, synthetic construct
  misc_feature 1..80: note = Synthetic: >NC_005228.1-cand-2380-2459
  source 1..80: mol_type = other DNA
gggtaggtacagggtgtacagcctgtggtgtttatctagataaattacgatctgttggcaaagtttataaaatcctgtcc

SEQ ID NO: 19998 - DNA, 80 bp, synthetic construct
  misc_feature 1..80: note = Synthetic: >NC_005228.1-cand-2450-2529
  source 1..80: mol_type = other DNA
aatcctgtcccttaaatatactagaaaagtttgtatccagttaggtactgagcaaacatgtaagacaattgattctaatg

SEQ ID NO: 19999 - DNA, 80 bp, synthetic construct
  misc_feature 1..80: note = Synthetic: >NC_005228.1-cand-2540-2619
  source 1..80: mol_type = other DNA
aacaacttctgtgaaggtctgtatgattggaacaatatcaaaatttcaacctggagacacattattattcttagggccgc

SEQ ID NO: 20000 - DNA, 80 bp, synthetic construct
  misc_feature 1..80: note = Synthetic: >NC_005228.1-cand-2620-2699
  source 1..80: mol_type = other DNA
tagaagagggtggaatgatttttaaacaatggtgtacaacaacatgccaatttggagacccaggtgatatcatgagcaca

SEQ ID NO: 20001 - DNA, 80 bp, synthetic construct
  misc_feature 1..80: note = Synthetic: >NC_005228.1-cand-2700-2779
  source 1..80: mol_type = other DNA
cccttagggatgaaatgcccagaacatgcaggttcctttagaaaaaagtgttcttttgccacattgccatcatgtcagta

SEQ ID NO: 20002 - DNA, 80 bp, synthetic construct
  misc_feature 1..80: note = Synthetic: >NC_005228.1-cand-2780-2859
  source 1..80: mol_type = other DNA
tgatggaaacactgtatctggatatcagagaatgattgccacaaaagattcattccagtcattcaatattacagaacccc

SEQ ID NO: 20003 - DNA, 80 bp, synthetic construct
  misc_feature 1..80: note = Synthetic: >NC_005228.1-cand-2860-2939
  source 1..80: mol_type = other DNA
atattacaacaaattcactagaatgggttgacccagatagttctctaaaggaccatgtcaatctgatagtaaaccgggat

SEQ ID NO: 20004 - DNA, 80 bp, synthetic construct
  misc_feature 1..80: note = Synthetic: >NC_005228.1-cand-2930-3009
  source 1..80: mol_type = other DNA
aaaccgggatctatctttccaagatttagctgaaaatccatgtcaggttgatttaagtgtatcatcaattgatggcgcat

SEQ ID NO: 20005 - DNA, 80 bp, synthetic construct
  misc_feature 1..80: note = Synthetic: >NC_005228.1-cand-3030-3109
  source 1..80: mol_type = other DNA
aatttagtctgctctgtcagccttacagaatgtgcatcgtttctcacatcaatcaaagcatgtgattctgccatgtgtta

SEQ ID NO: 20006 - DNA, 80 bp, synthetic construct
  misc_feature 1..80: note = Synthetic: >NC_005228.1-cand-3140-3219
  source 1..80: mol_type = other DNA
ccaaaacacagtacatgttgtaggcaaaggtggccattctggatccaaattcatgtgctgccatgataaaaaatgttcag

SEQ ID NO: 20007 - DNA, 80 bp, synthetic construct
  misc_feature 1..80: note = Synthetic: >NC_005234.1-cand-3220-3299
  source 1..80: mol_type = other DNA
acctggataaggtcaatgggattgttgaacaagagagtgagaaggtttatgatgatggtgcaccacaatgtggcatttca

SEQ ID NO: 20008 - DNA, 80 bp, synthetic construct
  misc_feature 1..80: note = Synthetic: >NC_005234.1-cand-3320-3399
  source 1..80: mol_type = other DNA
ggagtggataacaggaattttcaatgggaattggattgtcatagttgtgcttgttttcttcttcatattgtccttaatct

SEQ ID NO: 20009 - DNA, 80 bp, synthetic construct
  misc_feature 1..80: note = Synthetic: >NC_005234.1-cand-3380-3459
  source 1..80: mol_type = other DNA
cttcatattgtccttaatcttacttagtcttctatgtcccattcgtaagcataaacgctcataagtacatattagcttgt

SEQ ID NO: 20010 - DNA, 80 bp, synthetic construct
  misc_feature 1..80: note = Synthetic: >NC_005234.1-cand-3460-3539
  source 1..80: mol_type = other DNA
ccttgtatatagctttcaacaatgcaattttatatatcagtttaaacttctgtacttattaactttttacatttatcaac

SEQ ID NO: 20011 - DNA, 80 bp, synthetic construct
  misc_feature 1..80: note = Synthetic: >NC_005234.1-cand-3540-3619
  source 1..80: mol_type = other DNA
ctagttatctaaaaaaaataactccttcattactataaaccttagtcctttagtacgtgggtatttctatatcttgcgga

SEQ ID NO: 20012 - DNA, 80 bp, synthetic construct
  misc_feature 1..80: note = Synthetic: >NC_005235.1-cand-0-79
  source 1..80: mol_type = other DNA
agtagactccggaagagacaaactactataaagatggaaaaatacagagaaattcatagggatctacaatcctttccagt

SEQ ID NO: 20013 - DNA, 80 bp, synthetic construct
  misc_feature 1..80: note = Synthetic: >NC_005235.1-cand-80-159
  source 1..80: mol_type = other DNA
tgggtcactgacagcagtagagtgtatagactacctggatcgtctctatgcaataaggcatgacattgttgatcagatga

SEQ ID NO: 20014 - DNA, 80 bp, synthetic construct
  misc_feature 1..80: note = Synthetic: >NC_005235.1-cand-140-219
  source 1..80: mol_type = other DNA
tgacattgttgatcagatgataaagcatgactggtcagataacaaggattcagaggaatctataggaaaggttttgctgt

SEQ ID NO: 20015 - DNA, 80 bp, synthetic construct
  misc_feature 1..80: note = Synthetic: >NC_005235.1-cand-240-319
  source 1..80: mol_type = other DNA
gttataactgcaatggaaaaaaagatcattcctgaccacccaagtggtaaaacacttcgttccttcttcaagatgacacc

SEQ ID NO: 20016 - DNA, 80 bp, synthetic construct
  misc_feature 1..80: note = Synthetic: >NC_005235.1-cand-320-399
  source 1..80: mol_type = other DNA
tgataattataagattacagggtcaacgattgagtttgtagaagtaacagttactgttgatgttgacaaaggaatcagag

SEQ ID NO: 20017 - DNA, 80 bp, synthetic construct
  misc_feature 1..80: note = Synthetic: >NC_005235.1-cand-400-479
  source 1..80: mol_type = other DNA
agaaaaggctcaagtatgaggcagggctaaagtacattgaacaagaactgcataatcattttcttagaggagatattcca

SEQ ID NO: 20018 - DNA, 80 bp, synthetic construct
  misc_feature 1..80: note = Synthetic: >NC_005235.1-cand-480-559
  source 1..80: mol_type = other DNA
caaccttataagataacatttcaggttgtctccgttagaacagatggttctaatatctctacacaatggcctagccggag

SEQ ID NO: 20019 - DNA, 80 bp, synthetic construct
  misc_feature 1..80: note = Synthetic: >NC_005235.1-cand-550-629
  source 1..80: mol_type = other DNA
ctagccggaggaatgatggtgttgttcaatacatgaggcttgtacaagctgaaattagttatgttcgagagcacttgata

SEQ ID NO: 20020 - DNA, 80 bp, synthetic construct
  misc_feature 1..80: note = Synthetic: >NC_005235.1-cand-630-709
  source 1..80: mol_type = other DNA
cggcaggaggaaagggctgctctagaagcaatgttcaatctaaaattcaatataagcaacataaaaaatcaaccatatta

SEQ ID NO: 20021 - DNA, 80 bp, synthetic construct
  misc_feature 1..80: note = Synthetic: >NC_005235.1-cand-710-789
  source 1..80: mol_type = other DNA
tattcctgattacagaggaatcccattaatacatccaaatattaatgacttagttgtatacatgagggattggttatcaa

SEQ ID NO: 20022 - DNA, 80 bp, synthetic construct
  misc_feature 1..80: note = Synthetic: >NC_005235.1-cand-790-869
  source 1..80: mol_type = other DNA
aaagccataaattttcatttcatgagggaaaggtccctgctgtgtttgactgttttaatgagaatgaacttgagcatgct

SEQ ID NO: 20023 - DNA, 80 bp, synthetic construct
  misc_feature 1..80: note = Synthetic: >NC_005301.3-cand-540-619
  source 1..80: mol_type = other DNA
atacttccgcagtttgaaacagacacaagagaggccttgagcttgatggacagggttatagctgtggatcagttgacatc

SEQ ID NO: 20024 - DNA, 80 bp, synthetic construct
  misc_feature 1..80: note = Synthetic: >NC_005301.3-cand-620-699
  source 1..80: mol_type = other DNA
atcttctagtgatgaactgcaagactatgaagaccttgccttggcactcacaagcgcagaagaatcaaatagacggtcaa

SEQ ID NO: 20025 - DNA, 80 bp, synthetic construct
  misc_feature 1..80: note = Synthetic: >NC_005301.3-cand-700-779
  source 1..80: mol_type = other DNA
gcttggatgaggtcacattgtccaagaagcaagcagagatactaaggcaaaaagcatctcagttgtctaaattggttaat

SEQ ID NO: 20026 - DNA, 80 bp, synthetic construct
  misc_feature 1..80: note = Synthetic: >NC_005301.3-cand-780-859
  source 1..80: mol_type = other DNA
aaaagtcagaacataccgaccagagtcggtagagtcttggattgcatgttcaactgcaaattatgtgttgagatatcagc

SEQ ID NO: 20027 - DNA, 80 bp, synthetic construct
  misc_feature 1..80: note = Synthetic: >NC_005301.3-cand-840-919
  source 1..80: mol_type = other DNA
ttatgtgttgagatatcagctgacactttaattctgaggccagaatcaaaagagaaaatcggtgaaatcatgtcattgcg

SEQ ID NO: 20028 - DNA, 80 bp, synthetic construct
  misc_feature 1..80: note = Synthetic: >NC_005301.3-cand-940-1019
  source 1..80: mol_type = other DNA
tgacacgagacaaacagattaagcaagagttctccagaatgaaactctacgtcactaaagatttgcttgaccatctagac

SEQ ID NO: 20029 - DNA, 80 bp, synthetic construct
  misc_feature 1..80: note = Synthetic: >NC_005301.3-cand-1000-1079
  source 1..80: mol_type = other DNA
atttgcttgaccatctagacgttggtgggctcttgagggctgctttccctggaacaggaatagaaaggcatatgcagctg

SEQ ID NO: 20030 - DNA, 80 bp, synthetic construct
  misc_feature 1..80: note = Synthetic: >NC_005301.3-cand-1080-1159
  source 1..80: mol_type = other DNA
ctacactctgagatgatactggacatctgcactgtatcacttggtgtcatgctgtcaacattcttatatggttctaataa

SEQ ID NO: 20031 - DNA, 80 bp, synthetic construct
  misc_feature 1..80: note = Synthetic: >NC_005301.3-cand-1160-1239
  source 1..80: mol_type = other DNA
taaaaacaagaagaaattcattaccaactgtctgctcagcacagccctatccggaaagaaggtgtataaagttctcggca

SEQ ID NO: 20032 - DNA, 80 bp, synthetic construct
  misc_feature 1..80: note = Synthetic: >NC_005301.3-cand-1240-1319
  source 1..80: mol_type = other DNA
acctaggaaatgaactgttgtacaaggcacctagaaaggccttagcaactgtctgcagtgccttgtttgggaagcagata

SEQ ID NO: 20033 - DNA, 80 bp, synthetic construct
  misc_feature 1..80: note = Synthetic: >NC_005301.3-cand-1320-1399
  source 1..80: mol_type = other DNA
aacaaacttcagaattgcttcaggaccataagccctgtcagcttacttgcattgagaaatctagactttgattgtctcag

SEQ ID NO: 20034 - DNA, 80 bp, synthetic construct
  misc_feature 1..80: note = Synthetic: >NC_005301.3-cand-1400-1479
  source 1..80: mol_type = other DNA
tgtgcaagactataatggtatgatagaaaacatgtctaaattagacaacactgatgttgaattcaaccacagggagatag

SEQ ID NO: 20035 - DNA, 80 bp, synthetic construct
  misc_feature 1..80: note = Synthetic: >NC_005301.3-cand-1480-1559
  source 1..80: mol_type = other DNA
ctgatctcaaccaattaacttctcggctcatcacattaagaaaggagaaagacactgacctcctcaaacaatggtttcct

SEQ ID NO: 20036 - DNA, 80 bp, synthetic construct
  misc_feature 1..80: note = Synthetic: >NC_005301.3-cand-1560-1639
  source 1..80: mol_type = other DNA
gaaagtgacctcacccgcagaagcatcaggaatgctgcaaacgcggaggaatttgtcatatctgagttctttaagaagaa

SEQ ID NO: 20037 - DNA, 80 bp, synthetic construct
  misc_feature 1..80: note = Synthetic: >NC_005301.3-cand-1640-1719
  source 1..80: mol_type = other DNA
ggacattatgaaattcatcagcacttcaggcagagcaatgagtgcaggcaagattggtaatgtcctatcctatgcacata

SEQ ID NO: 20038 - DNA, 80 bp, synthetic construct
  misc_feature 1..80: note = Synthetic: >NC_005301.3-cand-1720-1799
  source 1..80: mol_type = other DNA
atctttatttgagtaagtcaagcctaaatatgacctctgaagacatctcacagcttttgatcgagattaagcgactgtat

SEQ ID NO: 20039 - DNA, 80 bp, synthetic construct
  misc_feature 1..80: note = Synthetic: >NC_006577.2-cand-8760-8839
  source 1..80: mol_type = other DNA
atctgttttatattattgtgggctttattgcctacatatagtgtttataagtctgatattcatttgcctgcttatgctag

SEQ ID NO: 20040 - DNA, 80 bp, synthetic construct
  misc_feature 1..80: note = Synthetic: >NC_006577.2-cand-8840-8919
  source 1..80: mol_type = other DNA
ttttaaagttattgataatggtgttgttagagatatttcagttaatgatttatgttttgctaataaatttttccaatttg

SEQ ID NO: 20041 - DNA, 80 bp, synthetic construct
  misc_feature 1..80: note = Synthetic: >NC_006577.2-cand-8920-8999
  source 1..80: mol_type = other DNA
atcaatggtatgagtccacttttgggtctgtttactatcataattctatggattgccctattgtagtggcagttatggat

SEQ ID NO: 20042 - DNA, 80 bp, synthetic construct
  misc_feature 1..80: note = Synthetic: >NC_006577.2-cand-9000-9079
  source 1..80: mol_type = other DNA
gaagatatcggttctactatgtttaatgttcctactaaagttttgagacatggctttcatgttttacattttttaactta

SEQ ID NO: 20043 - DNA, 80 bp, synthetic construct
  misc_feature 1..80: note = Synthetic: >NC_006577.2-cand-9080-9159
  source 1..80: mol_type = other DNA
tgcatttgctagtgatagtgttcagtgctatacaccacatattcagatttcttataatgatttttatgctagtggttgtg

SEQ ID NO: 20044 - DNA, 80 bp, synthetic construct
  misc_feature 1..80: note = Synthetic: >NC_006577.2-cand-9160-9239
  source 1..80: mol_type = other DNA
ttttatcatctttgtgtactatgtttaaaagaggtgatggtacaccacatccttattgttattcagatggtgttatgaag

SEQ ID NO: 20045 - DNA, 80 bp, synthetic construct
  misc_feature 1..80: note = Synthetic: >NC_006577.2-cand-9240-9319
  source 1..80: mol_type = other DNA
aatgcttctttgtatacatctttggttccacatacacgttatagccttgctaattctaatggttttataagatttcctga

SEQ ID NO: 20046 - DNA, 80 bp, synthetic construct
  misc_feature 1..80: note = Synthetic: >NC_006577.2-cand-9320-9399
  source 1..80: mol_type = other DNA
tgttattagtgaaggtattgtacgtattgtaagaacgcgctctatgacttattgtagagtgggtgcatgtgaatacgccg

SEQ ID NO: 20047 - DNA, 80 bp, synthetic construct
  misc_feature 1..80: note = Synthetic: >NC_006577.2-cand-9400-9479
  source 1..80: mol_type = other DNA
aagagggtatatgttttaattttaatagttcctgggttttgaataatgattattatagaagtatgcctggaactttttgt

SEQ ID NO: 20048 - DNA, 80 bp, synthetic construct
  misc_feature 1..80: note = Synthetic: >NC_006577.2-cand-9480-9559
  source 1..80: mol_type = other DNA
ggtagagatctttttgatttgttttatcaattttttagtagtttaattcgtcctatagatttcttttctcttactgctag

SEQ ID NO: 20049 - DNA, 80 bp, synthetic construct
  misc_feature 1..80: note = Synthetic: >NC_006577.2-cand-9560-9639
  source 1..80: mol_type = other DNA
ttctatttttggagctatattggctatagttgttgtcttggttttttattatttaataaaacttaagcgtgcttttggag

SEQ ID NO: 20050 - DNA, 80 bp, synthetic construct
  misc_feature 1..80: note = Synthetic: >NC_006577.2-cand-9640-9719
  source 1..80: mol_type = other DNA
attatactagtgttgtagttataaatgttgttgtttggtgtattaattttcttatgctttttgtttttcaagtttatcct

SEQ ID NO: 20051 - DNA, 80 bp, synthetic construct
  misc_feature 1..80: note = Synthetic: >NC_006577.2-cand-9720-9799
  source 1..80: mol_type = other DNA
atttgtgcatgtgtttatgcttgtttttatttttatgtaacattgtattttccttctgaaattagtgtaattatgcattt

SEQ ID NO: 20052 - DNA, 80 bp, synthetic construct
  misc_feature 1..80: note = Synthetic: >NC_006577.2-cand-9800-9879
  source 1..80: mol_type = other DNA
gcaatggattgttatgtatggtgctataatgcctttttggttttgtgtcacatatgtagctatggttattgcaaaccatg

SEQ ID NO: 20053 - DNA, 80 bp, synthetic construct
  misc_feature 1..80: note = Synthetic: >NC_006577.2-cand-9880-9959
  source 1..80: mol_type = other DNA
ttttatggttattttcatattgtaggaaaattggtgttaatgtatgtagtgatagtacatttgaagaaacatctcttact

SEQ ID NO: 20054 - DNA, 80 bp, synthetic construct
  misc_feature 1..80: note = Synthetic: >NC_006577.2-cand-9960-10039
  source 1..80: mol_type = other DNA
acttttatgattactaaagattcttattgtagattaaagaattctgtttctgatgttgcctacaatagatatttgagttt

SEQ ID NO: 20055 - DNA, 80 bp, synthetic construct
  misc_feature 1..80: note = Synthetic: >NC_007359.1-cand-920-999
  source 1..80: mol_type = other DNA
gggataccgctatatgatgcaatcaaatgcatgaaaacatttttcggctggaaagagcccaacattgtaaaaccacatga

SEQ ID NO: 20056 - DNA, 80 bp, synthetic construct
  misc_feature 1..80: note = Synthetic: >NC_007359.1-cand-990-1069
  source 1..80: mol_type = other DNA
aaccacatgaaaaaggcataaaccccaattacctcctggcttggaagcaggtgctggcagagctccaagatattgaaaac

SEQ ID NO: 20057 - DNA, 80 bp, synthetic construct
  misc_feature 1..80: note = Synthetic: >NC_007359.1-cand-1070-1149
  source 1..80: mol_type = other DNA
gaggagaaaattccaaagacaaagaacatgaggaaaacaagccaattgaagtgggcacttggtgagaatatggcaccaga

SEQ ID NO: 20058 - DNA, 80 bp, synthetic construct
  misc_feature 1..80: note = Synthetic: >NC_007359.1-cand-1150-1229
  source 1..80: mol_type = other DNA
gaaagtagactttgaggattgcaaagatgttagcgatctaaggcagtatgacagtgatgaaccaaagcctagatcactag

SEQ ID NO: 20059 - DNA, 80 bp, synthetic construct
  misc_feature 1..80: note = Synthetic: >NC_007359.1-cand-1220-1299
  source 1..80: mol_type = other DNA
agatcactagcaagctggatccagagtgaattcaacaaggcatgcgaattgacagattcaagttggattgaacttgatga

SEQ ID NO: 20060 - DNA, 80 bp, synthetic construct
  misc_feature 1..80: note = Synthetic: >NC_007359.1-cand-1320-1399
  source 1..80: mol_type = other DNA
caattgagcacattgcaagtatgagaaggaactatttcacagcggaagtatcccattgcagggctactgaatacataatg

SEQ ID NO: 20061 - DNA, 80 bp, synthetic construct
  misc_feature 1..80: note = Synthetic: >NC_007359.1-cand-1410-1489
  source 1..80: mol_type = other DNA
acataaacacagctttgttgaatgcatcctgtgcagccatggatgacttccaactgatcccaatgataagcaaatgcaga

SEQ ID NO: 20062 - DNA, 80 bp, synthetic construct
  misc_feature 1..80: note = Synthetic: >NC_007359.1-cand-1490-1569
  source 1..80: mol_type = other DNA
accaaagaaggaagacggaaaactaacctgtatggattccttataaaaggaagatcccatttgagaaatgacaccgatgt

SEQ ID NO: 20063 - DNA, 80 bp, synthetic construct
  misc_feature 1..80: note = Synthetic: >NC_007359.1-cand-1570-1649
  source 1..80: mol_type = other DNA
ggtaaactttgtgagtatggaattctctcttactgatccgaggctggagccacacagatgggaaaagtactgcgttcttc

SEQ ID NO: 20064 - DNA, 80 bp, synthetic construct
  misc_feature 1..80: note = Synthetic: >NC_007359.1-cand-1650-1729
  source 1..80: mol_type = other DNA
ggataggagacatgctcttacggactgaaataggccaagtgtcaaggcccatgtttctttatgtgagaaccaatggaacc

SEQ ID NO: 20065 - DNA, 80 bp, synthetic construct
  misc_feature 1..80: note = Synthetic: >NC_007359.1-cand-1750-1829
  source 1..80: mol_type = other DNA
gggcatggaaatgaggcgatgcccttttcaatcccttcaacagattgagagcatgattgaggccgagtcttctgtcaaag

SEQ ID NO: 20066 - DNA, 80 bp, synthetic construct
  misc_feature 1..80: note = Synthetic: >NC_007359.1-cand-1810-1889
  source 1..80: mol_type = other DNA
ggccgagtcttctgtcaaagaaaaagacatgactaaagaattctttgaaaacaaatcagaaacatggccaattggagaat

SEQ ID NO: 20067 - DNA, 80 bp, synthetic construct
  misc_feature 1..80: note = Synthetic: >NC_007359.1-cand-1900-1979
  source 1..80: mol_type = other DNA
agtggaggaaggctccatcgggaaggtgtgcagaaccttactggctaaatctgttttcaacagtctatatgcatctccac

SEQ ID NO: 20068 - DNA, 80 bp, synthetic construct
  misc_feature 1..80: note = Synthetic: >NC_007359.1-cand-1990-2069
  source 1..80: mol_type = other DNA
gttttcagctgaatcaagaaaattgcttctcattgttcaggcacttagggacaacctggaacctggaaccttcgatcttg

SEQ ID NO: 20069 - DNA, 80 bp, synthetic construct
  misc_feature 1..80: note = Synthetic: >NC_007359.1-cand-2080-2159
  source 1..80: mol_type = other DNA
tgaagcaattgaggagtgcctgattaatgatccctgggttttgcttaatgcatcttggttcaactccttcctcacacatg

SEQ ID NO: 20070 - DNA, 80 bp, synthetic construct
  misc_feature 1..80: note = Synthetic: >NC_007360.1-cand-90-169
  source 1..80: mol_type = other DNA
gagaacgccagaatgctactgagatcagagcatctgttggaagaatggttggtggaattgggaggttttatatacagatg

SEQ ID NO: 20071 - DNA, 80 bp, synthetic construct
  misc_feature 1..80: note = Synthetic: >NC_009825.1-cand-5630-5709
  source 1..80: mol_type = other DNA
gccattgcttccctcatgtcctttactgctgccgttacaagccctctgaccacccaacaaaccctcctttttaacatctt

SEQ ID NO: 20072 - DNA, 80 bp, synthetic construct
  misc_feature 1..80: note = Synthetic: >NC_009825.1-cand-5710-5789
  source 1..80: mol_type = other DNA
ggggggatgggtggcctcacagattcgcgactccgatgcttctaccgcattcgtcgtgagcggcttggcgggggcggcag

SEQ ID NO: 20073 - DNA, 80 bp, synthetic construct
  misc_feature 1..80: note = Synthetic: >NC_009825.1-cand-5790-5869
  source 1..80: mol_type = other DNA
ttggcagtgtgggccttggcaaaattttggtggacattctgcccggttacggcgccggcgtacgtggcgctgtggttacc

SEQ ID NO: 20074 - DNA, 80 bp, synthetic construct
  misc_feature 1..80: note = Synthetic: >NC_009825.1-cand-5870-5949
  source 1..80: mol_type = other DNA
ttcaagatcatgagcggcgagatgccttccacagaggacttggtaaatttgctcccggccattctatcgcccggagcatt

SEQ ID NO: 20075 - DNA, 80 bp, synthetic construct
  misc_feature 1..80: note = Synthetic: >NC_009825.1-cand-5920-5999
  source 1..80: mol_type = other DNA
gctcccggccattctatcgcccggagcattggtggtggaggtggtatgcccggcgattttgcgccgccacgtgggcccgg

SEQ ID NO: 20076 - DNA, 80 bp, synthetic construct
  misc_feature 1..80: note = Synthetic: >NC_009825.1-cand-6030-6109
  source 1..80: mol_type = other DNA
taattgcgttcgcatcgcgaggcaatcacgtgtctcccacgcattacgtccctgagtccgacgcggcacgccgcgtgacc

SEQ ID NO: 20077 - DNA, 80 bp, synthetic construct
  misc_feature 1..80: note = Synthetic: >NC_009825.1-cand-6110-6189
  source 1..80: mol_type = other DNA
accatactatcatccctcactgtgacatcccttctcagacgcctccacaagtggatcaatgaagattgctccaccccatg

SEQ ID NO: 20078 - DNA, 80 bp, synthetic construct
  misc_feature 1..80: note = Synthetic: >NC_009825.1-cand-6190-6269
  source 1..80: mol_type = other DNA
tgccgaatcttggctatgggaggtatgggattgggtcttgcacgtgctgagtgacttcaagacgtgcttaaaagcaaagt

SEQ ID NO: 20079 - DNA, 80 bp, synthetic construct
  misc_feature 1..80: note = Synthetic: >NC_009825.1-cand-6270-6349
  source 1..80: mol_type = other DNA
tcgtgcccttaatgccaggcatccccctcctctcatggccaagaggctataagggagagtggcgcggagatggcgtgatg

SEQ ID NO: 20080 - DNA, 80 bp, synthetic construct
  misc_feature 1..80: note = Synthetic: >NC_009825.1-cand-6350-6429
  source 1..80: mol_type = other DNA
catacgacatgcccctgcggagcagatctggcaggtcacatcaagaacggctcgatgagaatcaccgggccgaaaacctg

SEQ ID NO: 20081 - DNA, 80 bp, synthetic construct
  misc_feature 1..80: note = Synthetic: >NC_009825.1-cand-6430-6509
  source 1..80: mol_type = other DNA
cagcaacacatggcatggaaccttccccatcaatgcctacaccacaggccctggtgtacccatcccggctccgaactaca

SEQ ID NO: 20082 - DNA, 80 bp, synthetic construct
  misc_feature 1..80: note = Synthetic: >NC_009825.1-cand-6500-6579
  source 1..80: mol_type = other DNA
ccgaactacaagttcgcgctttggagggtgtccgccgaggactacgtggaggttcgcagagtgggtgatttccattatgt

SEQ ID NO: 20083 - DNA, 80 bp, synthetic construct
  misc_feature 1..80: note = Synthetic: >NC_009825.1-cand-6590-6669
  source 1..80: mol_type = other DNA
acacaagacaacatcaagttcccctgccaagttccggccccagagctcttcacggaagtggacggcatcaggatacaccg

SEQ ID NO: 20084 - DNA, 80 bp, synthetic construct
  misc_feature 1..80: note = Synthetic: >NC_009825.1-cand-6670-6749
  source 1..80: mol_type = other DNA
ccacgcccctaagtgcaaacccttgctgcgggacgaagtgtcgttctcagtaggactcaattcgttcgtagtgggatcac

SEQ ID NO: 20085 - DNA, 80 bp, synthetic construct
  misc_feature 1..80: note = Synthetic: >NC_009825.1-cand-6750-6829
  source 1..80: mol_type = other DNA
aactcccatgcgagccagagccggacgtggcagtgctaacatccatgctgacagacccatcacacataacggcggaatcg

SEQ ID NO: 20086 - DNA, 80 bp, synthetic construct
  misc_feature 1..80: note = Synthetic: >NC_009825.1-cand-6830-6909
  source 1..80: mol_type = other DNA
gcgcgtcggagattggctcgagggtcacgaccctcgctagctagttcctcggcgagtcagctttcgccccgtcttcttca

SEQ ID NO: 20087 - DNA, 80 bp, synthetic construct
  misc_feature 1..80: note = Synthetic: >NC_009942.1-cand-5050-5129
  source 1..80: mol_type = other DNA
gctttatggcaatggagtcataatgcccaacggctcatacataagcgcgatagtgcagggtgaaaggatggatgagccaa

SEQ ID NO: 20088 - DNA, 80 bp, synthetic construct
  misc_feature 1..80: note = Synthetic: >NC_009942.1-cand-5130-5209
  source 1..80: mol_type = other DNA
tcccagccggattcgaacctgagatgctgaggaaaaaacagatcactgtactggatctccatcccggcgccggtaaaaca

SEQ ID NO: 20089 - DNA, 80 bp, synthetic construct
  misc_feature 1..80: note = Synthetic: >NC_009942.1-cand-5210-5289
  source 1..80: mol_type = other DNA
aggaggattctgccacagatcatcaaagaggccataaacagaagactgagaacagccgtgctagcgccaaccagggttgt

SEQ ID NO: 20090 - DNA, 80 bp, synthetic construct
  misc_feature 1..80: note = Synthetic: >NC_009942.1-cand-5290-5369
  source 1..80: mol_type = other DNA
ggctgctgagatggctgaagcactgagaggactgcccatccggtaccagacatccgcagtgcccagagaacataatggaa

SEQ ID NO: 20091 - DNA, 80 bp, synthetic construct
  misc_feature 1..80: note = Synthetic: >NC_009942.1-cand-5370-5449
  source 1..80: mol_type = other DNA
atgagattgttgatgtcatgtgtcatgctaccctcacccacaggctgatgtctcctcacagggtgccgaactacaacctg

SEQ ID NO: 20092 - DNA, 80 bp, synthetic construct
  misc_feature 1..80: note = Synthetic: >NC_009942.1-cand-5450-5529
  source 1..80: mol_type = other DNA
ttcgtgatggatgaggctcatttcaccgacccagctagcattgcagcaagaggttacatttccacaaaggtcgagctagg

SEQ ID NO: 20093 - DNA, 80 bp, synthetic construct
  misc_feature 1..80: note = Synthetic: >NC_009942.1-cand-5540-5619
  source 1..80: mol_type = other DNA
gcaatattcatgacagccaccccaccaggcacttcagatccattcccagagtccaattcaccaatttccgacttacagac

SEQ ID NO: 20094 - DNA, 80 bp, synthetic construct
  misc_feature 1..80: note = Synthetic: >NC_009942.1-cand-5620-5699
  source 1..80: mol_type = other DNA
tgagatcccggatcgagcttggaactctggatacgaatggatcacagaatacaccgggaagacggtttggtttgtgccta

SEQ ID NO: 20095 - DNA, 80 bp, synthetic construct
  misc_feature 1..80: note = Synthetic: >NC_009942.1-cand-5720-5799
  source 1..80: mol_type = other DNA
attgccctttgcctacaacgtgctggaaagaaagtagtccaattgaacagaaagtcgtacgagacggagtacccaaaatg

SEQ ID NO: 20096 - DNA, 80 bp, synthetic construct
  misc_feature 1..80: note = Synthetic: >NC_009942.1-cand-5770-5849
  source 1..80: mol_type = other DNA
aaagtcgtacgagacggagtacccaaaatgtaagaacgatgattgggactttgttatcacaacagacatatctgaaatgg

SEQ ID NO: 20097 - DNA, 80 bp, synthetic construct
  misc_feature 1..80: note = Synthetic: >NC_009942.1-cand-5860-5939
  source 1..80: mol_type = other DNA
caaggcgagcagggtgattgacagccggaagagtgtgaaaccaaccatcataacagaaggagaagggagagtgatcctgg

SEQ ID NO: 20098 - DNA, 80 bp, synthetic construct
  misc_feature 1..80: note = Synthetic: >NC_009942.1-cand-5940-6019
  source 1..80: mol_type = other DNA
gagaaccatctgcagtgacagcagctagtgccgcccagagacgtggacgtatcggtagaaatccgtcgcaagttggtgat

SEQ ID NO: 20099 - DNA, 80 bp, synthetic construct
  misc_feature 1..80: note = Synthetic: >NC_009942.1-cand-6040-6119
  source 1..80: mol_type = other DNA
cacgaatgaagacgactcgaacttcgcccattggactgaggcacgaatcatgctggacaacatcaacatgccaaacggac

SEQ ID NO: 20100 - DNA, 80 bp, synthetic construct
  misc_feature 1..80: note = Synthetic: >NC_009942.1-cand-6090-6169
  source 1..80: mol_type = other DNA
tgctggacaacatcaacatgccaaacggactgatcgctcaattctaccaaccagagcgtgagaaggtatataccatggat

SEQ ID NO: 20101 - DNA, 80 bp, synthetic construct
  misc_feature 1..80: note = Synthetic: >NC_009942.1-cand-6180-6259
  source 1..80: mol_type = other DNA
ggctcagaggagaagagagaaaaaactttctggaactgttgaggactgcagatctgccagtttggctggcttacaaggtt

SEQ ID NO: 20102 - DNA, 80 bp, synthetic construct
  misc_feature 1..80: note = Synthetic: >NC_009942.1-cand-6270-6349
  source 1..80: mol_type = other DNA
gagtgtcataccacgaccggaggtggtgctttgatggtcctaggacaaacacaattttagaagacaacaacgaagtggaa

SEQ ID NO: 20103 - DNA, 80 bp, synthetic construct
  misc_feature 1..80: note = Synthetic: >NC_014407.1-cand-2530-2609
  source 1..80: mol_type = other DNA
gttattcatagaaccaataccagactctgtactttcttgggtttccctggtattttcctctgtgggatcattaatgagca

SEQ ID NO: 20104 - DNA, 80 bp, synthetic construct
  misc_feature 1..80: note = Synthetic: >NC_014407.1-cand-2610-2689
  source 1..80: mol_type = other DNA
caccctcaaaagggtctttacctgataaaatattctccttcatagtttgaaacattccatatgaaacccactgttcaaat

SEQ ID NO: 20105 - DNA, 80 bp, synthetic construct
  misc_feature 1..80: note = Synthetic: >NC_014407.1-cand-2690-2769
  source 1..80: mol_type = other DNA
gtttgtttccaattaactacctcttcttgtatttcttcaacaaagtcagacactggttcccaccaaatgagagcagctag

SEQ ID NO: 20106 - DNA, 80 bp, synthetic construct
  misc_feature 1..80: note = Synthetic: >NC_014407.1-cand-2770-2849
  source 1..80: mol_type = other DNA
caatgtacaccctttttgcaaaagcctttttttcattaaaatagggtttgcatccaagctttttttaaggcctggtttat

SEQ ID NO: 20107 - DNA, 80 bp, synthetic construct
  misc_feature 1..80: note = Synthetic: >NC_014407.1-cand-2850-2929
  source 1..80: mol_type = other DNA
gcaaaaagtagtagccttttgctactcttgccttcactgttgttggaatagcatattcattacaagttattatacaaggg

SEQ ID NO: 20108 - DNA, 80 bp, synthetic construct
  misc_feature 1..80: note = Synthetic: >NC_014407.1-cand-2930-3009
  source 1..80: mol_type = other DNA
ggaaacagctgagatgttttattaatatgcttcctttccaaattcactggtacacacccatctaaataatccctcatatt

SEQ ID NO: 20109 - DNA, 80 bp, synthetic construct
  misc_feature 1..80: note = Synthetic: >NC_014407.1-cand-2980-3059
  source 1..80: mol_type = other DNA
tacacacccatctaaataatccctcatattatcaagatttgccatcccaacacctgaaggtaaatctgtgttaggcaggg

SEQ ID NO: 20110 - DNA, 80 bp, synthetic construct
  misc_feature 1..80: note = Synthetic: >NC_014407.1-cand-3090-3169
  source 1..80: mol_type = other DNA
tgtacttatcaatagcacatcccagttcaaagtttatcttgtcactgctacaatttacatttaatgccacccctcctagt

SEQ ID NO: 20111 - DNA, 80 bp, synthetic construct
  misc_feature 1..80: note = Synthetic: >NC_014407.1-cand-3160-3239
  source 1..80: mol_type = other DNA
ccctcctagtaaatccagaatggcagctgctaaggttgttttcccactgttgataggccctttaaacaataggtttcttc

SEQ ID NO: 20112 - DNA, 80 bp, synthetic construct
  misc_feature 1..80: note = Synthetic: >NC_014407.1-cand-3250-3329
  source 1..80: mol_type = other DNA
gttttctactaagtaggacagcatctctttaattttaatagtgaactgtggcaataggcagtctaaccaggccactgctc

SEQ ID NO: 20113 - DNA, 80 bp, synthetic construct
  misc_feature 1..80: note = Synthetic: >NC_014407.1-cand-3330-3409
  source 1..80: mol_type = other DNA
ctattaattgagttatttcaacaccccctccaaactgctctgccagcactttgaattgtttcttaaatgacataaccatg

SEQ ID NO: 20114 - DNA, 80 bp, synthetic construct
  misc_feature 1..80: note = Synthetic: >NC_014407.1-cand-3410-3489
  source 1..80: mol_type = other DNA
agatctttcctagtagattccatcataagaacccttctggcagctaaaactctatcagcagcttgctgagcaattccctt

SEQ ID NO: 20115 - DNA, 80 bp, synthetic construct
  misc_feature 1..80: note = Synthetic: >NC_014407.1-cand-3490-3569
  source 1..80: mol_type = other DNA
ttgatttttagcagttttaaacagtttagcattggcccagtgcttctcatggtgttggtgggccttcactgactttaaac

SEQ ID NO: 20116 - DNA, 80 bp, synthetic construct
  misc_feature 1..80: note = Synthetic: >NC_014407.1-cand-3570-3649
  source 1..80: mol_type = other DNA
acttaggacatagtgatggctctgtagcaaattccatataatatcccataataagtaacacatcagttaattccatgtct

SEQ ID NO: 20117 - DNA, 80 bp, synthetic construct
  misc_feature 1..80: note = Synthetic: >NC_014407.1-cand-3650-3729
  source 1..80: mol_type = other DNA
gctgcaaaatctgctacaaaattccagtcacagtcatcttttttagaagcttcttgaaaatcataagagtgaaggcctcc

SEQ ID NO: 20118 - DNA, 80 bp, synthetic construct
  misc_feature 1..80: note = Synthetic: >NC_014407.1-cand-3720-3799
  source 1..80: mol_type = other DNA
gaaggcctccttcctttgactctcttaacacagcaaatttagaatcttgtaaggccttataacattcagcattttttaac

SEQ ID NO: 20119 - DNA, 80 bp, synthetic construct
  misc_feature 1..80: note = Synthetic: >NC_015150.1-cand-4070-4149
  source 1..80: mol_type = other DNA
attactatagatagcatgacttaaaaaagaatacaaacacataggaaagtcctctggagtattaggttcaggcttctttc

SEQ ID NO: 20120 - DNA, 80 bp, synthetic construct
  misc_feature 1..80: note = Synthetic: >NC_015150.1-cand-4160-4239
  source 1..80: mol_type = other DNA
cgtgcaggtaaatgaactctgggatgatccagcttcttcctcaggatcagggtcttcagaggcagaagcagaagagggtg

SEQ ID NO: 20121 - DNA, 80 bp, synthetic construct
  misc_feature 1..80: note = Synthetic: >NC_015150.1-cand-4250-4329
  source 1..80: mol_type = other DNA
aggtccaggattattttcatcatcactagatgatatagtctctgaacaaaataaatcatcatattctttgttaacaaact

SEQ ID NO: 20122 - DNA, 80 bp, synthetic construct
  misc_feature 1..80: note = Synthetic: >NC_015150.1-cand-4320-4399
  source 1..80: mol_type = other DNA
ttaacaaactccctccaccatttaccccatgaccccccttctggatcttcattttttctttcacagtaggaaaatggagt

SEQ ID NO: 20123 - DNA, 80 bp, synthetic construct
  misc_feature 1..80: note = Synthetic: >NC_015150.1-cand-4400-4479
  source 1..80: mol_type = other DNA
ttcagtaaagtatggagaatcactgtagtatccctaaaaaaaaatacttacattagaatccaagctcagtccagaggcgc

SEQ ID NO: 20124 - DNA, 80 bp, synthetic construct
  misc_feature 1..80: note = Synthetic: >NC_015150.1-cand-4470-4549
  source 1..80: mol_type = other DNA
ccagaggcgcagcaaacttaaatccatatttctcattaataaggtccagtagttaaaagatgtaaaatcctcaggaaatc

SEQ ID NO: 20125 - DNA, 80 bp, synthetic construct
  misc_feature 1..80: note = Synthetic: >NC_015150.1-cand-4550-4629
  source 1..80: mol_type = other DNA
caaaccaaagtaagtagcacttgtagcaaaagcattcaccccatactaagcaaggcttttttttatttatttttgtactt

SEQ ID NO: 20126 - DNA, 80 bp, synthetic construct
  misc_feature 1..80: note = Synthetic: >NC_015150.1-cand-4630-4709
  source 1..80: mol_type = other DNA
ttgtgctgctgctttaataaacatacaatgcagcaacaactgggcttattataggtaatgcaatcaggatatccaccaat

SEQ ID NO: 20127 - DNA, 80 bp, synthetic construct
  misc_feature 1..80: note = Synthetic: >NC_015150.1-cand-4710-4789
  source 1..80: mol_type = other DNA
aattctttgattaaatttttctcctagaaaagcacctagtgttctaaaattctcatcccaaaagtaccaagctacctgag

SEQ ID NO: 20128 - DNA, 80 bp, synthetic construct
  misc_feature 1..80: note = Synthetic: >NC_015150.1-cand-4780-4859
  source 1..80: mol_type = other DNA
gctacctgagaagaggaggatccacaattacttcttatttccagcaaggtaacttgcagcttttgaaataattcatttaa

SEQ ID NO: 20129 - DNA, 80 bp, synthetic construct
  misc_feature 1..80: note = Synthetic: >NC_015150.1-cand-4860-4939
  source 1..80: mol_type = other DNA
tctttgcattttctcaggattaccacctttatcagggtggtaaattttggaaactgttttgtaggcctttttcataagag

SEQ ID NO: 20130 - DNA, 80 bp, synthetic construct
  misc_feature 1..80: note = Synthetic: >NC_015150.1-cand-4930-5009
  source 1..80: mol_type = other DNA
ttcataagagataaatttccccatgctgctcttgtaagttgcagcaaatccataagctcatttctctcctccaaagacag

SEQ ID NO: 20131 - DNA, 80 bp, synthetic construct
  misc_feature 1..80: note = Synthetic: >NC_015783.1-cand-70-149
  source 1..80: mol_type = other DNA
tacgaggtctatataagcaacagcggtgacgaatggtagagtttctcttcgcccgtccgcggcgagagcgcgagcgaagc

SEQ ID NO: 20132 - DNA, 80 bp, synthetic construct
  misc_feature 1..80: note = Synthetic: >NC_015783.1-cand-90-169
  source 1..80: mol_type = other DNA
cagcggtgacgaatggtagagtttctcttcgcccgtccgcggcgagagcgcgagcgaagcgagcgatcgagcgtcccatg

SEQ ID NO: 20133 - DNA, 80 bp, synthetic construct
  misc_feature 1..80: note = Synthetic: >NC_015783.1-cand-130-209
  source 1..80: mol_type = other DNA
ggcgagagcgcgagcgaagcgagcgatcgagcgtcccatgggcgggtgccgtaggtgagtttacacaccgaagtcaaggg

SEQ ID NO: 20134 - DNA, 80 bp, synthetic construct
  misc_feature 1..80: note = Synthetic: >NC_015783.1-cand-250-329
  source 1..80: mol_type = other DNA
cttaaaaaattcccccgctctgttctccggcaggacacaaagtcatgccgtggagaccgccggtccataacgtgccaggt

SEQ ID NO: 20135 - DNA, 80 bp, synthetic construct
  misc_feature 1..80: note = Synthetic: >NC_019843.3-cand-1930-2009
  source 1..80: mol_type = other DNA
gccgccattactgcaccttatgtagttctcactggcttaggtgagtcctttaagaaagttgcaaccataccgtataaggt

SEQ ID NO: 20136 - DNA, 80 bp, synthetic construct
  misc_feature 1..80: note = Synthetic: >NC_019843.3-cand-2010-2089
  source 1..80: mol_type = other DNA
ttgcaactctgttaaggatactctggcttattatgctcacagcgtgttgtacagagtttttccttatgacatggattctg

SEQ ID NO: 20137 - DNA, 80 bp, synthetic construct
  misc_feature 1..80: note = Synthetic: >NC_019843.3-cand-2090-2169
  source 1..80: mol_type = other DNA
gtgtgtcatcctttagtgaactactttttgattgcgttgatctttcagtagcttctacctattttttagtccgcatcttg

SEQ ID NO: 20138 - DNA, 80 bp, synthetic construct
  misc_feature 1..80: note = Synthetic: >NC_019843.3-cand-2170-2249
  source 1..80: mol_type = other DNA
caagataagactggcgactttatgtctacaattattacttcctgccaaactgctgttagtaagcttctagatacatgttt

SEQ ID NO: 20139 - DNA, 80 bp, synthetic construct
  misc_feature 1..80: note = Synthetic: >NC_019843.3-cand-2250-2329
  source 1..80: mol_type = other DNA
tgaagctacagaagcaacatttaacttcttgttagatttggcaggattgttcagaatctttctccgcaatgcctatgtgt

SEQ ID NO: 20140 - DNA, 80 bp, synthetic construct
  misc_feature 1..80: note = Synthetic: >NC_019843.3-cand-2330-2409
  source 1..80: mol_type = other DNA
acacttcacaagggtttgtggtggtcaatggcaaagtttctacacttgtcaaacaagtgttagacttgcttaataagggt

SEQ ID NO: 20141 - DNA, 80 bp, synthetic construct
  misc_feature 1..80: note = Synthetic: >NC_019843.3-cand-2410-2489
  source 1..80: mol_type = other DNA
atgcaacttttgcatacaaaggtctcctgggctggttctaaaatcattgctgttatctacagcggcagggagtctctaat

SEQ ID NO: 20142 - DNA, 80 bp, synthetic construct
  misc_feature 1..80: note = Synthetic: >NC_019843.3-cand-2490-2569
  source 1..80: mol_type = other DNA
attcccatcgggaacctattactgtgtcaccactaaggctaagtccgttcaacaagatcttgacgttattttgcctggtg

SEQ ID NO: 20143 - DNA, 80 bp, synthetic construct
  misc_feature 1..80: note = Synthetic: >NC_019843.3-cand-2570-2649
  source 1..80: mol_type = other DNA
agttttccaagaagcagttaggactgctccaacctactgacaattctacaactgttagtgttactgtatccagtaacatg

SEQ ID NO: 20144 - DNA, 80 bp, synthetic construct
  misc_feature 1..80: note = Synthetic: >NC_019843.3-cand-2650-2729
  source 1..80: mol_type = other DNA
gttgaaactgttgtgggtcaacttgagcaaactaatatgcatagtcctgatgttatagtaggtgactatgtcattattag

SEQ ID NO: 20145 - DNA, 80 bp, synthetic construct
  misc_feature 1..80: note = Synthetic: >NC_019843.3-cand-2730-2809
  source 1..80: mol_type = other DNA
tgaaaaattgtttgtgcgtagtaaggaagaagacggatttgccttctaccctgcttgcactaatggtcatgctgtaccga

SEQ ID NO: 20146 - DNA, 80 bp, synthetic construct
  misc_feature 1..80: note = Synthetic: >NC_019843.3-cand-2810-2889
  source 1..80: mol_type = other DNA
ctctctttagacttaagggaggtgcacctgtaaaaaaagtagcctttggcggtgatcaagtacatgaggttgctgctgta

SEQ ID NO: 20147 - DNA, 80 bp, synthetic construct
  misc_feature 1..80: note = Synthetic: >NC_019843.3-cand-2890-2969
  source 1..80: mol_type = other DNA
agaagtgttactgtcgagtacaacattcatgctgtattagacacactacttgcttcttctagtcttagaacctttgttgt

SEQ ID NO: 20148 - DNA, 80 bp, synthetic construct
  misc_feature 1..80: note = Synthetic: >NC_019843.3-cand-2970-3049
  source 1..80: mol_type = other DNA
agataagtctttgtcaattgaggagtttgctgacgtagtaaaggaacaagtctcagacttgcttgttaaattactgcgtg

SEQ ID NO: 20149 - DNA, 80 bp, synthetic construct
  misc_feature 1..80: note = Synthetic: >NC_019843.3-cand-3050-3129
  source 1..80: mol_type = other DNA
gaatgccgattccagattttgatttagacgattttattgacgcaccatgctattgctttaacgctgagggtgatgcatcc

SEQ ID NO: 20150 - DNA, 80 bp, synthetic construct
  misc_feature 1..80: note = Synthetic: >NC_019843.3-cand-3130-3209
  source 1..80: mol_type = other DNA
tggtcttctactatgatcttctctcttcaccccgtcgagtgtgacgaggagtgttctgaagtagaggcttcagatttaga

SEQ ID NO: 20151 - DNA, 80 bp, synthetic construct
  misc_feature 1..80: note = Synthetic: >NC_030791.1-cand-4100-4179
  source 1..80: mol_type = other DNA
ctcgtgcttaatccatcagtcgcggccacccttgggtttggtgcctacatgtccaaggcttatggaattgatccaagtgt

SEQ ID NO: 20152 - DNA, 80 bp, synthetic construct
  misc_feature 1..80: note = Synthetic: >NC_030791.1-cand-4260-4339
  source 1..80: mol_type = other DNA
gttcaggtggtgcctatgatataatcatatgtgatgaatgccatgccatcgatgctaccaccgtggtcggcataggcacc

SEQ ID NO: 20153 - DNA, 80 bp, synthetic construct
  misc_feature 1..80: note = Synthetic: >NC_030791.1-cand-4310-4389
  source 1..80: mol_type = other DNA
gatgctaccaccgtggtcggcataggcaccgtgttggaccaggcagagactagtggtgtccgacttgtggtgctagctac

SEQ ID NO: 20154 - DNA, 80 bp, synthetic construct
  misc_feature 1..80: note = Synthetic: >NC_030791.1-cand-4380-4459
  source 1..80: mol_type = other DNA
tgctagctacggccaccccccccggaagcgttacggtgccccaccccaacatcgaggaggtcgcccttggcaacgatggg

SEQ ID NO: 20155 - DNA, 80 bp, synthetic construct
  misc_feature 1..80: note = Synthetic: >NC_030791.1-cand-4470-4549
  source 1..80: mol_type = other DNA
tctatgggaaagccatccccctgcaacacatcaaggggggaaggcatctcattttctgtcattccaaaaagaaatgtgat

SEQ ID NO: 20156 - DNA, 80 bp, synthetic construct
  misc_feature 1..80: note = Synthetic: >NC_030791.1-cand-4610-4689
  source 1..80: mol_type = other DNA
gatgtttcggtgatcccaacgtctggcgatgtagtcgtggtggctactgatgccttgatgacgggctttaccggagactt

SEQ ID NO: 20157 - DNA, 80 bp, synthetic construct
  misc_feature 1..80: note = Synthetic: >NC_030791.1-cand-4630-4709
  source 1..80: mol_type = other DNA
gtctggcgatgtagtcgtggtggctactgatgccttgatgacgggctttaccggagacttcgactccgtcatagactgca

SEQ ID NO: 20158 - DNA, 80 bp, synthetic construct
  misc_feature 1..80: note = Synthetic: >NC_030791.1-cand-4710-4789
  source 1..80: mol_type = other DNA
acgtggcggttacccagactgtagacttctccttggaccccaccttcactattgagaccaccacagtcccgcaagattct

SEQ ID NO: 20159 - DNA, 80 bp, synthetic construct
  misc_feature 1..80: note = Synthetic: >NC_030791.1-cand-4830-4909
  source 1..80: mol_type = other DNA
ggcttggcatctacagatacgtgtccagtggcgagcggccatccggtatgttcgacaccagcgtgctctgtgagtgctat

SEQ ID NO: 20160 - DNA, 80 bp, synthetic construct
  misc_feature 1..80: note = Synthetic: >NC_030791.1-cand-4960-5039
  source 1..80: mol_type = other DNA
cctcagagcctacctcaattgccctggtcttccagtgtgccaagaccatctggagttctgggagggcgtctttacgggac

SEQ ID NO: 20161 - DNA, 80 bp, synthetic construct
  misc_feature 1..80: note = Synthetic: >NC_030791.1-cand-5040-5119
  source 1..80: mol_type = other DNA
ttactcatattgatgcacacttcctgtcccagaccaaacaagagggccaaaattatgcgtacctgactgcataccaagct

SEQ ID NO: 20162 - DNA, 80 bp, synthetic construct
  misc_feature 1..80: note = Synthetic: >NC_030791.1-cand-5120-5199
  source 1..80: mol_type = other DNA
acagtgtgcgcccgggcgaaagcccccccgccctcctgggacgtccagtggaagtgtctccaaagactaaagccactgtt

SEQ ID NO: 20163 - DNA, 80 bp, synthetic construct
  misc_feature 1..80: note = Synthetic: >NC_030791.1-cand-5200-5279
  source 1..80: mol_type = other DNA
agtagggcccacgcccttgctatacaggctaggcagtgttaccaatgaagtcacattcactcatcccatcaccaaataca

SEQ ID NO: 20164 - DNA, 80 bp, synthetic construct
  misc_feature 1..80: note = Synthetic: >NC_030791.1-cand-5280-5359
  source 1..80: mol_type = other DNA
ttgccacgtgcatggctgccgacttggaggtcactacgagcacctgggtgatcgtaggtggcgtcctcgccgccgtggcc

SEQ ID NO: 20165 - DNA, 80 bp, synthetic construct
  misc_feature 1..80: note = Synthetic: >NC_030791.1-cand-5360-5439
  source 1..80: mol_type = other DNA
gcatattgcatgtctactggcagtgttgttgtggttggccgtgtggtccttggatccaacgtggtgacggcccccgacag

SEQ ID NO: 20166 - DNA, 80 bp, synthetic construct
  misc_feature 1..80: note = Synthetic: >NC_040876.1-cand-2810-2889
  source 1..80: mol_type = other DNA
ggaggacttctgtgaagaggaggaggccaagataagacaaagaatcttccgccccacaaagaaacagaggaaggaagaaa

SEQ ID NO: 20167 - DNA, 80 bp, synthetic construct
  misc_feature 1..80: note = Synthetic: >NC_040876.1-cand-2910-2989
  source 1..80: mol_type = other DNA
actggctcagacatcaggaagaggagaccagacgattttcaaccgaagggcaacctgtgggcagacgacaccaggagtgt

SEQ ID NO: 20168 - DNA, 80 bp, synthetic construct
  misc_feature 1..80: note = Synthetic: >NC_040876.1-cand-2980-3059
  source 1..80: mol_type = other DNA
ccaggagtgtggactacaacgagagacttgatttcgaggctcccccgagtgtctggtcaagaatagtcccattgggcact

SEQ ID NO: 20169 - DNA, 80 bp, synthetic construct
  misc_feature 1..80: note = Synthetic: >NC_040876.1-cand-3120-3199
  source 1..80: mol_type = other DNA
gggattaaggaactttttggagtcgaaatcaaacagattcaaattcataagtctggagagttctgcaggttcaggttccc

SEQ ID NO: 20170 - DNA, 80 bp, synthetic construct
  misc_feature 1..80: note = Synthetic: >NC_040876.1-cand-3150-3229
  source 1..80: mol_type = other DNA
aaacagattcaaattcataagtctggagagttctgcaggttcaggttcccgagaccaatcagaccagatgtcacagggct

SEQ ID NO: 20171 - DNA, 80 bp, synthetic construct
  misc_feature 1..80: note = Synthetic: >NC_040876.1-cand-3230-3309
  source 1..80: mol_type = other DNA
cgtgttggaggaaggtgctccagaaggcactgtctgctccatactcgtgaagagacctacaggtgagatgatccctctgg

SEQ ID NO: 20172 - DNA, 80 bp, synthetic construct
  misc_feature 1..80: note = Synthetic: >NC_040876.1-cand-3290-3369
  source 1..80: mol_type = other DNA
aggtgagatgatccctctggcagtgaggatgggcacgcatgcatccatgaaaatacagggtaggaccgtcggtggccaga

SEQ ID NO: 20173 - DNA, 80 bp, synthetic construct
  misc_feature 1..80: note = Synthetic: >NC_040876.1-cand-3390-3469
  source 1..80: mol_type = other DNA
gcaaatgcaaagaacatggaccttggcaccggtcctggtgactgcggttgcccttacatctacaaacgtggcaacgatat

SEQ ID NO: 20174 - DNA, 80 bp, synthetic construct
  misc_feature 1..80: note = Synthetic: >NC_040876.1-cand-3420-3499
  source 1..80: mol_type = other DNA
ggtcctggtgactgcggttgcccttacatctacaaacgtggcaacgatatagttgtcgcgggtgtccacaccgcagcagc

SEQ ID NO: 20175 - DNA, 80 bp, synthetic construct
  misc_feature 1..80: note = Synthetic: >NC_040876.1-cand-3550-3629
  source 1..80: mol_type = other DNA
cagtccttgagggaaatgagaaccttggcacttactgcggtgccccaattttgggtccaggcaaggcgcccaaacttagc

SEQ ID NO: 20176 - DNA, 80 bp, synthetic construct
  misc_feature 1..80: note = Synthetic: >NC_040876.1-cand-3630-3709
  source 1..80: mol_type = other DNA
acgaagaccaagttctggcgttcatcaccagacgctctgccgccaggcacttatgagcctgcctacttgggaggcaagga

SEQ ID NO: 20177 - DNA, 80 bp, synthetic construct
  misc_feature 1..80: note = Synthetic: >NC_040876.1-cand-3700-3779
  source 1..80: mol_type = other DNA
gaggcaaggaccccagagtggaaaaaggaccatccctgcagcaagtcatgagggaccagctaaagcccttcacagaaccc

SEQ ID NO: 20178 - DNA, 80 bp, synthetic construct
  misc_feature 1..80: note = Synthetic: >NC_040876.1-cand-3790-3869
  source 1..80: mol_type = other DNA
cacctagacctgcagtcttagaagaagccaaaaagacagtgatgaatgttctagaacaaaccattgaccctgctaagcca

SEQ ID NO: 20179 - DNA, 80 bp, synthetic construct
  misc_feature 1..80: note = Synthetic: >NC_040876.1-cand-3870-3949
  source 1..80: mol_type = other DNA
tggacctattcccaagcatgtgcctcactggacaagaccacttccagcggtagcccccatcatgtcaagaaaaatgacca

SEQ ID NO: 20180 - DNA, 80 bp, synthetic construct
  misc_feature 1..80: note = Synthetic: >NC_040876.1-cand-3960-4039
  source 1..80: mol_type = other DNA
gaatccttcactggcccccttgcagaccaagcatccaaagccaacctcatgtacgaacaggccaaacacgtgcagcccgt

SEQ ID NO: 20181 - DNA, 80 bp, synthetic construct
  misc_feature 1..80: note = Synthetic: >NC_040876.1-cand-4030-4109
  source 1..80: mol_type = other DNA
tgcagcccgtgtacacggccgcactcaaagatgagttagttaaaactgacaagatctacaaaaagataaagaaaaggctc

SEQ ID NO: 20182 - DNA, 80 bp, synthetic construct
  misc_feature 1..80: note = Synthetic: >NC_001611.1-cand-80220-80299
  source 1..80: mol_type = other DNA
aatgaattactaaaatatacaaacacgtcactgtctggcaataaatgatatcttagaatattgtaacaatttattttgta

SEQ ID NO: 20183 - DNA, 80 bp, synthetic construct
  misc_feature 1..80: note = Synthetic: >EVD70-cand-6980-7059
  source 1..80: mol_type = other DNA
aatgaccccagcagacaagagtagtggttttactgagactacttgggagaatgttacctttttgaagaggtatttcagag

SEQ ID NO: 20184 - DNA, 80 bp, synthetic construct
  misc_feature 1..80: note = Synthetic: >AdVB3-cand-15600-15679
  source 1..80: mol_type = other DNA
gggactgtatgcgcccaccaagatgtatggaggcgcccgcatacgctctacccagcaccctgtgcgcgttcgcggtcatt

SEQ ID NO: 20185 - DNA, 80 bp, synthetic construct
  misc_feature 1..80: note = Synthetic: >NC_026431.1-cand-640-719
  source 1..80: mol_type = other DNA
aatgagaactattgggactcatcctagctccagtgctggtctgaaagatgaccttcttgaaaatttgcaggcctaccaga

SEQ ID NO: 20186 - DNA, 80 bp, synthetic construct
  misc_feature 1..80: note = Synthetic: >NC_001611.1-cand-49710-49789
  source 1..80: mol_type = other DNA
tcaaccgttagatctattttaaagttaatcatataggcattgatttttaaaaggtatgtagccttgattacattctcatt

SEQ ID NO: 20187 - DNA, 80 bp, synthetic construct
  misc_feature 1..80: note = Synthetic: >NC_003310.1-cand-48170-48249
  source 1..80: mol_type = other DNA
taaaatgtaggagagttactaggccccactgattcaatacgaaaagaccaatctctcctagttatttggcagtactcatt

SEQ ID NO: 20188 - DNA, 80 bp, synthetic construct
  misc_feature 1..80: note = Synthetic: >EVA89-cand-7330-7409
  source 1..80: mol_type = other DNA
aatgataatttgaattaatgttaattggcaaaacctttggtgcaccctgggcttgataaagtcaccaaaggttaattacc

SEQ ID NO: 20189 - DNA, 80 bp, synthetic construct
  misc_feature 1..80: note = Synthetic: >NC_001611.1-cand-78690-78769
  source 1..80: mol_type = other DNA
cagacgtctgataatccagtctttaatgaattaacgagatatatgcgaattaaaaatacggttaacgattggaaatcatt

SEQ ID NO: 20190 - DNA, 80 bp, synthetic construct
  misc_feature 1..80: note = Synthetic: >AdVB3-cand-26210-26289
  source 1..80: mol_type = other DNA
atgcgggggcaacatatccttcacccggcgatacctgcttttccaccacggtgtaaacttcccccgcaatatcttgcatt

SEQ ID NO: 20191 - DNA, 80 bp, synthetic construct
  misc_feature 1..80: note = Synthetic: >NC_003310.1-cand-107200-107279
  source 1..80: mol_type = other DNA
aatgcatactgtctaatcctaagaaaactcttgctacaaaatgttgataatccttgaggcgtactacgtctgaccccatc

SEQ ID NO: 20192 - DNA, 80 bp, synthetic construct
  misc_feature 1..80: note = Synthetic: >NC_001611.1-cand-168630-168709
  source 1..80: mol_type = other DNA
aatgcatttttatatacattactgaattattattattaattatatcgtatttgtgctatagaatggatgaagatacgaaa

SEQ ID NO: 20193 - DNA, 80 bp, synthetic construct
  misc_feature 1..80: note = Synthetic: >NC_003310.1-cand-142420-142499
  source 1..80: mol_type = other DNA
aatgccttccaaagtttaagaattctattagagtattacattttgatagtttatcacctacatcatcaaaaataagtaaa

SEQ ID NO: 20194 - DNA, 80 bp, synthetic construct
  misc_feature 1..80: note = Synthetic: >NC_003310.1-cand-32280-32359
  source 1..80: mol_type = other DNA
ccgctagcatacagtctggggctattcatcggaggaattggaatccaattgtttgatatataatttaccgctatagcatt

SEQ ID NO: 20195 - DNA, 80 bp, synthetic construct
  misc_feature 1..80: note = Synthetic: >NC_003310.1-cand-115740-115819
  source 1..80: mol_type = other DNA
cgctaagaccagtctcgcgttcaagattatctttactaatggtgacgaactcatcgtatagaactctaagtttgtccatt

SEQ ID NO: 20196 - DNA, 80 bp, synthetic construct
  misc_feature 1..80: note = Synthetic: >NC_003310.1-cand-91050-91129
  source 1..80: mol_type = other DNA
aatggataatccgtctattttataaagaaatacatatcgcatattatacttttttttggaaattggaataccgatgtgtc

SEQ ID NO: 20197 - DNA, 80 bp, synthetic construct
  misc_feature 1..80: note = Synthetic: >NC_001430.1-cand-1880-1959
  source 1..80: mol_type = other DNA
agagtccaaataagtgcacaatcagacatggaccaattgcttttcaacatcccattggacatacagttggaaggcccatt

SEQ ID NO: 20198 - DNA, 80 bp, synthetic construct
  misc_feature 1..80: note = Synthetic: >AF028027.1-cand-1560-1639
  source 1..80: mol_type = other DNA
ggtttcacactcacatgtgttgtcggtctcacagaatgcccgaatttcattacgtcagttaaggcatgtgacttagccat

SEQ ID NO: 20199 - DNA, 80 bp, synthetic construct
  misc_feature 1..80: note = Synthetic: >AF307326.1-cand-0-79
  source 1..80: mol_type = other DNA
gagtcacataaacagagttgtgcaaacgggcaatgtccttattgcatgaccatgactgaatcaactgcaagtgctcttca

SEQ ID NO: 20200 - DNA, 80 bp, synthetic construct
  misc_feature 1..80: note = Synthetic: >AF307326.1-cand-80-159
  source 1..80: mol_type = other DNA
agcccattatgctgtttgtaaattgacaggaagattccaagaagcactgaagaaatccttaaagagacctgaagtacgaa

SEQ ID NO: 20201 - DNA, 80 bp, synthetic construct
  misc_feature 1..80: note = Synthetic: >AF307326.1-cand-160-239
  source 1..80: mol_type = other DNA
agggatgttatcgaacactgggagttttccgttacaagagcaggtgttatgttggcttagtatggtgtctgttgcttaca

SEQ ID NO: 20202 - DNA, 80 bp, synthetic construct
  misc_feature 1..80: note = Synthetic: >AF307326.1-cand-240-319
  source 1..80: mol_type = other DNA
ttagagttgattgtgtgggcagttagtgctgaaaccccattacttgaagcagggtggtcagatacagcacacggaattgg

SEQ ID NO: 20203 - DNA, 80 bp, synthetic construct
  misc_feature 1..80: note = Synthetic: >AF307326.1-cand-320-399
  source 1..80: mol_type = other DNA
agagatcccaatgaaaacagatttggagctggatttttctctaccatcgtcatcatcctacagttacaggagaaaattga

SEQ ID NO: 20204 - DNA, 80 bp, synthetic construct
  misc_feature 1..80: note = Synthetic: >AF307326.1-cand-400-479
  source 1..80: mol_type = other DNA
ccaatcctgccaataaagaagaatcagtcccattccactttcaaatggaaaagcaggtaattcatgcagaaattcaaccc

SEQ ID NO: 20205 - DNA, 80 bp, synthetic construct
  misc_feature 1..80: note = Synthetic: >AF307326.1-cand-450-529
  source 1..80: mol_type = other DNA
aagcaggtaattcatgcagaaattcaacccttaggccattggatggacgcaacattcaatatcaagactgcattccattg

SEQ ID NO: 20206 - DNA, 80 bp, synthetic construct
  misc_feature 1..80: note = Synthetic: >AF307326.1-cand-560-639
  source 1..80: mol_type = other DNA
gtggcaaactgcaaaatgtttttttgaaaaggattatcaatatgaaacaggttggggctgcaacccaggggattgtccag

SEQ ID NO: 20207 - DNA, 80 bp, synthetic construct
  misc_feature 1..80: note = Synthetic: >AF307326.1-cand-640-719
  source 1..80: mol_type = other DNA
gggtcgggacagggtgtactgcgtgtggtgtatacctggacaagttaaaatcagttggtaaagcatataaaatcatttct

SEQ ID NO: 20208 - DNA, 80 bp, synthetic construct
  misc_feature 1..80: note = Synthetic: >AF307326.1-cand-720-799
  source 1..80: mol_type = other DNA
ttaaaatacaccagaaaagtttgtttacagctgggtactgaacaaacatgcaaacatattgatgcaaatgactgtctggt

SEQ ID NO: 20209 - DNA, 80 bp, synthetic construct
  misc_feature 1..80: note = Synthetic: >AF307326.1-cand-800-879
  source 1..80: mol_type = other DNA
gacaccatcagtcaaagtgtgtattattggaactatctctaaacttcaaccatctgatacattactttttctgggtccat

SEQ ID NO: 20210 - DNA, 80 bp, synthetic construct
  misc_feature 1..80: note = Synthetic: >AF307326.1-cand-880-959
  source 1..80: mol_type = other DNA
tagaacaaggagggataatcttaaaacaatggtgcacaacttcatgtgcctttggtgacccaggagatataatgtctacc

SEQ ID NO: 20211 - DNA, 80 bp, synthetic construct
  misc_feature 1..80: note = Synthetic: >AF307326.1-cand-960-1039
  source 1..80: mol_type = other DNA
acgagcggaatgaggtgtcctgaacatactggttcttttagaaaaatatgtgggttcgcaacaacaccagtttgtgaata

SEQ ID NO: 20212 - DNA, 80 bp, synthetic construct
  misc_feature 1..80: note = Synthetic: >AF307326.1-cand-1040-1119
  source 1..80: mol_type = other DNA
tcaaggaaacactatttctgggtataaaagaatgatggcaaccaaggactcatttcaatcattcaaccttagtgaacctc

SEQ ID NO: 20213 - DNA, 80 bp, synthetic construct
  misc_feature 1..80: note = Synthetic: >AF307326.1-cand-1110-1189
  source 1..80: mol_type = other DNA
agtgaacctcatatcacaaccaataagcttgaatggatcgatccagatggcaatacacgtgatcatgtaaacctcgtttt

SEQ ID NO: 20214 - DNA, 80 bp, synthetic construct
  misc_feature 1..80: note = Synthetic: >AdVB7-cand-1540-1619
  source 1..80: mol_type = other DNA
acttggatatataagtaggagcagatctgtgtggttagctcacagcaacctgctgccatccatggaggtttgggctatct

SEQ ID NO: 20215 - DNA, 80 bp, synthetic construct
  misc_feature 1..80: note = Synthetic: >AdVB7-cand-2420-2499
  source 1..80: mol_type = other DNA
ctaagatatctctgaggcctgataaacaatatagaattactaagaagattaatattagaaatgcatgctacatatcaggg

SEQ ID NO: 20216 - DNA, 80 bp, synthetic construct
  misc_feature 1..80: note = Synthetic: >AdVB7-cand-2630-2709
  source 1..80: mol_type = other DNA
ataatggcattgtatttatggctaacactaagctgattctacatggttgtagcttttttgggtttaataatacgtgtgta

SEQ ID NO: 20217 - DNA, 80 bp, synthetic construct
  misc_feature 1..80: note = Synthetic: >AdVB7-cand-2640-2719
  source 1..80: mol_type = other DNA
tgtatttatggctaacactaagctgattctacatggttgtagcttttttgggtttaataatacgtgtgtagaagcttggg

SEQ ID NO: 20218 - DNA, 80 bp, synthetic construct
  misc_feature 1..80: note = Synthetic: >AdVB7-cand-2850-2929
  source 1..80: mol_type = other DNA
agcaaggatccgccactgcgcagctacagaaactggctgcttcattctaataaagggaaatgccagtgtgaagcataata

SEQ ID NO: 20219 - DNA, 80 bp, synthetic construct
  misc_feature 1..80: note = Synthetic: >AdVB7-cand-3310-3389
  source 1..80: mol_type = other DNA
gacctgagacccgatcatttggtgcttgcctgcactggagcggagttcggttccagtggtgaagaaactgactaaagtga

SEQ ID NO: 20220 - DNA, 80 bp, synthetic construct
  misc_feature 1..80: note = Synthetic: >AdVB7-cand-3420-3499
  source 1..80: mol_type = other DNA
caggttggtaaggtggacagattgggtaaattttgttaatttctgtcttgcagctgccatgagtggaagcgcttcttttg

SEQ ID NO: 20221 - DNA, 80 bp, synthetic construct
  misc_feature 1..80: note = Synthetic: >AdVB7-cand-3910-3989
  source 1..80: mol_type = other DNA
aaataaagaaatacttgtcataaaaacaaatgaatgtttatttgatttttcgcgcgcggtatgccctggaccatcggtct

SEQ ID NO: 20222 - DNA, 80 bp, synthetic construct
  misc_feature 1..80: note = Synthetic: >AdVB7-cand-4120-4199
  source 1..80: mol_type = other DNA
tgttataaatcacccagtcatagcaaggtcggagtgcatggtgttgcacaatatcttttaggagcagactaattgcaacg

SEQ ID NO: 20223 - DNA, 80 bp, synthetic construct
  misc_feature 1..80: note = Synthetic: >AdVB7-cand-4260-4339
  source 1..80: mol_type = other DNA
gaaattatatgcattttggactggatcttgaggttggcaatgttgccgcctagatcccgtctcgggttcatattgtgcag

SEQ ID NO: 20224 - DNA, 80 bp, synthetic construct
  misc_feature 1..80: note = Synthetic: >AdVB7-cand-4510-4589
  source 1..80: mol_type = other DNA
ggtctgaaacatcatagttatgctcctgagtcaggtcatcataagccattttaataaactttgggcggagggtgccagat

SEQ ID NO: 20225 - DNA, 80 bp, synthetic construct
  misc_feature 1..80: note = Synthetic: >AdVB7-cand-4720-4799
  source 1..80: mol_type = other DNA
gggtgattaactgggatgaaagcaaattcctaagcagctgagacttgccgcacccagtgggaccgtaaatgaccccaatt

SEQ ID NO: 20226 - DNA, 80 bp, synthetic construct
  misc_feature 1..80: note = Synthetic: >AdVB7-cand-4770-4849
  source 1..80: mol_type = other DNA
cacccagtgggaccgtaaatgaccccaattacgggttgcagatggtagtttagggagcgacagctgccgtcctcccggag

SEQ ID NO: 20227 - DNA, 80 bp, synthetic construct
  misc_feature 1..80: note = Synthetic: >AdVB7-cand-4950-5029
  source 1..80: mol_type = other DNA
gaggagaagtttttcagcggcttcagcccgtcagccatgggcattttggaaagagtctgttgcaagagctcgagccggtc

SEQ ID NO: 20228 - DNA, 80 bp, synthetic construct
  misc_feature 1..80: note = Synthetic: >AiVC-cand-790-869
  source 1..80: mol_type = other DNA
attgtcaacatccctcggaggacggtgacaccctcatgtcgctggcctgtgagtacgatgaagactgccccttccaccaa

SEQ ID NO: 20229 - DNA, 80 bp, synthetic construct
  misc_feature 1..80: note = Synthetic: >AiVC-cand-870-949
  source 1..80: mol_type = other DNA
tctatcatccacccttctaagcctgtccagaaagatcccgaggacatcctcgaggattccgaatggccagacaacatcct

SEQ ID NO: 20230 - DNA, 80 bp, synthetic construct
  misc_feature 1..80: note = Synthetic: >AiVC-cand-950-1029
  source 1..80: mol_type = other DNA
ccaccctgaacccccttcttttaccactgatgctgagcaaaattggcttgaccgcttggcatctgcttccttgcctggac

SEQ ID NO: 20231 - DNA, 80 bp, synthetic construct
  misc_feature 1..80: note = Synthetic: >AiVC-cand-1030-1109
  source 1..80: mol_type = other DNA
caacccaggtgaggcctctttccaaattctttgctgaaaacccccctcctgcatctcttgctggaaaaatcaatctttct

SEQ ID NO: 20232 - DNA, 80 bp, synthetic construct
  misc_feature 1..80: note = Synthetic: >AiVC-cand-1100-1179
  source 1..80: mol_type = other DNA
caatctttctgacttttctgacctcaccctctccactccttgccagatcgtgcgccagggaaactccaccactaacatct

SEQ ID NO: 20233 - DNA, 80 bp, synthetic construct
  misc_feature 1..80: note = Synthetic: >AiVC-cand-1180-1259
  source 1..80: mol_type = other DNA
acggaagtaataacaatgttactactgacgtgggtgcaaatggttggactcccacggtgaacactggtcttggagatggt

SEQ ID NO: 20234 - DNA, 80 bp, synthetic construct
  misc_feature 1..80: note = Synthetic: >AiVC-cand-1260-1339
  source 1..80: mol_type = other DNA
cctgtttcctcttctgctgatgaccttgctggtcgctctggtggatcgttccaccgctagcaaggacacatccacctcct

SEQ ID NO: 20235 - DNA, 80 bp, synthetic construct
  misc_feature 1..80: note = Synthetic: >AiVC-cand-1340-1419
  source 1..80: mol_type = other DNA
ccaaggttaaagtccacaactttaaccactggtgggaacctgctgctgccaaagccctcagccgtggagttgacaaagca

SEQ ID NO: 20236 - DNA, 80 bp, synthetic construct
  misc_feature 1..80: note = Synthetic: >AiVC-cand-1420-1499
  source 1..80: mol_type = other DNA
ctcgacggcattgagggtgctggtaaacttgcctcttctgccatcaagagcaagctctcaggtgctcgccctggtccctc

SEQ ID NO: 20237 - DNA, 80 bp, synthetic construct
  misc_feature 1..80: note = Synthetic: >AiVC-cand-1500-1579
  source 1..80: mol_type = other DNA
ccccaacctcatagctctaaacccttctgccacccaatctggtaatgctatgatcacaacgggctccaccgctcctgtgg

SEQ ID NO: 20238 - DNA, 80 bp, synthetic construct
  misc_feature 1..80: note = Synthetic: >AiVC-cand-1580-1659
  source 1..80: mol_type = other DNA
tctgtgcttaccctcccaccccttctgtccctcttcctaatccagatgctccctctgtacctggcccgtctggtgaccgt

SEQ ID NO: 20239 - DNA, 80 bp, synthetic construct
  misc_feature 1..80: note = Synthetic: >AiVC-cand-1660-1739
  source 1..80: mol_type = other DNA
acttggttgctggacactctcgaatggaccaccgagaatccacaactgtggaacttggctggtccaaacgggatgcaata

SEQ ID NO: 20240 - DNA, 80 bp, synthetic construct
  misc_feature 1..80: note = Synthetic: >AiVC-cand-1710-1789
  source 1..80: mol_type = other DNA
gaacttggctggtccaaacgggatgcaatattctgctctccagaacctcacattccctgtttctacttctgccaactggg

SEQ ID NO: 20241 - DNA, 80 bp, synthetic construct
  misc_feature 1..80: note = Synthetic: >AiVC-cand-1820-1899
  source 1..80: mol_type = other DNA
accctcttcctttctcctttgttcacgcctatccagactgcccttggaccgccatgcatgatacccactctatgtggaat

SEQ ID NO: 20242 - DNA, 80 bp, synthetic construct
  misc_feature 1..80: note = Synthetic: >AiVC-cand-1900-1979
  source 1..80: mol_type = other DNA
tgtggatggcgagtccaagtggtggtcaatggttctcaattccatgctgggtgtttggcgatggtcatggtccccgagta

SEQ ID NO: 20243 - DNA, 80 bp, synthetic construct
  misc_feature 1..80: note = Synthetic: >AiVC-cand-1990-2069
  source 1..80: mol_type = other DNA
gagctcgcccagggccgactaaatgccatcttcacttttccttatgccctcctcaacctctaccagggtaacactgcctc

SEQ ID NO: 20244 - DNA, 80 bp, synthetic construct
  misc_feature 1..80: note = Synthetic: >EVA71-cand-1430-1509
  source 1..80: mol_type = other DNA
cgagttgcaacacccgtacgtgcttgatgctggcatcccaatatcacaattaacagtgtgcccacaccagtggattaatt

SEQ ID NO: 20245 - DNA, 80 bp, synthetic construct
  misc_feature 1..80: note = Synthetic: >EVA71-cand-1510-1589
  source 1..80: mol_type = other DNA
tgaggaccaacaattgtgccacaataatagtgccatacattaacgcactgccttttgattctgccttgaaccattgcaac

SEQ ID NO: 20246 - DNA, 80 bp, synthetic construct
  misc_feature 1..80: note = Synthetic: >EVA71-cand-1590-1669
  source 1..80: mol_type = other DNA
tttggcctgctagttgtgcctattagcccactagactacgaccaaggagcgacgccagtaatccctataactatcacatt

SEQ ID NO: 20247 - DNA, 80 bp, synthetic construct
  misc_feature 1..80: note = Synthetic: >EVA71-cand-1670-1749
  source 1..80: mol_type = other DNA
ggccccaatgtgttctgaattcgcaggtcttaggcaggcagtcacgcaagggttccccaccgagctaaaacctggcacaa

SEQ ID NO: 20248 - DNA, 80 bp, synthetic construct
  misc_feature 1..80: note = Synthetic: >EVA71-cand-1750-1829
  source 1..80: mol_type = other DNA
atcaatttttaaccaccgatgatggcgtctcagcacccattctaccaaacttccaccccaccccgtgtatccacatacct

SEQ ID NO: 20249 - DNA, 80 bp, synthetic construct
  misc_feature 1..80: note = Synthetic: >EVA71-cand-1830-1909
  source 1..80: mol_type = other DNA
ggtgaagttaggaacttgctagagttatgccaggtggagaccattctggaggttaacaatgtgcccacgaatgccactag

SEQ ID NO: 20250 - DNA, 80 bp, synthetic construct
  misc_feature 1..80: note = Synthetic: >EVA71-cand-1910-1989
  source 1..80: mol_type = other DNA
cttgatggagagactgcgcttcccggtctcagcacaagcagggaaaggtgagctgtgtgcggtgtttagagccgaccctg

SEQ ID NO: 20251 - DNA, 80 bp, synthetic construct
  misc_feature 1..80: note = Synthetic: >EVA71-cand-1990-2069
  source 1..80: mol_type = other DNA
ggcgaaatggaccatggcaatccaccttgctgggtcagttgtgcgggtactacacccaatggtcaggatcattggaagtc

SEQ ID NO: 20252 - DNA, 80 bp, synthetic construct
  misc_feature 1..80: note = Synthetic: >EVA71-cand-2070-2149
  source 1..80: mol_type = other DNA
accttcatgtttactggatccttcatggctaccggcaagatgctcatagcctatacaccgccaggaggtcctttacccaa

SEQ ID NO: 20253 - DNA, 80 bp, synthetic construct
  misc_feature 1..80: note = Synthetic: >EVA71-cand-2160-2239
  source 1..80: mol_type = other DNA
accgccatgttgggcacgcacgtcatctgggattttgggctgcaatcgtctgttacccttgtaataccatggatcagcaa

SEQ ID NO: 20254 - DNA, 80 bp, synthetic construct
  misc_feature 1..80: note = Synthetic: >EVA71-cand-2240-2319
  source 1..80: mol_type = other DNA
cactcactacagagcgcatgcccgagatggagtgtttgactactacaccacagggttagtcagtatatggtatcagacaa

SEQ ID NO: 20255 - DNA, 80 bp, synthetic construct
  misc_feature 1..80: note = Synthetic: >EVA71-cand-2320-2399
  source 1..80: mol_type = other DNA
attacgtggttccaattggtgcgcccaacacagcctatataatagcactagcggcagcccaaaagaacttcactatgaaa

SEQ ID NO: 20256 - DNA, 80 bp, synthetic construct
  misc_feature 1..80: note = Synthetic: >EVA71-cand-2400-2479
  source 1..80: mol_type = other DNA
ttgtgcaaggatgctagtgatatcttgcagacaggcaccatccagggagatagggtggcagatgtgattgaaagttccat

SEQ ID NO: 20257 - DNA, 80 bp, synthetic construct
  misc_feature 1..80: note = Synthetic: >EVA71-cand-2480-2559
  source 1..80: mol_type = other DNA
aggagatagcgtgagcagagccctcactcacgctctaccagcacccacaggccagaacacacaggtgagcagtcatcgac

SEQ ID NO: 20258 - DNA, 80 bp, synthetic construct
  misc_feature 1..80: note = Synthetic: >EVA71-cand-2560-2639
  source 1..80: mol_type = other DNA
tggatacaggcaaggttccagcactccaagctgctgaaattggagcatcatcaaatgctagtgacgagagtatgattgag

SEQ ID NO: 20259 - DNA, 80 bp, synthetic construct
  misc_feature 1..80: note = Synthetic: >EVA71-cand-2640-2719
  source 1..80: mol_type = other DNA
acacgctgtgttcttaactcgcacagtacagcagagaccactcttgatagtttcttcagcagggcgggattagttggaga

SEQ ID NO: 20260 - DNA, 80 bp, synthetic construct
  misc_feature 1..80: note = Synthetic: >EVB100-cand-6910-6989
  source 1..80: mol_type = other DNA
ggatgatgtcatcgcgtcgtatccgcatcccatcgatgcatcactgttggctgaggctggcaagggatatggcttaatca

SEQ ID NO: 20261 - DNA, 80 bp, synthetic construct
  misc_feature 1..80: note = Synthetic: >EVB100-cand-6940-7019
  source 1..80: mol_type = other DNA
catcgatgcatcactgttggctgaggctggcaagggatatggcttaatcatgactccagctgataagggagaatgcttca

SEQ ID NO: 20262 - DNA, 80 bp, synthetic construct
  misc_feature 1..80: note = Synthetic: >EVB100-cand-7020-7099
  source 1..80: mol_type = other DNA
atgaagtgacatggactaacgtcacattcctgaagagatactttagggcagatgaacaatacccctttcttgttcaccca

SEQ ID NO: 20263 - DNA, 80 bp, synthetic construct
  misc_feature 1..80: note = Synthetic: >EVB100-cand-7180-7259
  source 1..80: mol_type = other DNA
atgcctattggcctggcataatggagagcaagagtatgaagagtttgtgactaagatcaggagcgttccagtagggcgct

SEQ ID NO: 20264 - DNA, 80 bp, synthetic construct
  misc_feature 1..80: note = Synthetic: >EVB100-cand-7260-7339
  source 1..80: mol_type = other DNA
gtctggccttgcctgcattctcaacattacgcaggaagtggctagactctttctaaattagagttcaatttgatttaatt

SEQ ID NO: 20265 - DNA, 80 bp, synthetic construct
  misc_feature 1..80: note = Synthetic: >EVB100-cand-7310-7389
  source 1..80: mol_type = other DNA
ttctaaattagagttcaatttgatttaattccaattggcttaaccctaccgcactcaccgaactagataacggtgtggta

SEQ ID NO: 20266 - DNA, 80 bp, synthetic construct
  misc_feature 1..80: note = Synthetic: >EVB101-cand-80-159
  source 1..80: mol_type = other DNA
ttatatccccctccccacttgaaacttagaagtgaaacacactgatcaatagttgacatggcaagccagccatgtcttga

SEQ ID NO: 20267 - DNA, 80 bp, synthetic construct
  misc_feature 1..80: note = Synthetic: >EVB101-cand-150-229
  source 1..80: mol_type = other DNA
catgtcttgatcaagcacctctgtttccccggacctagtatcaatagactgctcgcgcggttgaaagagaaagcgttcgt

SEQ ID NO: 20268 - DNA, 80 bp, synthetic construct
  misc_feature 1..80: note = Synthetic: >EVB101-cand-230-309
  source 1..80: mol_type = other DNA
tacccggctaactacttcgagaaacttagtaacaccatggaagttgcggagtgtttcgctcagcacatccccagtgtaga

SEQ ID NO: 20269 - DNA, 80 bp, synthetic construct
  misc_feature 1..80: note = Synthetic: >EVB101-cand-300-379
  source 1..80: mol_type = other DNA
ccagtgtagatcaggccgatgagtcaccgcattccccacgggcgaccgtggcggtggctgcgttggcggcctgcctgtgg

SEQ ID NO: 20270 - DNA, 80 bp, synthetic construct
  misc_feature 1..80: note = Synthetic: >EVB101-cand-630-709
  source 1..80: mol_type = other DNA
ccatccggtgacaaacagagcaattatatatctctttgttggatacattccattgaactacaaggagttaaaaaccctca

SEQ ID NO: 20271 - DNA, 80 bp, synthetic construct
  misc_feature 1..80: note = Synthetic: >EVB101-cand-710-789
  source 1..80: mol_type = other DNA
attatattctgttcttgaattccgcaagatgggagcacaagtgtcaacgcaaaagactggagcccatgacactgggctaa

SEQ ID NO: 20272 - DNA, 80 bp, synthetic construct
  misc_feature 1..80: note = Synthetic: >EVB101-cand-790-869
  source 1..80: mol_type = other DNA
atgccagtgggaattcgatcatccattacaccaacattaactactacaaggatgcagcgtccaactcagctaatagacaa

SEQ ID NO: 20273 - DNA, 80 bp, synthetic construct
  misc_feature 1..80: note = Synthetic: >EVB101-cand-860-939
  source 1..80: mol_type = other DNA
taatagacaagactttactcaggaccctagtaaattcaccgaaccagtgaaggatataatggtcaagtccctgccggctc

SEQ ID NO: 20274 - DNA, 80 bp, synthetic construct
  misc_feature 1..80: note = Synthetic: >EVB101-cand-940-1019
  source 1..80: mol_type = other DNA
tcaactcacccactgcagaggagtgtggttatagcgacagggtgagatcaataacattgggtaattcaacaataacaacc

SEQ ID NO: 20275 - DNA, 80 bp, synthetic construct
  misc_feature 1..80: note = Synthetic: >EVB101-cand-960-1039
  source 1..80: mol_type = other DNA
gagtgtggttatagcgacagggtgagatcaataacattgggtaattcaacaataacaacccaagagtgcgccaatgttgt

SEQ ID NO: 20276 - DNA, 80 bp, synthetic construct
  misc_feature 1..80: note = Synthetic: >EVB75-cand-2960-3039
  source 1..80: mol_type = other DNA
ctggaccgaaggcaatgcccccccgcgcatgtcaattccattcatgagcataggtaatgcatacagtaacttttatgacg

SEQ ID NO: 20277 - DNA, 80 bp, synthetic construct
  misc_feature 1..80: note = Synthetic: >EVB75-cand-3040-3119
  source 1..80: mol_type = other DNA
gttggtcacacttctcacaaactggtgtctatgggtttaacacgctgaacaacatgggccaattatacttcaggcatgtt

SEQ ID NO: 20278 - DNA, 80 bp, synthetic construct
  misc_feature 1..80: note = Synthetic: >EVB75-cand-3120-3199
  source 1..80: mol_type = other DNA
aacagcagcaaccctggtgcttatactagtgttgtgcgtatatattttaagctgaagcatgtgaaagcatgggtgccaag

SEQ ID NO: 20279 - DNA, 80 bp, synthetic construct
  misc_feature 1..80: note = Synthetic: >EVB75-cand-3200-3279
  source 1..80: mol_type = other DNA
gccaccaaggctgtgcaattacgagagatcggaaaacgtgaattttcaggtgatgggagtgaccgatacccgagactcta

SEQ ID NO: 20280 - DNA, 80 bp, synthetic construct
  misc_feature 1..80: note = Synthetic: >EVB75-cand-3240-3319
  source 1..80: mol_type = other DNA
aattttcaggtgatgggagtgaccgatacccgagactctattacagcgcaaccgggcacacacaccgccctccacacaag

SEQ ID NO: 20281 - DNA, 80 bp, synthetic construct
  misc_feature 1..80: note = Synthetic: >EVB75-cand-3360-3439
  source 1..80: mol_type = other DNA
aattacagagtagtcaacagacaccttgctacacacgctgattggcaaaactgcgtgtgggaagattataacagggacct

SEQ ID NO: 20282 - DNA, 80 bp, synthetic construct
  misc_feature 1..80: note = Synthetic: >EVB75-cand-3440-3519
  source 1..80: mol_type = other DNA
cttagtaagcaccaccacagctcacgggtgcgataccatagcaagatgcaagtgcacggctggcgtttacttctgtgcat

SEQ ID NO: 20283 - DNA, 80 bp, synthetic construct
  misc_feature 1..80: note = Synthetic: >EVB75-cand-3520-3599
  source 1..80: mol_type = other DNA
caaaaaataagcattatccagtttccttcgaaggtcccggcttagtagaagttcaggagagtgagtactaccccaaaaga

SEQ ID NO: 20284 - DNA, 80 bp, synthetic construct
  misc_feature 1..80: note = Synthetic: >EVB75-cand-3600-3679
  source 1..80: mol_type = other DNA
tatcaatcccacgtgttgcttgctgcgggtttctcagaaccaggtgattgtggaggcatcctaagatgcgagcacggtgt

SEQ ID NO: 20285 - DNA, 80 bp, synthetic construct
  misc_feature 1..80: note = Synthetic: >EVB75-cand-3680-3759
  source 1..80: mol_type = other DNA
cattgggcttgtgaccatgggaggcgagggtgttgttggctttgccgacgtgcgcgacctcctatggttggaagacgatg

SEQ ID NO: 20286 - DNA, 80 bp, synthetic construct
  misc_feature 1..80: note = Synthetic: >EVB75-cand-3760-3839
  source 1..80: mol_type = other DNA
ctatggaacagggtgtgaaggactatgttgagcaactaggaaatgcctttggttcgggcttcaccaatcaaatttgtgaa

SEQ ID NO: 20287 - DNA, 80 bp, synthetic construct
  misc_feature 1..80: note = Synthetic: >EVB75-cand-3840-3919
  source 1..80: mol_type = other DNA
caggtcaacttactcaaagagtcactcattggacaagattctatcctagaaaagtcgcttaaggccctagtgaaaatcat

SEQ ID NO: 20288 - DNA, 80 bp, synthetic construct
  misc_feature 1..80: note = Synthetic: >EVB75-cand-3920-3999
  source 1..80: mol_type = other DNA
atcagcactggtaattgtggtgcgaaaccatgacgatttaatcacagtgacagccacattagcccttataggctgctcat

SEQ ID NO: 20289 - DNA, 80 bp, synthetic construct
  misc_feature 1..80: note = Synthetic: >EVB75-cand-4020-4099
  source 1..80: mol_type = other DNA
aaacagaaagtgtcccaatactacgggatcccaatggctgaaaggcagaacaacaactggctaaagaaattcacagagat

SEQ ID NO: 20290 - DNA, 80 bp, synthetic construct
  misc_feature 1..80: note = Synthetic: >EVB75-cand-4100-4179
  source 1..80: mol_type = other DNA
gactaacgcctgcaagggcatggagtggatagctgtgaagatccaaaaatttattgaatggttgaaagtgaagattttgc

SEQ ID NO: 20291 - DNA, 80 bp, synthetic construct
  misc_feature 1..80: note = Synthetic: >EVB75-cand-4180-4259
  source 1..80: mol_type = other DNA
cagaagtcaaagagaaacacgagtttctaaacagattaaagcagctacctctgctggagagccagattgccactattgaa

SEQ ID NO: 20292 - DNA, 80 bp, synthetic construct
  misc_feature 1..80: note = Synthetic: >EVB83-cand-1490-1569
  source 1..80: mol_type = other DNA
tgtatttccccatcaatggatcaacctacgtacaaacaacagtgccacgatagttatgccatatatcaacagtgtaccta

SEQ ID NO: 20293 - DNA, 80 bp, synthetic construct
  misc_feature 1..80: note = Synthetic: >EVB83-cand-1570-1649
  source 1..80: mol_type = other DNA
tggataatttatatcgccattacaacttcactctgatggtaatcccttttgccagcttggattacgctgcaggatcatca

SEQ ID NO: 20294 - DNA, 80 bp, synthetic construct
  misc_feature 1..80: note = Synthetic: >EVB83-cand-1650-1729
  source 1..80: mol_type = other DNA
accaaggtccccatcactataacagtggcccccatgtgtgctgagtacaacggattgcgactagccggacatcagggcct

SEQ ID NO: 20295 - DNA, 80 bp, synthetic construct
  misc_feature 1..80: note = Synthetic: >EVB83-cand-1730-1809
  source 1..80: mol_type = other DNA
ccccgtaatgagcgttccgggcagcaaccagtttttaacatcagatgattaccaatcaccttctgcaatgccccaatttg

SEQ ID NO: 20296 - DNA, 80 bp, synthetic construct
  misc_feature 1..80: note = Synthetic: >EVB83-cand-1810-1889
  source 1..80: mol_type = other DNA
atgtgactccagagatgagaattccgggagaagttcgcaatttgatggaaatcgcggaggttgactcggtagtaccagta

SEQ ID NO: 20297 - DNA, 80 bp, synthetic construct
  misc_feature 1..80: note = Synthetic: >EVB83-cand-1890-1969
  source 1..80: mol_type = other DNA
tataatgtaccgaggcatgtgaattccatggatgcgtatgcgattccagtccaaacaggtaaatctaagaaacaagcatt

SEQ ID NO: 20298 - DNA, 80 bp, synthetic construct
  misc_feature 1..80: note = Synthetic: >EVB83-cand-1970-2049
  source 1..80: mol_type = other DNA
tggcttcaaactgcaacccggctcagactcggtgttcaagcacaccctattaggagagattcttaactactacgccaatt

SEQ ID NO: 20299 - DNA, 80 bp, synthetic construct
  misc_feature 1..80: note = Synthetic: >EVB83-cand-2050-2129
  source 1..80: mol_type = other DNA
ggtctggtagcataaagttgaccttcatgttctgcggttctgcaatggcaactgggaagttcctgctagcatactctcct

SEQ ID NO: 20300 - DNA, 80 bp, synthetic construct
  misc_feature 1..80: note = Synthetic: >EVB83-cand-2130-2209
  source 1..80: mol_type = other DNA
cctggtgccggcgtgcccggaagtagaaaggaagcaatgctagggacccatgtcgtgtgggacatcgggctccagtccag

SEQ ID NO: 20301 - DNA, 80 bp, synthetic construct
  misc_feature 1..80: note = Synthetic: >EVB83-cand-2210-2289
  source 1..80: mol_type = other DNA
ctgtgtgttgtgtgtgccatggattagtcagacgcactacaggtacgtggagcatgatgtctacaccgacgcgggatata

SEQ ID NO: 20302 - DNA, 80 bp, synthetic construct
  misc_feature 1..80: note = Synthetic: >EVB83-cand-2290-2369
  source 1..80: mol_type = other DNA
tcacctgctggtaccagactagtattgtagtcccagtagacgtcgccaccaccagcagaatcctgtgctttgtatcagcc

SEQ ID NO: 20303 - DNA, 80 bp, synthetic construct
  misc_feature 1..80: note = Synthetic: >EVB83-cand-2370-2449
  source 1..80: mol_type = other DNA
tgcaatgatttttctgtcaggctgctcagggatacgcctttcctaacgcaaacagctttgtaccagaatgaaccgaatgg

SEQ ID NO: 20304 - DNA, 80 bp, synthetic construct
  misc_feature 1..80: note = Synthetic: >EVB83-cand-2450-2529
  source 1..80: mol_type = other DNA
gagggaaacagtggcagacacccaaccgagcggacaaacgaactcgacacggatacctgctctgacagcggctgagacag

SEQ ID NO: 20305 - DNA, 80 bp, synthetic construct
  misc_feature 1..80: note = Synthetic: >EVB83-cand-2530-2609
  source 1..80: mol_type = other DNA
gacacacatcccaggtggtacccagtgatactatgcagacaaggcacgtaaacaatttccacaccagatcagagtcatca

SEQ ID NO: 20306 - DNA, 80 bp, synthetic construct
  misc_feature 1..80: note = Synthetic: >EVB83-cand-2610-2689
  source 1..80: mol_type = other DNA
atagagaatttcctttgtagagcagcttgcgccacgattgtcacatacaataccaatgtgtccgataatttcactagttg

SEQ ID NO: 20307 - DNA, 80 bp, synthetic construct
  misc_feature 1..80: note = Synthetic: >EVB83-cand-2690-2769
  source 1..80: mol_type = other DNA
gcgcataaacacgagagaggttgcacagcttaggcgcaaattggagatgttcacatacatgaggtttgacctggaattga

SEQ ID NO: 20308 - DNA, 80 bp, synthetic construct
  misc_feature 1..80: note = Synthetic: >HCV.A1-cand-4620-4699
  source 1..80: mol_type = other DNA
gggaggatatgaaattgttttgccagatggtgtctacagtggagttcataccaccaatggctagtttagaggagaaagga

SEQ ID NO: 20309 - DNA, 80 bp, synthetic construct
  misc_feature 1..80: note = Synthetic: >HCV.A1-cand-4660-4739
  source 1..80: mol_type = other DNA
ggagttcataccaccaatggctagtttagaggagaaaggaatcttgttcacctcagattacgtgcttgcttccactaatt

SEQ ID NO: 20310 - DNA, 80 bp, synthetic construct
  misc_feature 1..80: note = Synthetic: >HCV.A1-cand-4740-4819
  source 1..80: mol_type = other DNA
ccaacactataacacctcctacagtatcggcatctgatgcgttatccagaagatttgcttttgatatggatatacatcca

SEQ ID NO: 20311 - DNA, 80 bp, synthetic construct
  misc_feature 1..80: note = Synthetic: >HCV.A1-cand-4900-4979
  source 1..80: mol_type = other DNA
cttttcaacttgctgtcccttagtgtgtgggaaggctattcaattgatggacaaaaataccagaatgaggtactcactag

SEQ ID NO: 20312 - DNA, 80 bp, synthetic construct
  misc_feature 1..80: note = Synthetic: >HCV.A1-cand-4950-5029
  source 1..80: mol_type = other DNA
acaaaaataccagaatgaggtactcactagaccaaatcactaccatgctgattaacgagagaaacaggagatataacatt

SEQ ID NO: 20313 - DNA, 80 bp, synthetic construct
  misc_feature 1..80: note = Synthetic: >HCV.A1-cand-5060-5139
  source 1..80: mol_type = other DNA
ccaattgaatttaaagatctcaaaattgatgtggtttccacaccaccaccttctgcaatctcagacctacttaagtcagt

SEQ ID NO: 20314 - DNA, 80 bp, synthetic construct
  misc_feature 1..80: note = Synthetic: >HCV.A1-cand-5140-5219
  source 1..80: mol_type = other DNA
ggacaatcaggaagttagggattactgtaaacaacaaggctgggtggtcgagattccctcaaattctatcactatagaaa

SEQ ID NO: 20315 - DNA, 80 bp, synthetic construct
  misc_feature 1..80: note = Synthetic: >HCV.A1-cand-5220-5299
  source 1..80: mol_type = other DNA
gacacatctcccgcgctaccagcattttacaatcactctccacctttgcggtagtagcagggatggtttatgtagtgtac

SEQ ID NO: 20316 - DNA, 80 bp, synthetic construct
  misc_feature 1..80: note = Synthetic: >HCV.A1-cand-5300-5379
  source 1..80: mol_type = other DNA
aaactctttgcaggatttcaaggtgcatacactggtcttcccaatgcaaagcccaaagtccctacgatcagagcagcaaa

SEQ ID NO: 20317 - DNA, 80 bp, synthetic construct
  misc_feature 1..80: note = Synthetic: >HCV.A1-cand-5380-5459
  source 1..80: mol_type = other DNA
agttcagggcccagtatttgattatgcagttgcaatggcaaagaaaaacatcctgacagccaccacagaaaagggtgaat

SEQ ID NO: 20318 - DNA, 80 bp, synthetic construct
  misc_feature 1..80: note = Synthetic: >HCV.A1-cand-5460-5539
  source 1..80: mol_type = other DNA
tcacaatgttaggagtacatgatagagttgcagtattgcctacccattcaaacccaggtgaaacaatagttgtgtcagga

SEQ ID NO: 20319 - DNA, 80 bp, synthetic construct
  misc_feature 1..80: note = Synthetic: >HCV.A1-cand-5540-5619
  source 1..80: mol_type = other DNA
aaagaagtgaagatcttggatgcaaagaggctggttgataatgatgaggtcaatcttgaaattactattgtaaccctaga

SEQ ID NO: 20320 - DNA, 80 bp, synthetic construct
  misc_feature 1..80: note = Synthetic: >HCV.A1-cand-5620-5699
  source 1..80: mol_type = other DNA
cagaaacgaaaagtttagagacatcagaactcacttaccgacccaaatccatgagaccaatgatgcggttttggctgtca

SEQ ID NO: 20321 - DNA, 80 bp, synthetic construct
  misc_feature 1..80: note = Synthetic: >HCV.A1-cand-5700-5779
  source 1..80: mol_type = other DNA
acacctccaaatttccaaatatgtacattccagttggatcagtagttgaacagggaatgttgaaccttggtggcagaccc

SEQ ID NO: 20322 - DNA, 80 bp, synthetic construct
  misc_feature 1..80: note = Synthetic: >HCV.A1-cand-5780-5859
  source 1..80: mol_type = other DNA
acaaatagaaccctaatgtataactttccaactaaagcagggcagtgtggtggtgtcttaatggccactggcaaagtgat

SEQ ID NO: 20323 - DNA, 80 bp, synthetic construct
  misc_feature 1..80: note = Synthetic: >HCV.A1-cand-5860-5939
  source 1..80: mol_type = other DNA
tggcatacatgttggtggtaatggatctcacggtttcgcagctgcacttaaaagaagttactttactgaagaacagggtg

SEQ ID NO: 20324 - DNA, 80 bp, synthetic construct
  misc_feature 1..80: note = Synthetic: >HCV.A11-cand-4970-5049
  source 1..80: mol_type = other DNA
aagagatgctgtcctctggtgtgcggaaaagcaattcagttaatggataagtcatcaagagtcaggtatagtgtggacca

SEQ ID NO: 20325 - DNA, 80 bp, synthetic construct
  misc_feature 1..80: note = Synthetic: >HCV.A11-cand-5050-5129
  source 1..80: mol_type = other DNA
gattactactatgatcatcaatgaaaggaatagaagatcaaatattggcaattgtatggaagcactcttccaaggaccac

SEQ ID NO: 20326 - DNA, 80 bp, synthetic construct
  misc_feature 1..80: note = Synthetic: >HCV.A11-cand-5130-5209
  source 1..80: mol_type = other DNA
tccagtacaaagacctgaaaatagacattaaaacaacaccacccccagagtgcatcaatgatttgctccaggcagttgac

SEQ ID NO: 20327 - DNA, 80 bp, synthetic construct
  misc_feature 1..80: note = Synthetic: >HCV.A11-cand-5210-5289
  source 1..80: mol_type = other DNA
tcccaagaggttagggactattgtgagaagaaagggtggattgtcaatatcaccagtcaagtccaaactgaaaggaacat

SEQ ID NO: 20328 - DNA, 80 bp, synthetic construct
  misc_feature 1..80: note = Synthetic: >HCV.A11-cand-5290-5369
  source 1..80: mol_type = other DNA
caatagagcaatgacaattctgcaagctgtcacaacatttgctgcggtggccggagttgtgtacgtcatgtacaaacttt

SEQ ID NO: 20329 - DNA, 80 bp, synthetic construct
  misc_feature 1..80: note = Synthetic: >HCV.A11-cand-5360-5439
  source 1..80: mol_type = other DNA
tacaaacttttcgctggacatcaaggagcttacaccggcctcccgaacaaaagacctaacgtacctaccattagaactgc

SEQ ID NO: 20330 - DNA, 80 bp, synthetic construct
  misc_feature 1..80: note = Synthetic: >HCV.A11-cand-5430-5509
  source 1..80: mol_type = other DNA
ttagaactgctaaggtgcagggtccaggcttcgactacgcagtcgcaatggctaaaagaaacatagttactgctaccacc

SEQ ID NO: 20331 - DNA, 80 bp, synthetic construct
  misc_feature 1..80: note = Synthetic: >HCV.A11-cand-5520-5599
  source 1..80: mol_type = other DNA
aatttaccatgctaggagttcatgacaatgtggcgattttaccaactcatgcgtcgccaggagagaccatagtgattgat

SEQ ID NO: 20332 - DNA, 80 bp, synthetic construct
  misc_feature 1..80: note = Synthetic: >HCV.A11-cand-5600-5679
  source 1..80: mol_type = other DNA
ggaaaagaggtggagattttagatgcaaaggctcttgaagaccaagcaggcacaaatctggaaattacaattataacact

SEQ ID NO: 20333 - DNA, 80 bp, synthetic construct
  misc_feature 1..80: note = Synthetic: >HCV.A11-cand-5680-5759
  source 1..80: mol_type = other DNA
gaaaagaaatgaaaaattcagagacattagaccacacattcccacacaaatcactgagactaacgatggagtgctgatcg

SEQ ID NO: 20334 - DNA, 80 bp, synthetic construct
  misc_feature 1..80: note = Synthetic: >HCV.A11-cand-5840-5919
  source 1..80: mol_type = other DNA
caaacagctcgtacattaatgtacaacttcccaactagagcgggccagtgtggtggagtcatcacttgcactggtaaggt

SEQ ID NO: 20335 - DNA, 80 bp, synthetic construct
  misc_feature 1..80: note = Synthetic: >HCV.A11-cand-5920-5999
  source 1..80: mol_type = other DNA
catcgggatgcatgttggtgggaatggttcacatgggttcgcagcggccctaaagcgatcgtacttcactcagagtcaag

SEQ ID NO: 20336 - DNA, 80 bp, synthetic construct
  misc_feature 1..80: note = Synthetic: >HCV.A11-cand-6000-6079
  source 1..80: mol_type = other DNA
gtgagattcagtggataagaccatcaaaagaagtgggttaccccatcattaatgctccttccaagactaaattagaacct

SEQ ID NO: 20337 - DNA, 80 bp, synthetic construct
  misc_feature 1..80: note = Synthetic: >HCV.A11-cand-6080-6159
  source 1..80: mol_type = other DNA
agtgcctttcattatgtgtttgagggagtcaaagagccagcagtccttactaagaatgaccctagactaaaaacagattt

SEQ ID NO: 20338 - DNA, 80 bp, synthetic construct
  misc_feature 1..80: note = Synthetic: >HCV.A11-cand-6160-6239
  source 1..80: mol_type = other DNA
tgaagaggccattttctcaaaatacgtagggaacaaaatcacggaagtagatgaatacatgaaagaagcagtagaccact

SEQ ID NO: 20339 - DNA, 80 bp, synthetic construct
  misc_feature 1..80: note = Synthetic: >HCV.A11-cand-6240-6319
  source 1..80: mol_type = other DNA
atgcgggacaactaatgtccctagacatcaacacagaccagatgtgccttgaggatgccatgtacggcactgatgggctt

SEQ ID NO: 20340 - DNA, 80 bp, synthetic construct
  misc_feature 1..80: note = Synthetic: >HCV.A12-cand-300-379
  source 1..80: mol_type = other DNA
ttccccagtgtagatcaggtcgatgagtcaccgcgttccccacgggcgaccgtggcggtggctgcgttggcggcctgcct

SEQ ID NO: 20341 - DNA, 80 bp, synthetic construct
  misc_feature 1..80: note = Synthetic: >HCV.A12-cand-480-559
  source 1..80: mol_type = other DNA
cggagcacgcgccttcaatccagtgggtagcgtgtcgtaatgggtaactctgcagcggaaccgactactttgggtgtccg

SEQ ID NO: 20342 - DNA, 80 bp, synthetic construct
  misc_feature 1..80: note = Synthetic: >HCV.A12-cand-560-639
  source 1..80: mol_type = other DNA
tgtttccatttattcttacattggctgcttatggtgacaattgaaagattgttaccatatagctattggattggccatcc

SEQ ID NO: 20343 - DNA, 80 bp, synthetic construct
  misc_feature 1..80: note = Synthetic: >HCV.A12-cand-640-719
  source 1..80: mol_type = other DNA
ggtatcgaatagagcgattatctatcagtttattggatttatatccgttgagtgtgcagcagtatcgcactttgctttta

SEQ ID NO: 20344 - DNA, 80 bp, synthetic construct
  misc_feature 1..80: note = Synthetic: >HCV.A12-cand-720-799
  source 1..80: mol_type = other DNA
atagtgagactgaatagtgcaaaatgggtgctcaggtatcaacacaaaaatctgggtcccacgagacaagtacttttgca

SEQ ID NO: 20345 - DNA, 80 bp, synthetic construct
  misc_feature 1..80: note = Synthetic: >HCV.A12-cand-800-879
  source 1..80: mol_type = other DNA
tcagaaggctcgactataaattttaccaacattaattattataaggattcgtatgccgcatcggctagcaggcaggattt

SEQ ID NO: 20346 - DNA, 80 bp, synthetic construct
  misc_feature 1..80: note = Synthetic: >HCV.A12-cand-880-959
  source 1..80: mol_type = other DNA
cacccaagatccaagtaaatttaccagccccatactagatgcattgagagagacagctccccccttgaagtcacctagtg

SEQ ID NO: 20347 - DNA, 80 bp, synthetic construct
  misc_feature 1..80: note = Synthetic: >HCV.A12-cand-970-1049
  source 1..80: mol_type = other DNA
tggttacagtgatcgtgtggcacaactgactgttggcaattcaaccatcaccactcaggaagctgctaacattgtgatgg

SEQ ID NO: 20348 - DNA, 80 bp, synthetic construct
  misc_feature 1..80: note = Synthetic: >HCV.A12-cand-1060-1139
  source 1..80: mol_type = other DNA
gtggccggaatattgcgcagacacagacgctacagcagtagacaagcctacccgcccagatgtctcagtgaatcgcttct

SEQ ID NO: 20349 - DNA, 80 bp, synthetic construct
  misc_feature 1..80: note = Synthetic: >HCV.A12-cand-1140-1219
  source 1..80: mol_type = other DNA
acaccctatctgctaagatgtgggacaaaagttctaaaggatggtactggaagttcccagatctactaacgcaaaaggga

SEQ ID NO: 20350 - DNA, 80 bp, synthetic construct
  misc_feature 1..80: note = Synthetic: >HCV.A12-cand-1220-1299
  source 1..80: mol_type = other DNA
gtgtttggccaaaatgcacagtttcactacttgtacagggcgggattctgcatacacgtgcagtgcaatgctagcaagtt

SEQ ID NO: 20351 - DNA, 80 bp, synthetic construct
  misc_feature 1..80: note = Synthetic: >HCV.A12-cand-1300-1379
  source 1..80: mol_type = other DNA
tcaccaaggagctctgctggttgcagccttgccagagcacgtggtggctggaatgggaccgggagataagccgcaaaatg

SEQ ID NO: 20352 - DNA, 80 bp, synthetic construct
  misc_feature 1..80: note = Synthetic: >HCV.A12-cand-1380-1459
  source 1..80: mol_type = other DNA
caccgcatccaacctaccaggtcactcagcccggtgctggcgggcaggaactgacacacccttatgtgctggattgtggc

SEQ ID NO: 20353 - DNA, 80 bp, synthetic construct
  misc_feature 1..80: note = Synthetic: >HCV.A12-cand-1460-1539
  source 1..80: mol_type = other DNA
atacccattagtcagctcttggtgtgcccccatcagtggatcaacctgcggacaaataattgtgccaccattataatgcc

SEQ ID NO: 20354 - DNA, 80 bp, synthetic construct
  misc_feature 1..80: note = Synthetic: >HCV.A12-cand-1540-1619
  source 1..80: mol_type = other DNA
atatactaattcggtgccatatgactcggccatccatcataataatttcacattatttgtgatcccgatagcgccactga

SEQ ID NO: 20355 - DNA, 80 bp, synthetic construct
  misc_feature 1..80: note = Synthetic: >HCV.A12-cand-1620-1699
  source 1..80: mol_type = other DNA
attatgatacaggagccacaacagccataccaatcactatcaccgttgccccactatgtgctgaattcggaggcctaagg

SEQ ID NO: 20356 - DNA, 80 bp, synthetic construct
  misc_feature 1..80: note = Synthetic: >HCV.A3-cand-2500-2579
  source 1..80: mol_type = other DNA
ataatacaacggcaggcaacaccaccgttagcgagcacagcatcggtaccggttcagtgcctgcgttgcaagctgctgag

SEQ ID NO: 20357 - DNA, 80 bp, synthetic construct
  misc_feature 1..80: note = Synthetic: >HCV.A3-cand-2590-2669
  source 1..80: mol_type = other DNA
cgtctaacaccacagatgagagtatgatagaaacacggtgtgttgtcaataggaatggagtgattgagactagcatcaac

SEQ ID NO: 20358 - DNA, 80 bp, synthetic construct
  misc_feature 1..80: note = Synthetic: >HCV.A3-cand-2690-2769
  source 1..80: mol_type = other DNA
gcttgtgggagtgctgaacatacttgatggaggcacctcaaaaggctttgaagtttgggatatagacatcatgggctttg

SEQ ID NO: 20359 - DNA, 80 bp, synthetic construct
  misc_feature 1..80: note = Synthetic: >HCV.A3-cand-2750-2829
  source 1..80: mol_type = other DNA
tatagacatcatgggctttgttcagcttcgcagaaagctagagatgttcacctacatgcggttcaacgctgaattcacct

SEQ ID NO: 20360 - DNA, 80 bp, synthetic construct
  misc_feature 1..80: note = Synthetic: >HCV.A3-cand-2830-2909
  source 1..80: mol_type = other DNA
ttgtcgcgactttgagtgacggaacaactccccatataatgttgcaatacatgtatgtgccccctggagctcccaaacct

SEQ ID NO: 20361 - DNA, 80 bp, synthetic construct
  misc_feature 1..80: note = Synthetic: >HCV.A3-cand-2910-2989
  source 1..80: mol_type = other DNA
caggaaagagattcattccaatggcagactgcaaccaacccatccgtgtttgcgaaaatgagtgaccctcctccgcaagt

SEQ ID NO: 20362 - DNA, 80 bp, synthetic construct
  misc_feature 1..80: note = Synthetic: >HCV.A3-cand-2990-3069
  source 1..80: mol_type = other DNA
ttcagtacctttcatgtctcctgctagcgcctaccagtggttttatgatgggtacccaacatttgatgatagaccacaga

SEQ ID NO: 20363 - DNA, 80 bp, synthetic construct
  misc_feature 1..80: note = Synthetic: >HCV.A3-cand-3070-3149
  source 1..80: mol_type = other DNA
cctctaatcgtccctacggacaatgccccaataacatgttgggcacattcgcggtgcgcattgttagcaagacgcctgcg

SEQ ID NO: 20364 - DNA, 80 bp, synthetic construct
  misc_feature 1..80: note = Synthetic: >HCV.A3-cand-3150-3229
  source 1..80: mol_type = other DNA
gagagagacttgcgcgtccgtgtttacatgaaactgaagcatgtgcgagcatgggtaccgcgacccataaggtcacagcc

SEQ ID NO: 20365 - DNA, 80 bp, synthetic construct
  misc_feature 1..80: note = Synthetic: >HCV.A3-cand-3230-3309
  source 1..80: mol_type = other DNA
ttacgtcttgaagaactaccccaactatgatggaacccaaatcgtgcccagtgccaaagatcgagaagacataaagaaca

SEQ ID NO: 20366 - DNA, 80 bp, synthetic construct
  misc_feature 1..80: note = Synthetic: >HCV.A3-cand-3300-3379
  source 1..80: mol_type = other DNA
ataaagaacacagggaagtttggacaacaatcgggtgctatatacgtgggtaattacagagtggtgaatagacacctcgc

SEQ ID NO: 20367 - DNA, 80 bp, synthetic construct
  misc_feature 1..80: note = Synthetic: >HCV.A3-cand-3380-3459
  source 1..80: mol_type = other DNA
cacccacaacgattggactaatctagtgtgggaggacagtaccagagatttattagtatcgtccactacagcacagggtt

SEQ ID NO: 20368 - DNA, 80 bp, synthetic construct
  misc_feature 1..80: note = Synthetic: >HCV.A3-cand-3500-3579
  source 1..80: mol_type = other DNA
ttattgtaactcccgtagaaagcactatccagtcagtttttctaaacctagcctgatatttgtggaggctagtgagtact

SEQ ID NO: 20369 - DNA, 80 bp, synthetic construct
  misc_feature 1..80: note = Synthetic: >HCV.A3-cand-3540-3619
  source 1..80: mol_type = other DNA
tctaaacctagcctgatatttgtggaggctagtgagtactacccagctagataccaatctcatctcatgcttgctgaggg

SEQ ID NO: 20370 - DNA, 80 bp, synthetic construct
  misc_feature 1..80: note = Synthetic: >HCV.A3-cand-3620-3699
  source 1..80: mol_type = other DNA
ccattcagaacccggtgattgtggcggcattctcagatgtcagcatggtgtggtgggaatagtctctactggtgggaatg

SEQ ID NO: 20371 - DNA, 80 bp, synthetic construct
  misc_feature 1..80: note = Synthetic: >HCV.A3-cand-3700-3779
  source 1..80: mol_type = other DNA
gtcttgtgggattcgccgatgttcgagaccttttgtggttagatgaagaagcaatggagcagggagtgtctgattacatc

SEQ ID NO: 20372 - DNA, 80 bp, synthetic construct
  misc_feature 1..80: note = Synthetic: >HCV.A6-cand-5900-5979
  source 1..80: mol_type = other DNA
aggcaatggtaggcaaggtttctgtgcgggacttaagaggagctactttgctagtgagcaaggagagatccaatgggtaa

SEQ ID NO: 20373 - DNA, 80 bp, synthetic construct
  misc_feature 1..80: note = Synthetic: >HCV.A6-cand-5980-6059
  source 1..80: mol_type = other DNA
agcctaacaaagaaactgggagacttaacatcaatgggccaactcgcaccaagctcgaacctagtgtgttccatgatatc

SEQ ID NO: 20374 - DNA, 80 bp, synthetic construct
  misc_feature 1..80: note = Synthetic: >HCV.A6-cand-6060-6139
  source 1..80: mol_type = other DNA
tttgagggcaacaaggaaccagcggtcttacacagcaaagaccctcgcctcgaggtagattttgagcaggcattgttctc

SEQ ID NO: 20375 - DNA, 80 bp, synthetic construct
  misc_feature 1..80: note = Synthetic: >HCV.A6-cand-6140-6219
  source 1..80: mol_type = other DNA
caagtatgtaggaaacacactacatgagcctgatgaatatatcaaggaggcagccctacattatgcaaatcagttgaagc

SEQ ID NO: 20376 - DNA, 80 bp, synthetic construct
  misc_feature 1..80: note = Synthetic: >HCV.A6-cand-6220-6299
  source 1..80: mol_type = other DNA
agctaaatatagatacctctcaaatgagcatggaagaggcttgctacggtacagacaatcttgaggctattgaccttcac

SEQ ID NO: 20377 - DNA, 80 bp, synthetic construct
  misc_feature 1..80: note = Synthetic: >HCV.A6-cand-6330-6409
  source 1..80: mol_type = other DNA
gggatcaagaagagggatatcttagaccccaccaccagggatgtgagtaagatgaagttctacatggataagtatggtct

SEQ ID NO: 20378 - DNA, 80 bp, synthetic construct
  misc_feature 1..80: note = Synthetic: >HCV.A6-cand-6380-6459
  source 1..80: mol_type = other DNA
gatgaagttctacatggataagtatggtcttgacctcccttactctacctatgttaaggatgagctacgctcaatagata

SEQ ID NO: 20379 - DNA, 80 bp, synthetic construct
  misc_feature 1..80: note = Synthetic: >HCV.A6-cand-6480-6559
  source 1..80: mol_type = other DNA
cgcttaattgaagctagcagtttgaatgactcagtttacctcagaatggccttcggacatctctatgaaactttccatgc

SEQ ID NO: 20380 - DNA, 80 bp, synthetic construct
  misc_feature 1..80: note = Synthetic: >HCV.A6-cand-6540-6619
  source 1..80: mol_type = other DNA
ctctatgaaactttccatgcaaaccctgggactgtgactggttcggctgtgggatgtaacccagacgtgttctggagcaa

SEQ ID NO: 20381 - DNA, 80 bp, synthetic construct
  misc_feature 1..80: note = Synthetic: >HCV.A6-cand-6620-6699
  source 1..80: mol_type = other DNA
gttgccaatcctgctccctggttccctctttgcttttgactactcgggctatgatgctagcctcagcccagtttggttta

SEQ ID NO: 20382 - DNA, 80 bp, synthetic construct
  misc_feature 1..80: note = Synthetic: >HCV.A6-cand-6710-6789
  source 1..80: mol_type = other DNA
gctagttcttagagagataggctacagtgacgaggcagtctcactcattgaagggatcaatcatacacaccatgtatatc

SEQ ID NO: 20383 - DNA, 80 bp, synthetic construct
  misc_feature 1..80: note = Synthetic: >HCV.A6-cand-6860-6939
  source 1..80: mol_type = other DNA
gattaacaacatcatcattagatcattgcttatcaaaacatttaagggtattgacctggatgaactcaacatggttgctt

SEQ ID NO: 20384 - DNA, 80 bp, synthetic construct
  misc_feature 1..80: note = Synthetic: >HCV.A6-cand-6950-7029
  source 1..80: mol_type = other DNA
tgtacttgctagttacccttttcccattgactgctcagaactagcaagaacaggcaaggagtatggtttaaccatgaccc

SEQ ID NO: 20385 - DNA, 80 bp, synthetic construct
  misc_feature 1..80: note = Synthetic: >HCV.A6-cand-7030-7109
  source 1..80: mol_type = other DNA
ctgcagataagtctccttgcttcaatgaagttaattgggaaaatgcaacctttcttaagagaggtttcttgcctgatgaa

SEQ ID NO: 20386 - DNA, 80 bp, synthetic construct
  misc_feature 1..80: note = Synthetic: >HCV.A6-cand-7110-7189
  source 1..80: mol_type = other DNA
caatttccatttttgattcatcccaccatgccaatgaaggagattcatgaatccattcggtggactaaggatgcacgcaa

SEQ ID NO: 20387 - DNA, 80 bp, synthetic construct
  misc_feature 1..80: note = Synthetic: >HCV.A6-cand-7190-7269
  source 1..80: mol_type = other DNA
tactcaagatcacgtgcgatccttgtgtctattggcgtggcacaacggcaaacaagaatatgaaaaatttgtgagtgcaa

SEQ ID NO: 20388 - DNA, 80 bp, synthetic construct
  misc_feature 1..80: note = Synthetic: >HQ537729.1-cand-1350-1429
  source 1..80: mol_type = other DNA
gtataacctctagtagcgatgaaagacatgaagagactccaacgcgagacataatacaaatactaaaatgtagtaatgca

SEQ ID NO: 20389 - DNA, 80 bp, synthetic construct
  misc_feature 1..80: note = Synthetic: >HQ537729.1-cand-1370-1449
  source 1..80: mol_type = other DNA
gaaagacatgaagagactccaacgcgagacataatacaaatactaaaatgtagtaatgcaaacgcagctatgttggctaa

SEQ ID NO: 20390 - DNA, 80 bp, synthetic construct
  misc_feature 1..80: note = Synthetic: >HQ537729.1-cand-1460-1539
  source 1..80: mol_type = other DNA
ctatttggtattagttttacagaacttattagaccatttaagagtgataaatccacatgtacagattggtgtgtggccgc

SEQ ID NO: 20391 - DNA, 80 bp, synthetic construct
  misc_feature 1..80: note = Synthetic: >HQ537729.1-cand-1530-1609
  source 1..80: mol_type = other DNA
gtgtggccgcatttggaatagccccaagtgtggcggaaagtttaaaaacattaattaaaccatattgtttatatgtacat

SEQ ID NO: 20392 - DNA, 80 bp, synthetic construct
  misc_feature 1..80: note = Synthetic: >HQ537729.1-cand-1640-1719
  source 1..80: mol_type = other DNA
gtaattctagcattattacgatttaaatgtgcaaaaaacagaacaacaattgaaaaactattatcaaaattgctatgtat

SEQ ID NO: 20393 - DNA, 80 bp, synthetic construct
  misc_feature 1..80: note = Synthetic: >HQ537729.1-cand-1690-1769
  source 1..80: mol_type = other DNA
tgaaaaactattatcaaaattgctatgtatttcagctgcaagtatgctaatacaaccaccaaaattacgtagtaccccag

SEQ ID NO: 20394 - DNA, 80 bp, synthetic construct
  misc_feature 1..80: note = Synthetic: >HQ537729.1-cand-1770-1849
  source 1..80: mol_type = other DNA
ctgcgttatattggtttaaaacagcaatgtcaaatattagtgaggttgatggagaaacaccagaatggattcaaagacaa

SEQ ID NO: 20395 - DNA, 80 bp, synthetic construct
  misc_feature 1..80: note = Synthetic: >HQ537729.1-cand-1850-1929
  source 1..80: mol_type = other DNA
acagtattacagcatagttttaatgatgcaatatttgacctatctgaaatggtacaatgggcatatgacaatgattttat

SEQ ID NO: 20396 - DNA, 80 bp, synthetic construct
  misc_feature 1..80: note = Synthetic: >HQ537729.1-cand-1930-2009
  source 1..80: mol_type = other DNA
agatgatagtgatatagcatataaatatgcacaattggcagaaactaatagtaatgcatgtgcttttttaaaaagtaatt

SEQ ID NO: 20397 - DNA, 80 bp, synthetic construct
  misc_feature 1..80: note = Synthetic: >HQ537729.1-cand-2090-2169
  source 1..80: mol_type = other DNA
cagtggattaaaaggcgatgtgaaaaggtggacgatgacggtgactggagggacatagtacgatttttaagatatcaaca

SEQ ID NO: 20398 - DNA, 80 bp, synthetic construct
  misc_feature 1..80: note = Synthetic: >HQ537729.1-cand-2170-2249
  source 1..80: mol_type = other DNA
agtagattttgtggcatttttatctgcactaaaaaattttttacatggtgtgcctaaaaaaaattgcatacttatatatg

SEQ ID NO: 20399 - DNA, 80 bp, synthetic construct
  misc_feature 1..80: note = Synthetic: >HQ537729.1-cand-2250-2329
  source 1..80: mol_type = other DNA
gagcaccaaacacaggtaaatcattatttggaatgagtctaatgcatttcttacaaggagctattatatcctatgtaaat

SEQ ID NO: 20400 - DNA, 80 bp, synthetic construct
  misc_feature 1..80: note = Synthetic: >HQ537729.1-cand-2330-2409
  source 1..80: mol_type = other DNA
tctaaaagccatttttggttgcagccattatatgatgccaaaatagctatgttagatgatgctacatcgccatgttgggc

SEQ ID NO: 20401 - DNA, 80 bp, synthetic construct
  misc_feature 1..80: note = Synthetic: >HQ537729.1-cand-2400-2479
  source 1..80: mol_type = other DNA
catgttgggcatatatagaccaatatttaagaaatgcactagatggaaatcctatttcattagatgtaaagcataaagca

SEQ ID NO: 20402 - DNA, 80 bp, synthetic construct
  misc_feature 1..80: note = Synthetic: >HQ537729.1-cand-2480-2559
  source 1..80: mol_type = other DNA
ttagtgcaattaaaatgcccacctttacttattacatcaaatataaatgcaggcaaagatgacaggtggccatacttaca

SEQ ID NO: 20403 - DNA, 80 bp, synthetic construct
  misc_feature 1..80: note = Synthetic: >HQ537729.1-cand-2560-2639
  source 1..80: mol_type = other DNA
tagcagggtagtggtctttacatttcacaatgaattcccatttgataaaaatggaaacccagtgtatgggcttaatgata

SEQ ID NO: 20404 - DNA, 80 bp, synthetic construct
  misc_feature 1..80: note = Synthetic: >KC470236.1-cand-7560-7639
  source 1..80: mol_type = other DNA
agcaaaaacatgtctttaccttaggttcaccctgcatagttggcactggtaacagttttactggcgcgccttattactca

SEQ ID NO: 20405 - DNA, 80 bp, synthetic construct
  misc_feature 1..80: note = Synthetic: >KC470236.1-cand-7630-7709
  source 1..80: mol_type = other DNA
ttattactcatcatcctgtccaggtgcactgcaacaatactttggcaacatccatatctccaccctatgtaataaaactg

SEQ ID NO: 20406 - DNA, 80 bp, synthetic construct
  misc_feature 1..80: note = Synthetic: >KC470236.1-cand-7710-7789
  source 1..80: mol_type = other DNA
cttttaggcatatattgtagctgtttttacttgcttaattaaatagttggcctgtataactactttttgattcaggaatg

SEQ ID NO: 20407 - DNA, 80 bp, synthetic construct
  misc_feature 1..80: note = Synthetic: >KC470236.1-cand-7790-7869
  source 1..80: mol_type = other DNA
tgtcttacagtataagttatacaagtgactaatgtagcacacaatagtttatgcaaccgaaataggttgggcatacatac

SEQ ID NO: 20408 - DNA, 80 bp, synthetic construct
  misc_feature 1..80: note = Synthetic: >KC470281.1-cand-20-99
  source 1..80: mol_type = other DNA
gaacggccatacaaattgccagacctgtgcaggacattggacactacattgcatgacgttacaatagactgtgtctattg

SEQ ID NO: 20409 - DNA, 80 bp, synthetic construct
  misc_feature 1..80: note = Synthetic: >KC470281.1-cand-90-169
  source 1..80: mol_type = other DNA
gtgtctattgcagaaggcaactacaacggacagaggtatatgaatttgcctttggcgacttaaatgtagtatatagggac

SEQ ID NO: 20410 - DNA, 80 bp, synthetic construct
  misc_feature 1..80: note = Synthetic: >KC470281.1-cand-180-259
  source 1..80: mol_type = other DNA
tagctgcatgccaatcatgtattaaattttatgctaaaatacgggaactacgatattactcagaatcggtgtatgccaca

SEQ ID NO: 20411 - DNA, 80 bp, synthetic construct
  misc_feature 1..80: note = Synthetic: >KC470281.1-cand-260-339
  source 1..80: mol_type = other DNA
acattagaaaccataactaatacaaagttatatgatttatcaataaggtgcatgtgttgcttgaaaccattgagtccagc

SEQ ID NO: 20412 - DNA, 80 bp, synthetic construct
  misc_feature 1..80: note = Synthetic: >KC470281.1-cand-340-419
  source 1..80: mol_type = other DNA
tgaaaaactaaggcacctaaatgcaaaacgaagattccataaaatagcaggaaactttacaggacagtgtcgccactgct

SEQ ID NO: 20413 - DNA, 80 bp, synthetic construct
  misc_feature 1..80: note = Synthetic: >KC470281.1-cand-420-499
  source 1..80: mol_type = other DNA
ggaccagtaagcgagaggaccgcagacgcacacggcaggagacacaagtataaactaactatgcatggaccaaagcccac

SEQ ID NO: 20414 - DNA, 80 bp, synthetic construct
  misc_feature 1..80: note = Synthetic: >KC470281.1-cand-500-579
  source 1..80: mol_type = other DNA
cgtgcaggaaattgtgttagagttatgtccatgcaatgaaatagagccggttgaccttgtatgtcacgagcaattaggag

SEQ ID NO: 20415 - DNA, 80 bp, synthetic construct
  misc_feature 1..80: note = Synthetic: >KC470281.1-cand-580-659
  source 1..80: mol_type = other DNA
attcagacgatgaaatagatgaacccgaccatgcagttaatcaccaccaacatcaactactagccagacgggacgaacaa

SEQ ID NO: 20416 - DNA, 80 bp, synthetic construct
  misc_feature 1..80: note = Synthetic: >KC470281.1-cand-660-739
  source 1..80: mol_type = other DNA
cagcgtcacagaattcagtgtatgtgttgtaagtgtaacaacccactgcaactagtagtagaagcgtcgcgggagaacct

SEQ ID NO: 20417 - DNA, 80 bp, synthetic construct
  misc_feature 1..80: note = Synthetic: >KC470281.1-cand-740-819
  source 1..80: mol_type = other DNA
gcggaagctacaactgctgtttatggactcactaaattttgtgtgtccgtggtgtgcaacggaaacccagtaatctgcaa

SEQ ID NO: 20418 - DNA, 80 bp, synthetic construct
  misc_feature 1..80: note = Synthetic: >KC470281.1-cand-860-939
  source 1..80: mol_type = other DNA
taacggatggttttttgtacaagcaatagtagataaacaaacaggtgacacagtctcagaggatgaggatgaaaacgcga

SEQ ID NO: 20419 - DNA, 80 bp, synthetic construct
  misc_feature 1..80: note = Synthetic: >KC470281.1-cand-900-979
  source 1..80: mol_type = other DNA
acaggtgacacagtctcagaggatgaggatgaaaacgcgacagatacaggttcagacatggtagatttcattgatgatgc

SEQ ID NO: 20420 - DNA, 80 bp, synthetic construct
  misc_feature 1..80: note = Synthetic: >NC_001477.1-cand-6610-6689
  source 1..80: mol_type = other DNA
aaacatccattggcctactctgcgtgattgcctcaagtgcactgttatggatggccagtgtggaaccccattggatagcg

SEQ ID NO: 20421 - DNA, 80 bp, synthetic construct
  misc_feature 1..80: note = Synthetic: >NC_001477.1-cand-6690-6769
  source 1..80: mol_type = other DNA
gcctctatcatactggagttctttctgatggtgttgcttattccagagccggacagacagcgcactccacaagacaacca

SEQ ID NO: 20422 - DNA, 80 bp, synthetic construct
  misc_feature 1..80: note = Synthetic: >NC_001477.1-cand-6770-6849
  source 1..80: mol_type = other DNA
gctagcatacgtggtgataggtctgttattcatgatattgacagtggcagccaatgagatgggattactggaaaccacaa

SEQ ID NO: 20423 - DNA, 80 bp, synthetic construct
  misc_feature 1..80: note = Synthetic: >NC_001477.1-cand-6870-6949
  source 1..80: mol_type = other DNA
catgcagctgctgaaaaccaccatcatgctgcaatgctggacgtagacctacatccagcttcagcctggactctctatgc

SEQ ID NO: 20424 - DNA, 80 bp, synthetic construct
  misc_feature 1..80: note = Synthetic: >NC_001477.1-cand-6930-7009
  source 1..80: mol_type = other DNA
tcagcctggactctctatgcagtggccacaacaattatcactcccatgatgagacacacaattgaaaacacaacggcaaa

SEQ ID NO: 20425 - DNA, 80 bp, synthetic construct
  misc_feature 1..80: note = Synthetic: >NC_001477.1-cand-7010-7089
  source 1..80: mol_type = other DNA
tatttccctgacagctattgcaaaccaggcagctatattgatgggacttgacaagggatggccaatatcaaagatggaca

SEQ ID NO: 20426 - DNA, 80 bp, synthetic construct
  misc_feature 1..80: note = Synthetic: >NC_001477.1-cand-7120-7199
  source 1..80: mol_type = other DNA
attctcaggtgaacccgctgacgctgacagcggcggtattgatgctagtggctcattatgccataattggacccggactg

SEQ ID NO: 20427 - DNA, 80 bp, synthetic construct
  misc_feature 1..80: note = Synthetic: >NC_001477.1-cand-7170-7249
  source 1..80: mol_type = other DNA
gctcattatgccataattggacccggactgcaagcaaaagctactagagaagctcaaaaaaggacagcagccggaataat

SEQ ID NO: 20428 - DNA, 80 bp, synthetic construct
  misc_feature 1..80: note = Synthetic: >NC_001477.1-cand-7250-7329
  source 1..80: mol_type = other DNA
gaaaaacccaactgtcgacgggatcgttgcaatagatttggaccctgtggtttacgatgcaaaatttgaaaaacagctag

SEQ ID NO: 20429 - DNA, 80 bp, synthetic construct
  misc_feature 1..80: note = Synthetic: >NC_001477.1-cand-7330-7409
  source 1..80: mol_type = other DNA
gccaaataatgttgttgatactttgcacatcacagatcctcctgatgcggaccacatgggccttgtgtgaatccatcaca

SEQ ID NO: 20430 - DNA, 80 bp, synthetic construct
  misc_feature 1..80: note = Synthetic: >NC_001477.1-cand-7410-7489
  source 1..80: mol_type = other DNA
ctagccactggacctctgactacgctttgggagggatctccaggaaaattctggaacaccacgatagcggtgtccatggc

SEQ ID NO: 20431 - DNA, 80 bp, synthetic construct
  misc_feature 1..80: note = Synthetic: >NC_001477.1-cand-7420-7499
  source 1..80: mol_type = other DNA
gacctctgactacgctttgggagggatctccaggaaaattctggaacaccacgatagcggtgtccatggcaaacattttt

SEQ ID NO: 20432 - DNA, 80 bp, synthetic construct
  misc_feature 1..80: note = Synthetic: >NC_001477.1-cand-7590-7669
  source 1..80: mol_type = other DNA
acactgggagaaaaatggaaaagacagctaaaccaattgagcaagtcagaattcaacacttacaaaaggagtgggattat

SEQ ID NO: 20433 - DNA, 80 bp, synthetic construct
  misc_feature 1..80: note = Synthetic: >NC_001477.1-cand-7620-7699
  source 1..80: mol_type = other DNA
aaccaattgagcaagtcagaattcaacacttacaaaaggagtgggattatagaggtggatagatctgaagccaaagaggg

SEQ ID NO: 20434 - DNA, 80 bp, synthetic construct
  misc_feature 1..80: note = Synthetic: >NC_001477.1-cand-7730-7809
  source 1..80: mol_type = other DNA
agtgtcgagaggaacggccaaactgaggtggtttgtggagaggaaccttgtgaaaccagaagggaaagtcatagacctcg

SEQ ID NO: 20435 - DNA, 80 bp, synthetic construct
  misc_feature 1..80: note = Synthetic: >NC_001477.1-cand-7810-7889
  source 1..80: mol_type = other DNA
gttgtggaagaggtggctggtcatattattgcgctgggctgaagaaagtcacagaagtgaaaggatacacgaaaggagga

SEQ ID NO: 20436 - DNA, 80 bp, synthetic construct
  misc_feature 1..80: note = Synthetic: >NC_001526.4-cand-0-79
  source 1..80: mol_type = other DNA
ctgatcctgcaggtaccaatggggaagagggtacgggatgtaatggatggttttatgtagaggctgtagtggaaaaaaaa

SEQ ID NO: 20437 - DNA, 80 bp, synthetic construct
  misc_feature 1..80: note = Synthetic: >NC_001526.4-cand-90-169
  source 1..80: mol_type = other DNA
ctatatcagatgacgagaacgaaaatgacagtgatacaggtgaagatttggtagattttatagtaaatgataatgattat

SEQ ID NO: 20438 - DNA, 80 bp, synthetic construct
  misc_feature 1..80: note = Synthetic: >NC_001526.4-cand-160-239
  source 1..80: mol_type = other DNA
taatgattatttaacacaggcagaaacagagacagcacatgcgttgtttactgcacaggaagcaaaacaacatagagatg

SEQ ID NO: 20439 - DNA, 80 bp, synthetic construct
  misc_feature 1..80: note = Synthetic: >NC_001526.4-cand-240-319
  source 1..80: mol_type = other DNA
cagtacaggttctaaaacgaaagtatttgggtagtccacttagtgatattagtggatgtgtagacaataatattagtcct

SEQ ID NO: 20440 - DNA, 80 bp, synthetic construct
  misc_feature 1..80: note = Synthetic: >NC_001526.4-cand-320-399
  source 1..80: mol_type = other DNA
agattaaaagctatatgtatagaaaaacaaagtagagctgcaaaaaggagattatttgaaagcgaagacagcgggtatgg

SEQ ID NO: 20441 - DNA, 80 bp, synthetic construct
  misc_feature 1..80: note = Synthetic: >NC_001526.4-cand-400-479
  source 1..80: mol_type = other DNA
caatactgaagtggaaactcagcagatgttacaggtagaagggcgccatgagactgaaacaccatgtagtcagtatagtg

SEQ ID NO: 20442 - DNA, 80 bp, synthetic construct
  misc_feature 1..80: note = Synthetic: >NC_001526.4-cand-530-609
  source 1..80: mol_type = other DNA
ggtgttagtgaaagacacactatatgccaaacaccacttacaaatattttaaatgtactaaaaactagtaatgcaaaggc

SEQ ID NO: 20443 - DNA, 80 bp, synthetic construct
  misc_feature 1..80: note = Synthetic: >NC_001526.4-cand-560-639
  source 1..80: mol_type = other DNA
acaccacttacaaatattttaaatgtactaaaaactagtaatgcaaaggcagcaatgttagcaaaatttaaagagttata

SEQ ID NO: 20444 - DNA, 80 bp, synthetic construct
  misc_feature 1..80: note = Synthetic: >NC_001526.4-cand-680-759
  source 1..80: mol_type = other DNA
aataaatcaacgtgttgcgattggtgtattgctgcatttggacttacacccagtatagctgacagtataaaaacactatt

SEQ ID NO: 20445 - DNA, 80 bp, synthetic construct
  misc_feature 1..80: note = Synthetic: >NC_001526.4-cand-730-809
  source 1..80: mol_type = other DNA
cagtatagctgacagtataaaaacactattacaacaatattgtttatatttacacattcaaagtttagcatgttcatggg

SEQ ID NO: 20446 - DNA, 80 bp, synthetic construct
  misc_feature 1..80: note = Synthetic: >NC_001526.4-cand-840-919
  source 1..80: mol_type = other DNA
aatgtggaaaaaatagagaaacaattgaaaaattgctgtctaaactattatgtgtgtctccaatgtgtatgatgatagag

SEQ ID NO: 20447 - DNA, 80 bp, synthetic construct
  misc_feature 1..80: note = Synthetic: >NC_001526.4-cand-920-999
  source 1..80: mol_type = other DNA
cctccaaaattgcgtagtacagcagcagcattatattggtataaaacaggtatatcaaatattagtgaagtgtatggaga

SEQ ID NO: 20448 - DNA, 80 bp, synthetic construct
  misc_feature 1..80: note = Synthetic: >NC_001526.4-cand-1000-1079
  source 1..80: mol_type = other DNA
cacgccagaatggatacaaagacaaacagtattacaacatagttttaatgattgtacatttgaattatcacagatggtac

SEQ ID NO: 20449 - DNA, 80 bp, synthetic construct
  misc_feature 1..80: note = Synthetic: >NC_001526.4-cand-1080-1159
  source 1..80: mol_type = other DNA
aatgggcctacgataatgacatagtagacgatagtgaaattgcatataaatatgcacaattggcagacactaatagtaat

SEQ ID NO: 20450 - DNA, 80 bp, synthetic construct
  misc_feature 1..80: note = Synthetic: >NC_001526.4-cand-1240-1319
  source 1..80: mol_type = other DNA
agaaaaaaaacaaatgagtatgagtcaatggataaaatatagatgtgatagggtagatgatggaggtgattggaagcaaa

SEQ ID NO: 20451 - DNA, 80 bp, synthetic construct
  misc_feature 1..80: note = Synthetic: >NC_001526.4-cand-1320-1399
  source 1..80: mol_type = other DNA
ttgttatgtttttaaggtatcaaggtgtagagtttatgtcatttttaactgcattaaaaagatttttgcaaggcatacct

SEQ ID NO: 20452 - DNA, 80 bp, synthetic construct
  misc_feature 1..80: note = Synthetic: >NC_001611.1-cand-156050-156129
  source 1..80: mol_type = other DNA
tgtaaacacgatatagacaacgtagaattgtttgagatatgtttagagaatgctaatatagactctgtagactttaatgg

SEQ ID NO: 20453 - DNA, 80 bp, synthetic construct
  misc_feature 1..80: note = Synthetic: >NC_001611.1-cand-156130-156209
  source 1..80: mol_type = other DNA
atatacacctcttcattatgtctcatgtcgcaataaatatgattttgtaaagtcattaatttctaaaggagcaaatgtta

SEQ ID NO: 20454 - DNA, 80 bp, synthetic construct
  misc_feature 1..80: note = Synthetic: >NC_001611.1-cand-156210-156289
  source 1..80: mol_type = other DNA
atacgcgtaatagattcggaactactccattttattgtggaattatacacggtatctcgcttataaaactatatttggaa

SEQ ID NO: 20455 - DNA, 80 bp, synthetic construct
  misc_feature 1..80: note = Synthetic: >NC_001611.1-cand-156290-156369
  source 1..80: mol_type = other DNA
tcagacacagagttagaaatagataatgaacatatagttcgtcatttaataatttttgatgccgttgaatctttagatta

SEQ ID NO: 20456 - DNA, 80 bp, synthetic construct
  misc_feature 1..80: note = Synthetic: >NC_001611.1-cand-156370-156449
  source 1..80: mol_type = other DNA
tctattatttagaggagttattgatattaactatcgtactatatacaacgaaacatctatttacgacgctgttagttata

SEQ ID NO: 20457 - DNA, 80 bp, synthetic construct
  misc_feature 1..80: note = Synthetic: >NC_001611.1-cand-156450-156529
  source 1..80: mol_type = other DNA
atgcgtataatatgttggtctatctattaaacagaaatggtgattttgagacgattactactagtggatgtacatgtatt

SEQ ID NO: 20458 - DNA, 80 bp, synthetic construct
  misc_feature 1..80: note = Synthetic: >NC_001611.1-cand-156530-156609
  source 1..80: mol_type = other DNA
tcgaaagcagttgcgaacaacaacaaaataataatggaagtactattgtctaaacaaccatctttgaaaattatgatact

SEQ ID NO: 20459 - DNA, 80 bp, synthetic construct
  misc_feature 1..80: note = Synthetic: >NC_001611.1-cand-156610-156689
  source 1..80: mol_type = other DNA
gtctataatagcaattactaaacataaacaacataatacaaatttattaaaaatgtgtataaaatatactgcgtgtatga

SEQ ID NO: 20460 - DNA, 80 bp, synthetic construct
  misc_feature 1..80: note = Synthetic: >NC_001611.1-cand-156690-156769
  source 1..80: mol_type = other DNA
cagattatgatactcttatagatgtacagtcgttacagcaatataaatggtatattttaaaatgtttcgatgaaatagat

SEQ ID NO: 20461 - DNA, 80 bp, synthetic construct
  misc_feature 1..80: note = Synthetic: >NC_001611.1-cand-156770-156849
  source 1..80: mol_type = other DNA
atcatgaagagatgttatataaaaaataaaactgtattccaattagttttttgtactaaagacattaatactttaatgag

SEQ ID NO: 20462 - DNA, 80 bp, synthetic construct
  misc_feature 1..80: note = Synthetic: >NC_001611.1-cand-156850-156929
  source 1..80: mol_type = other DNA
atacggcagacatccttctttcgttaaatatactagtctcgacgtatacggaagtcgtgtacgtaatatcatagcatcta

SEQ ID NO: 20463 - DNA, 80 bp, synthetic construct
  misc_feature 1..80: note = Synthetic: >NC_001611.1-cand-156930-157009
  source 1..80: mol_type = other DNA
ttagatatcgtcagagattaattagtctattatccaagaagctggatgtgggagataaatgggcatgttttcctaacgaa

SEQ ID NO: 20464 - DNA, 80 bp, synthetic construct
  misc_feature 1..80: note = Synthetic: >NC_001611.1-cand-157010-157089
  source 1..80: mol_type = other DNA
ataaaatataaaatattggaaaactttaacgataacgaactatcgacatatctaaaaatcttataaacactattaaaata

SEQ ID NO: 20465 - DNA, 80 bp, synthetic construct
  misc_feature 1..80: note = Synthetic: >NC_001611.1-cand-157090-157169
  source 1..80: mol_type = other DNA
taaaacctaagtaggataaaacacattacatcattgtttccttttattgcttaacagtgtatactatttttaacactcat

SEQ ID NO: 20466 - DNA, 80 bp, synthetic construct
  misc_feature 1..80: note = Synthetic: >NC_001611.1-cand-157170-157249
  source 1..80: mol_type = other DNA
aaataaaaatgaaaacgatttccgttgttacgttgttatgcgtactacctgcggttgtttattcaacatgtactgtaccc

SEQ ID NO: 20467 - DNA, 80 bp, synthetic construct
  misc_feature 1..80: note = Synthetic: >NC_001611.1-cand-157250-157329
  source 1..80: mol_type = other DNA
actatgaataacgctaaattaacgtctaccgaaacatcgtttaatgataaacaaaaagttacatttacatgtgattcggg

SEQ ID NO: 20468 - DNA, 80 bp, synthetic construct
  misc_feature 1..80: note = Synthetic: >NC_001611.1-cand-158610-158689
  source 1..80: mol_type = other DNA
aatatacatccgtagaactatgattgacaagttgtacggatacgcatctctaactactattgcacgatcgctggaggtgt

SEQ ID NO: 20469 - DNA, 80 bp, synthetic construct
  misc_feature 1..80: note = Synthetic: >NC_001611.1-cand-158690-158769
  source 1..80: mol_type = other DNA
ttgttattatctgttgatgcatctagttagtttgtataaataattatttcaatatactagttaaaattttaagattttaa

SEQ ID NO: 20470 - DNA, 80 bp, synthetic construct
  misc_feature 1..80: note = Synthetic: >NC_001611.1-cand-158770-158849
  source 1..80: mol_type = other DNA
atgtataaaaactaataacgtttttatttgtaataggtgcaatagcattctattcgaataatgagtatactccgtttaat

SEQ ID NO: 20471 - DNA, 80 bp, synthetic construct
  misc_feature 1..80: note = Synthetic: >NC_001611.1-cand-158850-158929
  source 1..80: mol_type = other DNA
aaacttagtgtaaaactatatatagatggagtagataatatagaaaattcatatactgataataatgaattagtgttaat

SEQ ID NO: 20472 - DNA, 80 bp, synthetic construct
  misc_feature 1..80: note = Synthetic: >NC_001611.1-cand-159010-159089
  source 1..80: mol_type = other DNA
actataaaattattgatatgtatactattgactcgtctactatttaatgcaaaggacacacatgtagaatatctaccaaa

SEQ ID NO: 20473 - DNA, 80 bp, synthetic construct
  misc_feature 1..80: note = Synthetic: >NC_001611.1-cand-159090-159169
  source 1..80: mol_type = other DNA
ttatcatgccattatgataaacacccttatattcacaaatataagggtgataagcgacaatattctattactacaaaggg

SEQ ID NO: 20474 - DNA, 80 bp, synthetic construct
  misc_feature 1..80: note = Synthetic: >NC_001611.1-cand-159250-159329
  source 1..80: mol_type = other DNA
gatctactaatatattcgatagttatggacatagtaatacatattattcaaaatatggtctttaaaaatttaaaatatat

SEQ ID NO: 20475 - DNA, 80 bp, synthetic construct
  misc_feature 1..80: note = Synthetic: >NC_001611.1-cand-159330-159409
  source 1..80: mol_type = other DNA
tatcacttcaacgacaatagtcaaataacagccaatatgagatctgtaatgctaacagttttgctaattaatagcataaa

SEQ ID NO: 20476 - DNA, 80 bp, synthetic construct
  misc_feature 1..80: note = Synthetic: >NC_001611.1-cand-159410-159489
  source 1..80: mol_type = other DNA
tgctacgataactagctataaattcgaatccgtcaattttgattccaaaattgaatggactggcgatggtctatacaata

SEQ ID NO: 20477 - DNA, 80 bp, synthetic construct
  misc_feature 1..80: note = Synthetic: >NC_001611.1-cand-159650-159729
  source 1..80: mol_type = other DNA
atgcatcgaagtaaaaatcggaccaccaactgtaacattgactgaatacgacggccatatcaatttgtacatcgagcatc

SEQ ID NO: 20478 - DNA, 80 bp, synthetic construct
  misc_feature 1..80: note = Synthetic: >NC_001611.1-cand-159890-159969
  source 1..80: mol_type = other DNA
agactttgccacaacagaaaaagtgtgcgtgacggcgcagggagccacagaaggatttctagaaaaaattactccatgga

SEQ ID NO: 20479 - DNA, 80 bp, synthetic construct
  misc_feature 1..80: note = Synthetic: >NC_001611.1-cand-159970-160049
  source 1..80: mol_type = other DNA
gttcggaagtatgtctgacacctaagaagaatgtatttacatgcgctattagatccaaggaagatgtatccaatttcaag

SEQ ID NO: 20480 - DNA, 80 bp, synthetic construct
  misc_feature 1..80: note = Synthetic: >NC_001611.1-cand-160050-160129
  source 1..80: mol_type = other DNA
gacaaaatgaccagagttatcaagagaaaatttaataaacagtctcaaaattatatgaccaaatttctcggtactacggc

SEQ ID NO: 20481 - DNA, 80 bp, synthetic construct
  misc_feature 1..80: note = Synthetic: >NC_001611.1-cand-160130-160209
  source 1..80: mol_type = other DNA
taatgatgttactaccgtgattagcatgctagattaaatattttgggcaaatctaaatattttttataaaaattaaaaaa

SEQ ID NO: 20482 - DNA, 80 bp, synthetic construct
  misc_feature 1..80: note = Synthetic: >NC_001611.1-cand-160210-160289
  source 1..80: mol_type = other DNA
tcactttcgttatcgataactcgagaacatgggttacatatcaacatattaatgttggtggcattgtctaaaacagtcac

SEQ ID NO: 20483 - DNA, 80 bp, synthetic construct
  misc_feature 1..80: note = Synthetic: >NC_001611.1-cand-160290-160369
  source 1..80: mol_type = other DNA
gatatctcttaaatgctacagaaaggtaggattttataatctttatggatctaatgatagcgagcaggaaaattattctc

SEQ ID NO: 20484 - DNA, 80 bp, synthetic construct
  misc_feature 1..80: note = Synthetic: >NC_001611.1-cand-183320-183399
  source 1..80: mol_type = other DNA
gattaaatgtaataacaaaggttcttccttcaaacagctaacgaaagcaaagaatgatgacggtatgatgtcgcattcgg

SEQ ID NO: 20485 - DNA, 80 bp, synthetic construct
  misc_feature 1..80: note = Synthetic: >NC_001611.1-cand-183400-183479
  source 1..80: mol_type = other DNA
agacggtaactctagcgggtgactgtctatctagcgtcgacatctatatactatatagtaataccaatgctcaagactac

SEQ ID NO: 20486 - DNA, 80 bp, synthetic construct
  misc_feature 1..80: note = Synthetic: >NC_001611.1-cand-183480-183559
  source 1..80: mol_type = other DNA
gaaactgatacaatctcttatcgtgtgggtaatgttctcgatgatgatagccatatgcccggtagttgcaatatacataa

SEQ ID NO: 20487 - DNA, 80 bp, synthetic construct
  misc_feature 1..80: note = Synthetic: >NC_001611.1-cand-183560-183639
  source 1..80: mol_type = other DNA
accgatcactaattccaaacccacccgctttttatagtaagtttttcacccataaatagtaaatacaataattaatttct

SEQ ID NO: 20488 - DNA, 80 bp, synthetic construct
  misc_feature 1..80: note = Synthetic: >NC_001611.1-cand-183720-183799
  source 1..80: mol_type = other DNA
tcatgaaacaatatatcgtcctggcatgcatgtgcctggcggcagctgctatgcctgccagtcttcagcaatcctcatcc

SEQ ID NO: 20489 - DNA, 80 bp, synthetic construct
  misc_feature 1..80: note = Synthetic: >NC_001611.1-cand-183880-183959
  source 1..80: mol_type = other DNA
caatgataagatttgccaatccgtaacggaaattacagagtccgagtcagatcccgaggtggaatcagaagatgattcca

SEQ ID NO: 20490 - DNA, 80 bp, synthetic construct
  misc_feature 1..80: note = Synthetic: >NC_001611.1-cand-183960-184039
  source 1..80: mol_type = other DNA
catcagtcgaggatgtagatcctcctaccacttattactccattattggcggaggtctgagaatgaactttggattcacc

SEQ ID NO: 20491 - DNA, 80 bp, synthetic construct
  misc_feature 1..80: note = Synthetic: >NC_001611.1-cand-184040-184119
  source 1..80: mol_type = other DNA
aaatgtcctcagattaaatccatctcagaatccgctaatggaaacgcagtgaatgctagattgtccagcgtgcccctagg

SEQ ID NO: 20492 - DNA, 80 bp, synthetic construct
  misc_feature 1..80: note = Synthetic: >NC_001611.1-cand-184120-184199
  source 1..80: mol_type = other DNA
acaaggtaaggactctcccgctatcactcgtgcagaagctctggctatgatcaaagactgtgagctgtctatcgacatta

SEQ ID NO: 20493 - DNA, 80 bp, synthetic construct
  misc_feature 1..80: note = Synthetic: >NC_001611.1-cand-184200-184279
  source 1..80: mol_type = other DNA
gatgtagcgaagaagagaaagacagcgacatccagacccatccagtactcgagtctaacatctctcataagaaagtgagt

SEQ ID NO: 20494 - DNA, 80 bp, synthetic construct
  misc_feature 1..80: note = Synthetic: >NC_001611.1-cand-184280-184359
  source 1..80: mol_type = other DNA
tacgaagatatcatcggttcaacgatcgttgatacaaaatgcgtcaagaatctagagtttagtgttcgtatcggagacat

SEQ ID NO: 20495 - DNA, 80 bp, synthetic construct
  misc_feature 1..80: note = Synthetic: >NC_001611.1-cand-184360-184439
  source 1..80: mol_type = other DNA
gtgcaaggaatcgtctgatcttgaggtcaaggatggatttaagtatgtcgacggatcggtatctgaaggtgtaaccgatg

SEQ ID NO: 20496 - DNA, 80 bp, synthetic construct
  misc_feature 1..80: note = Synthetic: >NC_001611.1-cand-184440-184519
  source 1..80: mol_type = other DNA
atacttcactcatcgattcaacaaaactcaaatcgtgtgtctgaataaataactctattcatccgagattcgggtaagta

SEQ ID NO: 20497 - DNA, 80 bp, synthetic construct
  misc_feature 1..80: note = Synthetic: >NC_001611.1-cand-184520-184599
  source 1..80: mol_type = other DNA
gggttaatcgaacgatttagtcacactacgaattaaaaaagtgtacctgacactatactccggtttacaaaacaaaaatg

SEQ ID NO: 20498 - DNA, 80 bp, synthetic construct
  misc_feature 1..80: note = Synthetic: >NC_001611.1-cand-184600-184679
  source 1..80: mol_type = other DNA
ttcttaactacattaacaaaaagttatctctcgcgacttcttctttttctgtctcagtagtgtgtacgatatgatcactg

SEQ ID NO: 20499 - DNA, 80 bp, synthetic construct
  misc_feature 1..80: note = Synthetic: >NC_001611.1-cand-184680-184759
  source 1..80: mol_type = other DNA
ttcatattcctattctctcttcgatggtctcacaaaaaagttttacaaaaatatttttattctctttctctcttcgatgg

SEQ ID NO: 20500 - DNA, 80 bp, synthetic construct
  misc_feature 1..80: note = Synthetic: >NC_001612.1-cand-4080-4159
  source 1..80: mol_type = other DNA
gcgcatcatggctaaaaaaattcaacgacatggctaatgctgccaaagggctagaatggatatctaacaaaattagtaag

SEQ ID NO: 20501 - DNA, 80 bp, synthetic construct
  misc_feature 1..80: note = Synthetic: >NC_001612.1-cand-4160-4239
  source 1..80: mol_type = other DNA
ttcattgattggctcaaggagaagattataccagcagctaaggaaaaggttgaattcttgaacaacctgaaacagctacc

SEQ ID NO: 20502 - DNA, 80 bp, synthetic construct
  misc_feature 1..80: note = Synthetic: >NC_001612.1-cand-4230-4309
  source 1..80: mol_type = other DNA
aacagctaccattattagagaaccagatctcaaacctagaacaatctgctgcttcacaagaggaccttgaagcaatgttt

SEQ ID NO: 20503 - DNA, 80 bp, synthetic construct
  misc_feature 1..80: note = Synthetic: >NC_001612.1-cand-4310-4389
  source 1..80: mol_type = other DNA
ggaaatgtgtcataccttgcccatttctgccgcaaatttcagccactgtacgctacagaagccaagagggtctacgccct

SEQ ID NO: 20504 - DNA, 80 bp, synthetic construct
  misc_feature 1..80: note = Synthetic: >NC_001612.1-cand-4380-4459
  source 1..80: mol_type = other DNA
tctacgccctggagaaaaggatgaataactacatgcagttcaagagcaaacaccgtattgaacctgtatgtctcatcatc

SEQ ID NO: 20505 - DNA, 80 bp, synthetic construct
  misc_feature 1..80: note = Synthetic: >NC_001612.1-cand-4470-4549
  source 1..80: mol_type = other DNA
caggtactgggaaatctttggcaaccggtatcattgcccgggcaatagccgacaagtaccactccagtgtgtattcactt

SEQ ID NO: 20506 - DNA, 80 bp, synthetic construct
  misc_feature 1..80: note = Synthetic: >NC_001612.1-cand-4550-4629
  source 1..80: mol_type = other DNA
cccccagacccagatcactttgatgggtacaaacaacaagtagttacagttatggatgatttgtgtcaaaatcctgatgg

SEQ ID NO: 20507 - DNA, 80 bp, synthetic construct
  misc_feature 1..80: note = Synthetic: >NC_001612.1-cand-4630-4709
  source 1..80: mol_type = other DNA
taaggatatgtcattattttgtcaaatggtatccactgtggactttatcccaccaatggcctccctagaagaaaaaggag

SEQ ID NO: 20508 - DNA, 80 bp, synthetic construct
  misc_feature 1..80: note = Synthetic: >NC_001612.1-cand-4710-4789
  source 1..80: mol_type = other DNA
tttctttcacatccaaattcgtcattgcgtccaccaatgccagcaacatcatagtgccaacggtgtccgactctgatgcc

SEQ ID NO: 20509 - DNA, 80 bp, synthetic construct
  misc_feature 1..80: note = Synthetic: >NC_001612.1-cand-4790-4869
  source 1..80: mol_type = other DNA
atccgccgcagattctatatggactgtgacattgaggtgacagactcatacaagacagatttgggcagattggatgcagg

SEQ ID NO: 20510 - DNA, 80 bp, synthetic construct
  misc_feature 1..80: note = Synthetic: >NC_001612.1-cand-4870-4949
  source 1..80: mol_type = other DNA
acgggccgccagattatgttctgaaaacaacactgcaaacttcaagcgctgcagcccactggtgtgtgggaaagccattc

SEQ ID NO: 20511 - DNA, 80 bp, synthetic construct
  misc_feature 1..80: note = Synthetic: >NC_001612.1-cand-4950-5029
  source 1..80: mol_type = other DNA
aactcagagataggaaatccaaggtcagatacagtgtggacacggtggtctccgaactcattagagagtacaataacaga

SEQ ID NO: 20512 - DNA, 80 bp, synthetic construct
  misc_feature 1..80: note = Synthetic: >NC_001612.1-cand-5030-5109
  source 1..80: mol_type = other DNA
tatgctattggtaatacaatcgaagccttgtttcagggtccacctaagtttaggcccattagaatcagtcttgaggaaaa

SEQ ID NO: 20513 - DNA, 80 bp, synthetic construct
  misc_feature 1..80: note = Synthetic: >NC_001612.1-cand-5110-5189
  source 1..80: mol_type = other DNA
gccagccccagatgccattagtgatctcctcgctagtgtggacagtgaggaagtgcgtcaatactgcagagaccaaggct

SEQ ID NO: 20514 - DNA, 80 bp, synthetic construct
  misc_feature 1..80: note = Synthetic: >NC_001612.1-cand-5190-5269
  source 1..80: mol_type = other DNA
ggatcatcccagaaactcccaccaatgtcgagcggcaccttaatagggcggtgttgatcatgcagtccattgccactgtg

SEQ ID NO: 20515 - DNA, 80 bp, synthetic construct
  misc_feature 1..80: note = Synthetic: >NC_001612.1-cand-5270-5349
  source 1..80: mol_type = other DNA
gtagcagttgtttcactggtgtatgttatctacaaattgtttgcagggttccaaggtgcatactctggtgcccctaagca

SEQ ID NO: 20516 - DNA, 80 bp, synthetic construct
  misc_feature 1..80: note = Synthetic: >NC_001943.1-cand-880-959
  source 1..80: mol_type = other DNA
ctggtacagacttggttacacttgcaacatcccacttgtctggttttaggatggctgtcctacccacaattccatttcac

SEQ ID NO: 20517 - DNA, 80 bp, synthetic construct
  misc_feature 1..80: note = Synthetic: >NC_001943.1-cand-960-1039
  source 1..80: mol_type = other DNA
accactatgactttgtgggttatgaacacacttatggtttgttattattttgacaacttgctagcaataacattggcaat

SEQ ID NO: 20518 - DNA, 80 bp, synthetic construct
  misc_feature 1..80: note = Synthetic: >NC_001943.1-cand-1040-1119
  source 1..80: mol_type = other DNA
cttagcaccaattcttggcattatcttcttgtgcttcatggaagactccaactatgtgagccagatacgtggccttattg

SEQ ID NO: 20519 - DNA, 80 bp, synthetic construct
  misc_feature 1..80: note = Synthetic: >NC_001943.1-cand-1120-1199
  source 1..80: mol_type = other DNA
ctacagcagtattaattgctggtgggcatgcatgtttgacactcacaggcacgaccacgtcattgtttgttgtcatacta

SEQ ID NO: 20520 - DNA, 80 bp, synthetic construct
  misc_feature 1..80: note = Synthetic: >NC_001943.1-cand-1200-1279
  source 1..80: mol_type = other DNA
acctgtaggttcatacgtatggcaactgttttcattggcaccaggttcgagatccgtgacgctaatggaaaggttgtggc

SEQ ID NO: 20521 - DNA, 80 bp, synthetic construct
  misc_feature 1..80: note = Synthetic: >NC_001943.1-cand-1260-1339
  source 1..80: mol_type = other DNA
gctaatggaaaggttgtggccactgtaccaactaggattaaaaatgttgcatttgacttttttcagaagctgaagcagtc

SEQ ID NO: 20522 - DNA, 80 bp, synthetic construct
  misc_feature 1..80: note = Synthetic: >NC_001943.1-cand-1360-1439
  source 1..80: mol_type = other DNA
acgaattcgttgtcataaaaccaggtgcattatgtgttatagacacccctgaaggaaaagggacaggtttcttttctggc

SEQ ID NO: 20523 - DNA, 80 bp, synthetic construct
  misc_feature 1..80: note = Synthetic: >NC_001943.1-cand-1440-1519
  source 1..80: mol_type = other DNA
aatgacatagtaacagcagcacatgttgttggcaataatacttttgtgaatgtgtgctatgagggtttgatgtatgaagc

SEQ ID NO: 20524 - DNA, 80 bp, synthetic construct
  misc_feature 1..80: note = Synthetic: >NC_001943.1-cand-1520-1599
  source 1..80: mol_type = other DNA
gaaggtgcggtacatgcccgaaaaggatatagcattcttaacttgtcctggtgacctgcatccaacagcaagattaaaat

SEQ ID NO: 20525 - DNA, 80 bp, synthetic construct
  misc_feature 1..80: note = Synthetic: >NC_001943.1-cand-1600-1679
  source 1..80: mol_type = other DNA
tatcaaagaacccagattatagttgtgtcacagttatggcttatgtgaatgaggatcttgtggtttcaaccgcagcagct

SEQ ID NO: 20526 - DNA, 80 bp, synthetic construct
  misc_feature 1..80: note = Synthetic: >NC_001943.1-cand-1680-1759
  source 1..80: mol_type = other DNA
atggtgcatggcaacactctttcatatgcagttcgcacccaggacgggatgtcgggtgcaccagtctgtgacaaatatgg

SEQ ID NO: 20527 - DNA, 80 bp, synthetic construct
  misc_feature 1..80: note = Synthetic: >NC_001943.1-cand-1760-1839
  source 1..80: mol_type = other DNA
tcgggtgttagcagtccatcaaacaaacactgggtacactggaggtgctgtcataatagacccagcagacttccatccag

SEQ ID NO: 20528 - DNA, 80 bp, synthetic construct
  misc_feature 1..80: note = Synthetic: >NC_001943.1-cand-1840-1919
  source 1..80: mol_type = other DNA
tgaaagccccatctcaggtggaattgctcaaagaggaaatagagcggctaaaagctcaactgaactctgccactgagaac

SEQ ID NO: 20529 - DNA, 80 bp, synthetic construct
  misc_feature 1..80: note = Synthetic: >NC_001943.1-cand-1920-1999
  source 1..80: mol_type = other DNA
gcaacgactgtagttacacaacaacctagtgctgcactagaacagaaaagtgtcagcgatagtgatgtagttgaccttgt

SEQ ID NO: 20530 - DNA, 80 bp, synthetic construct
  misc_feature 1..80: note = Synthetic: >NC_001943.1-cand-2000-2079
  source 1..80: mol_type = other DNA
cagaactgcaatggaacgtgagatgaaggtgctgcgtgatgaaatcaatggaatacttgcaccattcctacaaaaaaaga

SEQ ID NO: 20531 - DNA, 80 bp, synthetic construct
  misc_feature 1..80: note = Synthetic: >NC_001943.1-cand-2110-2189
  source 1..80: mol_type = other DNA
tcaggcgtaaccttagaaaaggtgtgaaacttcttaccgaggaagagtatcgagaactcttagagaaaggtcttgatcgt

SEQ ID NO: 20532 - DNA, 80 bp, synthetic construct
  misc_feature 1..80: note = Synthetic: >NC_002022.1-cand-2080-2159
  source 1..80: mol_type = other DNA
tgaagcaattgaggagtgcctaattaatgatccctgggttttgcttaatgcttcttggttcaactccttccttacacatg

SEQ ID NO: 20533 - DNA, 80 bp, synthetic construct
  misc_feature 1..80: note = Synthetic: >NC_002022.1-cand-2130-2209
  source 1..80: mol_type = other DNA
cttcttggttcaactccttccttacacatgcattgagttagttgtggcagtgctactatttgctatccatactgtccaaa

SEQ ID NO: 20534 - DNA, 80 bp, synthetic construct
  misc_feature 1..80: note = Synthetic: >NC_002023.1-cand-20-99
  source 1..80: mol_type = other DNA
aatatggaaagaataaaagaactaagaaatctaatgtcgcagtctcgcacccgcgagatactcacaaaaaccaccgtgga

SEQ ID NO: 20535 - DNA, 80 bp, synthetic construct
  misc_feature 1..80: note = Synthetic: >NC_002023.1-cand-200-279
  source 1..80: mol_type = other DNA
gacaagaggataacggaaatgattcctgagagaaatgagcaaggacaaactttatggagtaaaatgaatgatgccggatc

SEQ ID NO: 20536 - DNA, 80 bp, synthetic construct
  misc_feature 1..80: note = Synthetic: >NC_002023.1-cand-280-359
  source 1..80: mol_type = other DNA
agaccgagtgatggtatcacctctggctgtgacatggtggaataggaatggaccaatgacaaatacagttcattatccaa

SEQ ID NO: 20537 - DNA, 80 bp, synthetic construct
  misc_feature 1..80: note = Synthetic: >NC_002023.1-cand-440-519
  source 1..80: mol_type = other DNA
aaaatacgtcggagagttgacataaatcctggtcatgcagatctcagtgccaaggaggcacaggatgtaatcatggaagt

SEQ ID NO: 20538 - DNA, 80 bp, synthetic construct
  misc_feature 1..80: note = Synthetic: >NC_002023.1-cand-520-599
  source 1..80: mol_type = other DNA
tgttttccctaacgaagtgggagccaggatactaacatcggaatcgcaactaacgataaccaaagagaagaaagaagaac

SEQ ID NO: 20539 - DNA, 80 bp, synthetic construct
  misc_feature 1..80: note = Synthetic: >NC_002023.1-cand-680-759
  source 1..80: mol_type = other DNA
gtggctggtggaacaagcagtgtgtacattgaagtgttgcatttgactcaaggaacatgctgggaacagatgtatactcc

SEQ ID NO: 20540 - DNA, 80 bp, synthetic construct
  misc_feature 1..80: note = Synthetic: >NC_002023.1-cand-770-849
  source 1..80: mol_type = other DNA
gtgaagaatgatgatgttgatcaaagcttgattattgctgctaggaacatagtgagaagagctgcagtatcagcagaccc

SEQ ID NO: 20541 - DNA, 80 bp, synthetic construct
  misc_feature 1..80: note = Synthetic: >NC_002023.1-cand-930-1009
  source 1..80: mol_type = other DNA
cagaagagcaagccgtgggtatatgcaaggctgcaatgggactgagaattagctcatccttcagttttggtggattcaca

SEQ ID NO: 20542 - DNA, 80 bp, synthetic construct
  misc_feature 1..80: note = Synthetic: >NC_002023.1-cand-1010-1089
  source 1..80: mol_type = other DNA
tttaagagaacaagcggatcatcagtcaagagagaggaagaggtgcttacgggcaatcttcaaacattgaagataagagt

SEQ ID NO: 20543 - DNA, 80 bp, synthetic construct
  misc_feature 1..80: note = Synthetic: >NC_002023.1-cand-1100-1179
  source 1..80: mol_type = other DNA
tatgaagagttcacaatggttgggagaagagcaacagccatactcagaaaagcaaccaggagattgattcagctgatagt

SEQ ID NO: 20544 - DNA, 80 bp, synthetic construct
  misc_feature 1..80: note = Synthetic: >NC_002023.1-cand-1180-1259
  source 1..80: mol_type = other DNA
gagtgggagagacgaacagtcgattgccgaagcaataattgtggccatggtattttcacaagaggattgtatgataaaag

SEQ ID NO: 20545 - DNA, 80 bp, synthetic construct
  misc_feature 1..80: note = Synthetic: >NC_002023.1-cand-1260-1339
  source 1..80: mol_type = other DNA
cagttagaggtgatctgaatttcgtcaatagggcgaatcagcgactgaatcctatgcatcaacttttaagacattttcag

SEQ ID NO: 20546 - DNA, 80 bp, synthetic construct
  misc_feature 1..80: note = Synthetic: >NC_002023.1-cand-1370-1449
  source 1..80: mol_type = other DNA
ggagttgaacctatcgacaatgtgatgggaatgattgggatattgcccgacatgactccaagcatcgagatgtcaatgag

SEQ ID NO: 20547 - DNA, 80 bp, synthetic construct
  misc_feature 1..80: note = Synthetic: >NC_002023.1-cand-1420-1499
  source 1..80: mol_type = other DNA
catgactccaagcatcgagatgtcaatgagaggagtgagaatcagcaaaatgggtgtagatgagtactccagcacggaga

SEQ ID NO: 20548 - DNA, 80 bp, synthetic construct
  misc_feature 1..80: note = Synthetic: >NC_002031.1-cand-3200-3279
  source 1..80: mol_type = other DNA
tagctctcacaatcatatccctggatacaaggttcagacgaacggaccttggatgcaggtaccactagaagtgaagagag

SEQ ID NO: 20549 - DNA, 80 bp, synthetic construct
  misc_feature 1..80: note = Synthetic: >NC_002031.1-cand-3250-3329
  source 1..80: mol_type = other DNA
ggatgcaggtaccactagaagtgaagagagaagcttgcccagggactagcgtgatcattgatggcaactgtgatggacgg

SEQ ID NO: 20550 - DNA, 80 bp, synthetic construct
  misc_feature 1..80: note = Synthetic: >NC_002031.1-cand-3360-3439
  source 1..80: mol_type = other DNA
gggaaagttattcctgaatggtgttgccgctcctgcacaatgccgcctgtgagcttccatggtagtgatgggtgttggta

SEQ ID NO: 20551 - DNA, 80 bp, synthetic construct
  misc_feature 1..80: note = Synthetic: >NC_002031.1-cand-3440-3519
  source 1..80: mol_type = other DNA
tcccatggaaattaggccaaggaaaacgcatgaaagccatctggtgcgctcctgggttacagctggagaaatacatgctg

SEQ ID NO: 20552 - DNA, 80 bp, synthetic construct
  misc_feature 1..80: note = Synthetic: >NC_002031.1-cand-3520-3599
  source 1..80: mol_type = other DNA
tcccttttggtttggtgagcatgatgatagcaatggaagtggtcctaaggaaaagacagggaccaaagcaaatgttggtt

SEQ ID NO: 20553 - DNA, 80 bp, synthetic construct
  misc_feature 1..80: note = Synthetic: >NC_002031.1-cand-3600-3679
  source 1..80: mol_type = other DNA
ggaggagtagtgctcttgggagcaatgctggtcgggcaagtaactctccttgatttgctgaaactcacagtggctgtggg

SEQ ID NO: 20554 - DNA, 80 bp, synthetic construct
  misc_feature 1..80: note = Synthetic: >NC_002031.1-cand-3680-3759
  source 1..80: mol_type = other DNA
attgcatttccatgagatgaacaatggaggagacgccatgtatatggcgttgattgctgccttttcaatcagaccagggc

SEQ ID NO: 20555 - DNA, 80 bp, synthetic construct
  misc_feature 1..80: note = Synthetic: >NC_002031.1-cand-3760-3839
  source 1..80: mol_type = other DNA
tgctcatcggctttgggctcaggaccctatggagccctcgggaacgccttgtgctgaccctaggagcagccatggtggag

SEQ ID NO: 20556 - DNA, 80 bp, synthetic construct
  misc_feature 1..80: note = Synthetic: >NC_002031.1-cand-3840-3919
  source 1..80: mol_type = other DNA
attgccttgggtggcgtgatgggcggcctgtggaagtatctaaatgcagtttctctctgcatcctgacaataaatgctgt

SEQ ID NO: 20557 - DNA, 80 bp, synthetic construct
  misc_feature 1..80: note = Synthetic: >NC_002031.1-cand-3920-3999
  source 1..80: mol_type = other DNA
tgcttctaggaaagcatcaaataccatcttgcccctcatggctctgttgacacctgtcactatggctgaggtgagacttg

SEQ ID NO: 20558 - DNA, 80 bp, synthetic construct
  misc_feature 1..80: note = Synthetic: >NC_002031.1-cand-4040-4119
  source 1..80: mol_type = other DNA
tcaccagaatttcaaggacacctccatgcagaagactatacctctggtggccctcacactcacatcttacctgggcttga

SEQ ID NO: 20559 - DNA, 80 bp, synthetic construct
  misc_feature 1..80: note = Synthetic: >NC_002031.1-cand-4080-4159
  source 1..80: mol_type = other DNA
cctctggtggccctcacactcacatcttacctgggcttgacacaaccttttttgggcctgtgtgcatttctggcaacccg

SEQ ID NO: 20560 - DNA, 80 bp, synthetic construct
  misc_feature 1..80: note = Synthetic: >NC_002031.1-cand-4160-4239
  source 1..80: mol_type = other DNA
catatttgggcgaaggagtatcccagtgaatgaggcactcgcagcagctggtctagtgggagtgctggcaggactggctt

SEQ ID NO: 20561 - DNA, 80 bp, synthetic construct
  misc_feature 1..80: note = Synthetic: >NC_002031.1-cand-4240-4319
  source 1..80: mol_type = other DNA
ttcaggagatggagaacttccttggtccgattgcagttggaggactcctgatgatgctggttagcgtggctgggagggtg

SEQ ID NO: 20562 - DNA, 80 bp, synthetic construct
  misc_feature 1..80: note = Synthetic: >NC_002031.1-cand-4320-4399
  source 1..80: mol_type = other DNA
gatgggctagagctcaagaagcttggtgaagtttcatgggaagaggaggcggagatcagcgggagttccgcccgctatga

SEQ ID NO: 20563 - DNA, 80 bp, synthetic construct
  misc_feature 1..80: note = Synthetic: >NC_002031.1-cand-4340-4419
  source 1..80: mol_type = other DNA
gcttggtgaagtttcatgggaagaggaggcggagatcagcgggagttccgcccgctatgatgtggcactcagtgaacaag

SEQ ID NO: 20564 - DNA, 80 bp, synthetic construct
  misc_feature 1..80: note = Synthetic: >NC_002031.1-cand-5790-5869
  source 1..80: mol_type = other DNA
tttatattggccactgacatagctgaaatgggagccaacctttgcgtggagcgagtgctggattgcaggacggcttttaa

SEQ ID NO: 20565 - DNA, 80 bp, synthetic construct
  misc_feature 1..80: note = Synthetic: >NC_002031.1-cand-5870-5949
  source 1..80: mol_type = other DNA
gcctgtgcttgtggatgaagggaggaaggtggcaataaaagggccacttcgtatctccgcatcctctgctgctcaaagga

SEQ ID NO: 20566 - DNA, 80 bp, synthetic construct
  misc_feature 1..80: note = Synthetic: >NC_002031.1-cand-5960-6039
  source 1..80: mol_type = other DNA
tgggagaaatcccaacagagatggagactcatactactattctgagcctacaagtgaaaataatgcccaccacgtctgct

SEQ ID NO: 20567 - DNA, 80 bp, synthetic construct
  misc_feature 1..80: note = Synthetic: >NC_002031.1-cand-6000-6079
  source 1..80: mol_type = other DNA
tctgagcctacaagtgaaaataatgcccaccacgtctgctggttggaggcctcaatgctcttggacaacatggaggtgag

SEQ ID NO: 20568 - DNA, 80 bp, synthetic construct
  misc_feature 1..80: note = Synthetic: >NC_002031.1-cand-6110-6189
  source 1..80: mol_type = other DNA
tgaaggaactaaaacaccagtttcccctggtgaaatgagactgagggatgaccagaggaaagtcttcagagaactagtga

SEQ ID NO: 20569 - DNA, 80 bp, synthetic construct
  misc_feature 1..80: note = Synthetic: >NC_002031.1-cand-6190-6269
  source 1..80: mol_type = other DNA
ggaattgtgacctgcccgtttggctttcgtggcaagtggccaaggctggtttgaagacgaatgatcgtaagtggtgtttt

SEQ ID NO: 20570 - DNA, 80 bp, synthetic construct
  misc_feature 1..80: note = Synthetic: >NC_002031.1-cand-6270-6349
  source 1..80: mol_type = other DNA
gaaggccctgaggaacatgagatcttgaatgacagcggtgaaacagtgaagtgcagggctcctggaggagcaaagaagcc

SEQ ID NO: 20571 - DNA, 80 bp, synthetic construct
  misc_feature 1..80: note = Synthetic: >NC_002031.1-cand-6350-6429
  source 1..80: mol_type = other DNA
tctgcgcccaaggtggtgtgatgaaagggtgtcatctgaccagagtgcgctgtctgaatttattaagtttgctgaaggta

SEQ ID NO: 20572 - DNA, 80 bp, synthetic construct
  misc_feature 1..80: note = Synthetic: >NC_002031.1-cand-6440-6519
  source 1..80: mol_type = other DNA
tgctgaagtgctagttgtgctgagtgaactccctgatttcctggctaaaaaaggtggagaggcaatggataccatcagtg

SEQ ID NO: 20573 - DNA, 80 bp, synthetic construct
  misc_feature 1..80: note = Synthetic: >NC_002031.1-cand-6520-6599
  source 1..80: mol_type = other DNA
tgttcctccactctgaggaaggctctagggcttaccgcaatgcactatcaatgatgcctgaggcaatgacaatagtcatg

SEQ ID NO: 20574 - DNA, 80 bp, synthetic construct
  misc_feature 1..80: note = Synthetic: >NC_002031.1-cand-6600-6679
  source 1..80: mol_type = other DNA
ctgtttatactggctggactactgacatcgggaatggtcatctttttcatgtctcccaaaggcatcagtagaatgtctat

SEQ ID NO: 20575 - DNA, 80 bp, synthetic construct
  misc_feature 1..80: note = Synthetic: >NC_002031.1-cand-6690-6769
  source 1..80: mol_type = other DNA
acaatggccggctgtggatatctcatgttccttggaggcgtcaaacccactcacatctcctatgtcatgctcatattctt

SEQ ID NO: 20576 - DNA, 80 bp, synthetic construct
  misc_feature 1..80: note = Synthetic: >NC_002031.1-cand-6770-6849
  source 1..80: mol_type = other DNA
tgtcctgatggtggttgtgatccccgagccagggcaacaaaggtccatccaagacaaccaagtggcatacctcattattg

SEQ ID NO: 20577 - DNA, 80 bp, synthetic construct
  misc_feature 1..80: note = Synthetic: >NC_002031.1-cand-6850-6929
  source 1..80: mol_type = other DNA
gcatcctgacgctggtttcagcggtggcagccaacgagctaggcatgctggagaaaaccaaagaggacctctttgggaag

SEQ ID NO: 20578 - DNA, 80 bp, synthetic construct
  misc_feature 1..80: note = Synthetic: >NC_002031.1-cand-6930-7009
  source 1..80: mol_type = other DNA
aagaacttaattccatctagtgcttcaccctggagttggccggatcttgacctgaagccaggagctgcctggacagtgta

SEQ ID NO: 20579 - DNA, 80 bp, synthetic construct
  misc_feature 1..80: note = Synthetic: >NC_002031.1-cand-7010-7089
  source 1..80: mol_type = other DNA
cgttggcattgttacaatgctctctccaatgttgcaccactggatcaaagtcgaatatggcaacctgtctctgtctggaa

SEQ ID NO: 20580 - DNA, 80 bp, synthetic construct
  misc_feature 1..80: note = Synthetic: >NC_003310.1-cand-24530-24609
  source 1..80: mol_type = other DNA
tagttcttttatgtcaagaaggcactggtttaattcatctataaatgtcacgccataactaccacgcatactatactcag

SEQ ID NO: 20581 - DNA, 80 bp, synthetic construct
  misc_feature 1..80: note = Synthetic: >NC_003310.1-cand-24650-24729
  source 1..80: mol_type = other DNA
gggattaatctttgttggatcagtctctaagttaacacatgtcacacatgatccatttatagttatatcacacgatgatg

SEQ ID NO: 20582 - DNA, 80 bp, synthetic construct
  misc_feature 1..80: note = Synthetic: >NC_003310.1-cand-24690-24769
  source 1..80: mol_type = other DNA
gtcacacatgatccatttatagttatatcacacgatgatgatttatgaattgattccggaagatcgctattgtattttgt

SEQ ID NO: 20583 - DNA, 80 bp, synthetic construct
  misc_feature 1..80: note = Synthetic: >NC_003310.1-cand-24770-24849
  source 1..80: mol_type = other DNA
agttccacaattcatttccatacatgttattgtcacactaatattatgatgaactttatctagccgctgagtggtaaaca

SEQ ID NO: 20584 - DNA, 80 bp, synthetic construct
  misc_feature 1..80: note = Synthetic: >NC_003310.1-cand-24840-24919
  source 1..80: mol_type = other DNA
gtggtaaacaacagaacagatagtttattatctttaccaacaccctcagccgctgccacaaatctctgatccgtatccat

SEQ ID NO: 20585 - DNA, 80 bp, synthetic construct
  misc_feature 1..80: note = Synthetic: >NC_003310.1-cand-24920-24999
  source 1..80: mol_type = other DNA
gatggtcatgtttatttttagtccgtatccagtcaacactatgttagcatttctgtcgatatagctttcactcatatgac

SEQ ID NO: 20586 - DNA, 80 bp, synthetic construct
  misc_feature 1..80: note = Synthetic: >NC_003310.1-cand-25000-25079
  source 1..80: mol_type = other DNA
actcaccaataattgtagaattaatgtcgtaatttacaccaatagtgagttcggcgacaaagtaccagtaccggtaatct

SEQ ID NO: 20587 - DNA, 80 bp, synthetic construct
  misc_feature 1..80: note = Synthetic: >NC_003310.1-cand-25160-25239
  source 1..80: mol_type = other DNA
aaccatcttactcaaaatatgcgacaatagtacgatgcaatgagtaagacaataggaaatctatcttatacacataatta

SEQ ID NO: 20588 - DNA, 80 bp, synthetic construct
  misc_feature 1..80: note = Synthetic: >NC_003310.1-cand-25240-25319
  source 1..80: mol_type = other DNA
ttctatcaattttaccaattagttagtgtaatgttaacaaaaatgtgggataatttaatagtttttccttacataattga

SEQ ID NO: 20589 - DNA, 80 bp, synthetic construct
  misc_feature 1..80: note = Synthetic: >NC_003310.1-cand-25320-25399
  source 1..80: mol_type = other DNA
catacatgagtctgagttcctcgtttttgctaattatttcgtccaatttattattcttgacatcgtcaagatcttttgta

SEQ ID NO: 20590 - DNA, 80 bp, synthetic construct
  misc_feature 1..80: note = Synthetic: >NC_003310.1-cand-25400-25479
  source 1..80: mol_type = other DNA
taggagtcagacttgtattcaacatgtttttctataatcatcttagctatttcggcatcatccaatagtacattttccag

SEQ ID NO: 20591 - DNA, 80 bp, synthetic construct
  misc_feature 1..80: note = Synthetic: >NC_003310.1-cand-25450-25529
  source 1..80: mol_type = other DNA
ttcggcatcatccaatagtacattttccagattaacagaatagatattaatgtcgtatttgaacagagcctgtaacatct

SEQ ID NO: 20592 - DNA, 80 bp, synthetic construct
  misc_feature 1..80: note = Synthetic: >NC_003310.1-cand-25530-25609
  source 1..80: mol_type = other DNA
caatgtctttattatctatagccaatttgatgtccggaatgaagagaagggaattggtgtttgtcgacgtcatatagtcg

SEQ ID NO: 20593 - DNA, 80 bp, synthetic construct
  misc_feature 1..80: note = Synthetic: >NC_003310.1-cand-25610-25689
  source 1..80: mol_type = other DNA
agcaagagaatcatcatatccacgtgtccattttttatagtggtgtgaatacaactaaggagaatagctagatcaaaagg

SEQ ID NO: 20594 - DNA, 80 bp, synthetic construct
  misc_feature 1..80: note = Synthetic: >NC_003310.1-cand-25690-25769
  source 1..80: mol_type = other DNA
agatggtatctctgaaagaaagtaggaaacaatacttacatcattaagcatgacagcatgataaaatgaagttttccatc

SEQ ID NO: 20595 - DNA, 80 bp, synthetic construct
  misc_feature 1..80: note = Synthetic: >NC_003310.1-cand-25770-25849
  source 1..80: mol_type = other DNA
cagttttcccatagaacatcagtctccaatttttcttaacaaacagttttaccgtttgcatgttaccactatcaaccgca

SEQ ID NO: 20596 - DNA, 80 bp, synthetic construct
  misc_feature 1..80: note = Synthetic: >NC_003310.1-cand-93990-94069
  source 1..80: mol_type = other DNA
tttataataaaacacgatatggatgccaacatagtatcatcttctactattgcgacgtatatagacgctttagcgaagaa

SEQ ID NO: 20597 - DNA, 80 bp, synthetic construct
  misc_feature 1..80: note = Synthetic: >NC_003310.1-cand-94070-94149
  source 1..80: mol_type = other DNA
tgcttcagaattagaacagaggtctaccgcatacgaaataaataatgaattggaactagtatttattaaaccgccattga

SEQ ID NO: 20598 - DNA, 80 bp, synthetic construct
  misc_feature 1..80: note = Synthetic: >NC_003310.1-cand-94140-94219
  source 1..80: mol_type = other DNA
ccgccattgattacgttgacaaatgtagtaaatatctccacgattcaggaatcgtttattcgatttaccgttactaataa

SEQ ID NO: 20599 - DNA, 80 bp, synthetic construct
  misc_feature 1..80: note = Synthetic: >NC_003310.1-cand-94370-94449
  source 1..80: mol_type = other DNA
gagactatcgacagaggaacgtcatatatttttggattacaagaaatatggatcctctatccgactagaattagtcaatc

SEQ ID NO: 20600 - DNA, 80 bp, synthetic construct
  misc_feature 1..80: note = Synthetic: >NC_003310.1-cand-94770-94849
  source 1..80: mol_type = other DNA
ctatatgccgtaactaagactgatggcattcctataactatcagagttacatcaaaagggttgtattgttattttacaca

SEQ ID NO: 20601 - DNA, 80 bp, synthetic construct
  misc_feature 1..80: note = Synthetic: >NC_003310.1-cand-95090-95169
  source 1..80: mol_type = other DNA
agtcgtcgatatgttatctacatatttaccaaagcaaccagaaggtgttattctgttctattcaaagggacctaaatcta

SEQ ID NO: 20602 - DNA, 80 bp, synthetic construct
  misc_feature 1..80: note = Synthetic: >NC_003310.1-cand-95240-95319
  source 1..80: mol_type = other DNA
cagtgaaccaattatctttggagagtcgtctatctttatagagtataagaaatttaccaacgataaaggctttcctaaag

SEQ ID NO: 20603 - DNA, 80 bp, synthetic construct
  misc_feature 1..80: note = Synthetic: >NC_003310.1-cand-95320-95399
  source 1..80: mol_type = other DNA
aatatggttctggtaagattgtgttatataacggcgttaattatctaaataatatctattgtttggaatatattaataca

SEQ ID NO: 20604 - DNA, 80 bp, synthetic construct
  misc_feature 1..80: note = Synthetic: >NC_003310.1-cand-95400-95479
  source 1..80: mol_type = other DNA
cataatgaagtgggtattaagtccgttgttgtacctattaagtttatagcagaattcttagtcaatggagaaatacttaa

SEQ ID NO: 20605 - DNA, 80 bp, synthetic construct
  misc_feature 1..80: note = Synthetic: >NC_003310.1-cand-95480-95559
  source 1..80: mol_type = other DNA
acctagaatcgataaaaccatgaaatatattaactcagaagactattatggaaatcaacataatatcatagtcgaacatt

SEQ ID NO: 20606 - DNA, 80 bp, synthetic construct
  misc_feature 1..80: note = Synthetic: >NC_003310.1-cand-95560-95639
  source 1..80: mol_type = other DNA
taagagatcaaagcatcaaaataggagatgtctttaacgaggataaactatcggatattggacatcaatacgccgccaac

SEQ ID NO: 20607 - DNA, 80 bp, synthetic construct
  misc_feature 1..80: note = Synthetic: >NC_003310.1-cand-95630-95709
  source 1..80: mol_type = other DNA
cgccgccaacaacgataaatttagattaaatccagaagttagttattttactaataaacgaactagagggccgttgggaa

SEQ ID NO: 20608 - DNA, 80 bp, synthetic construct
  misc_feature 1..80: note = Synthetic: >NC_003310.1-cand-96020-96099
  source 1..80: mol_type = other DNA
aaagtttaatatcattgactggcagttcgctattcattattcttttcatccaagacattatgctacagtcatgaataact

SEQ ID NO: 20609 - DNA, 80 bp, synthetic construct
  misc_feature 1..80: note = Synthetic: >NC_003310.1-cand-96650-96729
  source 1..80: mol_type = other DNA
tattattaatagatatattaatacttttgtagggtaacagaggttctacgtcttctaaaaataaaagttttataacatct

SEQ ID NO: 20610 - DNA, 80 bp, synthetic construct
  misc_feature 1..80: note = Synthetic: >NC_003310.1-cand-97050-97129
  source 1..80: mol_type = other DNA
attaaaggagcatgtatttttttctgaatatattgtgactccagatacatatggatctttatgcgtcgaattaaatgggt

SEQ ID NO: 20611 - DNA, 80 bp, synthetic construct
  misc_feature 1..80: note = Synthetic: >NC_003310.1-cand-97210-97289
  source 1..80: mol_type = other DNA
tccaatcatatatctgaagatatacacactgataaatttgtcatttatgatatttatacgtttgattcgttcaagaataa

SEQ ID NO: 20612 - DNA, 80 bp, synthetic construct
  misc_feature 1..80: note = Synthetic: >NC_003461.1-cand-690-769
  source 1..80: mol_type = other DNA
cttcaatagattagaagcattcagacaggatggaaccgttaaaagtgccctggtcttcacaggagacacagttgaaggta

SEQ ID NO: 20613 - DNA, 80 bp, synthetic construct
  misc_feature 1..80: note = Synthetic: >NC_003461.1-cand-770-849
  source 1..80: mol_type = other DNA
ttggtgcagtgatgaggtcacaacaaagcttagtatctcttatggtagaaactctggtgactatgaacacatccaggtca

SEQ ID NO: 20614 - DNA, 80 bp, synthetic construct
  misc_feature 1..80: note = Synthetic: >NC_003461.1-cand-850-929
  source 1..80: mol_type = other DNA
gatttaactacattagagaagaacattcagattgtaggaaattacataagagatgcaggattagcatctttcatgaacac

SEQ ID NO: 20615 - DNA, 80 bp, synthetic construct
  misc_feature 1..80: note = Synthetic: >NC_003461.1-cand-930-1009
  source 1..80: mol_type = other DNA
catcaagtatggtgtagaaacgaagatggccgccctgacactatcaaatctgagaccagatataaacaaattgagaagcc

SEQ ID NO: 20616 - DNA, 80 bp, synthetic construct
  misc_feature 1..80: note = Synthetic: >NC_003461.1-cand-1010-1089
  source 1..80: mol_type = other DNA
ttgttgatatctatctatcaaagggagcccgagccccttttatatgtatactcagagacccagttcatggagactttgcc

SEQ ID NO: 20617 - DNA, 80 bp, synthetic construct
  misc_feature 1..80: note = Synthetic: >NC_003461.1-cand-1090-1169
  source 1..80: mol_type = other DNA
cctggaaactatccagcactgtggagctacgcaatgggcgttgctgtggtacaaaacaaagctatgcaacagtatgtaac

SEQ ID NO: 20618 - DNA, 80 bp, synthetic construct
  misc_feature 1..80: note = Synthetic: >NC_003461.1-cand-1170-1249
  source 1..80: mol_type = other DNA
tggaagaacatatttggacatggaaatgttcctacttggacaagctgtagctaaagatgctgattccaaaatcagcagtg

SEQ ID NO: 20619 - DNA, 80 bp, synthetic construct
  misc_feature 1..80: note = Synthetic: >NC_003461.1-cand-1240-1319
  source 1..80: mol_type = other DNA
atcagcagtgctctggaggaagaactaggtgtgacagatacagcaaaagagagactaagacaccatctgacaaacctttc

SEQ ID NO: 20620 - DNA, 80 bp, synthetic construct
  misc_feature 1..80: note = Synthetic: >NC_003461.1-cand-1340-1419
  source 1..80: mol_type = other DNA
acaagcctacaggtggtggagctatagaagtggcaattgatcatacagacataacatttggagtcgaggacactgctgat

SEQ ID NO: 20621 - DNA, 80 bp, synthetic construct
  misc_feature 1..80: note = Synthetic: >NC_003461.1-cand-1420-1499
  source 1..80: mol_type = other DNA
cgggacaacaagaactggacaaatgacagcaatgaaagatggatgaatcactcgatcagcaaccacacaatcacgattcg

SEQ ID NO: 20622 - DNA, 80 bp, synthetic construct
  misc_feature 1..80: note = Synthetic: >NC_003461.1-cand-1500-1579
  source 1..80: mol_type = other DNA
tggtgcagaagaacttgaagaagagacaaatgatgaagacatcactgatatagaaaacaagattgcacgaaggctggccg

SEQ ID NO: 20623 - DNA, 80 bp, synthetic construct
  misc_feature 1..80: note = Synthetic: >NC_003461.1-cand-1580-1659
  source 1..80: mol_type = other DNA
acagaaaacagagactaagccaggcaaacaataaacgagacaccagcagtgatgctgactatgagaatgatgatgatgct

SEQ ID NO: 20624 - DNA, 80 bp, synthetic construct
  misc_feature 1..80: note = Synthetic: >NC_003461.1-cand-1660-1739
  source 1..80: mol_type = other DNA
acagcggctgcagggataggaggaatttaacaggatacttggacaatagaagccagatcaaaagtaagaaaaacttaggg

SEQ ID NO: 20625 - DNA, 80 bp, synthetic construct
  misc_feature 1..80: note = Synthetic: >NC_003461.1-cand-1740-1819
  source 1..80: mol_type = other DNA
tgaatgacaattcacagatcagctcaaccagacaccaccagcatacacgaaaccaaccttcacagtggatacctcagcat

SEQ ID NO: 20626 - DNA, 80 bp, synthetic construct
  misc_feature 1..80: note = Synthetic: >NC_003461.1-cand-1820-1899
  source 1..80: mol_type = other DNA
ccaaaactctccttcccgaatggatcaggatgccttcttttttgagagggatcctgaagccgaaggagaggcaccacgaa

SEQ ID NO: 20627 - DNA, 80 bp, synthetic construct
  misc_feature 1..80: note = Synthetic: >NC_003461.1-cand-1900-1979
  source 1..80: mol_type = other DNA
aacaagaatcactctcagatgtcatcggactccttgacgtcgtcttatcctacaagcccacagaaattggagaagacaga

SEQ ID NO: 20628 - DNA, 80 bp, synthetic construct
  misc_feature 1..80: note = Synthetic: >NC_003908.1-cand-10590-10669
  source 1..80: mol_type = other DNA
gaacaactcaggacgacccctgcaagaaacagcaccatttggatgtaaaattgaagtggagcctctgcgagcgtctaact

SEQ ID NO: 20629 - DNA, 80 bp, synthetic construct
  misc_feature 1..80: note = Synthetic: >NC_003908.1-cand-10670-10749
  source 1..80: mol_type = other DNA
gtgcttacgggcacatccctatctcgattgacatccctgatgcagcttttgtgagatcatcagaatcaccaacaatttta

SEQ ID NO: 20630 - DNA, 80 bp, synthetic construct
  misc_feature 1..80: note = Synthetic: >NC_003908.1-cand-10750-10829
  source 1..80: mol_type = other DNA
gaagttagctgcacagtagcagactgcatttattctgcagactttggtggttctctaacattacagtacaaagctgacag

SEQ ID NO: 20631 - DNA, 80 bp, synthetic construct
  misc_feature 1..80: note = Synthetic: >NC_003908.1-cand-10830-10909
  source 1..80: mol_type = other DNA
ggagggacattgtccagttcactcccactccacgacagctgttttgaaggaagcgaccacacatgtgactgccgtaggca

SEQ ID NO: 20632 - DNA, 80 bp, synthetic construct
  misc_feature 1..80: note = Synthetic: >NC_003908.1-cand-10910-10989
  source 1..80: mol_type = other DNA
gcataacactacattttagcacatcgagcccacaagcaaattttatagtttcgctatgcggcaagaagtccacctgcaat

SEQ ID NO: 20633 - DNA, 80 bp, synthetic construct
  misc_feature 1..80: note = Synthetic: >NC_003908.1-cand-10990-11069
  source 1..80: mol_type = other DNA
gctgaatgtaaaccaccggccgaccacataattggagaaccacataaagtcgaccaagaattccaggcggcagtttccaa

SEQ ID NO: 20634 - DNA, 80 bp, synthetic construct
  misc_feature 1..80: note = Synthetic: >NC_003908.1-cand-11020-11099
  source 1..80: mol_type = other DNA
attggagaaccacataaagtcgaccaagaattccaggcggcagtttccaaaacatcttggaactggctgcttgcactgtt

SEQ ID NO: 20635 - DNA, 80 bp, synthetic construct
  misc_feature 1..80: note = Synthetic: >NC_003908.1-cand-11140-11219
  source 1..80: mol_type = other DNA
ttggtctgcagctctatgcttataaacacacgtagatgactgagcgcggacactgacatagcggtaaaactcgatgtact

SEQ ID NO: 20636 - DNA, 80 bp, synthetic construct
  misc_feature 1..80: note = Synthetic: >NC_003908.1-cand-11220-11299
  source 1..80: mol_type = other DNA
tccgaggaagcgtggtgcataatgccacgcgccgcttgacactaaaactcgatgtatttccgaggaagcacagtgcataa

SEQ ID NO: 20637 - DNA, 80 bp, synthetic construct
  misc_feature 1..80: note = Synthetic: >NC_003908.1-cand-11300-11379
  source 1..80: mol_type = other DNA
tgctgtgcagtgtcacattaatcgtatatcacactacatattaacaacactatatcacttttatgagactcactatgggt

SEQ ID NO: 20638 - DNA, 80 bp, synthetic construct
  misc_feature 1..80: note = Synthetic: >NC_003908.1-cand-11380-11459
  source 1..80: mol_type = other DNA
ctctaatatacactacacatattttacttaaaaacactatacacactttataaattcttttataatttttcttttgtttt

SEQ ID NO: 20639 - DNA, 80 bp, synthetic construct
  misc_feature 1..80: note = Synthetic: >NC_004102.1-cand-20-99
  source 1..80: mol_type = other DNA
ctccaccatgaatcactcccctgtgaggaactactgtcttcacgcagaaagcgtctagccatggcgttagtatgagtgtc

SEQ ID NO: 20640 - DNA, 80 bp, synthetic construct
  misc_feature 1..80: note = Synthetic: >NC_004102.1-cand-170-249
  source 1..80: mol_type = other DNA
tgccaggacgaccgggtcctttcttggataaacccgctcaatgcctggagatttgggcgtgcccccgcaagactgctagc

SEQ ID NO: 20641 - DNA, 80 bp, synthetic construct
  misc_feature 1..80: note = Synthetic: >NC_004102.1-cand-370-449
  source 1..80: mol_type = other DNA
aaacgtaacaccaaccgtcgcccacaggacgtcaagttcccgggtggcggtcagatcgttggtggagtttacttgttgcc

SEQ ID NO: 20642 - DNA, 80 bp, synthetic construct
  misc_feature 1..80: note = Synthetic: >NC_004102.1-cand-490-569
  source 1..80: mol_type = other DNA
acttccgagcggtcgcaacctcgaggtagacgtcagcctatccccaaggcacgtcggcccgagggcaggacctgggctca

SEQ ID NO: 20643 - DNA, 80 bp, synthetic construct
  misc_feature 1..80: note = Synthetic: >NC_004102.1-cand-570-649
  source 1..80: mol_type = other DNA
gcccgggtacccttggcccctctatggcaatgagggttgcgggtgggcgggatggctcctgtctccccgtggctctcggc

SEQ ID NO: 20644 - DNA, 80 bp, synthetic construct
  misc_feature 1..80: note = Synthetic: >NC_004102.1-cand-4500-4579
  source 1..80: mol_type = other DNA
aagacatctcatcttctgccactcaaagaagaagtgcgacgagctcgccgcgaagctggtcgcattgggcatcaatgccg

SEQ ID NO: 20645 - DNA, 80 bp, synthetic construct
  misc_feature 1..80: note = Synthetic: >NC_004102.1-cand-4570-4649
  source 1..80: mol_type = other DNA
atcaatgccgtggcctactaccgcggtcttgacgtgtctgtcatcccgaccagcggcgatgttgtcgtcgtgtcgaccga

SEQ ID NO: 20646 - DNA, 80 bp, synthetic construct
  misc_feature 1..80: note = Synthetic: >NC_004102.1-cand-4650-4729
  source 1..80: mol_type = other DNA
tgctctcatgactggctttaccggcgacttcgactctgtgatagactgcaacacgtgtgtcactcagacagtcgatttca

SEQ ID NO: 20647 - DNA, 80 bp, synthetic construct
  misc_feature 1..80: note = Synthetic: >NC_004102.1-cand-4720-4799
  source 1..80: mol_type = other DNA
gtcgatttcagccttgaccctacctttaccattgagacaaccacgctcccccaggatgctgtctccaggactcaacgccg

SEQ ID NO: 20648 - DNA, 80 bp, synthetic construct
  misc_feature 1..80: note = Synthetic: >NC_004102.1-cand-4850-4929
  source 1..80: mol_type = other DNA
gggagcgcccctccggcatgttcgactcgtccgtcctctgtgagtgctatgacgcgggctgtgcttggtatgagctcacg

SEQ ID NO: 20649 - DNA, 80 bp, synthetic construct
  misc_feature 1..80: note = Synthetic: >NC_004102.1-cand-4890-4969
  source 1..80: mol_type = other DNA
tgagtgctatgacgcgggctgtgcttggtatgagctcacgcccgccgagactacagttaggctacgagcgtacatgaaca

SEQ ID NO: 20650 - DNA, 80 bp, synthetic construct
  misc_feature 1..80: note = Synthetic: >NC_004102.1-cand-4980-5059
  source 1..80: mol_type = other DNA
tcccgtgtgccaggaccatcttgaattttgggagggcgtctttacgggcctcactcatatagatgcccactttctatccc

SEQ ID NO: 20651 - DNA, 80 bp, synthetic construct
  misc_feature 1..80: note = Synthetic: >NC_004102.1-cand-5080-5159
  source 1..80: mol_type = other DNA
aactttccttacctggtagcgtaccaagccaccgtgtgcgctagggctcaagcccctcccccatcgtgggaccagatgtg

SEQ ID NO: 20652 - DNA, 80 bp, synthetic construct
  misc_feature 1..80: note = Synthetic: >NC_004102.1-cand-5130-5209
  source 1..80: mol_type = other DNA
agcccctcccccatcgtgggaccagatgtggaagtgtttgatccgccttaaacccaccctccatgggccaacacccctgc

SEQ ID NO: 20653 - DNA, 80 bp, synthetic construct
  misc_feature 1..80: note = Synthetic: >NC_004102.1-cand-5210-5289
  source 1..80: mol_type = other DNA
tatacagactgggcgctgttcagaatgaagtcaccctgacgcacccaatcaccaaatacatcatgacatgcatgtcggcc

SEQ ID NO: 20654 - DNA, 80 bp, synthetic construct
  misc_feature 1..80: note = Synthetic: >NC_004102.1-cand-5290-5369
  source 1..80: mol_type = other DNA
gacctggaggtcgtcacgagcacctgggtgctcgttggcggcgtcctggctgctctggccgcgtattgcctgtcaacagg

SEQ ID NO: 20655 - DNA, 80 bp, synthetic construct
  misc_feature 1..80: note = Synthetic: >NC_004102.1-cand-5370-5449
  source 1..80: mol_type = other DNA
ctgcgtggtcatagtgggcaggattgtcttgtccgggaagccggcaattatacctgacagggaggttctctaccaggagt

SEQ ID NO: 20656 - DNA, 80 bp, synthetic construct
  misc_feature 1..80: note = Synthetic: >NC_004102.1-cand-5450-5529
  source 1..80: mol_type = other DNA
tcgatgagatggaagagtgctctcagcacttaccgtacatcgagcaagggatgatgctcgctgagcagttcaagcagaag

SEQ ID NO: 20657 - DNA, 80 bp, synthetic construct
  misc_feature 1..80: note = Synthetic: >NC_004102.1-cand-5530-5609
  source 1..80: mol_type = other DNA
gccctcggcctcctgcagaccgcgtcccgccaagcagaggttatcacccctgctgtccagaccaactggcagaaactcga

SEQ ID NO: 20658 - DNA, 80 bp, synthetic construct
  misc_feature 1..80: note = Synthetic: >NC_004102.1-cand-5610-5689
  source 1..80: mol_type = other DNA
ggtcttctgggcgaagcacatgtggaatttcatcagtgggatacaatacttggcgggcctgtcaacgctgcctggtaacc

SEQ ID NO: 20659 - DNA, 80 bp, synthetic construct
  misc_feature 1..80: note = Synthetic: >NC_004102.1-cand-5690-5769
  source 1..80: mol_type = other DNA
ccgccattgcttcattgatggcttttacagctgccgtcaccagcccactaaccactggccaaaccctcctcttcaacata

SEQ ID NO: 20660 - DNA, 80 bp, synthetic construct
  misc_feature 1..80: note = Synthetic: >NC_004162.2-cand-1360-1439
  source 1..80: mol_type = other DNA
cggtctacaagaggcctgatacccagtcaattcagaaggttcaggccgagtttgacagctttgtggtaccgagcctgtgg

SEQ ID NO: 20661 - DNA, 80 bp, synthetic construct
  misc_feature 1..80: note = Synthetic: >NC_004162.2-cand-1440-1519
  source 1..80: mol_type = other DNA
tcgtccgggttgtcaatcccgttgaggactagaatcaaatggttgttaagcaaggtgccaaaaaccgacctgaccccata

SEQ ID NO: 20662 - DNA, 80 bp, synthetic construct
  misc_feature 1..80: note = Synthetic: >NC_004162.2-cand-1530-1609
  source 1..80: mol_type = other DNA
gcccaagaagcccgggacgcagaaaaagaagcagaggaagaacgagaagcagaactgactcttgaagccctaccacccct

SEQ ID NO: 20663 - DNA, 80 bp, synthetic construct
  misc_feature 1..80: note = Synthetic: >NC_004162.2-cand-1600-1679
  source 1..80: mol_type = other DNA
taccaccccttcaggcagcacaggaagatgttcaggtcgaaatcgacgtggaacagcttgaggacagagcgggtgcagga

SEQ ID NO: 20664 - DNA, 80 bp, synthetic construct
  misc_feature 1..80: note = Synthetic: >NC_004162.2-cand-1680-1759
  source 1..80: mol_type = other DNA
ataatagagactccgagaggagctatcaaagttactgcccaaccaacagaccacgtcgtgggagagtacttggttctttc

SEQ ID NO: 20665 - DNA, 80 bp, synthetic construct
  misc_feature 1..80: note = Synthetic: >NC_004162.2-cand-1760-1839
  source 1..80: mol_type = other DNA
cccgcagaccgtactacgtagccaaaagcttagcctgattcacgctttggcggagcaagtgaagacgtgcacgcacagcg

SEQ ID NO: 20666 - DNA, 80 bp, synthetic construct
  misc_feature 1..80: note = Synthetic: >NC_004162.2-cand-1840-1919
  source 1..80: mol_type = other DNA
gacgagcagggaggtatgcggtcgaagcgtacgacggcagagtcctagtgccctcaggctacgcaatctcgcctgaagac

SEQ ID NO: 20667 - DNA, 80 bp, synthetic construct
  misc_feature 1..80: note = Synthetic: >NC_004162.2-cand-1920-1999
  source 1..80: mol_type = other DNA
ttccagagcctaagcgaaagcgcaacgatggtgtacaacgaaagagagttcgtaaacagaaagctacaccatattgcgat

SEQ ID NO: 20668 - DNA, 80 bp, synthetic construct
  misc_feature 1..80: note = Synthetic: >NC_004162.2-cand-2000-2079
  source 1..80: mol_type = other DNA
gcatggaccagccctgaacaccgacgaagagtcgtatgagctggtgagggcagagaggacagaacacgagtacgtctacg

SEQ ID NO: 20669 - DNA, 80 bp, synthetic construct
  misc_feature 1..80: note = Synthetic: >NC_004162.2-cand-2080-2159
  source 1..80: mol_type = other DNA
acgtggaccagagaagatgctgtaagaaggaagaagctgcaggactggtactggtgggcgacttgactaatccgccctac

SEQ ID NO: 20670 - DNA, 80 bp, synthetic construct
  misc_feature 1..80: note = Synthetic: >NC_004162.2-cand-2160-2239
  source 1..80: mol_type = other DNA
cacgaattcgcatatgaagggctaaaaatccgccctgcctgcccatacaaaattgcagtcataggagtcttcggagtacc

SEQ ID NO: 20671 - DNA, 80 bp, synthetic construct
  misc_feature 1..80: note = Synthetic: >NC_004162.2-cand-2240-2319
  source 1..80: mol_type = other DNA
aggatctggcaagtcagctattatcaagaacctagttaccaggcaagacctggtgactagcggaaagaaagaaaactgcc

SEQ ID NO: 20672 - DNA, 80 bp, synthetic construct
  misc_feature 1..80: note = Synthetic: >NC_004162.2-cand-2320-2399
  source 1..80: mol_type = other DNA
aagaaatcaccaccgacgtgatgagacagagaggtctagagatatctgcacgtacggttgactcgctgctcttgaatgga

SEQ ID NO: 20673 - DNA, 80 bp, synthetic construct
  misc_feature 1..80: note = Synthetic: >NC_004162.2-cand-2400-2479
  source 1..80: mol_type = other DNA
tgtaacagaccagtcgacgtgttgtacgtagacgaggcgtttgcgtgccactctggaacgttacttgcattgatcgcctt

SEQ ID NO: 20674 - DNA, 80 bp, synthetic construct
  misc_feature 1..80: note = Synthetic: >NC_004162.2-cand-2480-2559
  source 1..80: mol_type = other DNA
ggtgagaccaagacagaaagttgtactttgtggtgacccgaagcagtgcggcttcttcaatatgatgcagatgaaagtca

SEQ ID NO: 20675 - DNA, 80 bp, synthetic construct
  misc_feature 1..80: note = Synthetic: >NC_004162.2-cand-2550-2629
  source 1..80: mol_type = other DNA
atgaaagtcaactataatcacaacatctgcacccaagtgtaccacaaaagtatctccaggcggtgtacactgcctgtgac

SEQ ID NO: 20676 - DNA, 80 bp, synthetic construct
  misc_feature 1..80: note = Synthetic: >NC_004162.2-cand-6470-6549
  source 1..80: mol_type = other DNA
aaaaacccataatctgctgccactgcaggaagtgccaatggataggttcacagtagacatgaaaagggatgtgaaggtga

SEQ ID NO: 20677 - DNA, 80 bp, synthetic construct
  misc_feature 1..80: note = Synthetic: >NC_004162.2-cand-6550-6629
  source 1..80: mol_type = other DNA
ctcctggtacaaagcacacagaggaaagacctaaggtacaggttatacaggcggctgaacccttggcaacagcataccta

SEQ ID NO: 20678 - DNA, 80 bp, synthetic construct
  misc_feature 1..80: note = Synthetic: >NC_004162.2-cand-6630-6709
  source 1..80: mol_type = other DNA
tgtgggattcacagagagctggttaggaggctgaacgccgtcctcctacccaatgtacatacactatttgacatgtctgc

SEQ ID NO: 20679 - DNA, 80 bp, synthetic construct
  misc_feature 1..80: note = Synthetic: >NC_004162.2-cand-6710-6789
  source 1..80: mol_type = other DNA
cgaggatttcgatgccatcatagccgcacactttaagccaggagacactgttttagaaacggacatagcctcctttgata

SEQ ID NO: 20680 - DNA, 80 bp, synthetic construct
  misc_feature 1..80: note = Synthetic: >NC_004162.2-cand-6760-6839
  source 1..80: mol_type = other DNA
ttttagaaacggacatagcctcctttgataagagccaagatgattcacttgcgcttactgctttaatgctgttagaggat

SEQ ID NO: 20681 - DNA, 80 bp, synthetic construct
  misc_feature 1..80: note = Synthetic: >NC_004162.2-cand-6870-6949
  source 1..80: mol_type = other DNA
atagaggctgctttcggagagatttccagctgtcatctaccgacaggtacgcgcttcaagttcggcgccatgatgaaatc

SEQ ID NO: 20682 - DNA, 80 bp, synthetic construct
  misc_feature 1..80: note = Synthetic: >NC_004162.2-cand-6950-7029
  source 1..80: mol_type = other DNA
tggtatgttcctaactctgttcgtcaacacactgctaaatatcaccatcgccagccgagtgctggaagatcgtctgacaa

SEQ ID NO: 20683 - DNA, 80 bp, synthetic construct
  misc_feature 1..80: note = Synthetic: >NC_004162.2-cand-7030-7109
  source 1..80: mol_type = other DNA
aatccgcgtgcgcagccttcatcggcgacgacaacataatacatggagtcgtctccgatgaattgatggcagccagatgc

SEQ ID NO: 20684 - DNA, 80 bp, synthetic construct
  misc_feature 1..80: note = Synthetic: >NC_004162.2-cand-7110-7189
  source 1..80: mol_type = other DNA
gccacttggatgaacatggaagtgaagatcatagatgcagttgtatcccagaaagccccttacttttgtggagggtttat

SEQ ID NO: 20685 - DNA, 80 bp, synthetic construct
  misc_feature 1..80: note = Synthetic: >NC_004162.2-cand-7190-7269
  source 1..80: mol_type = other DNA
actgcacgatatcgtgacaggaacagcttgcagagtggcagacccgctaaaaaggctatttaaactgggcaaaccgctag

SEQ ID NO: 20686 - DNA, 80 bp, synthetic construct
  misc_feature 1..80: note = Synthetic: >NC_004162.2-cand-7280-7359
  source 1..80: mol_type = other DNA
cgaacaagatgaggatagaagacgagcgctggctgacgaagtggtcagatggcaacgaacagggctaattgatgagttgg

SEQ ID NO: 20687 - DNA, 80 bp, synthetic construct
  misc_feature 1..80: note = Synthetic: >NC_004162.2-cand-7360-7439
  source 1..80: mol_type = other DNA
agaaagcggtatactctaggtatgaagtgcagggtatatcagttgtggtaatgtccatggccacctttgcaagctccaga

SEQ ID NO: 20688 - DNA, 80 bp, synthetic construct
  misc_feature 1..80: note = Synthetic: >NC_004162.2-cand-7440-7519
  source 1..80: mol_type = other DNA
tccaacttcgagaagctcagaggacccgtcgtaactttgtacggcggtcctaaataggtacgcactacagctacctattt

SEQ ID NO: 20689 - DNA, 80 bp, synthetic construct
  misc_feature 1..80: note = Synthetic: >NC_004162.2-cand-7520-7599
  source 1..80: mol_type = other DNA
tgcagaagccgacagtaagtacctaaacactaatcagctacaatggagttcatcccaacccaaactttttacaacaggag

SEQ ID NO: 20690 - DNA, 80 bp, synthetic construct
  misc_feature 1..80: note = Synthetic: >NC_004162.2-cand-7600-7679
  source 1..80: mol_type = other DNA
gtaccagcctcgaccctggactccgcgccctactatccaagtcatcaggcccagaccgcgcccgcagaggcaagctgggc

SEQ ID NO: 20691 - DNA, 80 bp, synthetic construct
  misc_feature 1..80: note = Synthetic: >NC_004162.2-cand-7680-7759
  source 1..80: mol_type = other DNA
aacttgcccagctgatctcagcagttaataaactgacaatgcgcgcggtaccccaacagaagccacgcaagaatcggaag

SEQ ID NO: 20692 - DNA, 80 bp, synthetic construct
  misc_feature 1..80: note = Synthetic: >NC_005062.1-cand-8030-8109
  source 1..80: mol_type = other DNA
atcaagtttagggctggaatgaatgtgtttaccatgcaaccacatcgcgctgatactgtgatgtgcgatattggagagag

SEQ ID NO: 20693 - DNA, 80 bp, synthetic construct
  misc_feature 1..80: note = Synthetic: >NC_005062.1-cand-8110-8189
  source 1..80: mol_type = other DNA
tagcccggacgccgccattgaaggtgagagaacccgcaaagtgatactgctcatggagcagtggaagaatcggaacccca

SEQ ID NO: 20694 - DNA, 80 bp, synthetic construct
  misc_feature 1..80: note = Synthetic: >NC_005062.1-cand-8190-8269
  source 1..80: mol_type = other DNA
ctgcggcttgtgtctttaaagtgttggctccatatagaccggaggtaattgaagcactacacagattccaactgcagtgg

SEQ ID NO: 20695 - DNA, 80 bp, synthetic construct
  misc_feature 1..80: note = Synthetic: >NC_005062.1-cand-8280-8359
  source 1..80: mol_type = other DNA
tagtgcgcactcccttctcaagaaattcaacccatgagatgtattactccacggccatttcaggaaacatcgtcaactcc

SEQ ID NO: 20696 - DNA, 80 bp, synthetic construct
  misc_feature 1..80: note = Synthetic: >NC_005062.1-cand-8360-8439
  source 1..80: mol_type = other DNA
gtcaatgtgcaatctaggaagttgctggcccgctttggagaccagagaggacccatcagggtgccagagatggacctagg

SEQ ID NO: 20697 - DNA, 80 bp, synthetic construct
  misc_feature 1..80: note = Synthetic: >NC_005062.1-cand-8440-8519
  source 1..80: mol_type = other DNA
agtgggaactcgctgtgtcgtcctggcagaagacaaggtgaaagaacacgacgttcaggagagaatcaaagctctgcagg

SEQ ID NO: 20698 - DNA, 80 bp, synthetic construct
  misc_feature 1..80: note = Synthetic: >NC_005062.1-cand-8500-8579
  source 1..80: mol_type = other DNA
gagaatcaaagctctgcaggagcaatacagtgatacctggcatgtggatagggaacacccataccgaacgtggcagtact

SEQ ID NO: 20699 - DNA, 80 bp, synthetic construct
  misc_feature 1..80: note = Synthetic: >NC_005062.1-cand-8600-8679
  source 1..80: mol_type = other DNA
cccactggctctgcagcttcactgattaatggagttgtgaagctcctcagctggccgtggaatgcacgggaagatgtggt

SEQ ID NO: 20700 - DNA, 80 bp, synthetic construct
  misc_feature 1..80: note = Synthetic: >NC_005062.1-cand-8680-8759
  source 1..80: mol_type = other DNA
gcggatggcaatgacagacaccacagcgtttgggcagcagagagtgttcaaggacaaagttgacaccaaggcacaggagc

SEQ ID NO: 20701 - DNA, 80 bp, synthetic construct
  misc_feature 1..80: note = Synthetic: >NC_005062.1-cand-8760-8839
  source 1..80: mol_type = other DNA
cccagccaggtaccagggtcatcatgagggcggtcaatgactggatgttcgaacggcttgcacgcagaagcagacctcgt

SEQ ID NO: 20702 - DNA, 80 bp, synthetic construct
  misc_feature 1..80: note = Synthetic: >NC_005062.1-cand-8840-8919
  source 1..80: mol_type = other DNA
atgtgcagcagagaagaattcattgcaaaggtgaaagctaacgcagcactgggagcctggtctgatgagcaaaacaaatg

SEQ ID NO: 20703 - DNA, 80 bp, synthetic construct
  misc_feature 1..80: note = Synthetic: >NC_005062.1-cand-8920-8999
  source 1..80: mol_type = other DNA
ggcaagtgcgaaggaagcagtggaagatcctgctttttggcatctggtggacgaagagagagaaaggcatctaaaaggaa

SEQ ID NO: 20704 - DNA, 80 bp, synthetic construct
  misc_feature 1..80: note = Synthetic: >NC_005062.1-cand-8970-9049
  source 1..80: mol_type = other DNA
acgaagagagagaaaggcatctaaaaggaagatgtgctcactgcgtgtacaacatgatgggcaagagagagaaaaagctg

SEQ ID NO: 20705 - DNA, 80 bp, synthetic construct
  misc_feature 1..80: note = Synthetic: >NC_005062.1-cand-9080-9159
  source 1..80: mol_type = other DNA
gctatctggtacatgtggctggggagccgctttctggagtttgaggcccttggattcctgaatgaagaccactgggcatc

SEQ ID NO: 20706 - DNA, 80 bp, synthetic construct
  misc_feature 1..80: note = Synthetic: >NC_005062.1-cand-9210-9289
  source 1..80: mol_type = other DNA
ggtggcatttgaagaagctgtcgctgttggagggaggtcttttctatgcggacgacacagccggatgggacaccagggtc

SEQ ID NO: 20707 - DNA, 80 bp, synthetic construct
  misc_feature 1..80: note = Synthetic: >NC_005062.1-cand-9240-9319
  source 1..80: mol_type = other DNA
agggaggtcttttctatgcggacgacacagccggatgggacaccagggtcaccaatgcggatctggaagatgaagagcag

SEQ ID NO: 20708 - DNA, 80 bp, synthetic construct
  misc_feature 1..80: note = Synthetic: >NC_005228.1-cand-3210-3289
  source 1..80: mol_type = other DNA
aaatgttcagctacagggcttgttgcagcagcaccacaccttgatagagtcacaggatacaatcaaattgacacaaataa

SEQ ID NO: 20709 - DNA, 80 bp, synthetic construct
  misc_feature 1..80: note = Synthetic: >NC_005228.1-cand-3290-3369
  source 1..80: mol_type = other DNA
ggtttttgatgatggtgcaccacaatgtggtgttcattgttggttcaagaagtcaggtgaatggttgctaggtattttaa

SEQ ID NO: 20710 - DNA, 80 bp, synthetic construct
  misc_feature 1..80: note = Synthetic: >NC_005228.1-cand-3370-3449
  source 1..80: mol_type = other DNA
gtggtaactggatggttgttgctgttcttattgcactgtttatattttcactattattattcagcctttgctgcccacgt

SEQ ID NO: 20711 - DNA, 80 bp, synthetic construct
  misc_feature 1..80: note = Synthetic: >NC_005228.1-cand-3440-3519
  source 1..80: mol_type = other DNA
ctgcccacgtcgtcagaattataagaaaaataaataagcatgagtccaatataactttttattattccttaatgcatatg

SEQ ID NO: 20712 - DNA, 80 bp, synthetic construct
  misc_feature 1..80: note = Synthetic: >NC_005228.1-cand-3520-3599
  source 1..80: mol_type = other DNA
tacttataccttatatcttatattactaatctcctatattaacagtatgtgtttatatcaaactgaactgtatagccctc

SEQ ID NO: 20713 - DNA, 80 bp, synthetic construct
  misc_feature 1..80: note = Synthetic: >NC_005228.1-cand-3600-3679
  source 1..80: mol_type = other DNA
atactacttccaaaaaaaactaccactttactactactctacctcatatcgatcattcctggacttttgttcctgcggag

SEQ ID NO: 20714 - DNA, 80 bp, synthetic construct
  misc_feature 1..80: note = Synthetic: >NC_005233.1-cand-10-89
  source 1..80: mol_type = other DNA
ctaaaaagcactacactaaagatggcaacattagaggaactccaaaaagaaatcaacaaccacgagggccaattggtgat

SEQ ID NO: 20715 - DNA, 80 bp, synthetic construct
  misc_feature 1..80: note = Synthetic: >NC_005233.1-cand-100-179
  source 1..80: mol_type = other DNA
aaggtgaaagatgcagaaaagcagtatgaaaaggatcctgacgacctgaataaaagggcattgagtgaccgggaaagcat

SEQ ID NO: 20716 - DNA, 80 bp, synthetic construct
  misc_feature 1..80: note = Synthetic: >NC_005233.1-cand-190-269
  source 1..80: mol_type = other DNA
attcagggaaaaatagatgaattaaggagacagctggctgatcgtgtggcagcagggaaaaacattggcaaagagaggga

SEQ ID NO: 20717 - DNA, 80 bp, synthetic construct
  misc_feature 1..80: note = Synthetic: >NC_005233.1-cand-370-449
  source 1..80: mol_type = other DNA
gggcaaaccgcagactggctgagcattgtggtctacctgacatcattcgtggttccaatattgttgaaggctctttacat

SEQ ID NO: 20718 - DNA, 80 bp, synthetic construct
  misc_feature 1..80: note = Synthetic: >NC_005233.1-cand-450-529
  source 1..80: mol_type = other DNA
gcttaccaccagagggagacaaactactaaagacaataagggaatgagaattcgatttaaggatgacagctcttttgaag

SEQ ID NO: 20719 - DNA, 80 bp, synthetic construct
  misc_feature 1..80: note = Synthetic: >NC_005233.1-cand-540-619
  source 1..80: mol_type = other DNA
gattagaaagccaaagcacctgttcttgtcaatgcccaatgcacaatctagcatgaaggcagatgagattacaccaggtc

SEQ ID NO: 20720 - DNA, 80 bp, synthetic construct
  misc_feature 1..80: note = Synthetic: >NC_005233.1-cand-630-709
  source 1..80: mol_type = other DNA
tgcaatttgtggactatacccagcccaggtgaaggcaaggaacttaatcagtcctgtgatgagtgtgattgggtttttag

SEQ ID NO: 20721 - DNA, 80 bp, synthetic construct
  misc_feature 1..80: note = Synthetic: >NC_005233.1-cand-720-799
  source 1..80: mol_type = other DNA
gaactggacagagcgggttgaggaatggcttgacctcccgtgcaagctactatctgagccatctccaacgtctttgacca

SEQ ID NO: 20722 - DNA, 80 bp, synthetic construct
  misc_feature 1..80: note = Synthetic: >NC_005233.1-cand-810-889
  source 1..80: mol_type = other DNA
caccaatcgtgactacttgaatcaaagacaaggagcgcttgcaaaaatggaaacaaaagaagctcaggctgtgaggaaac

SEQ ID NO: 20723 - DNA, 80 bp, synthetic construct
  misc_feature 1..80: note = Synthetic: >NC_005233.1-cand-900-979
  source 1..80: mol_type = other DNA
tgctggctgcaaccttatcgaccatatagactcaccatcatcaatctgggtctttgcaggagcacccgacagatgccctc

SEQ ID NO: 20724 - DNA, 80 bp, synthetic construct
  misc_feature 1..80: note = Synthetic: >NC_005235.1-cand-2150-2229
  source 1..80: mol_type = other DNA
ccgtgtcatttacaagcactaccgtagcttaatatcagaagtaacaacttgtttctttctgtttgaaaagggtttacatg

SEQ ID NO: 20725 - DNA, 80 bp, synthetic construct
  misc_feature 1..80: note = Synthetic: >NC_005235.1-cand-2230-2309
  source 1..80: mol_type = other DNA
gtaacatgaatgaggaagcaaagattcaccttgaaactgtggagtgggccctaaaatttaggcaaaaagaagaccaatat

SEQ ID NO: 20726 - DNA, 80 bp, synthetic construct
  misc_feature 1..80: note = Synthetic: >NC_005235.1-cand-2310-2389
  source 1..80: mol_type = other DNA
ggagaatccatggttgaaaatggttacacaataggtgaactcaatgataatcaagatttagttgaacaacaactatattg

SEQ ID NO: 20727 - DNA, 80 bp, synthetic construct
  misc_feature 1..80: note = Synthetic: >NC_005235.1-cand-2390-2469
  source 1..80: mol_type = other DNA
tcaagatgctgtagaacttgctgctgtagaacttaataagattttatcaacaaaatctcaggttgttgccaatagcattc

SEQ ID NO: 20728 - DNA, 80 bp, synthetic construct
  misc_feature 1..80: note = Synthetic: >NC_005235.1-cand-2440-2519
  source 1..80: mol_type = other DNA
caaaatctcaggttgttgccaatagcattcttaataaatattgggaggttccgtattttagtcagactaggaatataagt

SEQ ID NO: 20729 - DNA, 80 bp, synthetic construct
  misc_feature 1..80: note = Synthetic: >NC_005235.1-cand-2550-2629
  source 1..80: mol_type = other DNA
gatggacatcttgctgcatctgttacaatcatagaggcaatacgttatctctcatcttcacagaacaatccaagtgttct

SEQ ID NO: 20730 - DNA, 80 bp, synthetic construct
  misc_feature 1..80: note = Synthetic: >NC_005235.1-cand-2630-2709
  source 1..80: mol_type = other DNA
acaactttatgaagagactagaaaagtgaaagctcaagcacgaattgttagaaaatatcagagaacagaggctgatagag

SEQ ID NO: 20731 - DNA, 80 bp, synthetic construct
  misc_feature 1..80: note = Synthetic: >NC_005235.1-cand-2710-2789
  source 1..80: mol_type = other DNA
gtttttttattacaacactcccaacacgatgtaggttagaaataattgaagattattacgatgccatctcaaaaaatgtg

SEQ ID NO: 20732 - DNA, 80 bp, synthetic construct
  misc_feature 1..80: note = Synthetic: >NC_005235.1-cand-2790-2869
  source 1..80: mol_type = other DNA
gctgaagagtacatctcctatggtggtgaaaggaaaattttatgtattcaatcagctttagaaaaagcacttagatgggc

SEQ ID NO: 20733 - DNA, 80 bp, synthetic construct
  misc_feature 1..80: note = Synthetic: >NC_005235.1-cand-2870-2949
  source 1..80: mol_type = other DNA
ttctggagagagctttattgaacttagcaacggaaagtttataaggatgaaaagaaaattgatgtatgtgagtgctgatg

SEQ ID NO: 20734 - DNA, 80 bp, synthetic construct
  misc_feature 1..80: note = Synthetic: >NC_005235.1-cand-2950-3029
  source 1..80: mol_type = other DNA
caacgaaatggtctcctggagataactcagctaaattcagaagattcacagcagctctacataatggactacctgatgac

SEQ ID NO: 20735 - DNA, 80 bp, synthetic construct
  misc_feature 1..80: note = Synthetic: >NC_005235.1-cand-3030-3109
  source 1..80: mol_type = other DNA
cgtttaaaaaattgtgtaattgatgcattaaggaatgtttacaaaactgacttctatatgtccaggaaattaagggctta

SEQ ID NO: 20736 - DNA, 80 bp, synthetic construct
  misc_feature 1..80: note = Synthetic: >NC_005235.1-cand-3110-3189
  source 1..80: mol_type = other DNA
tatagataacatgaatgggcatgagccagctgttaagaatttcctggaattcttccctgatggtcattgtggagaagtgc

SEQ ID NO: 20737 - DNA, 80 bp, synthetic construct
  misc_feature 1..80: note = Synthetic: >NC_005235.1-cand-3200-3279
  source 1..80: mol_type = other DNA
gttgcagggaaatctaaataagtgttcatctctttttggtgtaggaatgtcgttgctatttaagcaactttggaatgaat

SEQ ID NO: 20738 - DNA, 80 bp, synthetic construct
  misc_feature 1..80: note = Synthetic: >NC_005235.1-cand-3270-3349
  source 1..80: mol_type = other DNA
tggaatgaattattccctgaattagactgcttctttgaatttgctcaccactcagatgatgcgctctttatatatggtta

SEQ ID NO: 20739 - DNA, 80 bp, synthetic construct
  misc_feature 1..80: note = Synthetic: >NC_005235.1-cand-3350-3429
  source 1..80: mol_type = other DNA
ccttgaaccaattgatgatggaactgattggtttctatatgtgtctcaacagatccaagcaggtcatttacactggttta

SEQ ID NO: 20740 - DNA, 80 bp, synthetic construct
  misc_feature 1..80: note = Synthetic: >NC_005237.1-cand-1850-1929
  source 1..80: mol_type = other DNA
gactcctcaaaatattgggcctggttgttaccgaacattaaatctttttaggtataaaagtaggtgttatattctgacaa

SEQ ID NO: 20741 - DNA, 80 bp, synthetic construct
  misc_feature 1..80: note = Synthetic: >NC_005237.1-cand-1930-2009
  source 1..80: mol_type = other DNA
tgtggactcttcttctcattattgaatccattctctgggcagcaagtgcagcagaaatcccccttgtccctctctggaca

SEQ ID NO: 20742 - DNA, 80 bp, synthetic construct
  misc_feature 1..80: note = Synthetic: >NC_005237.1-cand-2010-2089
  source 1..80: mol_type = other DNA
gataatgctcatggtgttgggagtgttcctatgcatacagaccttgaattagacttttctttgccatctagttctaggta

SEQ ID NO: 20743 - DNA, 80 bp, synthetic construct
  misc_feature 1..80: note = Synthetic: >NC_005237.1-cand-2090-2169
  source 1..80: mol_type = other DNA
cacatataaaagacatctcacaaacccagttaatgaccaacagagtgtctcattgcacatagaaattgaaagtcaaggca

SEQ ID NO: 20744 - DNA, 80 bp, synthetic construct
  misc_feature 1..80: note = Synthetic: >NC_005237.1-cand-2170-2249
  source 1..80: mol_type = other DNA
ttggtgctgatgtccatcatcttggacattggtatgatgcaagattgaatttaaaaacctcatttcattgttatggtgcc

SEQ ID NO: 20745 - DNA, 80 bp, synthetic construct
  misc_feature 1..80: note = Synthetic: >NC_005237.1-cand-2260-2339
  source 1..80: mol_type = other DNA
atcaatatccatggcacactgcaaaatgccattttgagaaagattatgagtatgaaaatagctgggcatgcaacccccca

SEQ ID NO: 20746 - DNA, 80 bp, synthetic construct
  misc_feature 1..80: note = Synthetic: >NC_005237.1-cand-2350-2429
  source 1..80: mol_type = other DNA
gggttggtacaggttgtactgcttgtgggttatatctcgatcaattgaagccggtaggaacagcctttaaaattataagt

SEQ ID NO: 20747 - DNA, 80 bp, synthetic construct
  misc_feature 1..80: note = Synthetic: >NC_005237.1-cand-2430-2509
  source 1..80: mol_type = other DNA
gtaagatacagtagaaaagtgtgcgtgcagtttggtgaagagtacctttgtaaaacaattgatatgaacgattgctttgt

SEQ ID NO: 20748 - DNA, 80 bp, synthetic construct
  misc_feature 1..80: note = Synthetic: >NC_005237.1-cand-2500-2579
  source 1..80: mol_type = other DNA
attgctttgtgactaggcatgccaaaatatgtataattgggactgtatctaagttttctcaaggtgacactctactattt

SEQ ID NO: 20749 - DNA, 80 bp, synthetic construct
  misc_feature 1..80: note = Synthetic: >NC_005237.1-cand-2590-2669
  source 1..80: mol_type = other DNA
tggaaggaggtggtataatctttaaacactggtgcacgtctacctgtcactttggagaccctggtgatgtcatgggtcca

SEQ ID NO: 20750 - DNA, 80 bp, synthetic construct
  misc_feature 1..80: note = Synthetic: >NC_005237.1-cand-2670-2749
  source 1..80: mol_type = other DNA
aaggataaaccatttatttgccctgaattcccagggcaattcaggaaaaaatgtaactttgccacaactccagtttgtga

SEQ ID NO: 20751 - DNA, 80 bp, synthetic construct
  misc_feature 1..80: note = Synthetic: >NC_005237.1-cand-2750-2829
  source 1..80: mol_type = other DNA
atatgatgggaatattatctcaggctataagaaagttcttgcaacaattgattctttccaatcatttaacacaagcaata

SEQ ID NO: 20752 - DNA, 80 bp, synthetic construct
  misc_feature 1..80: note = Synthetic: >NC_005237.1-cand-2830-2909
  source 1..80: mol_type = other DNA
tacacttcactgatgagagaattgaatggagagaccctgatggtatgcttcgggatcatattaatatcgttatttctaaa

SEQ ID NO: 20753 - DNA, 80 bp, synthetic construct
  misc_feature 1..80: note = Synthetic: >NC_005237.1-cand-2900-2979
  source 1..80: mol_type = other DNA
tatttctaaagatattgattttgaaaatttggctgagaatccttgtaaagtagggctccaggcagcaaacatagaaggtg

SEQ ID NO: 20754 - DNA, 80 bp, synthetic construct
  misc_feature 1..80: note = Synthetic: >NC_005237.1-cand-3000-3079
  source 1..80: mol_type = other DNA
tttacactcacatgccaggtgtctctcacagaatgcccaacatttctcacgtcaataagggcctgtgacatggcaatttg

SEQ ID NO: 20755 - DNA, 80 bp, synthetic construct
  misc_feature 1..80: note = Synthetic: >NC_005237.1-cand-3080-3159
  source 1..80: mol_type = other DNA
ttatggtgcagaaagtgtgacactctcacgaggacaaaatactgtcaaaattaccgggaaaggtggccatagtggttcct

SEQ ID NO: 20756 - DNA, 80 bp, synthetic construct
  misc_feature 1..80: note = Synthetic: >NC_005238.1-cand-4670-4749
  source 1..80: mol_type = other DNA
ggtttagatatctcttccccagatgttatgaagaaagtggcacctatgttgtataagagtgcaaaatcacgggttgtcat

SEQ ID NO: 20757 - DNA, 80 bp, synthetic construct
  misc_feature 1..80: note = Synthetic: >NC_005238.1-cand-4760-4839
  source 1..80: mol_type = other DNA
aatgtggaaggaactgcagaggcaatctgtgcatactggttaaggaatatgtcattgattaagacaattaaagttaaacc

SEQ ID NO: 20758 - DNA, 80 bp, synthetic construct
  misc_feature 1..80: note = Synthetic: >NC_005238.1-cand-4830-4909
  source 1..80: mol_type = other DNA
aagttaaaccccataaagaagtgctccaggctgtatccatatttaatagaaaagaagatatcggtcaacagaaggatttg

SEQ ID NO: 20759 - DNA, 80 bp, synthetic construct
  misc_feature 1..80: note = Synthetic: >NC_005238.1-cand-4910-4989
  source 1..80: mol_type = other DNA
tcagcactaaagttatgtattgaagtttggaggtgggcaaaagcaaataatgcaccatatagggactggttccatgcatt

SEQ ID NO: 20760 - DNA, 80 bp, synthetic construct
  misc_feature 1..80: note = Synthetic: >NC_005238.1-cand-4990-5069
  source 1..80: mol_type = other DNA
atggtttgaagacaaaacattttcagagtggctagatagatttatcagagtaggtgtgcctcctattgatccagaaattc

SEQ ID NO: 20761 - DNA, 80 bp, synthetic construct
  misc_feature 1..80: note = Synthetic: >NC_005238.1-cand-5070-5149
  source 1..80: mol_type = other DNA
agtgtgcagcattgatgattgcagatgtcaaaggtgacaggtcagtgttacaactccaagccaatagaagagcatattca

SEQ ID NO: 20762 - DNA, 80 bp, synthetic construct
  misc_feature 1..80: note = Synthetic: >NC_005238.1-cand-5130-5209
  source 1..80: mol_type = other DNA
ccaatagaagagcatattcagggaaacaatatgatgcatattgtgtacagacttataatgaagagacaaagctttatgaa

SEQ ID NO: 20763 - DNA, 80 bp, synthetic construct
  misc_feature 1..80: note = Synthetic: >NC_005238.1-cand-5230-5309
  source 1..80: mol_type = other DNA
caattttggattagattgtgcacggcttgagatattttgggataaaaaaacttatattcttgagacatccatcacacaga

SEQ ID NO: 20764 - DNA, 80 bp, synthetic construct
  misc_feature 1..80: note = Synthetic: >NC_005238.1-cand-5310-5389
  source 1..80: mol_type = other DNA
aacatgttttaaaaatcatgatggaggaggtttcgaaagagctagttaggtgtgggatgcgatttaatactgagcaagtt

SEQ ID NO: 20765 - DNA, 80 bp, synthetic construct
  misc_feature 1..80: note = Synthetic: >NC_005238.1-cand-5360-5439
  source 1..80: mol_type = other DNA
tgtgggatgcgatttaatactgagcaagttaatggtgtaaagcaccttgtgttgttcaagacggattcaggttttgaatg

SEQ ID NO: 20766 - DNA, 80 bp, synthetic construct
  misc_feature 1..80: note = Synthetic: >NC_005238.1-cand-5470-5549
  source 1..80: mol_type = other DNA
caaaaactgtgcattgaggacaggcttgaggacaaaccaggctatcaaccataagtttatgatcacaattaaggatgatg

SEQ ID NO: 20767 - DNA, 80 bp, synthetic construct
  misc_feature 1..80: note = Synthetic: >NC_005238.1-cand-5550-5629
  source 1..80: mol_type = other DNA
gtctcagggcaattgcacagtatgatgaagatagcccacggtttcttttagcacatgctttccatactatccgtgatgtt

SEQ ID NO: 20768 - DNA, 80 bp, synthetic construct
  misc_feature 1..80: note = Synthetic: >NC_005238.1-cand-5600-5679
  source 1..80: mol_type = other DNA
gcacatgctttccatactatccgtgatgttcgctatcaagcagttgatgcagtaagtaatgtgtggttcacacataaggg

SEQ ID NO: 20769 - DNA, 80 bp, synthetic construct
  misc_feature 1..80: note = Synthetic: >NC_005238.1-cand-5710-5789
  source 1..80: mol_type = other DNA
atcaggactgctagagtactttatgaaaaatatacctgctgctattccaccagctgcttattcattaataatgaatcgtg

SEQ ID NO: 20770 - DNA, 80 bp, synthetic construct
  misc_feature 1..80: note = Synthetic: >NC_005238.1-cand-5800-5879
  source 1..80: mol_type = other DNA
tgtggacctttttatgtttaatgacttacttagactaataaacccaggtaacacacttgacttgtctggtcttgaaataa

SEQ ID NO: 20771 - DNA, 80 bp, synthetic construct
  misc_feature 1..80: note = Synthetic: >NC_005238.1-cand-5880-5959
  source 1..80: mol_type = other DNA
caggtgagggttatagtacagtaaatagtctttctagtagattatggtcagaagaaatgagccttgttgatgatgaagag

SEQ ID NO: 20772 - DNA, 80 bp, synthetic construct
  misc_feature 1..80: note = Synthetic: >NC_006577.2-cand-20290-20369
  source 1..80: mol_type = other DNA
cagcctatgctcaagccattactggagcccacaaggtaatctaggtggtaattgcgcgggtaatgtcattggtaatgatg

SEQ ID NO: 20773 - DNA, 80 bp, synthetic construct
  misc_feature 1..80: note = Synthetic: >NC_006577.2-cand-20370-20449
  source 1..80: mol_type = other DNA
ctctaacacgttttactatctttactcagagtcgtgtattgtcaagttttgaacctcgctcagatttagaacgggatttt

SEQ ID NO: 20774 - DNA, 80 bp, synthetic construct
  misc_feature 1..80: note = Synthetic: >NC_006577.2-cand-20450-20529
  source 1..80: mol_type = other DNA
attgatatggatgataatctgtttattgctaaatatggtttagaagactatgcatttgatcatatagtttatggtagttt

SEQ ID NO: 20775 - DNA, 80 bp, synthetic construct
  misc_feature 1..80: note = Synthetic: >NC_006577.2-cand-20530-20609
  source 1..80: mol_type = other DNA
taaccataaagttataggaggtttgcatttgcttataggcttatttcgtaggaaaaaaaaatctaatttgttaattcaag

SEQ ID NO: 20776 - DNA, 80 bp, synthetic construct
  misc_feature 1..80: note = Synthetic: >NC_006577.2-cand-20610-20689
  source 1..80: mol_type = other DNA
agtttttacagtatgattctagtattcattcatattttattactgatcaggagtgtggtagtagtaagagtgtttgtaca

SEQ ID NO: 20777 - DNA, 80 bp, synthetic construct
  misc_feature 1..80: note = Synthetic: >NC_006577.2-cand-20690-20769
  source 1..80: mol_type = other DNA
gttattgatttattattagatgattttgtttctattgttaagtcattaaatttgagttgtgttagtaaagttgttaatat

SEQ ID NO: 20778 - DNA, 80 bp, synthetic construct
  misc_feature 1..80: note = Synthetic: >NC_006577.2-cand-20770-20849
  source 1..80: mol_type = other DNA
taatgttgattttaaggattttcaatttatgttgtggtgtaatgataataaaattatgactttttatcctaaaatgcaag

SEQ ID NO: 20779 - DNA, 80 bp, synthetic construct
  misc_feature 1..80: note = Synthetic: >NC_006577.2-cand-20850-20929
  source 1..80: mol_type = other DNA
ccactaatgattggaaacctggctattctatgcctgttttgtataagtatttgaatgttccattagagagagtctcttta

SEQ ID NO: 20780 - DNA, 80 bp, synthetic construct
  misc_feature 1..80: note = Synthetic: >NC_006577.2-cand-20930-21009
  source 1..80: mol_type = other DNA
tggaattatggtaaacctattaatttgcctacaggctgtatgatgaatgttgctaagtacactcaattatgtcagtattt

SEQ ID NO: 20781 - DNA, 80 bp, synthetic construct
  misc_feature 1..80: note = Synthetic: >NC_006577.2-cand-21010-21089
  source 1..80: mol_type = other DNA
gaatactacaacattagctgttcctgttaatatgcgtgttttacatttaggtgcagggtctgataaagaagtagctccag

SEQ ID NO: 20782 - DNA, 80 bp, synthetic construct
  misc_feature 1..80: note = Synthetic: >NC_006577.2-cand-21090-21169
  source 1..80: mol_type = other DNA
gttctgctgttttaagacagtggttaccatctggtagtattcttgtagataatgatttaaacccatttgttagcgatagt

SEQ ID NO: 20783 - DNA, 80 bp, synthetic construct
  misc_feature 1..80: note = Synthetic: >NC_006577.2-cand-21170-21249
  source 1..80: mol_type = other DNA
ttagttacttattttggagattgtatgactttaccatttgattgtcattgggatttgataatatctgatatgtatgatcc

SEQ ID NO: 20784 - DNA, 80 bp, synthetic construct
  misc_feature 1..80: note = Synthetic: >NC_006577.2-cand-21250-21329
  source 1..80: mol_type = other DNA
tcttactaaaaatattggtgattataatgtgagtaaggatgggttttttacttacatttgtcatttaattcgtgataaat

SEQ ID NO: 20785 - DNA, 80 bp, synthetic construct
  misc_feature 1..80: note = Synthetic: >NC_006577.2-cand-21330-21409
  source 1..80: mol_type = other DNA
tatctttgggtggtagtgtagctataaaaattacagagttttcttggaatgctgatttatataaattaatgagttgtttt

SEQ ID NO: 20786 - DNA, 80 bp, synthetic construct
  misc_feature 1..80: note = Synthetic: >NC_006577.2-cand-21410-21489
  source 1..80: mol_type = other DNA
gcattttggacagttttttgtactaatgtaaatgcttcttctagtgaagggtttttaataggtataaattacctgggtaa

SEQ ID NO: 20787 - DNA, 80 bp, synthetic construct
  misc_feature 1..80: note = Synthetic: >NC_006577.2-cand-21490-21569
  source 1..80: mol_type = other DNA
atcttcttttgaaatagatggcaatgttatgcatgctaactatttgttttggagaaatagtacaacatggaatggcggtg

SEQ ID NO: 20788 - DNA, 80 bp, synthetic construct
  misc_feature 1..80: note = Synthetic: >NC_006577.2-cand-28030-28109
  source 1..80: mol_type = other DNA
attgaggactatcacacattaactgctactgttattcgtggtcatctttatatacagggtgtcaaacttggcactggtta

SEQ ID NO: 20789 - DNA, 80 bp, synthetic construct
  misc_feature 1..80: note = Synthetic: >NC_006577.2-cand-28110-28189
  source 1..80: mol_type = other DNA
tactctttcagatttgcccgtatatgttactgtagctaaggtgcaagtactttgtacctataaacgtgcctttttagata

SEQ ID NO: 20790 - DNA, 80 bp, synthetic construct
  misc_feature 1..80: note = Synthetic: >NC_006577.2-cand-28190-28269
  source 1..80: mol_type = other DNA
agttagatgttaatagtggttttgctgtttttgttaagtctaaagttggtaactatcgtttaccgtctagtaaacctagt

SEQ ID NO: 20791 - DNA, 80 bp, synthetic construct
  misc_feature 1..80: note = Synthetic: >NC_006577.2-cand-28270-28349
  source 1..80: mol_type = other DNA
ggtatggatactgccttgttaagagcttaaatctaaactattaggatgtcttatactcccggtcattatgctggaagtag

SEQ ID NO: 20792 - DNA, 80 bp, synthetic construct
  misc_feature 1..80: note = Synthetic: >NC_006577.2-cand-28350-28429
  source 1..80: mol_type = other DNA
aagctcctctggaaatcgttcaggaatcctcaagaaaacttcttgggctgaccaatctgagcgaaattaccaaaccttta

SEQ ID NO: 20793 - DNA, 80 bp, synthetic construct
  misc_feature 1..80: note = Synthetic: >NC_006577.2-cand-28430-28509
  source 1..80: mol_type = other DNA
atagaggcagaaaaacccaacctaaattcactgtgtctactcaaccacaaggaaatactatcccacattattcctggttc

SEQ ID NO: 20794 - DNA, 80 bp, synthetic construct
  misc_feature 1..80: note = Synthetic: >NC_006577.2-cand-28510-28589
  source 1..80: mol_type = other DNA
tccgggatcactcaatttcaaaaaggtagagactttaaattttcagatggtcaaggagttcccattgctttcggagtacc

SEQ ID NO: 20795 - DNA, 80 bp, synthetic construct
  misc_feature 1..80: note = Synthetic: >NC_006577.2-cand-28590-28669
  source 1..80: mol_type = other DNA
cccttctgaagcaaaaggatattggtatagacacagccggcgttcttttaaaacagctgatggtcaacaaaagcagttgt

SEQ ID NO: 20796 - DNA, 80 bp, synthetic construct
  misc_feature 1..80: note = Synthetic: >NC_006577.2-cand-28660-28739
  source 1..80: mol_type = other DNA
aagcagttgttaccgagatggtatttctactatctcggtaccggcccatatgccaatgcatcctatggtgaatccctcga

SEQ ID NO: 20797 - DNA, 80 bp, synthetic construct
  misc_feature 1..80: note = Synthetic: >NC_006577.2-cand-28750-28829
  source 1..80: mol_type = other DNA
tgggttgctaatcaccaagctgacacttctactccctccgatgtttcgtcaagggatcctactactcaagaagctatccc

SEQ ID NO: 20798 - DNA, 80 bp, synthetic construct
  misc_feature 1..80: note = Synthetic: >NC_006577.2-cand-28830-28909
  source 1..80: mol_type = other DNA
tactaggtttccgcctggtacgattttgcctcaaggctattatgttgaaggctcaggaaggtctgcttctaatagtcgac

SEQ ID NO: 20799 - DNA, 80 bp, synthetic construct
  misc_feature 1..80: note = Synthetic: >NC_006577.2-cand-28910-28989
  source 1..80: mol_type = other DNA
caggttcacgttctcaatcacgtggacccaataatcgttcattaagtagaagtaattctaattttagacattcagattct

SEQ ID NO: 20800 - DNA, 80 bp, synthetic construct
  misc_feature 1..80: note = Synthetic: >NC_006577.2-cand-28990-29069
  source 1..80: mol_type = other DNA
atagtaaaacctgatatggctgatgagatcgctaatcttgttttagccaagcttggtaaagattctaaacctcagcaagt

SEQ ID NO: 20801 - DNA, 80 bp, synthetic construct
  misc_feature 1..80: note = Synthetic: >NC_006577.2-cand-29070-29149
  source 1..80: mol_type = other DNA
cactaagcaaaatgccaaggaaatcaggcataaaattttaacaaaacctcgccaaaagcgaactcctaataaacattgta

SEQ ID NO: 20802 - DNA, 80 bp, synthetic construct
  misc_feature 1..80: note = Synthetic: >NC_006577.2-cand-29150-29229
  source 1..80: mol_type = other DNA
atgttcaacagtgttttggtaaaagaggaccttctcaaaattttggtaatgctgaaatgttaaagcttggtactaatgat

SEQ ID NO: 20803 - DNA, 80 bp, synthetic construct
  misc_feature 1..80: note = Synthetic: >NC_006577.2-cand-29230-29309
  source 1..80: mol_type = other DNA
cctcagtttcctattcttgcagaattagctcctacaccaggtgcttttttctttggttctaaattagacttggttaaaag

SEQ ID NO: 20804 - DNA, 80 bp, synthetic construct
  misc_feature 1..80: note = Synthetic: >NC_009826.1-cand-1780-1859
  source 1..80: mol_type = other DNA
tgtctgcggtccagtctactgtttcacacctagcccagtggtcgttggcactactgaccgcagagggtgtcccacttata

SEQ ID NO: 20805 - DNA, 80 bp, synthetic construct
  misc_feature 1..80: note = Synthetic: >NC_009826.1-cand-1870-1949
  source 1..80: mol_type = other DNA
caacgagactgacatccttctcttgaataacattaggccccccgctggcaactggttcggctgcacctggatgaactcca

SEQ ID NO: 20806 - DNA, 80 bp, synthetic construct
  misc_feature 1..80: note = Synthetic: >NC_009826.1-cand-1960-2039
  source 1..80: mol_type = other DNA
gaagaattgcggagctccgccctgcaacttagggccaacaggcaacaacagccttaagtgtcctactgattgcttccgca

SEQ ID NO: 20807 - DNA, 80 bp, synthetic construct
  misc_feature 1..80: note = Synthetic: >NC_009826.1-cand-2020-2099
  source 1..80: mol_type = other DNA
tcctactgattgcttccgcaagcacccagacgccacctacaccagatgtgggtcaggaccctggctcaccccccggtgtt

SEQ ID NO: 20808 - DNA, 80 bp, synthetic construct
  misc_feature 1..80: note = Synthetic: >NC_009826.1-cand-2100-2179
  source 1..80: mol_type = other DNA
tggtgcactacccttaccggttgtggcattacccgtgcaccgtaaattacaccatctttaaggtgcgcatgttcatcgga

SEQ ID NO: 20809 - DNA, 80 bp, synthetic construct
  misc_feature 1..80: note = Synthetic: >NC_009826.1-cand-2180-2259
  source 1..80: mol_type = other DNA
ggcctagagcacaggcttgaagcggcatgcaattggacctatggtgagcggtgtgaccttgaagacagagatagggccga

SEQ ID NO: 20810 - DNA, 80 bp, synthetic construct
  misc_feature 1..80: note = Synthetic: >NC_009826.1-cand-2260-2339
  source 1..80: mol_type = other DNA
gttgagcccgctcctgcacaccaccacacagtgggccatattgccgtgctccttcacacctacgcccgctcttagcactg

SEQ ID NO: 20811 - DNA, 80 bp, synthetic construct
  misc_feature 1..80: note = Synthetic: >NC_009826.1-cand-2340-2419
  source 1..80: mol_type = other DNA
gtcttatacacctacatcagaatatagtagacacccaatacctctacggcctgagctccagcatcgtctcgtgggccgtt

SEQ ID NO: 20812 - DNA, 80 bp, synthetic construct
  misc_feature 1..80: note = Synthetic: >NC_009826.1-cand-2420-2499
  source 1..80: mol_type = other DNA
aagtgggaatacataatgctggtctttttactacttgctgatgcccgtatctgcacttgcctgttgatcttgctcctaat

SEQ ID NO: 20813 - DNA, 80 bp, synthetic construct
  misc_feature 1..80: note = Synthetic: >NC_009826.1-cand-2500-2579
  source 1..80: mol_type = other DNA
ctgtcaggcagaagcaacctgcaagaacgtcattgtcctaaacgcggctgcggccgcagggaatcatgggttcttctggg

SEQ ID NO: 20814 - DNA, 80 bp, synthetic construct
  misc_feature 1..80: note = Synthetic: >NC_009826.1-cand-2640-2719
  source 1..80: mol_type = other DNA
acctttgcttgggcgtttggccactactcttagtccgtctcctccggccccacagggccctggccctggactcaagcgat

SEQ ID NO: 20815 - DNA, 80 bp, synthetic construct
  misc_feature 1..80: note = Synthetic: >NC_009826.1-cand-2660-2739
  source 1..80: mol_type = other DNA
ccactactcttagtccgtctcctccggccccacagggccctggccctggactcaagcgatggcgggactgtgggttgtct

SEQ ID NO: 20816 - DNA, 80 bp, synthetic construct
  misc_feature 1..80: note = Synthetic: >NC_009826.1-cand-2740-2819
  source 1..80: mol_type = other DNA
tgtgctaattgttcttacaatctttacacttacccctgggtacaaaaagaaggtagtgctggtcatgtggtggcttcagt

SEQ ID NO: 20817 - DNA, 80 bp, synthetic construct
  misc_feature 1..80: note = Synthetic: >NC_009826.1-cand-2820-2899
  source 1..80: mol_type = other DNA
atttcatagcccgagtggaggccatcatccacgtgtgggtgcccccgttgcaggttaagggtggtcgtgacgctgtcatc

SEQ ID NO: 20818 - DNA, 80 bp, synthetic construct
  misc_feature 1..80: note = Synthetic: >NC_009826.1-cand-2930-3009
  source 1..80: mol_type = other DNA
gggtttgagatcacaaaaatcctcttcgggatactgggccccttgtacctgctgcaacattcactcaccaaggtccccta

SEQ ID NO: 20819 - DNA, 80 bp, synthetic construct
  misc_feature 1..80: note = Synthetic: >NC_009826.1-cand-2980-3059
  source 1..80: mol_type = other DNA
gctgcaacattcactcaccaaggtcccctacttcctcagggcgcgcgccctgctgaggctgtgcctactagcaaagcacc

SEQ ID NO: 20820 - DNA, 80 bp, synthetic construct
  misc_feature 1..80: note = Synthetic: >NC_009827.1-cand-6710-6789
  source 1..80: mol_type = other DNA
gagttcttcactgaggtggatggcgtaaggatacatcgttatgcgccaccctgcaaacccctgcttagagatgaggtgag

SEQ ID NO: 20821 - DNA, 80 bp, synthetic construct
  misc_feature 1..80: note = Synthetic: >NC_009827.1-cand-6830-6909
  source 1..80: mol_type = other DNA
ctcccttgtgagccagagcctgacgtgaccgtagtcacgtcaatgctcactgacccctcacacatcaccgcagagacagc

SEQ ID NO: 20822 - DNA, 80 bp, synthetic construct
  misc_feature 1..80: note = Synthetic: >NC_009827.1-cand-6850-6929
  source 1..80: mol_type = other DNA
tgacgtgaccgtagtcacgtcaatgctcactgacccctcacacatcaccgcagagacagcctctcggcgcttgaagaggg

SEQ ID NO: 20823 - DNA, 80 bp, synthetic construct
  misc_feature 1..80: note = Synthetic: >NC_009827.1-cand-6950-7029
  source 1..80: mol_type = other DNA
agttcatccgccagccagttgtcagcgccatcacttaaagccacttgcacggcgaacggagaccacccggacgccgagct

SEQ ID NO: 20824 - DNA, 80 bp, synthetic construct
  misc_feature 1..80: note = Synthetic: >NC_009827.1-cand-7030-7109
  source 1..80: mol_type = other DNA
gatcgaggccaatctcctatggagacaggagatgggaagcaacatcacccgggttgagtcggagaccaaagttgtcatcc

SEQ ID NO: 20825 - DNA, 80 bp, synthetic construct
  misc_feature 1..80: note = Synthetic: >NC_009827.1-cand-7110-7189
  source 1..80: mol_type = other DNA
tcgactcgtttgatcctctggttgcagagtatgacgacagggagatatcagtgtcagcagagtgccatagaccacctagg

SEQ ID NO: 20826 - DNA, 80 bp, synthetic construct
  misc_feature 1..80: note = Synthetic: >NC_009827.1-cand-7190-7269
  source 1..80: mol_type = other DNA
cctaagttccctcctgctctcccgatttgggccagacctgactacaatccacctctcctacagaaatggcaaatgcccgg

SEQ ID NO: 20827 - DNA, 80 bp, synthetic construct
  misc_feature 1..80: note = Synthetic: >NC_009827.1-cand-7270-7349
  source 1..80: mol_type = other DNA
atacgagccccccgtcgtgtctggatgtgcgttgcctccagctaaaccaacacctatcccgccaccaaggcggaagaggc

SEQ ID NO: 20828 - DNA, 80 bp, synthetic construct
  misc_feature 1..80: note = Synthetic: >NC_009827.1-cand-7350-7429
  source 1..80: mol_type = other DNA
tcatacagctggacgagtctgctgtatcgcaagctctacaacagctggctgataaggtgtttgtggaggacactagcacc

SEQ ID NO: 20829 - DNA, 80 bp, synthetic construct
  misc_feature 1..80: note = Synthetic: >NC_009827.1-cand-7430-7509
  source 1..80: mol_type = other DNA
tcagagccgagctccggcctcggagggtcaatagccggcccatcatctcctgacccgacaacagcagatgacacgtgttc

SEQ ID NO: 20830 - DNA, 80 bp, synthetic construct
  misc_feature 1..80: note = Synthetic: >NC_009827.1-cand-7550-7629
  source 1..80: mol_type = other DNA
gaacctggagacccagacttgagcactggttcctggtccactgttagtgaagaggacgatgtcgtctgttgctctatgtc

SEQ ID NO: 20831 - DNA, 80 bp, synthetic construct
  misc_feature 1..80: note = Synthetic: >NC_009827.1-cand-7560-7639
  source 1..80: mol_type = other DNA
acccagacttgagcactggttcctggtccactgttagtgaagaggacgatgtcgtctgttgctctatgtcatacacttgg

SEQ ID NO: 20832 - DNA, 80 bp, synthetic construct
  misc_feature 1..80: note = Synthetic: >NC_009827.1-cand-7670-7749
  source 1..80: mol_type = other DNA
gaggaggagaaattgccaataaaccctttgagcaattctctcataagacaccacaacatggtctactccacgacatcacg

SEQ ID NO: 20833 - DNA, 80 bp, synthetic construct
  misc_feature 1..80: note = Synthetic: >NC_009827.1-cand-7760-7839
  source 1..80: mol_type = other DNA
cttcgccagaagaaagtcacatttgacagactacaggtagttgaccaacactaccaagatgtcctaaaggagattaagct

SEQ ID NO: 20834 - DNA, 80 bp, synthetic construct
  misc_feature 1..80: note = Synthetic: >NC_009827.1-cand-7840-7919
  source 1..80: mol_type = other DNA
cagagcatcgaccgtgcacgccaggctcctatccaccgaggaggcctgttcgctcactccaccgcactcagcccgatcaa

SEQ ID NO: 20835 - DNA, 80 bp, synthetic construct
  misc_feature 1..80: note = Synthetic: >NC_009827.1-cand-7920-7999
  source 1..80: mol_type = other DNA
ggtatgggtatggagcacgggatgttaggagccatactagcaaggccgttaaacacatcgactccgtgtgggaggacttg

SEQ ID NO: 20836 - DNA, 80 bp, synthetic construct
  misc_feature 1..80: note = Synthetic: >NC_015783.1-cand-1720-1799
  source 1..80: mol_type = other DNA
gcatatacagcccctactacctaacacccaccagaattagcctagactgggacacaccatggacatatgtaagatgcaac

SEQ ID NO: 20837 - DNA, 80 bp, synthetic construct
  misc_feature 1..80: note = Synthetic: >NC_015783.1-cand-1800-1879
  source 1..80: mol_type = other DNA
ccactatcagacaaaggcataggtaacagaatatatgcacagtggtgctcagaaaaatccagtaaattagacaccacaaa

SEQ ID NO: 20838 - DNA, 80 bp, synthetic construct
  misc_feature 1..80: note = Synthetic: >NC_015783.1-cand-1880-1959
  source 1..80: mol_type = other DNA
gagcaagtgcatactaagagacttcccactgtgggccatggcctatggctactgtgactgggtggtgaagtgcacaggag

SEQ ID NO: 20839 - DNA, 80 bp, synthetic construct
  misc_feature 1..80: note = Synthetic: >NC_015783.1-cand-1960-2039
  source 1..80: mol_type = other DNA
tgtccagtgcatggacagacatgagaatagccattatatgtccctacacagaaccagcacttatagggtcaacagaagat

SEQ ID NO: 20840 - DNA, 80 bp, synthetic construct
  misc_feature 1..80: note = Synthetic: >NC_015783.1-cand-2040-2119
  source 1..80: mol_type = other DNA
gtaggcttcattccagtaagtgacaccttttgcaacggagacatgccgtttcttgcaccatacatacctattacatggtg

SEQ ID NO: 20841 - DNA, 80 bp, synthetic construct
  misc_feature 1..80: note = Synthetic: >NC_015783.1-cand-2120-2199
  source 1..80: mol_type = other DNA
gattaagtggtaccccatgattacacaccaaaaggaagttcttgaggcaatagttaactgtggaccgtttgtaccccgag

SEQ ID NO: 20842 - DNA, 80 bp, synthetic construct
  misc_feature 1..80: note = Synthetic: >NC_015783.1-cand-2170-2249
  source 1..80: mol_type = other DNA
tagttaactgtggaccgtttgtaccccgagaccaaacttccccagcttgggaaataaccatgggttacaaaatggattgg

SEQ ID NO: 20843 - DNA, 80 bp, synthetic construct
  misc_feature 1..80: note = Synthetic: >NC_015783.1-cand-2280-2359
  source 1..80: mol_type = other DNA
gcaatcgacgacccctgccaggagtccacccacgaacttcccgaccccgatagacaccctcgcatgttacaagtctctga

SEQ ID NO: 20844 - DNA, 80 bp, synthetic construct
  misc_feature 1..80: note = Synthetic: >NC_015783.1-cand-2360-2439
  source 1..80: mol_type = other DNA
cccgacaaagctcggaccgaagacagtttttcacaaatgggactggagacgtgggatgcttagcaaaagaagtattaaaa

SEQ ID NO: 20845 - DNA, 80 bp, synthetic construct
  misc_feature 1..80: note = Synthetic: >NC_015783.1-cand-2440-2519
  source 1..80: mol_type = other DNA
gagtccaaggagactcaacagatggtgaatatgttgcaggacctttaccaagaaaaagaaacaagttcgatactcgagtc

SEQ ID NO: 20846 - DNA, 80 bp, synthetic construct
  misc_feature 1..80: note = Synthetic: >NC_015783.1-cand-2500-2579
  source 1..80: mol_type = other DNA
acaagttcgatactcgagtccaaggccctccaaccccagaaaaagaaagttacactttactccaagccctccaagagtcg

SEQ ID NO: 20847 - DNA, 80 bp, synthetic construct
  misc_feature 1..80: note = Synthetic: >NC_015783.1-cand-2600-2679
  source 1..80: mol_type = other DNA
ggaccaagaacaagcaccccaagaaaaagaggaccagaaggaagcgctcatggagcagctccagctccagaaacaccacc

SEQ ID NO: 20848 - DNA, 80 bp, synthetic construct
  misc_feature 1..80: note = Synthetic: >NC_015783.1-cand-2680-2759
  source 1..80: mol_type = other DNA
agcgagtcctcaagcgaggcctcaaactcctcctcggagacgtgctccgactccggagaggagtccactgggaccccctc

SEQ ID NO: 20849 - DNA, 80 bp, synthetic construct
  misc_feature 1..80: note = Synthetic: >NC_015783.1-cand-2760-2839
  source 1..80: mol_type = other DNA
ctgtcctaattcaaggtcccagtatcccagacctgcttttccctaacacacaaaaaaaaaaaacgattttccaactacga

SEQ ID NO: 20850 - DNA, 80 bp, synthetic construct
  misc_feature 1..80: note = Synthetic: >NC_015783.1-cand-2840-2919
  source 1..80: mol_type = other DNA
ctgggtgtgcgagtacgagctgaccaaatggatggatcggcccttgcggcactacccatcagacccccctcactacccct

SEQ ID NO: 20851 - DNA, 80 bp, synthetic construct
  misc_feature 1..80: note = Synthetic: >NC_015783.1-cand-2920-2999
  source 1..80: mol_type = other DNA
ggctaccaaaaaacctcctacccctcctacatgtagagtaagtttcaaattaaagctcaatgactaaaattcaaggccgt

SEQ ID NO: 20852 - DNA, 80 bp, synthetic construct
  misc_feature 1..80: note = Synthetic: >NC_019843.3-cand-9600-9679
  source 1..80: mol_type = other DNA
tgtttcttggtacattatgttcgggcctatcgttcccatatggatgacctgcgtctatacagttgcaatgtgctttagac

SEQ ID NO: 20853 - DNA, 80 bp, synthetic construct
  misc_feature 1..80: note = Synthetic: >NC_019843.3-cand-9680-9759
  source 1..80: mol_type = other DNA
acttcttctgggttttagcttattttagtaagaaacatgtagaagtttttactgatggtaagcttaattgtagtttccag

SEQ ID NO: 20854 - DNA, 80 bp, synthetic construct
  misc_feature 1..80: note = Synthetic: >NC_019843.3-cand-9760-9839
  source 1..80: mol_type = other DNA
gacgctgcctctaatatctttgttattaacaaggacacttatgcagctcttagaaactctttaactaatgatgcctattc

SEQ ID NO: 20855 - DNA, 80 bp, synthetic construct
  misc_feature 1..80: note = Synthetic: >NC_019843.3-cand-9850-9929
  source 1..80: mol_type = other DNA
gggttgtttaacaagtataagtacttctctggtgctatggaaacagccgcttatcgtgaagctgcagcatgtcatcttgc

SEQ ID NO: 20856 - DNA, 80 bp, synthetic construct
  misc_feature 1..80: note = Synthetic: >NC_019843.3-cand-9920-9999
  source 1..80: mol_type = other DNA
gtcatcttgctaaagccttacaaacatacagcgagactggtagtgatcttctttaccaaccacccaactgtagcataacc

SEQ ID NO: 20857 - DNA, 80 bp, synthetic construct
  misc_feature 1..80: note = Synthetic: >NC_019843.3-cand-10020-10099
  source 1..80: mol_type = other DNA
tttggtgaaaatgtcacatcccagtggagatgttgaggcttgtatggttcaggttacctgcggtagcatgactcttaatg

SEQ ID NO: 20858 - DNA, 80 bp, synthetic construct
  misc_feature 1..80: note = Synthetic: >NC_019843.3-cand-10100-10179
  source 1..80: mol_type = other DNA
gtctttggcttgacaacacagtctggtgcccacgacacgtaatgtgcccggctgaccagttgtctgatcctaattatgat

SEQ ID NO: 20859 - DNA, 80 bp, synthetic construct
  misc_feature 1..80: note = Synthetic: >NC_019843.3-cand-10180-10259
  source 1..80: mol_type = other DNA
gccttgttgatttctatgactaatcatagtttcagtgtgcaaaaacacattggcgctccagcaaacttgcgtgttgttgg

SEQ ID NO: 20860 - DNA, 80 bp, synthetic construct
  misc_feature 1..80: note = Synthetic: >NC_019843.3-cand-10260-10339
  source 1..80: mol_type = other DNA
tcatgccatgcaaggcactcttttgaagttgactgtcgatgttgctaaccctagcactccagcctacacttttacaacag

SEQ ID NO: 20861 - DNA, 80 bp, synthetic construct
  misc_feature 1..80: note = Synthetic: >NC_019843.3-cand-10340-10419
  source 1..80: mol_type = other DNA
tgaaacctggcgcagcatttagtgtgttagcatgctataatggtcgtccgactggtacattcactgttgtaatgcgccct

SEQ ID NO: 20862 - DNA, 80 bp, synthetic construct
  misc_feature 1..80: note = Synthetic: >NC_019843.3-cand-10420-10499
  source 1..80: mol_type = other DNA
aactacacaattaagggttcctttctgtgtggttcttgtggtagtgttggttacaccaaggagggtagtgtgatcaattt

SEQ ID NO: 20863 - DNA, 80 bp, synthetic construct
  misc_feature 1..80: note = Synthetic: >NC_019843.3-cand-10500-10579
  source 1..80: mol_type = other DNA
ctgttacatgcatcaaatggaacttgctaatggtacacataccggttcagcatttgatggtactatgtatggtgccttta

SEQ ID NO: 20864 - DNA, 80 bp, synthetic construct
  misc_feature 1..80: note = Synthetic: >NC_019843.3-cand-10580-10659
  source 1..80: mol_type = other DNA
tggataaacaagtgcaccaagttcagttaacagacaaatactgcagtgttaatgtagtagcttggctttacgcagcaata

SEQ ID NO: 20865 - DNA, 80 bp, synthetic construct
  misc_feature 1..80: note = Synthetic: >NC_019843.3-cand-10660-10739
  source 1..80: mol_type = other DNA
cttaatggttgcgcttggtttgtaaaacctaatcgcactagtgttgtttcttttaatgaatgggctcttgccaaccaatt

SEQ ID NO: 20866 - DNA, 80 bp, synthetic construct
  misc_feature 1..80: note = Synthetic: >NC_019843.3-cand-10740-10819
  source 1..80: mol_type = other DNA
cactgaatttgttggcactcaatccgttgacatgttagctgtcaaaacaggcgttgctattgaacagctgctttatgcga

SEQ ID NO: 20867 - DNA, 80 bp, synthetic construct
  misc_feature 1..80: note = Synthetic: >NC_019843.3-cand-10820-10899
  source 1..80: mol_type = other DNA
tccaacaactgtatactgggttccagggaaagcaaatccttggcagtaccatgttggaagatgaattcacacctgaggat

SEQ ID NO: 20868 - DNA, 80 bp, synthetic construct
  misc_feature 1..80: note = Synthetic: >NC_019843.3-cand-17260-17339
  source 1..80: mol_type = other DNA
ctcaatatttgtttagtactattaatgctctaccagaaacttctgccgatattctggtggttgatgaggttagtatgtgc

SEQ ID NO: 20869 - DNA, 80 bp, synthetic construct
  misc_feature 1..80: note = Synthetic: >NC_019843.3-cand-17340-17419
  source 1..80: mol_type = other DNA
actaattatgatctttcaattattaatgcacgtattaaagctaagcacattgtctatgtaggagatccagcacagttgcc

SEQ ID NO: 20870 - DNA, 80 bp, synthetic construct
  misc_feature 1..80: note = Synthetic: >NC_019843.3-cand-17420-17499
  source 1..80: mol_type = other DNA
agctcctaggactttgttgactagaggcacattggaaccagaaaatttcaatagtgtcactagattgatgtgtaacttag

SEQ ID NO: 20871 - DNA, 80 bp, synthetic construct
  misc_feature 1..80: note = Synthetic: >NC_019843.3-cand-17500-17579
  source 1..80: mol_type = other DNA
gtcctgacatatttttaagtatgtgctacaggtgtcctaaggaaatagtaagcactgtgagcgctcttgtctacaataat

SEQ ID NO: 20872 - DNA, 80 bp, synthetic construct
  misc_feature 1..80: note = Synthetic: >NC_019843.3-cand-17580-17659
  source 1..80: mol_type = other DNA
aaattgttagccaagaaggagctttcaggccagtgctttaaaatactctataagggcaatgtgacgcatgatgctagctc

SEQ ID NO: 20873 - DNA, 80 bp, synthetic construct
  misc_feature 1..80: note = Synthetic: >NC_019843.3-cand-17660-17739
  source 1..80: mol_type = other DNA
tgccattaatagaccacaactcacatttgtgaagaattttattactgccaatccggcatggagtaaggcagtctttattt

SEQ ID NO: 20874 - DNA, 80 bp, synthetic construct
  misc_feature 1..80: note = Synthetic: >NC_019843.3-cand-17740-17819
  source 1..80: mol_type = other DNA
cgccttacaattcacagaatgctgtgtctcgttcaatgctgggtcttaccactcagactgttgattcctcacagggttca

SEQ ID NO: 20875 - DNA, 80 bp, synthetic construct
  misc_feature 1..80: note = Synthetic: >NC_019843.3-cand-17820-17899
  source 1..80: mol_type = other DNA
gaataccagtacgttatcttctgtcaaacagcagatacggcacatgctaacaacattaacagatttaatgttgcaatcac

SEQ ID NO: 20876 - DNA, 80 bp, synthetic construct
  misc_feature 1..80: note = Synthetic: >NC_019843.3-cand-17900-17979
  source 1..80: mol_type = other DNA
tcgtgcccaaaaaggtattctttgtgttatgacatctcaggcactctttgagtccttagagtttactgaattgtctttta

SEQ ID NO: 20877 - DNA, 80 bp, synthetic construct
  misc_feature 1..80: note = Synthetic: >NC_019843.3-cand-17980-18059
  source 1..80: mol_type = other DNA
ctaattacaagctccagtctcagattgtaactggcctttttaaagattgctctagagaaacttctggcctctcacctgct

SEQ ID NO: 20878 - DNA, 80 bp, synthetic construct
  misc_feature 1..80: note = Synthetic: >NC_019843.3-cand-18060-18139
  source 1..80: mol_type = other DNA
tatgcaccaacatatgttagtgttgatgacaagtataagacgagtgatgagctttgcgtgaatcttaatttacccgcaaa

SEQ ID NO: 20879 - DNA, 80 bp, synthetic construct
  misc_feature 1..80: note = Synthetic: >NC_019843.3-cand-18140-18219
  source 1..80: mol_type = other DNA
tgtcccatactctcgtgttatttccaggatgggctttaaactcgatgcaacagttcctggatatcctaagcttttcatta

SEQ ID NO: 20880 - DNA, 80 bp, synthetic construct
  misc_feature 1..80: note = Synthetic: >NC_019843.3-cand-18220-18299
  source 1..80: mol_type = other DNA
ctcgtgaagaggctgtaaggcaagttcgaagctggataggcttcgatgttgagggtgctcatgcttcccgtaatgcatgt

SEQ ID NO: 20881 - DNA, 80 bp, synthetic construct
  misc_feature 1..80: note = Synthetic: >NC_019843.3-cand-18300-18379
  source 1..80: mol_type = other DNA
ggcaccaatgtgcctctacaattaggattttcaactggtgtgaactttgttgttcagccagttggtgttgtagacactga

SEQ ID NO: 20882 - DNA, 80 bp, synthetic construct
  misc_feature 1..80: note = Synthetic: >NC_019843.3-cand-18380-18459
  source 1..80: mol_type = other DNA
gtggggtaacatgttaacgggcattgctgcacgtcctccaccaggtgaacagtttaagcacctcgtgcctcttatgcata

SEQ ID NO: 20883 - DNA, 80 bp, synthetic construct
  misc_feature 1..80: note = Synthetic: >NC_019843.3-cand-18470-18549
  source 1..80: mol_type = other DNA
gtggcctattgttagacgacgtatagtgcaaatgttgtcagacactttagacaaattgtctgattactgtacgtttgttt

SEQ ID NO: 20884 - DNA, 80 bp, synthetic construct
  misc_feature 1..80: note = Synthetic: >NC_029646.1-cand-7100-7179
  source 1..80: mol_type = other DNA
accagctcctgcgcctgtttccagacctagctctgtcgcctctacagtctccacccgctcaaccttgattagcgggtctt

SEQ ID NO: 20885 - DNA, 80 bp, synthetic construct
  misc_feature 1..80: note = Synthetic: >NC_029646.1-cand-7180-7259
  source 1..80: mol_type = other DNA
ccaatccttcttctttagctaggagttcttctagtgtttcttctcaacccacctcctcctcttctcggaccagtgagtgg

SEQ ID NO: 20886 - DNA, 80 bp, synthetic construct
  misc_feature 1..80: note = Synthetic: >NC_029646.1-cand-7220-7299
  source 1..80: mol_type = other DNA
ttctcaacccacctcctcctcttctcggaccagtgagtgggtgcgcagccaaaacagggcactggagccttacatgaggg

SEQ ID NO: 20887 - DNA, 80 bp, synthetic construct
  misc_feature 1..80: note = Synthetic: >NC_029646.1-cand-7340-7419
  source 1..80: mol_type = other DNA
agcttctagtaatggcacagtctcaaccgtgccaaaagaggttttggactcctggacatctgcatttaacacccacagac

SEQ ID NO: 20888 - DNA, 80 bp, synthetic construct
  misc_feature 1..80: note = Synthetic: >NC_029646.1-cand-7370-7449
  source 1..80: mol_type = other DNA
gccaaaagaggttttggactcctggacatctgcatttaacacccacagacaaccgctattcgctcatctccgtcggagag

SEQ ID NO: 20889 - DNA, 80 bp, synthetic construct
  misc_feature 1..80: note = Synthetic: >NC_029647.1-cand-0-79
  source 1..80: mol_type = other DNA
atgaagatggcgtctaacgacgctagtgttgccaacagcaacagcaaaaccattgctgccaacaacaccacgacccctaa

SEQ ID NO: 20890 - DNA, 80 bp, synthetic construct
  misc_feature 1..80: note = Synthetic: >NC_029647.1-cand-90-169
  source 1..80: mol_type = other DNA
gtgtttgcaaacatgaagattgggctcaagaaagttcttgaacccaaatctgagacacccacggtaagaccaaaagacgt

SEQ ID NO: 20891 - DNA, 80 bp, synthetic construct
  misc_feature 1..80: note = Synthetic: >NC_029647.1-cand-190-269
  source 1..80: mol_type = other DNA
gtccaccggatgaccccccaggtgtcacgatcaagtacgatgctcagagtgacaccattgaagggctccctaacctgtcc

SEQ ID NO: 20892 - DNA, 80 bp, synthetic construct
  misc_feature 1..80: note = Synthetic: >NC_029647.1-cand-250-329
  source 1..80: mol_type = other DNA
aagggctccctaacctgtccactgttccacaaccagaggcgcgccaggttaagtgtgttccacccatggcggagagggag

SEQ ID NO: 20893 - DNA, 80 bp, synthetic construct
  misc_feature 1..80: note = Synthetic: >NC_029647.1-cand-330-409
  source 1..80: mol_type = other DNA
gtcaagaatgcggcggaaccacaaaccggctccctgctagaaatgtatgatgggtcattctatcattatgccatctacat

SEQ ID NO: 20894 - DNA, 80 bp, synthetic construct
  misc_feature 1..80: note = Synthetic: >NC_029647.1-cand-410-489
  source 1..80: mol_type = other DNA
tgagaatggcctagtcgctgggataaatcgcccttctaaggctctcacaaccgccacagtcgacgttgaaccgattgggt

SEQ ID NO: 20895 - DNA, 80 bp, synthetic construct
  misc_feature 1..80: note = Synthetic: >NC_029647.1-cand-490-569
  source 1..80: mol_type = other DNA
tgtggtggagagtggtctacactccaccattctcagtctccacgtcggccctctaccatctacaaggtgagaaattccca

SEQ ID NO: 20896 - DNA, 80 bp, synthetic construct
  misc_feature 1..80: note = Synthetic: >NC_029647.1-cand-570-649
  source 1..80: mol_type = other DNA
tataacgcctttgacaacaactgttataacttctgctgtcaggtgttggaactggatgattgctggatgcgcaggaagtt

SEQ ID NO: 20897 - DNA, 80 bp, synthetic construct
  misc_feature 1..80: note = Synthetic: >NC_029647.1-cand-650-729
  source 1..80: mol_type = other DNA
cgtccagcgaaccactggtttctttgacccataccaaaggtggaacccaaaaccctcacagtatgtggctgattcaaagt

SEQ ID NO: 20898 - DNA, 80 bp, synthetic construct
  misc_feature 1..80: note = Synthetic: >NC_029647.1-cand-770-849
  source 1..80: mol_type = other DNA
actcttctccaagccaataaagaacataattgggaagctcaaacctttgaatttcttgaatttactatcgtcctgtgatt

SEQ ID NO: 20899 - DNA, 80 bp, synthetic construct
  misc_feature 1..80: note = Synthetic: >NC_029647.1-cand-800-879
  source 1..80: mol_type = other DNA
tgggaagctcaaacctttgaatttcttgaatttactatcgtcctgtgattggacgttccccagcattgttgaaaccataa

SEQ ID NO: 20900 - DNA, 80 bp, synthetic construct
  misc_feature 1..80: note = Synthetic: >NC_034517.1-cand-5190-5269
  source 1..80: mol_type = other DNA
gaggtcacaaagctgtatgaaggcgatttgcgagtgacctttaattttggattagactgtgctaggttagagatattttg

SEQ ID NO: 20901 - DNA, 80 bp, synthetic construct
  misc_feature 1..80: note = Synthetic: >NC_034517.1-cand-5270-5349
  source 1..80: mol_type = other DNA
ggaaaaacagacctatattctggagacctcaataactcagaagcacgtgttaaagattatgatggatgaagtaacaaaag

SEQ ID NO: 20902 - DNA, 80 bp, synthetic construct
  misc_feature 1..80: note = Synthetic: >NC_034517.1-cand-5350-5429
  source 1..80: mol_type = other DNA
aacttttacgatgtggtatgaggtttaagactgaacaagtatctggtgctaggcatctagtactgtataagactgagtct

SEQ ID NO: 20903 - DNA, 80 bp, synthetic construct
  misc_feature 1..80: note = Synthetic: >NC_034517.1-cand-5450-5529
  source 1..80: mol_type = other DNA
taatatcccttgtatagtctacaagaactgtgcgctaagaacaggcttgagaactaatcatgcaataaaccataagttca

SEQ ID NO: 20904 - DNA, 80 bp, synthetic construct
  misc_feature 1..80: note = Synthetic: >NC_034517.1-cand-5510-5589
  source 1..80: mol_type = other DNA
tgcaataaaccataagttcatgatctctataaaggatgatggtctacgggccattgctcagtttgatgaagaaagtccac

SEQ ID NO: 20905 - DNA, 80 bp, synthetic construct
  misc_feature 1..80: note = Synthetic: >NC_034517.1-cand-5590-5669
  source 1..80: mol_type = other DNA
gtttccttttagcacatgcttttcatacaatcaaggatataaggtatcaagctgtggatgctgttagtaatgtttggttt

SEQ ID NO: 20906 - DNA, 80 bp, synthetic construct
  misc_feature 1..80: note = Synthetic: >NC_034517.1-cand-5680-5759
  source 1..80: mol_type = other DNA
gggttaagttatttttaaatccaattatatcatctggtctatttgagaattttctaaaaaaccttcctgcagcaattcca

SEQ ID NO: 20907 - DNA, 80 bp, synthetic construct
  misc_feature 1..80: note = Synthetic: >NC_034517.1-cand-5750-5829
  source 1..80: mol_type = other DNA
agcaattccacctgcagcttattctctaatcatgaatagggccaaaatttcagttgatttatttatgtttaatgaccttc

SEQ ID NO: 20908 - DNA, 80 bp, synthetic construct
  misc_feature 1..80: note = Synthetic: >NC_034517.1-cand-5830-5909
  source 1..80: mol_type = other DNA
ttcgtctcataaatccaaacaatgtacttgatttgtcaggtctccagccaactgaagatgggtttagtactgttagtagt

SEQ ID NO: 20909 - DNA, 80 bp, synthetic construct
  misc_feature 1..80: note = Synthetic: >NC_034517.1-cand-5910-5989
  source 1..80: mol_type = other DNA
atgtcgagtcgattatggtctgaagaggtcagttttgttgatgatgatgaagaaatggaagatgagtttacaatagattt

SEQ ID NO: 20910 - DNA, 80 bp, synthetic construct
  misc_feature 1..80: note = Synthetic: >NC_034517.1-cand-5990-6069
  source 1..80: mol_type = other DNA
gcaagatgtggactttgaaaatattgacatggaagctgatatagaacattttctgcaggatgaaagctcatatacaggtg

SEQ ID NO: 20911 - DNA, 80 bp, synthetic construct
  misc_feature 1..80: note = Synthetic: >NC_034517.1-cand-6080-6159
  source 1..80: mol_type = other DNA
catgtcagaagaaactgaggtgaagaaaatgagaggtattgtaaaactcttagagcctgtaaaattgataaaaagttggg

SEQ ID NO: 20912 - DNA, 80 bp, synthetic construct
  misc_feature 1..80: note = Synthetic: >NC_034517.1-cand-6160-6239
  source 1..80: mol_type = other DNA
tctcaaagggtttgtcaattgaaaaggtatacagcccagtaaatattatattgatgacaagatatctttccaagaatttt

SEQ ID NO: 20913 - DNA, 80 bp, synthetic construct
  misc_feature 1..80: note = Synthetic: >NC_034517.1-cand-6230-6309
  source 1..80: mol_type = other DNA
caagaattttagtttttctgacaagcaggtttcactattagacccatatgatttgacagaattggaaagtatcgttaagg

SEQ ID NO: 20914 - DNA, 80 bp, synthetic construct
  misc_feature 1..80: note = Synthetic: >NC_034517.1-cand-6390-6469
  source 1..80: mol_type = other DNA
ccagaggatgttgttccagactccttgttttcttttagacatactattgtcttgctaagaagattatttcctcctgattc

SEQ ID NO: 20915 - DNA, 80 bp, synthetic construct
  misc_feature 1..80: note = Synthetic: >NC_034517.1-cand-6400-6479
  source 1..80: mol_type = other DNA
ttgttccagactccttgttttcttttagacatactattgtcttgctaagaagattatttcctcctgattctgtcaccact

SEQ ID NO: 20916 - DNA, 80 bp, synthetic construct
  misc_feature 1..80: note = Synthetic: >NC_039476.1-cand-300-379
  source 1..80: mol_type = other DNA
ccccaaccggacgtggccaacacagcattcagtgttccaccactgagcttgagagaaaacagggaggccaaggagccgct

SEQ ID NO: 20917 - DNA, 80 bp, synthetic construct
  misc_feature 1..80: note = Synthetic: >NC_039476.1-cand-490-569
  source 1..80: mol_type = other DNA
caagagtggagctgacgccgttgtcattgtactggcgtgtggtgtacactccccaatacctcatctcccctgaaaccctc

SEQ ID NO: 20918 - DNA, 80 bp, synthetic construct
  misc_feature 1..80: note = Synthetic: >NC_039476.1-cand-890-969
  source 1..80: mol_type = other DNA
aatagtggagtctctgatattacttgctgaactcttcggagttttctggacacccccagatgtgtctgctatgatcgctc

SEQ ID NO: 20919 - DNA, 80 bp, synthetic construct
  misc_feature 1..80: note = Synthetic: >NC_039476.1-cand-900-979
  source 1..80: mol_type = other DNA
tctctgatattacttgctgaactcttcggagttttctggacacccccagatgtgtctgctatgatcgctcccttactcgg

SEQ ID NO: 20920 - DNA, 80 bp, synthetic construct
  misc_feature 1..80: note = Synthetic: >NC_039476.1-cand-1050-1129
  source 1..80: mol_type = other DNA
ttggtgttgggattcaccaaagagaaaattggcaaaatgttgtcctcagcagcatcaacactcagggcttgcaaagatct

SEQ ID NO: 20921 - DNA, 80 bp, synthetic construct
  misc_feature 1..80: note = Synthetic: >NC_039476.1-cand-1560-1639
  source 1..80: mol_type = other DNA
gatcaaagagtcggactcataccacgaaacggtgtggaccattgggatgcatacaaaggtgagagagtcgtgctgtggga

SEQ ID NO: 20922 - DNA, 80 bp, synthetic construct
  misc_feature 1..80: note = Synthetic: >NC_039476.1-cand-1800-1879
  source 1..80: mol_type = other DNA
cttgattatgtcaactttgaggcctgttccaggagaattgatttcctggtgtacgctgatgcaccagaagtagaaaaggc

SEQ ID NO: 20923 - DNA, 80 bp, synthetic construct
  misc_feature 1..80: note = Synthetic: >NC_039476.1-cand-2200-2279
  source 1..80: mol_type = other DNA
atcaattaaaaggagtgaaaaccatggaagaactcaaacaagcaatcaggaatgtgaccatcaagaggtgccagatcatc

SEQ ID NO: 20924 - DNA, 80 bp, synthetic construct
  misc_feature 1..80: note = Synthetic: >NC_039476.1-cand-2380-2459
  source 1..80: mol_type = other DNA
gggccctgcaccatctcaaacatgcccgaatcaggtactatgtcaaatgtgtgcaagaagcagtctattccatcatacaa

SEQ ID NO: 20925 - DNA, 80 bp, synthetic construct
  misc_feature 1..80: note = Synthetic: >NC_039476.1-cand-2440-2519
  source 1..80: mol_type = other DNA
cagtctattccatcatacaaattgccggcgctgcgtttgtcaccacgcgcattgcacgtcgcatgaacatacaagaactc

SEQ ID NO: 20926 - DNA, 80 bp, synthetic construct
  misc_feature 1..80: note = Synthetic: >NC_039476.1-cand-2990-3069
  source 1..80: mol_type = other DNA
gagtgttgactacaatgagaaactggactttgaggcccccccaagcatatggtctaggattgtgagctttggttctggct

SEQ ID NO: 20927 - DNA, 80 bp, synthetic construct
  misc_feature 1..80: note = Synthetic: >NC_039476.1-cand-3160-3239
  source 1..80: mol_type = other DNA
aaattcagatccacaaatcaggcgaattttgccgattcagattcccaaaaccaattagaccagatgtgataggaatgatc

SEQ ID NO: 20928 - DNA, 80 bp, synthetic construct
  misc_feature 1..80: note = Synthetic: >NC_039476.1-cand-3380-3459
  source 1..80: mol_type = other DNA
tatgttgctcactggatcaaacgctaaaggaatggacttgggaacaactcctggtgactgtggctgtccttacatctata

SEQ ID NO: 20929 - DNA, 80 bp, synthetic construct
  misc_feature 1..80: note = Synthetic: >NC_039476.1-cand-3490-3569
  source 1..80: mol_type = other DNA
tgcacactgcagcagcccgtggtggaaacaccgtcatctgtgccacacagggaagtgagggtgaggcaactcttgagggt

SEQ ID NO: 20930 - DNA, 80 bp, synthetic construct
  misc_feature 1..80: note = Synthetic: >NC_039476.1-cand-3510-3589
  source 1..80: mol_type = other DNA
ggtggaaacaccgtcatctgtgccacacagggaagtgagggtgaggcaactcttgagggtggagatgacaaaggaacata

SEQ ID NO: 20931 - DNA, 80 bp, synthetic construct
  misc_feature 1..80: note = Synthetic: >NC_039476.1-cand-3710-3789
  source 1..80: mol_type = other DNA
ccgtgatccgcgtgttaagggtgggccttccctgcagcaggtaatgagagaccagttgaagcctttcactgaacccaggg

SEQ ID NO: 20932 - DNA, 80 bp, synthetic construct
  misc_feature 1..80: note = Synthetic: >NC_039897.1-cand-280-359
  source 1..80: mol_type = other DNA
gggatgccgaaccagaacatcaggaaagtacggctaaggcatggtgcgacctcgcgcaagaagagaaggaggagataatg

SEQ ID NO: 20933 - DNA, 80 bp, synthetic construct
  misc_feature 1..80: note = Synthetic: >NC_039897.1-cand-310-389
  source 1..80: mol_type = other DNA
cggctaaggcatggtgcgacctcgcgcaagaagagaaggaggagataatgcgtaataatgaaaagctcttcgacgctggg

SEQ ID NO: 20934 - DNA, 80 bp, synthetic construct
  misc_feature 1..80: note = Synthetic: >NC_039897.1-cand-400-479
  source 1..80: mol_type = other DNA
catcaactttgcctagtacgtttgagagggccgacccaattgacagccccagtgaacagcaacctgtaatatggtccgcc

SEQ ID NO: 20935 - DNA, 80 bp, synthetic construct
  misc_feature 1..80: note = Synthetic: >NC_039897.1-cand-490-569
  source 1..80: mol_type = other DNA
tcgatattggtgtcaatgacctgaccaccgtccgtggcccattttggaacttgtgtcccctcccgccactggatgcccgg

SEQ ID NO: 20936 - DNA, 80 bp, synthetic construct
  misc_feature 1..80: note = Synthetic: >NC_039897.1-cand-520-599
  source 1..80: mol_type = other DNA
tccgtggcccattttggaacttgtgtcccctcccgccactggatgcccggaataatggccccgctaaggaacccctcata

SEQ ID NO: 20937 - DNA, 80 bp, synthetic construct
  misc_feature 1..80: note = Synthetic: >NC_039897.1-cand-680-759
  source 1..80: mol_type = other DNA
ctcaccgcaagcggctttctccataccaagaataaccatccaccctctagtagcctggtggcgcgtatgctacgttccaa

SEQ ID NO: 20938 - DNA, 80 bp, synthetic construct
  misc_feature 1..80: note = Synthetic: >NC_039897.1-cand-730-809
  source 1..80: mol_type = other DNA
tagcctggtggcgcgtatgctacgttccaactaatcagcagcgcctcacttatgaccagctcaaagaattggagaatgag

SEQ ID NO: 20939 - DNA, 80 bp, synthetic construct
  misc_feature 1..80: note = Synthetic: >NC_039897.1-cand-820-899
  source 1..80: mol_type = other DNA
acgcttccatcacaaacaattgctatgagttttgttgcagggtgatggcacttgacgacacatggcttgagaggaggtta

SEQ ID NO: 20940 - DNA, 80 bp, synthetic construct
  misc_feature 1..80: note = Synthetic: >NC_039897.1-cand-900-979
  source 1..80: mol_type = other DNA
gtcagcactggaaaattcaaccaccccacacaagattggtcacaggacaccccagattttcaccaagattcgaagcttga

SEQ ID NO: 20941 - DNA, 80 bp, synthetic construct
  misc_feature 1..80: note = Synthetic: >NC_039897.1-cand-980-1059
  source 1..80: mol_type = other DNA
ggtggtaagagatgctgtgctatcagctattaatggccttgtatcacaaccctttaagaacattttgtcaaagatcaaac

SEQ ID NO: 20942 - DNA, 80 bp, synthetic construct
  misc_feature 1..80: note = Synthetic: >NC_039897.1-cand-1020-1099
  source 1..80: mol_type = other DNA
gtatcacaaccctttaagaacattttgtcaaagatcaaaccattaaatgttctcaatctcttatcaaattgtgactggac

SEQ ID NO: 20943 - DNA, 80 bp, synthetic construct
  misc_feature 1..80: note = Synthetic: >NC_039897.1-cand-1140-1219
  source 1..80: mol_type = other DNA
ttgtttgatgtgttctggactccaccagatgtttcaagtttcattgcctcactactacctgaatttcacctgcagggtcc

SEQ ID NO: 20944 - DNA, 80 bp, synthetic construct
  misc_feature 1..80: note = Synthetic: >NC_039897.1-cand-1220-1299
  source 1..80: mol_type = other DNA
tgaagacctagctaaggacttggtccctctcattctaggtggcataggcttggctattggctttacaagggataaagtga

SEQ ID NO: 20945 - DNA, 80 bp, synthetic construct
  misc_feature 1..80: note = Synthetic: >NC_039897.1-cand-1300-1379
  source 1..80: mol_type = other DNA
caagagtgatgaagagcgccgtcgatgggctgcgatcggcaacacagctcgggcagtacggactggaaatattctcaatc

SEQ ID NO: 20946 - DNA, 80 bp, synthetic construct
  misc_feature 1..80: note = Synthetic: >NC_039897.1-cand-1430-1509
  source 1..80: mol_type = other DNA
tatagaggatgcagtgatagatatggaggtgttgtccagcaccaatgtgacacaattggttaaagataagaaattggcca

SEQ ID NO: 20947 - DNA, 80 bp, synthetic construct
  misc_feature 1..80: note = Synthetic: >NC_039897.1-cand-1460-1539
  source 1..80: mol_type = other DNA
gttgtccagcaccaatgtgacacaattggttaaagataagaaattggccagaacttacatgaatgtgctggacaatgaag

SEQ ID NO: 20948 - DNA, 80 bp, synthetic construct
  misc_feature 1..80: note = Synthetic: >NC_040876.1-cand-1510-1589
  source 1..80: mol_type = other DNA
gtaaaacccacatggcaagacacttggctaagagtatcgccaacaccatgagcggcgaccagagagtagggctagtccca

SEQ ID NO: 20949 - DNA, 80 bp, synthetic construct
  misc_feature 1..80: note = Synthetic: >NC_040876.1-cand-1640-1719
  source 1..80: mol_type = other DNA
atgggatgattatggcatgggaaaccctgtcaaagatgccctaacactgcaagagttggctgacacctgcccagtaactc

SEQ ID NO: 20950 - DNA, 80 bp, synthetic construct
  misc_feature 1..80: note = Synthetic: >NC_040876.1-cand-1750-1829
  source 1..80: mol_type = other DNA
agatgttcgacagtgatgtcatcataatcacaaccaatttagtcaacccagcgcccctcgattatgtaaacttcgaggcg

SEQ ID NO: 20951 - DNA, 80 bp, synthetic construct
  misc_feature 1..80: note = Synthetic: >NC_040876.1-cand-1800-1879
  source 1..80: mol_type = other DNA
gcgcccctcgattatgtaaacttcgaggcgtgctccagaagggtcgactttctggtctatgcagagtcaccagaaattga

SEQ ID NO: 20952 - DNA, 80 bp, synthetic construct
  misc_feature 1..80: note = Synthetic: >NC_040876.1-cand-1880-1959
  source 1..80: mol_type = other DNA
gaaggttaagagagatttccccggccaacctgacatgtggaaggaccattttaaaccagacttttcccacataaaactga

SEQ ID NO: 20953 - DNA, 80 bp, synthetic construct
  misc_feature 1..80: note = Synthetic: >NC_040876.1-cand-1950-2029
  source 1..80: mol_type = other DNA
ataaaactgaccctagccccacagggtggatttgacaagaacggcaacaccccgcatggtaagggcaccatgcgatcctt

SEQ ID NO: 20954 - DNA, 80 bp, synthetic construct
  misc_feature 1..80: note = Synthetic: >NC_040876.1-cand-2100-2179
  source 1..80: mol_type = other DNA
gggaatgaccttcaaacatacaactttgacaccaacagggtctctgcatttaggaagctggccgcggacaacaagtatgg

SEQ ID NO: 20955 - DNA, 80 bp, synthetic construct
  misc_feature 1..80: note = Synthetic: >NC_040876.1-cand-2110-2189
  source 1..80: mol_type = other DNA
ttcaaacatacaactttgacaccaacagggtctctgcatttaggaagctggccgcggacaacaagtatgggatcatggag

SEQ ID NO: 20956 - DNA, 80 bp, synthetic construct
  misc_feature 1..80: note = Synthetic: >NC_040876.1-cand-2190-2269
  source 1..80: mol_type = other DNA
acaatgagagtgggtacggcgcttaagagtgtcaagaccttggaagatctgaaagttgccctgagggatgtgaagttcaa

SEQ ID NO: 20957 - DNA, 80 bp, synthetic construct
  misc_feature 1..80: note = Synthetic: >NC_040876.1-cand-2270-2349
  source 1..80: mol_type = other DNA
tgagtgtgagataatttacaggaactccaaataccgagtctcttccaatggtaagggctctgtctctgttgacaaagttg

SEQ ID NO: 20958 - DNA, 80 bp, synthetic construct
  misc_feature 1..80: note = Synthetic: >NC_040876.1-cand-2350-2429
  source 1..80: mol_type = other DNA
aggaccaagcgtcccagactgcaaacgaagtgggtgcagcactcctcagacttaggcaggcaagagccaggtactatgtc

SEQ ID NO: 20959 - DNA, 80 bp, synthetic construct
  misc_feature 1..80: note = Synthetic: >NC_040876.1-cand-2430-2509
  source 1..80: mol_type = other DNA
agctgcttccaagatctcatctacactctaatacaggtcgctggagcatcattcgttgtcaacaggatctctaaaaggtt

SEQ ID NO: 20960 - DNA, 80 bp, synthetic construct
  misc_feature 1..80: note = Synthetic: >NC_040876.1-cand-2510-2589
  source 1..80: mol_type = other DNA
ctgttgggagagatgggtcaaaccaaccgagacccaggaaacgagcgaacccgaaaaggaagtggcccaaggtagatggg

SEQ ID NO: 20961 - DNA, 80 bp, synthetic construct
  misc_feature 1..80: note = Synthetic: >NC_040876.1-cand-2590-2669
  source 1..80: mol_type = other DNA
aggttgaacccaaggacatagagacagaaggtaagaagggtaaaaacaagaaaggaagaggcaagaaacacacagctttc

SEQ ID NO: 20962 - DNA, 80 bp, synthetic construct
  misc_feature 1..80: note = Synthetic: >NC_040876.1-cand-2670-2749
  source 1..80: mol_type = other DNA
tccagcaaaggcctgagtgatgaggagtatgatgagttcaaaagaatcagagaagaaaggaacggaaaatactccattga

SEQ ID NO: 20963 - DNA, 80 bp, synthetic construct
  misc_feature 1..80: note = Synthetic: >NC_040876.1-cand-2750-2829
  source 1..80: mol_type = other DNA
ggaatacctgcaagaccgggatcgctactatgaggaagtggcagttgcccgggcaacagaggaggacttctgtgaagagg

SEQ ID NO: 20964 - DNA, 80 bp, synthetic construct
  misc_feature 1..80: note = Synthetic: >NC_007554.1-cand-370-449
  source 1..80: mol_type = other DNA
aggttgaaagtgctattgcaagcaagtatcctgatatattttgttctgctgataaaattagtcgagttgcacagagactt

SEQ ID NO: 20965 - DNA, 80 bp, synthetic construct
  misc_feature 1..80: note = Synthetic: >NC_001611.1-cand-141730-141809
  source 1..80: mol_type = other DNA
gtacgttctccgtagatgaactagacaataatgtcttttttacacatggttattttttaaaacacaaatatggttcactt

SEQ ID NO: 20966 - DNA, 80 bp, synthetic construct
  misc_feature 1..80: note = Synthetic: >NC_001611.1-cand-34410-34489
  source 1..80: mol_type = other DNA
acagtgatgtctacatgccgttttttgaaactgaatagatgcatctaaaagcgatgctacgctagtcacgatcaccactt

SEQ ID NO: 20967 - DNA, 80 bp, synthetic construct
  misc_feature 1..80: note = Synthetic: >NC_003310.1-cand-83300-83379
  source 1..80: mol_type = other DNA
aagtgtaaatataactattatttttatagttgtaataaaaagggaaatttgattgtataccttcggttctttaaaagaaa

SEQ ID NO: 20968 - DNA, 80 bp, synthetic construct
  misc_feature 1..80: note = Synthetic: >NC_003310.1-cand-142500-142579
  source 1..80: mol_type = other DNA
aagtgtgctgattttttatgattttgtgcgacagcaatacatttttctatgttacttttagttcgtatcagattatattc

SEQ ID NO: 20969 - DNA, 80 bp, synthetic construct
  misc_feature 1..80: note = Synthetic: >NC_003310.1-cand-108490-108569
  source 1..80: mol_type = other DNA
aagttaaaagttagggttcttgttccattattgctttttgtcagtagttcgttataaattctcgagatgggcccgttctc

SEQ ID NO: 20970 - DNA, 80 bp, synthetic construct
  misc_feature 1..80: note = Synthetic: >NC_003310.1-cand-121360-121439
  source 1..80: mol_type = other DNA
aagttaagatctgggtatttcttttctgctagaacatccattgagtcggagccatctggtttaatataaccaccgataaa

SEQ ID NO: 20971 - DNA, 80 bp, synthetic construct
  misc_feature 1..80: note = Synthetic: >NC_005236.1-cand-770-849
  source 1..80: mol_type = other DNA
aagttcatggcagagtctcctattgctgggagtttatctgggaatcctgtgaatcgtgactatatcagacaaagacaagg

SEQ ID NO: 20972 - DNA, 80 bp, synthetic construct
  misc_feature 1..80: note = Synthetic: >NC_001611.1-cand-69420-69499
  source 1..80: mol_type = other DNA
catcgaatataaaataactacagtttgaaaaataacagtatcatttaaacatttaacttgcggggttaatctcacaactt

SEQ ID NO: 20973 - DNA, 80 bp, synthetic construct
  misc_feature 1..80: note = Synthetic: >AdVB3-cand-33280-33359
  source 1..80: mol_type = other DNA
ttaaaaacatatcccaaggaatgggaaactcttgcagaacagtaaagctggcagaacaaggaagaccacgaacacaactt

SEQ ID NO: 20974 - DNA, 80 bp, synthetic construct
  misc_feature 1..80: note = Synthetic: >NC_001611.1-cand-59430-59509
  source 1..80: mol_type = other DNA
actcgttcgatattagtacagaaacatggaataaattattatccaattattatatgaagatgatagagtatgctaaactt

SEQ ID NO: 20975 - DNA, 80 bp, synthetic construct
  misc_feature 1..80: note = Synthetic: >NC_001611.1-cand-95230-95309
  source 1..80: mol_type = other DNA
attgtttaagaagagaattaaaagaggaaagtgatgaacgtataacagtaaaagaattcggaaatgtaattctaaaactt

SEQ ID NO: 20976 - DNA, 80 bp, synthetic construct
  misc_feature 1..80: note = Synthetic: >NC_001611.1-cand-109550-109629
  source 1..80: mol_type = other DNA
aataaaattacttaaagatagaaatgaattatttacaaaattcatcaacgagttaaaaaagaccagttcattcaagataa

SEQ ID NO: 20977 - DNA, 80 bp, synthetic construct
  misc_feature 1..80: note = Synthetic: >NC_003310.1-cand-116620-116699
  source 1..80: mol_type = other DNA
tgagattgatcatgtagaaaacaacaagggatacaatatttccgcatatcatgaaatatattaagaaatcccactttatt

SEQ ID NO: 20978 - DNA, 80 bp, synthetic construct
  misc_feature 1..80: note = Synthetic: >NC_003310.1-cand-90650-90729
  source 1..80: mol_type = other DNA
aataaataaattcgttagcaaaattattaattttagtgaaatagttagcgtcaactttcatagcttccttcaatctaatt

SEQ ID NO: 20979 - DNA, 80 bp, synthetic construct
  misc_feature 1..80: note = Synthetic: >NC_001611.1-cand-36580-36659
  source 1..80: mol_type = other DNA
aataacgtgctcattaggcagtttatggcagcttgataattagatatagtatattccagttcatatttattagataccgc

SEQ ID NO: 20980 - DNA, 80 bp, synthetic construct
  misc_feature 1..80: note = Synthetic: >NC_001611.1-cand-33370-33449
  source 1..80: mol_type = other DNA
aatatatatagacttgttaatagttggaataaatagattaatgcttaaactatcatcatctccacgattagagatacaat

SEQ ID NO: 20981 - DNA, 80 bp, synthetic construct
  misc_feature 1..80: note = Synthetic: >NC_001611.1-cand-36500-36579
  source 1..80: mol_type = other DNA
tatagaagatatttaatatagataatacaaaattttcagtttttgatatcgatctgattgatcctagaactagatatatt

SEQ ID NO: 20982 - DNA, 80 bp, synthetic construct
  misc_feature 1..80: note = Synthetic: >NC_001611.1-cand-68860-68939
  source 1..80: mol_type = other DNA
tttttattactttatactataatagtactagactgacttctaacaaacatctcacctgccataaataaatgcttgatatt

SEQ ID NO: 20983 - DNA, 80 bp, synthetic construct
  misc_feature 1..80: note = Synthetic: >NC_003310.1-cand-73220-73299
  source 1..80: mol_type = other DNA
tttatcatcttatatagatttcgaaaatactaaatcagatatcgatgttataaaatctatatcctcgatttttggatatt

SEQ ID NO: 20984 - DNA, 80 bp, synthetic construct
  misc_feature 1..80: note = Synthetic: >NC_001611.1-cand-37140-37219
  source 1..80: mol_type = other DNA
cggaaaaaacataatagctcccctgttttcatccatggttttaagtaaatgatcactggcttctttagtcaatggatatt

SEQ ID NO: 20985 - DNA, 80 bp, synthetic construct
  misc_feature 1..80: note = Synthetic: >NC_003310.1-cand-45110-45189
  source 1..80: mol_type = other DNA
gtaccgtatatttggattaattagatatagagaatatgatccgtaacatatacaacttttattatgacgtctaagatatt

SEQ ID NO: 20986 - DNA, 80 bp, synthetic construct
  misc_feature 1..80: note = Synthetic: >NC_039476.1-cand-90-169
  source 1..80: mol_type = other DNA
aatatgtcttccaccttaaagaaagccctcggggctaggcccaaacagcccgccccgagagacaaaccacaaaagccccc

SEQ ID NO: 20987 - DNA, 80 bp, synthetic construct
  misc_feature 1..80: note = Synthetic: >NC_003310.1-cand-87530-87609
  source 1..80: mol_type = other DNA
atctaccaacggtatatgaataatattaatattagagttaggtaatgtatatttatccatcgtcaaatttaaaacatatt

SEQ ID NO: 20988 - DNA, 80 bp, synthetic construct
  misc_feature 1..80: note = Synthetic: >NC_001611.1-cand-121130-121209
  source 1..80: mol_type = other DNA
aatattagctctcgtacagtagagatatttgagagggaaaagtcatctcttgtatcatatattaaaactaccaataagaa

SEQ ID NO: 20989 - DNA, 80 bp, synthetic construct
  misc_feature 1..80: note = Synthetic: >NC_003310.1-cand-60160-60239
  source 1..80: mol_type = other DNA
agaatcacatagattgacgattcgtctctcttagtaactctagtaaaataatcatacaatctagtacgcgaaataatatt

SEQ ID NO: 20990 - DNA, 80 bp, synthetic construct
  misc_feature 1..80: note = Synthetic: >NC_001611.1-cand-63090-63169
  source 1..80: mol_type = other DNA
gggagggcatgtaaccctttttatcgatagaggaagtataaaaattaaacaaaacgttagagacaaaagacgtaaatatt

SEQ ID NO: 20991 - DNA, 80 bp, synthetic construct
  misc_feature 1..80: note = Synthetic: >NC_003310.1-cand-151470-151549
  source 1..80: mol_type = other DNA
aatatttatcggtaacatctttgtaaacagatatggtgtagcatatgtttatttagatacagatgtaaatatatctacaa

SEQ ID NO: 20992 - DNA, 80 bp, synthetic construct
  misc_feature 1..80: note = Synthetic: >HCV.A7-cand-4590-4669
  source 1..80: mol_type = other DNA
cacggtcatggatgacttatgtcaaaaccctgatggtaaggacatgtcactgttctgccaaatggtgtccactgttgatt

SEQ ID NO: 20993 - DNA, 80 bp, synthetic construct
  misc_feature 1..80: note = Synthetic: >AdVB7-cand-30580-30659
  source 1..80: mol_type = other DNA
cctagcttccaccgccactcgcgctacacctgaacaacttagaaaatgcaaatttcaacaaccatggtcatttcttgatt

SEQ ID NO: 20994 - DNA, 80 bp, synthetic construct
  misc_feature 1..80: note = Synthetic: >AdVB7-cand-28960-29039
  source 1..80: mol_type = other DNA
aatcacacccttgtagggcccccaattacttcagaggttatttggaccaaacttggaagtgttgattattttgatataat

SEQ ID NO: 20995 - DNA, 80 bp, synthetic construct
  misc_feature 1..80: note = Synthetic: >AdVB3-cand-5110-5189
  source 1..80: mol_type = other DNA
aatcagacgatgggcgtccagcgctgccagggtccgatccttccatggtcgcagcgtccgagttagggttgtttccgtca

SEQ ID NO: 20996 - DNA, 80 bp, synthetic construct
  misc_feature 1..80: note = Synthetic: >AdVB7-cand-23640-23719
  source 1..80: mol_type = other DNA
tcctcttcgggggcagaggtggaggcgactgagatgggctgcggtctggccttggaagcggatggctggcagagcccatt

SEQ ID NO: 20997 - DNA, 80 bp, synthetic construct
  misc_feature 1..80: note = Synthetic: >NC_003310.1-cand-122930-123009
  source 1..80: mol_type = other DNA
gcatctttttagatggtttctttttcccagcattaactgattcgatacctagaagatcgtgattgatttctccgaccatt

SEQ ID NO: 20998 - DNA, 80 bp, synthetic construct
  misc_feature 1..80: note = Synthetic: >HCV.B4-cand-4610-4689
  source 1..80: mol_type = other DNA
aatggtgtcaagtgttgactttgtcccaccaatggcagcactagaagagaaaggcatcctgttcacctcaccatttgtcc

SEQ ID NO: 20999 - DNA, 80 bp, synthetic construct
  misc_feature 1..80: note = Synthetic: >NC_003310.1-cand-45270-45349
  source 1..80: mol_type = other DNA
acgttcatagaatttagcatatctcttgccaattcttccattgatgttacattataagaaattttagatgaaattacatt

SEQ ID NO: 21000 - DNA, 80 bp, synthetic construct
  misc_feature 1..80: note = Synthetic: >NC_003310.1-cand-44630-44709
  source 1..80: mol_type = other DNA
atacactagacattttttaaagctaaaatagtctttagtagtaacagtaactatgcgattattttcatcgatgatacatt

SEQ ID NO: 21001 - DNA, 80 bp, synthetic construct
  misc_feature 1..80: note = Synthetic: >NC_001611.1-cand-16490-16569
  source 1..80: mol_type = other DNA
gattgtctgacataagatgtctatgaatatgatttttgccaaatttatctactatcctggcttcaaatccaatggacatt

SEQ ID NO: 21002 - DNA, 80 bp, synthetic construct
  misc_feature 1..80: note = Synthetic: >AdVB3-cand-28430-28509
  source 1..80: mol_type = other DNA
tcattttttctgaaatgtgcgatctggccatgttcatgagcagacagtatgacctatggcctcccagcaaagagaacatt

SEQ ID NO: 21003 - DNA, 80 bp, synthetic construct
  misc_feature 1..80: note = Synthetic: >NC_003310.1-cand-47690-47769
  source 1..80: mol_type = other DNA
atagtagatatcaaatccaatggagatacagttcttggcttaaacagatatagtttttctggaacgaattctacaacatt

SEQ ID NO: 21004 - DNA, 80 bp, synthetic construct
  misc_feature 1..80: note = Synthetic: >NC_003310.1-cand-43100-43179
  source 1..80: mol_type = other DNA
attaattgttattttattcatattcttaaaaggtttcatatttatcaattcttctacattaaaaatttccatttttaatt

SEQ ID NO: 21005 - DNA, 80 bp, synthetic construct
  misc_feature 1..80: note = Synthetic: >NC_001611.1-cand-15360-15439
  source 1..80: mol_type = other DNA
gaatttgatataaaatagcgttcacatatcctccataatggtcaatcgccatttgttcgtatgtcataaattctttaatt

SEQ ID NO: 21006 - DNA, 80 bp, synthetic construct
  misc_feature 1..80: note = Synthetic: >AdVB7-cand-29920-29999
  source 1..80: mol_type = other DNA
ttgtgcataatgtactatgcctgctgctatagaaaacatgaacaaaaaggtgatgcattactaaattttgacatttaatt

SEQ ID NO: 21007 - DNA, 80 bp, synthetic construct
  misc_feature 1..80: note = Synthetic: >NC_001611.1-cand-26640-26719
  source 1..80: mol_type = other DNA
aattaaatttttttattaattaattaattaaacgtataaaaacgttccgtatctgtatttaagagccagatttcgtctaa

SEQ ID NO: 21008 - DNA, 80 bp, synthetic construct
  misc_feature 1..80: note = Synthetic: >EVD70-cand-7300-7379
  source 1..80: mol_type = other DNA
cattctagataactctacttaggaacccaagaacccctccctggggcattagattttgtagaggtaaattttggttaatt

SEQ ID NO: 21009 - DNA, 80 bp, synthetic construct
  misc_feature 1..80: note = Synthetic: >NC_001611.1-cand-49790-49869
  source 1..80: mol_type = other DNA
aattaaccattccaagtcactatgtgtaagaagattatattctatcataagcttgactacatttggtcccgataccatta

SEQ ID NO: 21010 - DNA, 80 bp, synthetic construct
  misc_feature 1..80: note = Synthetic: >NC_001611.1-cand-82680-82759
  source 1..80: mol_type = other DNA
aattacgaataaagcggatactagtagtttcacaaagatggctgaaattagagctcatctaagaaatagcgctgaaaata

SEQ ID NO: 21011 - DNA, 80 bp, synthetic construct
  misc_feature 1..80: note = Synthetic: >NC_001611.1-cand-133300-133379
  source 1..80: mol_type = other DNA
atattgatttactaaaatatctatgtttaacttttgttctataacgtccttatcggcggtatcggtacatatacgtaatt

SEQ ID NO: 21012 - DNA, 80 bp, synthetic construct
  misc_feature 1..80: note = Synthetic: >AJ410618.2-cand-3950-4029
  source 1..80: mol_type = other DNA
tattctcggcctctttaaatttctgatgaatctatcaaaagacacttttcagcatgagagattgggtgaattctcattaa

SEQ ID NO: 21013 - DNA, 80 bp, synthetic construct
  misc_feature 1..80: note = Synthetic: >AJ410618.2-cand-4030-4109
  source 1..80: mol_type = other DNA
ttgggaaagtacaatggaaaatattcatccctaaatcagaatttgagttctttgatatgtattcacccaaatttttaaag

SEQ ID NO: 21014 - DNA, 80 bp, synthetic construct
  misc_feature 1..80: note = Synthetic: >AJ410618.2-cand-4110-4189
  source 1..80: mol_type = other DNA
ctttggagtgagcaacatgtcacttatgattacattatccccaagggtagagacaatttgctgatttatcttgttagaaa

SEQ ID NO: 21015 - DNA, 80 bp, synthetic construct
  misc_feature 1..80: note = Synthetic: >AJ410618.2-cand-4190-4269
  source 1..80: mol_type = other DNA
aataaatgaccccagtatagttacagctatgacaatgcagtcaccacttcaattaagatttagaatgcaggcaaaacagc

SEQ ID NO: 21016 - DNA, 80 bp, synthetic construct
  misc_feature 1..80: note = Synthetic: >AJ410618.2-cand-4270-4349
  source 1..80: mol_type = other DNA
acatgaatgtatgtaagcttgatgataactgggttacattcagggaggttttagctgcagcaaacagctttgcacaatca

SEQ ID NO: 21017 - DNA, 80 bp, synthetic construct
  misc_feature 1..80: note = Synthetic: >AJ410618.2-cand-4350-4429
  source 1..80: mol_type = other DNA
tatgaggtaactcaggaggaccttgacctttttcaaaccttaacaagctgtacattttcaaaagagtatgcttggaagga

SEQ ID NO: 21018 - DNA, 80 bp, synthetic construct
  misc_feature 1..80: note = Synthetic: >AJ410618.2-cand-4450-4529
  source 1..80: mol_type = other DNA
gtgatgttattccaacaaagcaaattcaaagggcaaaggtggctaggacttttactgtaagagagaaggatcaaataatt

SEQ ID NO: 21019 - DNA, 80 bp, synthetic construct
  misc_feature 1..80: note = Synthetic: >AJ410618.2-cand-4510-4589
  source 1..80: mol_type = other DNA
gagagaaggatcaaataattcagaacagtatcccggctgtaataggttacaagtttgcggtgactgtagatgaaatgtca

SEQ ID NO: 21020 - DNA, 80 bp, synthetic construct
  misc_feature 1..80: note = Synthetic: >AJ410618.2-cand-4590-4669
  source 1..80: mol_type = other DNA
gatgtcctagactctgcaaaattcccagactctttggctgtagatttgaaaacaatgaaagatggagtttatagagaact

SEQ ID NO: 21021 - DNA, 80 bp, synthetic construct
  misc_feature 1..80: note = Synthetic: >AJ410618.2-cand-4670-4749
  source 1..80: mol_type = other DNA
tggattagatatctcaaaggctgaggtaatgaaaaaagttgcaccaatgctttataagagctcaaagtcaagggttgtta

SEQ ID NO: 21022 - DNA, 80 bp, synthetic construct
  misc_feature 1..80: note = Synthetic: >AJ410618.2-cand-4750-4829
  source 1..80: mol_type = other DNA
ttgtccaaggaaacgtagagggaacagcagaggctatctgtggttactggttgcgtaccatgtcccttgtgaagacaatt

SEQ ID NO: 21023 - DNA, 80 bp, synthetic construct
  misc_feature 1..80: note = Synthetic: >AJ410618.2-cand-4830-4909
  source 1..80: mol_type = other DNA
agagtcaaaccacacaaggaagtgttgaaagctgtgtctatttttaatagaaaggaggatattggccaacaaaaggacct

SEQ ID NO: 21024 - DNA, 80 bp, synthetic construct
  misc_feature 1..80: note = Synthetic: >AJ410618.2-cand-4910-4989
  source 1..80: mol_type = other DNA
tgctgcattaaggttatgtattgaagtttggcgctggtgcaaagcaaacaatgcaccctatcaagattggtttcatgcat

SEQ ID NO: 21025 - DNA, 80 bp, synthetic construct
  misc_feature 1..80: note = Synthetic: >AJ410618.2-cand-4990-5069
  source 1..80: mol_type = other DNA
tatggtttgaagacaagacattctccgagtggttggatagatttattcgagtaggtgtccctccagttgatccggagatt

SEQ ID NO: 21026 - DNA, 80 bp, synthetic construct
  misc_feature 1..80: note = Synthetic: >AJ410618.2-cand-5070-5149
  source 1..80: mol_type = other DNA
cattgtgctgcattaatgattgcagatatcagaggtgatttgtctgttttacaggtccaagctaatagaagggcgtattc

SEQ ID NO: 21027 - DNA, 80 bp, synthetic construct
  misc_feature 1..80: note = Synthetic: >AJ410618.2-cand-5150-5229
  source 1..80: mol_type = other DNA
aggcaaacaatatgatgcatattgtgttcaaacatataatgaggaaacaaagctttatgaaggtgatcttcgagttactt

SEQ ID NO: 21028 - DNA, 80 bp, synthetic construct
  misc_feature 1..80: note = Synthetic: >AdVE4-cand-22930-23009
  source 1..80: mol_type = other DNA
ttagggggttcatcaccgccatcttagcgctagcagccttcaccagggggtcgttgtcattgagagtctcaaagctccgc

SEQ ID NO: 21029 - DNA, 80 bp, synthetic construct
  misc_feature 1..80: note = Synthetic: >AdVE4-cand-23010-23089
  source 1..80: mol_type = other DNA
ttgccgtccttctcggtgatccgcacggggggatagctaaagcccacggctgccagctcctcctcggcctctctttcgtt

SEQ ID NO: 21030 - DNA, 80 bp, synthetic construct
  misc_feature 1..80: note = Synthetic: >AdVE4-cand-23090-23169
  source 1..80: mol_type = other DNA
ctcgctgtcctggctgacgtcctgcaggggcacatgcttggttttgcggggtttcttcttgggcggctgctgcgacggcg

SEQ ID NO: 21031 - DNA, 80 bp, synthetic construct
  misc_feature 1..80: note = Synthetic: >AdVE4-cand-23170-23249
  source 1..80: mol_type = other DNA
gtggttgttcctgaggcgagggggagcgcgagttttcgctcaccactactatctcttcttcttggtccgaggccatgcgg

SEQ ID NO: 21032 - DNA, 80 bp, synthetic construct
  misc_feature 1..80: note = Synthetic: >AdVE4-cand-23270-23349
  source 1..80: mol_type = other DNA
gggcagaggcggaggcgacgggctctcgcggtccggcgggtggctggcagagccccttccgcgatcgggagtgcgctccc

SEQ ID NO: 21033 - DNA, 80 bp, synthetic construct
  misc_feature 1..80: note = Synthetic: >AdVE4-cand-23330-23409
  source 1..80: mol_type = other DNA
gcgatcgggagtgcgctcccggcggcgctctgactgacttcctccgcggccggccattgtgttctcctagggaacaacaa

SEQ ID NO: 21034 - DNA, 80 bp, synthetic construct
  misc_feature 1..80: note = Synthetic: >AdVE4-cand-23410-23489
  source 1..80: mol_type = other DNA
caagcatggagactcagccatcgtcgccaaccttgccatctgcccccaccgccgacaacaagcagcagcagaatgagagc

SEQ ID NO: 21035 - DNA, 80 bp, synthetic construct
  misc_feature 1..80: note = Synthetic: >AdVE4-cand-23490-23569
  source 1..80: mol_type = other DNA
ttaaccgccccgccgcccagccccgccatctccgacgcggccccagacatgcaagagatggaggaatccatcgagattga

SEQ ID NO: 21036 - DNA, 80 bp, synthetic construct
  misc_feature 1..80: note = Synthetic: >AdVE4-cand-23570-23649
  source 1..80: mol_type = other DNA
cctgggctatgtgacgcccgcggagcacgaggaagagcttgcagtgcgcttttcaacccaggaagagatacaccaagaac

SEQ ID NO: 21037 - DNA, 80 bp, synthetic construct
  misc_feature 1..80: note = Synthetic: >AdVE4-cand-23620-23699
  source 1..80: mol_type = other DNA
tttcaacccaggaagagatacaccaagaacagccagagcaggaagcagagagtgagcgtgactacctccacctcagcggg

SEQ ID NO: 21038 - DNA, 80 bp, synthetic construct
  misc_feature 1..80: note = Synthetic: >AdVE4-cand-23730-23809
  source 1..80: mol_type = other DNA
cgacaggccatcatcgtcaaggacgcgctgcttgaccgcaccgaggtgcccctcagcgtggaggagcttagccgcgccta

SEQ ID NO: 21039 - DNA, 80 bp, synthetic construct
  misc_feature 1..80: note = Synthetic: >AdVE4-cand-23810-23889
  source 1..80: mol_type = other DNA
cgagctcaaccttttctcgccgcgcgtgccccccaagcgccagcccaacggcacctgcgagcccaacccacgcctcaact

SEQ ID NO: 21040 - DNA, 80 bp, synthetic construct
  misc_feature 1..80: note = Synthetic: >AdVE4-cand-23890-23969
  source 1..80: mol_type = other DNA
tctacccggtctttgcggtgcccgaggccctggctacctaccacatctttttcaagaaccaaaggatccccgtctcctgt

SEQ ID NO: 21041 - DNA, 80 bp, synthetic construct
  misc_feature 1..80: note = Synthetic: >AdVE4-cand-23970-24049
  source 1..80: mol_type = other DNA
cgcgccaaccgcacccgcgccgacgcccttttcgacctgggccccggtgcccgcatacctgatatcgcctccttggaaga

SEQ ID NO: 21042 - DNA, 80 bp, synthetic construct
  misc_feature 1..80: note = Synthetic: >AdVE4-cand-24050-24129
  source 1..80: mol_type = other DNA
ggttcccaagatcttcgagggtttgggcagcgacgagactcgggccgcaaacgctctgcaaggagaaggaggagagcatg

SEQ ID NO: 21043 - DNA, 80 bp, synthetic construct
  misc_feature 1..80: note = Synthetic: >AdVE4-cand-24130-24209
  source 1..80: mol_type = other DNA
agcaccacagcgccctggtggagttggaaggcgacaacgcgcgtctggcggtgctcaagcgcacgatcgagctgacccat

SEQ ID NO: 21044 - DNA, 80 bp, synthetic construct
  misc_feature 1..80: note = Synthetic: >EF177176.1-cand-6970-7049
  source 1..80: mol_type = other DNA
tttccactgggtagaaaatttttaatgcaactgggcactaggtcaaggcctgctgtagctacctctaaaaagcgatctgc

SEQ ID NO: 21045 - DNA, 80 bp, synthetic construct
  misc_feature 1..80: note = Synthetic: >EF177176.1-cand-7050-7129
  source 1..80: mol_type = other DNA
tcctacctccacctctacaccagcaaaacgtaaaaggcggtagtgtgttgttgtgtgtttgtgtaactgtgtttgtgtgt

SEQ ID NO: 21046 - DNA, 80 bp, synthetic construct
  misc_feature 1..80: note = Synthetic: >EF177176.1-cand-7130-7209
  source 1..80: mol_type = other DNA
tgtatatatggtatgtttgtgtatgtgctttatgttatactttgtatgtgtatgttgtgtttgtgtgtttgtgtgttgta

SEQ ID NO: 21047 - DNA, 80 bp, synthetic construct
  misc_feature 1..80: note = Synthetic: >EF177176.1-cand-7210-7289
  source 1..80: mol_type = other DNA
tatatggtatgtttgtgtatgtgccttattttatactttgtatgtgtatgttgtgtttgtgtaaatgtttgtgtctgtat

SEQ ID NO: 21048 - DNA, 80 bp, synthetic construct
  misc_feature 1..80: note = Synthetic: >EF177176.1-cand-7290-7369
  source 1..80: mol_type = other DNA
gcattgtatgtatgactgtatatatgtgtaatgtttgtgtgtctgtaataaacatgaatgagtgcttttacgcgtggttg

SEQ ID NO: 21049 - DNA, 80 bp, synthetic construct
  misc_feature 1..80: note = Synthetic: >EF177176.1-cand-7370-7449
  source 1..80: mol_type = other DNA
cataaactaaggtgtgtcattattgtggcttttgttttgtaagttattgtgtacagtgcactatgtgtattgtgcataca

SEQ ID NO: 21050 - DNA, 80 bp, synthetic construct
  misc_feature 1..80: note = Synthetic: >EF177176.1-cand-7450-7529
  source 1..80: mol_type = other DNA
tatatataccataacatactccattttgttgtttttccgccattttgtacatgcaaccgaattcggttgcatggcctatt

SEQ ID NO: 21051 - DNA, 80 bp, synthetic construct
  misc_feature 1..80: note = Synthetic: >EF177176.1-cand-7530-7609
  source 1..80: mol_type = other DNA
gccattatttaaaccaaaaggcccttttcagcagaacagttaatcccttggcatattgccgtttcctgcgttttatactt

SEQ ID NO: 21052 - DNA, 80 bp, synthetic construct
  misc_feature 1..80: note = Synthetic: >EF177176.1-cand-7610-7689
  source 1..80: mol_type = other DNA
gaactatgtacagtaccgcaccctgtattactcaccggtactatgactgccaactatgcttttatctgcatactttagtg

SEQ ID NO: 21053 - DNA, 80 bp, synthetic construct
  misc_feature 1..80: note = Synthetic: >EF177176.1-cand-7690-7769
  source 1..80: mol_type = other DNA
ctgttgggcacacatttttatacatgtgtctgcaactttggtgttttggcttgcagaatacactatgtaggccaagtatc

SEQ ID NO: 21054 - DNA, 80 bp, synthetic construct
  misc_feature 1..80: note = Synthetic: >EF177176.1-cand-7770-7849
  source 1..80: mol_type = other DNA
tgtcagtatctgttttgcaaacatgtaacatacaattactcatttttgaaaaccgtttacggtcgtgcaaaaacaggttt

SEQ ID NO: 21055 - DNA, 80 bp, synthetic construct
  misc_feature 1..80: note = Synthetic: >EF397003.1-cand-20-99
  source 1..80: mol_type = other DNA
aatcaagaaagatggaaaaatacagagaaatacatcagagagttaaagatcatgcacccggtggagtctctgctctagag

SEQ ID NO: 21056 - DNA, 80 bp, synthetic construct
  misc_feature 1..80: note = Synthetic: >EF397003.1-cand-100-179
  source 1..80: mol_type = other DNA
tgtatagaccttcttgaccgattatatgcagtaaggcatgacttagttgaccagatgatcaagcatgactggtcagacaa

SEQ ID NO: 21057 - DNA, 80 bp, synthetic construct
  misc_feature 1..80: note = Synthetic: >EF397003.1-cand-180-259
  source 1..80: mol_type = other DNA
caaagatgttgaaaggcctataggacaggtcctattaatggctggaataccgaatgaggtgattcaaggaatggagaaga

SEQ ID NO: 21058 - DNA, 80 bp, synthetic construct
  misc_feature 1..80: note = Synthetic: >EF397003.1-cand-260-339
  source 1..80: mol_type = other DNA
aaataatccccgacagcccttcaggacagatcttaaaaagtttttttagaatgacaccagataattataagattactggg

SEQ ID NO: 21059 - DNA, 80 bp, synthetic construct
  misc_feature 1..80: note = Synthetic: >EF397003.1-cand-340-419
  source 1..80: mol_type = other DNA
aatttgattgagttcattgaggtgactgtaacagcagatgttgctagagggataagggaaaagaggctaaagtatgaggg

SEQ ID NO: 21060 - DNA, 80 bp, synthetic construct
  misc_feature 1..80: note = Synthetic: >EVA90-cand-3010-3089
  source 1..80: mol_type = other DNA
cagcccaggtctcggtacccttcatgtcacctgcagcagcatatcaatggttctatgatggataccccacatttggcaat

SEQ ID NO: 21061 - DNA, 80 bp, synthetic construct
  misc_feature 1..80: note = Synthetic: >EVA90-cand-3090-3169
  source 1..80: mol_type = other DNA
cacccaaccaatcaagatttcaggtatggaatctgtcccaataatctcatgggaactttctgcgtgcgggttctcggttc

SEQ ID NO: 21062 - DNA, 80 bp, synthetic construct
  misc_feature 1..80: note = Synthetic: >EVA90-cand-3170-3249
  source 1..80: mol_type = other DNA
agagaaacttaccgaggctctcagagtgcgcatctacatgcgcatcaagcacgtcagagcatgggtccccagaccactta

SEQ ID NO: 21063 - DNA, 80 bp, synthetic construct
  misc_feature 1..80: note = Synthetic: >EVA90-cand-3210-3289
  source 1..80: mol_type = other DNA
cgcatcaagcacgtcagagcatgggtccccagaccacttaggtcacagaaatatctcctgaagaattatccaaattttga

SEQ ID NO: 21064 - DNA, 80 bp, synthetic construct
  misc_feature 1..80: note = Synthetic: >EVA90-cand-3370-3449
  source 1..80: mol_type = other DNA
tctatgttgggaattataaaatagttaacagacacctagcaactgaggaagattggagcaatttagtctgggaaaactac

SEQ ID NO: 21065 - DNA, 80 bp, synthetic construct
  misc_feature 1..80: note = Synthetic: >EVA90-cand-3410-3489
  source 1..80: mol_type = other DNA
aactgaggaagattggagcaatttagtctgggaaaactacaacagggatctcttagtgaccagtgtgaatgcacaaggtt

SEQ ID NO: 21066 - DNA, 80 bp, synthetic construct
  misc_feature 1..80: note = Synthetic: >EVA90-cand-3490-3569
  source 1..80: mol_type = other DNA
gtgacaccatagcacgttgctcgtgtaagacaggtgtttactactgcaagtccatgaacaagcattaccccgtcagtttc

SEQ ID NO: 21067 - DNA, 80 bp, synthetic construct
  misc_feature 1..80: note = Synthetic: >EVA90-cand-3570-3649
  source 1..80: mol_type = other DNA
cagggacctggaattgttgaagtccaagccaatgaattttacccacacagataccaaacccatgttctacttgggcatgg

SEQ ID NO: 21068 - DNA, 80 bp, synthetic construct
  misc_feature 1..80: note = Synthetic: >EVA90-cand-3670-3749
  source 1..80: mol_type = other DNA
gtggtggcatccttagatgtcagcacggtgtcattggtctggtgaccatgggaggcgatggcttggttggctttgcagac

SEQ ID NO: 21069 - DNA, 80 bp, synthetic construct
  misc_feature 1..80: note = Synthetic: >EVA90-cand-3730-3809
  source 1..80: mol_type = other DNA
gcttggttggctttgcagaccttagagacctgttttggctcgacgatgaagcaatggaacaaggtgtgactgattacatc

SEQ ID NO: 21070 - DNA, 80 bp, synthetic construct
  misc_feature 1..80: note = Synthetic: >EVA90-cand-3810-3889
  source 1..80: mol_type = other DNA
aagggacttggtgacgcctttggcacaggtttcactgattccatctctagggaaatccagcaacttaaaaattacctctt

SEQ ID NO: 21071 - DNA, 80 bp, synthetic construct
  misc_feature 1..80: note = Synthetic: >EVA90-cand-3890-3969
  source 1..80: mol_type = other DNA
aggttcagaaaatgtggtagagaagatccttaaagcattaatcaaagtagtttcagcattagtgatagttgttagaagtg

SEQ ID NO: 21072 - DNA, 80 bp, synthetic construct
  misc_feature 1..80: note = Synthetic: >EVA90-cand-3970-4049
  source 1..80: mol_type = other DNA
attatgacctggtcaccctaactgcaacccttgctttaattgggtgtcacggaagtccctgggcctggctcaaatctaaa

SEQ ID NO: 21073 - DNA, 80 bp, synthetic construct
  misc_feature 1..80: note = Synthetic: >EVA90-cand-4050-4129
  source 1..80: mol_type = other DNA
gtttccaacctgctagatattcctatcgcacaaaaacaaagtgactcatggctcaagaaatttacagaaatggctaatgc

SEQ ID NO: 21074 - DNA, 80 bp, synthetic construct
  misc_feature 1..80: note = Synthetic: >EVA90-cand-4130-4209
  source 1..80: mol_type = other DNA
tgccagaggtcttgaatggattgcaaataaaattagcaagtttatagactgggtgaaagagaaaattgtcccagcagcta

SEQ ID NO: 21075 - DNA, 80 bp, synthetic construct
  misc_feature 1..80: note = Synthetic: >EVA90-cand-4210-4289
  source 1..80: mol_type = other DNA
aagaaaaagtggagttcctctccaacctcaagcaattgcctttattagaatcccagattgctaacatcgaacaatcagca

SEQ ID NO: 21076 - DNA, 80 bp, synthetic construct
  misc_feature 1..80: note = Synthetic: >EVB73-cand-2550-2629
  source 1..80: mol_type = other DNA
cacacatcacaagtcgtcccaagtgacacaatgcagacacggtgtgtacgcaacatgcacataagatctgaatccgctgt

SEQ ID NO: 21077 - DNA, 80 bp, synthetic construct
  misc_feature 1..80: note = Synthetic: >EVB73-cand-2630-2709
  source 1..80: mol_type = other DNA
tgaaaacttcctaagtagggcagcgtgtgcctacataataaagtacagcacgcaaggtgaagatcagtttaacaattggc

SEQ ID NO: 21078 - DNA, 80 bp, synthetic construct
  misc_feature 1..80: note = Synthetic: >EVB73-cand-2710-2789
  source 1..80: mol_type = other DNA
acataaacacccaccaggtcgcccagctaaggcgaaagctagagatgtttacctatgcaaggtttgacattgaaataaca

SEQ ID NO: 21079 - DNA, 80 bp, synthetic construct
  misc_feature 1..80: note = Synthetic: >EVB73-cand-2790-2869
  source 1..80: mol_type = other DNA
ttcgtaatcaccagctctcaagagaatgggacacaagtaaacacagacaatgccgttctaacacaccaaataatgtacat

SEQ ID NO: 21080 - DNA, 80 bp, synthetic construct
  misc_feature 1..80: note = Synthetic: >EVB73-cand-2880-2959
  source 1..80: mol_type = other DNA
ggtcctatacccacctcagtgaatgacttcagttggcaaacatcaaccaatcctagcgtgttctggacagaagggaatgc

SEQ ID NO: 21081 - DNA, 80 bp, synthetic construct
  misc_feature 1..80: note = Synthetic: >EVB73-cand-2960-3039
  source 1..80: mol_type = other DNA
accagcacgcatatcaataccattcatgagtgtagggaatgcctacagcatgttctatgatgggtggtcaaacttttcac

SEQ ID NO: 21082 - DNA, 80 bp, synthetic construct
  misc_feature 1..80: note = Synthetic: >EVB73-cand-3000-3079
  source 1..80: mol_type = other DNA
gcctacagcatgttctatgatgggtggtcaaacttttcacaggcaggatcatatggtttcacaacactgaacaacatggg

SEQ ID NO: 21083 - DNA, 80 bp, synthetic construct
  misc_feature 1..80: note = Synthetic: >EVB73-cand-3120-3199
  source 1..80: mol_type = other DNA
aagtacgagagcacggcgcgcatatattttaaaccaaaacatgtgcggacatgggtgccacgaccaccacgactgtgtga

SEQ ID NO: 21084 - DNA, 80 bp, synthetic construct
  misc_feature 1..80: note = Synthetic: >EVB73-cand-3200-3279
  source 1..80: mol_type = other DNA
gtaccagagtaagtcaaatgtggacttcaagaccgagcctctaacagacacaagggcaaccatcacactagctagagatg

SEQ ID NO: 21085 - DNA, 80 bp, synthetic construct
  misc_feature 1..80: note = Synthetic: >EVB73-cand-3280-3359
  source 1..80: mol_type = other DNA
aacacctaccagaaatgcacaacacaggcgcatttggccagcagtcaggagcagtgtatgtgggtaactacagggtagtc

SEQ ID NO: 21086 - DNA, 80 bp, synthetic construct
  misc_feature 1..80: note = Synthetic: >EVB73-cand-3360-3439
  source 1..80: mol_type = other DNA
aacagacacctggcaactcataatgactggcagaactgcgtgtgggaggattacaacagagatctactagtgagcaccac

SEQ ID NO: 21087 - DNA, 80 bp, synthetic construct
  misc_feature 1..80: note = Synthetic: >EVB73-cand-3440-3519
  source 1..80: mol_type = other DNA
tacagctcatgggtgtgacaccatagcaaggtgtcagtgtactaccggtgtgtatttctgtgcttcaagaaacaagcatt

SEQ ID NO: 21088 - DNA, 80 bp, synthetic construct
  misc_feature 1..80: note = Synthetic: >EVB73-cand-3540-3619
  source 1..80: mol_type = other DNA
ccagggctagtggaagtccaggaaagtgagtattaccccaagagatatcaatcacatgttctactagcggcaggcttctc

SEQ ID NO: 21089 - DNA, 80 bp, synthetic construct
  misc_feature 1..80: note = Synthetic: >EVB73-cand-3600-3679
  source 1..80: mol_type = other DNA
ctactagcggcaggcttctctgaaccaggagattgtggtggcatactaaggtgtgagcatggtgtcattggtatagttac

SEQ ID NO: 21090 - DNA, 80 bp, synthetic construct
  misc_feature 1..80: note = Synthetic: >EVB73-cand-3670-3749
  source 1..80: mol_type = other DNA
gtatagttaccatgggaggtgaaggagtggtaggatttgccgatgtccgagacctactgtggttggaggacgatgcaatg

SEQ ID NO: 21091 - DNA, 80 bp, synthetic construct
  misc_feature 1..80: note = Synthetic: >EVB73-cand-3760-3839
  source 1..80: mol_type = other DNA
tgagagactacgtggaacagcttggaaacgctttcggctcaggattcaccaaccaaatttgtgagcaagttaacctcctc

SEQ ID NO: 21092 - DNA, 80 bp, synthetic construct
  misc_feature 1..80: note = Synthetic: >EVB80-cand-2850-2929
  source 1..80: mol_type = other DNA
acatgcccgttttgactcaccaaatcatgtacgtcccacctggtggtcccgtaccacaaagcgccacaagctatgcgtgg

SEQ ID NO: 21093 - DNA, 80 bp, synthetic construct
  misc_feature 1..80: note = Synthetic: >EVB80-cand-2930-3009
  source 1..80: mol_type = other DNA
cagacatcaaccaaccctagtgtgttctggactgaaggcaatgcaccaccacgtatgtccatcccatttgtgagcatcgg

SEQ ID NO: 21094 - DNA, 80 bp, synthetic construct
  misc_feature 1..80: note = Synthetic: >EVB80-cand-3010-3089
  source 1..80: mol_type = other DNA
aaacgcctattgcaatttctacgatgggtggtcccacttcacacaggatggtgcatatggttacacagcactgaaccgca

SEQ ID NO: 21095 - DNA, 80 bp, synthetic construct
  misc_feature 1..80: note = Synthetic: >EVB80-cand-3090-3169
  source 1..80: mol_type = other DNA
tgggcaagatatacgtgaggcacgtgaacaaagagacacccacacagataattagtacggtgaggatgtacatgaagcca

SEQ ID NO: 21096 - DNA, 80 bp, synthetic construct
  misc_feature 1..80: note = Synthetic: >EVB80-cand-3170-3249
  source 1..80: mol_type = other DNA
aagcacatcagagcgtgggtgcccagaccacccagattatgcccgtatctgcgtactaacgacttgaactttgaggtcac

SEQ ID NO: 21097 - DNA, 80 bp, synthetic construct
  misc_feature 1..80: note = Synthetic: >EVB80-cand-3250-3329
  source 1..80: mol_type = other DNA
cgcagtgacggatacccgcgcagacataaacaccgtaccaacaccggaacacacaaccccgggagtgggtggtcgccgcg

SEQ ID NO: 21098 - DNA, 80 bp, synthetic construct
  misc_feature 1..80: note = Synthetic: >EVB80-cand-3330-3409
  source 1..80: mol_type = other DNA
gtgatttggttgcactgaacacccatggtgcctttggccaacagtccggagctgtgtacgtgggaaactacagggtagtg

SEQ ID NO: 21099 - DNA, 80 bp, synthetic construct
  misc_feature 1..80: note = Synthetic: >EVB80-cand-3410-3489
  source 1..80: mol_type = other DNA
aacagacatcttgctacgcacaatgactggcataactgtgtatgggaggactacaacagggacctcctggttagcacaac

SEQ ID NO: 21100 - DNA, 80 bp, synthetic construct
  misc_feature 1..80: note = Synthetic: >EVB80-cand-3450-3529
  source 1..80: mol_type = other DNA
tatgggaggactacaacagggacctcctggttagcacaacaacggcacatggttgtgacaccattgccaggtgccagtgc

SEQ ID NO: 21101 - DNA, 80 bp, synthetic construct
  misc_feature 1..80: note = Synthetic: >EVB80-cand-3570-3649
  source 1..80: mol_type = other DNA
acccagttagcttcgaagggcctggtctggtggaggttcaggagaatgaatactacccaaaaagataccagtcccacgtg

SEQ ID NO: 21102 - DNA, 80 bp, synthetic construct
  misc_feature 1..80: note = Synthetic: >EVB80-cand-3650-3729
  source 1..80: mol_type = other DNA
ctacttgctgcaggtcactccgagccaggtgattgtggcggtatcctgagatgcgagcatggagtcatcggtatcgtgac

SEQ ID NO: 21103 - DNA, 80 bp, synthetic construct
  misc_feature 1..80: note = Synthetic: >EVB80-cand-3730-3809
  source 1..80: mol_type = other DNA
catgggcggtgaaggcgtcgttggttttgctgacgtgcgcgacctcctgtggttagaagatgacgccatggagcaaggcg

SEQ ID NO: 21104 - DNA, 80 bp, synthetic construct
  misc_feature 1..80: note = Synthetic: >EVB80-cand-3810-3889
  source 1..80: mol_type = other DNA
taaaagactacgtcgaacagcttggaaacgcctttggatcaggattcaccaaccaaatttgtgagcaagttaacctcctt

SEQ ID NO: 21105 - DNA, 80 bp, synthetic construct
  misc_feature 1..80: note = Synthetic: >EVB80-cand-3890-3969
  source 1..80: mol_type = other DNA
aaagagtcgttgatcggacaagactccatcctggagaaatctctcaaagctctggtcaagatcatatcagcattggtcat

SEQ ID NO: 21106 - DNA, 80 bp, synthetic construct
  misc_feature 1..80: note = Synthetic: >EVB80-cand-3970-4049
  source 1..80: mol_type = other DNA
cgtggtgagaaaccatgatgatctgattacagtgactgccacactggctctaattggctgcacctcgtcaccctggcgtt

SEQ ID NO: 21107 - DNA, 80 bp, synthetic construct
  misc_feature 1..80: note = Synthetic: >EVB80-cand-4050-4129
  source 1..80: mol_type = other DNA
ggctcaagcagaaagtatcccagtattatggaattcccatggcagagagacaaaacaatggttggctaaaaaagttcaca

SEQ ID NO: 21108 - DNA, 80 bp, synthetic construct
  misc_feature 1..80: note = Synthetic: >EVB85-cand-3130-3209
  source 1..80: mol_type = other DNA
accaataactagtactgtgcgggtgtatttcaaacccaaacacgtacgtgcttgggtgcctcggccaccacgcttgtgtg

SEQ ID NO: 21109 - DNA, 80 bp, synthetic construct
  misc_feature 1..80: note = Synthetic: >EVB85-cand-3210-3289
  source 1..80: mol_type = other DNA
aatacaaaaaaccattcagtgttgatttcacgccagagccagtcaccgaaaagcgtgccaccattaacacagtcacgacc

SEQ ID NO: 21110 - DNA, 80 bp, synthetic construct
  misc_feature 1..80: note = Synthetic: >EVB85-cand-3250-3329
  source 1..80: mol_type = other DNA
agtcaccgaaaagcgtgccaccattaacacagtcacgaccattcaatcaagactgacaaatacaggtgcttttgggcaac

SEQ ID NO: 21111 - DNA, 80 bp, synthetic construct
  misc_feature 1..80: note = Synthetic: >EVB85-cand-3370-3449
  source 1..80: mol_type = other DNA
caggcatctagcgacccatacggattggcagagttgcgtctgggaggactacaacagggacctgttggtgagtactacta

SEQ ID NO: 21112 - DNA, 80 bp, synthetic construct
  misc_feature 1..80: note = Synthetic: >EVB85-cand-3450-3529
  source 1..80: mol_type = other DNA
cggcccacggatgcgacaccatagccagatgccgatgcactacaggtgtgtactactgtgcttccaaaaacaagcattac

SEQ ID NO: 21113 - DNA, 80 bp, synthetic construct
  misc_feature 1..80: note = Synthetic: >EVB85-cand-3530-3609
  source 1..80: mol_type = other DNA
ccagtgtctttcgaaggacctggattggtagaagtgcaggaaagtgaatactatcccaagagataccagtcccacgtgct

SEQ ID NO: 21114 - DNA, 80 bp, synthetic construct
  misc_feature 1..80: note = Synthetic: >EVB85-cand-3610-3689
  source 1..80: mol_type = other DNA
ccttgcagccggattttccgagccaggcgactgcggtggtatcctgaggtgtgaacatggtgtgattggtattgtcacca

SEQ ID NO: 21115 - DNA, 80 bp, synthetic construct
  misc_feature 1..80: note = Synthetic: >EVB85-cand-3690-3769
  source 1..80: mol_type = other DNA
tgggaggtgaaggcgttgttggcttcgccgatgtgcgagaccttttgtggctggaagacgacgctatggagcagggagtg

SEQ ID NO: 21116 - DNA, 80 bp, synthetic construct
  misc_feature 1..80: note = Synthetic: >EVB85-cand-3770-3849
  source 1..80: mol_type = other DNA
agagactacgttgaacaactcgggaacgcttttggctcagggttcactaaccagatctgcgagcaagtcaaccttctgaa

SEQ ID NO: 21117 - DNA, 80 bp, synthetic construct
  misc_feature 1..80: note = Synthetic: >EVB85-cand-3850-3929
  source 1..80: mol_type = other DNA
agagtcattggtgggtcaagactctatcctagaaaagtccctcaaagctctagtcaaaatcatatcagcactagtcattg

SEQ ID NO: 21118 - DNA, 80 bp, synthetic construct
  misc_feature 1..80: note = Synthetic: >EVB85-cand-3930-4009
  source 1..80: mol_type = other DNA
tcgtgaggaatcacgatgacctcatcacagtcacagccactctcgcgctcatcggttgcacttcctcaccgtggtggtgg

SEQ ID NO: 21119 - DNA, 80 bp, synthetic construct
  misc_feature 1..80: note = Synthetic: >EVB85-cand-4010-4089
  source 1..80: mol_type = other DNA
cttaaacagaaagtgtcccagtactatggaatccccatggctgagaggcaaagcaacggctggctcaagaagttcactga

SEQ ID NO: 21120 - DNA, 80 bp, synthetic construct
  misc_feature 1..80: note = Synthetic: >EVB85-cand-4090-4169
  source 1..80: mol_type = other DNA
aatgacaaacgcgtgtaagggtatggagtggatagccattaagatccagaaatttatagaatggctgaaggtgaagattc

SEQ ID NO: 21121 - DNA, 80 bp, synthetic construct
  misc_feature 1..80: note = Synthetic: >EVB85-cand-4170-4249
  source 1..80: mol_type = other DNA
taccagaagtaaaggaaaaacacgagttcctaaacaggctgaaacagttgcccctgttagagagtcagattgccaccatt

SEQ ID NO: 21122 - DNA, 80 bp, synthetic construct
  misc_feature 1..80: note = Synthetic: >EVB85-cand-4250-4329
  source 1..80: mol_type = other DNA
gaacaaagtgcaccctcccagagtgaccaggaacaactattctccaacgtccagtactttgcacactattgcaggaaata

SEQ ID NO: 21123 - DNA, 80 bp, synthetic construct
  misc_feature 1..80: note = Synthetic: >EVB85-cand-4410-4489
  source 1..80: mol_type = other DNA
aatgccgtattgaaccagtctgtttactgctccatggaagccccggagccgggaaatccgtggcaaccaacctaatcggg

SEQ ID NO: 21124 - DNA, 80 bp, synthetic construct
  misc_feature 1..80: note = Synthetic: >EVB88-cand-880-959
  source 1..80: mol_type = other DNA
gcaggagtttgatcaagaccccagcaaattcactgaaccggttaaagatgtcatgataaaatccctcccagctttgaact

SEQ ID NO: 21125 - DNA, 80 bp, synthetic construct
  misc_feature 1..80: note = Synthetic: >EVB88-cand-930-1009
  source 1..80: mol_type = other DNA
tcatgataaaatccctcccagctttgaactcaccatctgctgaggaatgtgggtacagcgatagggtacgcaccatcaca

SEQ ID NO: 21126 - DNA, 80 bp, synthetic construct
  misc_feature 1..80: note = Synthetic: >EVB88-cand-1040-1119
  source 1..80: mol_type = other DNA
tgtgctaatgtggtcgtggcctacggagaatggccaagctatcttaaagatactgaagccactgcagaggaccaaccaac

SEQ ID NO: 21127 - DNA, 80 bp, synthetic construct
  misc_feature 1..80: note = Synthetic: >EVB88-cand-1120-1199
  source 1..80: mol_type = other DNA
tcaacctgatgttgccacatgtagattttacactctcgactctgtggactggcaaaataactcagcgggatggtggtgga

SEQ ID NO: 21128 - DNA, 80 bp, synthetic construct
  misc_feature 1..80: note = Synthetic: >EVB88-cand-1200-1279
  source 1..80: mol_type = other DNA
aattcccaaatgcactaaaggacatgggattattcggacaaaacatgcattaccactatctaggaaggacagggtacaca

SEQ ID NO: 21129 - DNA, 80 bp, synthetic construct
  misc_feature 1..80: note = Synthetic: >EVB88-cand-1270-1349
  source 1..80: mol_type = other DNA
agggtacacagtacacgtgcagtgcaacgcatccaagttccatcaaggttgtctgttggtggtgtgtgtaccagaagcag

SEQ ID NO: 21130 - DNA, 80 bp, synthetic construct
  misc_feature 1..80: note = Synthetic: >EVB88-cand-1360-1439
  source 1..80: mol_type = other DNA
tgcagatgtagaacgcacagtagtggaagaatctctttcaaaaggtgagagcccttgtgagttcactgccagcagtgtca

SEQ ID NO: 21131 - DNA, 80 bp, synthetic construct
  misc_feature 1..80: note = Synthetic: >EVB88-cand-1440-1519
  source 1..80: mol_type = other DNA
caggtgaaaacgcagtacaaacagctgtgtgtaatgctgccatgggagtggccgttgggaacttgacaatattcccacac

SEQ ID NO: 21132 - DNA, 80 bp, synthetic construct
  misc_feature 1..80: note = Synthetic: >EVB88-cand-1520-1599
  source 1..80: mol_type = other DNA
cagtggatcaatctgcgcaccaacaatagtgcgactatagtgataccatacatcaacagtgtccccatggacaatatgtt

SEQ ID NO: 21133 - DNA, 80 bp, synthetic construct
  misc_feature 1..80: note = Synthetic: >EVB88-cand-1600-1679
  source 1..80: mol_type = other DNA
tagacaccaaaatttcacgctaatgatcataccatttgcccccctagaggtctcaggcggtatcactcctagtgtgccca

SEQ ID NO: 21134 - DNA, 80 bp, synthetic construct
  misc_feature 1..80: note = Synthetic: >EVB88-cand-1680-1759
  source 1..80: mol_type = other DNA
taacagtgactatagccccaatggacgcagaatacaacgggttgcgcctagcatcacaccaaggtctaccagtcctcaat

SEQ ID NO: 21135 - DNA, 80 bp, synthetic construct
  misc_feature 1..80: note = Synthetic: >EVB88-cand-1760-1839
  source 1..80: mol_type = other DNA
acacccggtagcaaccagtttttgacatcagatgattaccagtccccatctgcaatgccacagtttgatgtaaccccact

SEQ ID NO: 21136 - DNA, 80 bp, synthetic construct
  misc_feature 1..80: note = Synthetic: >EVB88-cand-1840-1919
  source 1..80: mol_type = other DNA
gatgcacataccaggtgaggtgcgcaacctgatggagatagcagaggttgactcagtggtaccagtgaacaacctatcaa

SEQ ID NO: 21137 - DNA, 80 bp, synthetic construct
  misc_feature 1..80: note = Synthetic: >EVB88-cand-1920-1999
  source 1..80: mol_type = other DNA
agaatgtgaacaccatggaagcatatcaaatcccagtcaacactggaaaccaccccaagaacaaggctatattcagtttc

SEQ ID NO: 21138 - DNA, 80 bp, synthetic construct
  misc_feature 1..80: note = Synthetic: >EVB88-cand-2000-2079
  source 1..80: mol_type = other DNA
cccttggatccaggaaatagctcagtaatgaacagaacattgttaggcgagatcttgaattattatgcacactggtctgg

SEQ ID NO: 21139 - DNA, 80 bp, synthetic construct
  misc_feature 1..80: note = Synthetic: >EVB88-cand-2080-2159
  source 1..80: mol_type = other DNA
tagcataaagctaacatttatgttctgcgggaccgcaatggccaccggcaagatcctattgtcatactcaccaccaggag

SEQ ID NO: 21140 - DNA, 80 bp, synthetic construct
  misc_feature 1..80: note = Synthetic: >HCV.A16-cand-4670-4749
  source 1..80: mol_type = other DNA
ctttataccacccatggcatcattggaagagaaaggagtgtctttcacctctaagtttgtcatcgcatcaaccaatgcta

SEQ ID NO: 21141 - DNA, 80 bp, synthetic construct
  misc_feature 1..80: note = Synthetic: >HCV.A16-cand-4750-4829
  source 1..80: mol_type = other DNA
gcaatattgtagttcccacagtttcagattctgatgcgattcgcaggcggttttatatggactgcgatatagaggtgaca

SEQ ID NO: 21142 - DNA, 80 bp, synthetic construct
  misc_feature 1..80: note = Synthetic: >HCV.A16-cand-4830-4909
  source 1..80: mol_type = other DNA
gactcctacaagacggaccttggccgactcgacgcaggcagggccgctaagctttgcacagaaaacaacactgctaactt

SEQ ID NO: 21143 - DNA, 80 bp, synthetic construct
  misc_feature 1..80: note = Synthetic: >HCV.A16-cand-4910-4989
  source 1..80: mol_type = other DNA
taagagatgcagcccactagtgtgtggcaaggccattcaattaagagacaggaagtctaaagtgagatatagtattgaca

SEQ ID NO: 21144 - DNA, 80 bp, synthetic construct
  misc_feature 1..80: note = Synthetic: >HCV.A16-cand-5000-5079
  source 1..80: mol_type = other DNA
agagctaatcagagagtataataataggtctgccattgggaacaccatagaagccctcttccaaggaccccctaagttca

SEQ ID NO: 21145 - DNA, 80 bp, synthetic construct
  misc_feature 1..80: note = Synthetic: >HCV.A16-cand-5080-5159
  source 1..80: mol_type = other DNA
ggcctataagaattagccttgaagaaaagccagccccagatgccatcagtgacctacttgctagtgtggatagcgaggag

SEQ ID NO: 21146 - DNA, 80 bp, synthetic construct
  misc_feature 1..80: note = Synthetic: >HCV.A16-cand-5160-5239
  source 1..80: mol_type = other DNA
gttcgacaatactgcagggaacaagggtggataattccagaaacatcgaccaatgtggaacgtcacctcaacagagcagt

SEQ ID NO: 21147 - DNA, 80 bp, synthetic construct
  misc_feature 1..80: note = Synthetic: >HCV.A16-cand-5240-5319
  source 1..80: mol_type = other DNA
gttggtgatgcagtccattgccaccgtggttgcggttgtgtctctcgtctatgtcatttataaattgtttgctggatttc

SEQ ID NO: 21148 - DNA, 80 bp, synthetic construct
  misc_feature 1..80: note = Synthetic: >HCV.A16-cand-5320-5399
  source 1..80: mol_type = other DNA
aaggtgcctattctggtgcacctaagcaagctctcaaaaagcctgtgctaagaacagccacagtccaaggaccgagctta

SEQ ID NO: 21149 - DNA, 80 bp, synthetic construct
  misc_feature 1..80: note = Synthetic: >HCV.A16-cand-5400-5479
  source 1..80: mol_type = other DNA
gactttgccttatcccttctaaggcgcaacatcagacaggtgcaaactgaccaaggacatttcactatgttaggagtgcg

SEQ ID NO: 21150 - DNA, 80 bp, synthetic construct
  misc_feature 1..80: note = Synthetic: >HCV.A16-cand-5480-5559
  source 1..80: mol_type = other DNA
agatcgcctagccattttgccgcgccactcgcaaccaggaaaaactatttgggtggagcacaaattaatcaatgtgttag

SEQ ID NO: 21151 - DNA, 80 bp, synthetic construct
  misc_feature 1..80: note = Synthetic: >HCV.A16-cand-5560-5639
  source 1..80: mol_type = other DNA
atgctgttgaattggtggatgagcaaggtgtaaacttggaactcacactagtaaccttggacaccaacgaaaaatttagg

SEQ ID NO: 21152 - DNA, 80 bp, synthetic construct
  misc_feature 1..80: note = Synthetic: >HCV.A16-cand-5680-5759
  source 1..80: mol_type = other DNA
gcgacgcaaccttggtcatcaacactgagcacatgccctcaatgttcgttccagtgggtgatgttgtacagtatgggttt

SEQ ID NO: 21153 - DNA, 80 bp, synthetic construct
  misc_feature 1..80: note = Synthetic: >HCV.A16-cand-5720-5799
  source 1..80: mol_type = other DNA
aatgttcgttccagtgggtgatgttgtacagtatgggtttctaaatctcagcggtaagcccacacaccgaaccatgatgt

SEQ ID NO: 21154 - DNA, 80 bp, synthetic construct
  misc_feature 1..80: note = Synthetic: >HCV.A16-cand-5800-5879
  source 1..80: mol_type = other DNA
acaatttccccacaaaggcaggacagtgtggaggtgtggtcacctcagtcggtaagattattggaattcatatcggtggg

SEQ ID NO: 21155 - DNA, 80 bp, synthetic construct
  misc_feature 1..80: note = Synthetic: >HCV.A16-cand-5890-5969
  source 1..80: mol_type = other DNA
aaggcttctgtgctggactgaagagaggttactttgccagtgaacaaggagagatccaatggatgaagtccaataaagaa

SEQ ID NO: 21156 - DNA, 80 bp, synthetic construct
  misc_feature 1..80: note = Synthetic: >HCV.A17-cand-6870-6949
  source 1..80: mol_type = other DNA
tcaggcacttcaatttttaattcaatgatcaacaatttaatcatcaggacacttttactgaaaacctacaagggcataga

SEQ ID NO: 21157 - DNA, 80 bp, synthetic construct
  misc_feature 1..80: note = Synthetic: >HCV.A17-cand-7270-7349
  source 1..80: mol_type = other DNA
atggcgaagaagaatataacaaatttctagctaaaatcagaagcgtgccaatcggaagagcattactgctccctgagtac

SEQ ID NO: 21158 - DNA, 80 bp, synthetic construct
  misc_feature 1..80: note = Synthetic: >HCV.A18-cand-10-89
  source 1..80: mol_type = other DNA
gggttgttcccaccccagaggcccacgtggcggccagtactccggtattgcggtacccttgtacgcctgttttacactcc

SEQ ID NO: 21159 - DNA, 80 bp, synthetic construct
  misc_feature 1..80: note = Synthetic: >HCV.A18-cand-50-129
  source 1..80: mol_type = other DNA
tccggtattgcggtacccttgtacgcctgttttacactcccttcccctgtaacttagacgacaataaaccaagttcacta

SEQ ID NO: 21160 - DNA, 80 bp, synthetic construct
  misc_feature 1..80: note = Synthetic: >HCV.A18-cand-160-239
  source 1..80: mol_type = other DNA
caagcacttctgtttccccggtgacattgtatagactgtatccacggttgaaaacgattgatccgttatccgctcttgta

SEQ ID NO: 21161 - DNA, 80 bp, synthetic construct
  misc_feature 1..80: note = Synthetic: >HCV.A18-cand-240-319
  source 1..80: mol_type = other DNA
cttcgagaagcctagtatcatcttggaatcttcgacgcgttgcgctcagcattcaaccccagaatgtagcttaggtcgat

SEQ ID NO: 21162 - DNA, 80 bp, synthetic construct
  misc_feature 1..80: note = Synthetic: >HCV.A18-cand-310-389
  source 1..80: mol_type = other DNA
ttaggtcgatgagtctggacattcctcaccggtgacggtggtccaggctgcgttggcggcctacctgtgacccaaagtca

SEQ ID NO: 21163 - DNA, 80 bp, synthetic construct
  misc_feature 1..80: note = Synthetic: >HCV.A18-cand-470-549
  source 1..80: mol_type = other DNA
taaccacggagcaagtgctcacgaaccagtgagtggcttgtcgtaacgagcaattctgtggcggaaccgactactttggg

SEQ ID NO: 21164 - DNA, 80 bp, synthetic construct
  misc_feature 1..80: note = Synthetic: >HCV.A18-cand-550-629
  source 1..80: mol_type = other DNA
tgtccgtgtttcctttttaactttaaatggctgcttatggtgacaatcattgattgttatcataaagcgaattggattgg

SEQ ID NO: 21165 - DNA, 80 bp, synthetic construct
  misc_feature 1..80: note = Synthetic: >HCV.A18-cand-630-709
  source 1..80: mol_type = other DNA
ccatccggtgaaaatcaagttgatcatttatttgtttgttggattcactccattaactcatttttcaattgacctaatac

SEQ ID NO: 21166 - DNA, 80 bp, synthetic construct
  misc_feature 1..80: note = Synthetic: >HCV.A18-cand-710-789
  source 1..80: mol_type = other DNA
gtattgtattattagttagaaacatacatcacaatgggtgcacaagtttcttctcagaaggttggagcgcacgaaaacac

SEQ ID NO: 21167 - DNA, 80 bp, synthetic construct
  misc_feature 1..80: note = Synthetic: >HCV.A18-cand-790-869
  source 1..80: mol_type = other DNA
caatgtggcaactggcggttccacagttaattataccaccatcaactattataaagattctgccagcaatgctgcctcca

SEQ ID NO: 21168 - DNA, 80 bp, synthetic construct
  misc_feature 1..80: note = Synthetic: >HCV.A18-cand-870-949
  source 1..80: mol_type = other DNA
aacaggacttttcgcaagatccttcaaaattcactgaaccagtaaaggacgtgttgataaaatcagcaccagcattgaac

SEQ ID NO: 21169 - DNA, 80 bp, synthetic construct
  misc_feature 1..80: note = Synthetic: >HCV.A18-cand-950-1029
  source 1..80: mol_type = other DNA
tcaccaaacatagaagcatgtggttacagtgacagagtgatgcaactgacattgggaaattccacaatcaccacacaaga

SEQ ID NO: 21170 - DNA, 80 bp, synthetic construct
  misc_feature 1..80: note = Synthetic: >HCV.A18-cand-1060-1139
  source 1..80: mol_type = other DNA
ctggcccagctacctgagtgacaaggatgccaatccggtagatcaacccaccgaaccagatgtttcagcatgcagatttt

SEQ ID NO: 21171 - DNA, 80 bp, synthetic construct
  misc_feature 1..80: note = Synthetic: >HCV.A18-cand-1110-1189
  source 1..80: mol_type = other DNA
ccgaaccagatgtttcagcatgcagattttacacattagaaacggtggaatgggacagagaatccaagggatggtggtgg

SEQ ID NO: 21172 - DNA, 80 bp, synthetic construct
  misc_feature 1..80: note = Synthetic: >HCV.B3-cand-1670-1749
  source 1..80: mol_type = other DNA
cccaatcactgtcacaatagcacccatgtgtgccgagtacaatgggctacgtttggcaggccaccaaggcctaccaacaa

SEQ ID NO: 21173 - DNA, 80 bp, synthetic construct
  misc_feature 1..80: note = Synthetic: >HCV.B3-cand-1750-1829
  source 1..80: mol_type = other DNA
tgaacaccccagggagctgccaatttctgacatcagacgacttccaatccccatccgccatgccacaatatgacgtcact

SEQ ID NO: 21174 - DNA, 80 bp, synthetic construct
  misc_feature 1..80: note = Synthetic: >HCV.B3-cand-1830-1909
  source 1..80: mol_type = other DNA
ccagagatgaggatacctggtgaggtgaaaaacttgatggagatagcagaggttgactcagtggtgccggtgcaaaatat

SEQ ID NO: 21175 - DNA, 80 bp, synthetic construct
  misc_feature 1..80: note = Synthetic: >HCV.B3-cand-1910-1989
  source 1..80: mol_type = other DNA
tggagagaaggtcaactctatggaggcataccagatacctgtgagatccaacgaaggatctggcactcaagtattcggct

SEQ ID NO: 21176 - DNA, 80 bp, synthetic construct
  misc_feature 1..80: note = Synthetic: >HCV.B3-cand-1990-2069
  source 1..80: mol_type = other DNA
tcccactgcaaccagggtactcgagtgttttcagtcgcacgctcctaggtgagatccttaactactacacacactggtca

SEQ ID NO: 21177 - DNA, 80 bp, synthetic construct
  misc_feature 1..80: note = Synthetic: >HCV.B3-cand-2070-2149
  source 1..80: mol_type = other DNA
ggcagcataaagcttacttttatgttctgtggttcggccatggccactggaaaatttctgttggcatactcaccaccagg

SEQ ID NO: 21178 - DNA, 80 bp, synthetic construct
  misc_feature 1..80: note = Synthetic: >HCV.B3-cand-2150-2229
  source 1..80: mol_type = other DNA
tgctggtgctccaacaaagagggtggatgcaatgcttggtacgcatgttgtttgggacgtgggcctgcaatctagttgtg

SEQ ID NO: 21179 - DNA, 80 bp, synthetic construct
  misc_feature 1..80: note = Synthetic: >HCV.B3-cand-2210-2289
  source 1..80: mol_type = other DNA
gggcctgcaatctagttgtgtcctgtgtataccctggataagccaaacacactaccggtacgtggcttctgatgagtata

SEQ ID NO: 21180 - DNA, 80 bp, synthetic construct
  misc_feature 1..80: note = Synthetic: >HCV.B3-cand-2310-2389
  source 1..80: mol_type = other DNA
tgctggtatcaaaccaacattgtggtcccagcggatgcacaaagctcatgttacatcatgtgttttgtgtcagcatgcaa

SEQ ID NO: 21181 - DNA, 80 bp, synthetic construct
  misc_feature 1..80: note = Synthetic: >HCV.B3-cand-2390-2469
  source 1..80: mol_type = other DNA
tgatttctccgtgaggttattgaaagacacacccttcatatcgcagcaaaactttttccaaggcccagttgaggatgcga

SEQ ID NO: 21182 - DNA, 80 bp, synthetic construct
  misc_feature 1..80: note = Synthetic: >HCV.B3-cand-2510-2589
  source 1..80: mol_type = other DNA
tgggccaaccaactctgaagctataccagcactcactgcagctgagacgggtcacacatcccaagtggtgccaggtgaca

SEQ ID NO: 21183 - DNA, 80 bp, synthetic construct
  misc_feature 1..80: note = Synthetic: >HCV.B3-cand-2550-2629
  source 1..80: mol_type = other DNA
gctgagacgggtcacacatcccaagtggtgccaggtgacaccatgcaaacacgccatgtgaaaaactaccattcaaggtc

SEQ ID NO: 21184 - DNA, 80 bp, synthetic construct
  misc_feature 1..80: note = Synthetic: >HCV.B3-cand-2630-2709
  source 1..80: mol_type = other DNA
tgagtcaacaattgagaacttcctgtgtaggtctgcatgtgtttacttcactgagtatgagaactcaggatccaaacggt

SEQ ID NO: 21185 - DNA, 80 bp, synthetic construct
  misc_feature 1..80: note = Synthetic: >HCV.B3-cand-2710-2789
  source 1..80: mol_type = other DNA
atgctgaatgggtgataacaacacgacaagcagcacaactgaggagaaagctggaattcttcacctacataaggttcgac

SEQ ID NO: 21186 - DNA, 80 bp, synthetic construct
  misc_feature 1..80: note = Synthetic: >HCV.B3-cand-2790-2869
  source 1..80: mol_type = other DNA
ttggagctcacgtttgtcattacgagtacacagcaaccctccacaacccaaaaccaagacgcccagatcctcacccacca

SEQ ID NO: 21187 - DNA, 80 bp, synthetic construct
  misc_feature 1..80: note = Synthetic: >HCV.B3-cand-2870-2949
  source 1..80: mol_type = other DNA
gatcatgtatgtaccaccaggtggtccagtaccagataaagttgattcatatgtgtggcaaacatccacgaaccccagtg

SEQ ID NO: 21188 - DNA, 80 bp, synthetic construct
  misc_feature 1..80: note = Synthetic: >HCV.B3-cand-6050-6129
  source 1..80: mol_type = other DNA
tccacggctcaaggccaattttgaagaggccatcttctccaagtatattggcaatgtcaacacacatgtggatgagtaca

SEQ ID NO: 21189 - DNA, 80 bp, synthetic construct
  misc_feature 1..80: note = Synthetic: >HCV.B3-cand-6110-6189
  source 1..80: mol_type = other DNA
cacacatgtggatgagtacatgctggaagcagtggaccactacgcaggacaactagccaccctagacatcagcactgaac

SEQ ID NO: 21190 - DNA, 80 bp, synthetic construct
  misc_feature 1..80: note = Synthetic: >HCV.B3-cand-6190-6269
  source 1..80: mol_type = other DNA
ccatgaaactggaggatgcagtgtacggtaccgagggcctggaggcgctagatctgaccacaagtgcagggtacccatat

SEQ ID NO: 21191 - DNA, 80 bp, synthetic construct
  misc_feature 1..80: note = Synthetic: >HCV.B3-cand-6270-6349
  source 1..80: mol_type = other DNA
gttgcactgggtatcaagaagagagacatcctatctaagaagaccaaggacctaacaaagctgaaggagtgcatggacaa

SEQ ID NO: 21192 - DNA, 80 bp, synthetic construct
  misc_feature 1..80: note = Synthetic: >HCV.B3-cand-6350-6429
  source 1..80: mol_type = other DNA
gtatggtctgaatctaccaatggtgacttatgtgaaagatgagctcagatcagcagagaaggtggcgaaaggaaaatcca

SEQ ID NO: 21193 - DNA, 80 bp, synthetic construct
  misc_feature 1..80: note = Synthetic: >HCV.B3-cand-6510-6589
  source 1..80: mol_type = other DNA
aacccagggattgtgacaggcagtgctgttgggtgtgaccccgacctcttttggagcaaaataccagtgatgctagatgg

SEQ ID NO: 21194 - DNA, 80 bp, synthetic construct
  misc_feature 1..80: note = Synthetic: >HCV.B3-cand-6590-6669
  source 1..80: mol_type = other DNA
acatctcatagcctttgattactctgggtatgatgctagcttaagccctgtgtggtttgcttgcctaaaactgttacttg

SEQ ID NO: 21195 - DNA, 80 bp, synthetic construct
  misc_feature 1..80: note = Synthetic: >HCV.B3-cand-6670-6749
  source 1..80: mol_type = other DNA
agaagcttggatacacacacaaagagacaaactacattgattacttgtgcaactcccaccacctgtacagagataaacac

SEQ ID NO: 21196 - DNA, 80 bp, synthetic construct
  misc_feature 1..80: note = Synthetic: >HCV.B3-cand-6750-6829
  source 1..80: mol_type = other DNA
tactttgtgagaggtggaatgccctctggatgttctggtaccagcattttcaactcaatgattaacaacatcataattag

SEQ ID NO: 21197 - DNA, 80 bp, synthetic construct
  misc_feature 1..80: note = Synthetic: >HCV.B3-cand-6870-6949
  source 1..80: mol_type = other DNA
caattcaggatgattgcatatggtgatgatgtgattgcatcgtacccatggcctatcgatgcctctttactcgctgaagc

SEQ ID NO: 21198 - DNA, 80 bp, synthetic construct
  misc_feature 1..80: note = Synthetic: >HCV.B3-cand-6990-7069
  source 1..80: mol_type = other DNA
ggagagtgcttcaatgaagtgacctggaccaacgtcaccttcctgaagaggtatttcagagcagatgaacagtacccttt

SEQ ID NO: 21199 - DNA, 80 bp, synthetic construct
  misc_feature 1..80: note = Synthetic: >HCV.B3-cand-7070-7149
  source 1..80: mol_type = other DNA
cctggtccatcctgttatgcccatgaaggacatccatgaatcaatcaggtggaccaaagatccaaagaacacccaagatc

SEQ ID NO: 21200 - DNA, 80 bp, synthetic construct
  misc_feature 1..80: note = Synthetic: >HCV.B3-cand-7290-7369
  source 1..80: mol_type = other DNA
tccttttaaattagagtacaatttgaaataatttaaattggcttaaccctaccgcactcaccgaactagataacggtgcg

SEQ ID NO: 21201 - DNA, 80 bp, synthetic construct
  misc_feature 1..80: note = Synthetic: >HCV.B4-cand-80-159
  source 1..80: mol_type = other DNA
ttatttccccttccccccaaatgtaacttagaagcaacactacaacggtcaatagcagacgcagcacaccagctgtgtct

SEQ ID NO: 21202 - DNA, 80 bp, synthetic construct
  misc_feature 1..80: note = Synthetic: >HCV.B4-cand-300-379
  source 1..80: mol_type = other DNA
tccccagtgtagatcaggtcgatgagtcaccgcgttccccacgggtgaccgtggcggtggctgcgttggcggcctgccca

SEQ ID NO: 21203 - DNA, 80 bp, synthetic construct
  misc_feature 1..80: note = Synthetic: >HCV.B4-cand-630-709
  source 1..80: mol_type = other DNA
tggccatccggtgtctaacagagcaataatttatctgtttgttggatttgtacctttaaattttaaagtcttcaagaccc

SEQ ID NO: 21204 - DNA, 80 bp, synthetic construct
  misc_feature 1..80: note = Synthetic: >LR862007.1-cand-4520-4599
  source 1..80: mol_type = other DNA
tgaacctgttggacctacagatccatctatagttacattagttgaggattctagtgttataacatctggagcccctgccc

SEQ ID NO: 21205 - DNA, 80 bp, synthetic construct
  misc_feature 1..80: note = Synthetic: >LR862007.1-cand-4600-4679
  source 1..80: mol_type = other DNA
caacatttacaggtacttcaggatttgaaatatctacctctagtacaacaacaccagctgttttggatataaccccaacc

SEQ ID NO: 21206 - DNA, 80 bp, synthetic construct
  misc_feature 1..80: note = Synthetic: >LR862007.1-cand-4680-4759
  source 1..80: mol_type = other DNA
tcttctgttcaaattagtagctctagttttataaatcctgcatttacagacccttctgtcattgaggttccccaaacagg

SEQ ID NO: 21207 - DNA, 80 bp, synthetic construct
  misc_feature 1..80: note = Synthetic: >LR862007.1-cand-4760-4839
  source 1..80: mol_type = other DNA
tgaaatttctggtaatatattaattagtacccctacctctggtgcacatggctatgaagaaattccaatgcaaacgtttg

SEQ ID NO: 21208 - DNA, 80 bp, synthetic construct
  misc_feature 1..80: note = Synthetic: >LR862007.1-cand-4840-4919
  source 1..80: mol_type = other DNA
ctacggaaggtactggtttggaacccattagcagtacccccaatccaacagtacgtcgtgtggctggacctagattgtac

SEQ ID NO: 21209 - DNA, 80 bp, synthetic construct
  misc_feature 1..80: note = Synthetic: >LR862007.1-cand-4920-4999
  source 1..80: mol_type = other DNA
agtagggctaatcaacaagttcgggtgtctaacgctgactttttaacacgtccatccacatttgttacatatgataaccc

SEQ ID NO: 21210 - DNA, 80 bp, synthetic construct
  misc_feature 1..80: note = Synthetic: >LR862007.1-cand-5000-5079
  source 1..80: mol_type = other DNA
tgcttatgatccaattgatactacattaacttttgacccctcatcagaggttccagacccggactttatggatatagttc

SEQ ID NO: 21211 - DNA, 80 bp, synthetic construct
  misc_feature 1..80: note = Synthetic: >LR862007.1-cand-5080-5159
  source 1..80: mol_type = other DNA
gtttgcataggcctgcattaacatccagacgcagcactgtaaggtttagtaggctaggacaacgggcaaccatgtttacc

SEQ ID NO: 21212 - DNA, 80 bp, synthetic construct
  misc_feature 1..80: note = Synthetic: >LR862007.1-cand-5180-5259
  source 1..80: mol_type = other DNA
ggcccgtgtacatttttatcatgatataagccctataccacatgctgaagatattgaattgcaacctcttgtttcttccc

SEQ ID NO: 21213 - DNA, 80 bp, synthetic construct
  misc_feature 1..80: note = Synthetic: >LR862007.1-cand-5240-5319
  source 1..80: mol_type = other DNA
gcaacctcttgtttcttcccaggctgctactgatgatatatatgatatatatgcagatattacagatgaagcacctacta

SEQ ID NO: 21214 - DNA, 80 bp, synthetic construct
  misc_feature 1..80: note = Synthetic: >LR862007.1-cand-5320-5399
  source 1..80: mol_type = other DNA
gtactgccaacactgcatttacaattcctaaatcttcttttcaaagtttgtcattaacacggtcggcatctagcaccttt

SEQ ID NO: 21215 - DNA, 80 bp, synthetic construct
  misc_feature 1..80: note = Synthetic: >LR862007.1-cand-5400-5479
  source 1..80: mol_type = other DNA
tcaaatgtaactgttcctttggctactgcctgggatgttcctgtaaatacaggacccgatatagttttacctaatactaa

SEQ ID NO: 21216 - DNA, 80 bp, synthetic construct
  misc_feature 1..80: note = Synthetic: >LR862007.1-cand-5480-5559
  source 1..80: mol_type = other DNA
tattgttgaacccacttattctactacaccctttaccaccatacagtctattaatatagaaggcacaaattattttttat

SEQ ID NO: 21217 - DNA, 80 bp, synthetic construct
  misc_feature 1..80: note = Synthetic: >LR862007.1-cand-5560-5639
  source 1..80: mol_type = other DNA
ggcctatatattattttttacctcgtaaacgtaaacgtgttccctatttttttacagatggctctatggcgttctagtga

SEQ ID NO: 21218 - DNA, 80 bp, synthetic construct
  misc_feature 1..80: note = Synthetic: >LR862007.1-cand-5640-5719
  source 1..80: mol_type = other DNA
caacaaggtgtatctacctccaccttcggtagctaaggttgtcagcactgatgagtatgtcacccgtaccagtattttct

SEQ ID NO: 21219 - DNA, 80 bp, synthetic construct
  misc_feature 1..80: note = Synthetic: >LR862007.1-cand-5710-5789
  source 1..80: mol_type = other DNA
agtattttctaccacgcaggcagttccagacttcttacagttggacatccatattttaaagtacctaaaggtggtaatgg

SEQ ID NO: 21220 - DNA, 80 bp, synthetic construct
  misc_feature 1..80: note = Synthetic: >NC_001611.1-cand-25280-25359
  source 1..80: mol_type = other DNA
cctaatatcatatgtagtggtgtaatagaaccattaagcgcgaaagattttatttcacatcgtattttaacttcgcaata

SEQ ID NO: 21221 - DNA, 80 bp, synthetic construct
  misc_feature 1..80: note = Synthetic: >NC_001611.1-cand-25360-25439
  source 1..80: mol_type = other DNA
atttctggttagataacacactctaccagttaagtcaataatattagcctttacagatatattcatagtagttgtgacaa

SEQ ID NO: 21222 - DNA, 80 bp, synthetic construct
  misc_feature 1..80: note = Synthetic: >NC_001611.1-cand-25520-25599
  source 1..80: mol_type = other DNA
aatgagatattaacgcgttttatgaacgatgatatgtatccagaagttctatcctccgtggctaacgctataaccttatt

SEQ ID NO: 21223 - DNA, 80 bp, synthetic construct
  misc_feature 1..80: note = Synthetic: >NC_001611.1-cand-25600-25679
  source 1..80: mol_type = other DNA
attatagtaccaaaaagtgtgattaatgtgtgacacattagcgcatgtacatatttgtacattattgtctacgtcgtatt

SEQ ID NO: 21224 - DNA, 80 bp, synthetic construct
  misc_feature 1..80: note = Synthetic: >NC_001611.1-cand-25680-25759
  source 1..80: mol_type = other DNA
cgacacatccacatacagccaacaaatataaaatgataaatgctctaatggtgttcgtacccatcttaatgcggcttaat

SEQ ID NO: 21225 - DNA, 80 bp, synthetic construct
  misc_feature 1..80: note = Synthetic: >NC_001611.1-cand-25760-25839
  source 1..80: mol_type = other DNA
aaatgtttcgatttcaatttattgtaaaaaagaatcggttttatactgttcgagattctcattgattatattctcatcta

SEQ ID NO: 21226 - DNA, 80 bp, synthetic construct
  misc_feature 1..80: note = Synthetic: >NC_001611.1-cand-25840-25919
  source 1..80: mol_type = other DNA
tcatctccacacagtcaaatccgtggttagcatatacctcattaaccgataatagactatcagactcttctatcgttata

SEQ ID NO: 21227 - DNA, 80 bp, synthetic construct
  misc_feature 1..80: note = Synthetic: >NC_001611.1-cand-25920-25999
  source 1..80: mol_type = other DNA
actcgagaatatttaatttggtcattcttaatcaagtcaattatcttatttttaacaaatgtgagtattttactcatttt

SEQ ID NO: 21228 - DNA, 80 bp, synthetic construct
  misc_feature 1..80: note = Synthetic: >NC_001611.1-cand-26000-26079
  source 1..80: mol_type = other DNA
ttataaaaaacttttagaaatatacagactctatcgcgtgtctatatcttctttttatatccaatgtatttatatctgat

SEQ ID NO: 21229 - DNA, 80 bp, synthetic construct
  misc_feature 1..80: note = Synthetic: >NC_001611.1-cand-26080-26159
  source 1..80: mol_type = other DNA
ttttcttcatttattatatataatggtccaaattctatacgtgttgcttcatccagatcattaaggttcttataatcgca

SEQ ID NO: 21230 - DNA, 80 bp, synthetic construct
  misc_feature 1..80: note = Synthetic: >NC_001611.1-cand-26160-26239
  source 1..80: mol_type = other DNA
atatccttctccttcctcttctatatcgtccttcttaaacttattcttagcgtcacagaatcgaccacagcaggatccca

SEQ ID NO: 21231 - DNA, 80 bp, synthetic construct
  misc_feature 1..80: note = Synthetic: >NC_001611.1-cand-26240-26319
  source 1..80: mol_type = other DNA
tgacaagcgtcatattaaactaattcattttcaataatatactaattagtaacgactattaaaataaatattcttcataa

SEQ ID NO: 21232 - DNA, 80 bp, synthetic construct
  misc_feature 1..80: note = Synthetic: >NC_001611.1-cand-26320-26399
  source 1..80: mol_type = other DNA
ccggtaagaatagtaaaaagactaaatcttcacattgtaactattcagtagtgtttacataaatgagatgagaagatatt

SEQ ID NO: 21233 - DNA, 80 bp, synthetic construct
  misc_feature 1..80: note = Synthetic: >NC_001611.1-cand-26480-26559
  source 1..80: mol_type = other DNA
cacgttaaatgagtgtccatattttgcaatttcttcataggatggcggtgtacgtggacggtgctgttcctgttcttgtt

SEQ ID NO: 21234 - DNA, 80 bp, synthetic construct
  misc_feature 1..80: note = Synthetic: >NC_001611.1-cand-26560-26639
  source 1..80: mol_type = other DNA
gtggtctccgactttcgtgtttgcgtttagatccctccattatcgcgattgcatagatgaggtactattttataccttgt

SEQ ID NO: 21235 - DNA, 80 bp, synthetic construct
  misc_feature 1..80: note = Synthetic: >NC_001611.1-cand-26800-26879
  source 1..80: mol_type = other DNA
ttttcgataataggtggaacgtatattttatttaaggacttaagaattgtctgtaaaccacaatttgctcccgccgatcc

SEQ ID NO: 21236 - DNA, 80 bp, synthetic construct
  misc_feature 1..80: note = Synthetic: >NC_001611.1-cand-31550-31629
  source 1..80: mol_type = other DNA
tcgtgccaaaatgatatacagtcttaaatagttacgcaatatctcaatagtttcataattgttagctgttttcattaaga

SEQ ID NO: 21237 - DNA, 80 bp, synthetic construct
  misc_feature 1..80: note = Synthetic: >NC_001611.1-cand-31630-31709
  source 1..80: mol_type = other DNA
tttgtaccctgtttaacatgatggtgttctatacgtctttattttctatttttaattttttaaatttttaacgatttact

SEQ ID NO: 21238 - DNA, 80 bp, synthetic construct
  misc_feature 1..80: note = Synthetic: >NC_001611.1-cand-31790-31869
  source 1..80: mol_type = other DNA
atccgtgattttggtaatgggttccgtcaaaatttgccgacgtgatatgaacatattcatcgtcgactatcaacaatttt

SEQ ID NO: 21239 - DNA, 80 bp, synthetic construct
  misc_feature 1..80: note = Synthetic: >NC_001611.1-cand-32030-32109
  source 1..80: mol_type = other DNA
agttgtaaatgtcgggccaatagtagctattaccatcgacacgtgtagtgggaactattgccaaatgttcaatatctata

SEQ ID NO: 21240 - DNA, 80 bp, synthetic construct
  misc_feature 1..80: note = Synthetic: >NC_001611.1-cand-32110-32189
  source 1..80: mol_type = other DNA
ctagttttagctgacctaagtttatcaataactacatcggtatctagatctctagaatatcccaataggtgttccggaga

SEQ ID NO: 21241 - DNA, 80 bp, synthetic construct
  misc_feature 1..80: note = Synthetic: >NC_001611.1-cand-32270-32349
  source 1..80: mol_type = other DNA
aattcaaccatgaattttttacgctattaaaggctttaaaagtatcaaatcttctacgaagatctgtggccagtggtgga

SEQ ID NO: 21242 - DNA, 80 bp, synthetic construct
  misc_feature 1..80: note = Synthetic: >NC_001611.1-cand-32420-32499
  source 1..80: mol_type = other DNA
aacatctttcatcatctgatacccaaaaacatccaagtagtagtcctacgttattttttttatcaatattaacggttata

SEQ ID NO: 21243 - DNA, 80 bp, synthetic construct
  misc_feature 1..80: note = Synthetic: >NC_001611.1-cand-32580-32659
  source 1..80: mol_type = other DNA
ccctttttcagatgcctcttttagtttatcaaaaataagcgctcccctagtcgtactcagaggattacaacaaaaagatg

SEQ ID NO: 21244 - DNA, 80 bp, synthetic construct
  misc_feature 1..80: note = Synthetic: >NC_001611.1-cand-32740-32819
  source 1..80: mol_type = other DNA
atattttctggtagtgtttctaccagtctacattttgctcccgcaggtgctgatgtaaatggccacatttagttaacaaa

SEQ ID NO: 21245 - DNA, 80 bp, synthetic construct
  misc_feature 1..80: note = Synthetic: >NC_001611.1-cand-32820-32899
  source 1..80: mol_type = other DNA
aaaaatttacatatcctgttccatcaacgattctagaacgtcatcggttatatcgctaaaatcttcatcaaagtcgacat

SEQ ID NO: 21246 - DNA, 80 bp, synthetic construct
  misc_feature 1..80: note = Synthetic: >NC_001611.1-cand-32900-32979
  source 1..80: mol_type = other DNA
cacaacctagctcagtcaatatattaagaagttccgtgatattatcttcatcgatttctatatccatatcggatgtagat

SEQ ID NO: 21247 - DNA, 80 bp, synthetic construct
  misc_feature 1..80: note = Synthetic: >NC_001611.1-cand-32980-33059
  source 1..80: mol_type = other DNA
aattgactgattattgagttaaaatcagtactaatttccaacccttcagaatatactttgtgtttcatggtaatatcggt

SEQ ID NO: 21248 - DNA, 80 bp, synthetic construct
  misc_feature 1..80: note = Synthetic: >NC_001611.1-cand-33060-33139
  source 1..80: mol_type = other DNA
agcgtatttaagttggtagatttttcaattatgcatcaatatagcaacagtagttcttgctcctccttaattctagcatc

SEQ ID NO: 21249 - DNA, 80 bp, synthetic construct
  misc_feature 1..80: note = Synthetic: >NC_001611.1-cand-33130-33209
  source 1..80: mol_type = other DNA
ttctagcatcttcttcattattttcttctacatacataagcatctccaatacgttagacagcacaccgatgatggcggcc

SEQ ID NO: 21250 - DNA, 80 bp, synthetic construct
  misc_feature 1..80: note = Synthetic: >NC_001611.1-cand-33210-33289
  source 1..80: mol_type = other DNA
gccacagacacgaatatgactagactgatgaccatttaaaaaaacactctagctttcacttaaactgtatcgatcattct

SEQ ID NO: 21251 - DNA, 80 bp, synthetic construct
  misc_feature 1..80: note = Synthetic: >NC_001802.1-cand-8850-8929
  source 1..80: mol_type = other DNA
tgggatggatgacccggagagagaagtgttagagtggaggtttgacagccgcctagcatttcatcacgtggcccgagagc

SEQ ID NO: 21252 - DNA, 80 bp, synthetic construct
  misc_feature 1..80: note = Synthetic: >NC_001802.1-cand-8910-8989
  source 1..80: mol_type = other DNA
tcatcacgtggcccgagagctgcatccggagtacttcaagaactgctgacatcgagcttgctacaagggactttccgctg

SEQ ID NO: 21253 - DNA, 80 bp, synthetic construct
  misc_feature 1..80: note = Synthetic: >NC_001802.1-cand-9030-9109
  source 1..80: mol_type = other DNA
gtggcgagccctcagatcctgcatataagcagctgctttttgcctgtactgggtctctctggttagaccagatctgagcc

SEQ ID NO: 21254 - DNA, 80 bp, synthetic construct
  misc_feature 1..80: note = Synthetic: >NC_001803.1-cand-50-129
  source 1..80: mol_type = other DNA
agaatttgataagtaccacttaaatttaactcccttggttagagatgggcagcaattcattgagtatgataaaagttaga

SEQ ID NO: 21255 - DNA, 80 bp, synthetic construct
  misc_feature 1..80: note = Synthetic: >NC_001803.1-cand-90-169
  source 1..80: mol_type = other DNA
agagatgggcagcaattcattgagtatgataaaagttagattacaaaatttgtttgacaatgatgaagtagcattgttaa

SEQ ID NO: 21256 - DNA, 80 bp, synthetic construct
  misc_feature 1..80: note = Synthetic: >NC_001803.1-cand-170-249
  source 1..80: mol_type = other DNA
aaataacatgctatactgacaaattaatacatttaactaatgcattggctaaggcagtgatacatacaatcaaattgaat

SEQ ID NO: 21257 - DNA, 80 bp, synthetic construct
  misc_feature 1..80: note = Synthetic: >NC_001803.1-cand-250-329
  source 1..80: mol_type = other DNA
ggcattgtatttgtgcatgttattacaagtagtgatatttgccctaataataatattgtagtgaaatccaatttcacaac

SEQ ID NO: 21258 - DNA, 80 bp, synthetic construct
  misc_feature 1..80: note = Synthetic: >NC_001803.1-cand-330-409
  source 1..80: mol_type = other DNA
aatgccagtgttacaaaatggaggttatatatgggaaatgatggaattaacacactgctctcaacctaatggcctaatag

SEQ ID NO: 21259 - DNA, 80 bp, synthetic construct
  misc_feature 1..80: note = Synthetic: >NC_001803.1-cand-410-489
  source 1..80: mol_type = other DNA
atgacaattgtgaaattaaattctccaaaaaactaagtgattcaacaatgaccaattatatgaatcaattatctgaatta

SEQ ID NO: 21260 - DNA, 80 bp, synthetic construct
  misc_feature 1..80: note = Synthetic: >NC_001803.1-cand-490-569
  source 1..80: mol_type = other DNA
cttggatttgatcttaatccataaattataataaatatcaactagcaaatcaatgtcactaacaccattagttaatataa

SEQ ID NO: 21261 - DNA, 80 bp, synthetic construct
  misc_feature 1..80: note = Synthetic: >NC_001803.1-cand-600-679
  source 1..80: mol_type = other DNA
aaatcaattcagccgacccaaccatggacacaacacacaatgacaccacaccacaaagactgatgatcacagacatgaga

SEQ ID NO: 21262 - DNA, 80 bp, synthetic construct
  misc_feature 1..80: note = Synthetic: >NC_001803.1-cand-650-729
  source 1..80: mol_type = other DNA
ccacaaagactgatgatcacagacatgagaccattgtcacttgagactataataatatcactaaccagagacatcataac

SEQ ID NO: 21263 - DNA, 80 bp, synthetic construct
  misc_feature 1..80: note = Synthetic: >NC_001803.1-cand-730-809
  source 1..80: mol_type = other DNA
acacagatttatatacttgataaatcatgaatgtatagtgagaaaacttgatgaaagacaggccacatttacattcctgg

SEQ ID NO: 21264 - DNA, 80 bp, synthetic construct
  misc_feature 1..80: note = Synthetic: >NC_001803.1-cand-810-889
  source 1..80: mol_type = other DNA
tcaactatgaaatgaaactattgcacaaagtgggaagcactaaatacaaaaaatatactgaatacaacacaaaatatggc

SEQ ID NO: 21265 - DNA, 80 bp, synthetic construct
  misc_feature 1..80: note = Synthetic: >NC_001803.1-cand-890-969
  source 1..80: mol_type = other DNA
acttttcctatgccaatatttatcaatcatgatgggttcttagaatgcattggcattaagcctacaaagcacactcccat

SEQ ID NO: 21266 - DNA, 80 bp, synthetic construct
  misc_feature 1..80: note = Synthetic: >NC_001803.1-cand-970-1049
  source 1..80: mol_type = other DNA
aatatacaagtatgatctcaatccatgaatttcaacacaagagtcacacaatctgaaataacaacttcatgcataaccac

SEQ ID NO: 21267 - DNA, 80 bp, synthetic construct
  misc_feature 1..80: note = Synthetic: >NC_002645.1-cand-18770-18849
  source 1..80: mol_type = other DNA
aacatagcatttgaactttttgctaagaggaaggttggtttaacaccacctctcagtattctcaaaaaccttggtgttgt

SEQ ID NO: 21268 - DNA, 80 bp, synthetic construct
  misc_feature 1..80: note = Synthetic: >NC_002645.1-cand-18850-18929
  source 1..80: mol_type = other DNA
cgccacatataagtttgtcttgtgggattatgaagctgagcgtcccttgacaagctttactaagtctgtttgtggttata

SEQ ID NO: 21269 - DNA, 80 bp, synthetic construct
  misc_feature 1..80: note = Synthetic: >NC_002645.1-cand-18930-19009
  source 1..80: mol_type = other DNA
cagactttgcagaggatgtttgtacttgttacgataatagtatacaaggttcatacgaacgttttactctgtcaactaat

SEQ ID NO: 21270 - DNA, 80 bp, synthetic construct
  misc_feature 1..80: note = Synthetic: >NC_002645.1-cand-19010-19089
  source 1..80: mol_type = other DNA
gctgtgttattctctgctactgctgtgaaaacaggtggtaagagtttgccggctattaaattgaattttggaatgcttaa

SEQ ID NO: 21271 - DNA, 80 bp, synthetic construct
  misc_feature 1..80: note = Synthetic: >NC_002645.1-cand-19090-19169
  source 1..80: mol_type = other DNA
tggtaatgcaattgctactgtcaaatcagaagatggtaacataaaaaatattaactggtttgtttacgtacgcaaagatg

SEQ ID NO: 21272 - DNA, 80 bp, synthetic construct
  misc_feature 1..80: note = Synthetic: >NC_002645.1-cand-19170-19249
  source 1..80: mol_type = other DNA
gcaaacctgttgatcattatgatggtttttatacccaaggtcgtaatttacaagactttttgcctcgcagcacaatggaa

SEQ ID NO: 21273 - DNA, 80 bp, synthetic construct
  misc_feature 1..80: note = Synthetic: >NC_002645.1-cand-19250-19329
  source 1..80: mol_type = other DNA
gaagactttttgaacatggatataggcgtgtttattcaaaagtatggtctagaggatttcaacttcgagcacgttgtgta

SEQ ID NO: 21274 - DNA, 80 bp, synthetic construct
  misc_feature 1..80: note = Synthetic: >NC_002645.1-cand-19330-19409
  source 1..80: mol_type = other DNA
tggtgatgtttcaaaaactactctaggcggtttacacttgttgatttcacaagtacgtctgagtaaaatgggcatcttaa

SEQ ID NO: 21275 - DNA, 80 bp, synthetic construct
  misc_feature 1..80: note = Synthetic: >NC_002645.1-cand-19410-19489
  source 1..80: mol_type = other DNA
aggcagaggagtttgtggcagcatctgacataacactcaaatgttgtactgtgacttatcttaatgatcctagttctaag

SEQ ID NO: 21276 - DNA, 80 bp, synthetic construct
  misc_feature 1..80: note = Synthetic: >NC_002645.1-cand-19490-19569
  source 1..80: mol_type = other DNA
actgtttgtacttacatggatttgttgttggatgattttgtttctgtattgaagtctttggatttgactgttgtatccaa

SEQ ID NO: 21277 - DNA, 80 bp, synthetic construct
  misc_feature 1..80: note = Synthetic: >NC_002645.1-cand-19570-19649
  source 1..80: mol_type = other DNA
ggttcatgaggtcataattgacaacaaaccatggagatggatgctatggtgtaaagataatgccgttgctacattctatc

SEQ ID NO: 21278 - DNA, 80 bp, synthetic construct
  misc_feature 1..80: note = Synthetic: >NC_002645.1-cand-19650-19729
  source 1..80: mol_type = other DNA
ctcagttgcagagtgcagaatggaaatgcgggtattctatgcctggtatttataagacacaacgtatgtgcttagaacca

SEQ ID NO: 21279 - DNA, 80 bp, synthetic construct
  misc_feature 1..80: note = Synthetic: >NC_002645.1-cand-19730-19809
  source 1..80: mol_type = other DNA
tgtaatttgtataattatggtgcaggtttgaagttgcccagtggcattatgttcaatgttgttaaatacactcaattgtg

SEQ ID NO: 21280 - DNA, 80 bp, synthetic construct
  misc_feature 1..80: note = Synthetic: >NC_002645.1-cand-19810-19889
  source 1..80: mol_type = other DNA
tcaatattttaacagtaccacgttatgtgttcctcataatatgagagtgttacacttgggtgctggctctgattatggtg

SEQ ID NO: 21281 - DNA, 80 bp, synthetic construct
  misc_feature 1..80: note = Synthetic: >NC_002645.1-cand-19890-19969
  source 1..80: mol_type = other DNA
ttgcaccaggaactgctgttcttaaaaggtggttgccgcacgacgcaattgttgttgacaacgatgttgttgactatgtg

SEQ ID NO: 21282 - DNA, 80 bp, synthetic construct
  misc_feature 1..80: note = Synthetic: >NC_002645.1-cand-19970-20049
  source 1..80: mol_type = other DNA
agtgacgctgattttagtgttactggtgattgtgcaaccgtttatttggaagacaagtttgacttgttaatctctgatat

SEQ ID NO: 21283 - DNA, 80 bp, synthetic construct
  misc_feature 1..80: note = Synthetic: >NC_003310.1-cand-168840-168919
  source 1..80: mol_type = other DNA
ttgtgtgactttcaagatgatgcgatatatagggttatacagtttaacaattatataatagagatagaaagtacaaaaga

SEQ ID NO: 21284 - DNA, 80 bp, synthetic construct
  misc_feature 1..80: note = Synthetic: >NC_003310.1-cand-168920-168999
  source 1..80: mol_type = other DNA
tgtagaatcaatgatatggcacgctaaacagttgggtgtggaatcattgctaaaagaatgtcaaaattatttgcttagaa

SEQ ID NO: 21285 - DNA, 80 bp, synthetic construct
  misc_feature 1..80: note = Synthetic: >NC_003310.1-cand-169000-169079
  source 1..80: mol_type = other DNA
tattacgtatataattgtttagaaatttatagaataactaatattaatacattatcgtatatctacaacgatgtaagaaa

SEQ ID NO: 21286 - DNA, 80 bp, synthetic construct
  misc_feature 1..80: note = Synthetic: >NC_003310.1-cand-169080-169159
  source 1..80: mol_type = other DNA
cttcatattggataatattactattaatatataaggatccagattttatatatttgcctaaatacattattatagattta

SEQ ID NO: 21287 - DNA, 80 bp, synthetic construct
  misc_feature 1..80: note = Synthetic: >NC_003310.1-cand-169160-169239
  source 1..80: mol_type = other DNA
ctaggacaatcacctaaatgtttttaacgaagataatgtggtaaagattatatacacttatatatcttccgatatctaca

SEQ ID NO: 21288 - DNA, 80 bp, synthetic construct
  misc_feature 1..80: note = Synthetic: >NC_003310.1-cand-169240-169319
  source 1..80: mol_type = other DNA
aggatatttccatatcatcattgtgtaaactaaataacgttttctatggcatttaataaggcattggatatgtggaaaag

SEQ ID NO: 21289 - DNA, 80 bp, synthetic construct
  misc_feature 1..80: note = Synthetic: >NC_003310.1-cand-169320-169399
  source 1..80: mol_type = other DNA
atgatggtgtatggaagttagtacatcattatcaacttctccttattgattgaaaatgaaaatataaatagtttttatat

SEQ ID NO: 21290 - DNA, 80 bp, synthetic construct
  misc_feature 1..80: note = Synthetic: >NC_003310.1-cand-169400-169479
  source 1..80: mol_type = other DNA
atagcggtatctaccctatagttttattgcttactactaacatggatacagatacagatacagatacagatacagatata

SEQ ID NO: 21291 - DNA, 80 bp, synthetic construct
  misc_feature 1..80: note = Synthetic: >NC_003310.1-cand-169480-169559
  source 1..80: mol_type = other DNA
gatacagatacagatgttagatagagagaaagaagaaatactaaaaaatgtagaaattgaaaataataaaaacattaaca

SEQ ID NO: 21292 - DNA, 80 bp, synthetic construct
  misc_feature 1..80: note = Synthetic: >NC_003310.1-cand-169560-169639
  source 1..80: mol_type = other DNA
agaatcatcccagtgaatatattagagaagcactcgttattaataccagtagtaatagtgattccattgataaagaagtt

SEQ ID NO: 21293 - DNA, 80 bp, synthetic construct
  misc_feature 1..80: note = Synthetic: >NC_003310.1-cand-169640-169719
  source 1..80: mol_type = other DNA
atagaatatatcagtcacgatgtaggaatatagatcatatctactaatttttataatcgatacaaaacataaaaaacaac

SEQ ID NO: 21294 - DNA, 80 bp, synthetic construct
  misc_feature 1..80: note = Synthetic: >NC_003310.1-cand-169720-169799
  source 1..80: mol_type = other DNA
tcgttattacatagcaggcatggaatccttcaagtattgttttgataacgatggtaaggaatggattatcggaaatactt

SEQ ID NO: 21295 - DNA, 80 bp, synthetic construct
  misc_feature 1..80: note = Synthetic: >NC_003310.1-cand-169800-169879
  source 1..80: mol_type = other DNA
tatattctggtaattcaatactctataaggtcagaaaaaatttcactagttcgttctacaattacgtaatgaagatagat

SEQ ID NO: 21296 - DNA, 80 bp, synthetic construct
  misc_feature 1..80: note = Synthetic: >NC_003310.1-cand-169880-169959
  source 1..80: mol_type = other DNA
cataaatcacacaagccattgttgtccgaaatacgattctatatatctgtattggatcctttgactatcgacaactggac

SEQ ID NO: 21297 - DNA, 80 bp, synthetic construct
  misc_feature 1..80: note = Synthetic: >NC_003310.1-cand-169960-170039
  source 1..80: mol_type = other DNA
acgggaacgtggtataaagtatttggctattccagatctgtatggaattggagaaaccgatgattatatgttcttcgtta

SEQ ID NO: 21298 - DNA, 80 bp, synthetic construct
  misc_feature 1..80: note = Synthetic: >NC_003310.1-cand-170040-170119
  source 1..80: mol_type = other DNA
taaagaatttgggaagagtattcgccccaaaggatagtgaatcagttttcgaagcatgtgtcactatgataaacacgtta

SEQ ID NO: 21299 - DNA, 80 bp, synthetic construct
  misc_feature 1..80: note = Synthetic: >NC_003310.1-cand-176850-176929
  source 1..80: mol_type = other DNA
ttaattgttactttgaaggacgtacaccacttcattgcgctatacaatataacttcactcagattgctgagtacttatta

SEQ ID NO: 21300 - DNA, 80 bp, synthetic construct
  misc_feature 1..80: note = Synthetic: >NC_003310.1-cand-177010-177089
  source 1..80: mol_type = other DNA
taaatggactagctttttgattagtcgtctaccgcctaaaagtgtcatatgctcactgactaaccatataatagattatg

SEQ ID NO: 21301 - DNA, 80 bp, synthetic construct
  misc_feature 1..80: note = Synthetic: >NC_003310.1-cand-177090-177169
  source 1..80: mol_type = other DNA
ttcttacgaacaatagacgtattatttggcagagtcaaatgattaataagtacgtactgttactggacccatccttttat

SEQ ID NO: 21302 - DNA, 80 bp, synthetic construct
  misc_feature 1..80: note = Synthetic: >NC_003310.1-cand-177170-177249
  source 1..80: mol_type = other DNA
tatagattcagaaatgctatcgaaaacaaattagaccaatacaataatcgttataatatgttcgaacacgatagggacgt

SEQ ID NO: 21303 - DNA, 80 bp, synthetic construct
  misc_feature 1..80: note = Synthetic: >NC_003310.1-cand-177250-177329
  source 1..80: mol_type = other DNA
taatgaaaagtatggcaaagtcttacatgacctcgatacatatatcaaggatgtacaagtattaaaatctacttccatca

SEQ ID NO: 21304 - DNA, 80 bp, synthetic construct
  misc_feature 1..80: note = Synthetic: >NC_003310.1-cand-177330-177409
  source 1..80: mol_type = other DNA
ctaataatataacactatacgacactattataaataataagtcagagtttcctatacgtcgtgcaaacgacaaacaatta

SEQ ID NO: 21305 - DNA, 80 bp, synthetic construct
  misc_feature 1..80: note = Synthetic: >NC_003310.1-cand-177410-177489
  source 1..80: mol_type = other DNA
attaatctcataaaatccaatacatatcataatcttatcgaaaaagttattaaaaatacattagagaaatatactttaac

SEQ ID NO: 21306 - DNA, 80 bp, synthetic construct
  misc_feature 1..80: note = Synthetic: >NC_003310.1-cand-177490-177569
  source 1..80: mol_type = other DNA
taatatagtcctcgagtatatgatctcatctcaatctcaatctcaatctcaatctcaatcatcttatttgagtcgtattc

SEQ ID NO: 21307 - DNA, 80 bp, synthetic construct
  misc_feature 1..80: note = Synthetic: >NC_003310.1-cand-177570-177649
  source 1..80: mol_type = other DNA
ctaatgagatattactcgaaatattatataaactcgacatgtacgatttacgtaatctatatacaagatatatgagagag

SEQ ID NO: 21308 - DNA, 80 bp, synthetic construct
  misc_feature 1..80: note = Synthetic: >NC_003310.1-cand-177650-177729
  source 1..80: mol_type = other DNA
aatgatatcacagagtatcatatagagaatacgaggtctgtttctacacagacatgaataatgaatacacatacaacgtt

SEQ ID NO: 21309 - DNA, 80 bp, synthetic construct
  misc_feature 1..80: note = Synthetic: >NC_003310.1-cand-177730-177809
  source 1..80: mol_type = other DNA
ttttttttaatcttagatataacactaattacatcaagattatatattgaaatcgtaatttgagttgtctgatcatcatg

SEQ ID NO: 21310 - DNA, 80 bp, synthetic construct
  misc_feature 1..80: note = Synthetic: >NC_003310.1-cand-177810-177889
  source 1..80: mol_type = other DNA
gatatcgaaaatgatatacgtaacattagcaatcttttttagatgattgatatattattatgcgatgtaatcataactat

SEQ ID NO: 21311 - DNA, 80 bp, synthetic construct
  misc_feature 1..80: note = Synthetic: >NC_003310.1-cand-177890-177969
  source 1..80: mol_type = other DNA
cggagatgtagaaattaaagcgcataaaactattttggctgccggatctacgtattttaaaacaatgttcacaacaccta

SEQ ID NO: 21312 - DNA, 80 bp, synthetic construct
  misc_feature 1..80: note = Synthetic: >NC_003310.1-cand-177970-178049
  source 1..80: mol_type = other DNA
tgatagcgagagatctagcaactagagtaaatctacagatgttcgataagatgccgtcaaaaatattgtacagtacttat

SEQ ID NO: 21313 - DNA, 80 bp, synthetic construct
  misc_feature 1..80: note = Synthetic: >NC_003310.1-cand-178050-178129
  source 1..80: mol_type = other DNA
acaataggtatataagttctatgaatgtgatagacgtattaaaatgcaccgactaagaacgtagaacgaactatagaatg

SEQ ID NO: 21314 - DNA, 80 bp, synthetic construct
  misc_feature 1..80: note = Synthetic: >NC_003310.1-cand-178130-178209
  source 1..80: mol_type = other DNA
ttatacaatgggtgatgataagtagaagatgttacccgatatacccatagcattatctagttatggcatgtgtgtattag

SEQ ID NO: 21315 - DNA, 80 bp, synthetic construct
  misc_feature 1..80: note = Synthetic: >NC_004421.1-cand-1280-1359
  source 1..80: mol_type = other DNA
caagctcttctctctttcccaattccctggtgtccctaccacacctctttctctccccaagcccactggcaacatcatct

SEQ ID NO: 21316 - DNA, 80 bp, synthetic construct
  misc_feature 1..80: note = Synthetic: >NC_004421.1-cand-1360-1439
  source 1..80: mol_type = other DNA
cccaaggccaaagtcagaccaacatttacggtaacgggaacaacgtgaccaccgatctcggtgcgaacggttggtctcca

SEQ ID NO: 21317 - DNA, 80 bp, synthetic construct
  misc_feature 1..80: note = Synthetic: >NC_004421.1-cand-1440-1519
  source 1..80: mol_type = other DNA
actgtgaatactggtctcggtgatggacccgtttcttcttctcaggacgaggtccctggtcgtgctggtggttcttcttc

SEQ ID NO: 21318 - DNA, 80 bp, synthetic construct
  misc_feature 1..80: note = Synthetic: >NC_004421.1-cand-1520-1599
  source 1..80: mol_type = other DNA
tgctcccaaaaactcttctcctgctgtttccaccacccatgcccaaaacttcaaacattggtgggaacctgctgcttcta

SEQ ID NO: 21319 - DNA, 80 bp, synthetic construct
  misc_feature 1..80: note = Synthetic: >NC_004421.1-cand-1600-1679
  source 1..80: mol_type = other DNA
aggccctctcccgtggcgtcgacaaggctccggacggcatcgaaggcgctggtaaactcgccagtgacgcgataaagtct

SEQ ID NO: 21320 - DNA, 80 bp, synthetic construct
  misc_feature 1..80: note = Synthetic: >NC_004421.1-cand-1680-1759
  source 1..80: mol_type = other DNA
aagctttcaggcgcccgacccggtccctctcccaatctcattgccctcaacccatcttctacccagcacggtaacgcgat

SEQ ID NO: 21321 - DNA, 80 bp, synthetic construct
  misc_feature 1..80: note = Synthetic: >NC_004421.1-cand-1760-1839
  source 1..80: mol_type = other DNA
gatcaccaccggttccaccgccccagtggtcgtcgcatacccacctaccccctccgtgccccttcccaaccccgactgcc

SEQ ID NO: 21322 - DNA, 80 bp, synthetic construct
  misc_feature 1..80: note = Synthetic: >NC_004421.1-cand-1840-1919
  source 1..80: mol_type = other DNA
cttccgaacctggtccgtcaggtgaccgcacatggctcctggacactttcgagtggtcccaggaaaaccccatgtggtgg

SEQ ID NO: 21323 - DNA, 80 bp, synthetic construct
  misc_feature 1..80: note = Synthetic: >NC_004421.1-cand-1910-1989
  source 1..80: mol_type = other DNA
catgtggtggtgcctggctggtcagaatggaatgcagtacaacaccctagccaaccccacctaccccttttccgcctcca

SEQ ID NO: 21324 - DNA, 80 bp, synthetic construct
  misc_feature 1..80: note = Synthetic: >NC_004421.1-cand-2020-2099
  source 1..80: mol_type = other DNA
caactgcttacccgctacctgcttcttttgtgcaggcgtatccagactgcccctggaccgccatgcacgatacccatgcc

SEQ ID NO: 21325 - DNA, 80 bp, synthetic construct
  misc_feature 1..80: note = Synthetic: >NC_004421.1-cand-2080-2159
  source 1..80: mol_type = other DNA
ccatgcacgatacccatgcctacttcaactgtggctggcgcatgcaggtggtggtgaacggtactcagttccacgctggt

SEQ ID NO: 21326 - DNA, 80 bp, synthetic construct
  misc_feature 1..80: note = Synthetic: >NC_004421.1-cand-2160-2239
  source 1..80: mol_type = other DNA
gcccttctcatatacgccgtcccggaacgccccctgcttccgaacggtgttgaatatgagcacaccacctttgtctaccc

SEQ ID NO: 21327 - DNA, 80 bp, synthetic construct
  misc_feature 1..80: note = Synthetic: >NC_004421.1-cand-2240-2319
  source 1..80: mol_type = other DNA
ctacaccatcctcaacctctaccagtctaacaccgcaacattggaggtcccctacgtcggttgcacacccaataccacca

SEQ ID NO: 21328 - DNA, 80 bp, synthetic construct
  misc_feature 1..80: note = Synthetic: >NC_004421.1-cand-2320-2399
  source 1..80: mol_type = other DNA
cctgtgtgcactcgccgtggactttctacattgcgatcctcacccccttggctgtagcttcctcctccaaccagaccctt

SEQ ID NO: 21329 - DNA, 80 bp, synthetic construct
  misc_feature 1..80: note = Synthetic: >NC_004421.1-cand-2400-2479
  source 1..80: mol_type = other DNA
tctgtttcagtttacataactcctgttaattcttctttctatggtcttcgccacgtgtccaagcagcactggaagaccag

SEQ ID NO: 21330 - DNA, 80 bp, synthetic construct
  misc_feature 1..80: note = Synthetic: >NC_004421.1-cand-2480-2559
  source 1..80: mol_type = other DNA
ggccgtcccaggctctggtgcttttggaactgccgttgcagggcaggagatccctatctatgcttttgaaactttcactc

SEQ ID NO: 21331 - DNA, 80 bp, synthetic construct
  misc_feature 1..80: note = Synthetic: >NC_004905.2-cand-730-809
  source 1..80: mol_type = other DNA
agcagcacaaagagcaatgatggatcaggtgcgagaaagcagaaatcctgggaatgctgaaattgaagatctcatctttc

SEQ ID NO: 21332 - DNA, 80 bp, synthetic construct
  misc_feature 1..80: note = Synthetic: >NC_004905.2-cand-820-899
  source 1..80: mol_type = other DNA
tgcactcatcctgagaggatccgtagcccataagtcctgcttgcctgcttgtgtgtacgggctcgctgtggccagtggat

SEQ ID NO: 21333 - DNA, 80 bp, synthetic construct
  misc_feature 1..80: note = Synthetic: >NC_004905.2-cand-900-979
  source 1..80: mol_type = other DNA
atgattttgagagggaagggtactctctggttgggatagatcctttccgtctgcttcagaacagtcaggtcttcagtctt

SEQ ID NO: 21334 - DNA, 80 bp, synthetic construct
  misc_feature 1..80: note = Synthetic: >NC_004905.2-cand-1060-1139
  source 1..80: mol_type = other DNA
agtctcaagtttcattagaggaacaagagtgatcccaagaggacaactatccactagaggagttcagattgcttcaaatg

SEQ ID NO: 21335 - DNA, 80 bp, synthetic construct
  misc_feature 1..80: note = Synthetic: >NC_004905.2-cand-1210-1289
  source 1..80: mol_type = other DNA
tggaggaaacaccaatcaacagagagcatctgcaggacaaatcagtgtacagcccactttctcagtacagagaaatcttc

SEQ ID NO: 21336 - DNA, 80 bp, synthetic construct
  misc_feature 1..80: note = Synthetic: >NC_004905.2-cand-1330-1409
  source 1..80: mol_type = other DNA
taccgagggcagaacatctgacatgaggactgaaatcataaggatgatggaaagtgccagaccagaagatgtgtctttcc

SEQ ID NO: 21337 - DNA, 80 bp, synthetic construct
  misc_feature 1..80: note = Synthetic: >NC_004906.1-cand-90-169
  source 1..80: mol_type = other DNA
agaccaagaactgggtgatgccccattccttgaccggcttcgccgagatcagaagtccctaagaggaagaggcagcactc

SEQ ID NO: 21338 - DNA, 80 bp, synthetic construct
  misc_feature 1..80: note = Synthetic: >NC_004906.1-cand-180-259
  source 1..80: mol_type = other DNA
catcagaactgccactcgtgaaggaaagcatatagtggagcggattctggaggaagaatctgacgaggcacttaaaatga

SEQ ID NO: 21339 - DNA, 80 bp, synthetic construct
  misc_feature 1..80: note = Synthetic: >NC_004906.1-cand-260-339
  source 1..80: mol_type = other DNA
ctatcgcttcagtgcctgcttcacgctacctaactgaaatgactcttgaggaaatgtcaagggattggttaatgctcatt

SEQ ID NO: 21340 - DNA, 80 bp, synthetic construct
  misc_feature 1..80: note = Synthetic: >NC_004906.1-cand-350-429
  source 1..80: mol_type = other DNA
aagtgacagggcccctttgcattagaatggaccaggcagtaatgggtaaaaccatcatattgaaagcaaactttagtgtg

SEQ ID NO: 21341 - DNA, 80 bp, synthetic construct
  misc_feature 1..80: note = Synthetic: >NC_004906.1-cand-420-499
  source 1..80: mol_type = other DNA
ctttagtgtgatttttaatcgacttgaagctctgatactacttagagcgtttacagatgaaggagcaatagtgggcgaaa

SEQ ID NO: 21342 - DNA, 80 bp, synthetic construct
  misc_feature 1..80: note = Synthetic: >NC_004906.1-cand-470-549
  source 1..80: mol_type = other DNA
ttacagatgaaggagcaatagtgggcgaaatctcaccattaccttcccttccaggacatactgacgaggatgtcaaaaat

SEQ ID NO: 21343 - DNA, 80 bp, synthetic construct
  misc_feature 1..80: note = Synthetic: >NC_004906.1-cand-660-739
  source 1..80: mol_type = other DNA
actccctccaaaacagaaacggaaagtggagagaacaattgagccagaagtttgaagagataagatggttaattgaagaa

SEQ ID NO: 21344 - DNA, 80 bp, synthetic construct
  misc_feature 1..80: note = Synthetic: >NC_004907.1-cand-200-279
  source 1..80: mol_type = other DNA
ggattttagggtttgtgttcacgctcaccgtgcccagtgagcgaggactgcagcgtagacgatttgtccaaaatgcccta

SEQ ID NO: 21345 - DNA, 80 bp, synthetic construct
  misc_feature 1..80: note = Synthetic: >NC_004907.1-cand-270-349
  source 1..80: mol_type = other DNA
aaatgccctaaatgggaatggagacccaaacaacatggacagggcagttaaactatacaagaagctgaagagggaaatga

SEQ ID NO: 21346 - DNA, 80 bp, synthetic construct
  misc_feature 1..80: note = Synthetic: >NC_005237.1-cand-580-659
  source 1..80: mol_type = other DNA
aaggaaaatgctttgttcctgacaaggctgtcgtcagtgcattgaagagaggcatgtacgccatagcaagcatagagaca

SEQ ID NO: 21347 - DNA, 80 bp, synthetic construct
  misc_feature 1..80: note = Synthetic: >NC_005237.1-cand-660-739
  source 1..80: mol_type = other DNA
atctgcttttttattcatcagaaagggaatacatataagatagtgactgccatcacatcggcaatgggctccaaatgtaa

SEQ ID NO: 21348 - DNA, 80 bp, synthetic construct
  misc_feature 1..80: note = Synthetic: >NC_005237.1-cand-740-819
  source 1..80: mol_type = other DNA
taatacagatactaaagttcaagggtattatatctgtattattggtgggaactctgcccccgtatatgcccctgctggtg

SEQ ID NO: 21349 - DNA, 80 bp, synthetic construct
  misc_feature 1..80: note = Synthetic: >NC_005237.1-cand-820-899
  source 1..80: mol_type = other DNA
aagactttagggcaatggaggttttttccgggattattacatcaccgcatggagaagaccatgatctccctggcgaagaa

SEQ ID NO: 21350 - DNA, 80 bp, synthetic construct
  misc_feature 1..80: note = Synthetic: >NC_005237.1-cand-900-979
  source 1..80: mol_type = other DNA
attgcaacataccagatttcagggcagatagaggcaaaaatccctcatacagtgagctccaagaacttaaaattgactgc

SEQ ID NO: 21351 - DNA, 80 bp, synthetic construct
  misc_feature 1..80: note = Synthetic: >NC_005237.1-cand-980-1059
  source 1..80: mol_type = other DNA
ttttgcaggtattccatcatactcatcaaccagtatattgactgcttcagaagatggtcgtttcatatttagtcctggtc

SEQ ID NO: 21352 - DNA, 80 bp, synthetic construct
  misc_feature 1..80: note = Synthetic: >NC_005237.1-cand-1040-1119
  source 1..80: mol_type = other DNA
tttcatatttagtcctggtctatttcctaacctaaatcagtcagtctgtgacaacaatgcactccctttaatctggaggg

SEQ ID NO: 21353 - DNA, 80 bp, synthetic construct
  misc_feature 1..80: note = Synthetic: >NC_005237.1-cand-1130-1209
  source 1..80: mol_type = other DNA
tttaacaggatactatgaggcagtccacccttgcaatgtattctgtgtcttatcaggaccaggtgcttcatgtgaagcct

SEQ ID NO: 21354 - DNA, 80 bp, synthetic construct
  misc_feature 1..80: note = Synthetic: >NC_005237.1-cand-1210-1289
  source 1..80: mol_type = other DNA
tttcagaaggaggtattttcaatattacttccccaatgtgtcttgtgtccaagcaaaataggtttagagcagctgagcag

SEQ ID NO: 21355 - DNA, 80 bp, synthetic construct
  misc_feature 1..80: note = Synthetic: >NC_005237.1-cand-1290-1369
  source 1..80: mol_type = other DNA
cagatcagctttgtttgccaaagggttgatatggatattatagtgtactgtaatggtcagaaaaagacaatcctaacaaa

SEQ ID NO: 21356 - DNA, 80 bp, synthetic construct
  misc_feature 1..80: note = Synthetic: >NC_005237.1-cand-1350-1429
  source 1..80: mol_type = other DNA
aaaaagacaatcctaacaaaaacattagttataggccaatgcatttatactattacaagtctcttttcactgttaccagg

SEQ ID NO: 21357 - DNA, 80 bp, synthetic construct
  misc_feature 1..80: note = Synthetic: >NC_005237.1-cand-1450-1529
  source 1..80: mol_type = other DNA
ttgagttgtgtgttccaggatttcatggctgggccacagctgcacttttgatcacattctgctttggctgggtattgatt

SEQ ID NO: 21358 - DNA, 80 bp, synthetic construct
  misc_feature 1..80: note = Synthetic: >NC_005237.1-cand-1530-1609
  source 1..80: mol_type = other DNA
cctgcatgtacattagctattcttttagttcttaagttttttgcaaatatcctccacacaagcaatcaagagaaccgatt

SEQ ID NO: 21359 - DNA, 80 bp, synthetic construct
  misc_feature 1..80: note = Synthetic: >NC_005237.1-cand-1610-1689
  source 1..80: mol_type = other DNA
caaagccattctacggaaaataaaggaggagtttgaaaaaacaaagggttccatggtttgtgagatctgtaagtacgagt

SEQ ID NO: 21360 - DNA, 80 bp, synthetic construct
  misc_feature 1..80: note = Synthetic: >NC_005237.1-cand-1660-1739
  source 1..80: mol_type = other DNA
ccatggtttgtgagatctgtaagtacgagtgtgaaacattaaaggaattgaaggcacataatctatcatgtgttcaaggg

SEQ ID NO: 21361 - DNA, 80 bp, synthetic construct
  misc_feature 1..80: note = Synthetic: >NC_005237.1-cand-1770-1849
  source 1..80: mol_type = other DNA
ccgacagaaactgcaattcaggcacattacaaagtttgtcaagccacccaccgattcagagaagatttaaaaaagactgt

SEQ ID NO: 21362 - DNA, 80 bp, synthetic construct
  misc_feature 1..80: note = Synthetic: >NC_005238.1-cand-3370-3449
  source 1..80: mol_type = other DNA
gactgattggttcttatttgtatcccagcagattcaagccggaaaattgcattggtttaatgtaaatacagagatgtgga

SEQ ID NO: 21363 - DNA, 80 bp, synthetic construct
  misc_feature 1..80: note = Synthetic: >NC_005238.1-cand-3450-3529
  source 1..80: mol_type = other DNA
aaagtatgtttaatctgcatgaacacattcttctgttaggatcaattaaaatatccccaaagaagacaacattatcgccg

SEQ ID NO: 21364 - DNA, 80 bp, synthetic construct
  misc_feature 1..80: note = Synthetic: >NC_005238.1-cand-3530-3609
  source 1..80: mol_type = other DNA
acaaatgctgagtttttgtctacattttttgagggttgtgctgtatcaattccctttattaaaatccttcttggctcact

SEQ ID NO: 21365 - DNA, 80 bp, synthetic construct
  misc_feature 1..80: note = Synthetic: >NC_005238.1-cand-3610-3689
  source 1..80: mol_type = other DNA
atctgacctaccaggtcttggctatttcgatgatcttgctgctgcccagacgaggtgcgtcaaagcaatggatttaggag

SEQ ID NO: 21366 - DNA, 80 bp, synthetic construct
  misc_feature 1..80: note = Synthetic: >NC_005238.1-cand-3690-3769
  source 1..80: mol_type = other DNA
catcacctcaaatctcacaacttgcagtctcacttagtacgagtaaggttgagagattatatgggacatcaataggcatg

SEQ ID NO: 21367 - DNA, 80 bp, synthetic construct
  misc_feature 1..80: note = Synthetic: >NC_005238.1-cand-3770-3849
  source 1..80: mol_type = other DNA
gttaattatcctggcacatatttaaggacaaaacactctgaaactccaattccactgggaggaagtggtgcaatgtcaat

SEQ ID NO: 21368 - DNA, 80 bp, synthetic construct
  misc_feature 1..80: note = Synthetic: >NC_005238.1-cand-3850-3929
  source 1..80: mol_type = other DNA
aatggaactttcaacagccggtataggtatgtctgacaaaaatttactgaaacaagcacttattggttatatgcataaac

SEQ ID NO: 21369 - DNA, 80 bp, synthetic construct
  misc_feature 1..80: note = Synthetic: >NC_005238.1-cand-3960-4039
  source 1..80: mol_type = other DNA
tcttcaagtttttaatggatctctctggtgagacatttcagcatgaaaggctaggccagttttcatttataggaaaagtt

SEQ ID NO: 21370 - DNA, 80 bp, synthetic construct
  misc_feature 1..80: note = Synthetic: >NC_005238.1-cand-4010-4089
  source 1..80: mol_type = other DNA
ctaggccagttttcatttataggaaaagttcaatggaagatattcacacccaaatcagagtttgaattctctgacatgta

SEQ ID NO: 21371 - DNA, 80 bp, synthetic construct
  misc_feature 1..80: note = Synthetic: >NC_005238.1-cand-4090-4169
  source 1..80: mol_type = other DNA
ttctcagaagtttttaaaggtttggagtgaacagcatcctacatatgattacattattcctaaaggtcgtgataatcttc

SEQ ID NO: 21372 - DNA, 80 bp, synthetic construct
  misc_feature 1..80: note = Synthetic: >NC_005238.1-cand-4180-4259
  source 1..80: mol_type = other DNA
tgtgagaaaattgaatgacccaagcattataacagctatgactatgcaatcacctttacaactcagatttaggatgcaag

SEQ ID NO: 21373 - DNA, 80 bp, synthetic construct
  misc_feature 1..80: note = Synthetic: >NC_005238.1-cand-4300-4379
  source 1..80: mol_type = other DNA
ggtaacatttagagaggtacttgcagcagcaaacagttttgctgagagctatgaacctagtcaaaatgatattgatttat

SEQ ID NO: 21374 - DNA, 80 bp, synthetic construct
  misc_feature 1..80: note = Synthetic: >NC_005238.1-cand-4340-4419
  source 1..80: mol_type = other DNA
gctgagagctatgaacctagtcaaaatgatattgatttatttcaaacattgactagctgcacattttctaaagagtatgc

SEQ ID NO: 21375 - DNA, 80 bp, synthetic construct
  misc_feature 1..80: note = Synthetic: >NC_005238.1-cand-4430-4509
  source 1..80: mol_type = other DNA
tttttgaataatgtacactgtgatgtgataccaacaaagcaagtacaacgtgcaaaagttgcacgtacattcacagtgag

SEQ ID NO: 21376 - DNA, 80 bp, synthetic construct
  misc_feature 1..80: note = Synthetic: >NC_005238.1-cand-4510-4589
  source 1..80: mol_type = other DNA
agaaaaggaccgaattattcaaaacagcattccagctgttattggttacaagtttgcagtaacagttgatgaaatgtctg

SEQ ID NO: 21377 - DNA, 80 bp, synthetic construct
  misc_feature 1..80: note = Synthetic: >NC_005238.1-cand-4590-4669
  source 1..80: mol_type = other DNA
atgtgctagacacagcaaagttcccagattctctggcagttgacctaaagacaatgaaagatggagtctatagggaattg

SEQ ID NO: 21378 - DNA, 80 bp, synthetic construct
  misc_feature 1..80: note = Synthetic: >NC_005300.2-cand-4570-4649
  source 1..80: mol_type = other DNA
atggcaaggaagcttgaatttggaacagacagtacatttaaagctttctcggccatgcctaaaacttctctatgtttcta

SEQ ID NO: 21379 - DNA, 80 bp, synthetic construct
  misc_feature 1..80: note = Synthetic: >NC_005300.2-cand-4650-4729
  source 1..80: mol_type = other DNA
cattgttgaaagagaacactgtaagagctgcagtgaagaagacacaaaaaaatgtgttaacacaaaacttgagcaaccac

SEQ ID NO: 21380 - DNA, 80 bp, synthetic construct
  misc_feature 1..80: note = Synthetic: >NC_005300.2-cand-4730-4809
  source 1..80: mol_type = other DNA
aaagcattttgatcgaacacaagggaactataatcggaaagcaaaacagcacttgcacggctaaggcaagttgctggtta

SEQ ID NO: 21381 - DNA, 80 bp, synthetic construct
  misc_feature 1..80: note = Synthetic: >NC_005300.2-cand-4810-4889
  source 1..80: mol_type = other DNA
gagtcagtcaagagttttttttatggcctaaagaacatgcttagtggcatttttggcaatgtctttatgggcattttctt

SEQ ID NO: 21382 - DNA, 80 bp, synthetic construct
  misc_feature 1..80: note = Synthetic: >NC_005300.2-cand-4890-4969
  source 1..80: mol_type = other DNA
gttccttgcccccttcatcctgttaatactattctttatgtttgggtggaggatcctattctgctttaaatgttgtagaa

SEQ ID NO: 21383 - DNA, 80 bp, synthetic construct
  misc_feature 1..80: note = Synthetic: >NC_005300.2-cand-4970-5049
  source 1..80: mol_type = other DNA
gaaccagaggcctgttcaagtatagacacctcaaagacgatgaagaaactggttatagaaggattattgaaaaactaaac

SEQ ID NO: 21384 - DNA, 80 bp, synthetic construct
  misc_feature 1..80: note = Synthetic: >NC_005300.2-cand-5060-5139
  source 1..80: mol_type = other DNA
gaaaaaacaaactgcttgatggtgaaagacttgctgatagaagaattgccgaactgttctctacaaaaacacacattggc

SEQ ID NO: 21385 - DNA, 80 bp, synthetic construct
  misc_feature 1..80: note = Synthetic: >NC_005300.2-cand-5140-5219
  source 1..80: mol_type = other DNA
tagaccaactgaatgggccttaaaaatgatggcattacactgaacaatgctgtcattcatgctgacatctttagttgcaa

SEQ ID NO: 21386 - DNA, 80 bp, synthetic construct
  misc_feature 1..80: note = Synthetic: >NC_005300.2-cand-5220-5299
  source 1..80: mol_type = other DNA
ccctactacattatcatcacaatatactacatctaatctgctacattgtatccatgtacagactctataatgcttgaaac

SEQ ID NO: 21387 - DNA, 80 bp, synthetic construct
  misc_feature 1..80: note = Synthetic: >NC_005301.3-cand-0-79
  source 1..80: mol_type = other DNA
aaagatatcaatccccccgttacccacgttaacacagagagctctagtagtggtctttccttttgtgaaaccatggactt

SEQ ID NO: 21388 - DNA, 80 bp, synthetic construct
  misc_feature 1..80: note = Synthetic: >NC_005301.3-cand-80-159
  source 1..80: mol_type = other DNA
cttgagaagccttgactggactcaagtgattgctggtcaatatgtgtccaaccctaggttcaacatttctgattattttg

SEQ ID NO: 21389 - DNA, 80 bp, synthetic construct
  misc_feature 1..80: note = Synthetic: >NC_005301.3-cand-140-219
  source 1..80: mol_type = other DNA
caacatttctgattattttgagattgtgcggcagcctggtgatgggaactgcttctatcacagcatagctgagttaacca

SEQ ID NO: 21390 - DNA, 80 bp, synthetic construct
  misc_feature 1..80: note = Synthetic: >NC_005301.3-cand-220-299
  source 1..80: mol_type = other DNA
tgcctaacaaaacagatcactcatatcattacatcaaacgcctaaccgagtcggcagcacggaagtattaccaagaggag

SEQ ID NO: 21391 - DNA, 80 bp, synthetic construct
  misc_feature 1..80: note = Synthetic: >NC_005301.3-cand-290-369
  source 1..80: mol_type = other DNA
ccaagaggagcctgaagccagacttgttggcctgagcctggaagattacctcaagaggatgctgtctgacaacgagtggg

SEQ ID NO: 21392 - DNA, 80 bp, synthetic construct
  misc_feature 1..80: note = Synthetic: >NC_005301.3-cand-380-459
  source 1..80: mol_type = other DNA
agaagcatctatgttggctaaagaaatgggcattaccatcatcatttggactgttgctgccagtgatgaagtggaagcag

SEQ ID NO: 21393 - DNA, 80 bp, synthetic construct
  misc_feature 1..80: note = Synthetic: >NC_005301.3-cand-460-539
  source 1..80: mol_type = other DNA
gtataaagttcggagacggtgatgtgtttacagctgtgaaccttttgcactctggacaaacacactttgatgcgctcaga

SEQ ID NO: 21394 - DNA, 80 bp, synthetic construct
  misc_feature 1..80: note = Synthetic: >NC_005301.3-cand-6920-6999
  source 1..80: mol_type = other DNA
agtgcaagagactgggactaaagtcatgcatgcaaccactgaaatgtttagtagaaatcttttaaaaacaacatcagatg

SEQ ID NO: 21395 - DNA, 80 bp, synthetic construct
  misc_feature 1..80: note = Synthetic: >NC_005301.3-cand-7000-7079
  source 1..80: mol_type = other DNA
atggcctcacaaacccacatcttaaagaaacaatccttaatgtgggattagactgtcttgctaacatgcgaaatcttgac

SEQ ID NO: 21396 - DNA, 80 bp, synthetic construct
  misc_feature 1..80: note = Synthetic: >NC_005301.3-cand-7070-7149
  source 1..80: mol_type = other DNA
aaatcttgacggtaagcccataagtgaaggtagtaacttggtcaatttctacaaagtcatatgtatctcgggtgataata

SEQ ID NO: 21397 - DNA, 80 bp, synthetic construct
  misc_feature 1..80: note = Synthetic: >NC_005301.3-cand-7160-7239
  source 1..80: mol_type = other DNA
cccgatacactgctgttctttcttttctggcatgatgcaacaggttctgaaaaatgtaccagattggtgttcattttata

SEQ ID NO: 21398 - DNA, 80 bp, synthetic construct
  misc_feature 1..80: note = Synthetic: >NC_005301.3-cand-7260-7339
  source 1..80: mol_type = other DNA
ttatgtagacaggtagaaatacctgctggcagtattaagaagatcttaaatgttcttaggtatagattgtgcagcaaggg

SEQ ID NO: 21399 - DNA, 80 bp, synthetic construct
  misc_feature 1..80: note = Synthetic: >NC_005301.3-cand-7340-7419
  source 1..80: mol_type = other DNA
aggtgtagaacaacatagtgaagaagatctgagaagactgttgacagataatttagacagttgggatggaaacgacacag

SEQ ID NO: 21400 - DNA, 80 bp, synthetic construct
  misc_feature 1..80: note = Synthetic: >NC_005301.3-cand-7420-7499
  source 1..80: mol_type = other DNA
ttaagttcttagttacaacttatataagcaaaggactcatggcgttaaacagttacaatcatatgggtcagggtattcac

SEQ ID NO: 21401 - DNA, 80 bp, synthetic construct
  misc_feature 1..80: note = Synthetic: >NC_005301.3-cand-7500-7579
  source 1..80: mol_type = other DNA
catgcaacatcttcggtgttaacttccctagctgctgtgctctttgaggagctggcaattttttatcttaagagaagctt

SEQ ID NO: 21402 - DNA, 80 bp, synthetic construct
  misc_feature 1..80: note = Synthetic: >NC_005301.3-cand-7580-7659
  source 1..80: mol_type = other DNA
accccagacaacagtacatgttgaacatgccggtagttcagatgattacgcaaagtgtatagtggtgactggtatactat

SEQ ID NO: 21403 - DNA, 80 bp, synthetic construct
  misc_feature 1..80: note = Synthetic: >NC_005301.3-cand-7660-7739
  source 1..80: mol_type = other DNA
ccaaagagctctactcccagtatgatgaaacattttggaaacacgcttgcagactcaaaaacttcacggccgcggtacaa

SEQ ID NO: 21404 - DNA, 80 bp, synthetic construct
  misc_feature 1..80: note = Synthetic: >NC_005301.3-cand-7740-7819
  source 1..80: mol_type = other DNA
agatgctgtcaaatgaaagatagtgccaaaaccttggtgagcgactgctttctcgagttttacagtgagtttatgatggg

SEQ ID NO: 21405 - DNA, 80 bp, synthetic construct
  misc_feature 1..80: note = Synthetic: >NC_005301.3-cand-7820-7899
  source 1..80: mol_type = other DNA
ctacagagtaacccctgctgtaataaagttcatgtttactggactgataaacagctctgtgacctctcctcagagtttga

SEQ ID NO: 21406 - DNA, 80 bp, synthetic construct
  misc_feature 1..80: note = Synthetic: >NC_005301.3-cand-7900-7979
  source 1..80: mol_type = other DNA
tgcaagcatgccaagtttcatcccaacaagcaatgtataatagtgttcctcttgtcaccaacactgccttcaccctatta

SEQ ID NO: 21407 - DNA, 80 bp, synthetic construct
  misc_feature 1..80: note = Synthetic: >NC_005301.3-cand-7980-8059
  source 1..80: mol_type = other DNA
aggcagcaaattttctttaaccatgttgaagactttatcagaaggtatggtatactgactcttgggactttgtcaccctt

SEQ ID NO: 21408 - DNA, 80 bp, synthetic construct
  misc_feature 1..80: note = Synthetic: >NC_005301.3-cand-8060-8139
  source 1..80: mol_type = other DNA
tggtaggttgttcgtaccaacctactctggattagtcagctcagcggttgctttagaagatgctgaagtcattgctagag

SEQ ID NO: 21409 - DNA, 80 bp, synthetic construct
  misc_feature 1..80: note = Synthetic: >NC_005301.3-cand-8130-8209
  source 1..80: mol_type = other DNA
attgctagagcagcccaaacacttcaaatgaacagtgtgtcaatacagtcaagtagcttgaccacattagatagcctagg

SEQ ID NO: 21410 - DNA, 80 bp, synthetic construct
  misc_feature 1..80: note = Synthetic: >NC_006572.1-cand-920-999
  source 1..80: mol_type = other DNA
ttcaacatgctcaggccctatatgcgtgaaatcatgttcctccaggtccaggatctcctcattcaataagacggacaagg

SEQ ID NO: 21411 - DNA, 80 bp, synthetic construct
  misc_feature 1..80: note = Synthetic: >NC_006572.1-cand-930-1009
  source 1..80: mol_type = other DNA
tcaggccctatatgcgtgaaatcatgttcctccaggtccaggatctcctcattcaataagacggacaagggtatcacatc

SEQ ID NO: 21412 - DNA, 80 bp, synthetic construct
  misc_feature 1..80: note = Synthetic: >NC_006572.1-cand-1040-1119
  source 1..80: mol_type = other DNA
acaaatattttcagtggacagcaaccaaattgatgtggtttcccttttaaaccatgtagatgtctgtgcaactctccagc

SEQ ID NO: 21413 - DNA, 80 bp, synthetic construct
  misc_feature 1..80: note = Synthetic: >NC_006572.1-cand-1120-1199
  source 1..80: mol_type = other DNA
aatctttaattgcggatctttgaacactaccactgtaagttacatcaagggaatgaggcttgaataatccaccttccaac

SEQ ID NO: 21414 - DNA, 80 bp, synthetic construct
  misc_feature 1..80: note = Synthetic: >NC_006572.1-cand-1200-1279
  source 1..80: mol_type = other DNA
accacccctttgaaaaggaggtggagactaaatttctctttcaatgattcaccctgacttctcacctgaaaatttactgt

SEQ ID NO: 21415 - DNA, 80 bp, synthetic construct
  misc_feature 1..80: note = Synthetic: >NC_006572.1-cand-1280-1359
  source 1..80: mol_type = other DNA
gacagaaatttgaacgctcccaacactgaggtcggcaaaagcttcaagcagctcacttaccgactcaaagacgtgctgct

SEQ ID NO: 21416 - DNA, 80 bp, synthetic construct
  misc_feature 1..80: note = Synthetic: >NC_006572.1-cand-1370-1449
  source 1..80: mol_type = other DNA
tgatgctatgagctgtcctaagtttagaattgctggtgcacattcaaaatccagccaagcataacctgagtaaagatcat

SEQ ID NO: 21417 - DNA, 80 bp, synthetic construct
  misc_feature 1..80: note = Synthetic: >NC_006572.1-cand-1430-1509
  source 1..80: mol_type = other DNA
ataacctgagtaaagatcatgcctgtacatgggtctttcaacacccttataaataaccttttctataaaagaagaaaagg

SEQ ID NO: 21418 - DNA, 80 bp, synthetic construct
  misc_feature 1..80: note = Synthetic: >NC_006572.1-cand-1530-1609
  source 1..80: mol_type = other DNA
tccgactcaggaattgaagatctatgtggaaaccaagtaaaagaacctaaagtcctgcttgttgcaacgaatggtctgat

SEQ ID NO: 21419 - DNA, 80 bp, synthetic construct
  misc_feature 1..80: note = Synthetic: >NC_006572.1-cand-1610-1689
  source 1..80: mol_type = other DNA
gaaggactcaaagtagatttgtctcaggaaattttgtaccacatcataagtggtcaccaccctttcatccgtgattggga

SEQ ID NO: 21420 - DNA, 80 bp, synthetic construct
  misc_feature 1..80: note = Synthetic: >NC_006572.1-cand-1690-1769
  source 1..80: mol_type = other DNA
gatgagacctctcatgtgctattgctaaatctgaagacagaaccacataatgctcttctctcttccacttgacaacatga

SEQ ID NO: 21421 - DNA, 80 bp, synthetic construct
  misc_feature 1..80: note = Synthetic: >NC_006572.1-cand-1770-1849
  source 1..80: mol_type = other DNA
gaaattaatgacattgcctcacaattcacatctagaaccacacaaagatcaagaaacttaatccttggtgtccacctcat

SEQ ID NO: 21422 - DNA, 80 bp, synthetic construct
  misc_feature 1..80: note = Synthetic: >NC_006572.1-cand-1850-1929
  source 1..80: mol_type = other DNA
tttcgttgatgctaggtcactcatgaagggcaagaggtgtctctcaaatagagatgggtaaagtcttctgaatgagtgaa

SEQ ID NO: 21423 - DNA, 80 bp, synthetic construct
  misc_feature 1..80: note = Synthetic: >NC_006572.1-cand-1930-2009
  source 1..80: mol_type = other DNA
taatatggttaaaccccaccttgtcttccaagagttttgtggtagtgggcttcattgggaaatagtcacatggcttgaag

SEQ ID NO: 21424 - DNA, 80 bp, synthetic construct
  misc_feature 1..80: note = Synthetic: >NC_006572.1-cand-2010-2089
  source 1..80: mol_type = other DNA
ggaattgaggatgttttctccttcactttgggttcacccaacacccaggaacccagctcaagtgatgtagataaggctat

SEQ ID NO: 21425 - DNA, 80 bp, synthetic construct
  misc_feature 1..80: note = Synthetic: >NC_006572.1-cand-2080-2159
  source 1..80: mol_type = other DNA
ataaggctatgcagaagtaatcccaaaggacaggtctcaagaaacctaacgcttcctcagctgcctttgtgtgctcctta

SEQ ID NO: 21426 - DNA, 80 bp, synthetic construct
  misc_feature 1..80: note = Synthetic: >NC_006577.2-cand-640-719
  source 1..80: mol_type = other DNA
gtgaagattttttgggttggattgtaccttttggttttatgccatcttatgttcacaaatggtttcaattctgtaggttg

SEQ ID NO: 21427 - DNA, 80 bp, synthetic construct
  misc_feature 1..80: note = Synthetic: >NC_006577.2-cand-720-799
  source 1..80: mol_type = other DNA
tatattgaagagagtgatttaataatttcaaattttaaatttgatgattatgattttagtgtagaagatgcttatgctga

SEQ ID NO: 21428 - DNA, 80 bp, synthetic construct
  misc_feature 1..80: note = Synthetic: >NC_006577.2-cand-800-879
  source 1..80: mol_type = other DNA
ggttcatgctgagcctaaaggtaaatattcacaaaaagcttatgctttacttagacaatatcgtggtattaaacccgtac

SEQ ID NO: 21429 - DNA, 80 bp, synthetic construct
  misc_feature 1..80: note = Synthetic: >NC_006577.2-cand-870-949
  source 1..80: mol_type = other DNA
aaacccgtactttttgtagaccagtatggttgtgactattctggtaaattagcagattgtcttcaagcttatggtcatta

SEQ ID NO: 21430 - DNA, 80 bp, synthetic construct
  misc_feature 1..80: note = Synthetic: >NC_006577.2-cand-950-1029
  source 1..80: mol_type = other DNA
ttctttgcaagatatgagacaaaagcagtctgtatggcttgccaattgtgactttgatattgtagtggcttggcatgtag

SEQ ID NO: 21431 - DNA, 80 bp, synthetic construct
  misc_feature 1..80: note = Synthetic: >NC_006577.2-cand-1030-1109
  source 1..80: mol_type = other DNA
ttcgtgattcacgatttgttatgcgcctgcagactatagctactatttgtggtattaaatatgttgcacaacctacagaa

SEQ ID NO: 21432 - DNA, 80 bp, synthetic construct
  misc_feature 1..80: note = Synthetic: >NC_006577.2-cand-1110-1189
  source 1..80: mol_type = other DNA
gatgtagtagatggagatgtagttatacgtgaacctgtacatttattatctgctgatgcaatagttttaaagcttcctag

SEQ ID NO: 21433 - DNA, 80 bp, synthetic construct
  misc_feature 1..80: note = Synthetic: >NC_006577.2-cand-1190-1269
  source 1..80: mol_type = other DNA
tttgatgaaagttatgactcatatggatgatttttctattaaatctatatataatgttgatttgtgtgattgtggttttg

SEQ ID NO: 21434 - DNA, 80 bp, synthetic construct
  misc_feature 1..80: note = Synthetic: >NC_006577.2-cand-1270-1349
  source 1..80: mol_type = other DNA
ttatgcagtatggttatgtagattgttttaatgataattgtgatttttatggttgggtttcaggtaatatgatggatggt

SEQ ID NO: 21435 - DNA, 80 bp, synthetic construct
  misc_feature 1..80: note = Synthetic: >NC_006577.2-cand-1350-1429
  source 1..80: mol_type = other DNA
ttttcttgtccattgtgttgtacagtttatgactctagcgaagttaaagcccaatcatctggtgttattcctgaaaatcc

SEQ ID NO: 21436 - DNA, 80 bp, synthetic construct
  misc_feature 1..80: note = Synthetic: >NC_006577.2-cand-1430-1509
  source 1..80: mol_type = other DNA
tgtgttatttactaatagtactgatactgttaaccatgattcttttaatttgtatggttattctgtcacaccatttggtt

SEQ ID NO: 21437 - DNA, 80 bp, synthetic construct
  misc_feature 1..80: note = Synthetic: >NC_006577.2-cand-1510-1589
  source 1..80: mol_type = other DNA
cttgtatatattggtcgccgcgtcctggattgtggattcctataattaaatcttcagtcaagtcttatgatgatttggtt

SEQ ID NO: 21438 - DNA, 80 bp, synthetic construct
  misc_feature 1..80: note = Synthetic: >NC_006577.2-cand-1590-1669
  source 1..80: mol_type = other DNA
tattcaggtgtagtaggttgtaaatctattgttaaagaaactgctcttattactcatgcactttacttagattatgttca

SEQ ID NO: 21439 - DNA, 80 bp, synthetic construct
  misc_feature 1..80: note = Synthetic: >NC_006577.2-cand-1670-1749
  source 1..80: mol_type = other DNA
atgtaagtgtggtaatcttgaacaaaatcatattcttggcgttaataattcttggtgtaggcaactgttgcttaatagag

SEQ ID NO: 21440 - DNA, 80 bp, synthetic construct
  misc_feature 1..80: note = Synthetic: >NC_006577.2-cand-1750-1829
  source 1..80: mol_type = other DNA
gtgattataatatgcttctaaaaaatattgacttgtttgttaagcgtcgtgctgattttgcttgcaagtttgcagtttgt

SEQ ID NO: 21441 - DNA, 80 bp, synthetic construct
  misc_feature 1..80: note = Synthetic: >NC_006577.2-cand-1830-1909
  source 1..80: mol_type = other DNA
ggagatggttttgtaccttttttactagatggtttaattccccgtagttattatctaattcagagtggtattttctttac

SEQ ID NO: 21442 - DNA, 80 bp, synthetic construct
  misc_feature 1..80: note = Synthetic: >NC_007360.1-cand-300-379
  source 1..80: mol_type = other DNA
aggacccaaagaaaactggaggtccaatctaccgaagaagagacggaaaatgggtgagagagctgattctgtatgacaaa

SEQ ID NO: 21443 - DNA, 80 bp, synthetic construct
  misc_feature 1..80: note = Synthetic: >NC_007360.1-cand-390-469
  source 1..80: mol_type = other DNA
ggagaatttggcgtcaagcgaacaatggagaagatgcaactgctggtctcactcacatgatgatctggcattccaatcta

SEQ ID NO: 21444 - DNA, 80 bp, synthetic construct
  misc_feature 1..80: note = Synthetic: >NC_007360.1-cand-470-549
  source 1..80: mol_type = other DNA
aatgatgccacataccagagaacaagagctctcgtgcgtactgggatggaccctagaatgtgctctctgatgcaaggatc

SEQ ID NO: 21445 - DNA, 80 bp, synthetic construct
  misc_feature 1..80: note = Synthetic: >NC_007360.1-cand-560-639
  source 1..80: mol_type = other DNA
aggagatctggagctgctggtgcggcagtaaagggagtcggaacgatggtgatggaactaattcggatgataaagcgagg

SEQ ID NO: 21446 - DNA, 80 bp, synthetic construct
  misc_feature 1..80: note = Synthetic: >NC_007360.1-cand-720-799
  source 1..80: mol_type = other DNA
aagggaaattccaaacagcagcacaaagagcaatgatggatcaggtacgggaaagcagaaatcctgggaatgctgagatt

SEQ ID NO: 21447 - DNA, 80 bp, synthetic construct
  misc_feature 1..80: note = Synthetic: >NC_007360.1-cand-810-889
  source 1..80: mol_type = other DNA
tatttctggcacggtctgcactcatcctgagaggatcagtggcccacaagtcctgcttgcctgcttgtgtgtacgggctt

SEQ ID NO: 21448 - DNA, 80 bp, synthetic construct
  misc_feature 1..80: note = Synthetic: >NC_007360.1-cand-1110-1189
  source 1..80: mol_type = other DNA
aactatctactagaggagttcaaattgcttcaaatgagaacatggaaacaatggactccagcactcttgaactgagaagc

SEQ ID NO: 21449 - DNA, 80 bp, synthetic construct
  misc_feature 1..80: note = Synthetic: >NC_007360.1-cand-1220-1299
  source 1..80: mol_type = other DNA
ggaaacaccaaccagcagagagcatctgcaggacaaatcagtgtgcagcctactttctcggtacagagaaatcttccctt

SEQ ID NO: 21450 - DNA, 80 bp, synthetic construct
  misc_feature 1..80: note = Synthetic: >NC_007360.1-cand-1430-1509
  source 1..80: mol_type = other DNA
ttcgagctctcggacgaaaaggcaacgaacccgatcgtgccttcctttgacatgagtaatgaaggatcttatttcttcgg

SEQ ID NO: 21451 - DNA, 80 bp, synthetic construct
  misc_feature 1..80: note = Synthetic: >NC_007361.1-cand-0-79
  source 1..80: mol_type = other DNA
aaagcaggagattaaaatgaatccaaatcagaagataataaccattggatcaatctgtatggtagttgggataattagct

SEQ ID NO: 21452 - DNA, 80 bp, synthetic construct
  misc_feature 1..80: note = Synthetic: >NC_007361.1-cand-80-159
  source 1..80: mol_type = other DNA
tgatgttacaaattgggaacataatctcaatatgggtcagtcattcaattcagacagggaatcaacaccaagctgaacca

SEQ ID NO: 21453 - DNA, 80 bp, synthetic construct
  misc_feature 1..80: note = Synthetic: >NC_007361.1-cand-130-209
  source 1..80: mol_type = other DNA
cagacagggaatcaacaccaagctgaaccatgcaatcaaagcattattacttatgaaaacaacacctgggtaaatcaaac

SEQ ID NO: 21454 - DNA, 80 bp, synthetic construct
  misc_feature 1..80: note = Synthetic: >NC_007361.1-cand-220-299
  source 1..80: mol_type = other DNA
atcagcaataccaattttcttactgaaaaagctgtggcttcagtaacattagcgggcaattcatctctttgccccattag

SEQ ID NO: 21455 - DNA, 80 bp, synthetic construct
  misc_feature 1..80: note = Synthetic: >NC_007361.1-cand-270-349
  source 1..80: mol_type = other DNA
agcgggcaattcatctctttgccccattagcggatgggctgtacacagtaaggacaacggtataagaatcggttccaagg

SEQ ID NO: 21456 - DNA, 80 bp, synthetic construct
  misc_feature 1..80: note = Synthetic: >NC_007361.1-cand-390-469
  source 1..80: mol_type = other DNA
ccacttggaatgcagaactttctttttgactcagggagccttgctgaatgacaagcactccaatgggaccgtcaaagaca

SEQ ID NO: 21457 - DNA, 80 bp, synthetic construct
  misc_feature 1..80: note = Synthetic: >NC_007361.1-cand-470-549
  source 1..80: mol_type = other DNA
gaagccctcacagaacattgatgagttgtcctgtgggtgaggctccctccccatataactcaaggtttgagtctgttgct

SEQ ID NO: 21458 - DNA, 80 bp, synthetic construct
  misc_feature 1..80: note = Synthetic: >NC_009825.1-cand-3100-3179
  source 1..80: mol_type = other DNA
gggcctgactggtacttacatctatgaccaccttactcccatgtcagattggccgccttacggcctccgcgatttggcgg

SEQ ID NO: 21459 - DNA, 80 bp, synthetic construct
  misc_feature 1..80: note = Synthetic: >NC_009825.1-cand-3130-3209
  source 1..80: mol_type = other DNA
ccttactcccatgtcagattggccgccttacggcctccgcgatttggcggtggccctagagccagttgtgttcacgccca

SEQ ID NO: 21460 - DNA, 80 bp, synthetic construct
  misc_feature 1..80: note = Synthetic: >NC_009825.1-cand-3150-3229
  source 1..80: mol_type = other DNA
ggccgccttacggcctccgcgatttggcggtggccctagagccagttgtgttcacgcccatggagaagaaagtcatcgtc

SEQ ID NO: 21461 - DNA, 80 bp, synthetic construct
  misc_feature 1..80: note = Synthetic: >NC_009825.1-cand-3290-3369
  source 1..80: mol_type = other DNA
ttgggcaatgagatcttgctcggaccagccgatacagaaacatcaaaggggtggagactccttgcccccatcacagcata

SEQ ID NO: 21462 - DNA, 80 bp, synthetic construct
  misc_feature 1..80: note = Synthetic: >NC_009825.1-cand-3380-3459
  source 1..80: mol_type = other DNA
acccgcggcttgttcagcaccatcgtaacgagcctcactggcagggacaccaatgagaattgtggcgaagtgcaggtctt

SEQ ID NO: 21463 - DNA, 80 bp, synthetic construct
  misc_feature 1..80: note = Synthetic: >NC_009825.1-cand-3440-3519
  source 1..80: mol_type = other DNA
tgtggcgaagtgcaggtcttatccaccgctacgcagtccttcctgggtactgcggttaacggcgtgatgtggaccgtcta

SEQ ID NO: 21464 - DNA, 80 bp, synthetic construct
  misc_feature 1..80: note = Synthetic: >NC_009825.1-cand-3610-3689
  source 1..80: mol_type = other DNA
agcaccccccggagtcagatctcttgctccgtgcacctgcggctcggcagacttgtatctagtcaccaggcacgcggatg

SEQ ID NO: 21465 - DNA, 80 bp, synthetic construct
  misc_feature 1..80: note = Synthetic: >NC_009825.1-cand-3620-3699
  source 1..80: mol_type = other DNA
ggagtcagatctcttgctccgtgcacctgcggctcggcagacttgtatctagtcaccaggcacgcggatgtaatacccgt

SEQ ID NO: 21466 - DNA, 80 bp, synthetic construct
  misc_feature 1..80: note = Synthetic: >NC_009825.1-cand-3700-3779
  source 1..80: mol_type = other DNA
gcgcaggagaggagacaccagaggagctctcttgagccctagaccaatatccattcttaagggatcttccggaggtccgc

SEQ ID NO: 21467 - DNA, 80 bp, synthetic construct
  misc_feature 1..80: note = Synthetic: >NC_009825.1-cand-3750-3829
  source 1..80: mol_type = other DNA
ccattcttaagggatcttccggaggtccgctgctgtgccccatgggacaccgcgccggcatattccgtgcggcggtgtgt

SEQ ID NO: 21468 - DNA, 80 bp, synthetic construct
  misc_feature 1..80: note = Synthetic: >NC_009825.1-cand-3860-3939
  source 1..80: mol_type = other DNA
gtcccggttgaatctcttgagactaccatgagatcaccagtgttcactgacaactcaacacccccagcagtgccccagac

SEQ ID NO: 21469 - DNA, 80 bp, synthetic construct
  misc_feature 1..80: note = Synthetic: >NC_009825.1-cand-3940-4019
  source 1..80: mol_type = other DNA
ctaccaggtcgcgcacctacacgcaccaacaggaagtggcaagagcactaaggtcccggcggcgcatgctgcccaaggct

SEQ ID NO: 21470 - DNA, 80 bp, synthetic construct
  misc_feature 1..80: note = Synthetic: >NC_009825.1-cand-3990-4069
  source 1..80: mol_type = other DNA
aggtcccggcggcgcatgctgcccaaggctataaagtgctagtgctcaatccttcggttgcggccacactgggttttggg

SEQ ID NO: 21471 - DNA, 80 bp, synthetic construct
  misc_feature 1..80: note = Synthetic: >NC_009825.1-cand-4110-4189
  source 1..80: mol_type = other DNA
ggtcgggagtcaggaccatcaccacgggtgcgccaatcacgtactcaacgtatggtaagttcctggctgatggaggttgc

SEQ ID NO: 21472 - DNA, 80 bp, synthetic construct
  misc_feature 1..80: note = Synthetic: >NC_009825.1-cand-4200-4279
  source 1..80: mol_type = other DNA
catacgacataatcatctgtgacgagtgctattccactgactccacaacgatccttggcataggcacagtcctggaccaa

SEQ ID NO: 21473 - DNA, 80 bp, synthetic construct
  misc_feature 1..80: note = Synthetic: >NC_009825.1-cand-4270-4349
  source 1..80: mol_type = other DNA
cctggaccaagcggagaccgctggagtgcgcctcaccgtgctcgcgactgctactccgccagggtcagtgactacacctc

SEQ ID NO: 21474 - DNA, 80 bp, synthetic construct
  misc_feature 1..80: note = Synthetic: >NC_009942.1-cand-7680-7759
  source 1..80: mol_type = other DNA
gggcaaaaggacgcaccttgggagaggtttggaaagaaagactcaaccagatgacaaaagaagagttcactaggtaccgc

SEQ ID NO: 21475 - DNA, 80 bp, synthetic construct
  misc_feature 1..80: note = Synthetic: >NC_009942.1-cand-7710-7789
  source 1..80: mol_type = other DNA
ggaaagaaagactcaaccagatgacaaaagaagagttcactaggtaccgcaaagaggccatcatcgaagtcgatcgctca

SEQ ID NO: 21476 - DNA, 80 bp, synthetic construct
  misc_feature 1..80: note = Synthetic: >NC_009942.1-cand-7760-7839
  source 1..80: mol_type = other DNA
aaagaggccatcatcgaagtcgatcgctcagcggcaaaacacgccaggaaagaaggcaatgtcactggagggcatccagt

SEQ ID NO: 21477 - DNA, 80 bp, synthetic construct
  misc_feature 1..80: note = Synthetic: >NC_009942.1-cand-7870-7949
  source 1..80: mol_type = other DNA
ggtcgaacggaggtttctcgaaccggtcggaaaagtgattgaccttggatgtggaagaggcggttggtgttactatatgg

SEQ ID NO: 21478 - DNA, 80 bp, synthetic construct
  misc_feature 1..80: note = Synthetic: >NC_009942.1-cand-7950-8029
  source 1..80: mol_type = other DNA
caacccaaaaaagagtccaagaagtcagagggtacacaaagggcggtcccggacatgaagagccccaactagtgcaaagt

SEQ ID NO: 21479 - DNA, 80 bp, synthetic construct
  misc_feature 1..80: note = Synthetic: >NC_009942.1-cand-8030-8109
  source 1..80: mol_type = other DNA
tatggatggaacattgtcaccatgaagagtggagtggatgtgttctacagaccttctgagtgttgtgacaccctcctttg

SEQ ID NO: 21480 - DNA, 80 bp, synthetic construct
  misc_feature 1..80: note = Synthetic: >NC_009942.1-cand-8110-8189
  source 1..80: mol_type = other DNA
tgacatcggagagtcctcgtcaagtgctgaggttgaagagcataggacgattcgggtccttgaaatggttgaggactggc

SEQ ID NO: 21481 - DNA, 80 bp, synthetic construct
  misc_feature 1..80: note = Synthetic: >NC_009942.1-cand-8190-8269
  source 1..80: mol_type = other DNA
tgcaccgagggccaagggaattttgcgtgaaggtgctctgtccctacatgccgaaagtcatagagaagatggagctgctc

SEQ ID NO: 21482 - DNA, 80 bp, synthetic construct
  misc_feature 1..80: note = Synthetic: >NC_009942.1-cand-8290-8369
  source 1..80: mol_type = other DNA
actggtcagaaacccactctcacggaattccacgcacgagatgtattgggtgagtcgagcttcaggcaatgtggtacatt

SEQ ID NO: 21483 - DNA, 80 bp, synthetic construct
  misc_feature 1..80: note = Synthetic: >NC_009942.1-cand-8350-8429
  source 1..80: mol_type = other DNA
ttcaggcaatgtggtacattcagtgaatatgaccagccaggtgctcctaggaagaatggaaaaaaggacctggaagggac

SEQ ID NO: 21484 - DNA, 80 bp, synthetic construct
  misc_feature 1..80: note = Synthetic: >NC_009942.1-cand-8430-8509
  source 1..80: mol_type = other DNA
cccaatacgaggaagatgtaaacttgggaagtggaaccagggcggtgggaaaacccctgctcaactcagacaccagtaaa

SEQ ID NO: 21485 - DNA, 80 bp, synthetic construct
  misc_feature 1..80: note = Synthetic: >NC_009942.1-cand-8510-8589
  source 1..80: mol_type = other DNA
atcaagaacaggattgaacgactcaggcgtgagtacagttcgacgtggcaccacgatgagaaccacccatatagaacctg

SEQ ID NO: 21486 - DNA, 80 bp, synthetic construct
  misc_feature 1..80: note = Synthetic: >NC_009942.1-cand-8590-8669
  source 1..80: mol_type = other DNA
gaactatcacggcagttatgatgtgaagcccacaggctccgccagttcgctggtcaatggagtggtcaggctcctctcaa

SEQ ID NO: 21487 - DNA, 80 bp, synthetic construct
  misc_feature 1..80: note = Synthetic: >NC_009942.1-cand-8670-8749
  source 1..80: mol_type = other DNA
aaccatgggacaccatcacgaatgttaccaccatggccatgactgacactactcccttcgggcagcagcgagtgttcaaa

SEQ ID NO: 21488 - DNA, 80 bp, synthetic construct
  misc_feature 1..80: note = Synthetic: >NC_009942.1-cand-8750-8829
  source 1..80: mol_type = other DNA
gagaaggtggacacgaaagctcctgaaccgccagaaggagtgaagtacgtgctcaacgagaccaccaactggttgtgggc

SEQ ID NO: 21489 - DNA, 80 bp, synthetic construct
  misc_feature 1..80: note = Synthetic: >NC_009942.1-cand-8830-8909
  source 1..80: mol_type = other DNA
gtttttggccagagaaaaacgtcccagaatgtgctctcgagaggaattcataagaaaggtcaacagcaatgcagctttgg

SEQ ID NO: 21490 - DNA, 80 bp, synthetic construct
  misc_feature 1..80: note = Synthetic: >NC_009996.1-cand-1790-1869
  source 1..80: mol_type = other DNA
tcaatttacaatgtacaagtgaccaagaaaacagcagacaagcccatagttgtgatacccatggacattagcaacactct

SEQ ID NO: 21491 - DNA, 80 bp, synthetic construct
  misc_feature 1..80: note = Synthetic: >NC_009996.1-cand-1860-1939
  source 1..80: mol_type = other DNA
gcaacactctcttttctaccactttactaggtgaagttcttaattactttgcaaattggtcaggtagtatctctataact

SEQ ID NO: 21492 - DNA, 80 bp, synthetic construct
  misc_feature 1..80: note = Synthetic: >NC_009996.1-cand-1940-2019
  source 1..80: mol_type = other DNA
tttatgtgtgtttgtgatagctttagtacaggtaaatttttgctagcatacacacccccaggagccgctttgccaccaga

SEQ ID NO: 21493 - DNA, 80 bp, synthetic construct
  misc_feature 1..80: note = Synthetic: >NC_009996.1-cand-2020-2099
  source 1..80: mol_type = other DNA
caggaaaaccgcaatgttaggtgtacatgtaatctgggatttgggactccaatcctcgtgcaccattgtagtaccatgga

SEQ ID NO: 21494 - DNA, 80 bp, synthetic construct
  misc_feature 1..80: note = Synthetic: >NC_009996.1-cand-2100-2179
  source 1..80: mol_type = other DNA
tgagcggcaccttccatagacggactaaagctgacaattacacccaggctggatatgtgtcactatggtaccagactgat

SEQ ID NO: 21495 - DNA, 80 bp, synthetic construct
  misc_feature 1..80: note = Synthetic: >NC_009996.1-cand-2180-2259
  source 1..80: mol_type = other DNA
tttgtgtcaccaaatgatgggattgggacaatcgttgctacatgctccggatgtcctgatttgtctgttagaatgctgcg

SEQ ID NO: 21496 - DNA, 80 bp, synthetic construct
  misc_feature 1..80: note = Synthetic: >NC_009996.1-cand-2260-2339
  source 1..80: mol_type = other DNA
tgacacaccaatgatgaaacaggaaaaagatttgactcaaaacccagttgaggactacatagacaaggtggtcgacactg

SEQ ID NO: 21497 - DNA, 80 bp, synthetic construct
  misc_feature 1..80: note = Synthetic: >NC_009996.1-cand-2340-2419
  source 1..80: mol_type = other DNA
tactacaggtcccaaacacccaacccagtggtccacaacacagtattcaaccaagtgctttgggcgctatggaaattggg

SEQ ID NO: 21498 - DNA, 80 bp, synthetic construct
  misc_feature 1..80: note = Synthetic: >NC_009996.1-cand-2420-2499
  source 1..80: mol_type = other DNA
gcatcttcaaccaccataccaggtgatctcatagagactaggtatgtaatcaactcaaatactaacagtgaagccctaat

SEQ ID NO: 21499 - DNA, 80 bp, synthetic construct
  misc_feature 1..80: note = Synthetic: >NC_009996.1-cand-2500-2579
  source 1..80: mol_type = other DNA
tgagaacttcatgggccgctcagctctttgggccaagatccaggtggcgaatggttttgcaaaatgggatataaacttcc

SEQ ID NO: 21500 - DNA, 80 bp, synthetic construct
  misc_feature 1..80: note = Synthetic: >NC_009996.1-cand-2580-2659
  source 1..80: mol_type = other DNA
aagagcatgcacaagtcagaaagaaatttgaaatgtttacatatgctagatttgacatggaagttactgttgtcaccaac

SEQ ID NO: 21501 - DNA, 80 bp, synthetic construct
  misc_feature 1..80: note = Synthetic: >NC_009996.1-cand-2660-2739
  source 1..80: mol_type = other DNA
aacacaggtttggtacaaatcatgtttgtaccacctggtatagatgcaccagatagtattgactcccgtctatgggattc

SEQ ID NO: 21502 - DNA, 80 bp, synthetic construct
  misc_feature 1..80: note = Synthetic: >NC_009996.1-cand-2740-2819
  source 1..80: mol_type = other DNA
tgcctccaacccgagtgttttctatcaaccaaaatcaggttttcctaggtttactattccattcactggattgggttcag

SEQ ID NO: 21503 - DNA, 80 bp, synthetic construct
  misc_feature 1..80: note = Synthetic: >NC_009996.1-cand-2820-2899
  source 1..80: mol_type = other DNA
cttattatatgttttatgatggttatgatgtccccagaaataaaagtaatgctgtgtatggtatcacatctacaaatgat

SEQ ID NO: 21504 - DNA, 80 bp, synthetic construct
  misc_feature 1..80: note = Synthetic: >NC_009996.1-cand-2920-2999
  source 1..80: mol_type = other DNA
agctatggaagacaccaatgaacacagcattagagtctttgtaaagcctaaacataccatagcatggattccacgaccac

SEQ ID NO: 21505 - DNA, 80 bp, synthetic construct
  misc_feature 1..80: note = Synthetic: >NC_009996.1-cand-3000-3079
  source 1..80: mol_type = other DNA
ctcgtgccacccaatacacccacaaattcagcacaaactaccatgttaagaaaccagatgacactactggactactaata

SEQ ID NO: 21506 - DNA, 80 bp, synthetic construct
  misc_feature 1..80: note = Synthetic: >NC_014397.1-cand-4830-4909
  source 1..80: mol_type = other DNA
ttagtaagatagctatggttatccgtgacaatttctcccggatgggccatcttcgaggtgtagaagaccttgctggcttc

SEQ ID NO: 21507 - DNA, 80 bp, synthetic construct
  misc_feature 1..80: note = Synthetic: >NC_014397.1-cand-4870-4949
  source 1..80: mol_type = other DNA
gatgggccatcttcgaggtgtagaagaccttgctggcttcactcgtagtgtgtcagctgaaattctcaagcactttctat

SEQ ID NO: 21508 - DNA, 80 bp, synthetic construct
  misc_feature 1..80: note = Synthetic: >NC_014397.1-cand-4950-5029
  source 1..80: mol_type = other DNA
tctgtatactacaaggtccatacagtgagagctataagctacagctaatctacagagtcctaagctcagtgtcaaacgtt

SEQ ID NO: 21509 - DNA, 80 bp, synthetic construct
  misc_feature 1..80: note = Synthetic: >NC_014397.1-cand-5030-5109
  source 1..80: mol_type = other DNA
gagataaaggaatcagatggtaagacaaaaaccaacttgattggaatccttcagagatttctagatggtgatcacgttgt

SEQ ID NO: 21510 - DNA, 80 bp, synthetic construct
  misc_feature 1..80: note = Synthetic: >NC_014397.1-cand-5110-5189
  source 1..80: mol_type = other DNA
ccccataattgaagagatgggagccggaacagtgggtggattcatcaagagacaacaatctaaagttgtgcagaacaaag

SEQ ID NO: 21511 - DNA, 80 bp, synthetic construct
  misc_feature 1..80: note = Synthetic: >NC_014397.1-cand-5190-5269
  source 1..80: mol_type = other DNA
tggtctattatggagttgggatttggagaggcttcatggatggatatcaggtccatctagagatagaaaatgacatagga

SEQ ID NO: 21512 - DNA, 80 bp, synthetic construct
  misc_feature 1..80: note = Synthetic: >NC_014397.1-cand-5270-5349
  source 1..80: mol_type = other DNA
cagcccccaaggcttaggaatgtcacaactaactgtcagagcagcccatgggacctgagtattccaataaggcaatgggc

SEQ ID NO: 21513 - DNA, 80 bp, synthetic construct
  misc_feature 1..80: note = Synthetic: >NC_014397.1-cand-5410-5489
  source 1..80: mol_type = other DNA
atattggatgcattcattcaggatgcaaggacctagcaagccatttggatgcccagtttatattattaagggtgatatgt

SEQ ID NO: 21514 - DNA, 80 bp, synthetic construct
  misc_feature 1..80: note = Synthetic: >NC_014397.1-cand-5430-5509
  source 1..80: mol_type = other DNA
ggatgcaaggacctagcaagccatttggatgcccagtttatattattaagggtgatatgtcagatgtcatcagactgaga

SEQ ID NO: 21515 - DNA, 80 bp, synthetic construct
  misc_feature 1..80: note = Synthetic: >NC_014397.1-cand-5540-5619
  source 1..80: mol_type = other DNA
tctactctcaacttgtacaccaagcaccattctcatcaggacctacacattctatcttacactgcatcagacaatgatct

SEQ ID NO: 21516 - DNA, 80 bp, synthetic construct
  misc_feature 1..80: note = Synthetic: >NC_014397.1-cand-5570-5649
  source 1..80: mol_type = other DNA
tctcatcaggacctacacattctatcttacactgcatcagacaatgatctcagtccaggcattttcaagtcaatatcaga

SEQ ID NO: 21517 - DNA, 80 bp, synthetic construct
  misc_feature 1..80: note = Synthetic: >NC_014397.1-cand-5670-5749
  source 1..80: mol_type = other DNA
tgcaattatttgagagggagccaagcaactgctgggtgagatgtgagtctgtagccccaaaatttatatcagccatcctt

SEQ ID NO: 21518 - DNA, 80 bp, synthetic construct
  misc_feature 1..80: note = Synthetic: >NC_014397.1-cand-5770-5849
  source 1..80: mol_type = other DNA
acagataaagggaattaacagaaccagactctcagagattgtgagaatttgttctgaatcttccctaagatcaaaagtcg

SEQ ID NO: 21519 - DNA, 80 bp, synthetic construct
  misc_feature 1..80: note = Synthetic: >NC_014397.1-cand-5830-5909
  source 1..80: mol_type = other DNA
ttccctaagatcaaaagtcggatctatgttctcatttgtcgccaatgtcgaggaggcccatgatgttgattatgatgcgt

SEQ ID NO: 21520 - DNA, 80 bp, synthetic construct
  misc_feature 1..80: note = Synthetic: >NC_014397.1-cand-5910-5989
  source 1..80: mol_type = other DNA
taatggatctaatgatagaggatgccaagaacaatgcattcagtcatgttgttgactgcatagagttggatgttagtggc

SEQ ID NO: 21521 - DNA, 80 bp, synthetic construct
  misc_feature 1..80: note = Synthetic: >NC_014397.1-cand-5990-6069
  source 1..80: mol_type = other DNA
ccttacgagatggagtcttttgatacatctgatgtcaatctctttgggccagcccattacaaggacatcagttcattatc

SEQ ID NO: 21522 - DNA, 80 bp, synthetic construct
  misc_feature 1..80: note = Synthetic: >NC_014407.1-cand-1250-1329
  source 1..80: mol_type = other DNA
gctttttgttcttgaggagctacaaaaagaagtgaataaggagaataaacatgccctgtcaaagaaaaggaaatggaccc

SEQ ID NO: 21523 - DNA, 80 bp, synthetic construct
  misc_feature 1..80: note = Synthetic: >NC_014407.1-cand-1330-1409
  source 1..80: mol_type = other DNA
acacagaaacttcccagagtgataagaaaaggaggcgttgaagttttggatacagtaccactcactgaggaaacacagta

SEQ ID NO: 21524 - DNA, 80 bp, synthetic construct
  misc_feature 1..80: note = Synthetic: >NC_014407.1-cand-1410-1489
  source 1..80: mol_type = other DNA
caaagttgaagcagtgttgctgccaaactttggaaaagcagctacaactgggaactttcaatctagaggcctaccttatc

SEQ ID NO: 21525 - DNA, 80 bp, synthetic construct
  misc_feature 1..80: note = Synthetic: >NC_014407.1-cand-1520-1599
  source 1..80: mol_type = other DNA
ctttgtgttactctgttgctgttattaatttgcctgaaattcctgatgccatgtgtgaggacacaatgattgtttgggag

SEQ ID NO: 21526 - DNA, 80 bp, synthetic construct
  misc_feature 1..80: note = Synthetic: >NC_014407.1-cand-1570-1649
  source 1..80: mol_type = other DNA
atgtgtgaggacacaatgattgtttgggaggcctataggctggaaacagaacttctatttgctccacaaatggctagttc

SEQ ID NO: 21527 - DNA, 80 bp, synthetic construct
  misc_feature 1..80: note = Synthetic: >NC_014407.1-cand-1650-1729
  source 1..80: mol_type = other DNA
tggttatcaaagggctaatggcactctagctggaacagagggcagtcaactatacttctgggcctgtggaggaggcccct

SEQ ID NO: 21528 - DNA, 80 bp, synthetic construct
  misc_feature 1..80: note = Synthetic: >NC_014407.1-cand-1730-1809
  source 1..80: mol_type = other DNA
tggatgtaattggaattaaccctgaccctgaaaggctaaaggtcaatgaagccctagaaggtccaggcaatactgatgta

SEQ ID NO: 21529 - DNA, 80 bp, synthetic construct
  misc_feature 1..80: note = Synthetic: >NC_014407.1-cand-1810-1889
  source 1..80: mol_type = other DNA
gctagcctgcaagccctcagaaagcaagtaaatgctgcaaatttcccagtagagctctgggttgcagatcccacaaaaaa

SEQ ID NO: 21530 - DNA, 80 bp, synthetic construct
  misc_feature 1..80: note = Synthetic: >NC_014407.1-cand-1930-2009
  source 1..80: mol_type = other DNA
gtaacccctccagttgtgtcctatgggaatcagagtaccactccccttattgatgaaaatggagttggaattttgtgtac

SEQ ID NO: 21531 - DNA, 80 bp, synthetic construct
  misc_feature 1..80: note = Synthetic: >NC_014407.1-cand-1970-2049
  source 1..80: mol_type = other DNA
ctccccttattgatgaaaatggagttggaattttgtgtacttttggcagtgtgtatcttaccagtgctgatatggttgga

SEQ ID NO: 21532 - DNA, 80 bp, synthetic construct
  misc_feature 1..80: note = Synthetic: >NC_014407.1-cand-2050-2129
  source 1..80: mol_type = other DNA
atgacaggccttccaggccttcccactctgagtgctgactacagtaaccagagaacagtacaggctggttatggcagatt

SEQ ID NO: 21533 - DNA, 80 bp, synthetic construct
  misc_feature 1..80: note = Synthetic: >NC_014407.1-cand-2130-2209
  source 1..80: mol_type = other DNA
ttttagagtccactgcagacaaagaagaattaagcacccctacacagtggatatgatgtttagacagtttctgcagcccc

SEQ ID NO: 21534 - DNA, 80 bp, synthetic construct
  misc_feature 1..80: note = Synthetic: >NC_014407.1-cand-2230-2309
  source 1..80: mol_type = other DNA
cagcaacctgctgcagtgcaagaagttacaatggagcaaatgcagcctgctactatccctccaactgttgagggaggcct

SEQ ID NO: 21535 - DNA, 80 bp, synthetic construct
  misc_feature 1..80: note = Synthetic: >NC_014407.1-cand-2290-2369
  source 1..80: mol_type = other DNA
ccaactgttgagggaggccttggctttgctcccaccagtaagtttctgatccaaaatggagagcttatttatcccagcag

SEQ ID NO: 21536 - DNA, 80 bp, synthetic construct
  misc_feature 1..80: note = Synthetic: >NC_014407.1-cand-2370-2449
  source 1..80: mol_type = other DNA
caatgctgctgcagcagctgcaaaaatatctgtagccccaaagaaaaacacagacaacaagaaggaattgtaaccatttt

SEQ ID NO: 21537 - DNA, 80 bp, synthetic construct
  misc_feature 1..80: note = Synthetic: >NC_014407.1-cand-2450-2529
  source 1..80: mol_type = other DNA
attaaacttattccagtggaatacaaagcatatgctgggtaatttctagaaatgaaaagttttattgtatcaataaacta

SEQ ID NO: 21538 - DNA, 80 bp, synthetic construct
  misc_feature 1..80: note = Synthetic: >NC_015150.1-cand-180-259
  source 1..80: mol_type = other DNA
gccatagtgattttgagtgacagggagataactttgcaaattgaggaactaaatgacaggttatttttgcagaatcaact

SEQ ID NO: 21539 - DNA, 80 bp, synthetic construct
  misc_feature 1..80: note = Synthetic: >NC_015150.1-cand-230-309
  source 1..80: mol_type = other DNA
aaatgacaggttatttttgcagaatcaactctagaggaaactgtggtatctgtggtatctacctgctccacttgactgcc

SEQ ID NO: 21540 - DNA, 80 bp, synthetic construct
  misc_feature 1..80: note = Synthetic: >NC_015150.1-cand-330-409
  source 1..80: mol_type = other DNA
tccggtgtgtgacaaacaagtgcattgcggtttccgttgctaggtggcgcttagcaacccctctagataccagtagctaa

SEQ ID NO: 21541 - DNA, 80 bp, synthetic construct
  misc_feature 1..80: note = Synthetic: >NC_015150.1-cand-420-499
  source 1..80: mol_type = other DNA
aaatcattttgccatctaaggtcaacagagaagaagcccgcctaaactaaacgcgccaattttgaacttgggtaagatat

SEQ ID NO: 21542 - DNA, 80 bp, synthetic construct
  misc_feature 1..80: note = Synthetic: >NC_015150.1-cand-510-589
  source 1..80: mol_type = other DNA
ttaactatattgttggatatttttgaactggctgaacaattaagtttaagtactggatttactgttgatgcaatattgtc

SEQ ID NO: 21543 - DNA, 80 bp, synthetic construct
  misc_feature 1..80: note = Synthetic: >NC_015150.1-cand-600-679
  source 1..80: mol_type = other DNA
atagctgctgctactactgaagcagcttggttaattgaaatagaagctgtagatgtagcaggcctaggagccttagaggc

SEQ ID NO: 21544 - DNA, 80 bp, synthetic construct
  misc_feature 1..80: note = Synthetic: >NC_015150.1-cand-670-749
  source 1..80: mol_type = other DNA
ccttagaggccttaactttgactggactgtcagcagaagaattttctctacttagtgctctaccaactgccctgaacaat

SEQ ID NO: 21545 - DNA, 80 bp, synthetic construct
  misc_feature 1..80: note = Synthetic: >NC_015150.1-cand-750-829
  source 1..80: mol_type = other DNA
gccataggaataggaatcttttttcaaactgttacaggtgccagtgctgtggttgctgcaggagtaacaacttttggata

SEQ ID NO: 21546 - DNA, 80 bp, synthetic construct
  misc_feature 1..80: note = Synthetic: >NC_015150.1-cand-830-909
  source 1..80: mol_type = other DNA
ttccaaagaagtaccacttgttagtatggctctcactccttggtttcctcaagtggactatctgtttccaggcttgtctt

SEQ ID NO: 21547 - DNA, 80 bp, synthetic construct
  misc_feature 1..80: note = Synthetic: >NC_015150.1-cand-950-1029
  source 1..80: mol_type = other DNA
atcactgtttcatgctgttggcagggaaatatggagaaatattatgaggcaagctactcagcaaattggatatacttcta

SEQ ID NO: 21548 - DNA, 80 bp, synthetic construct
  misc_feature 1..80: note = Synthetic: >NC_015150.1-cand-960-1039
  source 1..80: mol_type = other DNA
catgctgttggcagggaaatatggagaaatattatgaggcaagctactcagcaaattggatatacttctagagctttggc

SEQ ID NO: 21549 - DNA, 80 bp, synthetic construct
  misc_feature 1..80: note = Synthetic: >NC_015150.1-cand-1070-1149
  source 1..80: mol_type = other DNA
gcttgctcaaattgcagaaaatgcaaggtgggccctaactaatgggcctattcatatttattctagtgttgaagaatatt

SEQ ID NO: 21550 - DNA, 80 bp, synthetic construct
  misc_feature 1..80: note = Synthetic: >NC_015150.1-cand-1150-1229
  source 1..80: mol_type = other DNA
atagaggtttgccttcagtaaatcctatacaactgagacaacagtatagaagtagaggagagctacccccaactagggaa

SEQ ID NO: 21551 - DNA, 80 bp, synthetic construct
  misc_feature 1..80: note = Synthetic: >NC_015150.1-cand-1190-1269
  source 1..80: mol_type = other DNA
acagtatagaagtagaggagagctacccccaactagggaacaatttgaatatcaggaacaagttaggctgaggcgggaga

SEQ ID NO: 21552 - DNA, 80 bp, synthetic construct
  misc_feature 1..80: note = Synthetic: >NC_015150.1-cand-1330-1409
  source 1..80: mol_type = other DNA
caaatcaaagagtatctcaagattggatgcttcctctaattctaggtttgtatggtgatataactccaacctgggagaaa

SEQ ID NO: 21553 - DNA, 80 bp, synthetic construct
  misc_feature 1..80: note = Synthetic: >NC_015150.1-cand-1390-1469
  source 1..80: mol_type = other DNA
taactccaacctgggagaaagagctgagtaaattggaaaaagaagaatatggccccccaaagaaaaaggcaagagtgcgg

SEQ ID NO: 21554 - DNA, 80 bp, synthetic construct
  misc_feature 1..80: note = Synthetic: >NC_015783.1-cand-3000-3079
  source 1..80: mol_type = other DNA
gggtgtttcacttcatcggtgtctacctctaaaagtcactaagcactccgagcgtaagcgaggagtgcgacccccctgcc

SEQ ID NO: 21555 - DNA, 80 bp, synthetic construct
  misc_feature 1..80: note = Synthetic: >NC_015783.1-cand-3100-3179
  source 1..80: mol_type = other DNA
tccggcgctacgccttcggctgcgccggacgcctcggaccccccctcgaccagaatcgctcgcgcgattcggacctgcgg

SEQ ID NO: 21556 - DNA, 80 bp, synthetic construct
  misc_feature 1..80: note = Synthetic: >NC_015783.1-cand-3270-3349
  source 1..80: mol_type = other DNA
gcttcgccataaggcctttaactttgggtcgcttgtcagcagcttccgggtccgcctggaggccgccattttacattcgg

SEQ ID NO: 21557 - DNA, 80 bp, synthetic construct
  misc_feature 1..80: note = Synthetic: >NC_015783.1-cand-3320-3399
  source 1..80: mol_type = other DNA
tccgcctggaggccgccattttacattcggccgccattttaggccctcgcgggcctccatagtcgcacatcagtgacgtc

SEQ ID NO: 21558 - DNA, 80 bp, synthetic construct
  misc_feature 1..80: note = Synthetic: >NC_015783.1-cand-3440-3519
  source 1..80: mol_type = other DNA
aggacggcgtgtaacccggaagtcatccccatcacgtgacctgacgtcacggccgccattttgtgctgtccgccatcttg

SEQ ID NO: 21559 - DNA, 80 bp, synthetic construct
  misc_feature 1..80: note = Synthetic: >NC_015783.1-cand-3480-3559
  source 1..80: mol_type = other DNA
ctgacgtcacggccgccattttgtgctgtccgccatcttgtgacttccttccgctttttgtaaaaaaaagaggaagtgtg

SEQ ID NO: 21560 - DNA, 80 bp, synthetic construct
  misc_feature 1..80: note = Synthetic: >NC_015783.1-cand-3600-3679
  source 1..80: mol_type = other DNA
ccagggggcgctacgcgcccccccccgcgcatgcgcgggtcccccccctcgggggggctccgccccccggcccccccccg

SEQ ID NO: 21561 - DNA, 80 bp, synthetic construct
  misc_feature 1..80: note = Synthetic: >NC_019843.3-cand-0-79
  source 1..80: mol_type = other DNA
taagtgaatagcttggctatctcacttcccctcgttctcttgcagaactttgattttaacgaacttaaataaaagccctg

SEQ ID NO: 21562 - DNA, 80 bp, synthetic construct
  misc_feature 1..80: note = Synthetic: >NC_019843.3-cand-80-159
  source 1..80: mol_type = other DNA
ttgtttagcgtatcgttgcacttgtctggtgggattgtggcattaatttgcctgctcatctaggcagtggacatatgctc

SEQ ID NO: 21563 - DNA, 80 bp, synthetic construct
  misc_feature 1..80: note = Synthetic: >NC_019843.3-cand-160-239
  source 1..80: mol_type = other DNA
aacactgggtataattctaattgaatactatttttcagttagagcgtcgtgtctcttgtacgtctcggtcacaatacacg

SEQ ID NO: 21564 - DNA, 80 bp, synthetic construct
  misc_feature 1..80: note = Synthetic: >NC_019843.3-cand-270-349
  source 1..80: mol_type = other DNA
catcatgtctttcgtggctggtgtgaccgcgcaaggtgcgcgcggtacgtatcgagcagcgctcaactctgaaaaacatc

SEQ ID NO: 21565 - DNA, 80 bp, synthetic construct
  misc_feature 1..80: note = Synthetic: >NC_019843.3-cand-320-399
  source 1..80: mol_type = other DNA
atcgagcagcgctcaactctgaaaaacatcaagaccatgtgtctctaactgtgccactctgtggttcaggaaacctggtt

SEQ ID NO: 21566 - DNA, 80 bp, synthetic construct
  misc_feature 1..80: note = Synthetic: >NC_019843.3-cand-400-479
  source 1..80: mol_type = other DNA
gaaaaactttcaccatggttcatggatggcgaaaatgcctatgaagtggtgaaggccatgttacttaaaaaggagccact

SEQ ID NO: 21567 - DNA, 80 bp, synthetic construct
  misc_feature 1..80: note = Synthetic: >NC_019843.3-cand-480-559
  source 1..80: mol_type = other DNA
tctctatgtgcccatccggctggctggacacactagacacctcccaggtcctcgtgtgtacctggttgagaggctcattg

SEQ ID NO: 21568 - DNA, 80 bp, synthetic construct
  misc_feature 1..80: note = Synthetic: >NC_019843.3-cand-560-639
  source 1..80: mol_type = other DNA
cttgtgaaaatccattcatggttaaccaattggcttatagctctagtgcaaatggcagcctggttggcacaactttgcag

SEQ ID NO: 21569 - DNA, 80 bp, synthetic construct
  misc_feature 1..80: note = Synthetic: >NC_019843.3-cand-5780-5859
  source 1..80: mol_type = other DNA
cacccgtaacatattcaccagctacaattttagctggtagtgtctacactaatagctgccttgtatcgtctgatggacaa

SEQ ID NO: 21570 - DNA, 80 bp, synthetic construct
  misc_feature 1..80: note = Synthetic: >NC_019843.3-cand-5860-5939
  source 1..80: mol_type = other DNA
cctggcggtgatgctattagtttgagttttaataaccttttagggtttgattctagtaaaccagtcactaagaaatacac

SEQ ID NO: 21571 - DNA, 80 bp, synthetic construct
  misc_feature 1..80: note = Synthetic: >NC_019843.3-cand-5940-6019
  source 1..80: mol_type = other DNA
ttactccttcttgcctaaagaagacggcgatgtgttgttggctgagtttgacacttatgaccctatttataagaatggtg

SEQ ID NO: 21572 - DNA, 80 bp, synthetic construct
  misc_feature 1..80: note = Synthetic: >NC_019843.3-cand-6020-6099
  source 1..80: mol_type = other DNA
ccatgtataaaggcaaaccaattctttgggtcaataaagcatcttatgatactaatcttaataagttcaatagagctagt

SEQ ID NO: 21573 - DNA, 80 bp, synthetic construct
  misc_feature 1..80: note = Synthetic: >NC_019843.3-cand-6100-6179
  source 1..80: mol_type = other DNA
ttgcgtcaaatttttgacgtagcccccattgaactcgaaaataaattcacacctttgagtgtggagtctacaccagttga

SEQ ID NO: 21574 - DNA, 80 bp, synthetic construct
  misc_feature 1..80: note = Synthetic: >NC_019843.3-cand-6180-6259
  source 1..80: mol_type = other DNA
acctccaactgtagatgtggtagcacttcaacaggaaatgacaattgtcaaatgtaagggtttaaataaacctttcgtga

SEQ ID NO: 21575 - DNA, 80 bp, synthetic construct
  misc_feature 1..80: note = Synthetic: >NC_019843.3-cand-6260-6339
  source 1..80: mol_type = other DNA
aggacaatgtcagtttcgttgctgatgattcaggtactcccgttgttgagtatctgtctaaagaagacctacatacattg

SEQ ID NO: 21576 - DNA, 80 bp, synthetic construct
  misc_feature 1..80: note = Synthetic: >NC_019843.3-cand-6340-6419
  source 1..80: mol_type = other DNA
tatgtagaccctaagtatcaagtcattgtcttaaaagacaatgtactttcttctatgcttagattgcacaccgttgagtc

SEQ ID NO: 21577 - DNA, 80 bp, synthetic construct
  misc_feature 1..80: note = Synthetic: >NC_019843.3-cand-6400-6479
  source 1..80: mol_type = other DNA
agattgcacaccgttgagtcaggtgatattaacgttgttgcagcttccggatctttgacacgtaaagtgaagttactatt

SEQ ID NO: 21578 - DNA, 80 bp, synthetic construct
  misc_feature 1..80: note = Synthetic: >NC_019843.3-cand-6480-6559
  source 1..80: mol_type = other DNA
tagggcttcattttatttcaaagaatttgctacccgcactttcactgctaccactgctgtaggtagttgtataaagagtg

SEQ ID NO: 21579 - DNA, 80 bp, synthetic construct
  misc_feature 1..80: note = Synthetic: >NC_019843.3-cand-6560-6639
  source 1..80: mol_type = other DNA
tagtgcggcatctaggtgttactaaaggcatattgacaggctgttttagttttgccaagatgttatttatgcttccacta

SEQ ID NO: 21580 - DNA, 80 bp, synthetic construct
  misc_feature 1..80: note = Synthetic: >NC_019843.3-cand-6640-6719
  source 1..80: mol_type = other DNA
gcttactttagtgattcaaaactcggcaccacagaggttaaagtgagtgctttgaaaacagccggcgttgtgacaggtaa

SEQ ID NO: 21581 - DNA, 80 bp, synthetic construct
  misc_feature 1..80: note = Synthetic: >NC_019843.3-cand-6720-6799
  source 1..80: mol_type = other DNA
tgttgtaaaacagtgttgcactgctgctgttgatttaagtatggataagttgcgccgtgtggattggaaatcaaccctac

SEQ ID NO: 21582 - DNA, 80 bp, synthetic construct
  misc_feature 1..80: note = Synthetic: >NC_019843.3-cand-6800-6879
  source 1..80: mol_type = other DNA
ggttgttacttatgttatgcacaactatggtattgttgtcttctgtgtatcacttgtatgtcttcaatcaggtcttatca

SEQ ID NO: 21583 - DNA, 80 bp, synthetic construct
  misc_feature 1..80: note = Synthetic: >NC_019843.3-cand-6880-6959
  source 1..80: mol_type = other DNA
agtgatgttatgtttgaagatgcccaaggtttgaaaaagttctacaaagaagttagagcttacctaggaatctcttctgc

SEQ ID NO: 21584 - DNA, 80 bp, synthetic construct
  misc_feature 1..80: note = Synthetic: >NC_019843.3-cand-6960-7039
  source 1..80: mol_type = other DNA
ttgtgacggtcttgcttcagcttatagggcgaattcctttgatgtacctacattctgcgcaaaccgttctgcaatgtgta

SEQ ID NO: 21585 - DNA, 80 bp, synthetic construct
  misc_feature 1..80: note = Synthetic: >NC_019843.3-cand-13440-13519
  source 1..80: mol_type = other DNA
tctattgtaaatgcccgaatagaaccctgttcaagtggtttgtccactgatgtcgtctttagggcatttgacatctgcaa

SEQ ID NO: 21586 - DNA, 80 bp, synthetic construct
  misc_feature 1..80: note = Synthetic: >NC_019843.3-cand-13520-13599
  source 1..80: mol_type = other DNA
ctataaggctaaggttgctggtattggaaaatactacaagactaatacttgtaggtttgtagaattagatgaccaagggc

SEQ ID NO: 21587 - DNA, 80 bp, synthetic construct
  misc_feature 1..80: note = Synthetic: >NC_019843.3-cand-13600-13679
  source 1..80: mol_type = other DNA
atcatttagactcctattttgtcgttaagaggcatactatggagaattatgaactagagaagcactgttacgacttgtta

SEQ ID NO: 21588 - DNA, 80 bp, synthetic construct
  misc_feature 1..80: note = Synthetic: >NC_019843.3-cand-13680-13759
  source 1..80: mol_type = other DNA
cgtgactgtgatgctgtagctccccatgatttcttcatctttgatgtagacaaagttaaaacacctcatattgtacgtca

SEQ ID NO: 21589 - DNA, 80 bp, synthetic construct
  misc_feature 1..80: note = Synthetic: >NC_019843.3-cand-13760-13839
  source 1..80: mol_type = other DNA
gcgtttaactgagtacactatgatggatcttgtatatgccctgaggcactttgatcaaaatagcgaagtgcttaaggcta

SEQ ID NO: 21590 - DNA, 80 bp, synthetic construct
  misc_feature 1..80: note = Synthetic: >NC_019843.3-cand-13840-13919
  source 1..80: mol_type = other DNA
tcttagtgaagtatggttgctgtgatgttacctactttgaaaataaactctggtttgattttgttgaaaatcccagtgtt

SEQ ID NO: 21591 - DNA, 80 bp, synthetic construct
  misc_feature 1..80: note = Synthetic: >NC_019843.3-cand-13920-13999
  source 1..80: mol_type = other DNA
attggtgtttatcataaacttggagaacgtgtacgccaagctatcttaaacactgttaaattttgtgaccacatggtcaa

SEQ ID NO: 21592 - DNA, 80 bp, synthetic construct
  misc_feature 1..80: note = Synthetic: >NC_019843.3-cand-14000-14079
  source 1..80: mol_type = other DNA
ggctggtttagtcggtgtgctcacactagacaaccaggaccttaatggcaagtggtatgattttggtgacttcgtaatca

SEQ ID NO: 21593 - DNA, 80 bp, synthetic construct
  misc_feature 1..80: note = Synthetic: >NC_019843.3-cand-14080-14159
  source 1..80: mol_type = other DNA
ctcaacctggttcaggagtagctatagttgatagctactattcttatttgatgcctgtgctctcaatgaccgattgtctg

SEQ ID NO: 21594 - DNA, 80 bp, synthetic construct
  misc_feature 1..80: note = Synthetic: >NC_019843.3-cand-14160-14239
  source 1..80: mol_type = other DNA
gccgctgagacacatagggattgtgattttaataaaccactcattgagtggccacttactgagtatgattttactgatta

SEQ ID NO: 21595 - DNA, 80 bp, synthetic construct
  misc_feature 1..80: note = Synthetic: >NC_019843.3-cand-14240-14319
  source 1..80: mol_type = other DNA
taaggtacaactctttgagaagtactttaaatattgggatcagacgtatcacgcaaattgcgttaattgtactgatgacc

SEQ ID NO: 21596 - DNA, 80 bp, synthetic construct
  misc_feature 1..80: note = Synthetic: >NC_019843.3-cand-14310-14389
  source 1..80: mol_type = other DNA
actgatgaccgttgtgtgttacattgtgctaatttcaatgtattgtttgctatgaccatgcctaagacttgtttcggacc

SEQ ID NO: 21597 - DNA, 80 bp, synthetic construct
  misc_feature 1..80: note = Synthetic: >NC_019843.3-cand-14390-14469
  source 1..80: mol_type = other DNA
catagtccgaaagatctttgttgatggcgtgccatttgtagtatcttgtggttatcactacaaagaattaggtttagtca

SEQ ID NO: 21598 - DNA, 80 bp, synthetic construct
  misc_feature 1..80: note = Synthetic: >NC_019843.3-cand-14470-14549
  source 1..80: mol_type = other DNA
tgaatatggatgttagtctccatagacataggctctctcttaaggagttgatgatgtatgccgctgatccagccatgcac

SEQ ID NO: 21599 - DNA, 80 bp, synthetic construct
  misc_feature 1..80: note = Synthetic: >NC_019843.3-cand-14550-14629
  source 1..80: mol_type = other DNA
attgcctcctctaacgcttttcttgatttgaggacatcatgttttagtgtcgctgcacttacaactggtttgacttttca

SEQ ID NO: 21600 - DNA, 80 bp, synthetic construct
  misc_feature 1..80: note = Synthetic: >NC_019843.3-cand-14630-14709
  source 1..80: mol_type = other DNA
aactgtgcggcctggcaattttaaccaagacttctatgatttcgtggtatctaaaggtttctttaaggagggctcttcag

SEQ ID NO: 21601 - DNA, 80 bp, synthetic construct
  misc_feature 1..80: note = Synthetic: >NC_019843.3-cand-21070-21149
  source 1..80: mol_type = other DNA
ataataatcttgctcttggtgggtctgttgctattaaaataacagaacactcttggagcgttgaactttatgaacttatg

SEQ ID NO: 21602 - DNA, 80 bp, synthetic construct
  misc_feature 1..80: note = Synthetic: >NC_019843.3-cand-21150-21229
  source 1..80: mol_type = other DNA
ggaaaatttgcttggtggactgttttctgcaccaatgcaaatgcatcctcatctgaaggattcctcttaggtattaatta

SEQ ID NO: 21603 - DNA, 80 bp, synthetic construct
  misc_feature 1..80: note = Synthetic: >NC_019843.3-cand-21230-21309
  source 1..80: mol_type = other DNA
cttgggtactattaaagaaaatatagatggtggtgctatgcacgccaactatatattttggagaaattccactcctatga

SEQ ID NO: 21604 - DNA, 80 bp, synthetic construct
  misc_feature 1..80: note = Synthetic: >NC_019843.3-cand-21310-21389
  source 1..80: mol_type = other DNA
atctgagtacttactcactttttgatttatccaagtttcaattaaaattaaaaggaacaccagttcttcaattaaaggag

SEQ ID NO: 21605 - DNA, 80 bp, synthetic construct
  misc_feature 1..80: note = Synthetic: >NC_019843.3-cand-21390-21469
  source 1..80: mol_type = other DNA
agtcaaattaacgaactcgtaatatctctcctgtcgcagggtaagttacttatccgtgacaatgatacactcagtgtttc

SEQ ID NO: 21606 - DNA, 80 bp, synthetic construct
  misc_feature 1..80: note = Synthetic: >NC_019843.3-cand-21470-21549
  source 1..80: mol_type = other DNA
tactgatgttcttgttaacacctacagaaagttacgttgatgtagggccagattctgttaagtctgcttgtattgaggtt

SEQ ID NO: 21607 - DNA, 80 bp, synthetic construct
  misc_feature 1..80: note = Synthetic: >NC_019843.3-cand-21550-21629
  source 1..80: mol_type = other DNA
gatatacaacagactttctttgataaaacttggcctaggccaattgatgtttctaaggctgacggtattatataccctca

SEQ ID NO: 21608 - DNA, 80 bp, synthetic construct
  misc_feature 1..80: note = Synthetic: >NC_019843.3-cand-21630-21709
  source 1..80: mol_type = other DNA
aggccgtacatattctaacataactatcacttatcaaggtctttttccctatcagggagaccatggtgatatgtatgttt

SEQ ID NO: 21609 - DNA, 80 bp, synthetic construct
  misc_feature 1..80: note = Synthetic: >NC_019843.3-cand-21710-21789
  source 1..80: mol_type = other DNA
actctgcaggacatgctacaggcacaactccacaaaagttgtttgtagctaactattctcaggacgtcaaacagtttgct

SEQ ID NO: 21610 - DNA, 80 bp, synthetic construct
  misc_feature 1..80: note = Synthetic: >NC_019843.3-cand-21790-21869
  source 1..80: mol_type = other DNA
aatgggtttgtcgtccgtataggagcagctgccaattccactggcactgttattattagcccatctaccagcgctactat

SEQ ID NO: 21611 - DNA, 80 bp, synthetic construct
  misc_feature 1..80: note = Synthetic: >NC_019843.3-cand-21870-21949
  source 1..80: mol_type = other DNA
acgaaaaatttaccctgcttttatgctgggttcttcagttggtaatttctcagatggtaaaatgggccgcttcttcaatc

SEQ ID NO: 21612 - DNA, 80 bp, synthetic construct
  misc_feature 1..80: note = Synthetic: >NC_019843.3-cand-21950-22029
  source 1..80: mol_type = other DNA
atactctagttcttttgcccgatggatgtggcactttacttagagctttttattgtattctagagcctcgctctggaaat

SEQ ID NO: 21613 - DNA, 80 bp, synthetic construct
  misc_feature 1..80: note = Synthetic: >NC_019843.3-cand-22030-22109
  source 1..80: mol_type = other DNA
cattgtcctgctggcaattcctatacttcttttgccacttatcacactcctgcaacagattgttctgatggcaattacaa

SEQ ID NO: 21614 - DNA, 80 bp, synthetic construct
  misc_feature 1..80: note = Synthetic: >NC_019843.3-cand-22110-22189
  source 1..80: mol_type = other DNA
tcgtaatgccagtctgaactcttttaaggagtattttaatttacgtaactgcacctttatgtacacttataacattaccg

SEQ ID NO: 21615 - DNA, 80 bp, synthetic construct
  misc_feature 1..80: note = Synthetic: >NC_019843.3-cand-22190-22269
  source 1..80: mol_type = other DNA
aagatgagattttagagtggtttggcattacacaaactgctcaaggtgttcacctcttctcatctcggtatgttgatttg

SEQ ID NO: 21616 - DNA, 80 bp, synthetic construct
  misc_feature 1..80: note = Synthetic: >NC_019843.3-cand-22270-22349
  source 1..80: mol_type = other DNA
tacggcggcaatatgtttcaatttgccaccttgcctgtttatgatactattaagtattattctatcattcctcacagtat

SEQ ID NO: 21617 - DNA, 80 bp, synthetic construct
  misc_feature 1..80: note = Synthetic: >NC_029646.1-cand-1950-2029
  source 1..80: mol_type = other DNA
ctggctccgcagggtggcttcgacaagaacggaaacaccccacatgggaaaggcgtcatgaaaaccctcactactggttc

SEQ ID NO: 21618 - DNA, 80 bp, synthetic construct
  misc_feature 1..80: note = Synthetic: >NC_029646.1-cand-2030-2109
  source 1..80: mol_type = other DNA
cctcatcgctcgagcatcagggctactccatgagaggttagatgagtacgagttacagggcccaacccccactaccttca

SEQ ID NO: 21619 - DNA, 80 bp, synthetic construct
  misc_feature 1..80: note = Synthetic: >NC_029646.1-cand-2110-2189
  source 1..80: mol_type = other DNA
actttgaccgcaacaaggtgcttgcgttcagacagcttgctgctgaaaacaagtacgggttgatggacacaatgagagtc

SEQ ID NO: 21620 - DNA, 80 bp, synthetic construct
  misc_feature 1..80: note = Synthetic: >NC_029646.1-cand-2190-2269
  source 1..80: mol_type = other DNA
ggaaaacagctcaaggatgtcaggaccatgccagagctcagacaagcactcaagaacatctcaatcaagagttgccagat

SEQ ID NO: 21621 - DNA, 80 bp, synthetic construct
  misc_feature 1..80: note = Synthetic: >NC_029646.1-cand-2270-2349
  source 1..80: mol_type = other DNA
agtgtatggtggctgcacctatatgcttgagtctgatggcaagggtgatgtgaaagttgacagagttcagaacgccactg

SEQ ID NO: 21622 - DNA, 80 bp, synthetic construct
  misc_feature 1..80: note = Synthetic: >NC_029646.1-cand-2350-2429
  source 1..80: mol_type = other DNA
tgcagaccaacaatgaactggccggcgccctacaccatcttaggtgtgccaggattagatattatgtcaagtgcattcag

SEQ ID NO: 21623 - DNA, 80 bp, synthetic construct
  misc_feature 1..80: note = Synthetic: >NC_029646.1-cand-2440-2519
  source 1..80: mol_type = other DNA
attccatcatccaaattgctggagctgcatttgtcaccacgcgcattgtcaagcgcatgaacatacaagacctttggtcc

SEQ ID NO: 21624 - DNA, 80 bp, synthetic construct
  misc_feature 1..80: note = Synthetic: >NC_029646.1-cand-2520-2599
  source 1..80: mol_type = other DNA
aagccacaggtggaagatacagaggagactgctagcaaggatgggtgcccaaaacccaaggatgatgacgagttcgttgt

SEQ ID NO: 21625 - DNA, 80 bp, synthetic construct
  misc_feature 1..80: note = Synthetic: >NC_029646.1-cand-2600-2679
  source 1..80: mol_type = other DNA
ttcatccgacgacatcaaaaccgagggcaagaaaggaaagaacaagtctggccgtggtaagaagcacacagcattctcaa

SEQ ID NO: 21626 - DNA, 80 bp, synthetic construct
  misc_feature 1..80: note = Synthetic: >NC_029646.1-cand-2680-2759
  source 1..80: mol_type = other DNA
gcaaaggcctcagtgatgaggagtacgatgagtacaaaagaatcagagaagaaagaaacggcaagtactctatagaggaa

SEQ ID NO: 21627 - DNA, 80 bp, synthetic construct
  misc_feature 1..80: note = Synthetic: >NC_029646.1-cand-2760-2839
  source 1..80: mol_type = other DNA
taccttcaggacagagataagtattatgaggaggtggccatcgccagggcgaccgaagaggacttctgtgaagaagaaga

SEQ ID NO: 21628 - DNA, 80 bp, synthetic construct
  misc_feature 1..80: note = Synthetic: >NC_029646.1-cand-2840-2919
  source 1..80: mol_type = other DNA
ggccaagatccgacaaaggatttttaggccaacaaggaagcaacgcaaagaggagagggcctctctcggcttggtcacag

SEQ ID NO: 21629 - DNA, 80 bp, synthetic construct
  misc_feature 1..80: note = Synthetic: >NC_029646.1-cand-2920-2999
  source 1..80: mol_type = other DNA
gttctgaaatcaggaagaggaacccagacgacttcaagcctaaaggaaagctgtgggctgatgacgacaggagtgttgac

SEQ ID NO: 21630 - DNA, 80 bp, synthetic construct
  misc_feature 1..80: note = Synthetic: >NC_029646.1-cand-2990-3069
  source 1..80: mol_type = other DNA
gagtgttgactacaatgagagactcaattttgaagccccaccaagcatttggtcgaggatagtcaactttggttcaggtt

SEQ ID NO: 21631 - DNA, 80 bp, synthetic construct
  misc_feature 1..80: note = Synthetic: >NC_029646.1-cand-3150-3229
  source 1..80: mol_type = other DNA
tccatcaagcaaattcagatacacaaatcgggtgaattctgtcgcttgaggtttccaaaaccaatcagaactgatgtgac

SEQ ID NO: 21632 - DNA, 80 bp, synthetic construct
  misc_feature 1..80: note = Synthetic: >NC_029646.1-cand-3160-3239
  source 1..80: mol_type = other DNA
aaattcagatacacaaatcgggtgaattctgtcgcttgaggtttccaaaaccaatcagaactgatgtgacaggcatgatc

SEQ ID NO: 21633 - DNA, 80 bp, synthetic construct
  misc_feature 1..80: note = Synthetic: >NC_034563.1-cand-320-399
  source 1..80: mol_type = other DNA
agctagtttcaaaggattatgcatgctgaagcacaggatgatagaagaatcttacaaaaatagacggtcagtaatctgtt

SEQ ID NO: 21634 - DNA, 80 bp, synthetic construct
  misc_feature 1..80: note = Synthetic: >NC_034563.1-cand-410-489
  source 1..80: mol_type = other DNA
ttgtaattcgacattttgcaagccaacagtttatatggtagtcccagttcatgcctgtaacatgatgaaaagctgcctta

SEQ ID NO: 21635 - DNA, 80 bp, synthetic construct
  misc_feature 1..80: note = Synthetic: >NC_034563.1-cand-490-569
  source 1..80: mol_type = other DNA
taggtctagggccttatagggttcaggttgtttatgaaaggacttattgcacagttgggatattaacagaaggaaagtgc

SEQ ID NO: 21636 - DNA, 80 bp, synthetic construct
  misc_feature 1..80: note = Synthetic: >NC_034563.1-cand-570-649
  source 1..80: mol_type = other DNA
tttgttccagataaaacaatcttaagttcaaccaaaagaggaatgtttgttgtgactagtgtgcaggtaacatgcttttt

SEQ ID NO: 21637 - DNA, 80 bp, synthetic construct
  misc_feature 1..80: note = Synthetic: >NC_034563.1-cand-660-739
  source 1..80: mol_type = other DNA
aaaggtcatacttacaagatcctagaagaggcaaaaaaatcaattaacaataaatgcaatgacactgaaaacaaagtcca

SEQ ID NO: 21638 - DNA, 80 bp, synthetic construct
  misc_feature 1..80: note = Synthetic: >NC_034563.1-cand-740-819
  source 1..80: mol_type = other DNA
aggttattacatctgtatcttgggtggtaattctgctccagtttatgtcccttctttaaatgattttaggtcaatggaga

SEQ ID NO: 21639 - DNA, 80 bp, synthetic construct
  misc_feature 1..80: note = Synthetic: >NC_034563.1-cand-850-929
  source 1..80: mol_type = other DNA
gggaagatcatgacctccctggagaagaaatatctacttaccagattgcaggaccaactgaagccaagatacctcactct

SEQ ID NO: 21640 - DNA, 80 bp, synthetic construct
  misc_feature 1..80: note = Synthetic: >NC_034563.1-cand-900-979
  source 1..80: mol_type = other DNA
ggaccaactgaagccaagatacctcactctgttagttcaaaaaatcttgcactggtggcttattccggaaacccatcata

SEQ ID NO: 21641 - DNA, 80 bp, synthetic construct
  misc_feature 1..80: note = Synthetic: >NC_034563.1-cand-980-1059
  source 1..80: mol_type = other DNA
ttcatccattagtattgtcacctcatctcaaggtgggcggtttgtcttcagtcctggtttatttcctaacttgaaccaaa

SEQ ID NO: 21642 - DNA, 80 bp, synthetic construct
  misc_feature 1..80: note = Synthetic: >NC_034563.1-cand-1060-1139
  source 1..80: mol_type = other DNA
cacattgtgaaaaaaatgctttaccagtggtttggagaggaatgattgacttgtcaggttactatgaagctgtccatcca

SEQ ID NO: 21643 - DNA, 80 bp, synthetic construct
  misc_feature 1..80: note = Synthetic: >NC_034563.1-cand-1140-1219
  source 1..80: mol_type = other DNA
tgtaatgttttctgtgttctttcagggcctggtgcatcttgtgaagctttctcagaaggtgggatctttaacataacttc

SEQ ID NO: 21644 - DNA, 80 bp, synthetic construct
  misc_feature 1..80: note = Synthetic: >NC_034563.1-cand-1220-1299
  source 1..80: mol_type = other DNA
cccaacttgcctcgtgtcaaagcaaaatcggtttaaatcagcagaacagcaaataaattttgtctgtcaacgggttgaca

SEQ ID NO: 21645 - DNA, 80 bp, synthetic construct
  misc_feature 1..80: note = Synthetic: >NC_034563.1-cand-1290-1369
  source 1..80: mol_type = other DNA
cgggttgacatggatatcattgtatactgtaatggacaaaagaaaacaattctgactaaaacacttgttattggtcagtg

SEQ ID NO: 21646 - DNA, 80 bp, synthetic construct
  misc_feature 1..80: note = Synthetic: >NC_034563.1-cand-1370-1449
  source 1..80: mol_type = other DNA
tatctatactataacaagccttttttctttaatgccaggagtagcacattcaatcgcaatagaactctgtgtcccgggct

SEQ ID NO: 21647 - DNA, 80 bp, synthetic construct
  misc_feature 1..80: note = Synthetic: >NC_034563.1-cand-1450-1529
  source 1..80: mol_type = other DNA
ttcatggatgggctacagctgcattgttgacaaccttttgttttggttggatcttaatccctactttgacatttgcagtc

SEQ ID NO: 21648 - DNA, 80 bp, synthetic construct
  misc_feature 1..80: note = Synthetic: >NC_034563.1-cand-1530-1609
  source 1..80: mol_type = other DNA
cttgtggtcttaaagtttattgcaaatatactccacacaaactcgcaagaaaataggttcaagatgattttaagaaaaat

SEQ ID NO: 21649 - DNA, 80 bp, synthetic construct
  misc_feature 1..80: note = Synthetic: >NC_039218.1-cand-7790-7869
  source 1..80: mol_type = other DNA
gggtggtcatactacgctgcttccaggccagctgtcatgggagtgaaggcctacacgataggagggaaaggccatgaggt

SEQ ID NO: 21650 - DNA, 80 bp, synthetic construct
  misc_feature 1..80: note = Synthetic: >NC_039218.1-cand-7870-7949
  source 1..80: mol_type = other DNA
cccaagactgatcacaagcctcggatggaacctcatcaagtttaggaccggaatggatgtgtactccctagaggcacaca

SEQ ID NO: 21651 - DNA, 80 bp, synthetic construct
  misc_feature 1..80: note = Synthetic: >NC_039218.1-cand-7950-8029
  source 1..80: mol_type = other DNA
gggctgacaccatcctttgtgacattggtgagagtagtccggatcccctggcggaaggagagaggagccgccgtgtcatc

SEQ ID NO: 21652 - DNA, 80 bp, synthetic construct
  misc_feature 1..80: note = Synthetic: >NC_039218.1-cand-8030-8109
  source 1..80: mol_type = other DNA
ctcctcatggagaaatggaaactccgcaaccctgacgcgtcctgcgtgttcaaggttttggctccgtacagaccagaggt

SEQ ID NO: 21653 - DNA, 80 bp, synthetic construct
  misc_feature 1..80: note = Synthetic: >NC_039218.1-cand-8150-8229
  source 1..80: mol_type = other DNA
gggttggtccgcgtccctttctcccgcaattccacgcatgagatgtacttctccactgcgatcagtggtaacattatcaa

SEQ ID NO: 21654 - DNA, 80 bp, synthetic construct
  misc_feature 1..80: note = Synthetic: >NC_039218.1-cand-8190-8269
  source 1..80: mol_type = other DNA
agatgtacttctccactgcgatcagtggtaacattatcaactcagtgaacactcagtccaggaagttgttggccagattt

SEQ ID NO: 21655 - DNA, 80 bp, synthetic construct
  misc_feature 1..80: note = Synthetic: >NC_039218.1-cand-8290-8369
  source 1..80: mol_type = other DNA
caaggtccccgaggtggatctgggaactggcacacgctgtgtggtactggcagaagacaaggtcagggaagctgatgtgg

SEQ ID NO: 21656 - DNA, 80 bp, synthetic construct
  misc_feature 1..80: note = Synthetic: >NC_039218.1-cand-8360-8439
  source 1..80: mol_type = other DNA
gctgatgtggccgaaagaatagctgccctcaagacccaatatggtgattcttggcatgtggacaaagaacatccatacag

SEQ ID NO: 21657 - DNA, 80 bp, synthetic construct
  misc_feature 1..80: note = Synthetic: >NC_039218.1-cand-8460-8539
  source 1..80: mol_type = other DNA
gctacaagacagaggccacaggttcggctgcctctctgatcaacggagtggtgaaactcctcagttggccctggaatgct

SEQ ID NO: 21658 - DNA, 80 bp, synthetic construct
  misc_feature 1..80: note = Synthetic: >NC_039218.1-cand-8520-8599
  source 1..80: mol_type = other DNA
tcagttggccctggaatgctagggaggatgtggtgcgcatggcaatgacggacacaacggcctttggccagcagagggtt

SEQ ID NO: 21659 - DNA, 80 bp, synthetic construct
  misc_feature 1..80: note = Synthetic: >NC_039218.1-cand-8600-8679
  source 1..80: mol_type = other DNA
tttaaggaaaaggtggacaccaaagcgcaggagccgcaggtgggaaccaagatcatcatgagggccgttaacgactggat

SEQ ID NO: 21660 - DNA, 80 bp, synthetic construct
  misc_feature 1..80: note = Synthetic: >NC_039218.1-cand-8680-8759
  source 1..80: mol_type = other DNA
ctttgaaagacttgcgggaaagaaaacaccacgactgtgcacgcgagaggaattcatcgcaaaggtgcgctcaaacgctg

SEQ ID NO: 21661 - DNA, 80 bp, synthetic construct
  misc_feature 1..80: note = Synthetic: >NC_039218.1-cand-8760-8839
  source 1..80: mol_type = other DNA
cgctcggagcctggtcagatgaacaaaatcgctggccaaacgcccgagaagcagtggaggaccccgagttttggaggctc

SEQ ID NO: 21662 - DNA, 80 bp, synthetic construct
  misc_feature 1..80: note = Synthetic: >NC_039218.1-cand-8840-8919
  source 1..80: mol_type = other DNA
gttgatgaggaaagagagagacatcttggaggacggtgtgcccagtgtgtgtacaacatgatgggtaagagagagaagaa

SEQ ID NO: 21663 - DNA, 80 bp, synthetic construct
  misc_feature 1..80: note = Synthetic: >NC_039218.1-cand-8860-8939
  source 1..80: mol_type = other DNA
acatcttggaggacggtgtgcccagtgtgtgtacaacatgatgggtaagagagagaagaaactcggtgagttcggtgtcg

SEQ ID NO: 21664 - DNA, 80 bp, synthetic construct
  misc_feature 1..80: note = Synthetic: >NC_039218.1-cand-9070-9149
  source 1..80: mol_type = other DNA
tcttaactacctgggatggcatttgaagaagctgtccgaactcgaaggagggcttttctatgccgacgacaccgccggct

SEQ ID NO: 21665 - DNA, 80 bp, synthetic construct
  misc_feature 1..80: note = Synthetic: >NC_039476.1-cand-6990-7069
  source 1..80: mol_type = other DNA
acacaggcgctggattggaatggcacaaggtattgggcaccaaactccatgaggaccacatcttattctggaaaatttac

SEQ ID NO: 21666 - DNA, 80 bp, synthetic construct
  misc_feature 1..80: note = Synthetic: >NC_039476.1-cand-7070-7149
  source 1..80: mol_type = other DNA
atcaaccgccccagtgaggcaggctgacttccagcacacccaaagccggccttcgagtggctcctctgtgtcttcctttg

SEQ ID NO: 21667 - DNA, 80 bp, synthetic construct
  misc_feature 1..80: note = Synthetic: >NC_039476.1-cand-7150-7229
  source 1..80: mol_type = other DNA
ccactcagtcttcaaggccaactctgaccacaaccactggttcctcacatggcacagcctcatcaaattcaactcgcacc

SEQ ID NO: 21668 - DNA, 80 bp, synthetic construct
  misc_feature 1..80: note = Synthetic: >NC_039476.1-cand-7230-7309
  source 1..80: mol_type = other DNA
acaagcctcccccaatcaacggtctcaacagctacatctaggactggtgagtggataaaagatcaaaataaaaatttgga

SEQ ID NO: 21669 - DNA, 80 bp, synthetic construct
  misc_feature 1..80: note = Synthetic: >NC_039476.1-cand-7280-7359
  source 1..80: mol_type = other DNA
gtggataaaagatcaaaataaaaatttggaaccctacatggatggcgccttaaagacagcctttgtcaccccaccttcca

SEQ ID NO: 21670 - DNA, 80 bp, synthetic construct
  misc_feature 1..80: note = Synthetic: >NC_039476.1-cand-7360-7439
  source 1..80: mol_type = other DNA
ggagggcatctgacgggacagtctcaaccgtccctaaaggtgttttggactcctggacacctgcgtttaacacccggaag

SEQ ID NO: 21671 - DNA, 80 bp, synthetic construct
  misc_feature 1..80: note = Synthetic: >NC_039476.1-cand-7440-7519
  source 1..80: mol_type = other DNA
cagccgctttttgcacacctccgtaagagggaggagtcacaagcttaatgaagaggtgaatatttatttaggatgaattg

SEQ ID NO: 21672 - DNA, 80 bp, synthetic construct
  misc_feature 1..80: note = Synthetic: >NC_039477.1-cand-40-119
  source 1..80: mol_type = other DNA
gcaacaacaacaacgacaaggaaaaatcttcaggtgaaggcttattcacaaatatgtcttccaccttaaagaaagccctc

SEQ ID NO: 21673 - DNA, 80 bp, synthetic construct
  misc_feature 1..80: note = Synthetic: >NC_039477.1-cand-300-379
  source 1..80: mol_type = other DNA
ccccaaccggacgtggccaacacagcattcagtgttccaccactgagcttgagagaaaacagggaggccaaggaaccgct

SEQ ID NO: 21674 - DNA, 80 bp, synthetic construct
  misc_feature 1..80: note = Synthetic: >NC_039477.1-cand-490-569
  source 1..80: mol_type = other DNA
caagagtggagctgacgccgctgtcattgtactggcgtgtggtgtacactccccaatacctcatctcccctgaaactctc

SEQ ID NO: 21675 - DNA, 80 bp, synthetic construct
  misc_feature 1..80: note = Synthetic: >NC_039477.1-cand-980-1059
  source 1..80: mol_type = other DNA
ggactacgagttgcaagggccagaagacctcgccgttgaactcgtacctgtggtaatgggagggattggtttggtgttgg

SEQ ID NO: 21676 - DNA, 80 bp, synthetic construct
  misc_feature 1..80: note = Synthetic: >NC_039477.1-cand-1560-1639
  source 1..80: mol_type = other DNA
gatcaaagagtcggactcataccaagaaacggtgtggaccattgggatgcatacaaaggtgagagagtcgtgctgtggga

SEQ ID NO: 21677 - DNA, 80 bp, synthetic construct
  misc_feature 1..80: note = Synthetic: >NC_039477.1-cand-1610-1689
  source 1..80: mol_type = other DNA
atacaaaggtgagagagtcgtgctgtgggacgactatggcatgagtaaccccattcatgatgctcttcgcatacaagaat

SEQ ID NO: 21678 - DNA, 80 bp, synthetic construct
  misc_feature 1..80: note = Synthetic: >NC_039897.1-cand-2820-2899
  source 1..80: mol_type = other DNA
gtcattgaacgctatggcctttgtgagagtgaacaagaagaagaaggcgagcaaacagtcgagttgcccactgccaataa

SEQ ID NO: 21679 - DNA, 80 bp, synthetic construct
  misc_feature 1..80: note = Synthetic: >NC_039897.1-cand-2900-2979
  source 1..80: mol_type = other DNA
agaaggtaaaaacaagggcaagaccaaaaagggccgtggacgaaagtccaacttcaacgctttctcaagacgtggcctca

SEQ ID NO: 21680 - DNA, 80 bp, synthetic construct
  misc_feature 1..80: note = Synthetic: >NC_039897.1-cand-2980-3059
  source 1..80: mol_type = other DNA
gtgatgaagagtatgargartacaaaaagatcagagaagaaaagagtggcaattacagcatccaagagtacctcgaggat

SEQ ID NO: 21681 - DNA, 80 bp, synthetic construct
  misc_feature 1..80: note = Synthetic: >NC_039897.1-cand-3020-3099
  source 1..80: mol_type = other DNA
aaagagtggcaattacagcatccaagagtacctcgaggatcgccaacgctatgaggaagaacttgctgaagtgcaggctg

SEQ ID NO: 21682 - DNA, 80 bp, synthetic construct
  misc_feature 1..80: note = Synthetic: >NC_039897.1-cand-3140-3219
  source 1..80: mol_type = other DNA
ccatcgggttttctataaatcaaaatccggcatgagaaaacaacgccaagaagaacggcgccaactaggtctcgtcagcg

SEQ ID NO: 21683 - DNA, 80 bp, synthetic construct
  misc_feature 1..80: note = Synthetic: >NC_039897.1-cand-3220-3299
  source 1..80: mol_type = other DNA
gttctgagatccgcaagcgtaagcccatagactggaccccccctaagaatgattggtcagaagacaccagaactgtcaac

SEQ ID NO: 21684 - DNA, 80 bp, synthetic construct
  misc_feature 1..80: note = Synthetic: >NC_039897.1-cand-3290-3369
  source 1..80: mol_type = other DNA
aactgtcaactatgatgaacacattagttttgaagcccctccctcaatttggagcagggtggtgaagtttggtagtggtt

SEQ ID NO: 21685 - DNA, 80 bp, synthetic construct
  misc_feature 1..80: note = Synthetic: >NC_039897.1-cand-3430-3509
  source 1..80: mol_type = other DNA
ctaaggaagtctttggtgaagaccttagcaatgtggccatccacagggttggtgagttcacccagttccgtttctccaaa

SEQ ID NO: 21686 - DNA, 80 bp, synthetic construct
  misc_feature 1..80: note = Synthetic: >NC_039897.1-cand-3460-3539
  source 1..80: mol_type = other DNA
atgtggccatccacagggttggtgagttcacccagttccgtttctccaaaaagatgagacctgacctcaccggtatggtc

SEQ ID NO: 21687 - DNA, 80 bp, synthetic construct
  misc_feature 1..80: note = Synthetic: >NC_039897.1-cand-3540-3619
  source 1..80: mol_type = other DNA
ttagaagaaggctgcccagagggaacagtatgcaccataatgatcaagagagactctggcgagctgctaccactcgctgt

SEQ ID NO: 21688 - DNA, 80 bp, synthetic construct
  misc_feature 1..80: note = Synthetic: >NC_039897.1-cand-3630-3709
  source 1..80: mol_type = other DNA
gcagtggcatcaatgaagatccagggcaagcttatgcatggacaatcaggaatgttgctcaccggcgctaacgccaaagg

SEQ ID NO: 21689 - DNA, 80 bp, synthetic construct
  misc_feature 1..80: note = Synthetic: >NC_039897.1-cand-3660-3739
  source 1..80: mol_type = other DNA
cttatgcatggacaatcaggaatgttgctcaccggcgctaacgccaaaggcatggaccttggaactatacctggtgattg

SEQ ID NO: 21690 - DNA, 80 bp, synthetic construct
  misc_feature 1..80: note = Synthetic: >NC_039897.1-cand-3780-3859
  source 1..80: mol_type = other DNA
gtctgtggagtacatgcagccgccacaaaatcaggcaacactgtggtgtgtgctatacagggtggcgatggtgaagccac

SEQ ID NO: 21691 - DNA, 80 bp, synthetic construct
  misc_feature 1..80: note = Synthetic: >NC_039897.1-cand-3860-3939
  source 1..80: mol_type = other DNA
actagagggcggcggtcaaaacaagggccattatgcagggcatccgatactaaggtatgggaatggcccctcgctatcaa

SEQ ID NO: 21692 - DNA, 80 bp, synthetic construct
  misc_feature 1..80: note = Synthetic: >NC_039897.1-cand-3940-4019
  source 1..80: mol_type = other DNA
ccaaaacaaaattttggaagtcaaccccccagcctttgcccccaggtacatatgagccagcttaccttggtggtagagat

SEQ ID NO: 21693 - DNA, 80 bp, synthetic construct
  misc_feature 1..80: note = Synthetic: >NC_039897.1-cand-4040-4119
  source 1..80: mol_type = other DNA
atccttgcaacaagtgttaagggaccagttaaaaccatttgccgagccccgtggcaggttgcccgaagcgggcctgctgg

SEQ ID NO: 21694 - DNA, 80 bp, synthetic construct
  misc_feature 1..80: note = Synthetic: >NC_001611.1-cand-68700-68779
  source 1..80: mol_type = other DNA
gtctagagcatcaatgtcctgctatacttcggccattaattaggttgtttattgatatactattatttgttatagtaatt

SEQ ID NO: 21695 - DNA, 80 bp, synthetic construct
  misc_feature 1..80: note = Synthetic: >NC_001611.1-cand-122010-122089
  source 1..80: mol_type = other DNA
gtataagtttttggtacctgatcctaaagccggagttttttatagaccgttacatttccaatatgtatcgtattctaatt

SEQ ID NO: 21696 - DNA, 80 bp, synthetic construct
  misc_feature 1..80: note = Synthetic: >NC_003310.1-cand-26090-26169
  source 1..80: mol_type = other DNA
ctagagagaaagcttttcagttgcttagacttccaagtattaattcgtgacagatccatgtctgaaacgagacgctaatt

SEQ ID NO: 21697 - DNA, 80 bp, synthetic construct
  misc_feature 1..80: note = Synthetic: >NC_003310.1-cand-99350-99429
  source 1..80: mol_type = other DNA
ccgaacgaggagaccatatagtttggattaataattcatggaaatttaacagcgaagaaccattgataacaaaactaatt

SEQ ID NO: 21698 - DNA, 80 bp, synthetic construct
  misc_feature 1..80: note = Synthetic: >NC_001430.1-cand-2100-2179
  source 1..80: mol_type = other DNA
caacagataggatgcaagccatgctagctactcatgtggtgtgggactttgggctgcaatctagtatcaccattataatt

SEQ ID NO: 21699 - DNA, 80 bp, synthetic construct
  misc_feature 1..80: note = Synthetic: >NC_001611.1-cand-22740-22819
  source 1..80: mol_type = other DNA
catattaacccaagcagcattcccgtggaaccaacgctcaacagatgtgggatttggtagacctcctactacgtataatt

SEQ ID NO: 21700 - DNA, 80 bp, synthetic construct
  misc_feature 1..80: note = Synthetic: >NC_003310.1-cand-124770-124849
  source 1..80: mol_type = other DNA
ctagattcgtcagtgcactcatgtaaccaacataccctaggtcctaaatatttatctccggaattagattttggataatt

SEQ ID NO: 21701 - DNA, 80 bp, synthetic construct
  misc_feature 1..80: note = Synthetic: >NC_001611.1-cand-132180-132259
  source 1..80: mol_type = other DNA
aattatcgcgttcagattgtgatcttttcaaatagactaaaaaccccatttctctagtaagtatcttatgtatatgtttg

SEQ ID NO: 21702 - DNA, 80 bp, synthetic construct
  misc_feature 1..80: note = Synthetic: >NC_003310.1-cand-24610-24689
  source 1..80: mol_type = other DNA
aattatgataaagatatttattcttggggtgtaagtaatggggattaatctttgttggatcagtctctaagttaacacat

SEQ ID NO: 21703 - DNA, 80 bp, synthetic construct
  misc_feature 1..80: note = Synthetic: >NC_001611.1-cand-27440-27519
  source 1..80: mol_type = other DNA
aattcaatatctttttcgatttctggatatgtttttaataaagtatgaacaaagaaatggaaatcgtaataccagttatg

SEQ ID NO: 21704 - DNA, 80 bp, synthetic construct
  misc_feature 1..80: note = Synthetic: >NC_001611.1-cand-162760-162839
  source 1..80: mol_type = other DNA
aattcagatgtgagtgttgacgctatgattcacaaaacgtatatagatgtcaatgaagagtacacagaagcagctgcagc

SEQ ID NO: 21705 - DNA, 80 bp, synthetic construct
  misc_feature 1..80: note = Synthetic: >NC_001611.1-cand-86640-86719
  source 1..80: mol_type = other DNA
cgttattggtagcgacggatccagatgctgatgctatagctagaggaaatgaaagatacaacaaattaaattctggaatt

SEQ ID NO: 21706 - DNA, 80 bp, synthetic construct
  misc_feature 1..80: note = Synthetic: >NC_001611.1-cand-88720-88799
  source 1..80: mol_type = other DNA
ttctatatctagattaaccggagtaattgattataaaggttataaccttaatataatagacggggttataccctggaatt

SEQ ID NO: 21707 - DNA, 80 bp, synthetic construct
  misc_feature 1..80: note = Synthetic: >NC_006573.1-cand-1130-1209
  source 1..80: mol_type = other DNA
aattccatactgtaattacagcaagtattggtacctcaaccacacaactactgggagaacatcactgcccaaatgttggc

SEQ ID NO: 21708 - DNA, 80 bp, synthetic construct
  misc_feature 1..80: note = Synthetic: >NC_001611.1-cand-115610-115689
  source 1..80: mol_type = other DNA
aattcgcacaccaacaatttctatttcctttatgatcgttacaaaagacgtataatgccgtatccccaaaagtaaaataa

SEQ ID NO: 21709 - DNA, 80 bp, synthetic construct
  misc_feature 1..80: note = Synthetic: >NC_001611.1-cand-44830-44909
  source 1..80: mol_type = other DNA
aattcggatcgtaaatctgtttctaaagaacggagaatatctatacatacctgattagaattcatccgtccttcagacaa

SEQ ID NO: 21710 - DNA, 80 bp, synthetic construct
  misc_feature 1..80: note = Synthetic: >AJ616854.1-cand-100-179
  source 1..80: mol_type = other DNA
aaggtgaaggatgcagaaaagcagtatgaaaaggaccctgatgacctcaacaaaagagcattgagtgaccgagaaagcgt

SEQ ID NO: 21711 - DNA, 80 bp, synthetic construct
  misc_feature 1..80: note = Synthetic: >AJ616854.1-cand-190-269
  source 1..80: mol_type = other DNA
attcagggcaaaattgatgagttaaggagacagctggctgatcgtgtggctgcaggaaaaaatattggcaaggaaaggga

SEQ ID NO: 21712 - DNA, 80 bp, synthetic construct
  misc_feature 1..80: note = Synthetic: >AJ616854.1-cand-370-449
  source 1..80: mol_type = other DNA
gggcaaactgctgactggttaagcattgttgtctatttgacatcttttgtggtcccaatactcctgaaggctctttatat

SEQ ID NO: 21713 - DNA, 80 bp, synthetic construct
  misc_feature 1..80: note = Synthetic: >AJ616854.1-cand-460-539
  source 1..80: mol_type = other DNA
agagggagacaaactactaaggacaacaaagggatgaggattcggttcaaggatgatagctcatttgaagatgtgaatgg

SEQ ID NO: 21714 - DNA, 80 bp, synthetic construct
  misc_feature 1..80: note = Synthetic: >AJ616854.1-cand-550-629
  source 1..80: mol_type = other DNA
ccaaaacatctatttttgtcaatgcctaatgcccagtctagcatgaaagcagatgagattacacccggtcggttcaggac

SEQ ID NO: 21715 - DNA, 80 bp, synthetic construct
  misc_feature 1..80: note = Synthetic: >AJ616854.1-cand-640-719
  source 1..80: mol_type = other DNA
ggattatacccggcacaggttaaagcaagaaatctggtcagccccgttatgagtgtgattggttttttagcccttgcaaa

SEQ ID NO: 21716 - DNA, 80 bp, synthetic construct
  misc_feature 1..80: note = Synthetic: >AJ616854.1-cand-730-809
  source 1..80: mol_type = other DNA
gaacgggttgaggagtggcttgatcttccatgcaagctattatctgagccatccccaacatctttgaccaaaggtccatc

SEQ ID NO: 21717 - DNA, 80 bp, synthetic construct
  misc_feature 1..80: note = Synthetic: >AJ616854.1-cand-850-929
  source 1..80: mol_type = other DNA
gcaaagatggagacaaaggaagctcaggctgtgaggaaacacgcaatagatgctggttgtaacatcattgaccacattga

SEQ ID NO: 21718 - DNA, 80 bp, synthetic construct
  misc_feature 1..80: note = Synthetic: >AJ616854.1-cand-880-959
  source 1..80: mol_type = other DNA
gtgaggaaacacgcaatagatgctggttgtaacatcattgaccacattgactcaccatcatcaatctgggtctttgctgg

SEQ ID NO: 21719 - DNA, 80 bp, synthetic construct
  misc_feature 1..80: note = Synthetic: >AJ616854.1-cand-980-1059
  source 1..80: mol_type = other DNA
ctacttgcttgttcattgcaggcatggcagagttaggtgcattttttgctgtcctccaggatatgaggaatacaatcatg

SEQ ID NO: 21720 - DNA, 80 bp, synthetic construct
  misc_feature 1..80: note = Synthetic: >AJ616854.1-cand-1070-1149
  source 1..80: mol_type = other DNA
ctattggaacatcggaggagaagctgagaaagaagtcctcattctatcaatcttaccttcgaaggacacagtccatggga

SEQ ID NO: 21721 - DNA, 80 bp, synthetic construct
  misc_feature 1..80: note = Synthetic: >AJ616854.1-cand-1110-1189
  source 1..80: mol_type = other DNA
attctatcaatcttaccttcgaaggacacagtccatgggaattcaactggaccaacgcattatcgtgcttttcatggtgg

SEQ ID NO: 21722 - DNA, 80 bp, synthetic construct
  misc_feature 1..80: note = Synthetic: >AJ616854.1-cand-1260-1339
  source 1..80: mol_type = other DNA
acaggcattgattgaccagaaagtgaaagagatatctaatcaagagccgcttaagctttaagtacatttattgcattatc

SEQ ID NO: 21723 - DNA, 80 bp, synthetic construct
  misc_feature 1..80: note = Synthetic: >AJ616854.1-cand-1330-1409
  source 1..80: mol_type = other DNA
ttgcattatcccatgcttcatgtagtcccacatatgctgcattaatcgcttgaattggaatcattatactactgatcagt

SEQ ID NO: 21724 - DNA, 80 bp, synthetic construct
  misc_feature 1..80: note = Synthetic: >AJ616854.1-cand-1430-1509
  source 1..80: mol_type = other DNA
ttgggttgggtgggtcatttattcattatataatctcagggtggtttaggatgtcaccttaagtgactattttttgtata

SEQ ID NO: 21725 - DNA, 80 bp, synthetic construct
  misc_feature 1..80: note = Synthetic: >AJ616854.1-cand-1510-1589
  source 1..80: mol_type = other DNA
tatgggtgtaaatttcaattgatccatactaacatctgattttcctcctttcttttctctactaacaacaactatctacc

SEQ ID NO: 21726 - DNA, 80 bp, synthetic construct
  misc_feature 1..80: note = Synthetic: >AdVB7-cand-8160-8239
  source 1..80: mol_type = other DNA
ggcggagctcgaggacgagagcgcgcaggccggagctgtccagggtcctgagacgctgcggagtcaggttagtaggcagt

SEQ ID NO: 21727 - DNA, 80 bp, synthetic construct
  misc_feature 1..80: note = Synthetic: >AdVB7-cand-8370-8449
  source 1..80: mol_type = other DNA
tgcccttgtttttccttttgggcggcggtggctctgttgcttcttgcatgtttaggagcggtgtcgagggcgcgcaccgg

SEQ ID NO: 21728 - DNA, 80 bp, synthetic construct
  misc_feature 1..80: note = Synthetic: >AdVB7-cand-8870-8949
  source 1..80: mol_type = other DNA
ccacgggatctctcgcgcgcataaccacctgggcgaggttaagctctacgtggcgggtgaagaccgcatagttgcatagg

SEQ ID NO: 21729 - DNA, 80 bp, synthetic construct
  misc_feature 1..80: note = Synthetic: >AdVB7-cand-8950-9029
  source 1..80: mol_type = other DNA
cgctggaaaaggtagttgagtgtggtggcgatgtgctcggtgacgaagaaatacatgatccatcgtctcagcggcatctc

SEQ ID NO: 21730 - DNA, 80 bp, synthetic construct
  misc_feature 1..80: note = Synthetic: >AdVB7-cand-9110-9189
  source 1..80: mol_type = other DNA
cggacacggtcaactcctcttccagaagacggatgagttcggcaatggtggtgcgcacctcgcgctcgaaatcccccggg

SEQ ID NO: 21731 - DNA, 80 bp, synthetic construct
  misc_feature 1..80: note = Synthetic: >AdVB7-cand-9160-9239
  source 1..80: mol_type = other DNA
gtgcgcacctcgcgctcgaaatcccccgggatttcttcctcaatctcttcttcttccactaacatctcttcctcttcagg

SEQ ID NO: 21732 - DNA, 80 bp, synthetic construct
  misc_feature 1..80: note = Synthetic: >AdVB7-cand-9510-9589
  source 1..80: mol_type = other DNA
cacgggatctgaaaacctttcgacgaaagcgtctaaccagtcgcaatcgcaaggtaggctgagcactgtttcttgcgggc

SEQ ID NO: 21733 - DNA, 80 bp, synthetic construct
  misc_feature 1..80: note = Synthetic: >AdVB7-cand-9620-9699
  source 1..80: mol_type = other DNA
ctctttcttttccttcctcctcttgggaggatgagacgatgctgctggtgatgaaattaaaataggcagttttgagacgg

SEQ ID NO: 21734 - DNA, 80 bp, synthetic construct
  misc_feature 1..80: note = Synthetic: >AdVB7-cand-9930-10009
  source 1..80: mol_type = other DNA
ggcttgctgcacctgggtgagggtggcttggaagtcgtcaaagtctacaaagcggtggtaggccccggtgttgattgtgt

SEQ ID NO: 21735 - DNA, 80 bp, synthetic construct
  misc_feature 1..80: note = Synthetic: >AdVB7-cand-10210-10289
  source 1..80: mol_type = other DNA
aggtcttccagcatgaggcggtggtaaccgtagatgtacctggacatccaggtgataccggaggcggtggtggatgcccg

SEQ ID NO: 21736 - DNA, 80 bp, synthetic construct
  misc_feature 1..80: note = Synthetic: >AdVB7-cand-10250-10329
  source 1..80: mol_type = other DNA
tggacatccaggtgataccggaggcggtggtggatgcccgcgggaactcgcgtacgcggttccagatgttgcgcagcggc

SEQ ID NO: 21737 - DNA, 80 bp, synthetic construct
  misc_feature 1..80: note = Synthetic: >AdVB7-cand-10330-10409
  source 1..80: mol_type = other DNA
atgaagtagttcatggtaggcacggtttggcccgtaagacgtgcacagtcgttgatgctctagacatacgggcaaaaacg

SEQ ID NO: 21738 - DNA, 80 bp, synthetic construct
  misc_feature 1..80: note = Synthetic: >AdVB7-cand-10410-10489
  source 1..80: mol_type = other DNA
aaagcggtcagcggctcgtctccgtggcctggaggctaagcgaacgggttgggctgcgcgtgtaccccggttcgaatctc

SEQ ID NO: 21739 - DNA, 80 bp, synthetic construct
  misc_feature 1..80: note = Synthetic: >AdVB7-cand-10560-10639
  source 1..80: mol_type = other DNA
caggatacggaggcgggtcgtttttttgctttttcctggatgggagccagtgctgcgtcaagctttagaacactcagttc

SEQ ID NO: 21740 - DNA, 80 bp, synthetic construct
  misc_feature 1..80: note = Synthetic: >AdVB7-cand-10650-10729
  source 1..80: mol_type = other DNA
gagtggctcgcgcccgtagtctggagaattaatcgccagggttgcgttgcggtgtgccccggttcgagtcttagcgcgcc

SEQ ID NO: 21741 - DNA, 80 bp, synthetic construct
  misc_feature 1..80: note = Synthetic: >AdVB7-cand-10730-10809
  source 1..80: mol_type = other DNA
ggatcggccggtttccgcgacgtttctaagaccccgtcagccgacttctccagtttacgggagcgagccctctttttttt

SEQ ID NO: 21742 - DNA, 80 bp, synthetic construct
  misc_feature 1..80: note = Synthetic: >AdVE4-cand-9900-9979
  source 1..80: mol_type = other DNA
gacgcgctcggcgaggatggcctgctgaatctgggtgagggtggtctggaagtcgtcaaagtcgacgaagcggtggtagg

SEQ ID NO: 21743 - DNA, 80 bp, synthetic construct
  misc_feature 1..80: note = Synthetic: >AdVE4-cand-9980-10059
  source 1..80: mol_type = other DNA
ctccggtgttgatggtgtaggagcagttggccatgacggaccagttgacggtctggtgaccgggccgcgcgagctcgtgg

SEQ ID NO: 21744 - DNA, 80 bp, synthetic construct
  misc_feature 1..80: note = Synthetic: >AdVE4-cand-10060-10139
  source 1..80: mol_type = other DNA
tacttgaggcgcgagtaggcacgcgagtcgaaaatgtagtcgttgcaggtgcgcaccaggtactggtagccaatgaggaa

SEQ ID NO: 21745 - DNA, 80 bp, synthetic construct
  misc_feature 1..80: note = Synthetic: >AdVE4-cand-10100-10179
  source 1..80: mol_type = other DNA
cgttgcaggtgcgcaccaggtactggtagccaatgaggaagtgcggcggcggctgacggtagagcggccatcgctcggtg

SEQ ID NO: 21746 - DNA, 80 bp, synthetic construct
  misc_feature 1..80: note = Synthetic: >AdVE4-cand-10220-10299
  source 1..80: mol_type = other DNA
ggtagccgtagatgtacctggacatccaggtaatgccagcggcggtggtggaggcgcgcgggaactcgcggacgcggttc

SEQ ID NO: 21747 - DNA, 80 bp, synthetic construct
  misc_feature 1..80: note = Synthetic: >AdVE4-cand-10300-10379
  source 1..80: mol_type = other DNA
caaatgttgcgcagcggcagaaagtagttcatggtgggcacggtctggcccgtaagacgcgcgcagtcgttgatgctcta

SEQ ID NO: 21748 - DNA, 80 bp, synthetic construct
  misc_feature 1..80: note = Synthetic: >AdVE4-cand-10380-10459
  source 1..80: mol_type = other DNA
gacatacgggtaaaaacaaaagcggtcagcggctcgactccgtggcctggaggctaagcaaacgggttgggctgcgcgtg

SEQ ID NO: 21749 - DNA, 80 bp, synthetic construct
  misc_feature 1..80: note = Synthetic: >AdVE4-cand-10540-10619
  source 1..80: mol_type = other DNA
aaaacctccaggatacggaggcgggtcgttttgcaaatttttggcggtccaaaaaaaaaaaaaagctagtaagcacggaa

SEQ ID NO: 21750 - DNA, 80 bp, synthetic construct
  misc_feature 1..80: note = Synthetic: >AdVE4-cand-10620-10699
  source 1..80: mol_type = other DNA
agcggccgaccgcaatggctcgctgccgtagattggagaagaatcgccagggttgcgttgcggtgtgccccggttcgaga

SEQ ID NO: 21751 - DNA, 80 bp, synthetic construct
  misc_feature 1..80: note = Synthetic: >AdVE4-cand-10760-10839
  source 1..80: mol_type = other DNA
agaccccataagccagccaacttctccagttacggagcgagcccctcttttgttttgttttttgccagatgcatcccgta

SEQ ID NO: 21752 - DNA, 80 bp, synthetic construct
  misc_feature 1..80: note = Synthetic: >AdVE4-cand-10840-10919
  source 1..80: mol_type = other DNA
ctgcggcagatgcgcccccaccctccaccgcaacagcagccccctcctccgcaacagccggcgcttctgcctccgcccca

SEQ ID NO: 21753 - DNA, 80 bp, synthetic construct
  misc_feature 1..80: note = Synthetic: >AdVE4-cand-10880-10959
  source 1..80: mol_type = other DNA
cccctcctccgcaacagccggcgcttctgcctccgccccaacagcagcaacttccagtcactaccgccacggccgccgtg

SEQ ID NO: 21754 - DNA, 80 bp, synthetic construct
  misc_feature 1..80: note = Synthetic: >AdVE4-cand-11030-11109
  source 1..80: mol_type = other DNA
cgtcgccggagcggcacccgcgcgtgcagatgaaaagggacgctcacgaggcctacgtgcccaagcagaacctgttcaga

SEQ ID NO: 21755 - DNA, 80 bp, synthetic construct
  misc_feature 1..80: note = Synthetic: >AdVE4-cand-11080-11159
  source 1..80: mol_type = other DNA
gcctacgtgcccaagcagaacctgttcagagacaggagcggcgaggagcccgaggagatgcgcgcagcccgttttcacgc

SEQ ID NO: 21756 - DNA, 80 bp, synthetic construct
  misc_feature 1..80: note = Synthetic: >AdVE4-cand-11160-11239
  source 1..80: mol_type = other DNA
ggggcgggagctgcggtgcggcctggaccgaaagagggtgctgagggacaaggatttcgaggcggacgagctgacgggga

SEQ ID NO: 21757 - DNA, 80 bp, synthetic construct
  misc_feature 1..80: note = Synthetic: >AdVE4-cand-11240-11319
  source 1..80: mol_type = other DNA
tcagccctgcgcgcgcgcacgtggccgcggccaacctggtcacggcgtacgagcagaccgtgaaggaggagagcaacttc

SEQ ID NO: 21758 - DNA, 80 bp, synthetic construct
  misc_feature 1..80: note = Synthetic: >AdVE4-cand-34480-34559
  source 1..80: mol_type = other DNA
ccctaatggctctaatcacatcgaccacggtggaatgggccagacccagccagatgatgcaattttgttgggtttcgata

SEQ ID NO: 21759 - DNA, 80 bp, synthetic construct
  misc_feature 1..80: note = Synthetic: >AdVE4-cand-34600-34679
  source 1..80: mol_type = other DNA
ttattccaaacggtctcggaacacttcaaaatgcaggtcccggaggtggcacctctcgcccccactgtgttggtggaaaa

SEQ ID NO: 21760 - DNA, 80 bp, synthetic construct
  misc_feature 1..80: note = Synthetic: >AdVE4-cand-34680-34759
  source 1..80: mol_type = other DNA
taacagccaggtcaaaggtgacacggttctcgagatgttccacggtggcttccagcaaagcctccacgcgcacatccaga

SEQ ID NO: 21761 - DNA, 80 bp, synthetic construct
  misc_feature 1..80: note = Synthetic: >AdVE4-cand-34760-34839
  source 1..80: mol_type = other DNA
aacaagaggacagcaaaagcgggagcgttttctaattcctcaatcatcatattacactcctgcaccatccctagataatt

SEQ ID NO: 21762 - DNA, 80 bp, synthetic construct
  misc_feature 1..80: note = Synthetic: >AdVE4-cand-34840-34919
  source 1..80: mol_type = other DNA
ttcatttttccagccttgaatgattcgtattagttcctgaggtaaatccaagccagccatgataaaaagctcgcgcagag

SEQ ID NO: 21763 - DNA, 80 bp, synthetic construct
  misc_feature 1..80: note = Synthetic: >AdVE4-cand-34930-35009
  source 1..80: mol_type = other DNA
cggcattcttaagcacaccctcataattccaagagatcctgctcctggttcacctgtagcagattaacaagtggaatatc

SEQ ID NO: 21764 - DNA, 80 bp, synthetic construct
  misc_feature 1..80: note = Synthetic: >AdVE4-cand-35010-35089
  source 1..80: mol_type = other DNA
aattgctctgccgcaatccctaagctcctccctcagcagtaactgtatgtactcattcatatcttctcctaaatttttag

SEQ ID NO: 21765 - DNA, 80 bp, synthetic construct
  misc_feature 1..80: note = Synthetic: >AdVE4-cand-35090-35169
  source 1..80: mol_type = other DNA
ccataggactgccaggaataagagaagggcaagccacattacagataaagcgaagtcctccccagtgagcattgccaaat

SEQ ID NO: 21766 - DNA, 80 bp, synthetic construct
  misc_feature 1..80: note = Synthetic: >AdVE4-cand-35170-35249
  source 1..80: mol_type = other DNA
gtaagattgaaataagcatgctggccagactcggtgatatcttccagataactggacagaaaatcaggcaagtaattttt

SEQ ID NO: 21767 - DNA, 80 bp, synthetic construct
  misc_feature 1..80: note = Synthetic: >AdVE4-cand-35250-35329
  source 1..80: mol_type = other DNA
aagaaaatcaacaaaagaaaagtcgtctaggtgcatgtttagagcctcaggaacaacgatggaataagtgcaaggagtgc

SEQ ID NO: 21768 - DNA, 80 bp, synthetic construct
  misc_feature 1..80: note = Synthetic: >AdVE4-cand-35330-35409
  source 1..80: mol_type = other DNA
gttccagcatggttagtgtttttggtgatctgtagaacaaaaaataaacatgcaatattaaaccatgctagcctggcgaa

SEQ ID NO: 21769 - DNA, 80 bp, synthetic construct
  misc_feature 1..80: note = Synthetic: >AdVE4-cand-35410-35489
  source 1..80: mol_type = other DNA
caggtggataaatcactttttccaacaccagacaggctacagggtctccggcgcgaccactgtagaagctgacattatga

SEQ ID NO: 21770 - DNA, 80 bp, synthetic construct
  misc_feature 1..80: note = Synthetic: >AdVE4-cand-35490-35569
  source 1..80: mol_type = other DNA
ttaaaaagcatcaccgagagaccttcccggtggccggcatggataatttgagaagaagcatacactccgggaacattggc

SEQ ID NO: 21771 - DNA, 80 bp, synthetic construct
  misc_feature 1..80: note = Synthetic: >AdVE4-cand-35570-35649
  source 1..80: mol_type = other DNA
gtccgtgagtgaaaaaaagcggcctataaagcctcgaggcactacaatgcttaatcttaattccagcaaagcgaccccat

SEQ ID NO: 21772 - DNA, 80 bp, synthetic construct
  misc_feature 1..80: note = Synthetic: >AdVE4-cand-35650-35729
  source 1..80: mol_type = other DNA
gcggataaagcacaaaattggcaggtgcgtaaaaaatgtaattacttcccttctgctcaggcagcaaagcccccgctccc

SEQ ID NO: 21773 - DNA, 80 bp, synthetic construct
  misc_feature 1..80: note = Synthetic: >AdVE4-cand-35730-35809
  source 1..80: mol_type = other DNA
tccagaaacacatacaaaacctcagcgtccatagcttaccgagcacggcaggcgcaacagtcaaagaaaaaagctcagct

SEQ ID NO: 21774 - DNA, 80 bp, synthetic construct
  misc_feature 1..80: note = Synthetic: >EU711054.1-cand-3780-3859
  source 1..80: mol_type = other DNA
ttgcatttttcacactcttctaccttaatagatagttgtaaatataatccaagtaataagtacacatcatcaattcctaa

SEQ ID NO: 21775 - DNA, 80 bp, synthetic construct
  misc_feature 1..80: note = Synthetic: >EU711054.1-cand-3860-3939
  source 1..80: mol_type = other DNA
ttctaaagcaaattctgacaaagccttccaatttaattgatctttaaactccccatataaatcctcagctttaaaatcat

SEQ ID NO: 21776 - DNA, 80 bp, synthetic construct
  misc_feature 1..80: note = Synthetic: >EU711054.1-cand-3950-4029
  source 1..80: mol_type = other DNA
gccaccaggaatattttcttcacataaagtaaatggatctctagtcattctactatataaaccatatgcattattaacac

SEQ ID NO: 21777 - DNA, 80 bp, synthetic construct
  misc_feature 1..80: note = Synthetic: >EU711054.1-cand-4030-4109
  source 1..80: mol_type = other DNA
ctttacaaaataaaaagctaatagtacagtatcccttacaaaagttattaacagcactaactctatgtctaaaaggtgtt

SEQ ID NO: 21778 - DNA, 80 bp, synthetic construct
  misc_feature 1..80: note = Synthetic: >EU711054.1-cand-4110-4189
  source 1..80: mol_type = other DNA
aaaataaacacaagtgcagtattataataagaatgtctacttgcaaaattacatttaaacttacttaaaagttttttata

SEQ ID NO: 21779 - DNA, 80 bp, synthetic construct
  misc_feature 1..80: note = Synthetic: >EU711054.1-cand-4190-4269
  source 1..80: mol_type = other DNA
tagggtttctgccttttctttggtggtatgtattacaaatgcagttaaagttctattactaaatacagcttgagacacaa

SEQ ID NO: 21780 - DNA, 80 bp, synthetic construct
  misc_feature 1..80: note = Synthetic: >EU711054.1-cand-4280-4359
  source 1..80: mol_type = other DNA
ttctttaggaaatgataaagatgcatctgtagcattgtcctttttttttttaggtggtgttgcctgtgaacattctggtt

SEQ ID NO: 21781 - DNA, 80 bp, synthetic construct
  misc_feature 1..80: note = Synthetic: >EU711054.1-cand-4390-4469
  source 1..80: mol_type = other DNA
gggtttctccaggagatttaggcatttcctcattacatcttagttcttcttcccagtaggaattaaactgagaccaccag

SEQ ID NO: 21782 - DNA, 80 bp, synthetic construct
  misc_feature 1..80: note = Synthetic: >EU711054.1-cand-4400-4479
  source 1..80: mol_type = other DNA
aggagatttaggcatttcctcattacatcttagttcttcttcccagtaggaattaaactgagaccaccagtaatcccagt

SEQ ID NO: 21783 - DNA, 80 bp, synthetic construct
  misc_feature 1..80: note = Synthetic: >EU711054.1-cand-4520-4599
  source 1..80: mol_type = other DNA
attaatttacttataaaacataaaagtacccctataataaaaacatgcttacctggttaagccaaccccttgcatggttg

SEQ ID NO: 21784 - DNA, 80 bp, synthetic construct
  misc_feature 1..80: note = Synthetic: >EU711054.1-cand-4580-4659
  source 1..80: mol_type = other DNA
gccaaccccttgcatggttgtaagaaatataatctttttccagtaaaaaaatgtttctgcactagtttcaaagccaaacc

SEQ ID NO: 21785 - DNA, 80 bp, synthetic construct
  misc_feature 1..80: note = Synthetic: >EU711054.1-cand-4660-4739
  source 1..80: mol_type = other DNA
actctctatagcacctgtagcagtaacactctatccacattggaggttttctaaatattttatatttttgcttgtggcgc

SEQ ID NO: 21786 - DNA, 80 bp, synthetic construct
  misc_feature 1..80: note = Synthetic: >EU711054.1-cand-4740-4819
  source 1..80: mol_type = other DNA
ttgtctaaaaagcagtaaaaacaattacacaaataataaaacccctttaagcatatgtcccagtcttttaaaatatactc

SEQ ID NO: 21787 - DNA, 80 bp, synthetic construct
  misc_feature 1..80: note = Synthetic: >EU711054.1-cand-4780-4859
  source 1..80: mol_type = other DNA
acccctttaagcatatgtcccagtcttttaaaatatactcttcaaaaacatcaccataaacttctccaacaagcctgtac

SEQ ID NO: 21788 - DNA, 80 bp, synthetic construct
  misc_feature 1..80: note = Synthetic: >EU711054.1-cand-4900-4979
  source 1..80: mol_type = other DNA
cctgtgaagagctccacacttcatcttcttcttcatttagttggtgcactgtactaacacactcttgcagttttaaatat

SEQ ID NO: 21789 - DNA, 80 bp, synthetic construct
  misc_feature 1..80: note = Synthetic: >EU711054.1-cand-4980-5059
  source 1..80: mol_type = other DNA
aaagaattaagctttttcattttttcctcatttccccctttgtcaggatgaaattctttgcatttgctaaggtattttgt

SEQ ID NO: 21790 - DNA, 80 bp, synthetic construct
  misc_feature 1..80: note = Synthetic: >EVB100-cand-1650-1729
  source 1..80: mol_type = other DNA
caccgtacgtgccaatcaccgtcactgtagcgcccatgtgcgctgagtacaatggattgcgattggcctctaaacagggt

SEQ ID NO: 21791 - DNA, 80 bp, synthetic construct
  misc_feature 1..80: note = Synthetic: >EVB100-cand-1710-1789
  source 1..80: mol_type = other DNA
gattggcctctaaacagggtttgcctgcgctattgaccccaggaagcaaccaattcctaacatctgatgatttccaatca

SEQ ID NO: 21792 - DNA, 80 bp, synthetic construct
  misc_feature 1..80: note = Synthetic: >EVB100-cand-1760-1839
  source 1..80: mol_type = other DNA
caattcctaacatctgatgatttccaatcaccctcggcaatgccccagtttgaccccactccagagatgcgaatcccagg

SEQ ID NO: 21793 - DNA, 80 bp, synthetic construct
  misc_feature 1..80: note = Synthetic: >EVB100-cand-1870-1949
  source 1..80: mol_type = other DNA
agttgattctgtcatgccagtcaataatgttccagggaactgcaacactattagagcatatcagattcccgtgcaagcca

SEQ ID NO: 21794 - DNA, 80 bp, synthetic construct
  misc_feature 1..80: note = Synthetic: >EVB100-cand-1950-2029
  source 1..80: mol_type = other DNA
acaatgctaacacaaccacaccgattttcagcttccaagtggacccaggttatagttctgtgctaaataggacactacta

SEQ ID NO: 21795 - DNA, 80 bp, synthetic construct
  misc_feature 1..80: note = Synthetic: >EVB100-cand-2030-2109
  source 1..80: mol_type = other DNA
ggtgagatgctgaattattacgcacattggtctggcagcatcaagttgacatttttgttctgtggttcagccatggccac

SEQ ID NO: 21796 - DNA, 80 bp, synthetic construct
  misc_feature 1..80: note = Synthetic: >EVB100-cand-2110-2189
  source 1..80: mol_type = other DNA
cgggaaattgctattggcatattccccaccaggtgcatcagtcccagaaagtagaaaagacgccatgcttggcacacaca

SEQ ID NO: 21797 - DNA, 80 bp, synthetic construct
  misc_feature 1..80: note = Synthetic: >EVB100-cand-2190-2269
  source 1..80: mol_type = other DNA
taatatgggacctgggcttgcagtcaagctgtgtcttgtgtgtgccatggatcagtcaatcacattatcggatggtccat

SEQ ID NO: 21798 - DNA, 80 bp, synthetic construct
  misc_feature 1..80: note = Synthetic: >EVB100-cand-2270-2349
  source 1..80: mol_type = other DNA
aaagacacttacacattggcaggttacataacatgttggtaccagacgaacatagtggttccgccagaaacaccggcaga

SEQ ID NO: 21799 - DNA, 80 bp, synthetic construct
  misc_feature 1..80: note = Synthetic: >EVB100-cand-2350-2429
  source 1..80: mol_type = other DNA
ctgtaccatattgggttttgcttcagcctgcaatgacttttctgtaagactcctacgagacacccccttcatcagccaaa

SEQ ID NO: 21800 - DNA, 80 bp, synthetic construct
  misc_feature 1..80: note = Synthetic: >EVB100-cand-2430-2509
  source 1..80: mol_type = other DNA
cgactgacctgcaaggcgacaccgatcaacgaaacggacaggtggtggataccaaagctactaacccaacgaactcaact

SEQ ID NO: 21801 - DNA, 80 bp, synthetic construct
  misc_feature 1..80: note = Synthetic: >EVB100-cand-2520-2599
  source 1..80: mol_type = other DNA
cgcttactgcagtggaaactgggcacacatcgcaggttgtgcctggcgatactattcagaccagacacgttgtgaacttc

SEQ ID NO: 21802 - DNA, 80 bp, synthetic construct
  misc_feature 1..80: note = Synthetic: >EVB100-cand-2600-2679
  source 1..80: mol_type = other DNA
cactcacgatcggagtcatcgatagagaatttcatgggcaggtcagcttgcgtattcatgaagacatacaaagctatggg

SEQ ID NO: 21803 - DNA, 80 bp, synthetic construct
  misc_feature 1..80: note = Synthetic: >EVB100-cand-2680-2759
  source 1..80: mol_type = other DNA
ggaagatactgataccagtaggtttgctgcatgggacatcaacataagggagatggtgcagttgagaagaaagtgtgaga

SEQ ID NO: 21804 - DNA, 80 bp, synthetic construct
  misc_feature 1..80: note = Synthetic: >EVB100-cand-2760-2839
  source 1..80: mol_type = other DNA
tgttcacctatctcagatttgacatagaggtaacatttgtgatcacaagttgccaggaccctagtacacaactggaccaa

SEQ ID NO: 21805 - DNA, 80 bp, synthetic construct
  misc_feature 1..80: note = Synthetic: >EVB100-cand-2840-2919
  source 1..80: mol_type = other DNA
gacatgccagtgctgacgcaccagattatgtatattccacctggcgggcccataccggacaaagtcaacagctatgcatg

SEQ ID NO: 21806 - DNA, 80 bp, synthetic construct
  misc_feature 1..80: note = Synthetic: >EVB75-cand-1650-1729
  source 1..80: mol_type = other DNA
ggtgcttcgacttacgttcccatcacggttacagtggctccaatgagcgcggagtacaacgggttgagacttgcaggaca

SEQ ID NO: 21807 - DNA, 80 bp, synthetic construct
  misc_feature 1..80: note = Synthetic: >EVB75-cand-1730-1809
  source 1..80: mol_type = other DNA
tcaagggctaccaacaatgttgacgccaggtagcaaccaatttttgacatcagatgattttcaatcaccctgtgcgatgc

SEQ ID NO: 21808 - DNA, 80 bp, synthetic construct
  misc_feature 1..80: note = Synthetic: >EVB75-cand-1810-1889
  source 1..80: mol_type = other DNA
ctcaatttgacgtcacaccagagatgttcattccaggagaggtgcacaacctcatggaaatagcagaggtggattcggtt

SEQ ID NO: 21809 - DNA, 80 bp, synthetic construct
  misc_feature 1..80: note = Synthetic: >EVB75-cand-1890-1969
  source 1..80: mol_type = other DNA
gtacccgtgaataacgtgggacaggcagtaaactccatggacgcctatcgcatcggtgttaaccccaatacaggcgctgg

SEQ ID NO: 21810 - DNA, 80 bp, synthetic construct
  misc_feature 1..80: note = Synthetic: >EVB75-cand-1950-2029
  source 1..80: mol_type = other DNA
aaccccaatacaggcgctgggacacaagtgttcggtttccccctccaacctggattcagttcagtattcaagaggacact

SEQ ID NO: 21811 - DNA, 80 bp, synthetic construct
  misc_feature 1..80: note = Synthetic: >EVB75-cand-2050-2129
  source 1..80: mol_type = other DNA
attatgcacactggagcggtagtatcaagttgacctttgtgttctgtggatctgctatggcaacaggaaagttcttactg

SEQ ID NO: 21812 - DNA, 80 bp, synthetic construct
  misc_feature 1..80: note = Synthetic: >EVB75-cand-2100-2179
  source 1..80: mol_type = other DNA
tctgctatggcaacaggaaagttcttactggcatactctccaccaggtgctggtgcaccaactgatcgtaagggagctat

SEQ ID NO: 21813 - DNA, 80 bp, synthetic construct
  misc_feature 1..80: note = Synthetic: >EVB75-cand-2210-2289
  source 1..80: mol_type = other DNA
gttgcaatctagttgtgtcttatgtgttccatggataagtcaaacacactaccgattcgtgcaggaggatgcgtacacaa

SEQ ID NO: 21814 - DNA, 80 bp, synthetic construct
  misc_feature 1..80: note = Synthetic: >EVB75-cand-2290-2369
  source 1..80: mol_type = other DNA
atgcagggtacgttacttgttggttccagaccagcattgtcgcaccagcagacgcccagagtaagtgctacatcatgtgc

SEQ ID NO: 21815 - DNA, 80 bp, synthetic construct
  misc_feature 1..80: note = Synthetic: >EVB75-cand-2370-2449
  source 1..80: mol_type = other DNA
tttgtatctgcgtgcaacgacttttcagtcaggttgttgcgcgacaccccattcatatctcaggaaagtttcttccaagg

SEQ ID NO: 21816 - DNA, 80 bp, synthetic construct
  misc_feature 1..80: note = Synthetic: >EVB75-cand-2470-2549
  source 1..80: mol_type = other DNA
aaggcgttataaccagagtggccgacaccattgccagcggaccatctaactccactgaagttccagctctgactgctgta

SEQ ID NO: 21817 - DNA, 80 bp, synthetic construct
  misc_feature 1..80: note = Synthetic: >EVB75-cand-2500-2579
  source 1..80: mol_type = other DNA
ttgccagcggaccatctaactccactgaagttccagctctgactgctgtagagacagggcacacatcgcaggtcacaccg

SEQ ID NO: 21818 - DNA, 80 bp, synthetic construct
  misc_feature 1..80: note = Synthetic: >EVB75-cand-2660-2739
  source 1..80: mol_type = other DNA
agcatgtgtttacttcacttcgtacaaaacacttgaccaaaaacaagagaatagatattctagttggatcataaccaccc

SEQ ID NO: 21819 - DNA, 80 bp, synthetic construct
  misc_feature 1..80: note = Synthetic: >EVB75-cand-2720-2799
  source 1..80: mol_type = other DNA
tagttggatcataaccacccgtaaggtcgcccaactgagaaggaaaatggagatgttcacatacatgagatttgatgtgg

SEQ ID NO: 21820 - DNA, 80 bp, synthetic construct
  misc_feature 1..80: note = Synthetic: >EVB75-cand-2800-2879
  source 1..80: mol_type = other DNA
aagtcacttttgtgattactagttcccaggatcaatctacagctctaagtcaagacacaccagtgcttactcatcagata

SEQ ID NO: 21821 - DNA, 80 bp, synthetic construct
  misc_feature 1..80: note = Synthetic: >EVB75-cand-2880-2959
  source 1..80: mol_type = other DNA
atgtacgtgcctcctggcggtccagtgccgtcgtctgtggatagctacagctggcaatcatcaaccaaccccagcatctt

SEQ ID NO: 21822 - DNA, 80 bp, synthetic construct
  misc_feature 1..80: note = Synthetic: >EVB86-cand-4060-4139
  source 1..80: mol_type = other DNA
tcacagagatgaccaatgcttgcaagggcatggaatggattgcaatcaaaatccaaaaattcatagaatggttaaaaatc

SEQ ID NO: 21823 - DNA, 80 bp, synthetic construct
  misc_feature 1..80: note = Synthetic: >EVB86-cand-4140-4219
  source 1..80: mol_type = other DNA
aaaattctaccggaggtgaaggagaaacatgaattcctaaacaggctgaagcaactgcccttgttagaaagtcaaattgc

SEQ ID NO: 21824 - DNA, 80 bp, synthetic construct
  misc_feature 1..80: note = Synthetic: >EVB86-cand-4220-4299
  source 1..80: mol_type = other DNA
taccattgaacaaagcgccccttcacaaagcgatcaagaacaactattctccaatgttcagtactttgcgcattactgca

SEQ ID NO: 21825 - DNA, 80 bp, synthetic construct
  misc_feature 1..80: note = Synthetic: >EVB86-cand-4380-4459
  source 1..80: mol_type = other DNA
aagtccaaatgccgcattgaacccgtctgtctattgctccatgggagccctggtgctgggaaatcagtagctacaaacct

SEQ ID NO: 21826 - DNA, 80 bp, synthetic construct
  misc_feature 1..80: note = Synthetic: >EVB86-cand-4460-4539
  source 1..80: mol_type = other DNA
aatcgggcgctcccttgctgaaaagctcaatagctcagtgtattccctaccaccagatcctgatcacttcgatggttaca

SEQ ID NO: 21827 - DNA, 80 bp, synthetic construct
  misc_feature 1..80: note = Synthetic: >EVB86-cand-4540-4619
  source 1..80: mol_type = other DNA
aacaacaggcagttgtgatcatggatgacttatgtcagaacccagatgggaaagatgtctctttgttttgccaaatggtg

SEQ ID NO: 21828 - DNA, 80 bp, synthetic construct
  misc_feature 1..80: note = Synthetic: >EVB86-cand-4620-4699
  source 1..80: mol_type = other DNA
tccagtgttgactttgtcccaccaatggcggcactagaggaaaaaggcatcctcttcacctcaccattcgtccttgcttc

SEQ ID NO: 21829 - DNA, 80 bp, synthetic construct
  misc_feature 1..80: note = Synthetic: >EVB86-cand-4700-4779
  source 1..80: mol_type = other DNA
cactaatgcagggtctatcaacgcccccaccgtatcagatagtagagccttggccagaaggttccactttgacatgaata

SEQ ID NO: 21830 - DNA, 80 bp, synthetic construct
  misc_feature 1..80: note = Synthetic: >EVB86-cand-4860-4939
  source 1..80: mol_type = other DNA
ccagtcaactttaagaaatgttgcccactggtgtgtggtaaagccattcagttcatagacagaagaacacaggtgaggta

SEQ ID NO: 21831 - DNA, 80 bp, synthetic construct
  misc_feature 1..80: note = Synthetic: >EVB86-cand-4940-5019
  source 1..80: mol_type = other DNA
ttcactagatatgctcgtgactgagatgttcagggagtataaccacaggcatagtgtgggtgcaacactcgaggcactct

SEQ ID NO: 21832 - DNA, 80 bp, synthetic construct
  misc_feature 1..80: note = Synthetic: >EVB86-cand-5020-5099
  source 1..80: mol_type = other DNA
tccaaggtccacctgtgtacagagaaatcaaaattagtgttgcaccagaaaccccccccccaccagcaatagcagatcta

SEQ ID NO: 21833 - DNA, 80 bp, synthetic construct
  misc_feature 1..80: note = Synthetic: >EVB86-cand-5100-5179
  source 1..80: mol_type = other DNA
ctgaagtcagtggatagtgaggctgtcagggaatactgcaaggaaaagggatggctagtgcccgaaattaattccacttt

SEQ ID NO: 21834 - DNA, 80 bp, synthetic construct
  misc_feature 1..80: note = Synthetic: >EVB86-cand-5180-5259
  source 1..80: mol_type = other DNA
gcaaatcgagaaacatgtgagcagggcttttatttgtctgcaggcactcaccaccttcgtctccgtggcagggatcatct

SEQ ID NO: 21835 - DNA, 80 bp, synthetic construct
  misc_feature 1..80: note = Synthetic: >EVB86-cand-5260-5339
  source 1..80: mol_type = other DNA
acatcatatacaaattgtttgcgggtttccagggagcttacaccggcatgcccaaccagaagcccaaggtaccgactctg

SEQ ID NO: 21836 - DNA, 80 bp, synthetic construct
  misc_feature 1..80: note = Synthetic: >EVB86-cand-5340-5419
  source 1..80: mol_type = other DNA
agacaggcgaaagtacaaggaccagctttcgaatttgcagtggctatgatgaaaaggaacgctagtactgtgaagactga

SEQ ID NO: 21837 - DNA, 80 bp, synthetic construct
  misc_feature 1..80: note = Synthetic: >EVB86-cand-5420-5499
  source 1..80: mol_type = other DNA
atacggcgagttcactatgctcggcgtctatgacaggtgggcggtgttaccccgacacgccaaacctgggcctaccattc

SEQ ID NO: 21838 - DNA, 80 bp, synthetic construct
  misc_feature 1..80: note = Synthetic: >EVB88-cand-2140-2219
  source 1..80: mol_type = other DNA
gtcatactcaccaccaggagcttcagtccccgagagtaggactcaagccatgctaggcactcatgttatatgggacttgg

SEQ ID NO: 21839 - DNA, 80 bp, synthetic construct
  misc_feature 1..80: note = Synthetic: >EVB88-cand-2240-2319
  source 1..80: mol_type = other DNA
ctgtgtgtgccatggataagtcagacacactaccgcttcgtacatgaagacgtgtacactagcgccggctacgtaactgc

SEQ ID NO: 21840 - DNA, 80 bp, synthetic construct
  misc_feature 1..80: note = Synthetic: >EVB88-cand-2320-2399
  source 1..80: mol_type = other DNA
atggtaccagaccaccatcgtggtaccaccgcaaacaccaaccagttgcaagatactgtgctttgtctcagcatgtaatg

SEQ ID NO: 21841 - DNA, 80 bp, synthetic construct
  misc_feature 1..80: note = Synthetic: >EVB88-cand-2380-2459
  source 1..80: mol_type = other DNA
ctttgtctcagcatgtaatgacttctctgtgcgaatgctccgggacacaccacacatggaacaagaagcagaactccaag

SEQ ID NO: 21842 - DNA, 80 bp, synthetic construct
  misc_feature 1..80: note = Synthetic: >EVB88-cand-2480-2559
  source 1..80: mol_type = other DNA
gctccaactgtggctgatacccagccaagcaccagtcaaaacacagagcgcataccagcactcacagcggctgagaccgg

SEQ ID NO: 21843 - DNA, 80 bp, synthetic construct
  misc_feature 1..80: note = Synthetic: >EVB88-cand-2560-2639
  source 1..80: mol_type = other DNA
acacacttcgcaagtagtgcccagcgacaccatgcaaacacgccacgtatgcaactaccactctaggtccgaatccacca

SEQ ID NO: 21844 - DNA, 80 bp, synthetic construct
  misc_feature 1..80: note = Synthetic: >EVB88-cand-2610-2689
  source 1..80: mol_type = other DNA
gcaactaccactctaggtccgaatccaccatagaaaacttctttggtagggctgcatgcgtcaaagtgaggcaatacagc

SEQ ID NO: 21845 - DNA, 80 bp, synthetic construct
  misc_feature 1..80: note = Synthetic: >EVB88-cand-2720-2799
  source 1..80: mol_type = other DNA
tacactagctgggatatatccgttagagacatggcgcagattaggcgcaaatttgaaatgttcacatacatgagatttga

SEQ ID NO: 21846 - DNA, 80 bp, synthetic construct
  misc_feature 1..80: note = Synthetic: >EVB88-cand-2800-2879
  source 1..80: mol_type = other DNA
tatagagatcaccatcgtcatcaccagctatcagaagcaaggcacaaacctagaccaggacatgcctgttttaacccacc

SEQ ID NO: 21847 - DNA, 80 bp, synthetic construct
  misc_feature 1..80: note = Synthetic: >EVB88-cand-2880-2959
  source 1..80: mol_type = other DNA
agatcatgtatgtgccaccgggagggcctatacccaaaagtgtaaccagctttgcttggcaaacctccaccaacccaagt

SEQ ID NO: 21848 - DNA, 80 bp, synthetic construct
  misc_feature 1..80: note = Synthetic: >EVB88-cand-2960-3039
  source 1..80: mol_type = other DNA
gtgttttggacagaaggcaatgcaccagcacgcatttctataccattcattagtgtgggcaatgcatacagcagcttcta

SEQ ID NO: 21849 - DNA, 80 bp, synthetic construct
  misc_feature 1..80: note = Synthetic: >EVB88-cand-2990-3069
  source 1..80: mol_type = other DNA
cgcatttctataccattcattagtgtgggcaatgcatacagcagcttctacgatgggtggtcacacttcacccagcgagg

SEQ ID NO: 21850 - DNA, 80 bp, synthetic construct
  misc_feature 1..80: note = Synthetic: >EVB88-cand-3130-3209
  source 1..80: mol_type = other DNA
ggatagcccaaacaagataatctcaaatgctaggatttactttaaaccaaagcatgtgcaagcatgggttccgagaccac

SEQ ID NO: 21851 - DNA, 80 bp, synthetic construct
  misc_feature 1..80: note = Synthetic: >EVB88-cand-3220-3299
  source 1..80: mol_type = other DNA
caaatacatcaacaggtacaatgtcaatttccacgttgaaccagtggcagaggcgcgcgccgacataaacaccgtgccca

SEQ ID NO: 21852 - DNA, 80 bp, synthetic construct
  misc_feature 1..80: note = Synthetic: >EVB88-cand-3250-3329
  source 1..80: mol_type = other DNA
ccacgttgaaccagtggcagaggcgcgcgccgacataaacaccgtgcccaacttggatcacgaacccattcgcatgcgca

SEQ ID NO: 21853 - DNA, 80 bp, synthetic construct
  misc_feature 1..80: note = Synthetic: >EVB88-cand-3380-3459
  source 1..80: mol_type = other DNA
agggtagtcaacaggcatctcgccacacacaacgattggcaaaactgtgtttgggaggattacaacagagatctactagt

SEQ ID NO: 21854 - DNA, 80 bp, synthetic construct
  misc_feature 1..80: note = Synthetic: >HCV.A16-cand-3300-3379
  source 1..80: mol_type = other DNA
agcactagtagagacaagataacaacgttgggaaagtttggacagcaatcaggcgccatatatgtgggcaactatagggt

SEQ ID NO: 21855 - DNA, 80 bp, synthetic construct
  misc_feature 1..80: note = Synthetic: >HCV.A16-cand-3380-3459
  source 1..80: mol_type = other DNA
ggtgaatcgacaccttgccacacacaacgactgggcaaaccttgtgtgggaggacagctctagggacttgttagtctctt

SEQ ID NO: 21856 - DNA, 80 bp, synthetic construct
  misc_feature 1..80: note = Synthetic: >HCV.A16-cand-3480-3559
  source 1..80: mol_type = other DNA
gacaccatcgctaggtgcaattgtcaaaccggagtatactattgcagctccaaaaggaaacactacccggttagtttcac

SEQ ID NO: 21857 - DNA, 80 bp, synthetic construct
  misc_feature 1..80: note = Synthetic: >HCV.A16-cand-3550-3629
  source 1..80: mol_type = other DNA
ttagtttcaccaagcccagtctgatatttgtggaagctagtgagtattacccagctagatatcaatcccatctcatgctt

SEQ ID NO: 21858 - DNA, 80 bp, synthetic construct
  misc_feature 1..80: note = Synthetic: >HCV.A16-cand-3630-3709
  source 1..80: mol_type = other DNA
gctgtgggtcactcggaacctggtgactgtggtggcatcctcaggtgccagcatggtgtggtaggaattgtctccactgg

SEQ ID NO: 21859 - DNA, 80 bp, synthetic construct
  misc_feature 1..80: note = Synthetic: >HCV.A16-cand-3730-3809
  source 1..80: mol_type = other DNA
ttgccgatgtcagagaccttctatggctggatgaagaagcaatggagcaaggagtgtctgactatatcaaaggcctcggt

SEQ ID NO: 21860 - DNA, 80 bp, synthetic construct
  misc_feature 1..80: note = Synthetic: >HCV.A16-cand-3790-3869
  source 1..80: mol_type = other DNA
actatatcaaaggcctcggtgacgcttttggtatgggcttcactgatgcagtgtctagggaagtagaggcattgaagaac

SEQ ID NO: 21861 - DNA, 80 bp, synthetic construct
  misc_feature 1..80: note = Synthetic: >HCV.A16-cand-3870-3949
  source 1..80: mol_type = other DNA
catttaattggctcagaaggagctgttgagaagatcttgaagaacttggtgaagctaatctcagctttagtcatagtcgt

SEQ ID NO: 21862 - DNA, 80 bp, synthetic construct
  misc_feature 1..80: note = Synthetic: >HCV.A16-cand-3950-4029
  source 1..80: mol_type = other DNA
taggagtgactatgacatggtcaccctcacggctacgctagccctgattgggtgtcatggaagcccttgggcatggatta

SEQ ID NO: 21863 - DNA, 80 bp, synthetic construct
  misc_feature 1..80: note = Synthetic: >HCV.A16-cand-4030-4109
  source 1..80: mol_type = other DNA
aagcgaagacagcctctattcttggcattcccatagtgcaaaaacagagcgcttcatggctaaagaagtttaatgatatg

SEQ ID NO: 21864 - DNA, 80 bp, synthetic construct
  misc_feature 1..80: note = Synthetic: >HCV.A16-cand-4110-4189
  source 1..80: mol_type = other DNA
gccaacgctgcgaaagggcttgagtggatttctagtaaaatcagcaagttcattgattggcttaaggaaaagattattcc

SEQ ID NO: 21865 - DNA, 80 bp, synthetic construct
  misc_feature 1..80: note = Synthetic: >HCV.A16-cand-4190-4269
  source 1..80: mol_type = other DNA
ggccgctaaagagaaagttgaattcttaaacaacctgaaacagcttcccttgttggagaaccaaatctcaaatcttgaac

SEQ ID NO: 21866 - DNA, 80 bp, synthetic construct
  misc_feature 1..80: note = Synthetic: >HCV.A16-cand-4270-4349
  source 1..80: mol_type = other DNA
agtctgctgcctcgcaagaggatctagaagctatgtttggtaatgtgtcatatttagcccacttctgccgcaagttccag

SEQ ID NO: 21867 - DNA, 80 bp, synthetic construct
  misc_feature 1..80: note = Synthetic: >HCV.A16-cand-4430-4509
  source 1..80: mol_type = other DNA
ccgtattgaacctgtatgcttaatcattagaggctccccaggaacaggtaagtcacttgctacgggcatcattgctagag

SEQ ID NO: 21868 - DNA, 80 bp, synthetic construct
  misc_feature 1..80: note = Synthetic: >HCV.A16-cand-4510-4589
  source 1..80: mol_type = other DNA
ctattgctgacaaataccactctagcgtttactcactccctccagacccagaccattttgatggatacaagcaacaagta

SEQ ID NO: 21869 - DNA, 80 bp, synthetic construct
  misc_feature 1..80: note = Synthetic: >HCV.A16-cand-4590-4669
  source 1..80: mol_type = other DNA
gtcactgttatggatgatctctgtcaaaacccagatggaaaggacatgtccctattttgccaaatggtttctacagtgga

SEQ ID NO: 21870 - DNA, 80 bp, synthetic construct
  misc_feature 1..80: note = Synthetic: >HCV.A18-cand-2480-2559
  source 1..80: mol_type = other DNA
ttggaagacctcatccaacaagtggccacgaatgcattgagtctgtcgcagcccacaagacccgcacttccaccagcaga

SEQ ID NO: 21871 - DNA, 80 bp, synthetic construct
  misc_feature 1..80: note = Synthetic: >HCV.A18-cand-2560-2639
  source 1..80: mol_type = other DNA
acaaagtgtgccaaacaccagtcagaccaccccagaacattcaaaggaagtacccgcactcactgcagtagagaccggtg

SEQ ID NO: 21872 - DNA, 80 bp, synthetic construct
  misc_feature 1..80: note = Synthetic: >HCV.A18-cand-2640-2719
  source 1..80: mol_type = other DNA
caaccaacccattggaaccaggtgacacagtgcaaactagacatgttgttcaaacaagatcaaggagcgaaagtacggtg

SEQ ID NO: 21873 - DNA, 80 bp, synthetic construct
  misc_feature 1..80: note = Synthetic: >HCV.A18-cand-2740-2819
  source 1..80: mol_type = other DNA
ggcgtgtgtcacgattatgggagttgacaattacaatgaaagcttgaccagtagtcaaaaatccaccctattcgccactt

SEQ ID NO: 21874 - DNA, 80 bp, synthetic construct
  misc_feature 1..80: note = Synthetic: >HCV.A18-cand-2800-2879
  source 1..80: mol_type = other DNA
atccaccctattcgccacttggaatattacatacactgatacagtacagttgaggagaaaattggaaatgttcacctact

SEQ ID NO: 21875 - DNA, 80 bp, synthetic construct
  misc_feature 1..80: note = Synthetic: >HCV.A18-cand-2880-2959
  source 1..80: mol_type = other DNA
ccagatttgacattgaatttaccttcgtagtaactgaaagttactactcgtcaaacagtggccatgccttgaatcaggtg

SEQ ID NO: 21876 - DNA, 80 bp, synthetic construct
  misc_feature 1..80: note = Synthetic: >HCV.A18-cand-2960-3039
  source 1..80: mol_type = other DNA
tatcaaatcatgtatgtgccaccaggcgctccaattcctaagaagtgggatgattatacctggcaaacatcatcaaaccc

SEQ ID NO: 21877 - DNA, 80 bp, synthetic construct
  misc_feature 1..80: note = Synthetic: >HCV.A18-cand-3040-3119
  source 1..80: mol_type = other DNA
ctcaatattctacacctatggaacagcaccacccagaatttcgatcccttttgtgggcattgcaaacgcgtactcacatt

SEQ ID NO: 21878 - DNA, 80 bp, synthetic construct
  misc_feature 1..80: note = Synthetic: >HCV.A18-cand-3090-3169
  source 1..80: mol_type = other DNA
ttgtgggcattgcaaacgcgtactcacatttttatgacggatatgcaactgtaccactcaagacagacactacggatccg

SEQ ID NO: 21879 - DNA, 80 bp, synthetic construct
  misc_feature 1..80: note = Synthetic: >HCV.A18-cand-3190-3269
  source 1..80: mol_type = other DNA
agtttccatcaatgactttggtttgttggcggtgcgagttgtcaacgagcacaacccggtaagagtgtcttcaaagataa

SEQ ID NO: 21880 - DNA, 80 bp, synthetic construct
  misc_feature 1..80: note = Synthetic: >HCV.A18-cand-3260-3339
  source 1..80: mol_type = other DNA
tcaaagataagagtgtacatgaagcctaaacatgtcagagtgtggtgcccacgaccaccacgtgccgtggagtactacgg

SEQ ID NO: 21881 - DNA, 80 bp, synthetic construct
  misc_feature 1..80: note = Synthetic: >HCV.A18-cand-3350-3429
  source 1..80: mol_type = other DNA
gattacaaggcaaacacattgacacctctccctaccaagaacttaactacttatggatttggacatcagaacaaagcggt

SEQ ID NO: 21882 - DNA, 80 bp, synthetic construct
  misc_feature 1..80: note = Synthetic: >HCV.A18-cand-3430-3509
  source 1..80: mol_type = other DNA
gtatgtggcaggttataaaatagtaaattaccacctggcttcagcagaagactttagatcctgcgttaaaagtatgtggg

SEQ ID NO: 21883 - DNA, 80 bp, synthetic construct
  misc_feature 1..80: note = Synthetic: >HCV.A18-cand-3510-3589
  source 1..80: mol_type = other DNA
agagagacatcatggtggttgagtcaaaagcacaaggcattgatcagatcgctaggtgtacatgcacaactggagtgtac

SEQ ID NO: 21884 - DNA, 80 bp, synthetic construct
  misc_feature 1..80: note = Synthetic: >HCV.A18-cand-3590-3669
  source 1..80: mol_type = other DNA
tactgtgagtctagaggaaaacactaccccatcacggttacccaacccacattccagtggatggaaaagaacgacttttt

SEQ ID NO: 21885 - DNA, 80 bp, synthetic construct
  misc_feature 1..80: note = Synthetic: >HCV.A18-cand-3640-3719
  source 1..80: mol_type = other DNA
attccagtggatggaaaagaacgactttttcccagcacgataccaatcgcacatgaccatcggtcacggatttgcagccc

SEQ ID NO: 21886 - DNA, 80 bp, synthetic construct
  misc_feature 1..80: note = Synthetic: >HCV.B3-cand-0-79
  source 1..80: mol_type = other DNA
aaaacagcctgtgggttgatcccacccacagggcccattgggcgctagcactctggtatcacggtacctttgtgcgcctg

SEQ ID NO: 21887 - DNA, 80 bp, synthetic construct
  misc_feature 1..80: note = Synthetic: >HCV.B3-cand-80-159
  source 1..80: mol_type = other DNA
ttttatacaccctcccccaactgtaacttagaagcataacacaaatggtcaacaggcagcccagcacaccagctgggttt

SEQ ID NO: 21888 - DNA, 80 bp, synthetic construct
  misc_feature 1..80: note = Synthetic: >HCV.B3-cand-300-379
  source 1..80: mol_type = other DNA
accccagtgtagatcaggtcgatgagtcaccgcattccccacgggcgaccgtggcggtggctgcgttggcggcctgccca

SEQ ID NO: 21889 - DNA, 80 bp, synthetic construct
  misc_feature 1..80: note = Synthetic: >HCV.B3-cand-630-709
  source 1..80: mol_type = other DNA
tggccatccggtgaccaacagagcaattatatatctctttgttggatttataccatttaacttcaaagattttaaaacct

SEQ ID NO: 21890 - DNA, 80 bp, synthetic construct
  misc_feature 1..80: note = Synthetic: >HCV.B3-cand-710-789
  source 1..80: mol_type = other DNA
tacaattcattattgagttgaatacggcaaaatgggagcacaagtatcaacgcagaaaactggtgcacatgagacagggc

SEQ ID NO: 21891 - DNA, 80 bp, synthetic construct
  misc_feature 1..80: note = Synthetic: >HCV.B3-cand-790-869
  source 1..80: mol_type = other DNA
tgaatgccagcggcaattccataattcactacacaaatattaattactacaaggatgcagcttcaaactcagccactaga

SEQ ID NO: 21892 - DNA, 80 bp, synthetic construct
  misc_feature 1..80: note = Synthetic: >HCV.B3-cand-900-979
  source 1..80: mol_type = other DNA
acagaaccagttaaggatatcatgataaaatcactcccagctctaaactcccccacagtagaggagtgtggatacagtga

SEQ ID NO: 21893 - DNA, 80 bp, synthetic construct
  misc_feature 1..80: note = Synthetic: >HCV.B3-cand-950-1029
  source 1..80: mol_type = other DNA
ccccacagtagaggagtgtggatacagtgacagggtgaggtccatcacattgggtaactccaccattactactcaggagt

SEQ ID NO: 21894 - DNA, 80 bp, synthetic construct
  misc_feature 1..80: note = Synthetic: >HCV.B3-cand-1030-1109
  source 1..80: mol_type = other DNA
gcgccaacgtggtggtgggatatggagtgtggccagattacctaaaggatagtgaggcaacagctgaggaccaaccgaca

SEQ ID NO: 21895 - DNA, 80 bp, synthetic construct
  misc_feature 1..80: note = Synthetic: >HCV.B3-cand-1110-1189
  source 1..80: mol_type = other DNA
caaccagacgttgccacatgtaggttctatacgcttgattctgtgcagtggcagaaaacctcaccaggatggtggtggaa

SEQ ID NO: 21896 - DNA, 80 bp, synthetic construct
  misc_feature 1..80: note = Synthetic: >HCV.B3-cand-1220-1299
  source 1..80: mol_type = other DNA
gtttgggcagaatatgcagtaccactacttaggccgaactgggtataccatacatgtgcagtgcaatgcatccaagttcc

SEQ ID NO: 21897 - DNA, 80 bp, synthetic construct
  misc_feature 1..80: note = Synthetic: >HCV.B3-cand-1270-1349
  source 1..80: mol_type = other DNA
tacatgtgcagtgcaatgcatccaagttccaccaaggatgcttgctagtagtgtgtgtaccggaagctgagatgggctgc

SEQ ID NO: 21898 - DNA, 80 bp, synthetic construct
  misc_feature 1..80: note = Synthetic: >HCV.B3-cand-1310-1389
  source 1..80: mol_type = other DNA
cttgctagtagtgtgtgtaccggaagctgagatgggctgcgcaactctagacaacacaccatcaagtgcagaattgctag

SEQ ID NO: 21899 - DNA, 80 bp, synthetic construct
  misc_feature 1..80: note = Synthetic: >HCV.B3-cand-1400-1479
  source 1..80: mol_type = other DNA
tgcaaaagagtttgcagacaaaccggtcgcatctgggtccaacaagttggtgcagagggtggtgtataatgcaggcatgg

SEQ ID NO: 21900 - DNA, 80 bp, synthetic construct
  misc_feature 1..80: note = Synthetic: >HCV.B3-cand-1510-1589
  source 1..80: mol_type = other DNA
cacaccaatggatcaacttgcgcaccaacaatagcgccacaattgtgatgccatacacaaacagtgtgccaatggataac

SEQ ID NO: 21901 - DNA, 80 bp, synthetic construct
  misc_feature 1..80: note = Synthetic: >HCV.B3-cand-1590-1669
  source 1..80: mol_type = other DNA
atgttcagacacaacaatgtcacactgatggtgattccatttgtgcccctagattactgccctgggtccaccacgtacgt

SEQ ID NO: 21902 - DNA, 80 bp, synthetic construct
  misc_feature 1..80: note = Synthetic: >HCV.B4-cand-2000-2079
  source 1..80: mol_type = other DNA
agcatcaagtgtgttgcagagaacactattgggagagatattgaattattacacacactggtcagggagcctgaagttga

SEQ ID NO: 21903 - DNA, 80 bp, synthetic construct
  misc_feature 1..80: note = Synthetic: >HCV.B4-cand-2070-2149
  source 1..80: mol_type = other DNA
ctgaagttgacatttgtgttctgtggatctgccatggcgaccggcaagtttttgcttgcatactctccacctggagcagg

SEQ ID NO: 21904 - DNA, 80 bp, synthetic construct
  misc_feature 1..80: note = Synthetic: >HCV.B4-cand-2160-2239
  source 1..80: mol_type = other DNA
agcaggaagaacgctatgctgggaacccacgttatatgggatgttggtttacaatccagctgtgtgctctgtgtaccatg

SEQ ID NO: 21905 - DNA, 80 bp, synthetic construct
  misc_feature 1..80: note = Synthetic: >HCV.B4-cand-2240-2319
  source 1..80: mol_type = other DNA
gattagccaaacgcactacaggtatgttgtggatgacaaatacacagctagtgggttcatatcatgctggtatcaaacca

SEQ ID NO: 21906 - DNA, 80 bp, synthetic construct
  misc_feature 1..80: note = Synthetic: >HCV.B4-cand-2320-2399
  source 1..80: mol_type = other DNA
atgtcattgtcccagcagaagcacagaagtcgtgctacataatgtgctttgtgtcagcatgtaacgacttctcagttcgc

SEQ ID NO: 21907 - DNA, 80 bp, synthetic construct
  misc_feature 1..80: note = Synthetic: >HCV.B4-cand-2400-2479
  source 1..80: mol_type = other DNA
atgttaagggacacacaatttatcaagcaagaaaacttttatcaaggaccaacagaggactctgtggagcgagcaatggg

SEQ ID NO: 21908 - DNA, 80 bp, synthetic construct
  misc_feature 1..80: note = Synthetic: >HCV.B4-cand-2490-2569
  source 1..80: mol_type = other DNA
gacaccattgccagcggcccatcaaactctgaacaaatcccagccctaacagccgtggaaactggacatacctctcaagt

SEQ ID NO: 21909 - DNA, 80 bp, synthetic construct
  misc_feature 1..80: note = Synthetic: >HCV.B4-cand-2570-2649
  source 1..80: mol_type = other DNA
tgacccaagtgacaccatgcaaactagacacgtgcacaattaccactcaagatcagagtcatctatagaaaatttcttgt

SEQ ID NO: 21910 - DNA, 80 bp, synthetic construct
  misc_feature 1..80: note = Synthetic: >HCV.B4-cand-2650-2729
  source 1..80: mol_type = other DNA
gcagatccgcatgtgtaatttacataaaatattcaagtgctgagtcaaacaacttgaagcgttatgcagagtgggtcatt

SEQ ID NO: 21911 - DNA, 80 bp, synthetic construct
  misc_feature 1..80: note = Synthetic: >HCV.B4-cand-2730-2809
  source 1..80: mol_type = other DNA
aacacaagacaggtggctcagctgcgacggaagatggaaatgttcacttacattcggtgtgacatggaactgacatttgt

SEQ ID NO: 21912 - DNA, 80 bp, synthetic construct
  misc_feature 1..80: note = Synthetic: >HCV.B4-cand-2800-2879
  source 1..80: mol_type = other DNA
tgacatttgtcataaccagccatcaggaaatgtccaccgccaccaactctgatgttccagtccagacacaccaaataatg

SEQ ID NO: 21913 - DNA, 80 bp, synthetic construct
  misc_feature 1..80: note = Synthetic: >HCV.B4-cand-2880-2959
  source 1..80: mol_type = other DNA
tacgtgccacctggaggccctgtgccaacatcagtcaatgactatgtgtggcagacatccaccaaccccagtatcttttg

SEQ ID NO: 21914 - DNA, 80 bp, synthetic construct
  misc_feature 1..80: note = Synthetic: >HCV.B4-cand-2960-3039
  source 1..80: mol_type = other DNA
gacagagggcaatgcaccaccaagaatgtccataccgttcatgagcataggcaatgcatacaccatgttttatgacggtt

SEQ ID NO: 21915 - DNA, 80 bp, synthetic construct
  misc_feature 1..80: note = Synthetic: >HCV.B4-cand-3010-3089
  source 1..80: mol_type = other DNA
gcaatgcatacaccatgttttatgacggttggtcaaatttctccagggacggcatatatggttacaactcactaaacaac

SEQ ID NO: 21916 - DNA, 80 bp, synthetic construct
  misc_feature 1..80: note = Synthetic: >HCV.B4-cand-3110-3189
  source 1..80: mol_type = other DNA
acatgttaatgattccagtccaggaggattaaccagcaccatccgcatttacttcaaaccaaagcatgtcaaagcgtatg

SEQ ID NO: 21917 - DNA, 80 bp, synthetic construct
  misc_feature 1..80: note = Synthetic: >HCV.B4-cand-3190-3269
  source 1..80: mol_type = other DNA
tgccacgcccaccacgcttgtgtcagtacaagaaagccaagaatgtgaattttgatgttgaggctgtcaccactgaacgt

SEQ ID NO: 21918 - DNA, 80 bp, synthetic construct
  misc_feature 1..80: note = Synthetic: >LR862007.1-cand-1940-2019
  source 1..80: mol_type = other DNA
gtttgataatgacctaacagatgaaagtgatattgcatatgaatatgcattaatagcagatagtaatagtaacgccgctg

SEQ ID NO: 21919 - DNA, 80 bp, synthetic construct
  misc_feature 1..80: note = Synthetic: >LR862007.1-cand-2020-2099
  source 1..80: mol_type = other DNA
catttttaaaaagcaactgccaggcaaaatacctaaaagattgtgcagttatgtgtaggcattataaaagagcacaaaaa

SEQ ID NO: 21920 - DNA, 80 bp, synthetic construct
  misc_feature 1..80: note = Synthetic: >LR862007.1-cand-2070-2149
  source 1..80: mol_type = other DNA
atgtgtaggcattataaaagagcacaaaaaagacaaatgagtatgtcacagtggataaaatggagatgtgataaaataga

SEQ ID NO: 21921 - DNA, 80 bp, synthetic construct
  misc_feature 1..80: note = Synthetic: >LR862007.1-cand-2180-2259
  source 1..80: mol_type = other DNA
atttttaagatatcaaggagtagaatttataacgtttttatgtgcattaaaagattttttaaaaggtaccccaaaaagaa

SEQ ID NO: 21922 - DNA, 80 bp, synthetic construct
  misc_feature 1..80: note = Synthetic: >LR862007.1-cand-2260-2339
  source 1..80: mol_type = other DNA
attgcattgtgctgtgtgggccagcaaatacaggcaagtcatactttggaatgagcctgctacattttttacaaggaact

SEQ ID NO: 21923 - DNA, 80 bp, synthetic construct
  misc_feature 1..80: note = Synthetic: >LR862007.1-cand-2340-2419
  source 1..80: mol_type = other DNA
gtaatttcacatgtaaattcaaatagtcacttttggctagaacctttaacagatgctaaattagctatgctagacgatgc

SEQ ID NO: 21924 - DNA, 80 bp, synthetic construct
  misc_feature 1..80: note = Synthetic: >LR862007.1-cand-2420-2499
  source 1..80: mol_type = other DNA
aacagatagttgttggacatattttgatacatatatgcgaaatgctttggatggcaatcctataagtgtagatagaaagc

SEQ ID NO: 21925 - DNA, 80 bp, synthetic construct
  misc_feature 1..80: note = Synthetic: >LR862007.1-cand-2500-2579
  source 1..80: mol_type = other DNA
ataggcacctagtacaaattaaatgtccaccaatgcttattacatcaaatacaaatccagttacagataacaggtggcca

SEQ ID NO: 21926 - DNA, 80 bp, synthetic construct
  misc_feature 1..80: note = Synthetic: >LR862007.1-cand-2580-2659
  source 1..80: mol_type = other DNA
tatttaaatagcagattaatggtatttaaatttccaaacaaattgccatttgacaaaaatagaaatccagtatatacaat

SEQ ID NO: 21927 - DNA, 80 bp, synthetic construct
  misc_feature 1..80: note = Synthetic: >LR862007.1-cand-2660-2739
  source 1..80: mol_type = other DNA
taatgacagaaactggaaatgtttttttgaaaggacgtggtgcagattagatttgaacgaggaagaggaagatgcagaca

SEQ ID NO: 21928 - DNA, 80 bp, synthetic construct
  misc_feature 1..80: note = Synthetic: >LR862007.1-cand-2740-2819
  source 1..80: mol_type = other DNA
gtgatggacaccctttcgcagcgtttaagtgtgttacaggatcaaatattagaacattatgaaaacgatagtaaagacat

SEQ ID NO: 21929 - DNA, 80 bp, synthetic construct
  misc_feature 1..80: note = Synthetic: >LR862007.1-cand-2840-2919
  source 1..80: mol_type = other DNA
ggaaactggtgcgtatggaaaatgtaattttatttgcagcaagagagaacaatatacatacattaaaccaccaggtggtg

SEQ ID NO: 21930 - DNA, 80 bp, synthetic construct
  misc_feature 1..80: note = Synthetic: >LR862007.1-cand-2920-2999
  source 1..80: mol_type = other DNA
ccaacgtttttggtgtctaaaaacaaggcatgtgaagctattgaactgcagatggcgttagagagtttggcacaaactga

SEQ ID NO: 21931 - DNA, 80 bp, synthetic construct
  misc_feature 1..80: note = Synthetic: >LR862007.1-cand-3000-3079
  source 1..80: mol_type = other DNA
gtttaaaaatgagcaatggacaatgcaagaaacatgccaagaactatggcaaacagcacctaaaaaatgttttaaaaaac

SEQ ID NO: 21932 - DNA, 80 bp, synthetic construct
  misc_feature 1..80: note = Synthetic: >LR862007.1-cand-3080-3159
  source 1..80: mol_type = other DNA
agggcattacagtggaagtacggtttgactgcagcaaggaaaacacaatgcattacacaagctggacatttatatattat

SEQ ID NO: 21933 - DNA, 80 bp, synthetic construct
  misc_feature 1..80: note = Synthetic: >LR862007.1-cand-3130-3209
  source 1..80: mol_type = other DNA
cattacacaagctggacatttatatattatgtaaatgatgtaggacagtggtgtaaaaccacaggaaatgtggacttttg

SEQ ID NO: 21934 - DNA, 80 bp, synthetic construct
  misc_feature 1..80: note = Synthetic: >MG717392.1-cand-0-79
  source 1..80: mol_type = other DNA
agtagactccgcacgaagaagcaaacactggataaaggaaatacagaatggtagggtgggtttgcatcttccttgtggtc

SEQ ID NO: 21935 - DNA, 80 bp, synthetic construct
  misc_feature 1..80: note = Synthetic: >MG717392.1-cand-80-159
  source 1..80: mol_type = other DNA
cttgctactactacagctgggctgacacgaaacctttatgagttaaaaattgaatgtccacatacagtaggtttaggcca

SEQ ID NO: 21936 - DNA, 80 bp, synthetic construct
  misc_feature 1..80: note = Synthetic: >MG717392.1-cand-160-239
  source 1..80: mol_type = other DNA
agggtatgtaacaggatcagtggaaacaacacctattctcttgacccaggtaactgatctgaaaattgaaagttcttgta

SEQ ID NO: 21937 - DNA, 80 bp, synthetic construct
  misc_feature 1..80: note = Synthetic: >MG717392.1-cand-250-329
  source 1..80: mol_type = other DNA
acatgtgccatctacatcaatccagaaatacaaccaggtagaatgggcaaagaaaagttcaaccacagaaagcactagtg

SEQ ID NO: 21938 - DNA, 80 bp, synthetic construct
  misc_feature 1..80: note = Synthetic: >MG717392.1-cand-330-409
  source 1..80: mol_type = other DNA
caggtgcaacaacattcgaggccaaaacaaaagaagtgagcttaaagggaacctgcaacatacctgtaactacgtttgag

SEQ ID NO: 21939 - DNA, 80 bp, synthetic construct
  misc_feature 1..80: note = Synthetic: >MG717392.1-cand-410-489
  source 1..80: mol_type = other DNA
gcagcatataagtcaaggaaaacggttatttgttatgacttggcttgtaatcaaacacattgcctaccgacagtacacct

SEQ ID NO: 21940 - DNA, 80 bp, synthetic construct
  misc_feature 1..80: note = Synthetic: >MG717392.1-cand-490-569
  source 1..80: mol_type = other DNA
gattgctcctgttcaaacatgcatgtctgtaagaagttgtatgataggtttgctgtcaagccgaatccaagttatttatg

SEQ ID NO: 21941 - DNA, 80 bp, synthetic construct
  misc_feature 1..80: note = Synthetic: >MG717392.1-cand-570-649
  source 1..80: mol_type = other DNA
agaagacatactgtgttacaggtcaactagtggaaggtctttgtttcattcctactcatacaattgcattgacacaacca

SEQ ID NO: 21942 - DNA, 80 bp, synthetic construct
  misc_feature 1..80: note = Synthetic: >MG717392.1-cand-650-729
  source 1..80: mol_type = other DNA
ggacatacatatgacacaatgacactgcctatcacttgttttctcgtggcaaagaagttgggaacacaattgaaaatagc

SEQ ID NO: 21943 - DNA, 80 bp, synthetic construct
  misc_feature 1..80: note = Synthetic: >MG717392.1-cand-730-809
  source 1..80: mol_type = other DNA
tgttgaacttgagaagcttatcacagctagcgggtgtacagagaatagctttcaaggttattatatctgttttctgggta

SEQ ID NO: 21944 - DNA, 80 bp, synthetic construct
  misc_feature 1..80: note = Synthetic: >MG717392.1-cand-810-889
  source 1..80: mol_type = other DNA
aacattcagagcctttatttgtaccaatgatggacgattacaggtctgctgagttattcactcgtatggttttgaacccg

SEQ ID NO: 21945 - DNA, 80 bp, synthetic construct
  misc_feature 1..80: note = Synthetic: >MG717392.1-cand-890-969
  source 1..80: mol_type = other DNA
agaggtgaagatcatgatccagatcagaatggtcaagggcttatgaggattgctgggcctatcactgcaaaagtgccatc

SEQ ID NO: 21946 - DNA, 80 bp, synthetic construct
  misc_feature 1..80: note = Synthetic: >MG717392.1-cand-1000-1079
  source 1..80: mol_type = other DNA
agcctttgctggtgcacctatgtatagctcgttctcaactttagtaaggaaagcagatcctgactatgtcttctctcctg

SEQ ID NO: 21947 - DNA, 80 bp, synthetic construct
  misc_feature 1..80: note = Synthetic: >MG717392.1-cand-1050-1129
  source 1..80: mol_type = other DNA
aagcagatcctgactatgtcttctctcctgggataattgcagaatcaaaccatagtgtttgtgataaaaagactataccc

SEQ ID NO: 21948 - DNA, 80 bp, synthetic construct
  misc_feature 1..80: note = Synthetic: >MG717392.1-cand-1170-1249
  source 1..80: mol_type = other DNA
agaagataacaggttgcacagtcttttgtactctagttggacctggagctagttgtgaggcatactcagagacagggata

SEQ ID NO: 21949 - DNA, 80 bp, synthetic construct
  misc_feature 1..80: note = Synthetic: >MG717392.1-cand-1210-1289
  source 1..80: mol_type = other DNA
acctggagctagttgtgaggcatactcagagacagggatattcaatatcagttcaccgacatgcttagttaataaggttc

SEQ ID NO: 21950 - DNA, 80 bp, synthetic construct
  misc_feature 1..80: note = Synthetic: >MG717393.1-cand-2950-3029
  source 1..80: mol_type = other DNA
gcaacaaaatggtcccctggtgataattctgcaaaatttaggagattcacacaagctctttatgatggtcttcctgatga

SEQ ID NO: 21951 - DNA, 80 bp, synthetic construct
  misc_feature 1..80: note = Synthetic: >MG717393.1-cand-3030-3109
  source 1..80: mol_type = other DNA
aaaattaaagtgttgcgtagtagatgctcttaggcatgtttatgagactgaattttttatgtccagaaagctgcatcggt

SEQ ID NO: 21952 - DNA, 80 bp, synthetic construct
  misc_feature 1..80: note = Synthetic: >MG717393.1-cand-3110-3189
  source 1..80: mol_type = other DNA
atatagattctatggaagaacactcagaagcagttcaagatttccttgatttttttaaaggaggtgtttcagcaatggtt

SEQ ID NO: 21953 - DNA, 80 bp, synthetic construct
  misc_feature 1..80: note = Synthetic: >MG717393.1-cand-3200-3279
  source 1..80: mol_type = other DNA
ggcttcagggcaaccttaataaatgctcttcattattcggtgctgctgtatcattgctatttaggagggtttgggcagag

SEQ ID NO: 21954 - DNA, 80 bp, synthetic construct
  misc_feature 1..80: note = Synthetic: >MG717393.1-cand-3270-3349
  source 1..80: mol_type = other DNA
ttgggcagagttatttcctgaattagaatgcttctttgagtttgcccatcactctgatgatgcattgtttatttatggtt

SEQ ID NO: 21955 - DNA, 80 bp, synthetic construct
  misc_feature 1..80: note = Synthetic: >MG717393.1-cand-3350-3429
  source 1..80: mol_type = other DNA
atctagaaccagaagatgatgggacagattggtttttgtatgtatcacatcagatccaagcagggaattatcactggcat

SEQ ID NO: 21956 - DNA, 80 bp, synthetic construct
  misc_feature 1..80: note = Synthetic: >MG717393.1-cand-3410-3489
  source 1..80: mol_type = other DNA
cagggaattatcactggcatgcagttaatcaagaaatgtggaaaagtatgtttaacctacatgaacacctattgctgatg

SEQ ID NO: 21957 - DNA, 80 bp, synthetic construct
  misc_feature 1..80: note = Synthetic: >MG717393.1-cand-3510-3589
  source 1..80: mol_type = other DNA
taagaagactacagtatcacctactaatgctgagttcctttctacattctttgagggttgtgcagtatcgattccattca

SEQ ID NO: 21958 - DNA, 80 bp, synthetic construct
  misc_feature 1..80: note = Synthetic: >MG717393.1-cand-3590-3669
  source 1..80: mol_type = other DNA
ttaaaatattgttaggttcattatcagatttgcccggtttgggtttctttgatgatttagcagctgcacagagtaggtgt

SEQ ID NO: 21959 - DNA, 80 bp, synthetic construct
  misc_feature 1..80: note = Synthetic: >MG717393.1-cand-3690-3769
  source 1..80: mol_type = other DNA
ggcctctccgcaattagcacagcttgcagttgtcatttgtactagtaaagtagagagattgtatgggactgcagacggga

SEQ ID NO: 21960 - DNA, 80 bp, synthetic construct
  misc_feature 1..80: note = Synthetic: >MG717393.1-cand-3750-3829
  source 1..80: mol_type = other DNA
gtatgggactgcagacgggatggtaaatagcccaatagcattcttgaaggtaaccaaggcacatgttccaatcccactag

SEQ ID NO: 21961 - DNA, 80 bp, synthetic construct
  misc_feature 1..80: note = Synthetic: >MG717393.1-cand-3840-3919
  source 1..80: mol_type = other DNA
ttctatgtcaataatggagttagctacagcagggatagggatggcagataagaatatacttaaacaggcattctattcat

SEQ ID NO: 21962 - DNA, 80 bp, synthetic construct
  misc_feature 1..80: note = Synthetic: >MG717393.1-cand-3920-3999
  source 1..80: mol_type = other DNA
acaaacataccaggcatgatggtgatcgatatgtgctaggcctttttaaattcttaatgtctcttagtgaggatgtcttt

SEQ ID NO: 21963 - DNA, 80 bp, synthetic construct
  misc_feature 1..80: note = Synthetic: >MG717393.1-cand-4020-4099
  source 1..80: mol_type = other DNA
atttagctttgttggaaaagttcagtggaaagtctttacacctaaaagtgaatttgagttttatgatcagttttcacaat

SEQ ID NO: 21964 - DNA, 80 bp, synthetic construct
  misc_feature 1..80: note = Synthetic: >MG717393.1-cand-4080-4159
  source 1..80: mol_type = other DNA
ttatgatcagttttcacaatcatacattaaaggttggactaaccaacatccggtatatgactatattattcctagaggca

SEQ ID NO: 21965 - DNA, 80 bp, synthetic construct
  misc_feature 1..80: note = Synthetic: >MG717393.1-cand-4160-4239
  source 1..80: mol_type = other DNA
gagacaatttattagtgtatttagttcggaagttgaatgacccaagtattgttacagccatgacaatgcagtcccctttg

SEQ ID NO: 21966 - DNA, 80 bp, synthetic construct
  misc_feature 1..80: note = Synthetic: >NC_001611.1-cand-6920-6999
  source 1..80: mol_type = other DNA
accaacctacactattatatgattatagtttctatttttacagtaccttgactaaagtctttagtcacacaatactacca

SEQ ID NO: 21967 - DNA, 80 bp, synthetic construct
  misc_feature 1..80: note = Synthetic: >NC_001611.1-cand-7000-7079
  source 1..80: mol_type = other DNA
acctacactattatatgattatagtttctatttttataggaacacgtacgagaaaatcaaatgtctaagttctaacggta

SEQ ID NO: 21968 - DNA, 80 bp, synthetic construct
  misc_feature 1..80: note = Synthetic: >NC_001611.1-cand-7080-7159
  source 1..80: mol_type = other DNA
gtgttgataaacgattgttatccacggatacctcatttatcatgttgtctattttcttactttgttctattaacttatta

SEQ ID NO: 21969 - DNA, 80 bp, synthetic construct
  misc_feature 1..80: note = Synthetic: >NC_001611.1-cand-7160-7239
  source 1..80: mol_type = other DNA
gcgttgtatattatttgattataaaacttatattgctgtttagtccactctataaatatcggattattcacatatcgttt

SEQ ID NO: 21970 - DNA, 80 bp, synthetic construct
  misc_feature 1..80: note = Synthetic: >NC_001611.1-cand-7320-7399
  source 1..80: mol_type = other DNA
cttttttgcattcggttctaccaacgtaataatgaagtgtggtatatgatctataagtataatatagtatctcttttttc

SEQ ID NO: 21971 - DNA, 80 bp, synthetic construct
  misc_feature 1..80: note = Synthetic: >NC_001611.1-cand-7400-7479
  source 1..80: mol_type = other DNA
gtaagatattaaacagtttatcacatctagagataatttatctcgtgataatataataatagagtgcggttttacctatt

SEQ ID NO: 21972 - DNA, 80 bp, synthetic construct
  misc_feature 1..80: note = Synthetic: >NC_001611.1-cand-7480-7559
  source 1..80: mol_type = other DNA
ttatcatctatataataataatataatactaatagtaatcgttatcattgtacccacttgagaagttagtaacttttttt

SEQ ID NO: 21973 - DNA, 80 bp, synthetic construct
  misc_feature 1..80: note = Synthetic: >NC_001611.1-cand-7560-7639
  source 1..80: mol_type = other DNA
ctattataatcttgtatccgtaagatacattactacacataggaattccctgatcgagcaatagtttaaatacatctaca

SEQ ID NO: 21974 - DNA, 80 bp, synthetic construct
  misc_feature 1..80: note = Synthetic: >NC_001611.1-cand-7640-7719
  source 1..80: mol_type = other DNA
tttggatttgatgtagttgcgtatttctctacaatattaataccatttttgcaactatttatttctagaccttttgtgat

SEQ ID NO: 21975 - DNA, 80 bp, synthetic construct
  misc_feature 1..80: note = Synthetic: >NC_001611.1-cand-7720-7799
  source 1..80: mol_type = other DNA
tagtaatctcaataattctacgtcaatattatcagattctatatattcgaatatatcaaagtcattgatatttttataat

SEQ ID NO: 21976 - DNA, 80 bp, synthetic construct
  misc_feature 1..80: note = Synthetic: >NC_001611.1-cand-7800-7879
  source 1..80: mol_type = other DNA
tggtagaagacaataatgacaccacaacatcagttttgatattcttatttttcttggtaacgtatacatttaatgaattt

SEQ ID NO: 21977 - DNA, 80 bp, synthetic construct
  misc_feature 1..80: note = Synthetic: >NC_001611.1-cand-7880-7959
  source 1..80: mol_type = other DNA
tcattacgttctaccaatgattgtgcactgcaggcatcaaaagttttacaactatcataaagcatactatcctatccaac

SEQ ID NO: 21978 - DNA, 80 bp, synthetic construct
  misc_feature 1..80: note = Synthetic: >NC_001611.1-cand-7950-8029
  source 1..80: mol_type = other DNA
cctatccaaccattatggtattgatgctatagtatattttaattcatttcatttatgtgtatttggtacgagcagacagc

SEQ ID NO: 21979 - DNA, 80 bp, synthetic construct
  misc_feature 1..80: note = Synthetic: >NC_001611.1-cand-8020-8099
  source 1..80: mol_type = other DNA
agcagacagcatgagatcgtatgatttcagtaccgtagtgacaatactattagtttcaataagatcaatctctagatcta

SEQ ID NO: 21980 - DNA, 80 bp, synthetic construct
  misc_feature 1..80: note = Synthetic: >NC_001611.1-cand-8100-8179
  source 1..80: mol_type = other DNA
tagaatcaaaacatgataggttagaagataatgaatatctgtaggcttcttgttgcactgtaacttctcgttttgttaga

SEQ ID NO: 21981 - DNA, 80 bp, synthetic construct
  misc_feature 1..80: note = Synthetic: >NC_001611.1-cand-8180-8259
  source 1..80: mol_type = other DNA
tgtttgtatcatgctttaacattaatggtacaaattttatcctcgctttgtgtatcatattcgtccctactataaaattg

SEQ ID NO: 21982 - DNA, 80 bp, synthetic construct
  misc_feature 1..80: note = Synthetic: >NC_001611.1-cand-12110-12189
  source 1..80: mol_type = other DNA
cgatatctcgaggcgacgggcatctccgtttaatacattgattaaagagtgtccatccagtacctgtacatttagcatat

SEQ ID NO: 21983 - DNA, 80 bp, synthetic construct
  misc_feature 1..80: note = Synthetic: >NC_001611.1-cand-12270-12349
  source 1..80: mol_type = other DNA
atcagtctccacactattcttaaatgtcatattaatgggtcgtgacggaatagtacagcatgatagaacgcatcctattc

SEQ ID NO: 21984 - DNA, 80 bp, synthetic construct
  misc_feature 1..80: note = Synthetic: >NC_001611.1-cand-12350-12429
  source 1..80: mol_type = other DNA
ccaacaatgtcaggaacgtcactctctccaccttcatatttatttatccgtaaaaatgttatcctggacattgtgccaat

SEQ ID NO: 21985 - DNA, 80 bp, synthetic construct
  misc_feature 1..80: note = Synthetic: >NC_001611.1-cand-12430-12509
  source 1..80: mol_type = other DNA
aataaaaagcccatatatgttcgctattgtagaaattgtttttcatagttgctcaaaaacgatggcggtgacttatgagt

SEQ ID NO: 21986 - DNA, 80 bp, synthetic construct
  misc_feature 1..80: note = Synthetic: >NC_001611.1-cand-12750-12829
  source 1..80: mol_type = other DNA
tcgtgtgtaattccagtaattgcatagatgttaccatcgtactctacagcataaactatactatgatgtctaggcatggg

SEQ ID NO: 21987 - DNA, 80 bp, synthetic construct
  misc_feature 1..80: note = Synthetic: >NC_001611.1-cand-12830-12909
  source 1..80: mol_type = other DNA
agacttttttatccaacaatttttagtgaaacattccacatcgtttaatattacatatttttcatacgtggtataaactc

SEQ ID NO: 21988 - DNA, 80 bp, synthetic construct
  misc_feature 1..80: note = Synthetic: >NC_001611.1-cand-12910-12989
  source 1..80: mol_type = other DNA
cacccattacatatatatcatcatttacgaataccgacgcgtctgaatatctaggagtaattaagtttggatgtcttatc

SEQ ID NO: 21989 - DNA, 80 bp, synthetic construct
  misc_feature 1..80: note = Synthetic: >NC_001611.1-cand-12990-13069
  source 1..80: mol_type = other DNA
catttcgaagtgtagcgttttaaatattttgctacacctgttgaaatagaaaattttaattctcctattacatataactt

SEQ ID NO: 21990 - DNA, 80 bp, synthetic construct
  misc_feature 1..80: note = Synthetic: >NC_001611.1-cand-13070-13149
  source 1..80: mol_type = other DNA
tccatcattaacacacgtactaacttttgattttaacgacgacatattagtaactgttttccattttttttttttttttt

SEQ ID NO: 21991 - DNA, 80 bp, synthetic construct
  misc_feature 1..80: note = Synthetic: >NC_001611.1-cand-13150-13229
  source 1..80: mol_type = other DNA
ttttgttttaagatctacccacggatacgaaataaacatgtctattgttaatcatgccaccaataatgtatagacaatta

SEQ ID NO: 21992 - DNA, 80 bp, synthetic construct
  misc_feature 1..80: note = Synthetic: >NC_001611.1-cand-13230-13309
  source 1..80: mol_type = other DNA
tataaaacatttgcattatagaattgtctatctatctgtattaccgacgattgtccaatattctgttctaggagagtaat

SEQ ID NO: 21993 - DNA, 80 bp, synthetic construct
  misc_feature 1..80: note = Synthetic: >NC_001611.1-cand-13390-13469
  source 1..80: mol_type = other DNA
gatttggatatagcattgcacatagtattagtcataaacttgggatgtaaactgttgatgatatctacatcgtttggatt

SEQ ID NO: 21994 - DNA, 80 bp, synthetic construct
  misc_feature 1..80: note = Synthetic: >NC_001611.1-cand-13470-13549
  source 1..80: mol_type = other DNA
tttatgtatccactttaataatatcatagctgtaacatcctcgtgatttacgttgacgttttcgtgggataagatagttg

SEQ ID NO: 21995 - DNA, 80 bp, synthetic construct
  misc_feature 1..80: note = Synthetic: >NC_001611.1-cand-13630-13709
  source 1..80: mol_type = other DNA
tatatagtttttacacatagatctacaacaggtggaatatcaattaatacggcagcaactagtatcatctctacattgtt

SEQ ID NO: 21996 - DNA, 80 bp, synthetic construct
  misc_feature 1..80: note = Synthetic: >NC_001611.1-cand-13870-13949
  source 1..80: mol_type = other DNA
aaaatatcacgctttccattcttgaagtactataagtaattatagtataatgtaacgtttatatattcaatattttttat

SEQ ID NO: 21997 - DNA, 80 bp, synthetic construct
  misc_feature 1..80: note = Synthetic: >NC_001611.1-cand-14030-14109
  source 1..80: mol_type = other DNA
gcttttacgtgtcctatcgtaggcgatagaaccgctaaaaagcctatcgaatttctacaaaagaatctattatatggtat

SEQ ID NO: 21998 - DNA, 80 bp, synthetic construct
  misc_feature 1..80: note = Synthetic: >NC_001611.1-cand-21210-21289
  source 1..80: mol_type = other DNA
ggtattatctggcggtgaaatgtccgttatataatctataaaacaatcatcgcatatagtatgcgatagtagagtaaaca

SEQ ID NO: 21999 - DNA, 80 bp, synthetic construct
  misc_feature 1..80: note = Synthetic: >NC_001611.1-cand-21290-21369
  source 1..80: mol_type = other DNA
tttttatagtttctactggattcatacatcgtttacccaattcggttatgaatgaaattgtcgccaatcttacacccaac

SEQ ID NO: 22000 - DNA, 80 bp, synthetic construct
  misc_feature 1..80: note = Synthetic: >NC_001611.1-cand-21370-21449
  source 1..80: mol_type = other DNA
cccttgttatccattagtatagtattaacttcgttatttatgtcataaactgtaaatgattctgtagatgccatatcata

SEQ ID NO: 22001 - DNA, 80 bp, synthetic construct
  misc_feature 1..80: note = Synthetic: >NC_001611.1-cand-21920-21999
  source 1..80: mol_type = other DNA
tagagattgtacttctttcagttctggataatatatacgttgatagattagctgagctattctatcccccgtatttacat

SEQ ID NO: 22002 - DNA, 80 bp, synthetic construct
  misc_feature 1..80: note = Synthetic: >NC_001611.1-cand-22180-22259
  source 1..80: mol_type = other DNA
ctggagggatagtataatcataagcgctatataaatcatatccggcggcgtacggtgattgtctagtaggagatttagct

SEQ ID NO: 22003 - DNA, 80 bp, synthetic construct
  misc_feature 1..80: note = Synthetic: >NC_001611.1-cand-22340-22419
  source 1..80: mol_type = other DNA
ttaccatcccatatattccatgaataagtgcgatgattgtacacttctatagtatctattacgaaccacgataaaatcct

SEQ ID NO: 22004 - DNA, 80 bp, synthetic construct
  misc_feature 1..80: note = Synthetic: >NC_001611.1-cand-22420-22499
  source 1..80: mol_type = other DNA
cctatcaatagcagtttattatccactattatcaattctggattatccctttgataaatagtatcatctatcagagacca

SEQ ID NO: 22005 - DNA, 80 bp, synthetic construct
  misc_feature 1..80: note = Synthetic: >NC_001611.1-cand-22500-22579
  source 1..80: mol_type = other DNA
tgtattgctgtatttgtaataaaatttagcatttctaccaaccaagaataaccttctaccgaacactaacgcgcatgatt

SEQ ID NO: 22006 - DNA, 80 bp, synthetic construct
  misc_feature 1..80: note = Synthetic: >NC_001611.1-cand-22580-22659
  source 1..80: mol_type = other DNA
tataatgtggataataagttgacggtccaaactgccactgatcatgattgggtagcaaatattctgtagttgtatccgtt

SEQ ID NO: 22007 - DNA, 80 bp, synthetic construct
  misc_feature 1..80: note = Synthetic: >NC_001611.1-cand-22660-22739
  source 1..80: mol_type = other DNA
tcagaatgtcctcctattacgtacataacattgtttatggatgccattgctggattacatctaggtttcaaaagactcgg

SEQ ID NO: 22008 - DNA, 80 bp, synthetic construct
  misc_feature 1..80: note = Synthetic: >NC_001611.1-cand-22860-22939
  source 1..80: mol_type = other DNA
attcatcggaggaattggaatccaattgtttgatatataatttaccgctatagcattgttatgtatttcattgttcatcc

SEQ ID NO: 22009 - DNA, 80 bp, synthetic construct
  misc_feature 1..80: note = Synthetic: >NC_001611.1-cand-22900-22979
  source 1..80: mol_type = other DNA
tttaccgctatagcattgttatgtatttcattgttcatccatcaccgatgagatatactacttctccaacatgtgtactt

SEQ ID NO: 22010 - DNA, 80 bp, synthetic construct
  misc_feature 1..80: note = Synthetic: >NC_001611.1-cand-23060-23139
  source 1..80: mol_type = other DNA
ttgtttatcacaatgaaatattttggtacagtctaatatccattttacattatttatacctctgggtgaaagataatttg

SEQ ID NO: 22011 - DNA, 80 bp, synthetic construct
  misc_feature 1..80: note = Synthetic: >NC_001611.1-cand-23140-23219
  source 1..80: mol_type = other DNA
acctgattacatttttgataaggagtagcaaatttcctaatttatttcttctcttcgtataccacttaatgacaaaatca

SEQ ID NO: 22012 - DNA, 80 bp, synthetic construct
  misc_feature 1..80: note = Synthetic: >NC_001611.1-cand-23220-23299
  source 1..80: mol_type = other DNA
actacataatcttcgtctggaacatttaactcattgctttctagaataagtttcaagataaataatcaaaattgtctatg

SEQ ID NO: 22013 - DNA, 80 bp, synthetic construct
  misc_feature 1..80: note = Synthetic: >NC_001611.1-cand-23380-23459
  source 1..80: mol_type = other DNA
acccattatgtaacactcgacacaatattcctttctaaaatctcgtagtataaagtttatacaagtgtagatgataaatt

SEQ ID NO: 22014 - DNA, 80 bp, synthetic construct
  misc_feature 1..80: note = Synthetic: >NC_001611.1-cand-40990-41069
  source 1..80: mol_type = other DNA
tgttcgtaggccagtggctaagatactgtgtaaagaaatggtaaataaatactttgagaatccgctgcatattattggta

SEQ ID NO: 22015 - DNA, 80 bp, synthetic construct
  misc_feature 1..80: note = Synthetic: >NC_001611.1-cand-41070-41149
  source 1..80: mol_type = other DNA
agaatcttcaagagtgcattgactttgttagtgaataggcatttcatctttctccaatactaattcaaattgttaaatta

SEQ ID NO: 22016 - DNA, 80 bp, synthetic construct
  misc_feature 1..80: note = Synthetic: >NC_001611.1-cand-41150-41229
  source 1..80: mol_type = other DNA
ataatggatatagtataaatagttattagaataagagtgtagtatcatagataagtatttactttcttctataaaatgga

SEQ ID NO: 22017 - DNA, 80 bp, synthetic construct
  misc_feature 1..80: note = Synthetic: >NC_001611.1-cand-41390-41469
  source 1..80: mol_type = other DNA
ttagctaataccaatttttttgttttcatacatatggtacgatgttgtaaagtgtacgaagcggttttacgacacgcatt

SEQ ID NO: 22018 - DNA, 80 bp, synthetic construct
  misc_feature 1..80: note = Synthetic: >NC_001611.1-cand-41540-41619
  source 1..80: mol_type = other DNA
tacaaggaaacagtgcataaactaacacaagatgaaaaatttttagaggtagccgaatacatggaagaattaggagaact

SEQ ID NO: 22019 - DNA, 80 bp, synthetic construct
  misc_feature 1..80: note = Synthetic: >NC_001611.1-cand-41670-41749
  source 1..80: mol_type = other DNA
aacccatcaaagatatggaaatcatttttttaaaactgtttaagaaaacagactttaaagttgttaaaaaattaagtgtt

SEQ ID NO: 22020 - DNA, 80 bp, synthetic construct
  misc_feature 1..80: note = Synthetic: >NC_001611.1-cand-41950-42029
  source 1..80: mol_type = other DNA
tgatgcagatatcgttcttaatagacccgccattaccatgtatgataaaattcttagttatatatactctgagataaaac

SEQ ID NO: 22021 - DNA, 80 bp, synthetic construct
  misc_feature 1..80: note = Synthetic: >NC_001611.1-cand-42270-42349
  source 1..80: mol_type = other DNA
aaatagatcctgaatattttgataatgaacgaattatgtctttattctctacgagtgctgtggaaattaaacgatttgat

SEQ ID NO: 22022 - DNA, 80 bp, synthetic construct
  misc_feature 1..80: note = Synthetic: >NC_001611.1-cand-42430-42509
  source 1..80: mol_type = other DNA
gaagaagtgccaaatctttaacgaggatacatcgtattatgttaaggaatacaatacatacctgtttttgaacgagacgg

SEQ ID NO: 22023 - DNA, 80 bp, synthetic construct
  misc_feature 1..80: note = Synthetic: >NC_001611.1-cand-42690-42769
  source 1..80: mol_type = other DNA
tcaagtttgtggaggatgtatcagcattcgttagattttctacagataaaaaccctagtgttcttccatcgctaatcaac

SEQ ID NO: 22024 - DNA, 80 bp, synthetic construct
  misc_feature 1..80: note = Synthetic: >NC_001611.1-cand-42770-42849
  source 1..80: mol_type = other DNA
actattttagctagttataatatttccatcattgtcctatttcaaaagtttttaagagataatctatatcatgtagaaaa

SEQ ID NO: 22025 - DNA, 80 bp, synthetic construct
  misc_feature 1..80: note = Synthetic: >NC_001611.1-cand-42850-42929
  source 1..80: mol_type = other DNA
attcttggataaaagcatccatctaaccaagacggataagaaatatatacttcaattgataaggcacggcagatcataga

SEQ ID NO: 22026 - DNA, 80 bp, synthetic construct
  misc_feature 1..80: note = Synthetic: >NC_001611.1-cand-42930-43009
  source 1..80: mol_type = other DNA
acaaaccaaatatattattaataatttgtatatacatagatataattatcacatattaaaattcacacatttttgataaa

SEQ ID NO: 22027 - DNA, 80 bp, synthetic construct
  misc_feature 1..80: note = Synthetic: >NC_001611.1-cand-43010-43089
  source 1..80: mol_type = other DNA
tgggaactactgcaacaatttagactcccaccaaattaatgaataaagagaatgcagaaatgattttggaaaaattgttg

SEQ ID NO: 22028 - DNA, 80 bp, synthetic construct
  misc_feature 1..80: note = Synthetic: >NC_001611.1-cand-43090-43169
  source 1..80: mol_type = other DNA
atcatatagttatgtatattagtgacgaatcaagagatgaaaataatcctgaatatattgattttcgtaacagatacgga

SEQ ID NO: 22029 - DNA, 80 bp, synthetic construct
  misc_feature 1..80: note = Synthetic: >NC_001611.1-cand-43170-43249
  source 1..80: mol_type = other DNA
gactatagatctttcattataaaaagtgatcacgggtttgtaaagatcatgcagagaaaagttctccaaaaacacaacaa

SEQ ID NO: 22030 - DNA, 80 bp, synthetic construct
  misc_feature 1..80: note = Synthetic: >NC_001796.2-cand-11330-11409
  source 1..80: mol_type = other DNA
ttcaacaactatatattgcccttgggatgaatatcaatccaactataacacagaatatcaaagatcagtattttaagaat

SEQ ID NO: 22031 - DNA, 80 bp, synthetic construct
  misc_feature 1..80: note = Synthetic: >NC_001796.2-cand-11370-11449
  source 1..80: mol_type = other DNA
aactataacacagaatatcaaagatcagtattttaagaattcaaattggatgcaatatgcctctttaatacctgccagtg

SEQ ID NO: 22032 - DNA, 80 bp, synthetic construct
  misc_feature 1..80: note = Synthetic: >NC_001796.2-cand-11490-11569
  source 1..80: mol_type = other DNA
aaggaatattggtgatccatcagttgctgcattagctgatattaaaagatttatcaaggcgaatctattagaccgaagtg

SEQ ID NO: 22033 - DNA, 80 bp, synthetic construct
  misc_feature 1..80: note = Synthetic: >NC_001796.2-cand-11570-11649
  source 1..80: mol_type = other DNA
ttctttataggattatgaaccaagaaccaggtgagtcatcttttttggactgggcttcagacccatattcatgcaattta

SEQ ID NO: 22034 - DNA, 80 bp, synthetic construct
  misc_feature 1..80: note = Synthetic: >NC_001796.2-cand-11650-11729
  source 1..80: mol_type = other DNA
ccacaatctcaaaatataaccaccatgataaaaaatataacagcaaggaatgtattacaagattcaccaaatccattatt

SEQ ID NO: 22035 - DNA, 80 bp, synthetic construct
  misc_feature 1..80: note = Synthetic: >NC_001796.2-cand-11730-11809
  source 1..80: mol_type = other DNA
atctggattattcacaaatacaatgatagaggaagatgaagaattagctgagttcctgatggacaggaaggtaattctcc

SEQ ID NO: 22036 - DNA, 80 bp, synthetic construct
  misc_feature 1..80: note = Synthetic: >NC_001796.2-cand-11810-11889
  source 1..80: mol_type = other DNA
ctagagttgcacatgatattctagataattctctcacaggaattagaaatgctatagctggaatgttagatacgacaaaa

SEQ ID NO: 22037 - DNA, 80 bp, synthetic construct
  misc_feature 1..80: note = Synthetic: >NC_001796.2-cand-11890-11969
  source 1..80: mol_type = other DNA
tcattaattcgggttggcataaatagaggaggactgacatatagtttgttgagaaaaatcagtaattatgatctagtgca

SEQ ID NO: 22038 - DNA, 80 bp, synthetic construct
  misc_feature 1..80: note = Synthetic: >NC_001796.2-cand-11980-12059
  source 1..80: mol_type = other DNA
ctaagtaggactttgcgattaattgtaagtgataaaatcagatatgaagatatgtgttcagtagaccttgccatagcatt

SEQ ID NO: 22039 - DNA, 80 bp, synthetic construct
  misc_feature 1..80: note = Synthetic: >NC_001796.2-cand-12060-12139
  source 1..80: mol_type = other DNA
gcgacaaaagatgtggattcatttatcaggaggaaggatgataagtggacttgaaacacctgacccattagaattattat

SEQ ID NO: 22040 - DNA, 80 bp, synthetic construct
  misc_feature 1..80: note = Synthetic: >NC_001796.2-cand-12150-12229
  source 1..80: mol_type = other DNA
aataacaggatcagaacattgtaaaatatgttattcttcagatggcacaaacccatatacttggatgtatttaccgggta

SEQ ID NO: 22041 - DNA, 80 bp, synthetic construct
  misc_feature 1..80: note = Synthetic: >NC_001796.2-cand-12220-12299
  source 1..80: mol_type = other DNA
ttaccgggtaatatcaaaatagggtcagcagaaacaggtgtgtcatcattaagagttccttattttggatcagtcactga

SEQ ID NO: 22042 - DNA, 80 bp, synthetic construct
  misc_feature 1..80: note = Synthetic: >NC_001796.2-cand-12300-12379
  source 1..80: mol_type = other DNA
tgaaagatctgaggcacaattaggatatatcaagaatcttagtaaacctgcaaaagccgcaataagaatagcaatgatat

SEQ ID NO: 22043 - DNA, 80 bp, synthetic construct
  misc_feature 1..80: note = Synthetic: >NC_001796.2-cand-12380-12459
  source 1..80: mol_type = other DNA
atacatgggcatttggtaatgatgagatatcttggatggaagcctcacagatagcacaaacacgtgcaaattttacacta

SEQ ID NO: 22044 - DNA, 80 bp, synthetic construct
  misc_feature 1..80: note = Synthetic: >NC_001796.2-cand-12460-12539
  source 1..80: mol_type = other DNA
gatagtctcaaaattttaacaccggtagctacatcaacaaatttatcacacagattaaaagatactgcaactcagatgaa

SEQ ID NO: 22045 - DNA, 80 bp, synthetic construct
  misc_feature 1..80: note = Synthetic: >NC_001796.2-cand-12540-12619
  source 1..80: mol_type = other DNA
attctccagtacatcattaatcagagtcagcagattcataacaatgtccaatgataacatgtctattaaagaagctaatg

SEQ ID NO: 22046 - DNA, 80 bp, synthetic construct
  misc_feature 1..80: note = Synthetic: >NC_001796.2-cand-15210-15289
  source 1..80: mol_type = other DNA
aaccaaagaagttaaaatacttatgaaattgattggtggtgctaaattattaggaattcccagacaatataaagaacccg

SEQ ID NO: 22047 - DNA, 80 bp, synthetic construct
  misc_feature 1..80: note = Synthetic: >NC_001796.2-cand-15290-15369
  source 1..80: mol_type = other DNA
aagaacagttattagaaaactacaatcaacatgatgaatttgatatcgattaagacataaatacaataaagatatatctt

SEQ ID NO: 22048 - DNA, 80 bp, synthetic construct
  misc_feature 1..80: note = Synthetic: >NC_001796.2-cand-15370-15449
  source 1..80: mol_type = other DNA
aacctttatctttgagcccaaggatagacaaaaagtaagaaaaacatgtaatatatatataccaagcagagttcttctct

SEQ ID NO: 22049 - DNA, 80 bp, synthetic construct
  misc_feature 1..80: note = Synthetic: >NC_001802.1-cand-90-169
  source 1..80: mol_type = other DNA
tcaagtagtgtgtgcccgtctgttgtgtgactctggtaactagagatccctcagacccttttagtcagtgtggaaaatct

SEQ ID NO: 22050 - DNA, 80 bp, synthetic construct
  misc_feature 1..80: note = Synthetic: >NC_001802.1-cand-170-249
  source 1..80: mol_type = other DNA
ctagcagtggcgcccgaacagggacctgaaagcgaaagggaaaccagaggagctctctcgacgcaggactcggcttgctg

SEQ ID NO: 22051 - DNA, 80 bp, synthetic construct
  misc_feature 1..80: note = Synthetic: >NC_001802.1-cand-280-359
  source 1..80: mol_type = other DNA
gactggtgagtacgccaaaaattttgactagcggaggctagaaggagagagatgggtgcgagagcgtcagtattaagcgg

SEQ ID NO: 22052 - DNA, 80 bp, synthetic construct
  misc_feature 1..80: note = Synthetic: >NC_001802.1-cand-420-499
  source 1..80: mol_type = other DNA
attaaaacatatagtatgggcaagcagggagctagaacgattcgcagttaatcctggcctgttagaaacatcagaaggct

SEQ ID NO: 22053 - DNA, 80 bp, synthetic construct
  misc_feature 1..80: note = Synthetic: >NC_001802.1-cand-500-579
  source 1..80: mol_type = other DNA
gtagacaaatactgggacagctacaaccatcccttcagacaggatcagaagaacttagatcattatataatacagtagca

SEQ ID NO: 22054 - DNA, 80 bp, synthetic construct
  misc_feature 1..80: note = Synthetic: >NC_001802.1-cand-580-659
  source 1..80: mol_type = other DNA
accctctattgtgtgcatcaaaggatagagataaaagacaccaaggaagctttagacaagatagaggaagagcaaaacaa

SEQ ID NO: 22055 - DNA, 80 bp, synthetic construct
  misc_feature 1..80: note = Synthetic: >NC_001802.1-cand-660-739
  source 1..80: mol_type = other DNA
aagtaagaaaaaagcacagcaagcagcagctgacacaggacacagcaatcaggtcagccaaaattaccctatagtgcaga

SEQ ID NO: 22056 - DNA, 80 bp, synthetic construct
  misc_feature 1..80: note = Synthetic: >NC_001802.1-cand-750-829
  source 1..80: mol_type = other DNA
gcaaatggtacatcaggccatatcacctagaactttaaatgcatgggtaaaagtagtagaagagaaggctttcagcccag

SEQ ID NO: 22057 - DNA, 80 bp, synthetic construct
  misc_feature 1..80: note = Synthetic: >NC_001802.1-cand-820-899
  source 1..80: mol_type = other DNA
ttcagcccagaagtgatacccatgttttcagcattatcagaaggagccaccccacaagatttaaacaccatgctaaacac

SEQ ID NO: 22058 - DNA, 80 bp, synthetic construct
  misc_feature 1..80: note = Synthetic: >NC_001802.1-cand-910-989
  source 1..80: mol_type = other DNA
catcaagcagccatgcaaatgttaaaagagaccatcaatgaggaagctgcagaatgggatagagtgcatccagtgcatgc

SEQ ID NO: 22059 - DNA, 80 bp, synthetic construct
  misc_feature 1..80: note = Synthetic: >NC_001802.1-cand-940-1019
  source 1..80: mol_type = other DNA
accatcaatgaggaagctgcagaatgggatagagtgcatccagtgcatgcagggcctattgcaccaggccagatgagaga

SEQ ID NO: 22060 - DNA, 80 bp, synthetic construct
  misc_feature 1..80: note = Synthetic: >NC_001802.1-cand-1060-1139
  source 1..80: mol_type = other DNA
caggaacaaataggatggatgacaaataatccacctatcccagtaggagaaatttataaaagatggataatcctgggatt

SEQ ID NO: 22061 - DNA, 80 bp, synthetic construct
  misc_feature 1..80: note = Synthetic: >NC_001802.1-cand-3670-3749
  source 1..80: mol_type = other DNA
aaaaggaaaaggtctatctggcatgggtaccagcacacaaaggaattggaggaaatgaacaagtagataaattagtcagt

SEQ ID NO: 22062 - DNA, 80 bp, synthetic construct
  misc_feature 1..80: note = Synthetic: >NC_001802.1-cand-3750-3829
  source 1..80: mol_type = other DNA
gctggaatcaggaaagtactatttttagatggaatagataaggcccaagatgaacatgagaaatatcacagtaattggag

SEQ ID NO: 22063 - DNA, 80 bp, synthetic construct
  misc_feature 1..80: note = Synthetic: >NC_001802.1-cand-3830-3909
  source 1..80: mol_type = other DNA
agcaatggctagtgattttaacctgccacctgtagtagcaaaagaaatagtagccagctgtgataaatgtcagctaaaag

SEQ ID NO: 22064 - DNA, 80 bp, synthetic construct
  misc_feature 1..80: note = Synthetic: >NC_001802.1-cand-3910-3989
  source 1..80: mol_type = other DNA
gagaagccatgcatggacaagtagactgtagtccaggaatatggcaactagattgtacacatttagaaggaaaagttatc

SEQ ID NO: 22065 - DNA, 80 bp, synthetic construct
  misc_feature 1..80: note = Synthetic: >NC_001802.1-cand-3990-4069
  source 1..80: mol_type = other DNA
ctggtagcagttcatgtagccagtggatatatagaagcagaagttattccagcagaaacagggcaggaaacagcatattt

SEQ ID NO: 22066 - DNA, 80 bp, synthetic construct
  misc_feature 1..80: note = Synthetic: >NC_001802.1-cand-4070-4149
  source 1..80: mol_type = other DNA
tcttttaaaattagcaggaagatggccagtaaaaacaatacatactgacaatggcagcaatttcaccggtgctacggtta

SEQ ID NO: 22067 - DNA, 80 bp, synthetic construct
  misc_feature 1..80: note = Synthetic: >NC_001802.1-cand-4160-4239
  source 1..80: mol_type = other DNA
ttggtgggcgggaatcaagcaggaatttggaattccctacaatccccaaagtcaaggagtagtagaatctatgaataaag

SEQ ID NO: 22068 - DNA, 80 bp, synthetic construct
  misc_feature 1..80: note = Synthetic: >NC_001802.1-cand-4240-4319
  source 1..80: mol_type = other DNA
aattaaagaaaattataggacaggtaagagatcaggctgaacatcttaagacagcagtacaaatggcagtattcatccac

SEQ ID NO: 22069 - DNA, 80 bp, synthetic construct
  misc_feature 1..80: note = Synthetic: >NC_001802.1-cand-4360-4439
  source 1..80: mol_type = other DNA
gggaaagaatagtagacataatagcaacagacatacaaactaaagaattacaaaaacaaattacaaaaattcaaaatttt

SEQ ID NO: 22070 - DNA, 80 bp, synthetic construct
  misc_feature 1..80: note = Synthetic: >NC_001802.1-cand-4400-4479
  source 1..80: mol_type = other DNA
taaagaattacaaaaacaaattacaaaaattcaaaattttcgggtttattacagggacagcagaaatccactttggaaag

SEQ ID NO: 22071 - DNA, 80 bp, synthetic construct
  misc_feature 1..80: note = Synthetic: >NC_001802.1-cand-4510-4589
  source 1..80: mol_type = other DNA
gggcagtagtaatacaagataatagtgacataaaagtagtgccaagaagaaaagcaaagatcattagggattatggaaaa

SEQ ID NO: 22072 - DNA, 80 bp, synthetic construct
  misc_feature 1..80: note = Synthetic: >NC_001802.1-cand-4560-4639
  source 1..80: mol_type = other DNA
aaagcaaagatcattagggattatggaaaacagatggcaggtgatgattgtgtggcaagtagacaggatgaggattagaa

SEQ ID NO: 22073 - DNA, 80 bp, synthetic construct
  misc_feature 1..80: note = Synthetic: >NC_001802.1-cand-4610-4689
  source 1..80: mol_type = other DNA
tgtggcaagtagacaggatgaggattagaacatggaaaagtttagtaaaacaccatatgtatgtttcagggaaagctagg

SEQ ID NO: 22074 - DNA, 80 bp, synthetic construct
  misc_feature 1..80: note = Synthetic: >NC_001802.1-cand-4720-4799
  source 1..80: mol_type = other DNA
cctcatccaagaataagttcagaagtacacatcccactaggggatgctagattggtaataacaacatattggggtctgca

SEQ ID NO: 22075 - DNA, 80 bp, synthetic construct
  misc_feature 1..80: note = Synthetic: >NC_001802.1-cand-4800-4879
  source 1..80: mol_type = other DNA
tacaggagaaagagactggcatttgggtcagggagtctccatagaatggaggaaaaagagatatagcacacaagtagacc

SEQ ID NO: 22076 - DNA, 80 bp, synthetic construct
  misc_feature 1..80: note = Synthetic: >NC_001802.1-cand-4880-4959
  source 1..80: mol_type = other DNA
ctgaactagcagaccaactaattcatctgtattactttgactgtttttcagactctgctataagaaaggccttattagga

SEQ ID NO: 22077 - DNA, 80 bp, synthetic construct
  misc_feature 1..80: note = Synthetic: >NC_001802.1-cand-7560-7639
  source 1..80: mol_type = other DNA
tctggaaaactcatttgcaccactgctgtgccttggaatgctagttggagtaataaatctctggaacagatttggaatca

SEQ ID NO: 22078 - DNA, 80 bp, synthetic construct
  misc_feature 1..80: note = Synthetic: >NC_001802.1-cand-7630-7709
  source 1..80: mol_type = other DNA
tttggaatcacacgacctggatggagtgggacagagaaattaacaattacacaagcttaatacactccttaattgaagaa

SEQ ID NO: 22079 - DNA, 80 bp, synthetic construct
  misc_feature 1..80: note = Synthetic: >NC_001802.1-cand-7710-7789
  source 1..80: mol_type = other DNA
tcgcaaaaccagcaagaaaagaatgaacaagaattattggaattagataaatgggcaagtttgtggaattggtttaacat

SEQ ID NO: 22080 - DNA, 80 bp, synthetic construct
  misc_feature 1..80: note = Synthetic: >NC_001802.1-cand-7790-7869
  source 1..80: mol_type = other DNA
aacaaattggctgtggtatataaaattattcataatgatagtaggaggcttggtaggtttaagaatagtttttgctgtac

SEQ ID NO: 22081 - DNA, 80 bp, synthetic construct
  misc_feature 1..80: note = Synthetic: >NC_001802.1-cand-7860-7939
  source 1..80: mol_type = other DNA
tttgctgtactttctatagtgaatagagttaggcagggatattcaccattatcgtttcagacccacctcccaaccccgag

SEQ ID NO: 22082 - DNA, 80 bp, synthetic construct
  misc_feature 1..80: note = Synthetic: >NC_001802.1-cand-7960-8039
  source 1..80: mol_type = other DNA
gaatagaagaagaaggtggagagagagacagagacagatccattcgattagtgaacggatccttggcacttatctgggac

SEQ ID NO: 22083 - DNA, 80 bp, synthetic construct
  misc_feature 1..80: note = Synthetic: >NC_001802.1-cand-8040-8119
  source 1..80: mol_type = other DNA
gatctgcggagcctgtgcctcttcagctaccaccgcttgagagacttactcttgattgtaacgaggattgtggaacttct

SEQ ID NO: 22084 - DNA, 80 bp, synthetic construct
  misc_feature 1..80: note = Synthetic: >NC_001802.1-cand-8130-8209
  source 1..80: mol_type = other DNA
gggtgggaagccctcaaatattggtggaatctcctacagtattggagtcaggaactaaagaatagtgctgttagcttgct

SEQ ID NO: 22085 - DNA, 80 bp, synthetic construct
  misc_feature 1..80: note = Synthetic: >NC_001802.1-cand-8240-8319
  source 1..80: mol_type = other DNA
gacagatagggttatagaagtagtacaaggagcttgtagagctattcgccacatacctagaagaataagacagggcttgg

SEQ ID NO: 22086 - DNA, 80 bp, synthetic construct
  misc_feature 1..80: note = Synthetic: >NC_001802.1-cand-8290-8369
  source 1..80: mol_type = other DNA
acatacctagaagaataagacagggcttggaaaggattttgctataagatgggtggcaagtggtcaaaaagtagtgtgat

SEQ ID NO: 22087 - DNA, 80 bp, synthetic construct
  misc_feature 1..80: note = Synthetic: >NC_001802.1-cand-8370-8449
  source 1..80: mol_type = other DNA
tggatggcctactgtaagggaaagaatgagacgagctgagccagcagcagatagggtgggagcagcatctcgagacctgg

SEQ ID NO: 22088 - DNA, 80 bp, synthetic construct
  misc_feature 1..80: note = Synthetic: >NC_001802.1-cand-8450-8529
  source 1..80: mol_type = other DNA
aaaaacatggagcaatcacaagtagcaatacagcagctaccaatgctgcttgtgcctggctagaagcacaagaggaggag

SEQ ID NO: 22089 - DNA, 80 bp, synthetic construct
  misc_feature 1..80: note = Synthetic: >NC_001802.1-cand-8530-8609
  source 1..80: mol_type = other DNA
gaggtgggttttccagtcacacctcaggtacctttaagaccaatgacttacaaggcagctgtagatcttagccacttttt

SEQ ID NO: 22090 - DNA, 80 bp, synthetic construct
  misc_feature 1..80: note = Synthetic: >NC_001802.1-cand-8630-8709
  source 1..80: mol_type = other DNA
aagggctaattcactcccaaagaagacaagatatccttgatctgtggatctaccacacacaaggctacttccctgattag

SEQ ID NO: 22091 - DNA, 80 bp, synthetic construct
  misc_feature 1..80: note = Synthetic: >NC_001802.1-cand-8650-8729
  source 1..80: mol_type = other DNA
agaagacaagatatccttgatctgtggatctaccacacacaaggctacttccctgattagcagaactacacaccagggcc

SEQ ID NO: 22092 - DNA, 80 bp, synthetic construct
  misc_feature 1..80: note = Synthetic: >NC_001802.1-cand-8770-8849
  source 1..80: mol_type = other DNA
ctagtaccagttgagccagataagatagaagaggccaataaaggagagaacaccagcttgttacaccctgtgagcctgca

SEQ ID NO: 22093 - DNA, 80 bp, synthetic construct
  misc_feature 1..80: note = Synthetic: >NC_001803.1-cand-3630-3709
  source 1..80: mol_type = other DNA
aaaacactcaacccaacacatgacatcattgctttatgtgaatttgaaaatatagtaacatcaaaaaaagtcataatacc

SEQ ID NO: 22094 - DNA, 80 bp, synthetic construct
  misc_feature 1..80: note = Synthetic: >NC_001803.1-cand-3710-3789
  source 1..80: mol_type = other DNA
aacatacctaagatccatcagtgtcagaaataaagatctgaacacacttgaaaatataacaaccactgaattcaaaaatg

SEQ ID NO: 22095 - DNA, 80 bp, synthetic construct
  misc_feature 1..80: note = Synthetic: >NC_001803.1-cand-3790-3869
  source 1..80: mol_type = other DNA
ccatcacaaatgcaaaaatcatcccttactcaggattactgttagtcatcacagtgactgacaacaaaggagcattcaaa

SEQ ID NO: 22096 - DNA, 80 bp, synthetic construct
  misc_feature 1..80: note = Synthetic: >NC_001803.1-cand-3870-3949
  source 1..80: mol_type = other DNA
tacataaagccacaaagtcaatttatagtagatcttggagcttacctagaaaaagaaagtatatattatgttacaacaaa

SEQ ID NO: 22097 - DNA, 80 bp, synthetic construct
  misc_feature 1..80: note = Synthetic: >NC_001803.1-cand-3950-4029
  source 1..80: mol_type = other DNA
ttggaagcacacagctacacgatttgcaatcaaacccatggaagattaacctttttcttctacatcagtgagttgattca

SEQ ID NO: 22098 - DNA, 80 bp, synthetic construct
  misc_feature 1..80: note = Synthetic: >NC_001803.1-cand-4030-4109
  source 1..80: mol_type = other DNA
tacaaactttctacctacattcttcacttcaccatcataatcaccaaccctctgtggttcaactaatcaaacaaaaccca

SEQ ID NO: 22099 - DNA, 80 bp, synthetic construct
  misc_feature 1..80: note = Synthetic: >NC_001803.1-cand-4100-4179
  source 1..80: mol_type = other DNA
acaaaacccatctggagcctcagatcatcccaagtcattgttcatcagatctagtactcaaataagttaataaaaatatc

SEQ ID NO: 22100 - DNA, 80 bp, synthetic construct
  misc_feature 1..80: note = Synthetic: >NC_001803.1-cand-4200-4279
  source 1..80: mol_type = other DNA
tggaggaaatccaactaatcacaatatctgtcaacatagacaagtcaacacgccaggcaaaatcaaccaatggaaaatac

SEQ ID NO: 22101 - DNA, 80 bp, synthetic construct
  misc_feature 1..80: note = Synthetic: >NC_001803.1-cand-4280-4359
  source 1..80: mol_type = other DNA
atccataacaatagaattctcaagcaaattctggccttactttacactaatacacatgataacaacaataatctctttgc

SEQ ID NO: 22102 - DNA, 80 bp, synthetic construct
  misc_feature 1..80: note = Synthetic: >NC_001803.1-cand-4370-4449
  source 1..80: mol_type = other DNA
ctccatcatgattgcaatactgaacaaactctgtgaatataacgtattccataacaaaacctttgagctaccaagagctc

SEQ ID NO: 22103 - DNA, 80 bp, synthetic construct
  misc_feature 1..80: note = Synthetic: >NC_001803.1-cand-4450-4529
  source 1..80: mol_type = other DNA
gagtcaatacatagcattcaccaatctgatggcacaaaacagtaaccttgcatttgtaagtgaacaaccctcacctcttt

SEQ ID NO: 22104 - DNA, 80 bp, synthetic construct
  misc_feature 1..80: note = Synthetic: >NC_001803.1-cand-4530-4609
  source 1..80: mol_type = other DNA
acaaaaccacatcaacatctcaccatgcaagccatcatccatattataaagtagttaattaaaaataatcataacaatga

SEQ ID NO: 22105 - DNA, 80 bp, synthetic construct
  misc_feature 1..80: note = Synthetic: >NC_001803.1-cand-4640-4719
  source 1..80: mol_type = other DNA
gggcaaatgcaaacatgtccaaaaacaaggaccaacgcaccaccaagacactagaaaagacctgggacactctcaatcat

SEQ ID NO: 22106 - DNA, 80 bp, synthetic construct
  misc_feature 1..80: note = Synthetic: >NC_001803.1-cand-4690-4769
  source 1..80: mol_type = other DNA
ctagaaaagacctgggacactctcaatcatctattattcatatcatcgtgcttatacaagttaaatcttaaatctatagc

SEQ ID NO: 22107 - DNA, 80 bp, synthetic construct
  misc_feature 1..80: note = Synthetic: >NC_001803.1-cand-4770-4849
  source 1..80: mol_type = other DNA
acaaatcacattatccattctggcaatgataatctcaacttcacttataattgcagccatcatattcatagcctcggcaa

SEQ ID NO: 22108 - DNA, 80 bp, synthetic construct
  misc_feature 1..80: note = Synthetic: >NC_001803.1-cand-4850-4929
  source 1..80: mol_type = other DNA
accacaaagtcacactaacaactgcaatcatacaagatgcaacaagccagatcaagaacacaaccccaacatacctcacc

SEQ ID NO: 22109 - DNA, 80 bp, synthetic construct
  misc_feature 1..80: note = Synthetic: >NC_002645.1-cand-9820-9899
  source 1..80: mol_type = other DNA
atggttgcacatggtggcttaaaggtgaaaaattgtttgtggagcattataatgagtgggcacaggctaatggtttcaca

SEQ ID NO: 22110 - DNA, 80 bp, synthetic construct
  misc_feature 1..80: note = Synthetic: >NC_002645.1-cand-9900-9979
  source 1..80: mol_type = other DNA
gctatgaatggtgaagacgctttttccattcttgctgctaaaactggtgtctgtgtggaaagattacttcatgctattca

SEQ ID NO: 22111 - DNA, 80 bp, synthetic construct
  misc_feature 1..80: note = Synthetic: >NC_002645.1-cand-9980-10059
  source 1..80: mol_type = other DNA
agttttgaataatggctttggtggtaaacaaattttgggttattctagtctcaatgatgagttcagtattaatgaagttg

SEQ ID NO: 22112 - DNA, 80 bp, synthetic construct
  misc_feature 1..80: note = Synthetic: >NC_002645.1-cand-10060-10139
  source 1..80: mol_type = other DNA
tcaaacaaatgtttggtgttaacctgcaaagtggtaaaaccactagtatgtttaaatccataagcttatttgctggcttc

SEQ ID NO: 22113 - DNA, 80 bp, synthetic construct
  misc_feature 1..80: note = Synthetic: >NC_002645.1-cand-10140-10219
  source 1..80: mol_type = other DNA
tttgtcatgttctgggctgaattatttgtttataccaccactatttgggttaaccctggttttcttactccgtttatgat

SEQ ID NO: 22114 - DNA, 80 bp, synthetic construct
  misc_feature 1..80: note = Synthetic: >NC_002645.1-cand-10220-10299
  source 1..80: mol_type = other DNA
tttgcttgttgctttgtcactctgtcttacatttgttgttaaacataaggttttgtttttgcaagtgtttttgttgcctt

SEQ ID NO: 22115 - DNA, 80 bp, synthetic construct
  misc_feature 1..80: note = Synthetic: >NC_002645.1-cand-10300-10379
  source 1..80: mol_type = other DNA
caattattgtggctgctattcaaaactgtgcttgggactaccatgttacaaaggtgttggcagagaagtttgattataat

SEQ ID NO: 22116 - DNA, 80 bp, synthetic construct
  misc_feature 1..80: note = Synthetic: >NC_002645.1-cand-10380-10459
  source 1..80: mol_type = other DNA
gtttctgttatgcaaatggacatccagggttttgttaacatttttatttgtctttttgttgcactgttgcatacttggcg

SEQ ID NO: 22117 - DNA, 80 bp, synthetic construct
  misc_feature 1..80: note = Synthetic: >NC_002645.1-cand-10450-10529
  source 1..80: mol_type = other DNA
atacttggcgctttgctaaagagcgttgtacacattggtgcacttatttgttctcactcattgctgttttatacactgca

SEQ ID NO: 22118 - DNA, 80 bp, synthetic construct
  misc_feature 1..80: note = Synthetic: >NC_002645.1-cand-10530-10609
  source 1..80: mol_type = other DNA
ttgtatagttatgactacgttagtttgctggttatgctactttgtgcaatttctaatgaatggtatattggtgctattat

SEQ ID NO: 22119 - DNA, 80 bp, synthetic construct
  misc_feature 1..80: note = Synthetic: >NC_002645.1-cand-10610-10689
  source 1..80: mol_type = other DNA
ttttagaatttgtcgttttggtgttgcatttttaccagtggaatacgtgtcttactttgatggtgttaaaactgtgctgt

SEQ ID NO: 22120 - DNA, 80 bp, synthetic construct
  misc_feature 1..80: note = Synthetic: >NC_002645.1-cand-10690-10769
  source 1..80: mol_type = other DNA
tgttttacatgttgttaggctttgttagctgtatgtactatggtttgttgtactggattaacaggttctgtaagtgcaca

SEQ ID NO: 22121 - DNA, 80 bp, synthetic construct
  misc_feature 1..80: note = Synthetic: >NC_002645.1-cand-10770-10849
  source 1..80: mol_type = other DNA
ttaggtgtttatgatttctgtgttagtccagccgaatttaagtatatggttgctaatggtttgaatgcaccaaatggccc

SEQ ID NO: 22122 - DNA, 80 bp, synthetic construct
  misc_feature 1..80: note = Synthetic: >NC_002645.1-cand-10850-10929
  source 1..80: mol_type = other DNA
ttttgatgcgctctttctgtcttttaaactaatgggtattggcggtcctagaaccattaaagtttctactgtacagtcta

SEQ ID NO: 22123 - DNA, 80 bp, synthetic construct
  misc_feature 1..80: note = Synthetic: >NC_002645.1-cand-10930-11009
  source 1..80: mol_type = other DNA
aattgactgatcttaagtgcacaaacgtcgttctaatgggcattttgtctaacatgaacatagcttctaattcaaaggag

SEQ ID NO: 22124 - DNA, 80 bp, synthetic construct
  misc_feature 1..80: note = Synthetic: >NC_002645.1-cand-11010-11089
  source 1..80: mol_type = other DNA
tgggcatattgtgttgaaatgcacaataaaataaacttgtgtgacgaccctgaaactgctcaagagttattgctggcgtt

SEQ ID NO: 22125 - DNA, 80 bp, synthetic construct
  misc_feature 1..80: note = Synthetic: >NC_002645.1-cand-23890-23969
  source 1..80: mol_type = other DNA
agacttacatcaagtggccgtggtgggtgtggttgtgcatttcagtcgtgctcatctttgtggtgagtatgttgctatta

SEQ ID NO: 22126 - DNA, 80 bp, synthetic construct
  misc_feature 1..80: note = Synthetic: >NC_002645.1-cand-23970-24049
  source 1..80: mol_type = other DNA
tgttgttgttctactggttgctgtggcttctttagttgttttgcatcttctattagaggttgttgtgaatcaactaaact

SEQ ID NO: 22127 - DNA, 80 bp, synthetic construct
  misc_feature 1..80: note = Synthetic: >NC_002645.1-cand-24050-24129
  source 1..80: mol_type = other DNA
tccttattacgacgttgaaaagatccacatacagtaatggctctaggtttgttcacattgcaacttgtgtctgctgttaa

SEQ ID NO: 22128 - DNA, 80 bp, synthetic construct
  misc_feature 1..80: note = Synthetic: >NC_002645.1-cand-24130-24209
  source 1..80: mol_type = other DNA
tcaatcgcttagcaatgcgaaagttagtgctgaagtttcacgacaggttatccaagacgtgaaagatggcactgttacct

SEQ ID NO: 22129 - DNA, 80 bp, synthetic construct
  misc_feature 1..80: note = Synthetic: >NC_002645.1-cand-24210-24289
  source 1..80: mol_type = other DNA
tcaacttgctagcgtatacactaatgagcctctttgttgtgtattttgctttatttaaagcaagatcacaccgtggcaga

SEQ ID NO: 22130 - DNA, 80 bp, synthetic construct
  misc_feature 1..80: note = Synthetic: >NC_002645.1-cand-24290-24369
  source 1..80: mol_type = other DNA
gctgctcttatagtgtttaaaattctaatccttttcgtttatgtgccattgctgtattggtctcaagcatatatttacgc

SEQ ID NO: 22131 - DNA, 80 bp, synthetic construct
  misc_feature 1..80: note = Synthetic: >NC_002645.1-cand-24370-24449
  source 1..80: mol_type = other DNA
aactttgattgctgtaattttgcttggaagatttttccatacagcttggcactgctggctctacaagacatgggatttca

SEQ ID NO: 22132 - DNA, 80 bp, synthetic construct
  misc_feature 1..80: note = Synthetic: >NC_002645.1-cand-24450-24529
  source 1..80: mol_type = other DNA
ttgtcttcaatgtaaccacactttgctatgcaaggtaagtgttggtttcttgaaaataaggctctgaaaccattcgtttg

SEQ ID NO: 22133 - DNA, 80 bp, synthetic construct
  misc_feature 1..80: note = Synthetic: >NC_002645.1-cand-24550-24629
  source 1..80: mol_type = other DNA
tcctttacataggcgacagaattgtttcttatttctcaactaacgacttgtacgttgctcttagaggacgtattgataaa

SEQ ID NO: 22134 - DNA, 80 bp, synthetic construct
  misc_feature 1..80: note = Synthetic: >NC_002645.1-cand-24610-24689
  source 1..80: mol_type = other DNA
ttagaggacgtattgataaagacctcagcctttctagaaaggttgagttatataacggtgaatgtgtatacttgttttgt

SEQ ID NO: 22135 - DNA, 80 bp, synthetic construct
  misc_feature 1..80: note = Synthetic: >NC_002645.1-cand-24690-24769
  source 1..80: mol_type = other DNA
gaacacccagctgttggaatagtcaacacagatttcaaattagaaatccactaagatgttccttaagctagtggatgatc

SEQ ID NO: 22136 - DNA, 80 bp, synthetic construct
  misc_feature 1..80: note = Synthetic: >NC_002645.1-cand-24770-24849
  source 1..80: mol_type = other DNA
atgctttggttgttaatgtactactctggtgtgtggtgcttatagtgatactactagtgtgtattacaataattaaacta

SEQ ID NO: 22137 - DNA, 80 bp, synthetic construct
  misc_feature 1..80: note = Synthetic: >NC_002645.1-cand-24850-24929
  source 1..80: mol_type = other DNA
attaagctttgtttcacttgccatatgttttgtaatagaacagtttatggccccattaaaaatgtgtaccacatttacca

SEQ ID NO: 22138 - DNA, 80 bp, synthetic construct
  misc_feature 1..80: note = Synthetic: >NC_002645.1-cand-24930-25009
  source 1..80: mol_type = other DNA
atcatatatgcacatagaccctttccctaaacgagttattgatttctaaactaaacgacaatgtcaaatgacaattgtac

SEQ ID NO: 22139 - DNA, 80 bp, synthetic construct
  misc_feature 1..80: note = Synthetic: >NC_002645.1-cand-25010-25089
  source 1..80: mol_type = other DNA
gggtgacattgtcacccatttgaagaattggaattttggttggaatgttattctaaccatattcattgttattcttcagt

SEQ ID NO: 22140 - DNA, 80 bp, synthetic construct
  misc_feature 1..80: note = Synthetic: >NC_002645.1-cand-25090-25169
  source 1..80: mol_type = other DNA
ttggacactataaatactccagattgttttatggtttgaagatgcttgtactgtggcttctttggccactcgtacttgct

SEQ ID NO: 22141 - DNA, 80 bp, synthetic construct
  misc_feature 1..80: note = Synthetic: >NC_003310.1-cand-165830-165909
  source 1..80: mol_type = other DNA
aataattaataacgaacaagtatcaaaagattaaagaattagctagaatcaattagatgtcttcttcagtggatgttgat

SEQ ID NO: 22142 - DNA, 80 bp, synthetic construct
  misc_feature 1..80: note = Synthetic: >NC_003310.1-cand-165910-165989
  source 1..80: mol_type = other DNA
atctacgatgctgttagagcatttttactcaggcactattatgacaagagatttattgtgtatggaagaagtaacaccat

SEQ ID NO: 22143 - DNA, 80 bp, synthetic construct
  misc_feature 1..80: note = Synthetic: >NC_003310.1-cand-165990-166069
  source 1..80: mol_type = other DNA
attacataatatatacaggctatttacaagatgcaccgttatacagttcgatgatatagtacgtactatgccaaatgaat

SEQ ID NO: 22144 - DNA, 80 bp, synthetic construct
  misc_feature 1..80: note = Synthetic: >NC_003310.1-cand-166070-166149
  source 1..80: mol_type = other DNA
cacgtgttaaacaatgggtgatggatacacttaatggtataatgatgaatgaatgcgatactgtatgtgtgggtaccgga

SEQ ID NO: 22145 - DNA, 80 bp, synthetic construct
  misc_feature 1..80: note = Synthetic: >NC_003310.1-cand-166150-166229
  source 1..80: mol_type = other DNA
ctacgattcatggaaatgtttttcgattacaataaaaataatcccaaaaatagcatcaacaatcaaataatgtatgatat

SEQ ID NO: 22146 - DNA, 80 bp, synthetic construct
  misc_feature 1..80: note = Synthetic: >NC_003310.1-cand-166230-166309
  source 1..80: mol_type = other DNA
aattaatagcgtaaccataattctagctaatgagagatatagaagcgcgtttaacgacgatagaatatacatccgtagaa

SEQ ID NO: 22147 - DNA, 80 bp, synthetic construct
  misc_feature 1..80: note = Synthetic: >NC_003310.1-cand-166310-166389
  source 1..80: mol_type = other DNA
ctatgatggacaaattgtacgaatacgcatctctaactactattggtacgatcactggaggtgtttgttattatctgttg

SEQ ID NO: 22148 - DNA, 80 bp, synthetic construct
  misc_feature 1..80: note = Synthetic: >NC_003310.1-cand-166390-166469
  source 1..80: mol_type = other DNA
atgcatctagttagtttgtataaataattatttcgatatactagtaaaattttaagattttaaatgtataaaaaactaat

SEQ ID NO: 22149 - DNA, 80 bp, synthetic construct
  misc_feature 1..80: note = Synthetic: >NC_003310.1-cand-166470-166549
  source 1..80: mol_type = other DNA
aacgtttttatttgtaataggtgcagttgcatcctattcgaataatgagtacactccgtttaataaactgagtgtaaaac

SEQ ID NO: 22150 - DNA, 80 bp, synthetic construct
  misc_feature 1..80: note = Synthetic: >NC_003310.1-cand-166550-166629
  source 1..80: mol_type = other DNA
tctatatagatggagtagataatatagaaaattcatatactgatgataataatgaattggtgttaaattttaaagagtac

SEQ ID NO: 22151 - DNA, 80 bp, synthetic construct
  misc_feature 1..80: note = Synthetic: >NC_003310.1-cand-166710-166789
  source 1..80: mol_type = other DNA
tgatatgtataccattgactcgtctactattcaacgcagagaacatacgtgtagaatatctaccaaattatcatgctatt

SEQ ID NO: 22152 - DNA, 80 bp, synthetic construct
  misc_feature 1..80: note = Synthetic: >NC_003310.1-cand-166780-166859
  source 1..80: mol_type = other DNA
tcatgctattatgataagtacccttatatccacaaatatgagggtgatgaacgacaatattctattactgcagagggaaa

SEQ ID NO: 22153 - DNA, 80 bp, synthetic construct
  misc_feature 1..80: note = Synthetic: >NC_003310.1-cand-166940-167019
  source 1..80: mol_type = other DNA
ttacttatatattcgatcgtcatgggcatagtaatacatattattcaaaatatgatttttaaaaatttaaaatatattat

SEQ ID NO: 22154 - DNA, 80 bp, synthetic construct
  misc_feature 1..80: note = Synthetic: >NC_003310.1-cand-167020-167099
  source 1..80: mol_type = other DNA
cacttcagtgacagtagtcaaataacaaacaacaccatgagatatattataattctcgcagttttgttcattaatagtat

SEQ ID NO: 22155 - DNA, 80 bp, synthetic construct
  misc_feature 1..80: note = Synthetic: >NC_003310.1-cand-167080-167159
  source 1..80: mol_type = other DNA
gttttgttcattaatagtatacatgctaaaataactagttataagtttgaatccgtcaattttgattccaaaattgaatg

SEQ ID NO: 22156 - DNA, 80 bp, synthetic construct
  misc_feature 1..80: note = Synthetic: >NC_003310.1-cand-167340-167419
  source 1..80: mol_type = other DNA
actatgtgtcgaagtaaaaattggaccaccaactgtaagattgactgaatatgacgatcatatcaatttgttcatcgagc

SEQ ID NO: 22157 - DNA, 80 bp, synthetic construct
  misc_feature 1..80: note = Synthetic: >NC_003310.1-cand-174540-174619
  source 1..80: mol_type = other DNA
tggatagccaactatacatctaaattcagtaaccgtaggtatttatgtaccgtaaccacaaagaatggtgactgtgttca

SEQ ID NO: 22158 - DNA, 80 bp, synthetic construct
  misc_feature 1..80: note = Synthetic: >NC_003310.1-cand-174620-174699
  source 1..80: mol_type = other DNA
gggtgtagttagatctcatgtgtggaaaccttcttcatgcattccaaaaacatatgaactaggtacttatgataagtatg

SEQ ID NO: 22159 - DNA, 80 bp, synthetic construct
  misc_feature 1..80: note = Synthetic: >NC_003310.1-cand-174780-174859
  source 1..80: mol_type = other DNA
atcgacgattttaagtattcacaagcgggaaaggaattaattattcataatccagagttagaagatagtggaagatacga

SEQ ID NO: 22160 - DNA, 80 bp, synthetic construct
  misc_feature 1..80: note = Synthetic: >NC_003310.1-cand-174940-175019
  source 1..80: mol_type = other DNA
cacaagaccacaggtttaaactaatactagatccgaaaatcaacgtaacgataggagaacctgccaatataacatgcagt

SEQ ID NO: 22161 - DNA, 80 bp, synthetic construct
  misc_feature 1..80: note = Synthetic: >NC_003310.1-cand-175020-175099
  source 1..80: mol_type = other DNA
gctgtgtcaacgtcattatttgtcgacgatgtactgattgaatgggaaaatccatccggatggattataggattagattt

SEQ ID NO: 22162 - DNA, 80 bp, synthetic construct
  misc_feature 1..80: note = Synthetic: >NC_003310.1-cand-175100-175179
  source 1..80: mol_type = other DNA
tggtgtatactctattttaactagtagaggcggtatcaccgaggcgactttgtattttgaaaatgttactgaagaatata

SEQ ID NO: 22163 - DNA, 80 bp, synthetic construct
  misc_feature 1..80: note = Synthetic: >NC_003310.1-cand-175180-175259
  source 1..80: mol_type = other DNA
taggcaatacatatacatgtcgtggacacaactattattttgataaaactcttacaactacagtagtattggagtaaata

SEQ ID NO: 22164 - DNA, 80 bp, synthetic construct
  misc_feature 1..80: note = Synthetic: >NC_003310.1-cand-175580-175659
  source 1..80: mol_type = other DNA
gatagaactggtatgaacagtgagagtgataatatatcaatcaaaacagaatatgagaatgaatatgaattctatgatga

SEQ ID NO: 22165 - DNA, 80 bp, synthetic construct
  misc_feature 1..80: note = Synthetic: >NC_003310.1-cand-175660-175739
  source 1..80: mol_type = other DNA
aacacaagatcaaagtacacaactagtagattacgacattaaactcaaaaccaatgaggatgattttgttgatgaattct

SEQ ID NO: 22166 - DNA, 80 bp, synthetic construct
  misc_feature 1..80: note = Synthetic: >NC_003310.1-cand-175900-175979
  source 1..80: mol_type = other DNA
agacagacataccgtagacgaattctacaagatagacagcgtatcagatgtagatgacgcagaacatatatctcagataa

SEQ ID NO: 22167 - DNA, 80 bp, synthetic construct
  misc_feature 1..80: note = Synthetic: >NC_003310.1-cand-176140-176219
  source 1..80: mol_type = other DNA
ttctaacggtgcatctctaacaatcaaggatagcagtaataaggatccaattgctgtttattttagaagaacaataatga

SEQ ID NO: 22168 - DNA, 80 bp, synthetic construct
  misc_feature 1..80: note = Synthetic: >NC_003310.1-cand-176300-176379
  source 1..80: mol_type = other DNA
tatagaaatttcgattatccatttttcagaaagttagttttgactaataaacattgtctcaacaattattataatataag

SEQ ID NO: 22169 - DNA, 80 bp, synthetic construct
  misc_feature 1..80: note = Synthetic: >NC_003310.1-cand-176380-176459
  source 1..80: mol_type = other DNA
cgacagcaaatatggaacaccactacatatattagcatctaataaaaaaataataactcctaattacatgaagttattag

SEQ ID NO: 22170 - DNA, 80 bp, synthetic construct
  misc_feature 1..80: note = Synthetic: >NC_003310.1-cand-176460-176539
  source 1..80: mol_type = other DNA
tgtataacggaaatgatataaacgcacgaggtgaagatacacaaatgcgaactccattacacaaatatttgtgtaaattt

SEQ ID NO: 22171 - DNA, 80 bp, synthetic construct
  misc_feature 1..80: note = Synthetic: >NC_003310.1-cand-176610-176689
  source 1..80: mol_type = other DNA
gagccgatctaactattccaaatgacgatggaatgataccagtagtttactgtatacactcaaatgccgaatatggttat

SEQ ID NO: 22172 - DNA, 80 bp, synthetic construct
  misc_feature 1..80: note = Synthetic: >NC_003310.1-cand-176690-176769
  source 1..80: mol_type = other DNA
aacaatattactaacataaagataatacgtaaactacttaatcttagtagacatgcgtcacataatctatttagagatcg

SEQ ID NO: 22173 - DNA, 80 bp, synthetic construct
  misc_feature 1..80: note = Synthetic: >NC_003310.1-cand-184320-184399
  source 1..80: mol_type = other DNA
cttttagctggtggttgtccctatgatacatctcaaacttttattgtacatactacttgcagtattctactaagaacagc

SEQ ID NO: 22174 - DNA, 80 bp, synthetic construct
  misc_feature 1..80: note = Synthetic: >NC_003310.1-cand-184400-184479
  source 1..80: mol_type = other DNA
tacacgggatcagtttagaaacagatgggtgttacaaaatccatttagacaagaagggacatataagcaactgtttacct

SEQ ID NO: 22175 - DNA, 80 bp, synthetic construct
  misc_feature 1..80: note = Synthetic: >NC_003310.1-cand-184640-184719
  source 1..80: mol_type = other DNA
aaaactgggaatatttaatgctgaaggttttaatagttttgtactaaattgtccaactgggtctacacctacatacatca

SEQ ID NO: 22176 - DNA, 80 bp, synthetic construct
  misc_feature 1..80: note = Synthetic: >NC_003310.1-cand-184720-184799
  source 1..80: mol_type = other DNA
aacataaaaatgcggacagtaacaatgttatcatagagctacctgtaggtgattacggcacagccaaattgtattcagca

SEQ ID NO: 22177 - DNA, 80 bp, synthetic construct
  misc_feature 1..80: note = Synthetic: >NC_003310.1-cand-184880-184959
  source 1..80: mol_type = other DNA
taataaaaacagcggtattccattttggagcatgtacacaggaagtgtaactagtaaaaatagaatgtttaccacattgg

SEQ ID NO: 22178 - DNA, 80 bp, synthetic construct
  misc_feature 1..80: note = Synthetic: >NC_003310.1-cand-184960-185039
  source 1..80: mol_type = other DNA
ctagaggaatgccgtttagatcaacgtattgcgataacagacgacgatcaggttgttattatgcaggaataccatttcat

SEQ ID NO: 22179 - DNA, 80 bp, synthetic construct
  misc_feature 1..80: note = Synthetic: >NC_003310.1-cand-185040-185119
  source 1..80: mol_type = other DNA
gaagatagtgtagaagcagatatacattatggaccagaaataatgttaaaggaaacatatgacataaacagtattgaccc

SEQ ID NO: 22180 - DNA, 80 bp, synthetic construct
  misc_feature 1..80: note = Synthetic: >NC_003310.1-cand-185120-185199
  source 1..80: mol_type = other DNA
acgagttataacaaagtcaaagacccattttcctactccattgagtgtaaaattcatggttgacaatttaggaaatggat

SEQ ID NO: 22181 - DNA, 80 bp, synthetic construct
  misc_feature 1..80: note = Synthetic: >NC_003310.1-cand-185200-185279
  source 1..80: mol_type = other DNA
atgacaaccctaattcattttgggaagatgctaaaactaagaaacggacatatagtgcaatgacgataaaagtcctacca

SEQ ID NO: 22182 - DNA, 80 bp, synthetic construct
  misc_feature 1..80: note = Synthetic: >NC_003310.1-cand-185280-185359
  source 1..80: mol_type = other DNA
tgtacagtgagaaataaaaatatagactttggatataactatggagatattatttctaatatggtttatctacaatctac

SEQ ID NO: 22183 - DNA, 80 bp, synthetic construct
  misc_feature 1..80: note = Synthetic: >NC_003310.1-cand-185360-185439
  source 1..80: mol_type = other DNA
tagtcaggattatggagatggtaccaaatatacatttaaatccgtaactagatcagatcatgagtgtgaatctagcttag

SEQ ID NO: 22184 - DNA, 80 bp, synthetic construct
  misc_feature 1..80: note = Synthetic: >NC_003310.1-cand-185440-185519
  source 1..80: mol_type = other DNA
atctgacgtctaaggaagtaactgtgacatgtcctgcgtttagtataccaagaaatatatcaacatatgaaggtctatgc

SEQ ID NO: 22185 - DNA, 80 bp, synthetic construct
  misc_feature 1..80: note = Synthetic: >NC_003310.1-cand-185510-185589
  source 1..80: mol_type = other DNA
aggtctatgctttagtgttactacatctaaagatcattgtgctacaggtattggttggttaaaatctagtggctatggga

SEQ ID NO: 22186 - DNA, 80 bp, synthetic construct
  misc_feature 1..80: note = Synthetic: >NC_003310.1-cand-185590-185669
  source 1..80: mol_type = other DNA
aggaagatgctgataaaccacgtgcttgttttcatcattggaattattacacactgtcgttggattattactgttcatac

SEQ ID NO: 22187 - DNA, 80 bp, synthetic construct
  misc_feature 1..80: note = Synthetic: >NC_003310.1-cand-185670-185749
  source 1..80: mol_type = other DNA
gaagatatttggagaagcacctggcctgactatgatccatgtaagtcatatatccatatagagtatagagatacatggat

SEQ ID NO: 22188 - DNA, 80 bp, synthetic construct
  misc_feature 1..80: note = Synthetic: >NC_003310.1-cand-185750-185829
  source 1..80: mol_type = other DNA
agaatctaacgtgttacagcaacctccttacacattcgaattcattcatgacaattctaacgaatatgtggataaagaaa

SEQ ID NO: 22189 - DNA, 80 bp, synthetic construct
  misc_feature 1..80: note = Synthetic: >NC_004297.1-cand-3390-3469
  source 1..80: mol_type = other DNA
aaaggtatttccaccattttgtgcatatgccacataagtagggttgagagatagtccctcccttttatgtcagcttgcaa

SEQ ID NO: 22190 - DNA, 80 bp, synthetic construct
  misc_feature 1..80: note = Synthetic: >NC_004297.1-cand-3470-3549
  source 1..80: mol_type = other DNA
gtcctttgagaggaaaattaaattctgtaagacagtcaagaacaaaaatggacacatcattgggccccacttactatgat

SEQ ID NO: 22191 - DNA, 80 bp, synthetic construct
  misc_feature 1..80: note = Synthetic: >NC_004297.1-cand-3550-3629
  source 1..80: mol_type = other DNA
ccatgctataagacacatgtgccaatgaaacattcaatttcatggaaaggatagcattttcaaattccttctcgttgttc

SEQ ID NO: 22192 - DNA, 80 bp, synthetic construct
  misc_feature 1..80: note = Synthetic: >NC_004297.1-cand-3630-3709
  source 1..80: mol_type = other DNA
aggcaactccctgataactgtaggcttatagcttcaaagtaatcttctataagtctagtaaacatctttgttctaagatc

SEQ ID NO: 22193 - DNA, 80 bp, synthetic construct
  misc_feature 1..80: note = Synthetic: >NC_004297.1-cand-3710-3789
  source 1..80: mol_type = other DNA
accaatatataattctctgttaccacccacttgttctttatatgacaaagaaaacttaagccttcctgtatcaggtccca

SEQ ID NO: 22194 - DNA, 80 bp, synthetic construct
  misc_feature 1..80: note = Synthetic: >NC_004297.1-cand-3790-3869
  source 1..80: mol_type = other DNA
ctgagtcataagattgtggcgactcttggctataaaaacacaaattctttaacattgctgtggtacagtttgtcagtgac

SEQ ID NO: 22195 - DNA, 80 bp, synthetic construct
  misc_feature 1..80: note = Synthetic: >NC_004297.1-cand-3870-3949
  source 1..80: mol_type = other DNA
agagccttactaagtgcctctgaattgctctccctttcactaattcttacatcatcagagagtttacccatatcaaactt

SEQ ID NO: 22196 - DNA, 80 bp, synthetic construct
  misc_feature 1..80: note = Synthetic: >NC_004297.1-cand-3950-4029
  source 1..80: mol_type = other DNA
gaaattaaggttccttgacttataatgagtgtacctccccataagtgtattcgcattcatgatcaagagtatggacttaa

SEQ ID NO: 22197 - DNA, 80 bp, synthetic construct
  misc_feature 1..80: note = Synthetic: >NC_004297.1-cand-4030-4109
  source 1..80: mol_type = other DNA
aacactgaaagtattcatggttaaagtatgtccttgttgacactgcctttgtcaactctccaataggacactgtgacata

SEQ ID NO: 22198 - DNA, 80 bp, synthetic construct
  misc_feature 1..80: note = Synthetic: >NC_004297.1-cand-4110-4189
  source 1..80: mol_type = other DNA
tgtccacagtaaaaatacttctgcttcaatctactattctcatagacagcattacagaattcttcataaaatttacctgg

SEQ ID NO: 22199 - DNA, 80 bp, synthetic construct
  misc_feature 1..80: note = Synthetic: >NC_004297.1-cand-4200-4279
  source 1..80: mol_type = other DNA
tgatcaaactcctcaaccatgtgattggataattcacccttgatcaacctaatgtaaaacttatttgagacaatctcatc

SEQ ID NO: 22200 - DNA, 80 bp, synthetic construct
  misc_feature 1..80: note = Synthetic: >NC_004297.1-cand-4280-4359
  source 1..80: mol_type = other DNA
tagatcatttattgatggttggccatcaccattagggcctgagcctagcttgacaggttccctatactgatcaacaattt

SEQ ID NO: 22201 - DNA, 80 bp, synthetic construct
  misc_feature 1..80: note = Synthetic: >NC_004297.1-cand-4360-4439
  source 1..80: mol_type = other DNA
tttcaacagtctcctttagctgatcaaaataatcgcttgcacctccatcgagcaaaatttcgtctaggtcagccccatca

SEQ ID NO: 22202 - DNA, 80 bp, synthetic construct
  misc_feature 1..80: note = Synthetic: >NC_004297.1-cand-4440-4519
  source 1..80: mol_type = other DNA
gcatcacttttgagctgcccagatcctagaaccaaattgctcattgcctgctgaactttgtactcatagtcctgcttgtt

SEQ ID NO: 22203 - DNA, 80 bp, synthetic construct
  misc_feature 1..80: note = Synthetic: >NC_004297.1-cand-4520-4599
  source 1..80: mol_type = other DNA
gagaaggtactttcctttccttgagaagacttcagtgagctgcgacacggccagtgctgtgagcttattgaagtcatagt

SEQ ID NO: 22204 - DNA, 80 bp, synthetic construct
  misc_feature 1..80: note = Synthetic: >NC_004297.1-cand-4600-4679
  source 1..80: mol_type = other DNA
ttaatattctagaaccatctgtgtatttattaacaacaacacttttcttgctggctaaatccaaggctgcactgccactg

SEQ ID NO: 22205 - DNA, 80 bp, synthetic construct
  misc_feature 1..80: note = Synthetic: >NC_004910.1-cand-680-759
  source 1..80: mol_type = other DNA
gtggctggcgggacaagcagcgtatatatagaagtattgcatttgactcaaggaacttgctgggagcagatgtacacacc

SEQ ID NO: 22206 - DNA, 80 bp, synthetic construct
  misc_feature 1..80: note = Synthetic: >NC_004910.1-cand-780-859
  source 1..80: mol_type = other DNA
atgatgttgaccaaagtttaatcattgctgctaggaacattgtcaggagagcaacagtatcagcagacccattggcttca

SEQ ID NO: 22207 - DNA, 80 bp, synthetic construct
  misc_feature 1..80: note = Synthetic: >NC_004910.1-cand-860-939
  source 1..80: mol_type = other DNA
ctcctggaaatgtgccatagcacacaaattggcggagtaagaatggtagacatccttaaacaaaacccaacagaagagca

SEQ ID NO: 22208 - DNA, 80 bp, synthetic construct
  misc_feature 1..80: note = Synthetic: >NC_004910.1-cand-940-1019
  source 1..80: mol_type = other DNA
agctgtagatatatgcaaggcagcaatgggtttgaaaatcagctcatccttcagctttggagggttcactttcaaaagaa

SEQ ID NO: 22209 - DNA, 80 bp, synthetic construct
  misc_feature 1..80: note = Synthetic: >NC_004910.1-cand-1030-1109
  source 1..80: mol_type = other DNA
ttctgtcaaaagagaggaagaagtgcttacaggcaacctccaaacattgaagataaaagtacatgaaggatatgaggaat

SEQ ID NO: 22210 - DNA, 80 bp, synthetic construct
  misc_feature 1..80: note = Synthetic: >NC_004910.1-cand-1100-1179
  source 1..80: mol_type = other DNA
tatgaggaattcacaatggttggacgaagagcaacagccattctaagaaaagcaaccagaaggatgatccaactgatagt

SEQ ID NO: 22211 - DNA, 80 bp, synthetic construct
  misc_feature 1..80: note = Synthetic: >NC_004910.1-cand-1180-1259
  source 1..80: mol_type = other DNA
cagcggaagggacgagcaatcaattgctgaggcaattattgtggcaatggtgttctcacaagaagattgcatggtaaagg

SEQ ID NO: 22212 - DNA, 80 bp, synthetic construct
  misc_feature 1..80: note = Synthetic: >NC_004910.1-cand-1260-1339
  source 1..80: mol_type = other DNA
cagtccgaggtgatttgaatttcgtaaacagagcaaatcaacgactgaatcccatgcaccaactcctgagacactttcaa

SEQ ID NO: 22213 - DNA, 80 bp, synthetic construct
  misc_feature 1..80: note = Synthetic: >NC_004910.1-cand-1370-1449
  source 1..80: mol_type = other DNA
ggaattgaacccatcgacaatgtcatgggtatgattggaatattgcctgacatgacccccagcacggaaatgtcactaag

SEQ ID NO: 22214 - DNA, 80 bp, synthetic construct
  misc_feature 1..80: note = Synthetic: >NC_004910.1-cand-1390-1469
  source 1..80: mol_type = other DNA
tgtcatgggtatgattggaatattgcctgacatgacccccagcacggaaatgtcactaagaggagtgagagttagcaaaa

SEQ ID NO: 22215 - DNA, 80 bp, synthetic construct
  misc_feature 1..80: note = Synthetic: >NC_004910.1-cand-1520-1599
  source 1..80: mol_type = other DNA
cgtttcttaagggtccgagatcagcgaggaaatgtactcctatcccctgaagaagttagtgaaacacagggaatggaaaa

SEQ ID NO: 22216 - DNA, 80 bp, synthetic construct
  misc_feature 1..80: note = Synthetic: >NC_004910.1-cand-1680-1759
  source 1..80: mol_type = other DNA
tcattaggaattgggagactgtaaagatccaatggtcccaagaacccaccatgctatacaataagatggagtttgaacca

SEQ ID NO: 22217 - DNA, 80 bp, synthetic construct
  misc_feature 1..80: note = Synthetic: >NC_004910.1-cand-1840-1919
  source 1..80: mol_type = other DNA
tttgggaacgttcgacactgttcaaataatcaaactactaccatttgcagcagccccaccggaacagagtaggatgcaat

SEQ ID NO: 22218 - DNA, 80 bp, synthetic construct
  misc_feature 1..80: note = Synthetic: >NC_004910.1-cand-1950-2029
  source 1..80: mol_type = other DNA
caggaatgagaatacttgtgagaggtaactcccctgcatttaactacaacaagacaactaagaggcttacaatacttggg

SEQ ID NO: 22219 - DNA, 80 bp, synthetic construct
  misc_feature 1..80: note = Synthetic: >NC_004910.1-cand-2000-2079
  source 1..80: mol_type = other DNA
aagacaactaagaggcttacaatacttgggaaggacgcaggtgcgcttacagaggacccagatgaaggaacagcaggagt

SEQ ID NO: 22220 - DNA, 80 bp, synthetic construct
  misc_feature 1..80: note = Synthetic: >NC_004910.1-cand-2080-2159
  source 1..80: mol_type = other DNA
agagtctgcagtattgagaggatttctaatcctcggcaaagaagacaaaagatatggaccagcattaagcatcaatgaac

SEQ ID NO: 22221 - DNA, 80 bp, synthetic construct
  misc_feature 1..80: note = Synthetic: >NC_005062.1-cand-2890-2969
  source 1..80: mol_type = other DNA
actggcaaagagaagaacaggtgtcttcacagtggctgaatttggaatgggcttgagaacaaaagtctttttggacttca

SEQ ID NO: 22222 - DNA, 80 bp, synthetic construct
  misc_feature 1..80: note = Synthetic: >NC_005062.1-cand-2930-3009
  source 1..80: mol_type = other DNA
tttggaatgggcttgagaacaaaagtctttttggacttcaggcaagaaataacacgggaatgcgacacaggagtgatggg

SEQ ID NO: 22223 - DNA, 80 bp, synthetic construct
  misc_feature 1..80: note = Synthetic: >NC_005062.1-cand-3030-3109
  source 1..80: mol_type = other DNA
tagcggtccacacagaccaaagcctatggatgaaatctataagaaatgagactggaacatacattgttgaactcctggtc

SEQ ID NO: 22224 - DNA, 80 bp, synthetic construct
  misc_feature 1..80: note = Synthetic: >NC_005062.1-cand-3110-3189
  source 1..80: mol_type = other DNA
acagatttgagaaactgctcatggccagcaagtcataccattgacaatgctgatgtcgtggactcagagctctttctgcc

SEQ ID NO: 22225 - DNA, 80 bp, synthetic construct
  misc_feature 1..80: note = Synthetic: >NC_005062.1-cand-3170-3249
  source 1..80: mol_type = other DNA
gactcagagctctttctgccggccagcctagccggacctcggtcttggtacaacagaatacccggttactcggaacaagt

SEQ ID NO: 22226 - DNA, 80 bp, synthetic construct
  misc_feature 1..80: note = Synthetic: >NC_005062.1-cand-3260-3339
  source 1..80: mol_type = other DNA
tggaaatacacacccatcaagatcaccagagaggagtgccccgggactaaggttgccatagatgccagctgcgataagcg

SEQ ID NO: 22227 - DNA, 80 bp, synthetic construct
  misc_feature 1..80: note = Synthetic: >NC_005062.1-cand-3360-3439
  source 1..80: mol_type = other DNA
cctcagaaagcggcaagatcatcccagaatggtgctgccggaagtgcactctgccaccggtgacattcagaacagggact

SEQ ID NO: 22228 - DNA, 80 bp, synthetic construct
  misc_feature 1..80: note = Synthetic: >NC_005062.1-cand-3440-3519
  source 1..80: mol_type = other DNA
gactgctggtatgccatggagatacggccagttcatgatcaaggtggcctggtgcgctcgatggtggtggctgacaatgg

SEQ ID NO: 22229 - DNA, 80 bp, synthetic construct
  misc_feature 1..80: note = Synthetic: >NC_005062.1-cand-3520-3599
  source 1..80: mol_type = other DNA
agagctgctcagcgaaggaggaatccctggaattgtggcagtgttcgtggtccttgaatacatcattcgcaaaaggccga

SEQ ID NO: 22230 - DNA, 80 bp, synthetic construct
  misc_feature 1..80: note = Synthetic: >NC_005062.1-cand-3540-3619
  source 1..80: mol_type = other DNA
gaatccctggaattgtggcagtgttcgtggtccttgaatacatcattcgcaaaaggccgagtgcaggactgacggttgtg

SEQ ID NO: 22231 - DNA, 80 bp, synthetic construct
  misc_feature 1..80: note = Synthetic: >NC_005062.1-cand-3710-3789
  source 1..80: mol_type = other DNA
tttcacctcgagctagggccagaaatcgtggctttgatgctgctccaggcagtgttcgagctaagggtcggactcctcgg

SEQ ID NO: 22232 - DNA, 80 bp, synthetic construct
  misc_feature 1..80: note = Synthetic: >NC_005062.1-cand-3760-3839
  source 1..80: mol_type = other DNA
agtgttcgagctaagggtcggactcctcggtgcgtttgtgctgcgcagaagtctaacaacccgcgaggtggtgaccatct

SEQ ID NO: 22233 - DNA, 80 bp, synthetic construct
  misc_feature 1..80: note = Synthetic: >NC_005062.1-cand-3820-3899
  source 1..80: mol_type = other DNA
ccgcgaggtggtgaccatctattttctcctcttggtcctggaacttggtctgccgagcgcaaacctggaggccttgtggg

SEQ ID NO: 22234 - DNA, 80 bp, synthetic construct
  misc_feature 1..80: note = Synthetic: >NC_005062.1-cand-3920-3999
  source 1..80: mol_type = other DNA
atgggagcaatgatattcagagcttgcacggctgagggaaaaaccggactgggactcctgttggtggctctcatgaccca

SEQ ID NO: 22235 - DNA, 80 bp, synthetic construct
  misc_feature 1..80: note = Synthetic: >NC_005062.1-cand-4000-4079
  source 1..80: mol_type = other DNA
gcagaatgcagtgatagtgcaccaagggcttgtgatctttttgagcgtggcttcagcttgttcagtgtggaaattgctca

SEQ ID NO: 22236 - DNA, 80 bp, synthetic construct
  misc_feature 1..80: note = Synthetic: >NC_005062.1-cand-4100-4179
  source 1..80: mol_type = other DNA
gggctatcctggatagtcccactcgctggaaggcttggaggaaagggctctggaattaggctgctggctttttgggaact

SEQ ID NO: 22237 - DNA, 80 bp, synthetic construct
  misc_feature 1..80: note = Synthetic: >NC_005234.1-cand-650-729
  source 1..80: mol_type = other DNA
tgtgagcattgtctgttttttcatcagagttaaagggaccaactacaagataatggcaagtattaaaacagcaactgcaa

SEQ ID NO: 22238 - DNA, 80 bp, synthetic construct
  misc_feature 1..80: note = Synthetic: >NC_005234.1-cand-700-779
  source 1..80: mol_type = other DNA
taatggcaagtattaaaacagcaactgcaaataactgtaatgacactgacaacaaggttcaaggatattacctttgtatt

SEQ ID NO: 22239 - DNA, 80 bp, synthetic construct
  misc_feature 1..80: note = Synthetic: >NC_005234.1-cand-810-889
  source 1..80: mol_type = other DNA
ccttcaaccactgattttagatctatggaggcacttgctagccttttaagagctcctcatggtgaagaccatgatttatc

SEQ ID NO: 22240 - DNA, 80 bp, synthetic construct
  misc_feature 1..80: note = Synthetic: >NC_005234.1-cand-880-959
  source 1..80: mol_type = other DNA
atgatttatctggagaagaggtggcaacttactcaattgccgggcaaattgaaggcaaaatcccacatactgcaaatgca

SEQ ID NO: 22241 - DNA, 80 bp, synthetic construct
  misc_feature 1..80: note = Synthetic: >NC_005234.1-cand-960-1039
  source 1..80: mol_type = other DNA
gcaaacatgctgtttactgcattctcaggaatccctagttactcttcattaagtgtttttatcggaagtcaggacggacc

SEQ ID NO: 22242 - DNA, 80 bp, synthetic construct
  misc_feature 1..80: note = Synthetic: >NC_005234.1-cand-1040-1119
  source 1..80: mol_type = other DNA
tgttatatatagcccaggattgtttcctaggttgaaccaatcttcatgtgataagattgcactaccattaatatgggaag

SEQ ID NO: 22243 - DNA, 80 bp, synthetic construct
  misc_feature 1..80: note = Synthetic: >NC_005234.1-cand-1110-1189
  source 1..80: mol_type = other DNA
atatgggaaggatatatagatctgcctggctattatgaaacagttcacccatgtaatgtcttttgtgtgttatctggccc

SEQ ID NO: 22244 - DNA, 80 bp, synthetic construct
  misc_feature 1..80: note = Synthetic: >NC_005234.1-cand-1200-1279
  source 1..80: mol_type = other DNA
tgtgaggcattctcagaaggtggtattttcaacattacatcccctacttgccttgtgtcaaagcaaaataggttcagagc

SEQ ID NO: 22245 - DNA, 80 bp, synthetic construct
  misc_feature 1..80: note = Synthetic: >NC_005234.1-cand-1280-1359
  source 1..80: mol_type = other DNA
tgctgagcagcaagtcaactttgtgtgccagcgagttgaccaagatattgtcatctactgtaatggacaaaagaagacaa

SEQ ID NO: 22246 - DNA, 80 bp, synthetic construct
  misc_feature 1..80: note = Synthetic: >NC_005234.1-cand-1350-1429
  source 1..80: mol_type = other DNA
aagaagacaattttaactaagacattagtgattgggcagtgtatttactcagtgactagtttattttcaataatgcctgg

SEQ ID NO: 22247 - DNA, 80 bp, synthetic construct
  misc_feature 1..80: note = Synthetic: >NC_005234.1-cand-1450-1529
  source 1..80: mol_type = other DNA
ttgaattatgtgtaccagggttccatggttgggcaactgctgctcttctcactacattctgctttggctggatactgatc

SEQ ID NO: 22248 - DNA, 80 bp, synthetic construct
  misc_feature 1..80: note = Synthetic: >NC_005234.1-cand-1530-1609
  source 1..80: mol_type = other DNA
ctttccattacattagctgtgttggttgtcctgaagttttttgccgcaatcttacataatagctctcaagaaaaccggtt

SEQ ID NO: 22249 - DNA, 80 bp, synthetic construct
  misc_feature 1..80: note = Synthetic: >NC_005234.1-cand-1620-1699
  source 1..80: mol_type = other DNA
ttaagaaagattaaagaagaatttgaaaagactaaaggctcaatggtctgtgaagtgtgcaagtatgagtgtgaaacagg

SEQ ID NO: 22250 - DNA, 80 bp, synthetic construct
  misc_feature 1..80: note = Synthetic: >NC_005234.1-cand-1700-1779
  source 1..80: mol_type = other DNA
gaaggagcttaaagcccataatttatcttgccctcagtcacagtgtccttattgctttacacactgtgagcctacagaat

SEQ ID NO: 22251 - DNA, 80 bp, synthetic construct
  misc_feature 1..80: note = Synthetic: >NC_005234.1-cand-1780-1859
  source 1..80: mol_type = other DNA
ctgcctttcaagcacattataaagtgtgccaagcaacacacagatttagggatgatttaaagaaaacaataacacctcaa

SEQ ID NO: 22252 - DNA, 80 bp, synthetic construct
  misc_feature 1..80: note = Synthetic: >NC_005234.1-cand-1860-1939
  source 1..80: mol_type = other DNA
tcaacaagcccaggttgttaccggacattaaatctttttaggtataaaagtagatgttacatctttacagtgtgggtgac

SEQ ID NO: 22253 - DNA, 80 bp, synthetic construct
  misc_feature 1..80: note = Synthetic: >NC_005301.3-cand-4370-4449
  source 1..80: mol_type = other DNA
cagtgtgagtgaaaaaacattgcaagacattgaaaatcattccatgactctactagaagattcattcagggaaatcactt

SEQ ID NO: 22254 - DNA, 80 bp, synthetic construct
  misc_feature 1..80: note = Synthetic: >NC_005301.3-cand-4440-4519
  source 1..80: mol_type = other DNA
gaaatcacttttgctcttgaaggtaggtttgaagaatcttataaaatacgaacctcgaggtgcagagccagtgggaattt

SEQ ID NO: 22255 - DNA, 80 bp, synthetic construct
  misc_feature 1..80: note = Synthetic: >NC_005301.3-cand-4520-4599
  source 1..80: mol_type = other DNA
tctgaacaggagcagtagagaccactttataagcgttgtttcaggcttgaacctagtttatggcttcctcataaaagata

SEQ ID NO: 22256 - DNA, 80 bp, synthetic construct
  misc_feature 1..80: note = Synthetic: >NC_005301.3-cand-4600-4679
  source 1..80: mol_type = other DNA
acttactagccaactctcagcaacagaacaaacaactacagatgcttcgttttggcatgcttgcagggcttagtaggctt

SEQ ID NO: 22257 - DNA, 80 bp, synthetic construct
  misc_feature 1..80: note = Synthetic: >NC_005301.3-cand-4680-4759
  source 1..80: mol_type = other DNA
gtttgtcctaatgagctaggaaagaaattttcaacgagctgtagaagaattgaagacaacattgcaaggctttacctgca

SEQ ID NO: 22258 - DNA, 80 bp, synthetic construct
  misc_feature 1..80: note = Synthetic: >NC_005301.3-cand-4760-4839
  source 1..80: mol_type = other DNA
gacatccatttactgttcagtcagggatgtggaggacaatgttaagcactggaaacaaagagatctatgtcctgaagtaa

SEQ ID NO: 22259 - DNA, 80 bp, synthetic construct
  misc_feature 1..80: note = Synthetic: >NC_005301.3-cand-4840-4919
  source 1..80: mol_type = other DNA
ccattccatgctttacagtctatggaacctttgtcaacagcgatagacaactgatctttgacatttacaatgtgcatata

SEQ ID NO: 22260 - DNA, 80 bp, synthetic construct
  misc_feature 1..80: note = Synthetic: >NC_005301.3-cand-4920-4999
  source 1..80: mol_type = other DNA
tataataaagaaatggacaactttgatgaaggatgtatcagcgtcttggaagaaacagcagaaaggcacatgctttggga

SEQ ID NO: 22261 - DNA, 80 bp, synthetic construct
  misc_feature 1..80: note = Synthetic: >NC_005301.3-cand-5000-5079
  source 1..80: mol_type = other DNA
actcgatctgatgaattcactttgttctgacgaaaaaaaagatactagacccgcaagacttttactaggctgcccaaatg

SEQ ID NO: 22262 - DNA, 80 bp, synthetic construct
  misc_feature 1..80: note = Synthetic: >NC_005301.3-cand-5080-5159
  source 1..80: mol_type = other DNA
tgaggaaagcagcaaccagagaagggaagaagctgttgaagttaaacagtgacacatccacagacacacagagcattgct

SEQ ID NO: 22263 - DNA, 80 bp, synthetic construct
  misc_feature 1..80: note = Synthetic: >NC_005301.3-cand-5160-5239
  source 1..80: mol_type = other DNA
tctgaagtgtcggacagaaggtcttatagttcaagtaagagtagaatccgtagtatatttggtagatacaactctcagaa

SEQ ID NO: 22264 - DNA, 80 bp, synthetic construct
  misc_feature 1..80: note = Synthetic: >NC_005301.3-cand-5240-5319
  source 1..80: mol_type = other DNA
gaaaccatttgaattaaggtcaggtcttgaggttttcaatgatcctttcaatgattatcagcaagcaataacggacattt

SEQ ID NO: 22265 - DNA, 80 bp, synthetic construct
  misc_feature 1..80: note = Synthetic: >NC_005301.3-cand-5320-5399
  source 1..80: mol_type = other DNA
gccaattttctgagtacacaccaaacaaagaaagcattttgaaagactgtcttcaaatcatacgaaaaaaccctagccac

SEQ ID NO: 22266 - DNA, 80 bp, synthetic construct
  misc_feature 1..80: note = Synthetic: >NC_005301.3-cand-5400-5479
  source 1..80: mol_type = other DNA
acaatgggttcttttgagctgatccaggcaatctcagagttcggcatgagcaagtttcctcccgaaaatatagacaaagc

SEQ ID NO: 22267 - DNA, 80 bp, synthetic construct
  misc_feature 1..80: note = Synthetic: >NC_005301.3-cand-5480-5559
  source 1..80: mol_type = other DNA
aagaagggatccgaagaactgggttagcatctctgaagtaaccgaaacaacaagtatagttgcatcacctagaactcata

SEQ ID NO: 22268 - DNA, 80 bp, synthetic construct
  misc_feature 1..80: note = Synthetic: >NC_005301.3-cand-5550-5629
  source 1..80: mol_type = other DNA
agaactcatatgatgctcaaggattgttttaaaattatactaggtactgagaataagaagatagtcaaaatgcttcgagg

SEQ ID NO: 22269 - DNA, 80 bp, synthetic construct
  misc_feature 1..80: note = Synthetic: >NC_005301.3-cand-10790-10869
  source 1..80: mol_type = other DNA
caagtacctcaaatcgggaggtgtcaggcaacggaacactgaagtgctcttcagagagaagttaaacaaggttgttataa

SEQ ID NO: 22270 - DNA, 80 bp, synthetic construct
  misc_feature 1..80: note = Synthetic: >NC_005301.3-cand-10870-10949
  source 1..80: mol_type = other DNA
aagacaatcttgagcaaggtgtggaagaggagattgagttttgcaacaacttgactaagactgtttcagagaacccatta

SEQ ID NO: 22271 - DNA, 80 bp, synthetic construct
  misc_feature 1..80: note = Synthetic: >NC_005301.3-cand-10950-11029
  source 1..80: mol_type = other DNA
ccactcagctgttggtctgaagttcaaaattacattgaagacataggctttaacaatgtacttgttaacattgacagaaa

SEQ ID NO: 22272 - DNA, 80 bp, synthetic construct
  misc_feature 1..80: note = Synthetic: >NC_005301.3-cand-11030-11109
  source 1..80: mol_type = other DNA
cacggtgaaaagtgaacttttatggaaatttacgttagacaccaatgtaagcaccacaagtactataaaagacgtgagga

SEQ ID NO: 22273 - DNA, 80 bp, synthetic construct
  misc_feature 1..80: note = Synthetic: >NC_005301.3-cand-11110-11189
  source 1..80: mol_type = other DNA
cattggtgtcctacgttagcactgaaaccatccctaagttcttgcttgcattcttactttatgaagaagtgttaatgaac

SEQ ID NO: 22274 - DNA, 80 bp, synthetic construct
  misc_feature 1..80: note = Synthetic: >NC_005301.3-cand-11190-11269
  source 1..80: mol_type = other DNA
ttaatcaaccagtgtaaggcagtaaaagaactcatcaacagcacaggactctcagacttggaactggaaagcttactcac

SEQ ID NO: 22275 - DNA, 80 bp, synthetic construct
  misc_feature 1..80: note = Synthetic: >NC_005301.3-cand-11270-11349
  source 1..80: mol_type = other DNA
tttatgtgctttctatttccaaagtgagtgcagtaagagagatggtcctagatgctcctttgcagcactattaagtctaa

SEQ ID NO: 22276 - DNA, 80 bp, synthetic construct
  misc_feature 1..80: note = Synthetic: >NC_005301.3-cand-11350-11429
  source 1..80: mol_type = other DNA
tccatgaggattggcagaggataggtaaaaacattcttgttcgtgcaaacaatgaactaggtgatgtgtcactgaaggtt

SEQ ID NO: 22277 - DNA, 80 bp, synthetic construct
  misc_feature 1..80: note = Synthetic: >NC_005301.3-cand-11430-11509
  source 1..80: mol_type = other DNA
aacattgtcctggtgcctctcaaggacatgtctaagccaaagtctgagagagtggtcatggctagaaggtcactaaatca

SEQ ID NO: 22278 - DNA, 80 bp, synthetic construct
  misc_feature 1..80: note = Synthetic: >NC_005301.3-cand-11500-11579
  source 1..80: mol_type = other DNA
cactaaatcatgctctatccttgatgtttctggacgagatgtcactacctgagctaaaatccttatccgtgaactgcaaa

SEQ ID NO: 22279 - DNA, 80 bp, synthetic construct
  misc_feature 1..80: note = Synthetic: >NC_005301.3-cand-11590-11669
  source 1..80: mol_type = other DNA
ttgaagggcaggagtgctttgagttcactattctgaaggacaatagcgcaagactagattacaacaagttgattgaccac

SEQ ID NO: 22280 - DNA, 80 bp, synthetic construct
  misc_feature 1..80: note = Synthetic: >NC_005301.3-cand-11670-11749
  source 1..80: mol_type = other DNA
tgtgtggacatggaaaaaaagagggaagcggttagagcagtagaagatttaattttgatgttgacaggcagagcagtcaa

SEQ ID NO: 22281 - DNA, 80 bp, synthetic construct
  misc_feature 1..80: note = Synthetic: >NC_005301.3-cand-11780-11859
  source 1..80: mol_type = other DNA
ggacgagcagtgtcaagagcaaataagcttagatgatctgatggcaaacgacacggtaacagactttcctgatagggaag

SEQ ID NO: 22282 - DNA, 80 bp, synthetic construct
  misc_feature 1..80: note = Synthetic: >NC_005301.3-cand-11830-11909
  source 1..80: mol_type = other DNA
acacggtaacagactttcctgatagggaagcagaagccctcaaaacaggaaatcttggctttaactgggactcagattga

SEQ ID NO: 22283 - DNA, 80 bp, synthetic construct
  misc_feature 1..80: note = Synthetic: >NC_005301.3-cand-11910-11989
  source 1..80: mol_type = other DNA
acatgccgcttataagccattaatacctttcggcgtcacaaggacaaatgatgcagttttagctgcatcattcattaaca

SEQ ID NO: 22284 - DNA, 80 bp, synthetic construct
  misc_feature 1..80: note = Synthetic: >NC_005301.3-cand-11990-12069
  source 1..80: mol_type = other DNA
ttaaagccttcaaacaagctaactactctgcattctcctcaatcaactcaattgcttcaactgatctattttactagctc

SEQ ID NO: 22285 - DNA, 80 bp, synthetic construct
  misc_feature 1..80: note = Synthetic: >NC_006313.1-cand-5410-5489
  source 1..80: mol_type = other DNA
aacatctagatctttctcctgtcttttggtaaaacagtaaacctattatgttgtttgtgatagggaatcgttggatataa

SEQ ID NO: 22286 - DNA, 80 bp, synthetic construct
  misc_feature 1..80: note = Synthetic: >NC_006313.1-cand-5490-5569
  source 1..80: mol_type = other DNA
cattccctaagtctcacattaccaaaatatcgtgaataatctctctcattaataagtaaccgagaggaaaatgatgtctt

SEQ ID NO: 22287 - DNA, 80 bp, synthetic construct
  misc_feature 1..80: note = Synthetic: >NC_006313.1-cand-5570-5649
  source 1..80: mol_type = other DNA
cattgaattgatcaagcctaatgaaagatgagacaaggcctttaacattatcttgaagtcatcgtcagtgaagttctcca

SEQ ID NO: 22288 - DNA, 80 bp, synthetic construct
  misc_feature 1..80: note = Synthetic: >NC_006313.1-cand-5650-5729
  source 1..80: mol_type = other DNA
ttgctttatggcaacattgtcgttcctctgctttgtgaacagaatacctcatcataggcctgtctgagactaactccttt

SEQ ID NO: 22289 - DNA, 80 bp, synthetic construct
  misc_feature 1..80: note = Synthetic: >NC_006313.1-cand-5730-5809
  source 1..80: mol_type = other DNA
gcgagttggaaaagttcattaaagtcaggaactcttattaaataacacagcttttcccagagctctaaatcatacctttt

SEQ ID NO: 22290 - DNA, 80 bp, synthetic construct
  misc_feature 1..80: note = Synthetic: >NC_006313.1-cand-5810-5889
  source 1..80: mol_type = other DNA
aagaacactgctacaaattgaaagccacttttcattggtggtcagtttttgcctgatcaacttattagcagtgaggatgt

SEQ ID NO: 22291 - DNA, 80 bp, synthetic construct
  misc_feature 1..80: note = Synthetic: >NC_006313.1-cand-5890-5969
  source 1..80: mol_type = other DNA
ccaacacccgatcattgacaagtaatatcatttgtccaactattaatcctgcattctttaggttcctgataactgtgcta

SEQ ID NO: 22292 - DNA, 80 bp, synthetic construct
  misc_feature 1..80: note = Synthetic: >NC_006313.1-cand-5980-6059
  source 1..80: mol_type = other DNA
tctcatcaacaacgaagttcaacatgattaagtctaaaaacaatagtgtgttcctcctggtattaaagatctttgaacct

SEQ ID NO: 22293 - DNA, 80 bp, synthetic construct
  misc_feature 1..80: note = Synthetic: >NC_006313.1-cand-6060-6139
  source 1..80: mol_type = other DNA
ttaatcttattgcacatggacaacacattcaggtaagattgcactgatgagtgtaaagttttagtcccatcaaggttcag

SEQ ID NO: 22294 - DNA, 80 bp, synthetic construct
  misc_feature 1..80: note = Synthetic: >NC_006313.1-cand-6140-6219
  source 1..80: mol_type = other DNA
cccccttgtgagcacatcctcatgcatcttgactgataatttgaaacacaactccaaaattctagaggaacaaaaggcac

SEQ ID NO: 22295 - DNA, 80 bp, synthetic construct
  misc_feature 1..80: note = Synthetic: >NC_006313.1-cand-6220-6299
  source 1..80: mol_type = other DNA
agtctaggctatcattctcctcatgggagcctaatgtgattaactgagacagcaggacctttttgtctgttttcacaaac

SEQ ID NO: 22296 - DNA, 80 bp, synthetic construct
  misc_feature 1..80: note = Synthetic: >NC_006313.1-cand-6300-6379
  source 1..80: mol_type = other DNA
tttcccaaacctttctcataaacttcacttttgtaccaaattttcaatcttataagctcctccatcacttttgattcttt

SEQ ID NO: 22297 - DNA, 80 bp, synthetic construct
  misc_feature 1..80: note = Synthetic: >NC_006313.1-cand-6380-6459
  source 1..80: mol_type = other DNA
cacatcattcttaactccaactaacaatgaggaatccagcaactgatcataggataacatattcctcttgagacattcaa

SEQ ID NO: 22298 - DNA, 80 bp, synthetic construct
  misc_feature 1..80: note = Synthetic: >NC_006313.1-cand-6470-6549
  source 1..80: mol_type = other DNA
accaaggctttgattgttggtcttggccaaactatggattaatctatgatattcttgttcttcaatttctagttctgaag

SEQ ID NO: 22299 - DNA, 80 bp, synthetic construct
  misc_feature 1..80: note = Synthetic: >NC_006313.1-cand-6550-6629
  source 1..80: mol_type = other DNA
tagtcttcatacctttcaacacctctattaacaaccacctcaacctttctgtggtccaatcagacacgaagctggtattg

SEQ ID NO: 22300 - DNA, 80 bp, synthetic construct
  misc_feature 1..80: note = Synthetic: >NC_006313.1-cand-6660-6739
  source 1..80: mol_type = other DNA
aatgtaacacctatcttgcctaggtctgtttttagagagattaatttgctcatatcagccttccatttcttttcaaagtc

SEQ ID NO: 22301 - DNA, 80 bp, synthetic construct
  misc_feature 1..80: note = Synthetic: >NC_007366.1-cand-1500-1579
  source 1..80: mol_type = other DNA
ctgcatagggtcaatcagaaatggaacttatgaccatgatgtatacagagatgaagcattaaacaaccggttccagatca

SEQ ID NO: 22302 - DNA, 80 bp, synthetic construct
  misc_feature 1..80: note = Synthetic: >NC_007366.1-cand-1590-1669
  source 1..80: mol_type = other DNA
gttgaagtcaggatacaaagattggatcctatggatttcctttgccatatcatgttttttgctttgtgttgctttgttgg

SEQ ID NO: 22303 - DNA, 80 bp, synthetic construct
  misc_feature 1..80: note = Synthetic: >NC_007366.1-cand-1670-1749
  source 1..80: mol_type = other DNA
ggttcatcatgtgggcctgccaaaaaggcaacattaggtgcaacatttgcatttgagtgcattaattaaaaacacccttg

SEQ ID NO: 22304 - DNA, 80 bp, synthetic construct
  misc_feature 1..80: note = Synthetic: >NC_007367.1-cand-210-289
  source 1..80: mol_type = other DNA
ttcacgctcaccgtgcccagtgagcgaggactgcagcgtagacgctttgtccaaaatgccctcaatgggaatggagatcc

SEQ ID NO: 22305 - DNA, 80 bp, synthetic construct
  misc_feature 1..80: note = Synthetic: >NC_007367.1-cand-260-339
  source 1..80: mol_type = other DNA
ccaaaatgccctcaatgggaatggagatccaaataacatggacaaagcagttaaactgtataggaaacttaagagggaga

SEQ ID NO: 22306 - DNA, 80 bp, synthetic construct
  misc_feature 1..80: note = Synthetic: >NC_007367.1-cand-270-349
  source 1..80: mol_type = other DNA
ctcaatgggaatggagatccaaataacatggacaaagcagttaaactgtataggaaacttaagagggagataacgttcca

SEQ ID NO: 22307 - DNA, 80 bp, synthetic construct
  misc_feature 1..80: note = Synthetic: >NC_007367.1-cand-430-509
  source 1..80: mol_type = other DNA
ctgtaaccactgaagtggcatttggcctggtatgtgcaacatgtgaacagattgctgactcccagcacaggtctcatagg

SEQ ID NO: 22308 - DNA, 80 bp, synthetic construct
  misc_feature 1..80: note = Synthetic: >NC_007367.1-cand-500-579
  source 1..80: mol_type = other DNA
gtctcataggcaaatggtggcaacaaccaatccattaataaaacatgagaacagaatggttttggccagcactacagcta

SEQ ID NO: 22309 - DNA, 80 bp, synthetic construct
  misc_feature 1..80: note = Synthetic: >NC_007367.1-cand-580-659
  source 1..80: mol_type = other DNA
aggctatggagcaaatggctggatcaagtgagcaggcagcggaggccatggaaattgctagtcaggccaggcaaatggtg

SEQ ID NO: 22310 - DNA, 80 bp, synthetic construct
  misc_feature 1..80: note = Synthetic: >NC_007367.1-cand-670-749
  source 1..80: mol_type = other DNA
gagccgttgggactcatcctagctccagtactggtctaagagatgatcttcttgaaaatttgcagacctatcagaaacga

SEQ ID NO: 22311 - DNA, 80 bp, synthetic construct
  misc_feature 1..80: note = Synthetic: >NC_007367.1-cand-840-919
  source 1..80: mol_type = other DNA
tcgtctttttttcaaatgcgtctatcgactcttcaaacacggccttaaaagaggcccttctacggaaggagtacctgagt

SEQ ID NO: 22312 - DNA, 80 bp, synthetic construct
  misc_feature 1..80: note = Synthetic: >NC_007367.1-cand-930-1009
  source 1..80: mol_type = other DNA
agaatatcgaaaggaacagcagaatgctgtggatgctgacgacagtcattttgtcagcatagagttggagtaaaaaacta

SEQ ID NO: 22313 - DNA, 80 bp, synthetic construct
  misc_feature 1..80: note = Synthetic: >NC_007368.1-cand-0-79
  source 1..80: mol_type = other DNA
aaagcaggagtaaagatgaatccaaatcaaaagataataacgattggctctgtttctctcaccatttccacaatatgctt

SEQ ID NO: 22314 - DNA, 80 bp, synthetic construct
  misc_feature 1..80: note = Synthetic: >NC_007368.1-cand-190-269
  source 1..80: mol_type = other DNA
aaagaaacataacagagatagtgtatctgaccaacaccaccatagagaaggaaatgtgccccaaactagcagaatacaga

SEQ ID NO: 22315 - DNA, 80 bp, synthetic construct
  misc_feature 1..80: note = Synthetic: >NC_007368.1-cand-270-349
  source 1..80: mol_type = other DNA
aattggtcaaagccgcaatgtgacattacaggatttgcacctttttctaaggacaattcgattaggctttccgctggtgg

SEQ ID NO: 22316 - DNA, 80 bp, synthetic construct
  misc_feature 1..80: note = Synthetic: >NC_007368.1-cand-360-439
  source 1..80: mol_type = other DNA
gtgacaagagaaccttatgtgtcatgcgaccctgacaagtgttaccaatttgcccttggacagggaacaacactaaacaa

SEQ ID NO: 22317 - DNA, 80 bp, synthetic construct
  misc_feature 1..80: note = Synthetic: >NC_007373.1-cand-160-239
  source 1..80: mol_type = other DNA
gatgaaatggatgatggcaatgaaatacccaatcactgctgacaaaaggataacagaaatggttccggagagaaatgaac

SEQ ID NO: 22318 - DNA, 80 bp, synthetic construct
  misc_feature 1..80: note = Synthetic: >NC_007373.1-cand-320-399
  source 1..80: mol_type = other DNA
aatagaaatggacccgtggcaagtacggtccattacccaaaagtatacaagacttattttgacaaagtcgaaaggttaaa

SEQ ID NO: 22319 - DNA, 80 bp, synthetic construct
  misc_feature 1..80: note = Synthetic: >NC_007373.1-cand-400-479
  source 1..80: mol_type = other DNA
acatggaacctttggccctgttcattttagaaatcaagtcaagatacgcagaagagtagacataaaccctggtcatgcag

SEQ ID NO: 22320 - DNA, 80 bp, synthetic construct
  misc_feature 1..80: note = Synthetic: >NC_007373.1-cand-480-559
  source 1..80: mol_type = other DNA
acctcagtgccaaagaggcacaagatgtaattatggaagttgtttttcccaatgaagtgggagccaggatactaacatca

SEQ ID NO: 22321 - DNA, 80 bp, synthetic construct
  misc_feature 1..80: note = Synthetic: >NC_007373.1-cand-560-639
  source 1..80: mol_type = other DNA
gaatcgcaattaacaataactaaagagaaaaaagaagaactccgagattgcaaaatttctcccttgatggttgcatacat

SEQ ID NO: 22322 - DNA, 80 bp, synthetic construct
  misc_feature 1..80: note = Synthetic: >NC_007373.1-cand-640-719
  source 1..80: mol_type = other DNA
gttagagagagaacttgtccgaaaaacaagatttctcccagttgctggcggaacaagcagtatatacattgaagtcttac

SEQ ID NO: 22323 - DNA, 80 bp, synthetic construct
  misc_feature 1..80: note = Synthetic: >NC_007373.1-cand-700-779
  source 1..80: mol_type = other DNA
tatatacattgaagtcttacatttgactcaaggaacgtgttgggaacaaatgtacactccaggtggagaagtgaggaatg

SEQ ID NO: 22324 - DNA, 80 bp, synthetic construct
  misc_feature 1..80: note = Synthetic: >NC_007373.1-cand-780-859
  source 1..80: mol_type = other DNA
acgatgttgaccaaagcctaattattgcggccaggaacatagtaagaagagctgcagtatcagcagatccactagcatct

SEQ ID NO: 22325 - DNA, 80 bp, synthetic construct
  misc_feature 1..80: note = Synthetic: >NC_007373.1-cand-860-939
  source 1..80: mol_type = other DNA
ttattggagatgtgccacagcacacaaattggcgggacaaggatggtggacattcttagacagaacccgactgaagaaca

SEQ ID NO: 22326 - DNA, 80 bp, synthetic construct
  misc_feature 1..80: note = Synthetic: >NC_007373.1-cand-1010-1089
  source 1..80: mol_type = other DNA
tttaaaagaacaagcgggtcatcagtcaaaaaagaggaagaagtgcttacaggcaatctccaaacattgaagataagagt

SEQ ID NO: 22327 - DNA, 80 bp, synthetic construct
  misc_feature 1..80: note = Synthetic: >NC_007373.1-cand-1130-1209
  source 1..80: mol_type = other DNA
gcaacagctatactcagaaaagcaaccagaagattggttcagctcatagtgagtggaagagacgaacagtcaatagccga

SEQ ID NO: 22328 - DNA, 80 bp, synthetic construct
  misc_feature 1..80: note = Synthetic: >NC_007373.1-cand-1250-1329
  source 1..80: mol_type = other DNA
atgataaaagcagttagaggtgacctgaatttcgtcaacagagcaaatcaacggttgaaccccatgcatcagcttttaag

SEQ ID NO: 22329 - DNA, 80 bp, synthetic construct
  misc_feature 1..80: note = Synthetic: >NC_007373.1-cand-1290-1369
  source 1..80: mol_type = other DNA
gagcaaatcaacggttgaaccccatgcatcagcttttaaggcattttcagaaagatgcgaaagtgctttttcaaaattgg

SEQ ID NO: 22330 - DNA, 80 bp, synthetic construct
  misc_feature 1..80: note = Synthetic: >NC_007373.1-cand-1410-1489
  source 1..80: mol_type = other DNA
tattaccagatatgactccaagcacagagatgtcaatgagaggaataagagtcagcaaaatgggtgtggatgaatactcc

SEQ ID NO: 22331 - DNA, 80 bp, synthetic construct
  misc_feature 1..80: note = Synthetic: >NC_007373.1-cand-1490-1569
  source 1..80: mol_type = other DNA
agtacagagagggtggtggttagcattgatcggtttttgagagttcgagaccaacgcgggaatgtattattgtctcctga

SEQ ID NO: 22332 - DNA, 80 bp, synthetic construct
  misc_feature 1..80: note = Synthetic: >NC_007373.1-cand-1570-1649
  source 1..80: mol_type = other DNA
ggaggtcagtgaaacacagggaactgaaagattgacaataacatattcatcgtcgatgatgtgggagattaacggtcctg

SEQ ID NO: 22333 - DNA, 80 bp, synthetic construct
  misc_feature 1..80: note = Synthetic: >NC_007375.1-cand-310-389
  source 1..80: mol_type = other DNA
atcacacccaggaatctttgaaaattcgtgtcttgaaacgatggaagttattcaacaaacaagagtggacaaactgaccc

SEQ ID NO: 22334 - DNA, 80 bp, synthetic construct
  misc_feature 1..80: note = Synthetic: >NC_007375.1-cand-390-469
  source 1..80: mol_type = other DNA
aaggtcgtcagacctatgactggacattgaacagaaatcagccggctgcaactgcgctagccaacactatagaggtcttc

SEQ ID NO: 22335 - DNA, 80 bp, synthetic construct
  misc_feature 1..80: note = Synthetic: >NC_007375.1-cand-470-549
  source 1..80: mol_type = other DNA
agatcgaatggactgacagctaatgagtcgggaaggctaatagatttcctcaaggatgtgatagaatcaatggataaaga

SEQ ID NO: 22336 - DNA, 80 bp, synthetic construct
  misc_feature 1..80: note = Synthetic: >NC_007375.1-cand-550-629
  source 1..80: mol_type = other DNA
ggagatggaaataacaacacacttccaaagaaaaagaagagtaagagacaacatgaccaagaaaatggtcacacaacgaa

SEQ ID NO: 22337 - DNA, 80 bp, synthetic construct
  misc_feature 1..80: note = Synthetic: >NC_007375.1-cand-610-689
  source 1..80: mol_type = other DNA
gaaaatggtcacacaacgaacaataggaaagaagaagcaaagattgaacaagagaagctatctgataagagcactgacat

SEQ ID NO: 22338 - DNA, 80 bp, synthetic construct
  misc_feature 1..80: note = Synthetic: >NC_007375.1-cand-690-769
  source 1..80: mol_type = other DNA
tgaacacaatgactaaagatgcagagagaggtaaattaaaaagaagagcaattgcaacacccggtatgcagatcagaggg

SEQ ID NO: 22339 - DNA, 80 bp, synthetic construct
  misc_feature 1..80: note = Synthetic: >NC_007375.1-cand-770-849
  source 1..80: mol_type = other DNA
ttcgtgcactttgtcgaaacactagcgagaaatatttgtgagaaacttgaacagtctgggcttccggttggaggtaatga

SEQ ID NO: 22340 - DNA, 80 bp, synthetic construct
  misc_feature 1..80: note = Synthetic: >NC_007375.1-cand-840-919
  source 1..80: mol_type = other DNA
gaggtaatgaaaagaaggctaaactagcaaatgttgttagaaaaatgatgactaattcacaagacacagagctctctttc

SEQ ID NO: 22341 - DNA, 80 bp, synthetic construct
  misc_feature 1..80: note = Synthetic: >NC_007375.1-cand-1000-1079
  source 1..80: mol_type = other DNA
aaatcaacctgaatggtttagaaacgtcctgagcattgcacccataatgttctcaaataaaatggctagactagggaaag

SEQ ID NO: 22342 - DNA, 80 bp, synthetic construct
  misc_feature 1..80: note = Synthetic: >NC_007375.1-cand-1080-1159
  source 1..80: mol_type = other DNA
gttacatgttcgaaagcaagagcatgaagctccgaacacaaataccagcagaaatgctagcaagtattgacctgaaatac

SEQ ID NO: 22343 - DNA, 80 bp, synthetic construct
  misc_feature 1..80: note = Synthetic: >NC_007375.1-cand-1160-1239
  source 1..80: mol_type = other DNA
tttaatgaatcaaccagaaagaaaattgagaaaataaggcctctcctaatagatggcacagtctcattgagtcctggaat

SEQ ID NO: 22344 - DNA, 80 bp, synthetic construct
  misc_feature 1..80: note = Synthetic: >NC_007375.1-cand-1240-1319
  source 1..80: mol_type = other DNA
gatgatgggcatgttcaacatgctaagtacagtcttaggagtctcaatcctgaatctcgggcaaaagaaatacaccaaaa

SEQ ID NO: 22345 - DNA, 80 bp, synthetic construct
  misc_feature 1..80: note = Synthetic: >NC_007375.1-cand-1410-1489
  source 1..80: mol_type = other DNA
atagattctacagaacctgcaagctagtcggaatcaatatgagcaaaaagaagtcctacataaataggacagggacattt

SEQ ID NO: 22346 - DNA, 80 bp, synthetic construct
  misc_feature 1..80: note = Synthetic: >NC_007375.1-cand-1420-1499
  source 1..80: mol_type = other DNA
cagaacctgcaagctagtcggaatcaatatgagcaaaaagaagtcctacataaataggacagggacatttgaattcacaa

SEQ ID NO: 22347 - DNA, 80 bp, synthetic construct
  misc_feature 1..80: note = Synthetic: >NC_007375.1-cand-1500-1579
  source 1..80: mol_type = other DNA
gctttttctatcgctatggatttgtagccaattttagcatggagctgcccagctttggagtgtctggaattaatgaatcg

SEQ ID NO: 22348 - DNA, 80 bp, synthetic construct
  misc_feature 1..80: note = Synthetic: >NC_007375.1-cand-1600-1679
  source 1..80: mol_type = other DNA
aacagtgataaagaacaatatgataaataatgaccttgggccagcaacagcccaaatggctcttcaactattcatcaaag

SEQ ID NO: 22349 - DNA, 80 bp, synthetic construct
  misc_feature 1..80: note = Synthetic: >NC_007378.1-cand-1650-1729
  source 1..80: mol_type = other DNA
agtcagtgttggtcaatacctatcagtggatcatcagaaactgggaaactgttaaaattcaatggtctcagaatcctaca

SEQ ID NO: 22350 - DNA, 80 bp, synthetic construct
  misc_feature 1..80: note = Synthetic: >NC_007378.1-cand-1730-1809
  source 1..80: mol_type = other DNA
atgctatacaataaaatggaatttgagccatttcagtctttagttcctaaggccattagaggccaatacagtggatttgt

SEQ ID NO: 22351 - DNA, 80 bp, synthetic construct
  misc_feature 1..80: note = Synthetic: >NC_007378.1-cand-1810-1889
  source 1..80: mol_type = other DNA
taggactctattccaacaaatgagggatgtacttgggacatttgataccacccagataataaagcttcttccctttgcag

SEQ ID NO: 22352 - DNA, 80 bp, synthetic construct
  misc_feature 1..80: note = Synthetic: >NC_007378.1-cand-1860-1939
  source 1..80: mol_type = other DNA
cccagataataaagcttcttccctttgcagccgccccaccaaagcaaagtagaatgcagttctcttcattgactgtgaat

SEQ ID NO: 22353 - DNA, 80 bp, synthetic construct
  misc_feature 1..80: note = Synthetic: >NC_007378.1-cand-1990-2069
  source 1..80: mol_type = other DNA
caactacaacaagaccactaagagactaacaattctcggaaaggatgctggcactttaactgaagacccagatgaaggca

SEQ ID NO: 22354 - DNA, 80 bp, synthetic construct
  misc_feature 1..80: note = Synthetic: >NC_007378.1-cand-2080-2159
  source 1..80: mol_type = other DNA
ggagtccgctgttctgagaggattcctcattctgggcaaggaagatagaagatatggaccagcattaagcatcaatgaac

SEQ ID NO: 22355 - DNA, 80 bp, synthetic construct
  misc_feature 1..80: note = Synthetic: >NC_007380.1-cand-0-79
  source 1..80: mol_type = other DNA
attctaacactgtgtcaagttttcaggtagattgcttcctttggcatgtccgaaaacaagttgtagaccaagaactaggt

SEQ ID NO: 22356 - DNA, 80 bp, synthetic construct
  misc_feature 1..80: note = Synthetic: >NC_007380.1-cand-130-209
  source 1..80: mol_type = other DNA
aagaggcagcactctcgatctagacatcgaagcagccacccgtgttggaaagcagatagtagagaggattctgaaggaag

SEQ ID NO: 22357 - DNA, 80 bp, synthetic construct
  misc_feature 1..80: note = Synthetic: >NC_007380.1-cand-180-259
  source 1..80: mol_type = other DNA
agcagatagtagagaggattctgaaggaagaatccgatgaggcacttaaaatgaccatggcctccgcacctgcttcgcga

SEQ ID NO: 22358 - DNA, 80 bp, synthetic construct
  misc_feature 1..80: note = Synthetic: >NC_007380.1-cand-270-349
  source 1..80: mol_type = other DNA
acatgactattgaggaattgtcaagggactggttcatgctaatgcccaagcagaaagtggaaggccctctttgcatcaga

SEQ ID NO: 22359 - DNA, 80 bp, synthetic construct
  misc_feature 1..80: note = Synthetic: >NC_007380.1-cand-370-449
  source 1..80: mol_type = other DNA
taagaacatcatgttgaaagcgaatttcagtgtgatttttgaccggctagagaccctaatattactaagggctttcaccg

SEQ ID NO: 22360 - DNA, 80 bp, synthetic construct
  misc_feature 1..80: note = Synthetic: >NC_007380.1-cand-450-529
  source 1..80: mol_type = other DNA
aagagggagcaattgttggcgaaatttcaccattgccttctcttccaggacatactattgaggatgtcaaaaatgcaatt

SEQ ID NO: 22361 - DNA, 80 bp, synthetic construct
  misc_feature 1..80: note = Synthetic: >NC_007380.1-cand-740-819
  source 1..80: mol_type = other DNA
gaatagttttgagcaaataacatttatgcaagccttacagctactatttgaagtggaacaagagataagaactttctcgt

SEQ ID NO: 22362 - DNA, 80 bp, synthetic construct
  misc_feature 1..80: note = Synthetic: >NC_007381.1-cand-50-129
  source 1..80: mol_type = other DNA
cgccagaatgcaactgagatcagagcatccgtcgggaagatgattgatggaattggacgattctacatccaaatgtgcac

SEQ ID NO: 22363 - DNA, 80 bp, synthetic construct
  misc_feature 1..80: note = Synthetic: >NC_007381.1-cand-70-149
  source 1..80: mol_type = other DNA
cagagcatccgtcgggaagatgattgatggaattggacgattctacatccaaatgtgcaccgaacttaaactcagtgatt

SEQ ID NO: 22364 - DNA, 80 bp, synthetic construct
  misc_feature 1..80: note = Synthetic: >NC_007381.1-cand-170-249
  source 1..80: mol_type = other DNA
aacagcttaacaatagagagaatggtgctctctgcttttgacgagagaaggaataaatatctggaagaacatcccagcgc

SEQ ID NO: 22365 - DNA, 80 bp, synthetic construct
  misc_feature 1..80: note = Synthetic: >NC_009823.1-cand-1080-1159
  source 1..80: mol_type = other DNA
cagcggcccggcgccctcacgcagggcttgcggacgcacatcgacatggttgtgatgtccgccacgctctgctctgccct

SEQ ID NO: 22366 - DNA, 80 bp, synthetic construct
  misc_feature 1..80: note = Synthetic: >NC_009823.1-cand-1210-1289
  source 1..80: mol_type = other DNA
ttgtctcgccgcagcaccactggtttgtccaagactgcaattgctccatctaccctggtaccatcactggacaccgcatg

SEQ ID NO: 22367 - DNA, 80 bp, synthetic construct
  misc_feature 1..80: note = Synthetic: >NC_009823.1-cand-1290-1369
  source 1..80: mol_type = other DNA
gcatgggacatgatgatgaactggtcgcccacggctaccatgatcttggcgtacgcgatgcgtgtccccgaggtcattat

SEQ ID NO: 22368 - DNA, 80 bp, synthetic construct
  misc_feature 1..80: note = Synthetic: >NC_009823.1-cand-1300-1379
  source 1..80: mol_type = other DNA
tgatgatgaactggtcgcccacggctaccatgatcttggcgtacgcgatgcgtgtccccgaggtcattatagacatcatt

SEQ ID NO: 22369 - DNA, 80 bp, synthetic construct
  misc_feature 1..80: note = Synthetic: >NC_009823.1-cand-1510-1589
  source 1..80: mol_type = other DNA
ccgcgcagaccaccgggcgcctcaccagcttatttgacatgggccccaggcagaaaatccagctcgttaacaccaatggc

SEQ ID NO: 22370 - DNA, 80 bp, synthetic construct
  misc_feature 1..80: note = Synthetic: >NC_009823.1-cand-1530-1609
  source 1..80: mol_type = other DNA
ctcaccagcttatttgacatgggccccaggcagaaaatccagctcgttaacaccaatggcagctggcacatcaaccgcac

SEQ ID NO: 22371 - DNA, 80 bp, synthetic construct
  misc_feature 1..80: note = Synthetic: >NC_009823.1-cand-1610-1689
  source 1..80: mol_type = other DNA
cgccctgaactgcaatgactccttgcacaccggctttatcgcgtctctgttctacacccacagcttcaactcgtcaggat

SEQ ID NO: 22372 - DNA, 80 bp, synthetic construct
  misc_feature 1..80: note = Synthetic: >NC_009823.1-cand-1660-1739
  source 1..80: mol_type = other DNA
tctacacccacagcttcaactcgtcaggatgtcccgaacgcatgtccgcctgccgcagtatcgaggccttccgggtggga

SEQ ID NO: 22373 - DNA, 80 bp, synthetic construct
  misc_feature 1..80: note = Synthetic: >NC_009823.1-cand-1770-1849
  source 1..80: mol_type = other DNA
accaatccagaggatatgagaccctattgctggcactacccaccaaggcagtgtggcgtggtctccgcgaagactgtgtg

SEQ ID NO: 22374 - DNA, 80 bp, synthetic construct
  misc_feature 1..80: note = Synthetic: >NC_009823.1-cand-1850-1929
  source 1..80: mol_type = other DNA
tggcccagtgtactgtttcacccccagcccagtggtagtgggcacgaccgacaggcttggagcgcccacttacacgtggg

SEQ ID NO: 22375 - DNA, 80 bp, synthetic construct
  misc_feature 1..80: note = Synthetic: >NC_009823.1-cand-1980-2059
  source 1..80: mol_type = other DNA
gggtcatggttcggctgcacgtggatgaactcttctggctacaccaagacttgcggcgcaccaccctgccgtactagagc

SEQ ID NO: 22376 - DNA, 80 bp, synthetic construct
  misc_feature 1..80: note = Synthetic: >NC_009823.1-cand-2010-2089
  source 1..80: mol_type = other DNA
tcttctggctacaccaagacttgcggcgcaccaccctgccgtactagagctgacttcaacgccagcacggacctgttgtg

SEQ ID NO: 22377 - DNA, 80 bp, synthetic construct
  misc_feature 1..80: note = Synthetic: >NC_009823.1-cand-2090-2169
  source 1..80: mol_type = other DNA
ccccacggactgttttaggaagcatcctgataccacttacctcaaatgcggctctgggccctggctcacgccaaggtgcc

SEQ ID NO: 22378 - DNA, 80 bp, synthetic construct
  misc_feature 1..80: note = Synthetic: >NC_009823.1-cand-2170-2249
  source 1..80: mol_type = other DNA
tgatcgactacccctacaggctctggcattacccctgcacagttaactataccatcttcaaaataaggatgtatgtggga

SEQ ID NO: 22379 - DNA, 80 bp, synthetic construct
  misc_feature 1..80: note = Synthetic: >NC_009823.1-cand-2300-2379
  source 1..80: mol_type = other DNA
ttgcaacttggaggacagagacagaagtcaactgtctcctttgttgcactccaccacggaatgggccattttaccttgct

SEQ ID NO: 22380 - DNA, 80 bp, synthetic construct
  misc_feature 1..80: note = Synthetic: >NC_009823.1-cand-2330-2409
  source 1..80: mol_type = other DNA
actgtctcctttgttgcactccaccacggaatgggccattttaccttgctcttactcggacctgcccgccttgtcgactg

SEQ ID NO: 22381 - DNA, 80 bp, synthetic construct
  misc_feature 1..80: note = Synthetic: >NC_009823.1-cand-4950-5029
  source 1..80: mol_type = other DNA
accaccgtcaggctcagggcgtatttcaacacgcccggtttgcctgtgtgccaagaccatcttgagttttgggaggcagt

SEQ ID NO: 22382 - DNA, 80 bp, synthetic construct
  misc_feature 1..80: note = Synthetic: >NC_009823.1-cand-5000-5079
  source 1..80: mol_type = other DNA
ccaagaccatcttgagttttgggaggcagttttcaccggcctcacacacatagatgcccacttcctttcccaaacaaagc

SEQ ID NO: 22383 - DNA, 80 bp, synthetic construct
  misc_feature 1..80: note = Synthetic: >NC_009823.1-cand-5110-5189
  source 1..80: mol_type = other DNA
cctaccaggctacagtgtgcgctagggccaaagccccccccccgtcctgggacgtcatgtggaagtgtttgactcgactc

SEQ ID NO: 22384 - DNA, 80 bp, synthetic construct
  misc_feature 1..80: note = Synthetic: >NC_009823.1-cand-5190-5269
  source 1..80: mol_type = other DNA
aagcccacactcgtgggccccacacctctcctgtaccgcttgggctctgttaccaacgaggtcaccctcacacatcccgt

SEQ ID NO: 22385 - DNA, 80 bp, synthetic construct
  misc_feature 1..80: note = Synthetic: >NC_009823.1-cand-5260-5339
  source 1..80: mol_type = other DNA
cacatcccgtgacgaaatacatcgccacctgcatgcaagccgaccttgaggtcatgaccagcacatgggtcttggcaggg

SEQ ID NO: 22386 - DNA, 80 bp, synthetic construct
  misc_feature 1..80: note = Synthetic: >NC_009823.1-cand-5350-5429
  source 1..80: mol_type = other DNA
cggccgtcgccgcgtattgcctggcgaccgggtgtgtttgcatcatcggccgcttgcacattaaccagcgagccgtcgtt

SEQ ID NO: 22387 - DNA, 80 bp, synthetic construct
  misc_feature 1..80: note = Synthetic: >NC_009823.1-cand-5430-5509
  source 1..80: mol_type = other DNA
gcgccggacaaggaggtcctctatgaggcttttgatgagatggaggaatgtgcctctagggcggctctcattgaagaggg

SEQ ID NO: 22388 - DNA, 80 bp, synthetic construct
  misc_feature 1..80: note = Synthetic: >NC_009823.1-cand-5510-5589
  source 1..80: mol_type = other DNA
gcagcggatagccgagatgctgaagtccaagatccaaggcttattgcagcaagcttccaaacaagctcaagacatacaac

SEQ ID NO: 22389 - DNA, 80 bp, synthetic construct
  misc_feature 1..80: note = Synthetic: >NC_009823.1-cand-5590-5669
  source 1..80: mol_type = other DNA
ccactgtgcaggcttcatggcccaaggtagaacaattctgggccaaacacatgtggaacttcattagcggcatccaatac

SEQ ID NO: 22390 - DNA, 80 bp, synthetic construct
  misc_feature 1..80: note = Synthetic: >NC_009823.1-cand-5670-5749
  source 1..80: mol_type = other DNA
ctcgcaggactatcaacactgccagggaaccctgcagtagcttccatgatggcgttcagtgccgccctcaccagtccgct

SEQ ID NO: 22391 - DNA, 80 bp, synthetic construct
  misc_feature 1..80: note = Synthetic: >NC_009823.1-cand-5700-5779
  source 1..80: mol_type = other DNA
cctgcagtagcttccatgatggcgttcagtgccgccctcaccagtccgctgtcaacaagcaccactatccttctcaacat

SEQ ID NO: 22392 - DNA, 80 bp, synthetic construct
  misc_feature 1..80: note = Synthetic: >NC_009823.1-cand-5830-5909
  source 1..80: mol_type = other DNA
gcttcgttgtcagtggcctagtgggagctgccgtaggcagtataggcttaggtaaggtgctagtggacatcctggcaggg

SEQ ID NO: 22393 - DNA, 80 bp, synthetic construct
  misc_feature 1..80: note = Synthetic: >NC_009823.1-cand-5930-6009
  source 1..80: mol_type = other DNA
ggctctcgtcgcattcaagatcatgtctggcgagaagccctccatggaggatgtcgtcaacttgctgcctggaattctgt

SEQ ID NO: 22394 - DNA, 80 bp, synthetic construct
  misc_feature 1..80: note = Synthetic: >NC_009823.1-cand-5990-6069
  source 1..80: mol_type = other DNA
cttgctgcctggaattctgtctccgggtgccttggtagtgggagtcatctgcgcggccattctgcgccgacacgtgggac

SEQ ID NO: 22395 - DNA, 80 bp, synthetic construct
  misc_feature 1..80: note = Synthetic: >NC_009823.1-cand-6080-6159
  source 1..80: mol_type = other DNA
cgccgtccaatggatgaatagactcattgcctttgcttccagaggaaatcacgtcgcccccacccactacgtgacggagt

SEQ ID NO: 22396 - DNA, 80 bp, synthetic construct
  misc_feature 1..80: note = Synthetic: >NC_009823.1-cand-6150-6229
  source 1..80: mol_type = other DNA
gtgacggagtcggatgcgtcgcagcgtgtgacccaactacttggctcccttaccataaccagcctgctcagaagactcca

SEQ ID NO: 22397 - DNA, 80 bp, synthetic construct
  misc_feature 1..80: note = Synthetic: >NC_010277.2-cand-4940-5019
  source 1..80: mol_type = other DNA
aaacactctccccacgtcagacagtttttttgctttaaagtttttagactacaatgctggcgagacaacttacagctaat

SEQ ID NO: 22398 - DNA, 80 bp, synthetic construct
  misc_feature 1..80: note = Synthetic: >NC_010277.2-cand-5020-5099
  source 1..80: mol_type = other DNA
acaagcgcacttagaatctctaagttgcttaagcatgcacccaggacctctgcaaaatctagcattatatccactttgca

SEQ ID NO: 22399 - DNA, 80 bp, synthetic construct
  misc_feature 1..80: note = Synthetic: >NC_010277.2-cand-5100-5179
  source 1..80: mol_type = other DNA
tataatcctttaaagttccatattcttcccaaggaaattttgtactgacctcatcaaacatagagaagtcacttctgagc

SEQ ID NO: 22400 - DNA, 80 bp, synthetic construct
  misc_feature 1..80: note = Synthetic: >NC_010277.2-cand-5180-5259
  source 1..80: mol_type = other DNA
ttgtggatattttgctggaatttgctccaaagggtgttcaattccatcattataacaggatttccccctttatcagggtg

SEQ ID NO: 22401 - DNA, 80 bp, synthetic construct
  misc_feature 1..80: note = Synthetic: >NC_010277.2-cand-5260-5339
  source 1..80: mol_type = other DNA
atgctttaagcagcttcttttgaaagcagctttcatcagagggatgttgccataacaattaggagcaatctctaaaagct

SEQ ID NO: 22402 - DNA, 80 bp, synthetic construct
  misc_feature 1..80: note = Synthetic: >NC_010562.1-cand-0-79
  source 1..80: mol_type = other DNA
acagtggatcctaggcgctttttggtcacgcataaatcgtgagcaagaataaacatgggtcaacttgtgagtttctttca

SEQ ID NO: 22403 - DNA, 80 bp, synthetic construct
  misc_feature 1..80: note = Synthetic: >NC_010562.1-cand-80-159
  source 1..80: mol_type = other DNA
ggaaattcctaacatcatacaggaagcaatcaacattgctctaatagctgtcagcctcattgctatcctaaaagggttgg

SEQ ID NO: 22404 - DNA, 80 bp, synthetic construct
  misc_feature 1..80: note = Synthetic: >NC_010562.1-cand-160-239
  source 1..80: mol_type = other DNA
tcaatctgtggaaaagtggtttgtttcaactcctggtcttccttattctagctggaaggtcctgctcattcaaaattgga

SEQ ID NO: 22405 - DNA, 80 bp, synthetic construct
  misc_feature 1..80: note = Synthetic: >NC_010562.1-cand-240-319
  source 1..80: mol_type = other DNA
agatccacagaactccaaaacatcacaataaacatgttaaaggtctttgaggaccatcctatttcttgcacagtgaacaa

SEQ ID NO: 22406 - DNA, 80 bp, synthetic construct
  misc_feature 1..80: note = Synthetic: >NC_010562.1-cand-320-399
  source 1..80: mol_type = other DNA
aactctttattacatccgtgaaagtgagaatgcaacatggtgtgtagagattgctgcactggacatgtctgtcttgctct

SEQ ID NO: 22407 - DNA, 80 bp, synthetic construct
  misc_feature 1..80: note = Synthetic: >NC_010562.1-cand-400-479
  source 1..80: mol_type = other DNA
cgccacatgatccacgtgtaatgggcaacctatcaaactgtgttcacccagacattaaacatagatcagaacttctaggt

SEQ ID NO: 22408 - DNA, 80 bp, synthetic construct
  misc_feature 1..80: note = Synthetic: >NC_010562.1-cand-480-559
  source 1..80: mol_type = other DNA
ctattggagtggattttgagagctctgaaatatgattttctaaattatccacccctcttgtgtgaaaaagtgacatcatc

SEQ ID NO: 22409 - DNA, 80 bp, synthetic construct
  misc_feature 1..80: note = Synthetic: >NC_010562.1-cand-560-639
  source 1..80: mol_type = other DNA
tgtcaatgaaacacgcattcagataaatgtgagcgatagtgcaggttctcatgatttcaaagaaaccatgctccaaaggc

SEQ ID NO: 22410 - DNA, 80 bp, synthetic construct
  misc_feature 1..80: note = Synthetic: >NC_010562.1-cand-640-719
  source 1..80: mol_type = other DNA
tggccatactatttggcacaaaattgatgtttgataaaacacctaagcagttcatagttatcagaaatcagacttgggtg

SEQ ID NO: 22411 - DNA, 80 bp, synthetic construct
  misc_feature 1..80: note = Synthetic: >NC_010562.1-cand-720-799
  source 1..80: mol_type = other DNA
aatcagtgcaagtccaatcatgtcaacacgttgcatttgatgatggctaatgctgggcatgctgttaaattaagaagatt

SEQ ID NO: 22412 - DNA, 80 bp, synthetic construct
  misc_feature 1..80: note = Synthetic: >NC_010562.1-cand-810-889
  source 1..80: mol_type = other DNA
ttcacttggacgatcacagatgctgctggcaacgacatgcctggaggttattgtttggaaaggtggatgttagtcacatc

SEQ ID NO: 22413 - DNA, 80 bp, synthetic construct
  misc_feature 1..80: note = Synthetic: >NC_014395.1-cand-0-79
  source 1..80: mol_type = other DNA
aaagaccccctagtgcttatcaagtatatcatggattactttcctgtgatatctgttgatttgcagagtggtcgtcgtgt

SEQ ID NO: 22414 - DNA, 80 bp, synthetic construct
  misc_feature 1..80: note = Synthetic: >NC_014395.1-cand-80-159
  source 1..80: mol_type = other DNA
tgtgtcagtggagtactttagaggagatggtcctcccaggataccttattctatggttgggccctgttgtgtctttctca

SEQ ID NO: 22415 - DNA, 80 bp, synthetic construct
  misc_feature 1..80: note = Synthetic: >NC_014395.1-cand-160-239
  source 1..80: mol_type = other DNA
tgcaccatcgtcctagtcacgaggttcgcttgcgattctctgatttctacaatgtcggagaattcccataccgagtcgga

SEQ ID NO: 22416 - DNA, 80 bp, synthetic construct
  misc_feature 1..80: note = Synthetic: >NC_014395.1-cand-240-319
  source 1..80: mol_type = other DNA
cttggagactttgcatcaaacgttgcacctccaccagcgaagccttttcagagacttattgatctaataggccatatgac

SEQ ID NO: 22417 - DNA, 80 bp, synthetic construct
  misc_feature 1..80: note = Synthetic: >NC_014395.1-cand-320-399
  source 1..80: mol_type = other DNA
tcttagtgatttcacaaggttccccaatctgaaagaagccatatcctggcctcttggagaaccctcactggctttctttg

SEQ ID NO: 22418 - DNA, 80 bp, synthetic construct
  misc_feature 1..80: note = Synthetic: >NC_014395.1-cand-400-479
  source 1..80: mol_type = other DNA
acctaagctctactagagtgcataggaatgatgacattagaagggatcagattgccactctagcaatgaggagttgcaag

SEQ ID NO: 22419 - DNA, 80 bp, synthetic construct
  misc_feature 1..80: note = Synthetic: >NC_014395.1-cand-480-559
  source 1..80: mol_type = other DNA
atcaccaatgatctagaggactcctttgttggcttacacaggatgatagcgactgaggccatcctcagagggattgacct

SEQ ID NO: 22420 - DNA, 80 bp, synthetic construct
  misc_feature 1..80: note = Synthetic: >NC_014395.1-cand-570-649
  source 1..80: mol_type = other DNA
ccaggctttgatctcatgtatgaggttgctcacgtacagtgcgttcggcttctgcaagcagcaaaagaggacatttctaa

SEQ ID NO: 22421 - DNA, 80 bp, synthetic construct
  misc_feature 1..80: note = Synthetic: >NC_014395.1-cand-640-719
  source 1..80: mol_type = other DNA
acatttctaatgctgtagttccaaactcagccctcattgttcttatggaggagagcctgatgctgcgctcatcacttccc

SEQ ID NO: 22422 - DNA, 80 bp, synthetic construct
  misc_feature 1..80: note = Synthetic: >NC_014395.1-cand-730-809
  source 1..80: mol_type = other DNA
ggagaaacaactggattccagttattcctccaatcccagatgttgagatggaatcagaggaggagagtgatgatgatgga

SEQ ID NO: 22423 - DNA, 80 bp, synthetic construct
  misc_feature 1..80: note = Synthetic: >NC_014395.1-cand-800-879
  source 1..80: mol_type = other DNA
tgatgatggatttgttgaggttgattagaggttaaggctgccccaccccccaccccccaatcccgaccgtaaccccaact

SEQ ID NO: 22424 - DNA, 80 bp, synthetic construct
  misc_feature 1..80: note = Synthetic: >NC_014395.1-cand-880-959
  source 1..80: mol_type = other DNA
ccccttccccccaaccccctgggcagccacttaggctgctgtcttgtaagcctgagcggctgccatgacagcagctgacg

SEQ ID NO: 22425 - DNA, 80 bp, synthetic construct
  misc_feature 1..80: note = Synthetic: >NC_014395.1-cand-960-1039
  source 1..80: mol_type = other DNA
gcttcccattggaatccacaagtccaaaggctttcaagaattctctcctcttctcatggcttataaagttgctattcact

SEQ ID NO: 22426 - DNA, 80 bp, synthetic construct
  misc_feature 1..80: note = Synthetic: >NC_014395.1-cand-1020-1099
  source 1..80: mol_type = other DNA
ttataaagttgctattcactgctgcattcattggctgcgtgaacgttgcagcaacctcctcttttgttctacctcggagg

SEQ ID NO: 22427 - DNA, 80 bp, synthetic construct
  misc_feature 1..80: note = Synthetic: >NC_014395.1-cand-1100-1179
  source 1..80: mol_type = other DNA
tttgggttgatgacccgggagaactgcagcagatacagagagtgagcatctaatattgcccttagatagtctcctggtag

SEQ ID NO: 22428 - DNA, 80 bp, synthetic construct
  misc_feature 1..80: note = Synthetic: >NC_014395.1-cand-1130-1209
  source 1..80: mol_type = other DNA
agatacagagagtgagcatctaatattgcccttagatagtctcctggtagagaaggatccaccatgccagcaaagctggg

SEQ ID NO: 22429 - DNA, 80 bp, synthetic construct
  misc_feature 1..80: note = Synthetic: >NC_021551.1-cand-1290-1369
  source 1..80: mol_type = other DNA
caaggcaactttatcttatgaccacatttttacattcccatcatactcaaaaggagattggagagatgaaagagcgacaa

SEQ ID NO: 22430 - DNA, 80 bp, synthetic construct
  misc_feature 1..80: note = Synthetic: >NC_021551.1-cand-1370-1449
  source 1..80: mol_type = other DNA
cggatgacatcttcgttacaactgagaaacaactaagatttgaagattggataatcgatgctaaaaatttgtcgcttgag

SEQ ID NO: 22431 - DNA, 80 bp, synthetic construct
  misc_feature 1..80: note = Synthetic: >NC_021551.1-cand-1450-1529
  source 1..80: mol_type = other DNA
atggatgttgaagttgtttctgaagctgttttcctacaatttggcaaacacagagcttttatatctgatatgtatcagca

SEQ ID NO: 22432 - DNA, 80 bp, synthetic construct
  misc_feature 1..80: note = Synthetic: >NC_021551.1-cand-1540-1619
  source 1..80: mol_type = other DNA
ttcagatttaagcagaaaaacttcttctcagatcagaaattttcacattttggtatacgtcaaccatccatatataatag

SEQ ID NO: 22433 - DNA, 80 bp, synthetic construct
  misc_feature 1..80: note = Synthetic: >NC_021551.1-cand-1620-1699
  source 1..80: mol_type = other DNA
agatatctatctctcttccaggttgaatgcatacattaatcgtcaattaacattgagtaccgacttatcattaattaagc

SEQ ID NO: 22434 - DNA, 80 bp, synthetic construct
  misc_feature 1..80: note = Synthetic: >NC_021551.1-cand-1710-1789
  source 1..80: mol_type = other DNA
tgaaggattttctggacatttaattgctgttgaaaagtattttcatgcattagtatacacgatgtcaccaatgagatggg

SEQ ID NO: 22435 - DNA, 80 bp, synthetic construct
  misc_feature 1..80: note = Synthetic: >NC_021551.1-cand-1790-1869
  source 1..80: mol_type = other DNA
ccaaacgagcactatccgatgctatctattcaaaaactgattctttttccaacgctatcggtgatcgacattctttacat

SEQ ID NO: 22436 - DNA, 80 bp, synthetic construct
  misc_feature 1..80: note = Synthetic: >NC_021551.1-cand-1870-1949
  source 1..80: mol_type = other DNA
gattttcgtaatacatatgcatatttgggagatacgatcaaccccatattcaggtccaatttagttaccaacaaatttgc

SEQ ID NO: 22437 - DNA, 80 bp, synthetic construct
  misc_feature 1..80: note = Synthetic: >NC_021551.1-cand-1950-2029
  source 1..80: mol_type = other DNA
tgatgatccgaaattcgctatcacattgtcttgtggagttaatcacattacattacaattgaccactaaaaatccgcaga

SEQ ID NO: 22438 - DNA, 80 bp, synthetic construct
  misc_feature 1..80: note = Synthetic: >NC_021551.1-cand-2030-2109
  source 1..80: mol_type = other DNA
ttgcactacaggatattggaaatactattcatggaatggtaattaaaaaactagacaagaatgatttcggcaacattaag

SEQ ID NO: 22439 - DNA, 80 bp, synthetic construct
  misc_feature 1..80: note = Synthetic: >NC_021551.1-cand-2110-2189
  source 1..80: mol_type = other DNA
gtgattctataccaaacaaaggaaatgattcagtataaaatctgtaatatacttcgttcaatggatattccgtgtcagca

SEQ ID NO: 22440 - DNA, 80 bp, synthetic construct
  misc_feature 1..80: note = Synthetic: >NC_021551.1-cand-2190-2269
  source 1..80: mol_type = other DNA
acatcgaccatacattatgcatatgacagtcaaaaccgagcgcaatgtgcccgatgtaatcataattaacaggaatgatt

SEQ ID NO: 22441 - DNA, 80 bp, synthetic construct
  misc_feature 1..80: note = Synthetic: >NC_021551.1-cand-2250-2329
  source 1..80: mol_type = other DNA
cataattaacaggaatgatttaattatcaaagaaatcaagcgctgagcggacataccaagctgaatcagcgggtacgtta

SEQ ID NO: 22442 - DNA, 80 bp, synthetic construct
  misc_feature 1..80: note = Synthetic: >NC_021928.1-cand-10-89
  source 1..80: mol_type = other DNA
agatatggatactgatctggaaaattaaaggtatctaatataggtccggaaagaccttaaataaagtagctcatcaataa

SEQ ID NO: 22443 - DNA, 80 bp, synthetic construct
  misc_feature 1..80: note = Synthetic: >NC_021928.1-cand-70-149
  source 1..80: mol_type = other DNA
ataaagtagctcatcaataaatcatcatgtcttcagttttagctgcttacgaacagtttcttcaaacaactgaagatcgg

SEQ ID NO: 22444 - DNA, 80 bp, synthetic construct
  misc_feature 1..80: note = Synthetic: >NC_021928.1-cand-150-229
  source 1..80: mol_type = other DNA
ggttttggtgatcaacaatttgtgcaatctgatactttaaaagcagaaatccctgtatttgtacttaatacaaatgatcc

SEQ ID NO: 22445 - DNA, 80 bp, synthetic construct
  misc_feature 1..80: note = Synthetic: >NC_021928.1-cand-6650-6729
  source 1..80: mol_type = other DNA
ctgcatcttattaatattgacagttacaatctgcataatttggctcaagtatttgactaaggaagttaagaacgtggcaa

SEQ ID NO: 22446 - DNA, 80 bp, synthetic construct
  misc_feature 1..80: note = Synthetic: >NC_021928.1-cand-6730-6809
  source 1..80: mol_type = other DNA
gaaatcaaagacttaatagagatgctgatcttttttataagatccctagtcaaataccggtgcctagataataacagcca

SEQ ID NO: 22447 - DNA, 80 bp, synthetic construct
  misc_feature 1..80: note = Synthetic: >NC_021928.1-cand-6820-6899
  source 1..80: mol_type = other DNA
tttataaactttatttatctagatgctccaggaaaaatcatccacaaagatgtaccaaatctcatctcattgaaagaaac

SEQ ID NO: 22448 - DNA, 80 bp, synthetic construct
  misc_feature 1..80: note = Synthetic: >NC_021928.1-cand-6900-6979
  source 1..80: mol_type = other DNA
tcaaaatcaacagaatcacaactattctacaacaacaccacgaccataacaatgttctccaagaaatgagagacaaagcc

SEQ ID NO: 22449 - DNA, 80 bp, synthetic construct
  misc_feature 1..80: note = Synthetic: >NC_021928.1-cand-6980-7059
  source 1..80: mol_type = other DNA
aggaatcagaaaaaaatagaaaagaacacaacaacagacagagaaaaagaagaagggcaacatcgccctggcaacacccc

SEQ ID NO: 22450 - DNA, 80 bp, synthetic construct
  misc_feature 1..80: note = Synthetic: >NC_021928.1-cand-7060-7139
  source 1..80: mol_type = other DNA
caatcaacatctcccaaccaagaccgaattgactgcacaacccgaactcaacatcataaaacgagaaagggcccctccac

SEQ ID NO: 22451 - DNA, 80 bp, synthetic construct
  misc_feature 1..80: note = Synthetic: >NC_021928.1-cand-7140-7219
  source 1..80: mol_type = other DNA
aatgcacccccctagccagctccatcatcaacaaaacaaaacgacacccaatcaaacaatctccacatttcaattttaag

SEQ ID NO: 22452 - DNA, 80 bp, synthetic construct
  misc_feature 1..80: note = Synthetic: >NC_021928.1-cand-7240-7319
  source 1..80: mol_type = other DNA
gaacacacttctcagccctgattgctcaaggcccttgcatgtgcaaccgagacaccccccacaagcaccggaataagacc

SEQ ID NO: 22453 - DNA, 80 bp, synthetic construct
  misc_feature 1..80: note = Synthetic: >NC_021928.1-cand-7300-7379
  source 1..80: mol_type = other DNA
acaagcaccggaataagacctgacaacaaagtagcagccaccacgacccaaaaacaaaattaaaaggatccggtaacagc

SEQ ID NO: 22454 - DNA, 80 bp, synthetic construct
  misc_feature 1..80: note = Synthetic: >NC_021928.1-cand-7380-7459
  source 1..80: mol_type = other DNA
ccatcaaccagcaatcatagaatccaacaatccagagagacgtcacatcaactcatccacgaatcttcgaagggaacatc

SEQ ID NO: 22455 - DNA, 80 bp, synthetic construct
  misc_feature 1..80: note = Synthetic: >NC_021928.1-cand-7460-7539
  source 1..80: mol_type = other DNA
ccagacaaaatcacagcccattccctgatcacggataaactgagaaagatcacaagaatgcaagactcacatggtaatac

SEQ ID NO: 22456 - DNA, 80 bp, synthetic construct
  misc_feature 1..80: note = Synthetic: >NC_021928.1-cand-7540-7619
  source 1..80: mol_type = other DNA
acaaatactcaaccaggcaaattcaatggtgaaaagaacatggagattactatttggaattgcaaccttaatattacttg

SEQ ID NO: 22457 - DNA, 80 bp, synthetic construct
  misc_feature 1..80: note = Synthetic: >NC_021928.1-cand-7580-7659
  source 1..80: mol_type = other DNA
tggagattactatttggaattgcaaccttaatattacttgtttcaatatttgtgttatcgctcataattgtattacagtc

SEQ ID NO: 22458 - DNA, 80 bp, synthetic construct
  misc_feature 1..80: note = Synthetic: >NC_021928.1-cand-7700-7779
  source 1..80: mol_type = other DNA
aaggagctcaatgaacttatggagaattttgaaactacatctaagtcactgttaagtgtatcaaatcaaatcacttacga

SEQ ID NO: 22459 - DNA, 80 bp, synthetic construct
  misc_feature 1..80: note = Synthetic: >NC_021928.1-cand-7780-7859
  source 1..80: mol_type = other DNA
tgtatcagtacttactcctataagacaagaagctattgaaacaaacatcatttcaaaaataaaagatcattgcaaagata

SEQ ID NO: 22460 - DNA, 80 bp, synthetic construct
  misc_feature 1..80: note = Synthetic: >NC_021928.1-cand-7860-7939
  source 1..80: mol_type = other DNA
gagtaattaaagaaggaagcacttgcacattgaatggcagccctttgcatgatgtctcttttttaaatgggttcaataaa

SEQ ID NO: 22461 - DNA, 80 bp, synthetic construct
  misc_feature 1..80: note = Synthetic: >NC_026429.1-cand-180-259
  source 1..80: mol_type = other DNA
ataatgaaacaaacatcaccaayatccaaatggaagagagaacaagcaggaatttcaataacttaactaaagggctctgt

SEQ ID NO: 22462 - DNA, 80 bp, synthetic construct
  misc_feature 1..80: note = Synthetic: >NC_026429.1-cand-270-349
  source 1..80: mol_type = other DNA
catggcacatatatgggaaagacaatgcagtaagaattggagagagctcggatgttttagtcacaagagaaccctatgtt

SEQ ID NO: 22463 - DNA, 80 bp, synthetic construct
  misc_feature 1..80: note = Synthetic: >NC_026429.1-cand-360-439
  source 1..80: mol_type = other DNA
cagatgaatgcaggttctatgctctcagccaaggaacaacaatcagagggaaacactcaaacggaacaatacacgatagg

SEQ ID NO: 22464 - DNA, 80 bp, synthetic construct
  misc_feature 1..80: note = Synthetic: >NC_026429.1-cand-450-529
  source 1..80: mol_type = other DNA
gcgccctgataagctggccactatcatcaccgcccacagtgtacaacagcagggtggaatgcattgggtggtcaagtact

SEQ ID NO: 22465 - DNA, 80 bp, synthetic construct
  misc_feature 1..80: note = Synthetic: >NC_026429.1-cand-530-609
  source 1..80: mol_type = other DNA
agttgccatgatggcaaatccaggatgtcaatatgtatatcaggaccaaacaacaatgcatctgcagtagtatggtacaa

SEQ ID NO: 22466 - DNA, 80 bp, synthetic construct
  misc_feature 1..80: note = Synthetic: >NC_026429.1-cand-610-689
  source 1..80: mol_type = other DNA
cagaaggcctgttgcagaaattaacacatgggcccgaaacatactaagaacacaggaatctgaatgtgtatgccacaacg

SEQ ID NO: 22467 - DNA, 80 bp, synthetic construct
  misc_feature 1..80: note = Synthetic: >NC_026429.1-cand-680-759
  source 1..80: mol_type = other DNA
tgccacaacggcgtatgcccagtagtgttcaccgatgggtctgccactggacctgcagacacaagaatatactattttaa

SEQ ID NO: 22468 - DNA, 80 bp, synthetic construct
  misc_feature 1..80: note = Synthetic: >NC_026429.1-cand-840-919
  source 1..80: mol_type = other DNA
caggaattacctgcacatgcagggacaattggcagggctcaaatagaccagtgattcagatagacccagtagcaatgaca

SEQ ID NO: 22469 - DNA, 80 bp, synthetic construct
  misc_feature 1..80: note = Synthetic: >NC_026429.1-cand-860-939
  source 1..80: mol_type = other DNA
agggacaattggcagggctcaaatagaccagtgattcagatagacccagtagcaatgacacacactagtcaatatatatg

SEQ ID NO: 22470 - DNA, 80 bp, synthetic construct
  misc_feature 1..80: note = Synthetic: >NC_026429.1-cand-940-1019
  source 1..80: mol_type = other DNA
cagtcctgttcttacagacaatccccgaccgaatgacccaaatataggtaagtgtaatgacccttatccaggtaataata

SEQ ID NO: 22471 - DNA, 80 bp, synthetic construct
  misc_feature 1..80: note = Synthetic: >NC_026429.1-cand-970-1049
  source 1..80: mol_type = other DNA
gaatgacccaaatataggtaagtgtaatgacccttatccaggtaataataacaatggagtcaagggattctcatacctgg

SEQ ID NO: 22472 - DNA, 80 bp, synthetic construct
  misc_feature 1..80: note = Synthetic: >NC_026429.1-cand-1070-1149
  source 1..80: mol_type = other DNA
gggaggacaataagcacagcctcgaggtctggatacgagatgttaaaagtgccaaatgcattgacagatgatagatcaaa

SEQ ID NO: 22473 - DNA, 80 bp, synthetic construct
  misc_feature 1..80: note = Synthetic: >NC_026429.1-cand-1150-1229
  source 1..80: mol_type = other DNA
gcccattcaaggtcagacaattgtattaaacgctgactggagtggttacagtggatctttcatggactattgggctgaag

SEQ ID NO: 22474 - DNA, 80 bp, synthetic construct
  misc_feature 1..80: note = Synthetic: >NC_026429.1-cand-1240-1319
  source 1..80: mol_type = other DNA
tcgagcgtgtttttatgtggagttgatacgtggaagacccaaggaggataaagtgtggtggaccagcaatagtatagtat

SEQ ID NO: 22475 - DNA, 80 bp, synthetic construct
  misc_feature 1..80: note = Synthetic: >NC_026429.1-cand-1290-1369
  source 1..80: mol_type = other DNA
aagtgtggtggaccagcaatagtatagtatcgatgtgttccagtacagaattcctgggacaatggaactggcctgatggg

SEQ ID NO: 22476 - DNA, 80 bp, synthetic construct
  misc_feature 1..80: note = Synthetic: >NC_026431.1-cand-30-109
  source 1..80: mol_type = other DNA
tttctatcatcccgtcaggccccctcaaagccgagatcgcgcagagactggaaagtgtctttgcaggaaagaacacagat

SEQ ID NO: 22477 - DNA, 80 bp, synthetic construct
  misc_feature 1..80: note = Synthetic: >NC_026435.1-cand-1230-1309
  source 1..80: mol_type = other DNA
tcaacatgctaagtacggtcttgggagtctcgatactgaatcttggacaaaagaaatacaccaagacaatatactggtgg

SEQ ID NO: 22478 - DNA, 80 bp, synthetic construct
  misc_feature 1..80: note = Synthetic: >NC_026435.1-cand-1310-1389
  source 1..80: mol_type = other DNA
gatgggctccaatcatccgacgattttgctctcatagtgaatgcaccaaaccatgagggaatacaagcaggagtggacag

SEQ ID NO: 22479 - DNA, 80 bp, synthetic construct
  misc_feature 1..80: note = Synthetic: >NC_026435.1-cand-1470-1549
  source 1..80: mol_type = other DNA
tcacaagctttttttatcgctatggatttgtggctaattttagcatggagctacccagctttggagtgtctggagtaaat

SEQ ID NO: 22480 - DNA, 80 bp, synthetic construct
  misc_feature 1..80: note = Synthetic: >NC_026435.1-cand-1550-1629
  source 1..80: mol_type = other DNA
gaatcagctgacatgagtattggagtaacagtgataaagaacaacatgataaacaatgaccttggacctgcaacggccca

SEQ ID NO: 22481 - DNA, 80 bp, synthetic construct
  misc_feature 1..80: note = Synthetic: >NC_026435.1-cand-1600-1679
  source 1..80: mol_type = other DNA
aaacaatgaccttggacctgcaacggcccagatggctcttcaattgttcatcaaagactacagatacacatataggtgcc

SEQ ID NO: 22482 - DNA, 80 bp, synthetic construct
  misc_feature 1..80: note = Synthetic: >NC_026435.1-cand-1710-1789
  source 1..80: mol_type = other DNA
gatcatttgagttaaagaagctgtgggatcaaacccaatcaaaggtagggctattagtatcagatggaggaccaaactta

SEQ ID NO: 22483 - DNA, 80 bp, synthetic construct
  misc_feature 1..80: note = Synthetic: >NC_026435.1-cand-1780-1859
  source 1..80: mol_type = other DNA
accaaacttatacaatatacggaatcttcacattcctgaagtctgcttaaaatgggagctaatggatgatgattatcggg

SEQ ID NO: 22484 - DNA, 80 bp, synthetic construct
  misc_feature 1..80: note = Synthetic: >NC_026435.1-cand-1870-1949
  source 1..80: mol_type = other DNA
taatcccctgaatccctttgtcagtcataaagagattgattctgtaaacaatgctgtggtaatgccagcccatggtccag

SEQ ID NO: 22485 - DNA, 80 bp, synthetic construct
  misc_feature 1..80: note = Synthetic: >NC_026435.1-cand-1950-2029
  source 1..80: mol_type = other DNA
ccaaaagcatggaatatgatgccgttgcaactacacattcctggattcccaagaggaatcgttctattctcaacacaagc

SEQ ID NO: 22486 - DNA, 80 bp, synthetic construct
  misc_feature 1..80: note = Synthetic: >NC_026435.1-cand-2040-2119
  source 1..80: mol_type = other DNA
ttcttgaggatgaacagatgtaccagaagtgctgcaatctattcgagaaatttttccctagcagttcatataggagaccg

SEQ ID NO: 22487 - DNA, 80 bp, synthetic construct
  misc_feature 1..80: note = Synthetic: >NC_026436.1-cand-50-129
  source 1..80: mol_type = other DNA
cgccaggatgccacagaaatcagagcatctgtcggaagaatgattggtggaatcgggagattctacatccaaatgtgcac

SEQ ID NO: 22488 - DNA, 80 bp, synthetic construct
  misc_feature 1..80: note = Synthetic: >NC_026436.1-cand-90-169
  source 1..80: mol_type = other DNA
tgattggtggaatcgggagattctacatccaaatgtgcactgaactcaaactcagtgattatgatggacgactaatccag

SEQ ID NO: 22489 - DNA, 80 bp, synthetic construct
  misc_feature 1..80: note = Synthetic: >NC_026436.1-cand-170-249
  source 1..80: mol_type = other DNA
aatagcataacaatagagaggatggtgctttctgcttttgatgagagaagaaataaatacctagaagagcatcccagtgc

SEQ ID NO: 22490 - DNA, 80 bp, synthetic construct
  misc_feature 1..80: note = Synthetic: >NC_026436.1-cand-360-439
  source 1..80: mol_type = other DNA
tagcaaacaatggcgaagatgcaacagcaggtcttactcatatcatgatttggcattccaacctgaatgatgccacatat

SEQ ID NO: 22491 - DNA, 80 bp, synthetic construct
  misc_feature 1..80: note = Synthetic: >NC_026436.1-cand-440-519
  source 1..80: mol_type = other DNA
cagagaacaagagcgcttgttcgcaccggaatggatcccagaatgtgctctctaatgcaaggttcaacacttcccagaag

SEQ ID NO: 22492 - DNA, 80 bp, synthetic construct
  misc_feature 1..80: note = Synthetic: >NC_026436.1-cand-530-609
  source 1..80: mol_type = other DNA
gcaggtgctgcggtgaaaggagttggaacaatagcaatggagttaatcagaatgatcaaacgtggaatcaatgaccgaaa

SEQ ID NO: 22493 - DNA, 80 bp, synthetic construct
  misc_feature 1..80: note = Synthetic: >NC_027026.1-cand-1690-1769
  source 1..80: mol_type = other DNA
ttcattttctgcactaccaattacacgaccagtgtgctcccagacaatccacgtgctggcgcattctaccgtcgagtcat

SEQ ID NO: 22494 - DNA, 80 bp, synthetic construct
  misc_feature 1..80: note = Synthetic: >NC_027026.1-cand-1770-1849
  source 1..80: mol_type = other DNA
cactgtagatgtgcgatctcctgaaattgaggattggatggcagcacaccctggtaggtcccctccgaaaactctcttca

SEQ ID NO: 22495 - DNA, 80 bp, synthetic construct
  misc_feature 1..80: note = Synthetic: >NC_027026.1-cand-1810-1889
  source 1..80: mol_type = other DNA
gcagcacaccctggtaggtcccctccgaaaactctcttcaaaagcgattgctcccacttgaaattaatggttaggccata

SEQ ID NO: 22496 - DNA, 80 bp, synthetic construct
  misc_feature 1..80: note = Synthetic: >NC_027026.1-cand-1920-1999
  source 1..80: mol_type = other DNA
agctggcaaacgcgtaaagcccaccccaatcaccatagctgggcttcatgacatgattgacaaaaagtttgaggagcaat

SEQ ID NO: 22497 - DNA, 80 bp, synthetic construct
  misc_feature 1..80: note = Synthetic: >NC_027026.1-cand-2020-2099
  source 1..80: mol_type = other DNA
tggatcactgtgccccggcgtagtgtgcaaacagcccttgttgctgtcaagaagttttgtgtagcccatcaagcgttgtg

SEQ ID NO: 22498 - DNA, 80 bp, synthetic construct
  misc_feature 1..80: note = Synthetic: >NC_027026.1-cand-2090-2169
  source 1..80: mol_type = other DNA
aagcgttgtgccacgtcacatccactccttctcctgaaattctacagtgtgccactttctcgtgtgttgttgtgtcagat

SEQ ID NO: 22499 - DNA, 80 bp, synthetic construct
  misc_feature 1..80: note = Synthetic: >NC_027026.1-cand-2180-2259
  source 1..80: mol_type = other DNA
cacctggtgctccacttttgcacatcaagaatgcacatcttgaagtagaccacactggccaagctgtcaccagcatttca

SEQ ID NO: 22500 - DNA, 80 bp, synthetic construct
  misc_feature 1..80: note = Synthetic: >NC_027026.1-cand-2260-2339
  source 1..80: mol_type = other DNA
gagagcctgcttggtatgtttattacagagcaacgtgtttcatccaagttgcaaagggatatcatgtacaaagtgtggtc

SEQ ID NO: 22501 - DNA, 80 bp, synthetic construct
  misc_feature 1..80: note = Synthetic: >NC_027026.1-cand-2340-2419
  source 1..80: mol_type = other DNA
accttttacattaatgcagactgagccattgaatacacagtccctacccccagttaggcgcataatttatgctgacacgc

SEQ ID NO: 22502 - DNA, 80 bp, synthetic construct
  misc_feature 1..80: note = Synthetic: >NC_027026.1-cand-2440-2519
  source 1..80: mol_type = other DNA
ttaaggcaccaccttggctttagttcaattcctggtctgtggcgtgcccttaagcatctcccagacacgccctcaatgat

SEQ ID NO: 22503 - DNA, 80 bp, synthetic construct
  misc_feature 1..80: note = Synthetic: >NC_027026.1-cand-2510-2589
  source 1..80: mol_type = other DNA
cctcaatgatagagtggatcactgaccacctttctcaagtgcagtttcccaacaaccccgaatcaaccctatttagaaca

SEQ ID NO: 22504 - DNA, 80 bp, synthetic construct
  misc_feature 1..80: note = Synthetic: >NC_027026.1-cand-2590-2669
  source 1..80: mol_type = other DNA
ggcaatggtgatgtcatattctatacttatggttctttttatgctctaggcacttgtgcccgtgtgcctgtagttagtgg

SEQ ID NO: 22505 - DNA, 80 bp, synthetic construct
  misc_feature 1..80: note = Synthetic: >NC_027026.1-cand-2670-2749
  source 1..80: mol_type = other DNA
tgacacagttagccctctcccaaatgtccccctaaaaatgacttggtttgaaacactgaaggccctttgctcgtcagcat

SEQ ID NO: 22506 - DNA, 80 bp, synthetic construct
  misc_feature 1..80: note = Synthetic: >NC_027026.1-cand-2750-2829
  source 1..80: mol_type = other DNA
tgcgcttgttcacggccatctcaccatttgccatagccgttgctaatgtcacttatctcaccacccgaggatcacgtgaa

SEQ ID NO: 22507 - DNA, 80 bp, synthetic construct
  misc_feature 1..80: note = Synthetic: >NC_027026.1-cand-2830-2909
  source 1..80: mol_type = other DNA
gaacaagccaaaggcaagacaaaacatggtcgtggcgcccgccatgcccgtgggcgatccacagcgcttaatgatgatga

SEQ ID NO: 22508 - DNA, 80 bp, synthetic construct
  misc_feature 1..80: note = Synthetic: >NC_027026.1-cand-2910-2989
  source 1..80: mol_type = other DNA
gtacaatgagtggatggacttgcgccgcgactggcgtgaagaaatgactgctgacgagttcttacacctaagggatgaag

SEQ ID NO: 22509 - DNA, 80 bp, synthetic construct
  misc_feature 1..80: note = Synthetic: >NC_035889.1-cand-4660-4739
  source 1..80: mol_type = other DNA
accacagatggagtgtacagagtaatgactcgtagactgctaggttcaacacaagttggagtgggagttatgcaagaggg

SEQ ID NO: 22510 - DNA, 80 bp, synthetic construct
  misc_feature 1..80: note = Synthetic: >NC_035889.1-cand-4820-4899
  source 1..80: mol_type = other DNA
atgtcaagcaggatctggtgtcatactgtggtccatggaagctagatgccgcctgggacgggcacagcgaggtgcagctc

SEQ ID NO: 22511 - DNA, 80 bp, synthetic construct
  misc_feature 1..80: note = Synthetic: >NC_035889.1-cand-4870-4949
  source 1..80: mol_type = other DNA
gcctgggacgggcacagcgaggtgcagctcttggccgtgccccccggagagagagcgaggaacatccagactctgcccgg

SEQ ID NO: 22512 - DNA, 80 bp, synthetic construct
  misc_feature 1..80: note = Synthetic: >NC_035889.1-cand-4970-5049
  source 1..80: mol_type = other DNA
gggacattggagcggttgcgctggattacccagcaggaacttcaggatctccaatcctagacaagtgtgggagagtgata

SEQ ID NO: 22513 - DNA, 80 bp, synthetic construct
  misc_feature 1..80: note = Synthetic: >NC_035889.1-cand-5070-5149
  source 1..80: mol_type = other DNA
cgtgatcaaaaatgggagttatgttagtgccatcacccaagggaggagggaggaagagactcctgttgagtgcttcgagc

SEQ ID NO: 22514 - DNA, 80 bp, synthetic construct
  misc_feature 1..80: note = Synthetic: >NC_035889.1-cand-5120-5199
  source 1..80: mol_type = other DNA
aggaagagactcctgttgagtgcttcgagccttcgatgctgaagaagaagcagctaactgtcttagacttgcatcctgga

SEQ ID NO: 22515 - DNA, 80 bp, synthetic construct
  misc_feature 1..80: note = Synthetic: >NC_035889.1-cand-5200-5279
  source 1..80: mol_type = other DNA
gctgggaaaaccaggagagttcttcctgaaatagtccgtgaagccataaaaacaagactccgtactgtgatcttagctcc

SEQ ID NO: 22516 - DNA, 80 bp, synthetic construct
  misc_feature 1..80: note = Synthetic: >NC_035889.1-cand-5280-5359
  source 1..80: mol_type = other DNA
aaccagggttgtcgctgctgaaatggaggaagcccttagagggcttccagtgcgttatatgacaacagcagtcaatgtca

SEQ ID NO: 22517 - DNA, 80 bp, synthetic construct
  misc_feature 1..80: note = Synthetic: >NC_035889.1-cand-5370-5449
  source 1..80: mol_type = other DNA
aacagaaatcgtcgacttaatgtgccatgccaccttcacttcacgtctactacagccaatcagagtccccaactataatc

SEQ ID NO: 22518 - DNA, 80 bp, synthetic construct
  misc_feature 1..80: note = Synthetic: >NC_035889.1-cand-5450-5529
  source 1..80: mol_type = other DNA
tgtatattatggatgaggcccacttcacagatccctcaagtatagcagcaagaggatacatttcaacaagggttgagatg

SEQ ID NO: 22519 - DNA, 80 bp, synthetic construct
  misc_feature 1..80: note = Synthetic: >NC_035889.1-cand-5560-5639
  source 1..80: mol_type = other DNA
acgccaccaggaacccgtgacgcatttccggactccaactcaccaattatggacaccgaagtggaagtcccagagagagc

SEQ ID NO: 22520 - DNA, 80 bp, synthetic construct
  misc_feature 1..80: note = Synthetic: >NC_035889.1-cand-5640-5719
  source 1..80: mol_type = other DNA
ctggagctcaggctttgattgggtgacggatcattctggaaaaacagtttggtttgttccaagcgtgaggaacggcaatg

SEQ ID NO: 22521 - DNA, 80 bp, synthetic construct
  misc_feature 1..80: note = Synthetic: >NC_035889.1-cand-5720-5799
  source 1..80: mol_type = other DNA
agatcgcagcttgtctgacaaaggctggaaaacgggtcatacagctcagcagaaagacttttgagacagagttccagaaa

SEQ ID NO: 22522 - DNA, 80 bp, synthetic construct
  misc_feature 1..80: note = Synthetic: >NC_035889.1-cand-5800-5879
  source 1..80: mol_type = other DNA
acaaaacatcaagagtgggactttgtcgtgacaactgacatttcagagatgggcgccaactttaaagctgaccgtgtcat

SEQ ID NO: 22523 - DNA, 80 bp, synthetic construct
  misc_feature 1..80: note = Synthetic: >NC_035889.1-cand-5880-5959
  source 1..80: mol_type = other DNA
agattccaggagatgcctaaagccggtcatacttgatggcgagagagtcattttggctggacccatgcctgtcacacatg

SEQ ID NO: 22524 - DNA, 80 bp, synthetic construct
  misc_feature 1..80: note = Synthetic: >NC_038298.1-cand-1860-1939
  source 1..80: mol_type = other DNA
tacctcatccctataccctatccctttaatctacctctcatagcctacctcagattttttatttcttgattgcttttcaa

SEQ ID NO: 22525 - DNA, 80 bp, synthetic construct
  misc_feature 1..80: note = Synthetic: >NC_038299.1-cand-0-79
  source 1..80: mol_type = other DNA
actccgagatagagaattccaaaaaaatggagaaatacagagagatacatcagagaatcagggatgttgcaccagggact

SEQ ID NO: 22526 - DNA, 80 bp, synthetic construct
  misc_feature 1..80: note = Synthetic: >NC_038299.1-cand-80-159
  source 1..80: mol_type = other DNA
ggctcagcagtagaatgtatggacttattagaccggctgtacgctgtaagacatgatctagtagatcagatgataaagca

SEQ ID NO: 22527 - DNA, 80 bp, synthetic construct
  misc_feature 1..80: note = Synthetic: >NC_038299.1-cand-160-239
  source 1..80: mol_type = other DNA
tgattggtctgataacaaagatgtagagacacctattgggcaagtgttgctgatggctggtgtacctaatgatataattc

SEQ ID NO: 22528 - DNA, 80 bp, synthetic construct
  misc_feature 1..80: note = Synthetic: >NC_038299.1-cand-250-329
  source 1..80: mol_type = other DNA
aaagaaaataattccaaatagtccgacaggtcaggtattaaaaagcttctttagaatgacacctgataattataaaataa

SEQ ID NO: 22529 - DNA, 80 bp, synthetic construct
  misc_feature 1..80: note = Synthetic: >NC_038299.1-cand-320-399
  source 1..80: mol_type = other DNA
tataaaataacaggaaatcatattgaatttgttgaggtgacagtcactgcagatgttgcaagaggaatccgtgaaaaaag

SEQ ID NO: 22530 - DNA, 80 bp, synthetic construct
  misc_feature 1..80: note = Synthetic: >NC_038299.1-cand-420-499
  source 1..80: mol_type = other DNA
tccgtttcattgaggagttgctggaattagaagttagaaagggtaatctacagcaagtttatagaataactttcaatgta

SEQ ID NO: 22531 - DNA, 80 bp, synthetic construct
  misc_feature 1..80: note = Synthetic: >NC_038299.1-cand-480-559
  source 1..80: mol_type = other DNA
atagaataactttcaatgtagtggcagttaagacagatgggtcgaacatttcaactcagtggcctagcaggcgcaatgat

SEQ ID NO: 22532 - DNA, 80 bp, synthetic construct
  misc_feature 1..80: note = Synthetic: >NC_038299.1-cand-530-609
  source 1..80: mol_type = other DNA
tcaactcagtggcctagcaggcgcaatgatggtgttgtccaacaaatgagattagtgcaggctgatataaattatgttag

SEQ ID NO: 22533 - DNA, 80 bp, synthetic construct
  misc_feature 1..80: note = Synthetic: >NC_038299.1-cand-610-689
  source 1..80: mol_type = other DNA
agagcacttaataaagcaagatgagagatcatccctagaagcaatgttcaacctgaaattccatgttacaggcccaaagc

SEQ ID NO: 22534 - DNA, 80 bp, synthetic construct
  misc_feature 1..80: note = Synthetic: >NC_038299.1-cand-690-769
  source 1..80: mol_type = other DNA
taaggtattttagcataccagattataggccccaacctctctgtaatccgacaattgatggtttgttaaattactgcaag

SEQ ID NO: 22535 - DNA, 80 bp, synthetic construct
  misc_feature 1..80: note = Synthetic: >NC_038299.1-cand-730-809
  source 1..80: mol_type = other DNA
ctgtaatccgacaattgatggtttgttaaattactgcaagcagtggctaactgaggaacatgaatttgtcttcaaagaag

SEQ ID NO: 22536 - DNA, 80 bp, synthetic construct
  misc_feature 1..80: note = Synthetic: >NC_038299.1-cand-850-929
  source 1..80: mol_type = other DNA
aatagagcatagagataggtacattgaatcacgtaagccacggaatttcctattactgcagactacaatacaaggcactt

SEQ ID NO: 22537 - DNA, 80 bp, synthetic construct
  misc_feature 1..80: note = Synthetic: >NC_038299.1-cand-930-1009
  source 1..80: mol_type = other DNA
acttgccttctaccataagttcagatcaatgtaatacaaggataggctgccttgaaatctgtaagaacacaccagagaca

SEQ ID NO: 22538 - DNA, 80 bp, synthetic construct
  misc_feature 1..80: note = Synthetic: >NC_038299.1-cand-1010-1089
  source 1..80: mol_type = other DNA
ccagtccaggcacttgctacagacatagcattcaagtatgtgagtttagataaagaggagatcataaactattataaccc

SEQ ID NO: 22539 - DNA, 80 bp, synthetic construct
  misc_feature 1..80: note = Synthetic: >NC_038299.1-cand-1090-1169
  source 1..80: mol_type = other DNA
aagaatccactttaagccgagtgctaatgttaaagagcctggtactttgaaattaggcctatcacagcttaaccctttgt

SEQ ID NO: 22540 - DNA, 80 bp, synthetic construct
  misc_feature 1..80: note = Synthetic: >NC_038311.1-cand-80-159
  source 1..80: mol_type = other DNA
ttccctcccctccccatccttttacgtaacttagaagttttaaatacaagaccaatagtaggcaactctccaggttgtct

SEQ ID NO: 22541 - DNA, 80 bp, synthetic construct
  misc_feature 1..80: note = Synthetic: >NC_038311.1-cand-160-239
  source 1..80: mol_type = other DNA
aaggtcaagcacttctgtttccccggttgatgttgatatgctccaacagggcaaaaacaacagataccgttatccgcaaa

SEQ ID NO: 22542 - DNA, 80 bp, synthetic construct
  misc_feature 1..80: note = Synthetic: >NC_038311.1-cand-230-309
  source 1..80: mol_type = other DNA
tatccgcaaagtgcctacacagagcttagtaggattctgaaagatctttggttggtcgttcagctgcatacccagcagta

SEQ ID NO: 22543 - DNA, 80 bp, synthetic construct
  misc_feature 1..80: note = Synthetic: >NC_038311.1-cand-310-389
  source 1..80: mol_type = other DNA
gaccttgcagatgaggctggacattccccactggtaacagtggtccagcctgcgtggctgcctgcgcacctctcatgagg

SEQ ID NO: 22544 - DNA, 80 bp, synthetic construct
  misc_feature 1..80: note = Synthetic: >NC_038311.1-cand-390-469
  source 1..80: mol_type = other DNA
tgtgaagccaaagatcggacagggtgtgaagagccgcgtgtgctcactttgagtcctccggcccctgaatgcggctaacc

SEQ ID NO: 22545 - DNA, 80 bp, synthetic construct
  misc_feature 1..80: note = Synthetic: >NC_038311.1-cand-470-549
  source 1..80: mol_type = other DNA
ttaaacctgcagccatggctcataagccaatgagtttatggtcgtaacgagtaattgcgggatgggaccgactactttgg

SEQ ID NO: 22546 - DNA, 80 bp, synthetic construct
  misc_feature 1..80: note = Synthetic: >NC_038311.1-cand-550-629
  source 1..80: mol_type = other DNA
gtgtccgtgtttcactttttcctttattaattgcttatggtgacaatatatatattgatatatattggcatcatgggcgc

SEQ ID NO: 22547 - DNA, 80 bp, synthetic construct
  misc_feature 1..80: note = Synthetic: >NC_038311.1-cand-630-709
  source 1..80: mol_type = other DNA
ccaggtatctagacaaaatgttggtacacactcaacccaaaattcagtgtcaaatggatcaagtttaaattactttaata

SEQ ID NO: 22548 - DNA, 80 bp, synthetic construct
  misc_feature 1..80: note = Synthetic: >NC_038311.1-cand-710-789
  source 1..80: mol_type = other DNA
taaattacttcaaggatgctgcctcaagtggtgcatctagattagatttctctcaagatccaagcaaattcactgaccca

SEQ ID NO: 22549 - DNA, 80 bp, synthetic construct
  misc_feature 1..80: note = Synthetic: >NC_038311.1-cand-820-899
  source 1..80: mol_type = other DNA
acactacaatcaccatctgttgaggcttgtggctattcagacaggattatgcaaataaccagaggagattcaacaatcac

SEQ ID NO: 22550 - DNA, 80 bp, synthetic construct
  misc_feature 1..80: note = Synthetic: >NC_038311.1-cand-850-929
  source 1..80: mol_type = other DNA
ggctattcagacaggattatgcaaataaccagaggagattcaacaatcacatctcaagatgtagcaaatgctgtggttgg

SEQ ID NO: 22551 - DNA, 80 bp, synthetic construct
  misc_feature 1..80: note = Synthetic: >NC_038311.1-cand-950-1029
  source 1..80: mol_type = other DNA
acttaacaccacaagatgccactgctatagacaaaccaacacaacctgatacatcatcaaatagattttatacactagag

SEQ ID NO: 22552 - DNA, 80 bp, synthetic construct
  misc_feature 1..80: note = Synthetic: >NC_038311.1-cand-1030-1109
  source 1..80: mol_type = other DNA
agtaaacattggaatggtagttcaaaaggatggtggtggaaattaccagatgctcttaaagacatgggtatttttggaga

SEQ ID NO: 22553 - DNA, 80 bp, synthetic construct
  misc_feature 1..80: note = Synthetic: >NC_038311.1-cand-1110-1189
  source 1..80: mol_type = other DNA
aaatatgtattatcatttcctgggtagaagtggatatacagttcatgtgcagtgtaatgctagtaaattccatcagggta

SEQ ID NO: 22554 - DNA, 80 bp, synthetic construct
  misc_feature 1..80: note = Synthetic: >NC_038311.1-cand-1190-1269
  source 1..80: mol_type = other DNA
ccttgttagttgcaatgataccagaacaccagctagcaagtgcaaaacacggaagtgtgactgctggttacaaactcaca

SEQ ID NO: 22555 - DNA, 80 bp, synthetic construct
  misc_feature 1..80: note = Synthetic: >NC_038311.1-cand-1270-1349
  source 1..80: mol_type = other DNA
cacccaggtgaggctggcagagatgtaagtcaagaacgtgatgcaagtttaagacaacctagtgatgatagttggcttaa

SEQ ID NO: 22556 - DNA, 80 bp, synthetic construct
  misc_feature 1..80: note = Synthetic: >NC_038312.1-cand-7110-7189
  source 1..80: mol_type = other DNA
tctacctgaatacagtgtcctgcgtagacgctggttggatttattttaaataaatagataatatagacatttagtttgaa

SEQ ID NO: 22557 - DNA, 80 bp, synthetic construct
  misc_feature 1..80: note = Synthetic: >NC_038373.1-cand-20-99
  source 1..80: mol_type = other DNA
actatgactaaagctggaatgagcaccctcaaagaagtgcaggaaaatatcaccctacatgaacagcagcttgttactgc

SEQ ID NO: 22558 - DNA, 80 bp, synthetic construct
  misc_feature 1..80: note = Synthetic: >NC_038373.1-cand-90-169
  source 1..80: mol_type = other DNA
ttgttactgcacggcaaaagcttaaagatgccgagagagcagttgaagtggacccggatgaagttaacaaaagtacacta

SEQ ID NO: 22559 - DNA, 80 bp, synthetic construct
  misc_feature 1..80: note = Synthetic: >NC_038373.1-cand-190-269
  source 1..80: mol_type = other DNA
gtctacactggaaaccaagctcggagaactcaaaaggcagctggcagatttggtggcagctcaaaaattggcttcaaaac

SEQ ID NO: 22560 - DNA, 80 bp, synthetic construct
  misc_feature 1..80: note = Synthetic: >NC_038373.1-cand-270-349
  source 1..80: mol_type = other DNA
cagttgatccaacagggattgagcctgatgaccatttgaaggaaaaatctacacttcgttatggcaatgtcttggatgtg

SEQ ID NO: 22561 - DNA, 80 bp, synthetic construct
  misc_feature 1..80: note = Synthetic: >NC_038373.1-cand-350-429
  source 1..80: mol_type = other DNA
aactccattgatcttgaagagcctagtggtcaaacagctgattggaggtcaattggtgcttatatcctcggatttgcact

SEQ ID NO: 22562 - DNA, 80 bp, synthetic construct
  misc_feature 1..80: note = Synthetic: >NC_038373.1-cand-430-509
  source 1..80: mol_type = other DNA
accaatcatcttgaaagccctctacatgttatccacaagagggaggcagactgtgaaagaaaacaaaggcaccaggatca

SEQ ID NO: 22563 - DNA, 80 bp, synthetic construct
  misc_feature 1..80: note = Synthetic: >NC_038373.1-cand-510-589
  source 1..80: mol_type = other DNA
gatttaaagatgattcatccttcgaagaggtaaatgggataagaaagcctaaacatctttatgtgtcgatgcccactgca

SEQ ID NO: 22564 - DNA, 80 bp, synthetic construct
  misc_feature 1..80: note = Synthetic: >NC_038373.1-cand-590-669
  source 1..80: mol_type = other DNA
cagtcaacaatgaaggctgatgaaataacacctggaaggttccggacaattgcatgtggccttttcccagctcaagtcaa

SEQ ID NO: 22565 - DNA, 80 bp, synthetic construct
  misc_feature 1..80: note = Synthetic: >NC_038373.1-cand-670-749
  source 1..80: mol_type = other DNA
agccaggaatataattagcccagtaatgggtgtcatcggttttggtttttttgtaaaggattggatggatcgtattgata

SEQ ID NO: 22566 - DNA, 80 bp, synthetic construct
  misc_feature 1..80: note = Synthetic: >NC_038373.1-cand-750-829
  source 1..80: mol_type = other DNA
atttcttatctgctgagtgtccatttttgcagaagccaaaggttccatctgaggcatttacaaccacaaatcgggcatat

SEQ ID NO: 22567 - DNA, 80 bp, synthetic construct
  misc_feature 1..80: note = Synthetic: >NC_038373.1-cand-830-909
  source 1..80: mol_type = other DNA
tttctggcaaggcaaagtcaggtgagagagtctattcttcctgacattgaagacttaattgatacagctgagtctgaagg

SEQ ID NO: 22568 - DNA, 80 bp, synthetic construct
  misc_feature 1..80: note = Synthetic: >NC_038373.1-cand-920-999
  source 1..80: mol_type = other DNA
tttaaagacattgctgtccctcactctgtgtgggtttttgcctgtgcaccagaccggtgtccaccaacagcactatatat

SEQ ID NO: 22569 - DNA, 80 bp, synthetic construct
  misc_feature 1..80: note = Synthetic: >NC_038373.1-cand-1000-1079
  source 1..80: mol_type = other DNA
tgctgggatgcctgagcttggagctttcttcgcaatacttcaagatatgagaaacaccatcatggcatcaaaatctgtgg

SEQ ID NO: 22570 - DNA, 80 bp, synthetic construct
  misc_feature 1..80: note = Synthetic: >NC_038373.1-cand-1070-1149
  source 1..80: mol_type = other DNA
aaatctgtgggaactgctgaggaaaaactgaagaagaaatctgcattctatcagtcatatcttcgaaggacacagtctat

SEQ ID NO: 22571 - DNA, 80 bp, synthetic construct
  misc_feature 1..80: note = Synthetic: >NC_038373.1-cand-1200-1279
  source 1..80: mol_type = other DNA
gaaaagaagcagtaaaccactttcaccttggtgatgacatggatcctgagctaaggcagttagcacagtccttagttgac

SEQ ID NO: 22572 - DNA, 80 bp, synthetic construct
  misc_feature 1..80: note = Synthetic: >NC_039199.1-cand-3180-3259
  source 1..80: mol_type = other DNA
ccaatgtttttacactggaggtaggcgatgtagagaaccttacatgtgccgatggacccagcttaataaaaacagaatta

SEQ ID NO: 22573 - DNA, 80 bp, synthetic construct
  misc_feature 1..80: note = Synthetic: >NC_039199.1-cand-3260-3339
  source 1..80: mol_type = other DNA
gacctgaccaaaagtgcactaagagagctcagaacagtttctgctgatcaactggcaagagaggagcaaattgaaaatcc

SEQ ID NO: 22574 - DNA, 80 bp, synthetic construct
  misc_feature 1..80: note = Synthetic: >NC_039199.1-cand-3340-3419
  source 1..80: mol_type = other DNA
cagacaatctagattcgttctaggagcaatagcactcggtgttgcaactgcagctgcagttacagcaggtgttgcaattg

SEQ ID NO: 22575 - DNA, 80 bp, synthetic construct
  misc_feature 1..80: note = Synthetic: >NC_039199.1-cand-3420-3499
  source 1..80: mol_type = other DNA
ccaaaaccatccggcttgaaagtgaagtaacagcaattaagaatgccctcaaaaagaccaatgaagcagtatctacattg

SEQ ID NO: 22576 - DNA, 80 bp, synthetic construct
  misc_feature 1..80: note = Synthetic: >NC_039199.1-cand-3500-3579
  source 1..80: mol_type = other DNA
gggaatggagttcgtgtgttggcaactgcagtgagagagctgaaagattttgtgagcaagaatctaacacgtgcaatcaa

SEQ ID NO: 22577 - DNA, 80 bp, synthetic construct
  misc_feature 1..80: note = Synthetic: >NC_039199.1-cand-3580-3659
  source 1..80: mol_type = other DNA
caaaaacaagtgcgacattgctgacctgaaaatggccgttagcttcagtcaattcaacagaaggttcctaaatgttgtgc

SEQ ID NO: 22578 - DNA, 80 bp, synthetic construct
  misc_feature 1..80: note = Synthetic: >NC_039199.1-cand-3660-3739
  source 1..80: mol_type = other DNA
ggcaattttcagacaacgctggaataacaccagcaatatctttggacttaatgacagatgctgaactagccagagctgtt

SEQ ID NO: 22579 - DNA, 80 bp, synthetic construct
  misc_feature 1..80: note = Synthetic: >NC_039199.1-cand-3740-3819
  source 1..80: mol_type = other DNA
tccaacatgccaacatctgcaggacaaataaaactgatgttggagaaccgtgcaatggtaagaagaaaagggttcggatt

SEQ ID NO: 22580 - DNA, 80 bp, synthetic construct
  misc_feature 1..80: note = Synthetic: >NC_039199.1-cand-3790-3869
  source 1..80: mol_type = other DNA
tgcaatggtaagaagaaaagggttcggattcctgataggagtttacggaagctccgtaatttacatggtgcaactgccaa

SEQ ID NO: 22581 - DNA, 80 bp, synthetic construct
  misc_feature 1..80: note = Synthetic: >NC_039199.1-cand-3900-3979
  source 1..80: mol_type = other DNA
tagtaaaagcagccccttcttgttcaggaaaaaagggaaactatgcttgcctcttaagagaagaccaaggatggtattgt

SEQ ID NO: 22582 - DNA, 80 bp, synthetic construct
  misc_feature 1..80: note = Synthetic: >NC_039199.1-cand-3980-4059
  source 1..80: mol_type = other DNA
caaaatgcagggtcaactgtttactacccaaatgaaaaagactgtgaaacaagaggagaccatgtcttttgcgacacagc

SEQ ID NO: 22583 - DNA, 80 bp, synthetic construct
  misc_feature 1..80: note = Synthetic: >NC_039199.1-cand-4060-4139
  source 1..80: mol_type = other DNA
agcaggaatcaatgttgctgagcagtcaaaggagtgcaacataaacatatctactactaattacccatgcaaagttagca

SEQ ID NO: 22584 - DNA, 80 bp, synthetic construct
  misc_feature 1..80: note = Synthetic: >NC_039199.1-cand-4100-4179
  source 1..80: mol_type = other DNA
ataaacatatctactactaattacccatgcaaagttagcacaggaagacatcctatcagtatggttgcactatctcctct

SEQ ID NO: 22585 - DNA, 80 bp, synthetic construct
  misc_feature 1..80: note = Synthetic: >NC_039199.1-cand-4220-4299
  source 1..80: mol_type = other DNA
attggcagcaacagagtagggatcatcaagcaactgaacaaaggctgctcttatataaccaaccaagacgcagacacagt

SEQ ID NO: 22586 - DNA, 80 bp, synthetic construct
  misc_feature 1..80: note = Synthetic: >NC_039199.1-cand-4300-4379
  source 1..80: mol_type = other DNA
gacaatagacaacactgtataccagctaagcaaagttgaaggcgaacagcatgttataaaaggaaggccagtgtcaagca

SEQ ID NO: 22587 - DNA, 80 bp, synthetic construct
  misc_feature 1..80: note = Synthetic: >NC_039199.1-cand-4380-4459
  source 1..80: mol_type = other DNA
gctttgacccagtcaagtttcctgaagatcaattcaatgttgcacttgaccaagttttcgagagcattgagaacagtcag

SEQ ID NO: 22588 - DNA, 80 bp, synthetic construct
  misc_feature 1..80: note = Synthetic: >NC_044856.1-cand-4110-4189
  source 1..80: mol_type = other DNA
ggcttgttagaagctgcggttgaaacagtcaccaatgtgcttgaacaagttatggacacaccagtggcatggagcttcaa

SEQ ID NO: 22589 - DNA, 80 bp, synthetic construct
  misc_feature 1..80: note = Synthetic: >NC_044856.1-cand-4190-4269
  source 1..80: mol_type = other DNA
tgatgcctgtatgtcattagataaaacaaccagttcaggctttccccatcacaagaaaaagaatgatgattggaatggga

SEQ ID NO: 22590 - DNA, 80 bp, synthetic construct
  misc_feature 1..80: note = Synthetic: >NC_044856.1-cand-4270-4349
  source 1..80: mol_type = other DNA
gtgcatttgtgagagaacttggagaccaggcggcccatgccaacaacatgtatgagcttggtaagcccatgaaacctgta

SEQ ID NO: 22591 - DNA, 80 bp, synthetic construct
  misc_feature 1..80: note = Synthetic: >NC_044856.1-cand-4340-4419
  source 1..80: mol_type = other DNA
gaaacctgtatacacggcagccctcaaggatgaactcgtcaagccagataaagtgtacaacaagattaagaaaaggctac

SEQ ID NO: 22592 - DNA, 80 bp, synthetic construct
  misc_feature 1..80: note = Synthetic: >NC_044856.1-cand-4430-4509
  source 1..80: mol_type = other DNA
agatcttggcactgtcatccgcgctgcaagagcctttgggccattctgcgaagccataaaacctcatgtgatcaagctgc

SEQ ID NO: 22593 - DNA, 80 bp, synthetic construct
  misc_feature 1..80: note = Synthetic: >NC_044856.1-cand-4510-4589
  source 1..80: mol_type = other DNA
ccatcaaagtgggcatgaatgccatagaggatggccctctgatctacgcagaacattccaagtacaaatttcattatgat

SEQ ID NO: 22594 - DNA, 80 bp, synthetic construct
  misc_feature 1..80: note = Synthetic: >NC_044856.1-cand-4590-4669
  source 1..80: mol_type = other DNA
gctgattacacggcatgggattcaacacaaaacagggaaatcatgatggagtccttcaacattatgtgcaaattgacagc

SEQ ID NO: 22595 - DNA, 80 bp, synthetic construct
  misc_feature 1..80: note = Synthetic: >NC_044856.1-cand-4670-4749
  source 1..80: mol_type = other DNA
caatccctctctggctgcagtggtggcgcaagatcttctttctccctctgagatggatgttggtgactatgtaatcagtg

SEQ ID NO: 22596 - DNA, 80 bp, synthetic construct
  misc_feature 1..80: note = Synthetic: >NC_044856.1-cand-4750-4829
  source 1..80: mol_type = other DNA
tcaaggatggcctaccgtctggtttcccatgtacctcacaagtaaatagcatgaatcattggatcttgaccctgtgtgct

SEQ ID NO: 22597 - DNA, 80 bp, synthetic construct
  misc_feature 1..80: note = Synthetic: >NC_044856.1-cand-4830-4909
  source 1..80: mol_type = other DNA
ctatcagaggtgactggactctcccccgatgtgatacagtcacaatcctacttctctttctatggtgatgatgagatagt

SEQ ID NO: 22598 - DNA, 80 bp, synthetic construct
  misc_feature 1..80: note = Synthetic: >NC_044856.1-cand-4910-4989
  source 1..80: mol_type = other DNA
gtccacagacattgagtttgaccctaataaattaacccaagtgctaaaagaatatggcttgaaacccacaagacccgaca

SEQ ID NO: 22599 - DNA, 80 bp, synthetic construct
  misc_feature 1..80: note = Synthetic: >NC_044856.1-cand-4990-5069
  source 1..80: mol_type = other DNA
aaactgatggccctatcattgttagacaacaggtggatggcttggtctttctccggcgcaccatatcaaaagatgccatt

SEQ ID NO: 22600 - DNA, 80 bp, synthetic construct
  misc_feature 1..80: note = Synthetic: >NC_044856.1-cand-5080-5159
  source 1..80: mol_type = other DNA
ggcggctcgaccgcaactctattgagagacagttgtggtggactcgcggacccaatcatgatgatccattcgaaactctg

SEQ ID NO: 22601 - DNA, 80 bp, synthetic construct
  misc_feature 1..80: note = Synthetic: >NC_044856.1-cand-5150-5229
  source 1..80: mol_type = other DNA
cgaaactctggttccacattcgcagagaaaagtccagttggtgtctttgttaggtgaagctgctctccatggtgaaaagt

SEQ ID NO: 22602 - DNA, 80 bp, synthetic construct
  misc_feature 1..80: note = Synthetic: >NC_044856.1-cand-5190-5269
  source 1..80: mol_type = other DNA
gtgtctttgttaggtgaagctgctctccatggtgaaaagttttataggaaaatagccagcagagttattcaagaagtcaa

SEQ ID NO: 22603 - DNA, 80 bp, synthetic construct
  misc_feature 1..80: note = Synthetic: >NC_044856.1-cand-5310-5389
  source 1..80: mol_type = other DNA
atgttccgctggatgcggttccatgatttgagtttgtggacaggagatcgcgatctcttgcccgattatgtaaatgatga

SEQ ID NO: 22604 - DNA, 80 bp, synthetic construct
  misc_feature 1..80: note = Synthetic: >U31794.1-cand-5800-5879
  source 1..80: mol_type = other DNA
caaatctggtaccaaaacaaacatccctaaagttagtgcatatcagtatagagtgtttagggtacggttgcctgatccta

SEQ ID NO: 22605 - DNA, 80 bp, synthetic construct
  misc_feature 1..80: note = Synthetic: >U31794.1-cand-5880-5959
  source 1..80: mol_type = other DNA
ataagtttggccttcctgatccatctttctataatcctgaccaggaacgtttggtatgggcctgtgtaggtttggaggta

SEQ ID NO: 22606 - DNA, 80 bp, synthetic construct
  misc_feature 1..80: note = Synthetic: >U31794.1-cand-5970-6049
  source 1..80: mol_type = other DNA
aacctttaggtgctgggttaagtggtcatccattatttaataggctggatgacactgaggtctctaatttagcaggtaat

SEQ ID NO: 22607 - DNA, 80 bp, synthetic construct
  misc_feature 1..80: note = Synthetic: >U31794.1-cand-6050-6129
  source 1..80: mol_type = other DNA
aatgttatagaagatagccgggacaatatatctgttgattgtaaacaaacccagttatgtattgtgggatgtgcaccagc

SEQ ID NO: 22608 - DNA, 80 bp, synthetic construct
  misc_feature 1..80: note = Synthetic: >U31794.1-cand-6190-6269
  source 1..80: mol_type = other DNA
ttgtccacctcttgcattagttaataccccgatagaggacggtgacatggtggacaccgggtttggtgcaatggacttta

SEQ ID NO: 22609 - DNA, 80 bp, synthetic construct
  misc_feature 1..80: note = Synthetic: >U31794.1-cand-6210-6289
  source 1..80: mol_type = other DNA
ttaataccccgatagaggacggtgacatggtggacaccgggtttggtgcaatggactttaagctattacaggaatcaaag

SEQ ID NO: 22610 - DNA, 80 bp, synthetic construct
  misc_feature 1..80: note = Synthetic: >U31794.1-cand-6280-6359
  source 1..80: mol_type = other DNA
ggaatcaaaggctgaggtgccattggacattgtacaatctacatgtaaatatcctgattatttaaaaatgtctgcagatg

SEQ ID NO: 22611 - DNA, 80 bp, synthetic construct
  misc_feature 1..80: note = Synthetic: >U31794.1-cand-6450-6529
  source 1..80: mol_type = other DNA
ttcctacagatttgtattggaagggtggcaatggcagggaccctcctcccagttctgtatatgttgctactcctagtggg

SEQ ID NO: 22612 - DNA, 80 bp, synthetic construct
  misc_feature 1..80: note = Synthetic: >U31794.1-cand-6530-6609
  source 1..80: mol_type = other DNA
tccatgattacctctgaggcccaattatttaataaaccttattggttgcaacgtgcacagggccataataatggcatatg

SEQ ID NO: 22613 - DNA, 80 bp, synthetic construct
  misc_feature 1..80: note = Synthetic: >U31794.1-cand-6620-6699
  source 1..80: mol_type = other DNA
caggtatttgttactgttgtggatactaccagaagcaccaacatgactattaatgcagctaaaagcacattaactaaata

SEQ ID NO: 22614 - DNA, 80 bp, synthetic construct
  misc_feature 1..80: note = Synthetic: >U31794.1-cand-6700-6779
  source 1..80: mol_type = other DNA
tgatgcccgtgaaatcaatcaataccttcgccatgtggaggaatatgaactacagtttgtgtttcaactttgtaaaataa

SEQ ID NO: 22615 - DNA, 80 bp, synthetic construct
  misc_feature 1..80: note = Synthetic: >U31794.1-cand-6780-6859
  source 1..80: mol_type = other DNA
ccttaactgcagaagttatggcatatttgcataatatgaataatactttattagacgattggaatattggcttatcccca

SEQ ID NO: 22616 - DNA, 80 bp, synthetic construct
  misc_feature 1..80: note = Synthetic: >U31794.1-cand-6860-6939
  source 1..80: mol_type = other DNA
ccagttgcaactagcttagaggataaatataggtatattaaaagcacagctattacatgtcagagggaacagccccctgc

SEQ ID NO: 22617 - DNA, 80 bp, synthetic construct
  misc_feature 1..80: note = Synthetic: >U31794.1-cand-6940-7019
  source 1..80: mol_type = other DNA
agaaaagcaggatcccctggctaaatataagttttgggaagttaatttacaggacagcttttctgcagacctggatcagt

SEQ ID NO: 22618 - DNA, 80 bp, synthetic construct
  misc_feature 1..80: note = Synthetic: >U31794.1-cand-7020-7099
  source 1..80: mol_type = other DNA
ttcctttgggtagaaaatttttaatgcaactaggccctagaccccctagacccaaggctagtgtatctgcctctaaaagg

SEQ ID NO: 22619 - DNA, 80 bp, synthetic construct
  misc_feature 1..80: note = Synthetic: >U31794.1-cand-7100-7179
  source 1..80: mol_type = other DNA
cgggcggctcctacctcttcctcttcttcaccagctaaacgtaaaaaacgatagttgtgtgttgtgtgttgtatgtattg

SEQ ID NO: 22620 - DNA, 80 bp, synthetic construct
  misc_feature 1..80: note = Synthetic: >NC_001611.1-cand-159170-159249
  source 1..80: mol_type = other DNA
aaaatgctataaaggaataaaatatgaaataagtacaatgaacgataatattctattgagacaacatactcttaaaattg

SEQ ID NO: 22621 - DNA, 80 bp, synthetic construct
  misc_feature 1..80: note = Synthetic: >NC_001611.1-cand-80780-80859
  source 1..80: mol_type = other DNA
aaaatgtaaatccaattcctccggcattatagatgtgtatacatcggtaaataaaactatagtatccaacgatcccttct

SEQ ID NO: 22622 - DNA, 80 bp, synthetic construct
  misc_feature 1..80: note = Synthetic: >NC_001611.1-cand-55510-55589
  source 1..80: mol_type = other DNA
aaaatgtagaattttttaaaaagttatcttttgctattaccaagattgtgtttagacgcttattattaatatgagtgata

SEQ ID NO: 22623 - DNA, 80 bp, synthetic construct
  misc_feature 1..80: note = Synthetic: >NC_001611.1-cand-33850-33929
  source 1..80: mol_type = other DNA
aattgagaagcacatttagtagttttgtacattttaagtttattgacgaatcgtcgaaaactagttatagttaacatttt

SEQ ID NO: 22624 - DNA, 80 bp, synthetic construct
  misc_feature 1..80: note = Synthetic: >NC_003310.1-cand-66240-66319
  source 1..80: mol_type = other DNA
ttatcataaattacacatttccaatgagacaaataacaaaatccaaacattacaaatctagaggtagaacttttaatttt

SEQ ID NO: 22625 - DNA, 80 bp, synthetic construct
  misc_feature 1..80: note = Synthetic: >NC_001611.1-cand-61830-61909
  source 1..80: mol_type = other DNA
atgtaaaataataagaaatacatacgaataacaaaaataaaataaaatataataaagatgccatttagagatctaatttt

SEQ ID NO: 22626 - DNA, 80 bp, synthetic construct
  misc_feature 1..80: note = Synthetic: >NC_003310.1-cand-50530-50609
  source 1..80: mol_type = other DNA
taaaggatgatacattaagtaaagtaaacaattttaccctcaatcatgtactagctctcaagtatctagttagcaatttt

SEQ ID NO: 22627 - DNA, 80 bp, synthetic construct
  misc_feature 1..80: note = Synthetic: >NC_001611.1-cand-97780-97859
  source 1..80: mol_type = other DNA
aaaatttatttctaaaattttgatcatcgtaattaataaaaatacaatccttcgttatctctggagcgtatctgagtata

SEQ ID NO: 22628 - DNA, 80 bp, synthetic construct
  misc_feature 1..80: note = Synthetic: >NC_001611.1-cand-59750-59829
  source 1..80: mol_type = other DNA
gatactatatttgttcctgtagataataactaaaaatcaaactctaatgaccacatctttttttagagatgaaaaatttt

SEQ ID NO: 22629 - DNA, 80 bp, synthetic construct
  misc_feature 1..80: note = Synthetic: >NC_001699.1-cand-90-169
  source 1..80: mol_type = other DNA
aaacaaagcacaaggctgtatatataaaaaaaagggaagggatggctgccagccaagcatgagctcatacctagggagcc

SEQ ID NO: 22630 - DNA, 80 bp, synthetic construct
  misc_feature 1..80: note = Synthetic: >NC_001611.1-cand-64850-64929
  source 1..80: mol_type = other DNA
tgattctaataatttaacattttggcaaattgattaccttaaagggtgagttaatatgcataactactcctccgttgttt

SEQ ID NO: 22631 - DNA, 80 bp, synthetic construct
  misc_feature 1..80: note = Synthetic: >NC_003310.1-cand-53500-53579
  source 1..80: mol_type = other DNA
ccgattatgagacattagctaatattagtactatattgtactttaccaagtatgatccagtattaatgtttttattgttt

SEQ ID NO: 22632 - DNA, 80 bp, synthetic construct
  misc_feature 1..80: note = Synthetic: >AdVB3-cand-6070-6149
  source 1..80: mol_type = other DNA
aaacacaatcttcttgttgtccagcttggtggcaaatgatccatagagggcattggatagaagcttggcgatggagcgca

SEQ ID NO: 22633 - DNA, 80 bp, synthetic construct
  misc_feature 1..80: note = Synthetic: >HCV.A19-cand-7180-7259
  source 1..80: mol_type = other DNA
aaacacacaggatcatgtccgatcattgtgcttattggcttggcacaatggagaagaaacatacaacaaattcttagctc

SEQ ID NO: 22634 - DNA, 80 bp, synthetic construct
  misc_feature 1..80: note = Synthetic: >NC_003310.1-cand-129070-129149
  source 1..80: mol_type = other DNA
aaacacattttccattttatacgactatgatgggaacggaacagaaactagaggagaagtaataaaacgaattatagaca

SEQ ID NO: 22635 - DNA, 80 bp, synthetic construct
  misc_feature 1..80: note = Synthetic: >NC_003310.1-cand-24050-24129
  source 1..80: mol_type = other DNA
cttggctccatactgtaccaataaatttattctctctatgacttcatcatctgttcccgagagataatatagaggtgttt

SEQ ID NO: 22636 - DNA, 80 bp, synthetic construct
  misc_feature 1..80: note = Synthetic: >NC_003310.1-cand-88970-89049
  source 1..80: mol_type = other DNA
attctacatttttattttctagctcgataaaaaatttagaatcccatagggctaaatgtctagcgatatttcttttcgtt

SEQ ID NO: 22637 - DNA, 80 bp, synthetic construct
  misc_feature 1..80: note = Synthetic: >HCV.A14-cand-4110-4189
  source 1..80: mol_type = other DNA
aacgacatggccaacgctgcaaagggactggaatggatctccaacaagatcagcaaattcattgattggctcaaggaaaa

SEQ ID NO: 22638 - DNA, 80 bp, synthetic construct
  misc_feature 1..80: note = Synthetic: >NC_003310.1-cand-101810-101889
  source 1..80: mol_type = other DNA
atggatattctgaatataatggttctcagggaactaatccacatatgataaacggcaaaccaaaaacatttgctatcgtt

SEQ ID NO: 22639 - DNA, 80 bp, synthetic construct
  misc_feature 1..80: note = Synthetic: >NC_003310.1-cand-73380-73459
  source 1..80: mol_type = other DNA
aacgatagtctgttaataaccaatactaaaagtgataatataataaatataggttactagattaaaaatggtgttccagc

SEQ ID NO: 22640 - DNA, 80 bp, synthetic construct
  misc_feature 1..80: note = Synthetic: >EVD70-cand-3300-3379
  source 1..80: mol_type = other DNA
aacgatatcaatttgacaacagccggtcccggttatggaggagcttttgtggggtcttacaaaatcattaattaccatct

SEQ ID NO: 22641 - DNA, 80 bp, synthetic construct
  misc_feature 1..80: note = Synthetic: >AdVB3-cand-32650-32729
  source 1..80: mol_type = other DNA
aacgatgggaatcataatccgaaaacggaatcgggcgattgtgtctcatcaaccccacaagcagccgctgtctgcgtcgc

SEQ ID NO: 22642 - DNA, 80 bp, synthetic construct
  misc_feature 1..80: note = Synthetic: >AdVB3-cand-11440-11519
  source 1..80: mol_type = other DNA
cccactagcaaacccctgacagctcagctgtttctggtggttcaacatagcagggacaacgaggcattcagggaggcgtt

SEQ ID NO: 22643 - DNA, 80 bp, synthetic construct
  misc_feature 1..80: note = Synthetic: >AdVB7-cand-12730-12809
  source 1..80: mol_type = other DNA
aacgctttcctcagcacccagcccgctaacgtgccccgtggtcagcaagactatacaaactttttgagtgcattgagact

SEQ ID NO: 22644 - DNA, 80 bp, synthetic construct
  misc_feature 1..80: note = Synthetic: >NC_001611.1-cand-38440-38519
  source 1..80: mol_type = other DNA
aacgcttttgtgatagtatggcattcattgtctaaaaacgctctacgaatatctgtgacagatatcatctttagagaata

SEQ ID NO: 22645 - DNA, 80 bp, synthetic construct
  misc_feature 1..80: note = Synthetic: >NC_001611.1-cand-78770-78849
  source 1..80: mol_type = other DNA
aacggatagtaaaacaaaattagaaagtgatagaggtagacttctagccgctggtaaggatgatatattcgaattcaaat

SEQ ID NO: 22646 - DNA, 80 bp, synthetic construct
  misc_feature 1..80: note = Synthetic: >NC_007361.1-cand-640-719
  source 1..80: mol_type = other DNA
aacggcataataacagacactatcaagagttggaggaacaacatactgagaactcaagagtctgaatgtgcatgtgtaaa

SEQ ID NO: 22647 - DNA, 80 bp, synthetic construct
  misc_feature 1..80: note = Synthetic: >EVA76-cand-6000-6079
  source 1..80: mol_type = other DNA
aacggcccaaccaagaccaagcttgaacccagtgttttccatgatgtgtttgaaggagtcaaagaaccagcagtcctcca

SEQ ID NO: 22648 - DNA, 80 bp, synthetic construct
  misc_feature 1..80: note = Synthetic: >AdVB7-cand-4630-4709
  source 1..80: mol_type = other DNA
cctcacatatttgcatttcccaggctttcagttcagagggggggatcatgtccacctgcggggctataaaaaataccgtt

SEQ ID NO: 22649 - DNA, 80 bp, synthetic construct
  misc_feature 1..80: note = Synthetic: >NC_001430.1-cand-770-849
  source 1..80: mol_type = other DNA
aacgttgccactggaggctcaagcataacttacaatcaaataaatttctacaaagatagttatgcagcctcagctagtaa

SEQ ID NO: 22650 - DNA, 80 bp, synthetic construct
  misc_feature 1..80: note = Synthetic: >NC_003310.1-cand-83060-83139
  source 1..80: mol_type = other DNA
aacgtttcccaatgaaatggtacaatcagatacattacatcttgatatatttttttttaaagaggctggtaacaacgcat

SEQ ID NO: 22651 - DNA, 80 bp, synthetic construct
  misc_feature 1..80: note = Synthetic: >NC_001611.1-cand-135100-135179
  source 1..80: mol_type = other DNA
aactaaacagtacaacggatgctgaagcgtgttatatatacaagtctggaaaactggttaaaacagtatgtaaaagtact

SEQ ID NO: 22652 - DNA, 80 bp, synthetic construct
  misc_feature 1..80: note = Synthetic: >NC_007373.1-cand-240-319
  source 1..80: mol_type = other DNA
aaggacaaactctatggagtaaaatgagtgatgctggatcagatcgagtgatggtatcacctttggctgtaacatggtgg

SEQ ID NO: 22653 - DNA, 80 bp, synthetic construct
  misc_feature 1..80: note = Synthetic: >NC_001611.1-cand-36420-36499
  source 1..80: mol_type = other DNA
tgctctatcttttattttatctaattcgatacaaactcctgatactggttcagaaagtaattcattaattttcagtcctt

SEQ ID NO: 22654 - DNA, 80 bp, synthetic construct
  misc_feature 1..80: note = Synthetic: >EVB82-cand-6720-6799
  source 1..80: mol_type = other DNA
aaggagacaaactacattgactacttgtgcaactctcatcacctatacagggacaagcactactttgtgaggggtggcat

SEQ ID NO: 22655 - DNA, 80 bp, synthetic construct
  misc_feature 1..80: note = Synthetic: >NC_003310.1-cand-87300-87379
  source 1..80: mol_type = other DNA
ggattttccacaaatgcgcctctcaagtccctcatagaatgatacacgtataaaaaatatagcataggtgatgactcctt

SEQ ID NO: 22656 - DNA, 80 bp, synthetic construct
  misc_feature 1..80: note = Synthetic: >EVB83-cand-5020-5099
  source 1..80: mol_type = other DNA
aaggcccaccagtgtacagggagatcaagatcagtgttgcacccgaaaccccaccaccaccagcaattgcagacctacta

SEQ ID NO: 22657 - DNA, 80 bp, synthetic construct
  misc_feature 1..80: note = Synthetic: >NC_003310.1-cand-129480-129559
  source 1..80: mol_type = other DNA
acttcaaccagttcgtctcaatctttaataccgttaccgatgtcaaaaaaagattattcgagtgaaataatatgcgcctt

SEQ ID NO: 22658 - DNA, 80 bp, synthetic construct
  misc_feature 1..80: note = Synthetic: >NC_001611.1-cand-109010-109089
  source 1..80: mol_type = other DNA
gattcattatttgttcagatgcgttgacgctgtaaaagacgtcactattaccaaaaaaaataacattattgtggcgcctt

SEQ ID NO: 22659 - DNA, 80 bp, synthetic construct
  misc_feature 1..80: note = Synthetic: >NC_001430.1-cand-6170-6249
  source 1..80: mol_type = other DNA
tgtttagagccccttgatattagcaccgaacccattaaattagaagaagccatgtatggtatggatggccttgaagcctt

SEQ ID NO: 22660 - DNA, 80 bp, synthetic construct
  misc_feature 1..80: note = Synthetic: >AdVB3-cand-34160-34239
  source 1..80: mol_type = other DNA
caccctcataatgacaaaatatcttgctcctgtgtcacctgtagcaaattaagaatggcatcatcaattgacatgccctt

SEQ ID NO: 22661 - DNA, 80 bp, synthetic construct
  misc_feature 1..80: note = Synthetic: >NC_004296.1-cand-1860-1939
  source 1..80: mol_type = other DNA
aagggtctcatctcttccatttcacaggcacaccaggctgtttgtagagtccacaggaacaaatgcccatatgattcaat

SEQ ID NO: 22662 - DNA, 80 bp, synthetic construct
  misc_feature 1..80: note = Synthetic: >NC_007372.1-cand-370-449
  source 1..80: mol_type = other DNA
aagggtggacaaactaacccaaggccgccagacttatgattggacattaaacagaaatcaaccggcagcaactgcattag

SEQ ID NO: 22663 - DNA, 80 bp, synthetic construct
  misc_feature 1..80: note = Synthetic: >NC_003310.1-cand-69380-69459
  source 1..80: mol_type = other DNA
aaggtagaatctctatttgtcaatatgtcatctatggaattaccactagcaaaaaatgatagaaatatatattgatacat

SEQ ID NO: 22664 - DNA, 80 bp, synthetic construct
  misc_feature 1..80: note = Synthetic: >NC_001611.1-cand-49470-49549
  source 1..80: mol_type = other DNA
aaggtgggactatatctaacatcttgattaataaaatttataacattttccataggatactttgtaactagctttataca

SEQ ID NO: 22665 - DNA, 80 bp, synthetic construct
  misc_feature 1..80: note = Synthetic: >HCV.A8-cand-5880-5959
  source 1..80: mol_type = other DNA
aaggtttttgtgcaggactcaagaggagctactttgccagtgagcaaggagagatccagtgggttaagcccaacaaagag

SEQ ID NO: 22666 - DNA, 80 bp, synthetic construct
  misc_feature 1..80: note = Synthetic: >AdVB3-cand-7260-7339
  source 1..80: mol_type = other DNA
aagtaacatcattgaagaggatcttgccggccctgggcatgaaatttcgggtgattctgaaaggctgagggacctctgct

SEQ ID NO: 22667 - DNA, 80 bp, synthetic construct
  misc_feature 1..80: note = Synthetic: >NC_001611.1-cand-96030-96109
  source 1..80: mol_type = other DNA
aagtaattttctttgttggaagaatatctctaacgagtgatcaaattattgatacctttaaaagtaatcatgaaattaag

SEQ ID NO: 22668 - DNA, 80 bp, synthetic construct
  misc_feature 1..80: note = Synthetic: >NC_001611.1-cand-107490-107569
  source 1..80: mol_type = other DNA
gatccatgcacgtaaacattatatcgttatcattaataaagacttctttctcatcggatctgtaaaagttgttactgatt

SEQ ID NO: 22669 - DNA, 80 bp, synthetic construct
  misc_feature 1..80: note = Synthetic: >NC_001611.1-cand-85340-85419
  source 1..80: mol_type = other DNA
aatcatccaaagtcaaggcctaatacatctctggaaatagaattcacacctagagacaatgaaacagttccatatgatga

SEQ ID NO: 22670 - DNA, 80 bp, synthetic construct
  misc_feature 1..80: note = Synthetic: >NC_003310.1-cand-70260-70339
  source 1..80: mol_type = other DNA
aatccaatgttccaggtcctaatctcttgacaaaaattacgatattcgatcccgatatcctttgcattctatttaccagc

SEQ ID NO: 22671 - DNA, 80 bp, synthetic construct
  misc_feature 1..80: note = Synthetic: >AdVB3-cand-35170-35249
  source 1..80: mol_type = other DNA
aatcccaacaagcgtaacttcctctttctcacgatacgtcacatccgattaacttacaacgtcattttcccacggtcaca

SEQ ID NO: 22672 - DNA, 80 bp, synthetic construct
  misc_feature 1..80: note = Synthetic: >NC_003310.1-cand-100210-100289
  source 1..80: mol_type = other DNA
cacttttctcaaccttctggtagagaggctgctgaaaataatgacgcgtacgataaagtcaaactattagacgagggatt

SEQ ID NO: 22673 - DNA, 80 bp, synthetic construct
  misc_feature 1..80: note = Synthetic: >NC_001611.1-cand-102350-102429
  source 1..80: mol_type = other DNA
ccatcgtctgaatccattgataatttcttgtactggtttttgagagctcgcatcaatctagcatttctagctcccggatt

SEQ ID NO: 22674 - DNA, 80 bp, synthetic construct
  misc_feature 1..80: note = Synthetic: >NC_001611.1-cand-141810-141889
  source 1..80: mol_type = other DNA
aatcctagtttgattgtctcattatcaggaaacttaaaatataatgatatacaatgctcagtaaatgtatcgtgcctcat

SEQ ID NO: 22675 - DNA, 80 bp, synthetic construct
  misc_feature 1..80: note = Synthetic: >NC_001611.1-cand-125130-125209
  source 1..80: mol_type = other DNA
agaaatggagagagactgtttaatagcgcatggcgcagccaatactattacagaagttttaaaagactcagaagaggatt

SEQ ID NO: 22676 - DNA, 80 bp, synthetic construct
  misc_feature 1..80: note = Synthetic: >NC_003310.1-cand-182750-182829
  source 1..80: mol_type = other DNA
acaaactgttgttaaggaatataatgaaagatatggtagatcagtcagtagaacacagtcatcaagtagtgaaagcgatt

SEQ ID NO: 22677 - DNA, 80 bp, synthetic construct
  misc_feature 1..80: note = Synthetic: >NC_001611.1-cand-27520-27599
  source 1..80: mol_type = other DNA
ttcaactttgaaattgttttttattttcttgttaatgattccagccacttgggaaaagtcaaagtcgtttaatgccgatt

SEQ ID NO: 22678 - DNA, 80 bp, synthetic construct
  misc_feature 1..80: note = Synthetic: >NC_003310.1-cand-156500-156579
  source 1..80: mol_type = other DNA
aatctaaaaacaatacagtgattgcagatttgccatatctggataatgctgtatcagatgtatgcaaatcaatatataaa

SEQ ID NO: 22679 - DNA, 80 bp, synthetic construct
  misc_feature 1..80: note = Synthetic: >NC_003310.1-cand-37870-37949
  source 1..80: mol_type = other DNA
aatctaactgacggagcccaattttggtgtaaatctaattgggacattatgttgttaaaatataaacagtctcctaatat

SEQ ID NO: 22680 - DNA, 80 bp, synthetic construct
  misc_feature 1..80: note = Synthetic: >AdVB3-cand-27720-27799
  source 1..80: mol_type = other DNA
tgagtttaataaaaactgagttaagaccctcctacggactaccgcttcttcaatcaggactttacaacaccaaccagatt

SEQ ID NO: 22681 - DNA, 80 bp, synthetic construct
  misc_feature 1..80: note = Synthetic: >NC_003310.1-cand-81120-81199
  source 1..80: mol_type = other DNA
aatcttattccattatctgaaatggtggtaaaactaactgcagtgtgtatgaaatgctttaaggaggcttccttttctaa

SEQ ID NO: 22682 - DNA, 80 bp, synthetic construct
  misc_feature 1..80: note = Synthetic: >NC_003310.1-cand-125970-126049
  source 1..80: mol_type = other DNA
agattagaggagggctatatagagccaagacgaacaaaatcaaaccgagtaacgttctaacatcattatttttgaagatt

SEQ ID NO: 22683 - DNA, 80 bp, synthetic construct
  misc_feature 1..80: note = Synthetic: >NC_003310.1-cand-141610-141689
  source 1..80: mol_type = other DNA
catctattttaaatacacttaggtttttagaaaaaacatcattttataattgtaacgattcaataactaaagaaaagatt

SEQ ID NO: 22684 - DNA, 80 bp, synthetic construct
  misc_feature 1..80: note = Synthetic: >NC_003310.1-cand-23160-23239
  source 1..80: mol_type = other DNA
acaaaacgtttatatgaagtaaagtatctacgatttttacaaaagtcaggatgcataagtacaaagtacgcgataaacgg

SEQ ID NO: 22685 - DNA, 80 bp, synthetic construct
  misc_feature 1..80: note = Synthetic: >NC_001611.1-cand-177300-177379
  source 1..80: mol_type = other DNA
acaaaatacggaggcaatggctttatatttcttagatgttatcaactcagagatcctatatctaaacacatcaaatttag

SEQ ID NO: 22686 - DNA, 80 bp, synthetic construct
  misc_feature 1..80: note = Synthetic: >NC_003310.1-cand-122290-122369
  source 1..80: mol_type = other DNA
acaaacaccatccttgggagtagtttatgataaagataaaagaattcagatgctagaggatgaagtggttaatcttagaa

SEQ ID NO: 22687 - DNA, 80 bp, synthetic construct
  misc_feature 1..80: note = Synthetic: >NC_001611.1-cand-69820-69899
  source 1..80: mol_type = other DNA
ctgtcattaaatctttcatttcttcctggtatatttttattacctcgcttggttggatttttgtctatattatcgtttgt

SEQ ID NO: 22688 - DNA, 80 bp, synthetic construct
  misc_feature 1..80: note = Synthetic: >AdVB7-cand-17970-18049
  source 1..80: mol_type = other DNA
acaaagcttggaacagcagcacagggcaggctctgagaaataagcttaaggaacaaaacttccaacagaaggtggtcgat

SEQ ID NO: 22689 - DNA, 80 bp, synthetic construct
  misc_feature 1..80: note = Synthetic: >NC_003310.1-cand-102530-102609
  source 1..80: mol_type = other DNA
acaaatacgaaaacgatattattacagtaccgtttagactttcctacgaaccatttgtttggggagttaactttcgtaaa

SEQ ID NO: 22690 - DNA, 80 bp, synthetic construct
  misc_feature 1..80: note = Synthetic: >NC_026423.1-cand-1140-1219
  source 1..80: mol_type = other DNA
acaaatcaacaagagagaaaatcgagaaaataagacctctactgatagatggcacagcctcattgagtcctggaatgatg

SEQ ID NO: 22691 - DNA, 80 bp, synthetic construct
  misc_feature 1..80: note = Synthetic: >NC_001611.1-cand-121530-121609
  source 1..80: mol_type = other DNA
acaaattattctatgtctattataatttatttctgttgttcgaggatatcatccaaaacgagtactttaaagaagtagct

SEQ ID NO: 22692 - DNA, 80 bp, synthetic construct
  misc_feature 1..80: note = Synthetic: >NC_001611.1-cand-83260-83339
  source 1..80: mol_type = other DNA
acaacactatctgatctagtcaccgagggaaaatctaaagttgttcgtaaaaaagttaaaacttgtaagaagtaaatgcg

SEQ ID NO: 22693 - DNA, 80 bp, synthetic construct
  misc_feature 1..80: note = Synthetic: >AdVB7-cand-27860-27939
  source 1..80: mol_type = other DNA
acaaccatctccatttactgcatctgtaaccaccccggattgcatgaaagcctttgctgtcttgtttgtgctgagtttaa

SEQ ID NO: 22694 - DNA, 80 bp, synthetic construct
  misc_feature 1..80: note = Synthetic: >NC_001611.1-cand-9700-9779
  source 1..80: mol_type = other DNA
atagaatcagactctaaagaaaacgaatcggctttattatacacattcatgataaacttaatgaaaaatgttttcgttgt

SEQ ID NO: 22695 - DNA, 80 bp, synthetic construct
  misc_feature 1..80: note = Synthetic: >NC_003310.1-cand-68820-68899
  source 1..80: mol_type = other DNA
acaagaagccattttatctctaaatttacgaattaagattttaaaatttaaacataaagatgatgatacgtatatacact

SEQ ID NO: 22696 - DNA, 80 bp, synthetic construct
  misc_feature 1..80: note = Synthetic: >NC_003310.1-cand-142660-142739
  source 1..80: mol_type = other DNA
acaagaatatatgtttatattttttaactagtgtagaaaacagagatagtaaatagatagttcttccagatccagatcct

SEQ ID NO: 22697 - DNA, 80 bp, synthetic construct
  misc_feature 1..80: note = Synthetic: >NC_003310.1-cand-66800-66879
  source 1..80: mol_type = other DNA
acaagacactttgccagcggttgtagatttatcatatttctccaccacatatccgttacaatttgttaagaatttagata

SEQ ID NO: 22698 - DNA, 80 bp, synthetic construct
  misc_feature 1..80: note = Synthetic: >NC_001611.1-cand-45380-45459
  source 1..80: mol_type = other DNA
acaagatcattctacgtcctatggatgtgcaactcttagccgaagcgtatgagtatagagcactatttctaaatcccatc

SEQ ID NO: 22699 - DNA, 80 bp, synthetic construct
  misc_feature 1..80: note = Synthetic: >NC_026424.1-cand-330-409
  source 1..80: mol_type = other DNA
acaaggaaaaccgtttcattgaaattggagtgacgaggagggaagtccacatatattacctagagaaagccaataaaata

SEQ ID NO: 22700 - DNA, 80 bp, synthetic construct
  misc_feature 1..80: note = Synthetic: >NC_001430.1-cand-5220-5299
  source 1..80: mol_type = other DNA
acattagtagagcctttatagcgctacaggcaataaccacttttgtatcaattgctggggtggtttatgtaatctacaag

SEQ ID NO: 22701 - DNA, 80 bp, synthetic construct
  misc_feature 1..80: note = Synthetic: >NC_003310.1-cand-76570-76649
  source 1..80: mol_type = other DNA
acattatgtagtaaagatgctagtgtaccaatatgtgaattatttttgcatcatttacgcgcacacaatacagaagatag

SEQ ID NO: 22702 - DNA, 80 bp, synthetic construct
  misc_feature 1..80: note = Synthetic: >NC_001611.1-cand-49550-49629
  source 1..80: mol_type = other DNA
catctcttcatctgtaagtttagacagaatatcgtgaacaggtggtatattatattcatcagatatacgaagaataatgt

SEQ ID NO: 22703 - DNA, 80 bp, synthetic construct
  misc_feature 1..80: note = Synthetic: >NC_001611.1-cand-14190-14269
  source 1..80: mol_type = other DNA
tggctcttattctgtacgaatctatttttttgaacaacggacctagtggtatatcttgttctatgtatctaaaataatgt

SEQ ID NO: 22704 - DNA, 80 bp, synthetic construct
  misc_feature 1..80: note = Synthetic: >NC_003310.1-cand-125810-125889
  source 1..80: mol_type = other DNA
acattgattgccataataattacagcagctacaatacacacaatagacattcccacagtgttgccattacctccacgata

SEQ ID NO: 22705 - DNA, 80 bp, synthetic construct
  misc_feature 1..80: note = Synthetic: >NC_003310.1-cand-95170-95249
  source 1..80: mol_type = other DNA
acattgattttaaaatcaaaaaggagaatactatagaccaaactgcaaatgtagtatttaggtacatgtccagtgaacca

SEQ ID NO: 22706 - DNA, 80 bp, synthetic construct
  misc_feature 1..80: note = Synthetic: >NC_001611.1-cand-6760-6839
  source 1..80: mol_type = other DNA
acatttcaccgccaccagatgtataagttttagatcctttattactaccatcatgtccatggataaagacactccacatg

SEQ ID NO: 22707 - DNA, 80 bp, synthetic construct
  misc_feature 1..80: note = Synthetic: >NC_038505.1-cand-260-339
  source 1..80: mol_type = other DNA
gctgcaaaaccagttgatccaacagggcttgaacctgatgaccatctgaaggaaaagtctgctctgcgttatggaaatgt

SEQ ID NO: 22708 - DNA, 80 bp, synthetic construct
  misc_feature 1..80: note = Synthetic: >NC_001611.1-cand-56470-56549
  source 1..80: mol_type = other DNA
caaagttattcatcgtcgtctactattctatttaattttgtagttaatttatcacatatcacattaattgactttttggt

SEQ ID NO: 22709 - DNA, 80 bp, synthetic construct
  misc_feature 1..80: note = Synthetic: >AdVB3-cand-12400-12479
  source 1..80: mol_type = other DNA
gaccggatggtgaccgatgtgcgcgaggccgtgtctcagcgcgagcggtttcagcgcgacgccaacttggggtcgttggt

SEQ ID NO: 22710 - DNA, 80 bp, synthetic construct
  misc_feature 1..80: note = Synthetic: >AdVB3-cand-27090-27169
  source 1..80: mol_type = other DNA
ctcaacagagtataaaacgcctggtgatcagaggccgaggtattcagctcaacgacgagtcggttagctcttcgcttggt

SEQ ID NO: 22711 - DNA, 80 bp, synthetic construct
  misc_feature 1..80: note = Synthetic: >NC_005233.1-cand-1330-1409
  source 1..80: mol_type = other DNA
ttgcattatcccatgctttatgtaatcccacgtatgctgcattaactgcttggactggaattattatactactgattggt

SEQ ID NO: 22712 - DNA, 80 bp, synthetic construct
  misc_feature 1..80: note = Synthetic: >NC_039476.1-cand-970-1049
  source 1..80: mol_type = other DNA
ccttactcggggactacgagttgcaagggccagaagacctcgccgttgaactcgtacctgtggtaatgggggggattggt

SEQ ID NO: 22713 - DNA, 80 bp, synthetic construct
  misc_feature 1..80: note = Synthetic: >NC_001611.1-cand-79010-79089
  source 1..80: mol_type = other DNA
gtctaataatgttattacttgtggtaatgagatgttaaatgaattaggttatagcggttattttatgtcgccacattggt

SEQ ID NO: 22714 - DNA, 80 bp, synthetic construct
  misc_feature 1..80: note = Synthetic: >NC_001611.1-cand-75580-75659
  source 1..80: mol_type = other DNA
tttgtttagatgaagtattgaacatcttggggaaatatggaagagagttcgatcctaaaggtaaatgtaaattcagtggt

SEQ ID NO: 22715 - DNA, 80 bp, synthetic construct
  misc_feature 1..80: note = Synthetic: >NC_001611.1-cand-22100-22179
  source 1..80: mol_type = other DNA
accagacctaggagctattctaccatagcagaacttaggcatggacatactaatatctgtcttaattaattgtctttctc

SEQ ID NO: 22716 - DNA, 80 bp, synthetic construct
  misc_feature 1..80: note = Synthetic: >AF307327.1-cand-640-719
  source 1..80: mol_type = other DNA
gtgttggtacaggctgtacagcatgtggtatttatttggacaagctgaaatctgttggaaaggcttataagatagtttca

SEQ ID NO: 22717 - DNA, 80 bp, synthetic construct
  misc_feature 1..80: note = Synthetic: >AF307327.1-cand-730-809
  source 1..80: mol_type = other DNA
cccgaaaagtatgtgtccagctaggtacagaacaaacttgtaagcatattgatgcaaatgactgtttagtgacaccatca

SEQ ID NO: 22718 - DNA, 80 bp, synthetic construct
  misc_feature 1..80: note = Synthetic: >AF307327.1-cand-810-889
  source 1..80: mol_type = other DNA
atcaaaatatgcattgttgggactgtttctaagcttcagccatccgatactcttttatttttaggccctttggaacaggg

SEQ ID NO: 22719 - DNA, 80 bp, synthetic construct
  misc_feature 1..80: note = Synthetic: >AF307327.1-cand-900-979
  source 1..80: mol_type = other DNA
ctgaaacagtggtgtacaacaacatgtgcctttggtgacccaggtgacattatgtctacaacaagtggtatgaggtgtcc

SEQ ID NO: 22720 - DNA, 80 bp, synthetic construct
  misc_feature 1..80: note = Synthetic: >AF307327.1-cand-960-1039
  source 1..80: mol_type = other DNA
acaagtggtatgaggtgtcctgagcatacaggttctttcagaaagatttgtggctttgctactaccccagtttgtgaata

SEQ ID NO: 22721 - DNA, 80 bp, synthetic construct
  misc_feature 1..80: note = Synthetic: >AF307327.1-cand-1040-1119
  source 1..80: mol_type = other DNA
tcagggaaatactatttctggttataaaaggatgatggcaactaaagattcatttcagtcatttaatctaacagatcccc

SEQ ID NO: 22722 - DNA, 80 bp, synthetic construct
  misc_feature 1..80: note = Synthetic: >AF307327.1-cand-1120-1199
  source 1..80: mol_type = other DNA
acatcacaacaaataaacttgaatggattgacccagatggcaatacacgagatcatgttaatctcattcttaacagggat

SEQ ID NO: 22723 - DNA, 80 bp, synthetic construct
  misc_feature 1..80: note = Synthetic: >AF307327.1-cand-1190-1269
  source 1..80: mol_type = other DNA
taacagggatgtatcatttcaagatcttagtgataatccatgcagagttgacttgcacacccaatcaattgatggagctt

SEQ ID NO: 22724 - DNA, 80 bp, synthetic construct
  misc_feature 1..80: note = Synthetic: >AF307327.1-cand-1280-1359
  source 1..80: mol_type = other DNA
agtcggcttcacactcacatgcactgttgggctaacagagtgtccaagttttataacatcaattaaagcatgtgatcttg

SEQ ID NO: 22725 - DNA, 80 bp, synthetic construct
  misc_feature 1..80: note = Synthetic: >AF307327.1-cand-1370-1449
  source 1..80: mol_type = other DNA
tggctctactgtggcaaatttagcaagaggttcaaatacagtaaaggtagtaggtaaaggaggacattctggatcatctt

SEQ ID NO: 22726 - DNA, 80 bp, synthetic construct
  misc_feature 1..80: note = Synthetic: >AF307327.1-cand-1460-1539
  source 1..80: mol_type = other DNA
tcatgatagtgaatgctcttcagaaggtttggttgcatcagcaccacatttagagagggtgactgggtttaatcaaattg

SEQ ID NO: 22727 - DNA, 80 bp, synthetic construct
  misc_feature 1..80: note = Synthetic: >AF307327.1-cand-1550-1629
  source 1..80: mol_type = other DNA
agtttacgatgatggtgctcctccttgcacagtaaagtgctggtttacaaagtcaggtgaatggctccttggtattttaa

SEQ ID NO: 22728 - DNA, 80 bp, synthetic construct
  misc_feature 1..80: note = Synthetic: >AF307327.1-cand-1640-1719
  source 1..80: mol_type = other DNA
ggttgtggttgtcgttctctttgtgatacttatcttctctatcatcttgttcagtatcttatgccctagaagaggccata

SEQ ID NO: 22729 - DNA, 80 bp, synthetic construct
  misc_feature 1..80: note = Synthetic: >AF307327.1-cand-1730-1809
  source 1..80: mol_type = other DNA
ttgattgttcaccatttatatcatgacacagttttttttaatattaggccaacatgtactcaatgctatataaacctact

SEQ ID NO: 22730 - DNA, 80 bp, synthetic construct
  misc_feature 1..80: note = Synthetic: >AF307327.1-cand-1810-1889
  source 1..80: mol_type = other DNA
aatattcaagaacttacttggtataatcaatattaacacattaatctgacataaaaaaaacaaatactttactaacataa

SEQ ID NO: 22731 - DNA, 80 bp, synthetic construct
  misc_feature 1..80: note = Synthetic: >AF482713.1-cand-130-209
  source 1..80: mol_type = other DNA
gtggaggtggacccggatgaggttaacaagagcacactacaaagtagacgggcagctgtgtctacattggagaccaagct

SEQ ID NO: 22732 - DNA, 80 bp, synthetic construct
  misc_feature 1..80: note = Synthetic: >AdVE4-cand-960-1039
  source 1..80: mol_type = other DNA
acgagcaggcgatccagaacgcagcgagccagggagtgcaagccgccagcgagagctttgcactggactgcccacctttg

SEQ ID NO: 22733 - DNA, 80 bp, synthetic construct
  misc_feature 1..80: note = Synthetic: >AdVE4-cand-1040-1119
  source 1..80: mol_type = other DNA
cccggacacggctgtaagtcttgtgaatttcatcgtatgaatactggagataaagctgtgttatgtgcactttgctatat

SEQ ID NO: 22734 - DNA, 80 bp, synthetic construct
  misc_feature 1..80: note = Synthetic: >AdVE4-cand-1110-1189
  source 1..80: mol_type = other DNA
tttgctatatgagagcgtacaaccattgtgtttacagtaagtgtgattaagtgaactttagagggaggcaaagagtaggg

SEQ ID NO: 22735 - DNA, 80 bp, synthetic construct
  misc_feature 1..80: note = Synthetic: >AdVE4-cand-1190-1269
  source 1..80: mol_type = other DNA
tgactgggcaatgactggtttatttatgtatatctgttttttatataggtcccgtctctgatgcagatgatgaaaccccc

SEQ ID NO: 22736 - DNA, 80 bp, synthetic construct
  misc_feature 1..80: note = Synthetic: >AdVE4-cand-1270-1349
  source 1..80: mol_type = other DNA
actacagagtccactttgttaccccctgaaattggcacgtccccacctaagaatattattagaccagttcctgtaaaagc

SEQ ID NO: 22737 - DNA, 80 bp, synthetic construct
  misc_feature 1..80: note = Synthetic: >AdVE4-cand-1320-1399
  source 1..80: mol_type = other DNA
gaatattattagaccagttcctgtaaaagccactgggaggagagcagctgtggaatgtttggatgatttgcttcagggtg

SEQ ID NO: 22738 - DNA, 80 bp, synthetic construct
  misc_feature 1..80: note = Synthetic: >AdVE4-cand-1430-1509
  source 1..80: mol_type = other DNA
aacgccccagacattaagtgccacacatgtgtgtttacttgaggtgatgtcagtatttatagggtgtggagtgcaataaa

SEQ ID NO: 22739 - DNA, 80 bp, synthetic construct
  misc_feature 1..80: note = Synthetic: >AdVE4-cand-1560-1639
  source 1..80: mol_type = other DNA
gggtatataagcaggtgcaaacctgtgtggttagctcaaagcggtatggagatttggacggtcttggaagacttttacaa

SEQ ID NO: 22740 - DNA, 80 bp, synthetic construct
  misc_feature 1..80: note = Synthetic: >AdVE4-cand-1590-1669
  source 1..80: mol_type = other DNA
ttagctcaaagcggtatggagatttggacggtcttggaagacttttacaagactaggcagctgctagagaacgcctcgaa

SEQ ID NO: 22741 - DNA, 80 bp, synthetic construct
  misc_feature 1..80: note = Synthetic: >AdVE4-cand-1670-1749
  source 1..80: mol_type = other DNA
cggagtttcttacctgtggagattttgcttcggtggcgacctagctaagctagtctataggaccaaacaggattataagg

SEQ ID NO: 22742 - DNA, 80 bp, synthetic construct
  misc_feature 1..80: note = Synthetic: >AdVE4-cand-1750-1829
  source 1..80: mol_type = other DNA
aacaatttgatgatattttaaaagagtgtcctggtctttttgacgctcttaacttgggccatcagtctcactttaaccag

SEQ ID NO: 22743 - DNA, 80 bp, synthetic construct
  misc_feature 1..80: note = Synthetic: >AdVE4-cand-1830-1909
  source 1..80: mol_type = other DNA
agaatttcaagagcccttgactttactactcctggcagaaccactgcagcagtagccttttttgcttttgttcttgacaa

SEQ ID NO: 22744 - DNA, 80 bp, synthetic construct
  misc_feature 1..80: note = Synthetic: >AdVE4-cand-1910-1989
  source 1..80: mol_type = other DNA
atggagtcaagaaacccatttcagcagggattaccagttggatttcttagcagtagctttgtggagagcatggaagtgcc

SEQ ID NO: 22745 - DNA, 80 bp, synthetic construct
  misc_feature 1..80: note = Synthetic: >AdVE4-cand-1990-2069
  source 1..80: mol_type = other DNA
agcgcctgaatgcaatctccggctacttgccggtacagccgctagacactctgaggatcctaagtctccagcaaatttcc

SEQ ID NO: 22746 - DNA, 80 bp, synthetic construct
  misc_feature 1..80: note = Synthetic: >AdVE4-cand-2070-2149
  source 1..80: mol_type = other DNA
caggaacgccaacgccgccagcagcagcaggaggatcaagaagagaacccgagagccggcctggaccctccggcggagga

SEQ ID NO: 22747 - DNA, 80 bp, synthetic construct
  misc_feature 1..80: note = Synthetic: >AdVE4-cand-2140-2219
  source 1..80: mol_type = other DNA
cggcggaggaggaggagtagctgacctgtttcctgaactgcgccgggtgctgactaggtctttgagtggtcgggagaggg

SEQ ID NO: 22748 - DNA, 80 bp, synthetic construct
  misc_feature 1..80: note = Synthetic: >EVA76-cand-4940-5019
  source 1..80: mol_type = other DNA
agtctgtgggaaagcaattcaactcagagacagaaaaacaaaagttagatacagcctagattcagtagtctctgagctca

SEQ ID NO: 22749 - DNA, 80 bp, synthetic construct
  misc_feature 1..80: note = Synthetic: >EVA76-cand-5020-5099
  source 1..80: mol_type = other DNA
taagggagtacaacaacagatcagcaattggtaacaccattgaagctttgttccaagggcccccagtctttaaaccagtt

SEQ ID NO: 22750 - DNA, 80 bp, synthetic construct
  misc_feature 1..80: note = Synthetic: >EVA76-cand-5100-5179
  source 1..80: mol_type = other DNA
aggatctccttagaggaaaagccagcaccagatgctattagtgatcttttgaagagtgtggacagtgaagaggtgagaca

SEQ ID NO: 22751 - DNA, 80 bp, synthetic construct
  misc_feature 1..80: note = Synthetic: >EVA76-cand-5180-5259
  source 1..80: mol_type = other DNA
atactgcagagatcagggatggatagtgcctgttcaaccaaccaatgtggagaaacaccttgggagagctgtgctaataa

SEQ ID NO: 22752 - DNA, 80 bp, synthetic construct
  misc_feature 1..80: note = Synthetic: >EVA76-cand-5260-5339
  source 1..80: mol_type = other DNA
tgcaatccattgccacagttgttgcagttgtgagtctagtgtatgtcatctataaactatttgctggattccaaggtgca

SEQ ID NO: 22753 - DNA, 80 bp, synthetic construct
  misc_feature 1..80: note = Synthetic: >EVA76-cand-5340-5419
  source 1..80: mol_type = other DNA
tactctggcatgcccaagcaaaatgttaagaaaccagtccttaggacagcaacagtgcagggaccgagcctagactttgc

SEQ ID NO: 22754 - DNA, 80 bp, synthetic construct
  misc_feature 1..80: note = Synthetic: >EVA76-cand-5420-5499
  source 1..80: mol_type = other DNA
cctttccctactcaggaggaacattagacaagtgcaaacagaccagggccatttcaccatgttaggtatcagagaccaga

SEQ ID NO: 22755 - DNA, 80 bp, synthetic construct
  misc_feature 1..80: note = Synthetic: >EVA76-cand-5500-5579
  source 1..80: mol_type = other DNA
tcgcagtgctaccgcgacacgcccttcctggtaagcaaatttggattgaacacaaattagtcaatgttttagatgcagta

SEQ ID NO: 22756 - DNA, 80 bp, synthetic construct
  misc_feature 1..80: note = Synthetic: >EVA76-cand-5580-5659
  source 1..80: mol_type = other DNA
gagttggtggatgagcaacaggttaatttggaactcaccttagtgactttggacaccaatgagaaattcagagacattac

SEQ ID NO: 22757 - DNA, 80 bp, synthetic construct
  misc_feature 1..80: note = Synthetic: >EVA76-cand-5660-5739
  source 1..80: mol_type = other DNA
taaatttataccagagcaaattgagggttcccccgatgctgtcttggtgatcaacactgaaaccatgccatcaatgttcg

SEQ ID NO: 22758 - DNA, 80 bp, synthetic construct
  misc_feature 1..80: note = Synthetic: >EVA76-cand-5760-5839
  source 1..80: mol_type = other DNA
gaatatggcttccttaaccttagtggcagaccaacccaccggaccatgatgtacaatttcccaactagagcaggacagtg

SEQ ID NO: 22759 - DNA, 80 bp, synthetic construct
  misc_feature 1..80: note = Synthetic: >EVA76-cand-5790-5869
  source 1..80: mol_type = other DNA
ccaacccaccggaccatgatgtacaatttcccaactagagcaggacagtgtggaggagtcgtcacctctgtgggcaagat

SEQ ID NO: 22760 - DNA, 80 bp, synthetic construct
  misc_feature 1..80: note = Synthetic: >EVA76-cand-5930-6009
  source 1..80: mol_type = other DNA
ctactttacaactgagcaaggtgaaatccagtggatgaagcccaacaaagagacaggtaatttcaacattaacggcccaa

SEQ ID NO: 22761 - DNA, 80 bp, synthetic construct
  misc_feature 1..80: note = Synthetic: >EVA76-cand-6170-6249
  source 1..80: mol_type = other DNA
gatccaagctgcaaatcactatgcagaccagctcaaacaattagacattgacacatcaaaaatgagcatggaggatgctt

SEQ ID NO: 22762 - DNA, 80 bp, synthetic construct
  misc_feature 1..80: note = Synthetic: >EVA76-cand-6410-6489
  source 1..80: mol_type = other DNA
ttccacttatatcaaggatgagcttagggctaaagacaaaattaagaaaggaaaatccagactaattgaagccagtagta

SEQ ID NO: 22763 - DNA, 80 bp, synthetic construct
  misc_feature 1..80: note = Synthetic: >EVA76-cand-6570-6649
  source 1..80: mol_type = other DNA
tcagcagttggttgcaacccagatactttctggagtaaaatccctataatgctccctggttctctctttgcttttgatta

SEQ ID NO: 22764 - DNA, 80 bp, synthetic construct
  misc_feature 1..80: note = Synthetic: >EVB101-cand-4990-5069
  source 1..80: mol_type = other DNA
tggatatgttggtcactgaaatgttcagagagtacaaccacagacacagtgtgggtgccacactcgaagccctattccaa

SEQ ID NO: 22765 - DNA, 80 bp, synthetic construct
  misc_feature 1..80: note = Synthetic: >EVB101-cand-5080-5159
  source 1..80: mol_type = other DNA
tctatagagagattaagatcagtgtcactccagagacgccccccccaccagcaattgccgacctcctaaaatcagtggat

SEQ ID NO: 22766 - DNA, 80 bp, synthetic construct
  misc_feature 1..80: note = Synthetic: >EVB101-cand-5160-5239
  source 1..80: mol_type = other DNA
agtgaggctgttagggagtactgcaaggataagggctggctagtaccggaggtcaactccacattacagattgagaagca

SEQ ID NO: 22767 - DNA, 80 bp, synthetic construct
  misc_feature 1..80: note = Synthetic: >EVB101-cand-5240-5319
  source 1..80: mol_type = other DNA
cgtcagcagggcattcatctgcctgcaggccttaaccacatttgtttcagtggctggaataatctacatcatttacaagt

SEQ ID NO: 22768 - DNA, 80 bp, synthetic construct
  misc_feature 1..80: note = Synthetic: >EVB101-cand-5270-5349
  source 1..80: mol_type = other DNA
cttaaccacatttgtttcagtggctggaataatctacatcatttacaagttgttcgctggatttcagggcgcatacaccg

SEQ ID NO: 22769 - DNA, 80 bp, synthetic construct
  misc_feature 1..80: note = Synthetic: >EVB101-cand-5350-5429
  source 1..80: mol_type = other DNA
ggatgcctaaccagaaacccaaagtacccactttgagacaagctaaagtacagggtccagcatttgaatttgctgtggcg

SEQ ID NO: 22770 - DNA, 80 bp, synthetic construct
  misc_feature 1..80: note = Synthetic: >EVB101-cand-5430-5509
  source 1..80: mol_type = other DNA
atgatgaagaggaatgccagcacggcaaagactgaatatggtgagttcactatgttgggcatttacgacagatgggctgt

SEQ ID NO: 22771 - DNA, 80 bp, synthetic construct
  misc_feature 1..80: note = Synthetic: >EVB101-cand-5510-5589
  source 1..80: mol_type = other DNA
gttaccgcgccacgccaagcctggaccaaccattctcatgaacgaccaagaggttggcgtgctggacgccaaagagttgg

SEQ ID NO: 22772 - DNA, 80 bp, synthetic construct
  misc_feature 1..80: note = Synthetic: >EVB101-cand-5590-5669
  source 1..80: mol_type = other DNA
ttgacaaagacgggacaaacttagagttaactctcctgaaacttaaccgcaatgagaagtttagagatattagaggtttc

SEQ ID NO: 22773 - DNA, 80 bp, synthetic construct
  misc_feature 1..80: note = Synthetic: >EVB101-cand-5670-5749
  source 1..80: mol_type = other DNA
cttgcaagagaagaggctgaagtgagtgaggcagtgctggcaattaatacaagcaagtttccaaacatgtacattcccgt

SEQ ID NO: 22774 - DNA, 80 bp, synthetic construct
  misc_feature 1..80: note = Synthetic: >EVB101-cand-5790-5869
  source 1..80: mol_type = other DNA
actccaactaaaaggatgctcatgtacaacttccccaccagagcaggacagtgcggtggtgtcctcatgtcaacaggaaa

SEQ ID NO: 22775 - DNA, 80 bp, synthetic construct
  misc_feature 1..80: note = Synthetic: >EVB101-cand-5810-5889
  source 1..80: mol_type = other DNA
catgtacaacttccccaccagagcaggacagtgcggtggtgtcctcatgtcaacaggaaaggttcttgggatacatgtag

SEQ ID NO: 22776 - DNA, 80 bp, synthetic construct
  misc_feature 1..80: note = Synthetic: >EVB101-cand-5910-5989
  source 1..80: mol_type = other DNA
ttttctgctgctctcctcagacactacttcaatgaggagcagggagagatagagttcattgagagttccaaggatgcggg

SEQ ID NO: 22777 - DNA, 80 bp, synthetic construct
  misc_feature 1..80: note = Synthetic: >EVB101-cand-5990-6069
  source 1..80: mol_type = other DNA
ctaccccgtgatcaacacccctagcaaaaccaaactagaaccaagtgtgtttcaccaagtttttgaaggcaataaggaac

SEQ ID NO: 22778 - DNA, 80 bp, synthetic construct
  misc_feature 1..80: note = Synthetic: >EVB101-cand-6090-6169
  source 1..80: mol_type = other DNA
gatccacgacttaaagtcaactttgaggaagcgatcttctccaagtacattggcaatgtcaacactcatgtggatgagca

SEQ ID NO: 22779 - DNA, 80 bp, synthetic construct
  misc_feature 1..80: note = Synthetic: >EVB101-cand-6150-6229
  source 1..80: mol_type = other DNA
aacactcatgtggatgagcacatgcaagaggctgtggaccattatgcaggacaattggccacgcttgatatcagcactga

SEQ ID NO: 22780 - DNA, 80 bp, synthetic construct
  misc_feature 1..80: note = Synthetic: >EVB79-cand-3210-3289
  source 1..80: mol_type = other DNA
acttatataaggcaaaggtggatttcgatgttgaacctgtcaccgcagctagacagaacataagggacacaagcaagcta

SEQ ID NO: 22781 - DNA, 80 bp, synthetic construct
  misc_feature 1..80: note = Synthetic: >EVB79-cand-3330-3409
  source 1..80: mol_type = other DNA
ttggacaacagtcaggtgcagtgtatgtgggtaactacagggtggtcaatagacatctggctactcacagtgactggcaa

SEQ ID NO: 22782 - DNA, 80 bp, synthetic construct
  misc_feature 1..80: note = Synthetic: >EVB79-cand-3380-3459
  source 1..80: mol_type = other DNA
agacatctggctactcacagtgactggcaaaactgcgtgtgggaagactacaatagagacctcttagtcagtacaacaac

SEQ ID NO: 22783 - DNA, 80 bp, synthetic construct
  misc_feature 1..80: note = Synthetic: >EVB79-cand-3420-3499
  source 1..80: mol_type = other DNA
gggaagactacaatagagacctcttagtcagtacaacaacagcacatggctgtgacaatatagccaggtgccagtgcaca

SEQ ID NO: 22784 - DNA, 80 bp, synthetic construct
  misc_feature 1..80: note = Synthetic: >EVB79-cand-3540-3619
  source 1..80: mol_type = other DNA
cagttaccttcgagggaccaggcttagtggaggttcaggagagcgaatattacccaaagagataccaatcccatgtccta

SEQ ID NO: 22785 - DNA, 80 bp, synthetic construct
  misc_feature 1..80: note = Synthetic: >EVB79-cand-3620-3699
  source 1..80: mol_type = other DNA
cttgcagcgggtttctcagaacctggtgattgtggtggaatcctgaggtgtgaacacggagtcatcgggatcgtgaccat

SEQ ID NO: 22786 - DNA, 80 bp, synthetic construct
  misc_feature 1..80: note = Synthetic: >EVB79-cand-3710-3789
  source 1..80: mol_type = other DNA
ggcgttgttggctttgccgacgtgcgcgacctcctatggctagaggatgatgcaatggagcagggcgtcaaggactatgt

SEQ ID NO: 22787 - DNA, 80 bp, synthetic construct
  misc_feature 1..80: note = Synthetic: >EVB79-cand-3780-3859
  source 1..80: mol_type = other DNA
aggactatgtagagcagctaggaaacgcctttggttcaggcttcaccaatcaaatttgtgaacaagtcaacctcctaaag

SEQ ID NO: 22788 - DNA, 80 bp, synthetic construct
  misc_feature 1..80: note = Synthetic: >EVB79-cand-3860-3939
  source 1..80: mol_type = other DNA
gagtcactgattgggcaagactccattttagagaaatcactaaaagctctagtcaagattatatcagcactagtcatcgt

SEQ ID NO: 22789 - DNA, 80 bp, synthetic construct
  misc_feature 1..80: note = Synthetic: >EVB79-cand-3940-4019
  source 1..80: mol_type = other DNA
ggtgagaaatcatgaagatctaatcacagtaacagcaactctcgctctcataggctgcactacatcaccatggcgatggc

SEQ ID NO: 22790 - DNA, 80 bp, synthetic construct
  misc_feature 1..80: note = Synthetic: >EVB79-cand-4020-4099
  source 1..80: mol_type = other DNA
tcaaacagaaggtatctcaatattatgggatccccatggccgagaggcaaaacaacggatggttaaagaagttcacggag

SEQ ID NO: 22791 - DNA, 80 bp, synthetic construct
  misc_feature 1..80: note = Synthetic: >EVB79-cand-4100-4179
  source 1..80: mol_type = other DNA
atgaccaacgcttgcaagggcatggagtggatagccatcaaaatccagaaatttatagaatggctgaaggtcaaaatcct

SEQ ID NO: 22792 - DNA, 80 bp, synthetic construct
  misc_feature 1..80: note = Synthetic: >EVB79-cand-4180-4259
  source 1..80: mol_type = other DNA
accagaggtaaaggaaaaacacgaatttctaaacaggctgaagcaactacctttgttagaaagtcagattgccacaatcg

SEQ ID NO: 22793 - DNA, 80 bp, synthetic construct
  misc_feature 1..80: note = Synthetic: >EVB79-cand-4260-4339
  source 1..80: mol_type = other DNA
aacaaagtgcaccatcacaaagcgatcaagagcaactgttctccaatgtccagtatttcgcacactactgcagaaagtat

SEQ ID NO: 22794 - DNA, 80 bp, synthetic construct
  misc_feature 1..80: note = Synthetic: >EVB79-cand-4420-4499
  source 1..80: mol_type = other DNA
atgccgtattgaacctgtatgtttactgctccatgggagccctggtgcaggcaagtccgtggcaacaaatttaatcgggc

SEQ ID NO: 22795 - DNA, 80 bp, synthetic construct
  misc_feature 1..80: note = Synthetic: >EVB79-cand-4510-4589
  source 1..80: mol_type = other DNA
agagaagctcaatagctcagtgtattccctaccaccagaccctgaccactttgacggctacaaacaacaggctgtcgtaa

SEQ ID NO: 22796 - DNA, 80 bp, synthetic construct
  misc_feature 1..80: note = Synthetic: >GU997097.1-cand-5680-5759
  source 1..80: mol_type = other DNA
caacataaactgtttatcaatccgataatttcctctgggcttcttgaaaatttcatgaagggcttacctgcagcaatacc

SEQ ID NO: 22797 - DNA, 80 bp, synthetic construct
  misc_feature 1..80: note = Synthetic: >GU997097.1-cand-5760-5839
  source 1..80: mol_type = other DNA
acctgctgcttactctcttattatgaataaagcaaaaatatcagttgatttatttatgtttaatgagctgctagctctca

SEQ ID NO: 22798 - DNA, 80 bp, synthetic construct
  misc_feature 1..80: note = Synthetic: >GU997097.1-cand-5840-5919
  source 1..80: mol_type = other DNA
ttaacaagaataatatattagatcttagtggcatagaagaaacctctgaaggttacagtacagtaacatccatgtcaagc

SEQ ID NO: 22799 - DNA, 80 bp, synthetic construct
  misc_feature 1..80: note = Synthetic: >GU997097.1-cand-5920-5999
  source 1..80: mol_type = other DNA
aaacagtggtctgaagaaatgagcttgatgtcagatgatgacattgatgatgatgaggaatttacaattgcattggatga

SEQ ID NO: 22800 - DNA, 80 bp, synthetic construct
  misc_feature 1..80: note = Synthetic: >GU997097.1-cand-6000-6079
  source 1..80: mol_type = other DNA
tatagattttgagcaagttgatttagaagaagatatccaacattttctacaagatgagtcagcctatgttggtgacttac

SEQ ID NO: 22801 - DNA, 80 bp, synthetic construct
  misc_feature 1..80: note = Synthetic: >GU997097.1-cand-6120-6199
  source 1..80: mol_type = other DNA
ggtaacacgtattcttgagccagtaaaactaataaagagctgggtatcaaaaggtttggctatagacaaggtatataatc

SEQ ID NO: 22802 - DNA, 80 bp, synthetic construct
  misc_feature 1..80: note = Synthetic: >GU997097.1-cand-6160-6239
  source 1..80: mol_type = other DNA
tgggtatcaaaaggtttggctatagacaaggtatataatcctgttggtatacttttgatggccaggtacatgtcaaaaaa

SEQ ID NO: 22803 - DNA, 80 bp, synthetic construct
  misc_feature 1..80: note = Synthetic: >GU997097.1-cand-6240-6319
  source 1..80: mol_type = other DNA
ttatgattttcattctgtcccattagcgttgatgaacccttatgacctaacagaatttgaaagtgttgtgaaaggctggg

SEQ ID NO: 22804 - DNA, 80 bp, synthetic construct
  misc_feature 1..80: note = Synthetic: >GU997097.1-cand-6320-6399
  source 1..80: mol_type = other DNA
gagaaactataaatgacagatttcaagaaatagacctagaggcacaaagactggtgagagagcaaaatatacaaccggag

SEQ ID NO: 22805 - DNA, 80 bp, synthetic construct
  misc_feature 1..80: note = Synthetic: >GU997097.1-cand-6400-6479
  source 1..80: mol_type = other DNA
gatattctaccagattcgttattttcatttagacatgttgatgtcttactaaaaaggttatttcctagagatcctatctc

SEQ ID NO: 22806 - DNA, 80 bp, synthetic construct
  misc_feature 1..80: note = Synthetic: >HCV.A1-cand-50-129
  source 1..80: mol_type = other DNA
tctggtattgcggtacctttgtacgcctgttttatatcccctccccaagtaactttagaagcaattcacaaagttcaata

SEQ ID NO: 22807 - DNA, 80 bp, synthetic construct
  misc_feature 1..80: note = Synthetic: >HCV.A1-cand-170-249
  source 1..80: mol_type = other DNA
gtttccccggtgaagctgtatagactgttcccacggtcgaaaatggcagatccgttatccgctcacgtacttcgagaagc

SEQ ID NO: 22808 - DNA, 80 bp, synthetic construct
  misc_feature 1..80: note = Synthetic: >HCV.A1-cand-250-329
  source 1..80: mol_type = other DNA
ctagtatcatcttggaatcttcgacgcgttgcgctcagcactctaccccgagtgtagcttaggccgatgagtctgggcat

SEQ ID NO: 22809 - DNA, 80 bp, synthetic construct
  misc_feature 1..80: note = Synthetic: >HCV.A1-cand-330-409
  source 1..80: mol_type = other DNA
accccaccggcgacggtggcccaggctgcgttggcggcctacccatggctaatgtcatgggacgctagttgtgaacaagg

SEQ ID NO: 22810 - DNA, 80 bp, synthetic construct
  misc_feature 1..80: note = Synthetic: >HCV.A1-cand-570-649
  source 1..80: mol_type = other DNA
attatggctgcttatggtgacaacctaagattgttgtcatatagcttttggattggccatccggtgatctttgagattaa

SEQ ID NO: 22811 - DNA, 80 bp, synthetic construct
  misc_feature 1..80: note = Synthetic: >HCV.A1-cand-650-729
  source 1..80: mol_type = other DNA
tataccttccttattacttcatagtactcatttattcattacactactgtagttacaatgggagctcaagtatctactca

SEQ ID NO: 22812 - DNA, 80 bp, synthetic construct
  misc_feature 1..80: note = Synthetic: >HCV.A12-cand-1720-1799
  source 1..80: mol_type = other DNA
gccgatggagttaaaacccgggtcgaaccaattcctcaccactgacgacgaggtttcagctcccattttacctgggttta

SEQ ID NO: 22813 - DNA, 80 bp, synthetic construct
  misc_feature 1..80: note = Synthetic: >HCV.A12-cand-1780-1859
  source 1..80: mol_type = other DNA
tcccattttacctgggtttaatgcgactcccaacatccatatccctggagaggtgaccaacttacttgaattgtgccaaa

SEQ ID NO: 22814 - DNA, 80 bp, synthetic construct
  misc_feature 1..80: note = Synthetic: >HCV.A12-cand-1860-1939
  source 1..80: mol_type = other DNA
ttgaaactatgctagaggtgaataatgtcaccgatgtagatggtatgcaaagactcctaataccagtgtccgcgcaaaca

SEQ ID NO: 22815 - DNA, 80 bp, synthetic construct
  misc_feature 1..80: note = Synthetic: >HCV.A12-cand-1900-1979
  source 1..80: mol_type = other DNA
tggtatgcaaagactcctaataccagtgtccgcgcaaacagaggcagataagttgtgcgcctcgtttaaagtggacccgg

SEQ ID NO: 22816 - DNA, 80 bp, synthetic construct
  misc_feature 1..80: note = Synthetic: >HCV.A12-cand-2020-2099
  source 1..80: mol_type = other DNA
atgtcgatattacacacagtggtctggctccttggaagtgacatttatgttcaccgggtcattcatggcaactggcaaaa

SEQ ID NO: 22817 - DNA, 80 bp, synthetic construct
  misc_feature 1..80: note = Synthetic: >HCV.A12-cand-2100-2179
  source 1..80: mol_type = other DNA
tgctcattgcatacaccccacctggaggccaacaaccggccactagagacatagctatgttgggaactcatgtcatttgg

SEQ ID NO: 22818 - DNA, 80 bp, synthetic construct
  misc_feature 1..80: note = Synthetic: >HCV.A12-cand-2180-2259
  source 1..80: mol_type = other DNA
gattttggcctgcagtcctctgttacactggtgatcccttggataagcaacacccactatagaacagtggagactggagg

SEQ ID NO: 22819 - DNA, 80 bp, synthetic construct
  misc_feature 1..80: note = Synthetic: >HCV.A12-cand-2200-2279
  source 1..80: mol_type = other DNA
tgttacactggtgatcccttggataagcaacacccactatagaacagtggagactggagggatcctagactattattcta

SEQ ID NO: 22820 - DNA, 80 bp, synthetic construct
  misc_feature 1..80: note = Synthetic: >HCV.A12-cand-2340-2419
  source 1..80: mol_type = other DNA
gcgcatatatcattgcaatgggggcagctcaaaagaatttcacccttaaattgtgccgggatacagaatctatatcccaa

SEQ ID NO: 22821 - DNA, 80 bp, synthetic construct
  misc_feature 1..80: note = Synthetic: >HCV.A12-cand-2440-2519
  source 1..80: mol_type = other DNA
cactgtcagcgacatgatagaaaactccattaatcgaatcactaacgcaatctctactactcaaacccaccaaacggcgg

SEQ ID NO: 22822 - DNA, 80 bp, synthetic construct
  misc_feature 1..80: note = Synthetic: >HCV.A12-cand-2490-2569
  source 1..80: mol_type = other DNA
tctctactactcaaacccaccaaacggcggccgacacgagagttagtaatcacaggctgggcacgggtgaggtgccggcc

SEQ ID NO: 22823 - DNA, 80 bp, synthetic construct
  misc_feature 1..80: note = Synthetic: >HCV.A12-cand-2570-2649
  source 1..80: mol_type = other DNA
ttacaagcagcagagacaggcgctacctctaacgcgactgatgagagcatgatcgaaactcgctgcgttgtcaataagca

SEQ ID NO: 22824 - DNA, 80 bp, synthetic construct
  misc_feature 1..80: note = Synthetic: >HCV.A12-cand-2650-2729
  source 1..80: mol_type = other DNA
tggagtgagtgagactagtgtggaatacttcttctctcgatcaggcttggcaggtgtcgtcgtggtagaggatgcgactg

SEQ ID NO: 22825 - DNA, 80 bp, synthetic construct
  misc_feature 1..80: note = Synthetic: >HCV.A12-cand-2730-2809
  source 1..80: mol_type = other DNA
ctaccaacaaagggtatgctacatgggagatcgatgttatgggctttgcccagctacgccgcaagctagagatctttaca

SEQ ID NO: 22826 - DNA, 80 bp, synthetic construct
  misc_feature 1..80: note = Synthetic: >HCV.A12-cand-2810-2889
  source 1..80: mol_type = other DNA
tacatgcgctttgacgctgagtttacttttgtggcgacagagcgcaatggaaataccagtcctgtcatgttgcagtacat

SEQ ID NO: 22827 - DNA, 80 bp, synthetic construct
  misc_feature 1..80: note = Synthetic: >HCV.A12-cand-2890-2969
  source 1..80: mol_type = other DNA
gtttgtacccccaggtgcccccgttccaacagggagagacactttccaatggcagtcagcgacaaacccctcaatactgg

SEQ ID NO: 22828 - DNA, 80 bp, synthetic construct
  misc_feature 1..80: note = Synthetic: >HCV.A3-cand-1210-1289
  source 1..80: mol_type = other DNA
caggtgtgtttggacagaatgcacaatatcattacctgtatagatcgggattctgtatccacgttcaatgcaacgcaagc

SEQ ID NO: 22829 - DNA, 80 bp, synthetic construct
  misc_feature 1..80: note = Synthetic: >HCV.A3-cand-1290-1369
  source 1..80: mol_type = other DNA
aaatttcaccaaggagctcttctagtggtagccatccccgaatttgtcatagcagctgcaagccctgaaaagaaacccac

SEQ ID NO: 22830 - DNA, 80 bp, synthetic construct
  misc_feature 1..80: note = Synthetic: >HCV.A3-cand-1380-1459
  source 1..80: mol_type = other DNA
catccgacattcgacaagactatgcctgggtcaaatggttccactttcgagcacccttacgtgctcgatgcgggtattcc

SEQ ID NO: 22831 - DNA, 80 bp, synthetic construct
  misc_feature 1..80: note = Synthetic: >HCV.A3-cand-1460-1539
  source 1..80: mol_type = other DNA
cctcagtcaggcgcttatattccctcaccaatggatcaacttgagaactaataactgtgctaccataattatgccttaca

SEQ ID NO: 22832 - DNA, 80 bp, synthetic construct
  misc_feature 1..80: note = Synthetic: >HCV.A3-cand-1540-1619
  source 1..80: mol_type = other DNA
ttaatgcggttccttttgactcagccataaaccataacaacttcactttagcagtgatcccaattagccctctcaagttt

SEQ ID NO: 22833 - DNA, 80 bp, synthetic construct
  misc_feature 1..80: note = Synthetic: >HCV.A3-cand-1630-1709
  source 1..80: mol_type = other DNA
ccacgtccgcaatacctatcactattacattagccccattgagttcagaattttgtgggttacgtcaagccacgaagcaa

SEQ ID NO: 22834 - DNA, 80 bp, synthetic construct
  misc_feature 1..80: note = Synthetic: >HCV.A3-cand-1710-1789
  source 1..80: mol_type = other DNA
ggatttccaactgagttgaagcccgggactaatcaatttttgaccacagaccagtgtgtgtctgcacctatattaccagg

SEQ ID NO: 22835 - DNA, 80 bp, synthetic construct
  misc_feature 1..80: note = Synthetic: >HCV.A3-cand-1790-1869
  source 1..80: mol_type = other DNA
gtttgagcccacgccccaaattcacattcctggagaggtgagtagtcttctagaactgtgccaggtcgaaaccatattgg

SEQ ID NO: 22836 - DNA, 80 bp, synthetic construct
  misc_feature 1..80: note = Synthetic: >HCV.A3-cand-1870-1949
  source 1..80: mol_type = other DNA
agatcaataatgtcaccggaacgcccgatgtcacaagactgctcattcccgtctctgcacagaaagataaagatacactg

SEQ ID NO: 22837 - DNA, 80 bp, synthetic construct
  misc_feature 1..80: note = Synthetic: >HCV.A3-cand-1950-2029
  source 1..80: mol_type = other DNA
tgcgcggcgttccgtgtggacccaggtagagatggcccttggcaatcaacccttgttgggcaaatatgcaggtactacac

SEQ ID NO: 22838 - DNA, 80 bp, synthetic construct
  misc_feature 1..80: note = Synthetic: >HCV.A3-cand-2030-2109
  source 1..80: mol_type = other DNA
ccaatggtcgggctctctggaagtgacattcatgtttactggatccttcatggccacgggcaagatgctcatagcatatt

SEQ ID NO: 22839 - DNA, 80 bp, synthetic construct
  misc_feature 1..80: note = Synthetic: >HCV.A3-cand-2110-2189
  source 1..80: mol_type = other DNA
ccccacctggtagcgcccagcccacctccagggagttcgcaatgcttggcacgcacgtggtttgggattttgggttgcag

SEQ ID NO: 22840 - DNA, 80 bp, synthetic construct
  misc_feature 1..80: note = Synthetic: >HCV.A3-cand-2190-2269
  source 1..80: mol_type = other DNA
tcctcagtcactctggtcataccatggattagcaacacacattaccgcactgggaagactggcggctattatgactacta

SEQ ID NO: 22841 - DNA, 80 bp, synthetic construct
  misc_feature 1..80: note = Synthetic: >HCV.A3-cand-2270-2349
  source 1..80: mol_type = other DNA
cgcgtcaggtattgtcaccatctggtaccagacgaattttgtggtcccctctggcacaccaacacaagcttacataatag

SEQ ID NO: 22842 - DNA, 80 bp, synthetic construct
  misc_feature 1..80: note = Synthetic: >HCV.A3-cand-2350-2429
  source 1..80: mol_type = other DNA
cccttggcgcagcgcaaaagaatttcactctgaaactatgcaaggacaccgatgaggtgacacagcaggcgatcttgcag

SEQ ID NO: 22843 - DNA, 80 bp, synthetic construct
  misc_feature 1..80: note = Synthetic: >HCV.A3-cand-2430-2509
  source 1..80: mol_type = other DNA
ggagatccagtggaagacttaatcgccaatacagttgctaggactctagagagaataacctctccaactcataatacaac

SEQ ID NO: 22844 - DNA, 80 bp, synthetic construct
  misc_feature 1..80: note = Synthetic: >HCV.A3-cand-3770-3849
  source 1..80: mol_type = other DNA
tgattacatcaagggtctcggtgatgcctttggcacgggcttcactgatgcagtatccagagaagtggaagcacttaaga

SEQ ID NO: 22845 - DNA, 80 bp, synthetic construct
  misc_feature 1..80: note = Synthetic: >HCV.A3-cand-3880-3959
  source 1..80: mol_type = other DNA
ataaaatattgaagaatttggtgaaacttatttcagccttggttatagtcattaggagcgactatgatatggtcaccctc

SEQ ID NO: 22846 - DNA, 80 bp, synthetic construct
  misc_feature 1..80: note = Synthetic: >HCV.A3-cand-3930-4009
  source 1..80: mol_type = other DNA
attaggagcgactatgatatggtcaccctcacagccactcttgccctgattgggtgtcatgggagcccatgggcttggat

SEQ ID NO: 22847 - DNA, 80 bp, synthetic construct
  misc_feature 1..80: note = Synthetic: >HCV.A3-cand-4010-4089
  source 1..80: mol_type = other DNA
caaatcaaagacagcttccatcctaggtattcctatggcacaaaagcaaagcgcctcctggctaaagaaattcaatgaca

SEQ ID NO: 22848 - DNA, 80 bp, synthetic construct
  misc_feature 1..80: note = Synthetic: >HCV.A3-cand-4090-4169
  source 1..80: mol_type = other DNA
tggctaacgctgcgaagggcctcgaatggatctctaataaaatcagtaagtttattgactggctcaaagagaaaatcatc

SEQ ID NO: 22849 - DNA, 80 bp, synthetic construct
  misc_feature 1..80: note = Synthetic: >HCV.A3-cand-4150-4229
  source 1..80: mol_type = other DNA
ggctcaaagagaaaatcatcccagctgctaaagagaaagttgagtttttgaataacctaaagcaacttcccttactggaa

SEQ ID NO: 22850 - DNA, 80 bp, synthetic construct
  misc_feature 1..80: note = Synthetic: >HCV.A3-cand-4230-4309
  source 1..80: mol_type = other DNA
aatcaaatctccaatctcgaacaatctgctgcctcgcaagatgacctcgaagttatgtttggcaacgtatcgtatttagc

SEQ ID NO: 22851 - DNA, 80 bp, synthetic construct
  misc_feature 1..80: note = Synthetic: >HCV.A3-cand-4310-4389
  source 1..80: mol_type = other DNA
tcacttttgccgcaagtttcaaccactttatgcaactgaggccaagagagtttatgccttggagaaaagaataaacaact

SEQ ID NO: 22852 - DNA, 80 bp, synthetic construct
  misc_feature 1..80: note = Synthetic: >HCV.A3-cand-4360-4439
  source 1..80: mol_type = other DNA
tttatgccttggagaaaagaataaacaactacatgcagttcaagagcaaacaccgtattgaacctgtgtgtttaatcatc

SEQ ID NO: 22853 - DNA, 80 bp, synthetic construct
  misc_feature 1..80: note = Synthetic: >HCV.A3-cand-4470-4549
  source 1..80: mol_type = other DNA
gccacgggcattatagctagagctattgctgacaagtaccattccagcgtctactcgctccctccagatccagatcactt

SEQ ID NO: 22854 - DNA, 80 bp, synthetic construct
  misc_feature 1..80: note = Synthetic: >HCV.A3-cand-4550-4629
  source 1..80: mol_type = other DNA
cgatgggtacaagcaacaggtggtcacagtaatggatgatctttgccagaatccagatggaaaggacatgtccctgtttt

SEQ ID NO: 22855 - DNA, 80 bp, synthetic construct
  misc_feature 1..80: note = Synthetic: >HCV.A3-cand-4630-4709
  source 1..80: mol_type = other DNA
gtcagatggtttccacagtagatttcataccacctatggcgtcgctagaggaaaaaggagtgtccttcatctctaaattt

SEQ ID NO: 22856 - DNA, 80 bp, synthetic construct
  misc_feature 1..80: note = Synthetic: >HCV.A3-cand-4710-4789
  source 1..80: mol_type = other DNA
gtcatcgcatcgaccaacgccagcaacatcatagtccccacagtttctgactcagatgcaatccgcaggaggttttatat

SEQ ID NO: 22857 - DNA, 80 bp, synthetic construct
  misc_feature 1..80: note = Synthetic: >HCV.A3-cand-4780-4859
  source 1..80: mol_type = other DNA
ggttttatatggattgcgacatagaagtgacagactcctacaagacagatctcggccggttggacgcaagcagggctgct

SEQ ID NO: 22858 - DNA, 80 bp, synthetic construct
  misc_feature 1..80: note = Synthetic: >HCV.A3-cand-4860-4939
  source 1..80: mol_type = other DNA
aagctttgctcagagaacaacactgccaacttcaaaagatgcagtccattagtgtgtggtaaagccatacagttgaggga

SEQ ID NO: 22859 - DNA, 80 bp, synthetic construct
  misc_feature 1..80: note = Synthetic: >HCV.A3-cand-4940-5019
  source 1..80: mol_type = other DNA
caggaagtccaaagtcagatacagtgttgacactgtggtgtcagaactaatcagagagtacaacaataggtctgccgttg

SEQ ID NO: 22860 - DNA, 80 bp, synthetic construct
  misc_feature 1..80: note = Synthetic: >HCV.A3-cand-6300-6379
  source 1..80: mol_type = other DNA
agagatattcttgacccaatcaccagagatacctccaagatgaaactgtacatggataagtatgggttggacttgcccta

SEQ ID NO: 22861 - DNA, 80 bp, synthetic construct
  misc_feature 1..80: note = Synthetic: >HCV.A3-cand-6380-6459
  source 1..80: mol_type = other DNA
ctccacttatgtgaaggatgagctcagatccctagacaaaatcaaaaagggaaagtctcgcttgattgaagccagcagtc

SEQ ID NO: 22862 - DNA, 80 bp, synthetic construct
  misc_feature 1..80: note = Synthetic: >HCV.A3-cand-6440-6519
  source 1..80: mol_type = other DNA
cttgattgaagccagcagtctaaatgattccgtttaccttagaatgacatttggccacctttatgaagtgtttcacgcca

SEQ ID NO: 22863 - DNA, 80 bp, synthetic construct
  misc_feature 1..80: note = Synthetic: >HCV.A3-cand-6540-6619
  source 1..80: mol_type = other DNA
tccgcagttggatgcaatcctgatgtgttttggagtaagttaccaatcctattgccaggctcgctttttgcattcgacta

SEQ ID NO: 22864 - DNA, 80 bp, synthetic construct
  misc_feature 1..80: note = Synthetic: >HCV.A3-cand-6620-6699
  source 1..80: mol_type = other DNA
ctcagggtatgacgcaagccttagtcctgtgtggtttagagctttggagttggtcctgcgagaaattggttacccggagg

SEQ ID NO: 22865 - DNA, 80 bp, synthetic construct
  misc_feature 1..80: note = Synthetic: >HCV.A3-cand-6700-6779
  source 1..80: mol_type = other DNA
aggctgtgtcgcttatagaagggatcaatcacactcaccatatatatcggaataaaacatactgtgttcttggcgggatg

SEQ ID NO: 22866 - DNA, 80 bp, synthetic construct
  misc_feature 1..80: note = Synthetic: >HCV.A3-cand-6780-6859
  source 1..80: mol_type = other DNA
ccctcgggttgctctggcacttccattttcaattccatgatcaacaacataatcatcagaacccttttgattaaaacgtt

SEQ ID NO: 22867 - DNA, 80 bp, synthetic construct
  misc_feature 1..80: note = Synthetic: >HCV.A3-cand-6860-6939
  source 1..80: mol_type = other DNA
taaagggatagatttggatgaactgaacatggtggcctacggagatgatgtgttggctagttacccgttccccattgatt

SEQ ID NO: 22868 - DNA, 80 bp, synthetic construct
  misc_feature 1..80: note = Synthetic: >HCV.A3-cand-6940-7019
  source 1..80: mol_type = other DNA
gcttggaattggcgagaactggcaaggagtacgggctgactatgactcctgccgataaatcaccctgtttcaatgaagtc

SEQ ID NO: 22869 - DNA, 80 bp, synthetic construct
  misc_feature 1..80: note = Synthetic: >HCV.A3-cand-7050-7129
  source 1..80: mol_type = other DNA
ggtttcttgccagatcaccagtttccttttctaatccatcctacaatgcccatgagggaaatccatgaatccatccgttg

SEQ ID NO: 22870 - DNA, 80 bp, synthetic construct
  misc_feature 1..80: note = Synthetic: >HCV.A3-cand-7100-7179
  source 1..80: mol_type = other DNA
catgagggaaatccatgaatccatccgttggactaaggatgcacgcaacactcaagaccacgtgcgctccctttgtttac

SEQ ID NO: 22871 - DNA, 80 bp, synthetic construct
  misc_feature 1..80: note = Synthetic: >HCV.A3-cand-7220-7299
  source 1..80: mol_type = other DNA
gagcacaattagatcagttcccattggaaaagctttggcaataccaaattttgagaacttgagaagaaattggctcgaat

SEQ ID NO: 22872 - DNA, 80 bp, synthetic construct
  misc_feature 1..80: note = Synthetic: >HCV.A3-cand-7280-7359
  source 1..80: mol_type = other DNA
gagaagaaattggctcgaattattttaaacttacagcttaaagctgaaccccaccagaagtctggtcgtgtaaatgactg

SEQ ID NO: 22873 - DNA, 80 bp, synthetic construct
  misc_feature 1..80: note = Synthetic: >HCV.A4-cand-0-79
  source 1..80: mol_type = other DNA
aaaaaccagcctgtgggttgtacccactcacagggcccactgggcgctagcactctgattagtcggttccgctgcggaat

SEQ ID NO: 22874 - DNA, 80 bp, synthetic construct
  misc_feature 1..80: note = Synthetic: >HCV.A4-cand-80-159
  source 1..80: mol_type = other DNA
ctttgtgcgcctgttttataacccctcccccccaattcgtaatttagaagtaatgcacaccattgatcaacagcaagcgt

SEQ ID NO: 22875 - DNA, 80 bp, synthetic construct
  misc_feature 1..80: note = Synthetic: >HCV.A4-cand-440-519
  source 1..80: mol_type = other DNA
gagtctattgagctagttagtagtcctccggcccctgaatgcggctaatcctaactgcggagcgcataccctcaatccag

SEQ ID NO: 22876 - DNA, 80 bp, synthetic construct
  misc_feature 1..80: note = Synthetic: >HCV.A6-cand-4590-4669
  source 1..80: mol_type = other DNA
tttgatggttacaaacagcaagtggtcacagttatggacgatctatgccaaaatcctgatggcaaggatatgtcactctt

SEQ ID NO: 22877 - DNA, 80 bp, synthetic construct
  misc_feature 1..80: note = Synthetic: >HCV.A6-cand-4650-4729
  source 1..80: mol_type = other DNA
ggcaaggatatgtcactcttttgccagatggtatccactgtagattttatcccaccaatggcttctttagaagagaaagg

SEQ ID NO: 22878 - DNA, 80 bp, synthetic construct
  misc_feature 1..80: note = Synthetic: >HCV.A6-cand-4750-4829
  source 1..80: mol_type = other DNA
ttgttattgcatccactaatgctagcaatatcatagtgccaacagtgtctgattctgatgctattcgccgcaggttctac

SEQ ID NO: 22879 - DNA, 80 bp, synthetic construct
  misc_feature 1..80: note = Synthetic: >HCV.A6-cand-4830-4909
  source 1..80: mol_type = other DNA
atggactgcgacatcgaggtaacggactcatataaaacagatttgggtaggttagatgctggaagagctgccaaattatg

SEQ ID NO: 22880 - DNA, 80 bp, synthetic construct
  misc_feature 1..80: note = Synthetic: >HCV.A6-cand-4910-4989
  source 1..80: mol_type = other DNA
ctctgaaaacaacacagcaaacttcaaacgctgcagcccactagtgtgtgggaaggccatccaactaagagataggaagt

SEQ ID NO: 22881 - DNA, 80 bp, synthetic construct
  misc_feature 1..80: note = Synthetic: >HCV.A6-cand-4990-5069
  source 1..80: mol_type = other DNA
ccaaagttagatacagtgtggatacggtggtttcagagctcataagggaatacaataacaggtctgccattggaaacaca

SEQ ID NO: 22882 - DNA, 80 bp, synthetic construct
  misc_feature 1..80: note = Synthetic: >HCV.A6-cand-5090-5169
  source 1..80: mol_type = other DNA
gccacccaagtttagacctattaggattagtcttgaggagacgccagcaccagatgttattagtgatcttcttgccagtg

SEQ ID NO: 22883 - DNA, 80 bp, synthetic construct
  misc_feature 1..80: note = Synthetic: >HCV.A6-cand-5150-5229
  source 1..80: mol_type = other DNA
tagtgatcttcttgccagtgtggatagtgaagaggtgcgccaatactgtagagaccaaggttggatcataccagaaaccc

SEQ ID NO: 22884 - DNA, 80 bp, synthetic construct
  misc_feature 1..80: note = Synthetic: >HCV.A6-cand-5230-5309
  source 1..80: mol_type = other DNA
ctaccaacgttgagcgacatctaagtagggctgtgctaatcatgcaatccatcgccacggtcgttgcagtagtctcactg

SEQ ID NO: 22885 - DNA, 80 bp, synthetic construct
  misc_feature 1..80: note = Synthetic: >HCV.A6-cand-5310-5389
  source 1..80: mol_type = other DNA
gtgtatgttatctacaaactttttgctggatttcagggtgcgtattctggcgctcctaagcaagtgctcaagaaacctat

SEQ ID NO: 22886 - DNA, 80 bp, synthetic construct
  misc_feature 1..80: note = Synthetic: >HCV.A6-cand-5400-5479
  source 1..80: mol_type = other DNA
gcaacagtgcagggacctagccttgattttgccctatccctactgagaaggaacatcaggcaggttcagacagatcaagg

SEQ ID NO: 22887 - DNA, 80 bp, synthetic construct
  misc_feature 1..80: note = Synthetic: >HCV.A6-cand-5480-5559
  source 1..80: mol_type = other DNA
gcacttcactatgttgggcgtcagggatcgcttagcagttctcccgcgccactcgcagcccggaaaaacaatctgggtgg

SEQ ID NO: 22888 - DNA, 80 bp, synthetic construct
  misc_feature 1..80: note = Synthetic: >HCV.A6-cand-5530-5609
  source 1..80: mol_type = other DNA
actcgcagcccggaaaaacaatctgggtggaacacaaactcgtgaacatcctggatgctgtcgagttggtggatgagcaa

SEQ ID NO: 22889 - DNA, 80 bp, synthetic construct
  misc_feature 1..80: note = Synthetic: >HCV.A6-cand-5640-5719
  source 1..80: mol_type = other DNA
cttgataccaatgagaaattcagagatatcaccaagttcattccagaaaacatcagcgctgctagtgacgccaccctagt

SEQ ID NO: 22890 - DNA, 80 bp, synthetic construct
  misc_feature 1..80: note = Synthetic: >HCV.A6-cand-5720-5799
  source 1..80: mol_type = other DNA
gattaatacagaacacatgccctcaatgtttgtacctgtgggtgatgtcgtacaatacggtttcctgaatctcagtggaa

SEQ ID NO: 22891 - DNA, 80 bp, synthetic construct
  misc_feature 1..80: note = Synthetic: >HCV.A6-cand-5820-5899
  source 1..80: mol_type = other DNA
atgtacaacttccctactaaggcaggacagtgtggaggagtggtgacatcagttggaaaggttattggaattcacatagg

SEQ ID NO: 22892 - DNA, 80 bp, synthetic construct
  misc_feature 1..80: note = Synthetic: >HCV.A6-cand-7270-7349
  source 1..80: mol_type = other DNA
ttaggtctgtcccaataggaaaggcactggctattccaaattatgaaaacctgagacgcaattggctcgaattattttag

SEQ ID NO: 22893 - DNA, 80 bp, synthetic construct
  misc_feature 1..80: note = Synthetic: >HCV.A6-cand-7320-7399
  source 1..80: mol_type = other DNA
ctgagacgcaattggctcgaattattttagaggttgaatacacctcaaccccaccaggaatctggtcgtgaatatgactg

SEQ ID NO: 22894 - DNA, 80 bp, synthetic construct
  misc_feature 1..80: note = Synthetic: >HCV.A7-cand-80-159
  source 1..80: mol_type = other DNA
tttataacccttcccccaaaattgtaacttagaagcaacatgctacaccgatcaatagcaggcgtggcgcaccagccatg

SEQ ID NO: 22895 - DNA, 80 bp, synthetic construct
  misc_feature 1..80: note = Synthetic: >HCV.A7-cand-300-379
  source 1..80: mol_type = other DNA
acttcccccgtgtagatcaggtcgatgagtcactgcattccccacgggcgaccgtggcagtggctgcgctggcggcctgc

SEQ ID NO: 22896 - DNA, 80 bp, synthetic construct
  misc_feature 1..80: note = Synthetic: >HCV.A7-cand-480-559
  source 1..80: mol_type = other DNA
tgcggagcgcatgcccccaaaccaggaggtggtgcgtcgtaacgggcaactctgcagcggaaccgactactttgggtgtc

SEQ ID NO: 22897 - DNA, 80 bp, synthetic construct
  misc_feature 1..80: note = Synthetic: >HCV.A7-cand-560-639
  source 1..80: mol_type = other DNA
cgtgtttccttttattcttattatggctgcttatggtgacaattgaagaattgttaccatatagctattggattggccat

SEQ ID NO: 22898 - DNA, 80 bp, synthetic construct
  misc_feature 1..80: note = Synthetic: >HCV.A7-cand-640-719
  source 1..80: mol_type = other DNA
ccggtgtctaacagagctattatatacctatttgttggattcattccattgtcacacacatcactacaacacattacagt

SEQ ID NO: 22899 - DNA, 80 bp, synthetic construct
  misc_feature 1..80: note = Synthetic: >HCV.A7-cand-720-799
  source 1..80: mol_type = other DNA
tgattctgagtttgaacacaagaaaatgggcgctcaagtctcaacacaaaaatctggctcccatgagaccggtaatatag

SEQ ID NO: 22900 - DNA, 80 bp, synthetic construct
  misc_feature 1..80: note = Synthetic: >HCV.A7-cand-800-879
  source 1..80: mol_type = other DNA
caactgagggatccaccataaactttactaatatcaattactacaaggactcctatgccgcctcagctagcaagcaagac

SEQ ID NO: 22901 - DNA, 80 bp, synthetic construct
  misc_feature 1..80: note = Synthetic: >HCV.A7-cand-880-959
  source 1..80: mol_type = other DNA
tttactcaagacccgaagaaattcaccagcccagtcttggacgttttgtcagagatggcagcaccactgcaatcaccgac

SEQ ID NO: 22902 - DNA, 80 bp, synthetic construct
  misc_feature 1..80: note = Synthetic: >HCV.A7-cand-960-1039
  source 1..80: mol_type = other DNA
agcggaagcatgtggttacagtgatagagtcgcccagctcacagtaggtaactccacaattaccacccaggaagcagcca

SEQ ID NO: 22903 - DNA, 80 bp, synthetic construct
  misc_feature 1..80: note = Synthetic: >HCV.A7-cand-1040-1119
  source 1..80: mol_type = other DNA
atgtgatcgttgcttatggagagtggccacaatactgtcctgacactgacgctactgcagtggacaaacccactcgccct

SEQ ID NO: 22904 - DNA, 80 bp, synthetic construct
  misc_feature 1..80: note = Synthetic: >HCV.A7-cand-1100-1179
  source 1..80: mol_type = other DNA
tggacaaacccactcgccctgacgtctcagtcaacaggttttacacactagacaccaaagactggtcatccagttcaaag

SEQ ID NO: 22905 - DNA, 80 bp, synthetic construct
  misc_feature 1..80: note = Synthetic: >HCV.A7-cand-1200-1279
  source 1..80: mol_type = other DNA
agacattctagcagagactggtgtctttggtcaaaatgcacaatttcacttcttgtataggtcagggttttgcatccacg

SEQ ID NO: 22906 - DNA, 80 bp, synthetic construct
  misc_feature 1..80: note = Synthetic: >HCV.A7-cand-1280-1359
  source 1..80: mol_type = other DNA
ttcaatgcaatgctagcaaatttcatcaaggagcactattggttgcaatcctgccggaatatgttactggtactgtgtcc

SEQ ID NO: 22907 - DNA, 80 bp, synthetic construct
  misc_feature 1..80: note = Synthetic: >HCV.A7-cand-1360-1439
  source 1..80: mol_type = other DNA
ggcaacactgggcacgagaacactcacccaccatacgctgctacacaacctggtgctgcagggtttgaattgaccaaccc

SEQ ID NO: 22908 - DNA, 80 bp, synthetic construct
  misc_feature 1..80: note = Synthetic: >HQ537729.1-cand-10-89
  source 1..80: mol_type = other DNA
aagggagtaaccgaaaacggtcgtaccgaaaacggttgccataaaagcaaaagtgcacaaaaaagcaaaagtggacaaac

SEQ ID NO: 22909 - DNA, 80 bp, synthetic construct
  misc_feature 1..80: note = Synthetic: >HQ537729.1-cand-100-179
  source 1..80: mol_type = other DNA
gcgatatgtttcaggacccagctgaaagaccttacaaactgcatgatttgtgcaacgaggtagaagaaagcatccatgaa

SEQ ID NO: 22910 - DNA, 80 bp, synthetic construct
  misc_feature 1..80: note = Synthetic: >HQ537729.1-cand-170-249
  source 1..80: mol_type = other DNA
catccatgaaatttgtttgaattgtgtatactgcaaacaagaattacagcggagtgaggtatatgactttgcatgctatg

SEQ ID NO: 22911 - DNA, 80 bp, synthetic construct
  misc_feature 1..80: note = Synthetic: >HQ537729.1-cand-260-339
  source 1..80: mol_type = other DNA
agtatatagagaaggccagccatatggagtttgcatgaaatgtttaaaattttattcaaaaataagtgaatatagatggt

SEQ ID NO: 22912 - DNA, 80 bp, synthetic construct
  misc_feature 1..80: note = Synthetic: >HQ537729.1-cand-340-419
  source 1..80: mol_type = other DNA
atagatatagtgtgtatggagaaacgttagaaaaacaatgcaacaaacagttatgtcatttattaattaggtgtattaca

SEQ ID NO: 22913 - DNA, 80 bp, synthetic construct
  misc_feature 1..80: note = Synthetic: >HQ537729.1-cand-420-499
  source 1..80: mol_type = other DNA
tgtcaaaaaccgctgtgtccagttgaaaagcaaagacatttagaagaaaaaaaacgattccataacatcggtggacggtg

SEQ ID NO: 22914 - DNA, 80 bp, synthetic construct
  misc_feature 1..80: note = Synthetic: >HQ537729.1-cand-500-579
  source 1..80: mol_type = other DNA
gacaggtcggtgtatgtcctgttggaaaccaacacgtatagaaaccgaggtgtaatcatgcatggagaaataactacatt

SEQ ID NO: 22915 - DNA, 80 bp, synthetic construct
  misc_feature 1..80: note = Synthetic: >HQ537729.1-cand-580-659
  source 1..80: mol_type = other DNA
gcaagactatgttttagatttggaacccgaggcaactgacctacactgttatgagcaattgtgtgacagctcagaggagg

SEQ ID NO: 22916 - DNA, 80 bp, synthetic construct
  misc_feature 1..80: note = Synthetic: >HQ537729.1-cand-660-739
  source 1..80: mol_type = other DNA
aggaagataccattgacggtccagctggacaagcaaaaccagacacctccaattataatattgtaacgtcctgttgtaaa

SEQ ID NO: 22917 - DNA, 80 bp, synthetic construct
  misc_feature 1..80: note = Synthetic: >HQ537729.1-cand-740-819
  source 1..80: mol_type = other DNA
tgtgaggcgacactacgtctgtgtgtacagagcacacacattgacatacgtaaattggaagatttattaatgggcacatt

SEQ ID NO: 22918 - DNA, 80 bp, synthetic construct
  misc_feature 1..80: note = Synthetic: >HQ537729.1-cand-810-889
  source 1..80: mol_type = other DNA
tgggcacatttggaatagtgtgccccggctgttcacagagagcataatctacaatggctgatcctgcaggtacagatgaa

SEQ ID NO: 22919 - DNA, 80 bp, synthetic construct
  misc_feature 1..80: note = Synthetic: >HQ537729.1-cand-900-979
  source 1..80: mol_type = other DNA
cgggatgtaatggatggttttttgtagaagcagtagttagtagacgtacgggggatccagtgtcagaggacgaaaatgaa

SEQ ID NO: 22920 - DNA, 80 bp, synthetic construct
  misc_feature 1..80: note = Synthetic: >HQ537729.1-cand-1000-1079
  source 1..80: mol_type = other DNA
ggatatggtggactttataaatgatacagatatattaaacatacaggcagaaacagagacagcacaagcattatttcatg

SEQ ID NO: 22921 - DNA, 80 bp, synthetic construct
  misc_feature 1..80: note = Synthetic: >HQ537729.1-cand-1060-1139
  source 1..80: mol_type = other DNA
agcacaagcattatttcatgcacaggaggagcaaacacacaaagaggctgtacaggtcctaaaacgaaagtatgctagta

SEQ ID NO: 22922 - DNA, 80 bp, synthetic construct
  misc_feature 1..80: note = Synthetic: >HQ537729.1-cand-1130-1209
  source 1..80: mol_type = other DNA
tatgctagtagtccacttagcagcgtgagcttatgtgttaataataacataagtccacgtttaaaagctatttgcattga

SEQ ID NO: 22923 - DNA, 80 bp, synthetic construct
  misc_feature 1..80: note = Synthetic: >HQ537729.1-cand-1210-1289
  source 1..80: mol_type = other DNA
aaataaaaatacagcagcaaagcgacgattatttgaactaccagacagcggttatggcaattctgaagtggaaatacagc

SEQ ID NO: 22924 - DNA, 80 bp, synthetic construct
  misc_feature 1..80: note = Synthetic: >KC470281.1-cand-2270-2349
  source 1..80: mol_type = other DNA
gcaaggcacaataatttcatatgtaaattcagctagtcacttttggttagagccacttgcagatgcaaaaatagccatgt

SEQ ID NO: 22925 - DNA, 80 bp, synthetic construct
  misc_feature 1..80: note = Synthetic: >KC470281.1-cand-2350-2429
  source 1..80: mol_type = other DNA
tagatgacgcaacaggcacatgttggtcatattttgataattacatgagaaatgcattagatggtaacccaataagttta

SEQ ID NO: 22926 - DNA, 80 bp, synthetic construct
  misc_feature 1..80: note = Synthetic: >KC470281.1-cand-2430-2509
  source 1..80: mol_type = other DNA
gatagaaaacacagacacctaatacaaataaaatgtccaccaatgctaataacatcaaatactaaccctgtggaagacaa

SEQ ID NO: 22927 - DNA, 80 bp, synthetic construct
  misc_feature 1..80: note = Synthetic: >KC470281.1-cand-2510-2589
  source 1..80: mol_type = other DNA
taggtggccgtatttacatagcagactaactgtatttaaatttcctaatgcatttccatttgaccaaaacaggaacccag

SEQ ID NO: 22928 - DNA, 80 bp, synthetic construct
  misc_feature 1..80: note = Synthetic: >KC470281.1-cand-2670-2749
  source 1..80: mol_type = other DNA
gaaggagacaatgatgaaaacactttcccaacgtttaaatgtgttgcaggagaaaatattagaacattatgaacaggaca

SEQ ID NO: 22929 - DNA, 80 bp, synthetic construct
  misc_feature 1..80: note = Synthetic: >KC470281.1-cand-2760-2839
  source 1..80: mol_type = other DNA
aaaggaccatattaactattggaactgtgtacgactggaaaatgcaatatattatgcagcacgagaacgtggtatgcata

SEQ ID NO: 22930 - DNA, 80 bp, synthetic construct
  misc_feature 1..80: note = Synthetic: >KC470281.1-cand-2840-2919
  source 1..80: mol_type = other DNA
atattgaccaccaggtggtgcctcctgtaaacatttcaaaaactaaagcatatcaagccattgaactgcagatggcacta

SEQ ID NO: 22931 - DNA, 80 bp, synthetic construct
  misc_feature 1..80: note = Synthetic: >KC470281.1-cand-2930-3009
  source 1..80: mol_type = other DNA
ctcaaactgcatatagtgcagaggagtggacattaagggacacaagtaatgaactatggcatacaaagccaaagcaatgt

SEQ ID NO: 22932 - DNA, 80 bp, synthetic construct
  misc_feature 1..80: note = Synthetic: >KC470281.1-cand-2970-3049
  source 1..80: mol_type = other DNA
cacaagtaatgaactatggcatacaaagccaaagcaatgttttaaaaaacatggtgttacagtggaagtatggtatgacg

SEQ ID NO: 22933 - DNA, 80 bp, synthetic construct
  misc_feature 1..80: note = Synthetic: >KC470281.1-cand-3150-3229
  source 1..80: mol_type = other DNA
gggtatatattatatgtatgaaaaacagaaaacgtattatgaaaggtttataaatgatgcacaactatatgggactagtg

SEQ ID NO: 22934 - DNA, 80 bp, synthetic construct
  misc_feature 1..80: note = Synthetic: >KC470281.1-cand-3180-3259
  source 1..80: mol_type = other DNA
aacgtattatgaaaggtttataaatgatgcacaactatatgggactagtggaaaatgggacgtgcattataatggcaaca

SEQ ID NO: 22935 - DNA, 80 bp, synthetic construct
  misc_feature 1..80: note = Synthetic: >KC470281.1-cand-3260-3339
  source 1..80: mol_type = other DNA
taattcattgtcctgactctatgtgcagtaccactgacggaacagtatccacttctgaatctattgccgaactacagaac

SEQ ID NO: 22936 - DNA, 80 bp, synthetic construct
  misc_feature 1..80: note = Synthetic: >KC470281.1-cand-3340-3419
  source 1..80: mol_type = other DNA
accaccgcgacccataccaccgcaggtgccccatgcaccaaaaaaacacactcgacgtcgtcttggaagcaccccagaca

SEQ ID NO: 22937 - DNA, 80 bp, synthetic construct
  misc_feature 1..80: note = Synthetic: >KC470281.1-cand-3420-3499
  source 1..80: mol_type = other DNA
gtacggaatcactgagccctctgagcccaacgacgtgtccgtggacggtgtcaacctcccactcctcagtagaactgcag

SEQ ID NO: 22938 - DNA, 80 bp, synthetic construct
  misc_feature 1..80: note = Synthetic: >KC470281.1-cand-3500-3579
  source 1..80: mol_type = other DNA
gccacaacaaaagaaggaacgtgtgttgtggtgacactacacctatagtgcatttaaaaggtgacaaaaatggtttaaaa

SEQ ID NO: 22939 - DNA, 80 bp, synthetic construct
  misc_feature 1..80: note = Synthetic: >KC470281.1-cand-3570-3649
  source 1..80: mol_type = other DNA
tggtttaaaatgctttaggtataggttgcaaaaatatagcgctttgtatgaaaatatatcatgtacatggcattggatac

SEQ ID NO: 22940 - DNA, 80 bp, synthetic construct
  misc_feature 1..80: note = Synthetic: >KC470281.1-cand-5060-5139
  source 1..80: mol_type = other DNA
ggtgcactattatcatgatattagtggcattgcccctgctgacagcattgaactacaacctttggttgccccagagcagt

SEQ ID NO: 22941 - DNA, 80 bp, synthetic construct
  misc_feature 1..80: note = Synthetic: >KC470281.1-cand-5120-5199
  source 1..80: mol_type = other DNA
tttggttgccccagagcagtctgaccctatggatactttatatgatatatatgcaccagatactgacaatactacagtat

SEQ ID NO: 22942 - DNA, 80 bp, synthetic construct
  misc_feature 1..80: note = Synthetic: >KC470281.1-cand-5200-5279
  source 1..80: mol_type = other DNA
tggatactgcattccataatgctacatttacctcccgttcccatatatctgttccttcattagcgtctacaacatctact

SEQ ID NO: 22943 - DNA, 80 bp, synthetic construct
  misc_feature 1..80: note = Synthetic: >KC470281.1-cand-5280-5359
  source 1..80: mol_type = other DNA
acatatgctaacactactattcctattggtactgcttggaacacgcctgtaaatactggtcctgatgttgtgttaccagc

SEQ ID NO: 22944 - DNA, 80 bp, synthetic construct
  misc_feature 1..80: note = Synthetic: >KC470281.1-cand-5360-5439
  source 1..80: mol_type = other DNA
aacgtctccacagttgcctttaacaccctctacaccaattgatacaacctatgccataactatatatggcaccaattatt

SEQ ID NO: 22945 - DNA, 80 bp, synthetic construct
  misc_feature 1..80: note = Synthetic: >KC470281.1-cand-5450-5529
  source 1..80: mol_type = other DNA
attattgttctttttattaaaaaaacgtaaacgccttccttatttttttgcagatggcattgtggcgctctagcgacaac

SEQ ID NO: 22946 - DNA, 80 bp, synthetic construct
  misc_feature 1..80: note = Synthetic: >KC470281.1-cand-5530-5609
  source 1..80: mol_type = other DNA
atggtgtatttgcctcccccctcagtggcgaaggttgtcaatacagatgattacgtaacacgcactggcatttattacta

SEQ ID NO: 22947 - DNA, 80 bp, synthetic construct
  misc_feature 1..80: note = Synthetic: >KC470281.1-cand-5590-5669
  source 1..80: mol_type = other DNA
cgcactggcatttattactatgctggtacatctaggttattaactgtaggccatccatattttaaggtccctatgtctgg

SEQ ID NO: 22948 - DNA, 80 bp, synthetic construct
  misc_feature 1..80: note = Synthetic: >KC470281.1-cand-5680-5759
  source 1..80: mol_type = other DNA
caggacattcctaaggtgtctgcatatcaatacagggtgtttagggtttccctacctgatcctaataaatttagtcttcc

SEQ ID NO: 22949 - DNA, 80 bp, synthetic construct
  misc_feature 1..80: note = Synthetic: >KC470281.1-cand-5750-5829
  source 1..80: mol_type = other DNA
ttagtcttcctgagtctacattatataaccctgatacgcagcgattggtatgggcctgtgttggtgttgaaataggtagg

SEQ ID NO: 22950 - DNA, 80 bp, synthetic construct
  misc_feature 1..80: note = Synthetic: >KC470281.1-cand-5840-5919
  source 1..80: mol_type = other DNA
taggtgttggccttagtgggcatccattatataataggctagatgatactgaaaattctccgttttcctctaacagaaat

SEQ ID NO: 22951 - DNA, 80 bp, synthetic construct
  misc_feature 1..80: note = Synthetic: >KC470281.1-cand-5920-5999
  source 1..80: mol_type = other DNA
cctaaggacagtagggacaatgtttcagtggactgtaaacaaacgcaactatgtattataggctgtgttcctgccattgg

SEQ ID NO: 22952 - DNA, 80 bp, synthetic construct
  misc_feature 1..80: note = Synthetic: >KC470281.1-cand-6050-6129
  source 1..80: mol_type = other DNA
gggactgtccaccattagaattagttaatacacctatacaggatggcgatatgattgatacaggatatggtgctatggac

SEQ ID NO: 22953 - DNA, 80 bp, synthetic construct
  misc_feature 1..80: note = Synthetic: >KC470281.1-cand-6080-6159
  source 1..80: mol_type = other DNA
cacctatacaggatggcgatatgattgatacaggatatggtgctatggactttagtacattacaagaaacaaaaagcgag

SEQ ID NO: 22954 - DNA, 80 bp, synthetic construct
  misc_feature 1..80: note = Synthetic: >KC470281.1-cand-6160-6239
  source 1..80: mol_type = other DNA
gtgcctttagatatatgtcaatcggtctgcaaatatcctgactatttacaaatgtctgcagatgtctatggagacagtat

SEQ ID NO: 22955 - DNA, 80 bp, synthetic construct
  misc_feature 1..80: note = Synthetic: >KC470281.1-cand-6210-6289
  source 1..80: mol_type = other DNA
aatgtctgcagatgtctatggagacagtatgttcttttgtttacgtagggaacagttatttgctaggcatttttggaata

SEQ ID NO: 22956 - DNA, 80 bp, synthetic construct
  misc_feature 1..80: note = Synthetic: >NC_001434.1-cand-330-409
  source 1..80: mol_type = other DNA
ccgggcgtgatgttcagcgttggtatactgcccctacccgcgggccggctgctaattgccggcgttccgcactgcgcggg

SEQ ID NO: 22957 - DNA, 80 bp, synthetic construct
  misc_feature 1..80: note = Synthetic: >NC_001434.1-cand-410-489
  source 1..80: mol_type = other DNA
ctccccgctgctgaccgcacttactgcttcgacgggttttctggctgtaactttcccgccgagactggcgtcgccctcta

SEQ ID NO: 22958 - DNA, 80 bp, synthetic construct
  misc_feature 1..80: note = Synthetic: >NC_001434.1-cand-490-569
  source 1..80: mol_type = other DNA
ttctctccatgatatgtcaccatctgatgtcgccgaggctatgttccgccatggtatgacgcggctttacgctgccctcc

SEQ ID NO: 22959 - DNA, 80 bp, synthetic construct
  misc_feature 1..80: note = Synthetic: >NC_001434.1-cand-570-649
  source 1..80: mol_type = other DNA
acctcccgcctgaggtcctgttgccccctggcacataccgcaccgcgtcgtacttgctgatccatgacggcaggcgcgtt

SEQ ID NO: 22960 - DNA, 80 bp, synthetic construct
  misc_feature 1..80: note = Synthetic: >NC_001434.1-cand-650-729
  source 1..80: mol_type = other DNA
gtggtgacgtatgagggtgacactagtgctggttataaccacgatgtttccaacctgcgctcctggattagaaccactaa

SEQ ID NO: 22961 - DNA, 80 bp, synthetic construct
  misc_feature 1..80: note = Synthetic: >NC_001434.1-cand-730-809
  source 1..80: mol_type = other DNA
ggttaccggagaccatcctctcgtcattgagcgggttagggccattggctgccactttgtcctcttactcacggcagccc

SEQ ID NO: 22962 - DNA, 80 bp, synthetic construct
  misc_feature 1..80: note = Synthetic: >NC_001434.1-cand-810-889
  source 1..80: mol_type = other DNA
cggagccatcacctacgccctatgttccttacccccggtctaccgaggtctatgtccgatcgatcttcggcccgggtggt

SEQ ID NO: 22963 - DNA, 80 bp, synthetic construct
  misc_feature 1..80: note = Synthetic: >NC_001434.1-cand-890-969
  source 1..80: mol_type = other DNA
accccctccctatttccaacctcatgctccactaagtcgaccttccatgctgtccctgcccatatctgggaccgtctcat

SEQ ID NO: 22964 - DNA, 80 bp, synthetic construct
  misc_feature 1..80: note = Synthetic: >NC_001434.1-cand-980-1059
  source 1..80: mol_type = other DNA
gccaccctagatgaccaagccttttgctgctcccgcctaatgacttacctccgtggcattagctacaaggttactgtggg

SEQ ID NO: 22965 - DNA, 80 bp, synthetic construct
  misc_feature 1..80: note = Synthetic: >NC_001434.1-cand-1050-1129
  source 1..80: mol_type = other DNA
ttactgtgggcacccttgttgccaatgaaggctggaacgcctctgaggtcgctcttacagctgtcatcactgccgcctac

SEQ ID NO: 22966 - DNA, 80 bp, synthetic construct
  misc_feature 1..80: note = Synthetic: >NC_001434.1-cand-1100-1179
  source 1..80: mol_type = other DNA
gctcttacagctgtcatcactgccgcctaccttaccatctgccaccagcggtacctccgcactcaggctatatctaaggg

SEQ ID NO: 22967 - DNA, 80 bp, synthetic construct
  misc_feature 1..80: note = Synthetic: >NC_001434.1-cand-1210-1289
  source 1..80: mol_type = other DNA
gaagtttataacacgcctctacagttggctctttgagaagtccggccgtgattatatccccggccgtcagttggagttct

SEQ ID NO: 22968 - DNA, 80 bp, synthetic construct
  misc_feature 1..80: note = Synthetic: >NC_001434.1-cand-1290-1369
  source 1..80: mol_type = other DNA
acgctcagtgtaggcgctggctctcggccggctttcatcttgacccacgggtgttggtttttgatgagtcggccccctgc

SEQ ID NO: 22969 - DNA, 80 bp, synthetic construct
  misc_feature 1..80: note = Synthetic: >NC_001434.1-cand-1370-1449
  source 1..80: mol_type = other DNA
cactgtaggactgcgattcgtaaggcggtctcaaagttttgctgttttatgaagtggctgggccaggagtgcacctgttt

SEQ ID NO: 22970 - DNA, 80 bp, synthetic construct
  misc_feature 1..80: note = Synthetic: >NC_001434.1-cand-1430-1509
  source 1..80: mol_type = other DNA
ggccaggagtgcacctgtttcctacaacctgcagaaggcgccgtcggcgaccagggccatgacaacgaggcctatgaggg

SEQ ID NO: 22971 - DNA, 80 bp, synthetic construct
  misc_feature 1..80: note = Synthetic: >NC_001434.1-cand-1530-1609
  source 1..80: mol_type = other DNA
aatccgctattagtgacatatctgggtcctacgtcgtccctggcactgccctccaaccgctttaccaagcccttgacctc

SEQ ID NO: 22972 - DNA, 80 bp, synthetic construct
  misc_feature 1..80: note = Synthetic: >NC_001538.1-cand-1240-1319
  source 1..80: mol_type = other DNA
cctataaacttttataattatattcaacaatattattctgatctttcccctattaggccctcaatggttagacaagtagc

SEQ ID NO: 22973 - DNA, 80 bp, synthetic construct
  misc_feature 1..80: note = Synthetic: >NC_001538.1-cand-1320-1399
  source 1..80: mol_type = other DNA
tgaaagggaaggtacccgtgtacattttggccatacttatagtatagatgatgctgacagtatagaagaagttacacaaa

SEQ ID NO: 22974 - DNA, 80 bp, synthetic construct
  misc_feature 1..80: note = Synthetic: >NC_001538.1-cand-1400-1479
  source 1..80: mol_type = other DNA
gaatggacttaagaaatcaacaaagtgtacattcaggagagtttatagaaaaaactattgccccaggaggtgctaatcaa

SEQ ID NO: 22975 - DNA, 80 bp, synthetic construct
  misc_feature 1..80: note = Synthetic: >NC_001538.1-cand-1600-1679
  source 1..80: mol_type = other DNA
tcccaaaaagccaaaggaacccgtgcaagtgccaaaactactaataaaaggaggagtagaagttctagaagttaaaactg

SEQ ID NO: 22976 - DNA, 80 bp, synthetic construct
  misc_feature 1..80: note = Synthetic: >NC_001538.1-cand-1750-1829
  source 1..80: mol_type = other DNA
gggctttagtctaaagctaagtgctgaaaatgactttagcagtgatagcccagagagaaaaatgcttccctgttacagca

SEQ ID NO: 22977 - DNA, 80 bp, synthetic construct
  misc_feature 1..80: note = Synthetic: >NC_001538.1-cand-1810-1889
  source 1..80: mol_type = other DNA
aatgcttccctgttacagcacagcaagaattcccctccccaatttaaatgaggacctaacctgtggaaatctactgatgt

SEQ ID NO: 22978 - DNA, 80 bp, synthetic construct
  misc_feature 1..80: note = Synthetic: >NC_001538.1-cand-1890-1969
  source 1..80: mol_type = other DNA
gggaggctgtaactgtacaaacagaggttattggaataactagcatgcttaaccttcatgcagggtcacaaaaagtgcat

SEQ ID NO: 22979 - DNA, 80 bp, synthetic construct
  misc_feature 1..80: note = Synthetic: >NC_001538.1-cand-1970-2049
  source 1..80: mol_type = other DNA
gagcatggtggaggaaaacctattcaaggcagtaatttccacttctttgctgtaggtggagaacccttggaaatgcaggg

SEQ ID NO: 22980 - DNA, 80 bp, synthetic construct
  misc_feature 1..80: note = Synthetic: >NC_001538.1-cand-2050-2129
  source 1..80: mol_type = other DNA
agtgctaatgaattacaggtcaaagtaccctgatggtactataacccctaaaaacccaacagcccagtcccaggtaatga

SEQ ID NO: 22981 - DNA, 80 bp, synthetic construct
  misc_feature 1..80: note = Synthetic: >NC_001538.1-cand-2130-2209
  source 1..80: mol_type = other DNA
atactgaccataaggcctatttggacaaaaacaatgcttatccagttgagtgctgggtacctgatcccagtagaaatgaa

SEQ ID NO: 22982 - DNA, 80 bp, synthetic construct
  misc_feature 1..80: note = Synthetic: >NC_001538.1-cand-2160-2239
  source 1..80: mol_type = other DNA
acaatgcttatccagttgagtgctgggtacctgatcccagtagaaatgaaaatgctaggtattttgggactttcacagga

SEQ ID NO: 22983 - DNA, 80 bp, synthetic construct
  misc_feature 1..80: note = Synthetic: >NC_001538.1-cand-2320-2399
  source 1..80: mol_type = other DNA
ttgtaaagctgatagcctgtatgtttcagctgctgatatttgtggcctgtttactaacagctctggaacacaacagtgga

SEQ ID NO: 22984 - DNA, 80 bp, synthetic construct
  misc_feature 1..80: note = Synthetic: >NC_001538.1-cand-2370-2449
  source 1..80: mol_type = other DNA
ttactaacagctctggaacacaacagtggagaggccttgcaagatattttaagatccgcctgagaaaaagatctgtaaag

SEQ ID NO: 22985 - DNA, 80 bp, synthetic construct
  misc_feature 1..80: note = Synthetic: >NC_001538.1-cand-2450-2529
  source 1..80: mol_type = other DNA
aatccttacccaatttcctttttgctaagtgaccttataaacaggagaacccagagagtggatgggcagcctatgtatgg

SEQ ID NO: 22986 - DNA, 80 bp, synthetic construct
  misc_feature 1..80: note = Synthetic: >NC_001538.1-cand-2500-2579
  source 1..80: mol_type = other DNA
ccagagagtggatgggcagcctatgtatggtatggaatcccaggtagaagaggttagggtgtttgatggcacagaaagac

SEQ ID NO: 22987 - DNA, 80 bp, synthetic construct
  misc_feature 1..80: note = Synthetic: >NC_001545.2-cand-3840-3919
  source 1..80: mol_type = other DNA
aaccccaccggccacttcgtctgcgcggtcggcggcggcccacgccgcgtctcggaccgcccccacctctggcttgcggt

SEQ ID NO: 22988 - DNA, 80 bp, synthetic construct
  misc_feature 1..80: note = Synthetic: >NC_001545.2-cand-3850-3929
  source 1..80: mol_type = other DNA
gccacttcgtctgcgcggtcggcggcggcccacgccgcgtctcggaccgcccccacctctggcttgcggtccccctgtct

SEQ ID NO: 22989 - DNA, 80 bp, synthetic construct
  misc_feature 1..80: note = Synthetic: >NC_001545.2-cand-4010-4089
  source 1..80: mol_type = other DNA
ggatgacgccatggcccgggcggccctcgcatcagtccaacgccctcgcaaaggcccttacaatatcagggtatggaaca

SEQ ID NO: 22990 - DNA, 80 bp, synthetic construct
  misc_feature 1..80: note = Synthetic: >NC_001545.2-cand-4080-4159
  source 1..80: mol_type = other DNA
gtatggaacatggccgcaggcgctggcaagactacccgcatcctcgctgccttcacgcgcgaagacctttacgtctgccc

SEQ ID NO: 22991 - DNA, 80 bp, synthetic construct
  misc_feature 1..80: note = Synthetic: >NC_001545.2-cand-4160-4239
  source 1..80: mol_type = other DNA
caccaatgcgctcctgcacgagatccaggccaaactccgcgcgcgcgatatcgacatcaagaacgccgccacctacgagc

SEQ ID NO: 22992 - DNA, 80 bp, synthetic construct
  misc_feature 1..80: note = Synthetic: >NC_001545.2-cand-4240-4319
  source 1..80: mol_type = other DNA
gccggctgacgaaaccgctcgccgcctaccgccgcatctacatcgatgaggcgttcactctcggcggcgagtactgcgcg

SEQ ID NO: 22993 - DNA, 80 bp, synthetic construct
  misc_feature 1..80: note = Synthetic: >NC_001545.2-cand-4320-4399
  source 1..80: mol_type = other DNA
ttcgttgccagccaaaccaccgcggaggtgatctgcgtcggtgatcgggaccagtgcggcccacactacgccaataactg

SEQ ID NO: 22994 - DNA, 80 bp, synthetic construct
  misc_feature 1..80: note = Synthetic: >NC_001545.2-cand-4400-4479
  source 1..80: mol_type = other DNA
ccgcacccccgtccctgaccgctggcctaccgagcgctcgcgccacacttggcgcttccccgactgctgggcggcccgcc

SEQ ID NO: 22995 - DNA, 80 bp, synthetic construct
  misc_feature 1..80: note = Synthetic: >NC_001545.2-cand-4490-4569
  source 1..80: mol_type = other DNA
gctcgattatgacatcgagggcgagcgcaccggcaccttcgcctgcaacctttgggacggccgccaggtcgaccttcacc

SEQ ID NO: 22996 - DNA, 80 bp, synthetic construct
  misc_feature 1..80: note = Synthetic: >NC_001545.2-cand-4560-4639
  source 1..80: mol_type = other DNA
gaccttcacctcgccttctcgcgcgaaaccgtgcgccgccttcacgaggctggcatacgcgcatacaccgtgcgcgaggc

SEQ ID NO: 22997 - DNA, 80 bp, synthetic construct
  misc_feature 1..80: note = Synthetic: >NC_001545.2-cand-4640-4719
  source 1..80: mol_type = other DNA
ccagggtatgagcgtcggcaccgcctgcatccatgtaggcagagacggcacggacgttgccctggcgctgacacgcgacc

SEQ ID NO: 22998 - DNA, 80 bp, synthetic construct
  misc_feature 1..80: note = Synthetic: >NC_001545.2-cand-4710-4789
  source 1..80: mol_type = other DNA
acacgcgacctcgccatcgtcagcctgacccgggcctccgacgcactctacctccacgagctcgaggacggctcactgcg

SEQ ID NO: 22999 - DNA, 80 bp, synthetic construct
  misc_feature 1..80: note = Synthetic: >NC_001545.2-cand-4830-4909
  source 1..80: mol_type = other DNA
gcggagctcaaggaggttcccgctggcattgaccgcgttgtcgccgtcgagcaggcaccaccaccgttgccgcccgccga

SEQ ID NO: 23000 - DNA, 80 bp, synthetic construct
  misc_feature 1..80: note = Synthetic: >NC_001545.2-cand-4880-4959
  source 1..80: mol_type = other DNA
gcaggcaccaccaccgttgccgcccgccgacggcatccccgaggcccaagacgtgccgcccttctgcccccgcactctgg

SEQ ID NO: 23001 - DNA, 80 bp, synthetic construct
  misc_feature 1..80: note = Synthetic: >NC_001545.2-cand-4960-5039
  source 1..80: mol_type = other DNA
aggagctcgtcttcggccgtgccggccacccccattacgcggacctcaaccgcgtgactgagggcgaacgagaagtgcgg

SEQ ID NO: 23002 - DNA, 80 bp, synthetic construct
  misc_feature 1..80: note = Synthetic: >NC_001545.2-cand-5040-5119
  source 1..80: mol_type = other DNA
tacatgcgcatctcgcgtcacctgctcaacaagaatcacaccgagatgcccggaacggaacgcgttctcagtgccgtttg

SEQ ID NO: 23003 - DNA, 80 bp, synthetic construct
  misc_feature 1..80: note = Synthetic: >NC_001611.1-cand-119040-119119
  source 1..80: mol_type = other DNA
agcgctgatttaactaacttaaaagaattacttagtctgtacaaaagtttgagattttcagattctgcggctatagagaa

SEQ ID NO: 23004 - DNA, 80 bp, synthetic construct
  misc_feature 1..80: note = Synthetic: >NC_001611.1-cand-119150-119229
  source 1..80: mol_type = other DNA
tacttactggaaaataggcgtacaaaaggtagctaatgtcgagacgtccatatctgattattatgatgaggtaaaaaata

SEQ ID NO: 23005 - DNA, 80 bp, synthetic construct
  misc_feature 1..80: note = Synthetic: >NC_001611.1-cand-119440-119519
  source 1..80: mol_type = other DNA
taatggaagacgctatatcaaaatatcagtcaccagttaatatatttaaactagcgagtgagtacggattaaacataccc

SEQ ID NO: 23006 - DNA, 80 bp, synthetic construct
  misc_feature 1..80: note = Synthetic: >NC_001611.1-cand-119600-119679
  source 1..80: mol_type = other DNA
taattttccaaaaatatccatatcgtatattaagttgggagaacttaggcggcaagttgtagactttttcaaattctcat

SEQ ID NO: 23007 - DNA, 80 bp, synthetic construct
  misc_feature 1..80: note = Synthetic: >NC_001611.1-cand-119720-119799
  source 1..80: mol_type = other DNA
taatatttttattcctagcgttataacaaaatcaggaaaaaagatattagtaaaagatgtagaccatttaatacgatcca

SEQ ID NO: 23008 - DNA, 80 bp, synthetic construct
  misc_feature 1..80: note = Synthetic: >NC_001611.1-cand-119920-119999
  source 1..80: mol_type = other DNA
taggacgagactattatgttaacggaaagtatttctctaaggttggtagtgcgggcttaaagcaattgactaataaatta

SEQ ID NO: 23009 - DNA, 80 bp, synthetic construct
  misc_feature 1..80: note = Synthetic: >NC_001611.1-cand-120000-120079
  source 1..80: mol_type = other DNA
aatattaatgagtgcacaactgtcgatgagttagttgatgagattaataaatccggaactgtaaaacgaaaaataaaaac

SEQ ID NO: 23010 - DNA, 80 bp, synthetic construct
  misc_feature 1..80: note = Synthetic: >NC_001611.1-cand-120160-120239
  source 1..80: mol_type = other DNA
tcaaaatagaaaattgtaaggttgtaaattttaatattgaaaatactaattgtttaaataacccaagtattgaaactata

SEQ ID NO: 23011 - DNA, 80 bp, synthetic construct
  misc_feature 1..80: note = Synthetic: >NC_001611.1-cand-120480-120559
  source 1..80: mol_type = other DNA
agaacgtcagcctagaaggtcgccatacgtcaaatttatctattttattaaaggctttttatatcatacatcggctacca

SEQ ID NO: 23012 - DNA, 80 bp, synthetic construct
  misc_feature 1..80: note = Synthetic: >NC_001611.1-cand-120570-120649
  source 1..80: mol_type = other DNA
tgtctcgcctgtcatgtctggtaattcatatagagatcgaaaaaagagatctgtcgaagcattttttgattggatggaca

SEQ ID NO: 23013 - DNA, 80 bp, synthetic construct
  misc_feature 1..80: note = Synthetic: >NC_001611.1-cand-121230-121309
  source 1..80: mol_type = other DNA
aaataaagaaaactgtacatggaggcactaatgcaaattacttttccggtaaaaaatctgatgagtatctgagcactaca

SEQ ID NO: 23014 - DNA, 80 bp, synthetic construct
  misc_feature 1..80: note = Synthetic: >NC_001611.1-cand-121430-121509
  source 1..80: mol_type = other DNA
atttttactaatagaacatgtgtgaaaatattcaaggattctactatgcacattattctatccaaggacaaggatgaaaa

SEQ ID NO: 23015 - DNA, 80 bp, synthetic construct
  misc_feature 1..80: note = Synthetic: >NC_001611.1-cand-121610-121689
  source 1..80: mol_type = other DNA
aatgttgtgaaccatgtactcacggctacggcattagatgagaaattattcctaattaagaaaatggctaaacacgatgt

SEQ ID NO: 23016 - DNA, 80 bp, synthetic construct
  misc_feature 1..80: note = Synthetic: >NC_001611.1-cand-121810-121889
  source 1..80: mol_type = other DNA
aaagctcaatattgtagcattacgctctctggaggattgtataaattacgtgactaaatccgagaatatgatagaaatga

SEQ ID NO: 23017 - DNA, 80 bp, synthetic construct
  misc_feature 1..80: note = Synthetic: >NC_001611.1-cand-121930-122009
  source 1..80: mol_type = other DNA
aacggaatcggtagatcgtctaaaagatttgcttctaaaatgaaaaaaaacactgattcagaaatggatcaacgactcgg

SEQ ID NO: 23018 - DNA, 80 bp, synthetic construct
  misc_feature 1..80: note = Synthetic: >NC_001611.1-cand-122090-122169
  source 1..80: mol_type = other DNA
ttatattgcatcgattgcatggaatcttgaccgtcaagcggccacttttatcgtttaagaataatacagaacgaattatg

SEQ ID NO: 23019 - DNA, 80 bp, synthetic construct
  misc_feature 1..80: note = Synthetic: >NC_001611.1-cand-131690-131769
  source 1..80: mol_type = other DNA
aagtcattaacgaacaatatgccagactctggattataagacgatactgtttcatcacaatcacctaccttaatcatgtg

SEQ ID NO: 23020 - DNA, 80 bp, synthetic construct
  misc_feature 1..80: note = Synthetic: >NC_001611.1-cand-132340-132419
  source 1..80: mol_type = other DNA
tattccaatgtttaacaagggccattttacaagattattaaatccttgtttgataaatgtagctaatgagggttcgagtt

SEQ ID NO: 23021 - DNA, 80 bp, synthetic construct
  misc_feature 1..80: note = Synthetic: >NC_001611.1-cand-132420-132499
  source 1..80: mol_type = other DNA
caacgacgattgaattctcttcccgcggatgccgcatgatgaacgactggatgttgttcgattgatttggaattcttttt

SEQ ID NO: 23022 - DNA, 80 bp, synthetic construct
  misc_feature 1..80: note = Synthetic: >NC_001611.1-cand-132740-132819
  source 1..80: mol_type = other DNA
gtccgtaaaacataaatataaacacccgcttttatcaaacgttccaaaaagtcgttagtagacatttttaacatggtatc

SEQ ID NO: 23023 - DNA, 80 bp, synthetic construct
  misc_feature 1..80: note = Synthetic: >NC_001611.1-cand-133010-133089
  source 1..80: mol_type = other DNA
gtaacaattaatgatctaaagatgatgctattttacatggatttatcatatcatggagtgacaagtagtggagtaattta

SEQ ID NO: 23024 - DNA, 80 bp, synthetic construct
  misc_feature 1..80: note = Synthetic: >NC_001611.1-cand-133140-133219
  source 1..80: mol_type = other DNA
caaaagttaataacaattataacaattataacaattataacaattattataattgttataattatgatgatacatttttt

SEQ ID NO: 23025 - DNA, 80 bp, synthetic construct
  misc_feature 1..80: note = Synthetic: >NC_001611.1-cand-133540-133619
  source 1..80: mol_type = other DNA
acaaaaatgcgtaatgttagcccgtcctaatattggtacatgcctataagtttggcatagtagaataatagacgtgttca

SEQ ID NO: 23026 - DNA, 80 bp, synthetic construct
  misc_feature 1..80: note = Synthetic: >NC_001611.1-cand-133940-134019
  source 1..80: mol_type = other DNA
cccgttaaaaccattctaaacggcatttttaataaattttctcttaaaaattgtttttcttggaaacaattcataattat

SEQ ID NO: 23027 - DNA, 80 bp, synthetic construct
  misc_feature 1..80: note = Synthetic: >NC_001611.1-cand-134100-134179
  source 1..80: mol_type = other DNA
gcacatcgtgatataaataatatttgttatcatgatgacaccagaaaacgacgaagagcaaacatctgtgttctccgcca

SEQ ID NO: 23028 - DNA, 80 bp, synthetic construct
  misc_feature 1..80: note = Synthetic: >NC_001611.1-cand-134170-134249
  source 1..80: mol_type = other DNA
ttctccgccactgtttacggagacaaaattcagggaaaaaataaacgcaaacgcgtaattggtatatgtattagaatatc

SEQ ID NO: 23029 - DNA, 80 bp, synthetic construct
  misc_feature 1..80: note = Synthetic: >NC_001611.1-cand-134410-134489
  source 1..80: mol_type = other DNA
aaacaccaagaaagctgtaatggtttatattaccagggttcttgttatatattccattcagactaccagttattctcgga

SEQ ID NO: 23030 - DNA, 80 bp, synthetic construct
  misc_feature 1..80: note = Synthetic: >NC_001611.1-cand-134590-134669
  source 1..80: mol_type = other DNA
gatggtaatccaattacaaaaactacaaccgattatcaagattccgatgtatcacaagaagttagaaagtatttttgtgt

SEQ ID NO: 23031 - DNA, 80 bp, synthetic construct
  misc_feature 1..80: note = Synthetic: >NC_001611.1-cand-134650-134729
  source 1..80: mol_type = other DNA
gttagaaagtatttttgtgttaaaacaatgaactaatatttatttttgtacattaataaatgaaatcgcttaatagacaa

SEQ ID NO: 23032 - DNA, 80 bp, synthetic construct
  misc_feature 1..80: note = Synthetic: >NC_001611.1-cand-134730-134809
  source 1..80: mol_type = other DNA
actgtaagtaggtttaagaagttgtcggtgccggccgctataatgatgatactctcaaccattattagcggcataggaac

SEQ ID NO: 23033 - DNA, 80 bp, synthetic construct
  misc_feature 1..80: note = Synthetic: >NC_001611.1-cand-134890-134969
  source 1..80: mol_type = other DNA
atactaacattaaaatgtctacagataatacggtttatcagtgtcgtaaattacgagccagattgcctagaccggatact

SEQ ID NO: 23034 - DNA, 80 bp, synthetic construct
  misc_feature 1..80: note = Synthetic: >NC_001611.1-cand-135020-135099
  source 1..80: mol_type = other DNA
tttaaaaaagaccaataataaatggttagatattaataatgataaagatatagatattagtaaattaacaaattttaaac

SEQ ID NO: 23035 - DNA, 80 bp, synthetic construct
  misc_feature 1..80: note = Synthetic: >NC_001611.1-cand-138340-138419
  source 1..80: mol_type = other DNA
taatgatggtatcattgcacgccgtatactctatagtctttgtagatgttataaccacaaaagtgcagaggtatatcaac

SEQ ID NO: 23036 - DNA, 80 bp, synthetic construct
  misc_feature 1..80: note = Synthetic: >NC_001611.1-cand-138420-138499
  source 1..80: mol_type = other DNA
aatattctaactcttaacatttttatttatttaaaatgatacctttgttatttattttattctattttgcgaacggtatc

SEQ ID NO: 23037 - DNA, 80 bp, synthetic construct
  misc_feature 1..80: note = Synthetic: >NC_001611.1-cand-138500-138579
  source 1..80: mol_type = other DNA
gaatggcataagtttgaaacgagtgaaaaaataatttctacttacttaatagatgacgtattatacacgggtgttaatgg

SEQ ID NO: 23038 - DNA, 80 bp, synthetic construct
  misc_feature 1..80: note = Synthetic: >NC_001611.1-cand-138580-138659
  source 1..80: mol_type = other DNA
ggcagtatatacattttcaaataataaactaaacaaaactggtttagctaatactaattatatcacaacatctataaaag

SEQ ID NO: 23039 - DNA, 80 bp, synthetic construct
  misc_feature 1..80: note = Synthetic: >NC_001611.1-cand-138660-138739
  source 1..80: mol_type = other DNA
tagaggatgtgatacattagtatgcggaaccaataacggaaatcccaaatgttggaaaatagacggttccaaagatccaa

SEQ ID NO: 23040 - DNA, 80 bp, synthetic construct
  misc_feature 1..80: note = Synthetic: >NC_001611.1-cand-138740-138819
  source 1..80: mol_type = other DNA
aacatagaggtagaggatacgctccttatcaaaatagtaaagtaacgataatcagtcataacaaatgtatactatctaac

SEQ ID NO: 23041 - DNA, 80 bp, synthetic construct
  misc_feature 1..80: note = Synthetic: >NC_001611.1-cand-138900-138979
  source 1..80: mol_type = other DNA
ataacgtaattccaaaagatggtttacaaggagcatttgtcgataaagacggtacttatgacaaagtttacattcttttc

SEQ ID NO: 23042 - DNA, 80 bp, synthetic construct
  misc_feature 1..80: note = Synthetic: >NC_001611.1-cand-138980-139059
  source 1..80: mol_type = other DNA
actgttactatcggctcaaagagaattgttaaaattccgtatatagcacaaatgtgcttaaacgacgaatgtggtccatc

SEQ ID NO: 23043 - DNA, 80 bp, synthetic construct
  misc_feature 1..80: note = Synthetic: >NC_001611.1-cand-139060-139139
  source 1..80: mol_type = other DNA
atcattgtctagtcatagatggtcgacgttgctcaaagtcgaattagaatgtgacatcgacggaagaagttatagtcaaa

SEQ ID NO: 23044 - DNA, 80 bp, synthetic construct
  misc_feature 1..80: note = Synthetic: >NC_001611.1-cand-139140-139219
  source 1..80: mol_type = other DNA
ttaatcattctaaaactataaaacagataatgatacgatactatatgtattctttgatagtccttttccaagtccgcatt

SEQ ID NO: 23045 - DNA, 80 bp, synthetic construct
  misc_feature 1..80: note = Synthetic: >NC_001611.1-cand-139210-139289
  source 1..80: mol_type = other DNA
agtccgcattatgtacctattctatgaataccattaaacaatctttttctacgtcaaattgggaggatatacaaagcaat

SEQ ID NO: 23046 - DNA, 80 bp, synthetic construct
  misc_feature 1..80: note = Synthetic: >NC_001611.1-cand-139290-139369
  source 1..80: mol_type = other DNA
tactgtctccagcttttggtatatgtctaccagctggaaaaagttgttccacataacacgtttgacgttatagaacaata

SEQ ID NO: 23047 - DNA, 80 bp, synthetic construct
  misc_feature 1..80: note = Synthetic: >NC_001611.1-cand-139370-139449
  source 1..80: mol_type = other DNA
taatgtactagataatattataaagcctttatttaaccaacctatcttcaaaggaccgtctgatgttaaatggttcgata

SEQ ID NO: 23048 - DNA, 80 bp, synthetic construct
  misc_feature 1..80: note = Synthetic: >NC_001611.1-cand-139450-139529
  source 1..80: mol_type = other DNA
taaaggagaaggaaaatgaacatcggaaatatagaatatacttcataaaagaaaatactatatattcgttcaatacaaaa

SEQ ID NO: 23049 - DNA, 80 bp, synthetic construct
  misc_feature 1..80: note = Synthetic: >NC_001611.1-cand-139530-139609
  source 1..80: mol_type = other DNA
tctaaacaaactcgtagctcgcaagtcgatgcgcaactattttcagtaatggtaacttcgaaaccgttatttatagcaga

SEQ ID NO: 23050 - DNA, 80 bp, synthetic construct
  misc_feature 1..80: note = Synthetic: >NC_001611.1-cand-139610-139689
  source 1..80: mol_type = other DNA
tatagggatagaagtaggaatgccacgaataaaaaatacttaaaatgtaatcttaatcgagtacgccatatgacaatgaa

SEQ ID NO: 23051 - DNA, 80 bp, synthetic construct
  misc_feature 1..80: note = Synthetic: >NC_001672.1-cand-5830-5909
  source 1..80: mol_type = other DNA
gacgactgatatctcggagatgggagctaaccttgacgtgagccgcgtcatagatgggaggacaaacatcaagcccgagg

SEQ ID NO: 23052 - DNA, 80 bp, synthetic construct
  misc_feature 1..80: note = Synthetic: >NC_001672.1-cand-5910-5989
  source 1..80: mol_type = other DNA
aggttgatgggaaagtcgagctcaccgggaccaggcgagtgaccacggcttccgctgcccaacggcgcggaagagttggt

SEQ ID NO: 23053 - DNA, 80 bp, synthetic construct
  misc_feature 1..80: note = Synthetic: >NC_001672.1-cand-5990-6069
  source 1..80: mol_type = other DNA
cggcaagacggacgaacagatgaatacatatactctggacagtgtgatgatgatgacagtggattagtgcaatggaaaga

SEQ ID NO: 23054 - DNA, 80 bp, synthetic construct
  misc_feature 1..80: note = Synthetic: >NC_001672.1-cand-6110-6189
  source 1..80: mol_type = other DNA
cccgtggccaccttctatggaccagaacaggacaagatgccggaggtggccggtcactttcgactcactgaagagaaaag

SEQ ID NO: 23055 - DNA, 80 bp, synthetic construct
  misc_feature 1..80: note = Synthetic: >NC_001672.1-cand-6150-6229
  source 1..80: mol_type = other DNA
cggaggtggccggtcactttcgactcactgaagagaaaagaaagcacttccgacatcttctcacccattgtgacttcaca

SEQ ID NO: 23056 - DNA, 80 bp, synthetic construct
  misc_feature 1..80: note = Synthetic: >NC_001672.1-cand-6230-6309
  source 1..80: mol_type = other DNA
ccgtggctggcatggcacgtcgcagcgaatgtatccagcgtcacggatcgaagctggacatgggaagggccggaggcaaa

SEQ ID NO: 23057 - DNA, 80 bp, synthetic construct
  misc_feature 1..80: note = Synthetic: >NC_001672.1-cand-6280-6359
  source 1..80: mol_type = other DNA
aagctggacatgggaagggccggaggcaaatgccgtggatgaggccagtggtgacttggtcacctttaggagcccgaatg

SEQ ID NO: 23058 - DNA, 80 bp, synthetic construct
  misc_feature 1..80: note = Synthetic: >NC_001672.1-cand-6390-6469
  source 1..80: mol_type = other DNA
aggacgcacgtatgttcaaagagggacgtgacatcaaagagttcgtggcgtacgcgtctgggcgtcgcagcttcggagat

SEQ ID NO: 23059 - DNA, 80 bp, synthetic construct
  misc_feature 1..80: note = Synthetic: >NC_001672.1-cand-6470-6549
  source 1..80: mol_type = other DNA
gttctgacaggaatgtcgggagttcctgagctcctgcggcacagatgcgtcagtgccctggatgtcttctacacgcttat

SEQ ID NO: 23060 - DNA, 80 bp, synthetic construct
  misc_feature 1..80: note = Synthetic: >NC_001672.1-cand-6550-6629
  source 1..80: mol_type = other DNA
gcatgaggaacctggcagcagggcaatgagaatggcggagagagatgccccagaggcctttctgactatggttgagatga

SEQ ID NO: 23061 - DNA, 80 bp, synthetic construct
  misc_feature 1..80: note = Synthetic: >NC_001672.1-cand-6630-6709
  source 1..80: mol_type = other DNA
tggtgctgggtttggcaaccctgggtgtcatctggtgcttcgtcgtccggacttcaatcagccgcatgatgctgggcacg

SEQ ID NO: 23062 - DNA, 80 bp, synthetic construct
  misc_feature 1..80: note = Synthetic: >NC_001672.1-cand-6710-6789
  source 1..80: mol_type = other DNA
ctggtcctgctggcctccttgctactcttgtgggcaggtggcgtcggctatgggaacatggctggagtggctctcatctt

SEQ ID NO: 23063 - DNA, 80 bp, synthetic construct
  misc_feature 1..80: note = Synthetic: >NC_001672.1-cand-6790-6869
  source 1..80: mol_type = other DNA
ttacacgttgctgacggtgctgcagcctgaggcgggaaaacagagaagcagtgacgacaacaaactggcatatttcttgc

SEQ ID NO: 23064 - DNA, 80 bp, synthetic construct
  misc_feature 1..80: note = Synthetic: >NC_001672.1-cand-6870-6949
  source 1..80: mol_type = other DNA
tgacgctctgcagccttgctggactggttgcagccaatgagatgggctttctggagaagaccaaggcagacttgtccacg

SEQ ID NO: 23065 - DNA, 80 bp, synthetic construct
  misc_feature 1..80: note = Synthetic: >NC_001672.1-cand-6940-7019
  source 1..80: mol_type = other DNA
cttgtccacggcgctgtggagtgaacgggaggaaccccggccatggagtgaatggacgaatgtggacatccagccagcga

SEQ ID NO: 23066 - DNA, 80 bp, synthetic construct
  misc_feature 1..80: note = Synthetic: >NC_001672.1-cand-7030-7109
  source 1..80: mol_type = other DNA
gacctatgtgctggtggtgtctctgttcacaccttacatcatccaccaactgcagaccaaaatccaacaacttgtcaaca

SEQ ID NO: 23067 - DNA, 80 bp, synthetic construct
  misc_feature 1..80: note = Synthetic: >NC_001918.1-cand-2730-2809
  source 1..80: mol_type = other DNA
gcgatgcgcggaacatacaccgtatgggacgtcaacgctgcctcaaccctggagttcaccatccccttcatctctaactc

SEQ ID NO: 23068 - DNA, 80 bp, synthetic construct
  misc_feature 1..80: note = Synthetic: >NC_001918.1-cand-2810-2889
  source 1..80: mol_type = other DNA
ctactggaaaacagtggacgttaacaaccccgacgctctgctgtccaccaccggctatgtttccatctgggttcaaaacc

SEQ ID NO: 23069 - DNA, 80 bp, synthetic construct
  misc_feature 1..80: note = Synthetic: >NC_001918.1-cand-2890-2969
  source 1..80: mol_type = other DNA
cgctagtcggaccccacaccgcccctgcgtcggccctcgtgcaggcattcatctccgcaggtgaatccttcaacgtacga

SEQ ID NO: 23070 - DNA, 80 bp, synthetic construct
  misc_feature 1..80: note = Synthetic: >NC_001918.1-cand-2970-3049
  source 1..80: mol_type = other DNA
ctgatgcaaaaccccgccctcacttcccaaaccctcaccgaagacctcgatgcaccccaagacaccgggaacattgagaa

SEQ ID NO: 23071 - DNA, 80 bp, synthetic construct
  misc_feature 1..80: note = Synthetic: >NC_001918.1-cand-3050-3129
  source 1..80: mol_type = other DNA
cggtgcggctgacaactccccgcagccccgcaccaccttcgactacaccggaaaccccctccctccagacaccaaactgg

SEQ ID NO: 23072 - DNA, 80 bp, synthetic construct
  misc_feature 1..80: note = Synthetic: >NC_001918.1-cand-3130-3209
  source 1..80: mol_type = other DNA
aaaacttcttctccttctaccgcttgctgcccatgggtggcagcggtgctccatctctttctttccccgctgacgaaggc

SEQ ID NO: 23073 - DNA, 80 bp, synthetic construct
  misc_feature 1..80: note = Synthetic: >NC_001918.1-cand-3250-3329
  source 1..80: mol_type = other DNA
cggacgtctccgggatcgctgcgatgctatcgtgcttcacgtacatcgctgcggacctgcgaatcacgctccgcttctcc

SEQ ID NO: 23074 - DNA, 80 bp, synthetic construct
  misc_feature 1..80: note = Synthetic: >NC_001918.1-cand-3290-3369
  source 1..80: mol_type = other DNA
gtacatcgctgcggacctgcgaatcacgctccgcttctccaacccaaatgacaaccctgccaccatgcttgttgccttcg

SEQ ID NO: 23075 - DNA, 80 bp, synthetic construct
  misc_feature 1..80: note = Synthetic: >NC_001918.1-cand-3370-3449
  source 1..80: mol_type = other DNA
ctccccctggcgccaccatccccctcaaacccacgcgccaaatgctctccaacttctacatggcggaggtcccagtctcc

SEQ ID NO: 23076 - DNA, 80 bp, synthetic construct
  misc_feature 1..80: note = Synthetic: >NC_001918.1-cand-3450-3529
  source 1..80: mol_type = other DNA
gctgccacctccaccatggtctctttctccatcccctacacctcccccctctctgccatccccacctcatacttcggatg

SEQ ID NO: 23077 - DNA, 80 bp, synthetic construct
  misc_feature 1..80: note = Synthetic: >NC_001918.1-cand-3500-3579
  source 1..80: mol_type = other DNA
ctctgccatccccacctcatacttcggatgggaggactggtcaggtaccaactttggccagctctcctccgggtcatggg

SEQ ID NO: 23078 - DNA, 80 bp, synthetic construct
  misc_feature 1..80: note = Synthetic: >NC_001918.1-cand-3610-3689
  source 1..80: mol_type = other DNA
tcgactctgctatccccttcgacttccagctctcttgctgggtcgccttcggcaacttcaaagcctgggtcccccgccca

SEQ ID NO: 23079 - DNA, 80 bp, synthetic construct
  misc_feature 1..80: note = Synthetic: >NC_001918.1-cand-3690-3769
  source 1..80: mol_type = other DNA
cctccacctctcccccccctccccacccctgccgcgaacgcggaacgcacagtggccgtgatcaagcagggcgccgcctc

SEQ ID NO: 23080 - DNA, 80 bp, synthetic construct
  misc_feature 1..80: note = Synthetic: >NC_001918.1-cand-3770-3849
  source 1..80: mol_type = other DNA
agcgactcccgatgtggaccccgacgatcgggtctacatcgtgcgcgcgcagcgccccacctacgtccactgggccatcc

SEQ ID NO: 23081 - DNA, 80 bp, synthetic construct
  misc_feature 1..80: note = Synthetic: >NC_001918.1-cand-3850-3929
  source 1..80: mol_type = other DNA
gcaaggtggcccccgacggcagtgccaaacagatctcgctgtcccgcagcgggatccaggcactggtcgccctcgaaccc

SEQ ID NO: 23082 - DNA, 80 bp, synthetic construct
  misc_feature 1..80: note = Synthetic: >NC_001918.1-cand-3930-4009
  source 1..80: mol_type = other DNA
cccgagggtgaaccttacctcgaaattctcccctcccattggacccttgctgaactccaacttggcaacaagtgggagta

SEQ ID NO: 23083 - DNA, 80 bp, synthetic construct
  misc_feature 1..80: note = Synthetic: >NC_001918.1-cand-5290-5369
  source 1..80: mol_type = other DNA
cctccctcgaggagaagggcacccactacacctccaaggtcatcgtggttacctccaacttccacgagcctaacgagcgc

SEQ ID NO: 23084 - DNA, 80 bp, synthetic construct
  misc_feature 1..80: note = Synthetic: >NC_001918.1-cand-5370-5449
  source 1..80: mol_type = other DNA
gccgcgcgctcgatgggcgctcttcgacgccgcgtccacctgcggatcaacgtcacctcaaatggagtgccatttgaccc

SEQ ID NO: 23085 - DNA, 80 bp, synthetic construct
  misc_feature 1..80: note = Synthetic: >NC_001918.1-cand-5450-5529
  source 1..80: mol_type = other DNA
taccaatgccctcaaccccatccccggaacccaatctaaatacttcaccgcccaaacacctctcaccctattccagtcca

SEQ ID NO: 23086 - DNA, 80 bp, synthetic construct
  misc_feature 1..80: note = Synthetic: >NC_001918.1-cand-5530-5609
  source 1..80: mol_type = other DNA
acacggtccgcctggatcgtgactccatctggacccctaccttcaccaacatggacgagttggtggacgcgattgtgacc

SEQ ID NO: 23087 - DNA, 80 bp, synthetic construct
  misc_feature 1..80: note = Synthetic: >NC_001918.1-cand-5610-5689
  source 1..80: mol_type = other DNA
cgtctcgatcgctccaccggcgtgtccaattccctcgcctccctcatcagacgccagggcaaccgggtcatcgacgcgga

SEQ ID NO: 23088 - DNA, 80 bp, synthetic construct
  misc_feature 1..80: note = Synthetic: >NC_001918.1-cand-5690-5769
  source 1..80: mol_type = other DNA
acccagggaaatccccctggaatacgcggatgatctcctggaagccatggcgcaccaccgccctgtaccatgctcccttg

SEQ ID NO: 23089 - DNA, 80 bp, synthetic construct
  misc_feature 1..80: note = Synthetic: >NC_001918.1-cand-5770-5849
  source 1..80: mol_type = other DNA
gcctctcccaagccatcgcaaacaacacccccatccaacaaatctctgaaaccttctggaagtaccgcaaacccatcttc

SEQ ID NO: 23090 - DNA, 80 bp, synthetic construct
  misc_feature 1..80: note = Synthetic: >NC_001918.1-cand-5850-5929
  source 1..80: mol_type = other DNA
acttgcaccactttcctcgctgtcctcggtttcctctgctctgtcatccctcttgctcgctccctgtggaagtccaaaca

SEQ ID NO: 23091 - DNA, 80 bp, synthetic construct
  misc_feature 1..80: note = Synthetic: >NC_001918.1-cand-5930-6009
  source 1..80: mol_type = other DNA
ggacacgccacaggaacctcaagctgcctactctgccatctcccaccagaaacccaagcccaagtcccagaaacccgtcc

SEQ ID NO: 23092 - DNA, 80 bp, synthetic construct
  misc_feature 1..80: note = Synthetic: >NC_001918.1-cand-6010-6089
  source 1..80: mol_type = other DNA
ccactcgtcacatccagcgccagggaatctcccctgctgtccccggcatctccaacaatgtcgtccatgtcgagtccggc

SEQ ID NO: 23093 - DNA, 80 bp, synthetic construct
  misc_feature 1..80: note = Synthetic: >NC_001918.1-cand-6090-6169
  source 1..80: mol_type = other DNA
aacggtctcaacaagaacgtcatgtctggcttctacatcttctcccgcttccttctggttcctacccacctccgtgaacc

SEQ ID NO: 23094 - DNA, 80 bp, synthetic construct
  misc_feature 1..80: note = Synthetic: >NC_001918.1-cand-6170-6249
  source 1..80: mol_type = other DNA
ccaccacaccactctcacggtgggcgccgacacctacgactgggccaccctccagacgcaggagttcggtgaaatcacca

SEQ ID NO: 23095 - DNA, 80 bp, synthetic construct
  misc_feature 1..80: note = Synthetic: >NC_001918.1-cand-6250-6329
  source 1..80: mol_type = other DNA
ttgttcacactcccacctcccgccagtacaaggacatgcggcgcttcatcggcgcccatccccaccccactggactcctt

SEQ ID NO: 23096 - DNA, 80 bp, synthetic construct
  misc_feature 1..80: note = Synthetic: >NC_001918.1-cand-6330-6409
  source 1..80: mol_type = other DNA
gtttcccaattcaaagctgcccccctctatgtccgcatctccgacaaccggatcctggaccttgacttccccggagtcgt

SEQ ID NO: 23097 - DNA, 80 bp, synthetic construct
  misc_feature 1..80: note = Synthetic: >NC_001918.1-cand-6410-6489
  source 1..80: mol_type = other DNA
cgtctgtaagcaggcgtacggataccgcgccgcgaccttcgaaggtctgtgcggttccccgcttgttacggatgatccct

SEQ ID NO: 23098 - DNA, 80 bp, synthetic construct
  misc_feature 1..80: note = Synthetic: >NC_001918.1-cand-6490-6569
  source 1..80: mol_type = other DNA
ccggagtcaagattctgggcctccacgtcgctggagtcgcgggcacgagcggattctctgcccccatccaccccatcctc

SEQ ID NO: 23099 - DNA, 80 bp, synthetic construct
  misc_feature 1..80: note = Synthetic: >NC_002031.1-cand-1930-2009
  source 1..80: mol_type = other DNA
aggtgaaagtgtcaaaaggagccccctgcaggattccagtgatagtagctgatgatcttacagcggcaatcaataaaggc

SEQ ID NO: 23100 - DNA, 80 bp, synthetic construct
  misc_feature 1..80: note = Synthetic: >NC_002031.1-cand-2010-2089
  source 1..80: mol_type = other DNA
attttggttacagttaaccccatcgcctcaaccaatgatgatgaagtgctgattgaggtgaacccaccttttggagacag

SEQ ID NO: 23101 - DNA, 80 bp, synthetic construct
  misc_feature 1..80: note = Synthetic: >NC_002031.1-cand-2090-2169
  source 1..80: mol_type = other DNA
ctacattatcgttgggagaggagattcacgtctcacttaccagtggcacaaagagggaagctcaataggaaagttgttca

SEQ ID NO: 23102 - DNA, 80 bp, synthetic construct
  misc_feature 1..80: note = Synthetic: >NC_002031.1-cand-2170-2249
  source 1..80: mol_type = other DNA
ctcagaccatgaaaggcgtggaacgcctggccgtcatgggagacaccgcctgggatttcagctccgctggagggttcttc

SEQ ID NO: 23103 - DNA, 80 bp, synthetic construct
  misc_feature 1..80: note = Synthetic: >NC_002031.1-cand-2220-2299
  source 1..80: mol_type = other DNA
tgggatttcagctccgctggagggttcttcacttcggttgggaaaggaattcatacggtgtttggctctgcctttcaggg

SEQ ID NO: 23104 - DNA, 80 bp, synthetic construct
  misc_feature 1..80: note = Synthetic: >NC_002031.1-cand-2350-2429
  source 1..80: mol_type = other DNA
ttatatgggttggcatcaacacaagaaacatgacaatgtccatgagcatgatcttggtaggagtgatcatgatgtttttg

SEQ ID NO: 23105 - DNA, 80 bp, synthetic construct
  misc_feature 1..80: note = Synthetic: >NC_002031.1-cand-2360-2439
  source 1..80: mol_type = other DNA
tggcatcaacacaagaaacatgacaatgtccatgagcatgatcttggtaggagtgatcatgatgtttttgtctctaggag

SEQ ID NO: 23106 - DNA, 80 bp, synthetic construct
  misc_feature 1..80: note = Synthetic: >NC_002031.1-cand-2480-2559
  source 1..80: mol_type = other DNA
agagctcaagtgcggagatggtatcttcatatttagagactctgatgactggctgaacaagtactcatactatccagaag

SEQ ID NO: 23107 - DNA, 80 bp, synthetic construct
  misc_feature 1..80: note = Synthetic: >NC_002031.1-cand-2560-2639
  source 1..80: mol_type = other DNA
atcctgtgaagcttgcatcaatagtgaaagcctcttttgaagaagggaagtgtggcctaaattcagttgactcccttgag

SEQ ID NO: 23108 - DNA, 80 bp, synthetic construct
  misc_feature 1..80: note = Synthetic: >NC_002031.1-cand-2640-2719
  source 1..80: mol_type = other DNA
catgagatgtggagaagcagggcagatgagatcaatgccatttttgaggaaaacgaggtggacatttctgttgtcgtgca

SEQ ID NO: 23109 - DNA, 80 bp, synthetic construct
  misc_feature 1..80: note = Synthetic: >NC_002031.1-cand-2720-2799
  source 1..80: mol_type = other DNA
ggatccaaagaatgtttaccagagaggaactcatccattttccagaattcgggatggtctgcagtatggttggaagactt

SEQ ID NO: 23110 - DNA, 80 bp, synthetic construct
  misc_feature 1..80: note = Synthetic: >NC_002031.1-cand-2810-2889
  source 1..80: mol_type = other DNA
ccttgtgttctccccagggaggaagaatggaagcttcatcatagatggaaagtccaggaaagaatgcccgttttcaaacc

SEQ ID NO: 23111 - DNA, 80 bp, synthetic construct
  misc_feature 1..80: note = Synthetic: >NC_002031.1-cand-2880-2959
  source 1..80: mol_type = other DNA
ttttcaaaccgggtctggaattctttccagatagaggagtttgggacgggagtgttcaccacacgcgtgtacatggacgc

SEQ ID NO: 23112 - DNA, 80 bp, synthetic construct
  misc_feature 1..80: note = Synthetic: >NC_002031.1-cand-2960-3039
  source 1..80: mol_type = other DNA
agtctttgaatacaccatagactgcgatggatctatcttgggtgcagcggtgaacggaaaaaagagtgcccatggctctc

SEQ ID NO: 23113 - DNA, 80 bp, synthetic construct
  misc_feature 1..80: note = Synthetic: >NC_002031.1-cand-3040-3119
  source 1..80: mol_type = other DNA
caacattttggatgggaagtcatgaagtaaatgggacatggatgatccacaccttggaggcattagattacaaggagtgt

SEQ ID NO: 23114 - DNA, 80 bp, synthetic construct
  misc_feature 1..80: note = Synthetic: >NC_002031.1-cand-3120-3199
  source 1..80: mol_type = other DNA
gagtggccactgacacatacgattggaacatcagttgaagagagtgaaatgttcatgccgagatcaatcggaggcccagt

SEQ ID NO: 23115 - DNA, 80 bp, synthetic construct
  misc_feature 1..80: note = Synthetic: >NC_003310.1-cand-27600-27679
  source 1..80: mol_type = other DNA
ctttaacttttacagttttccctacaagtttatccctatattcaacatatctatccatatgcatctcttaacactctgcc

SEQ ID NO: 23116 - DNA, 80 bp, synthetic construct
  misc_feature 1..80: note = Synthetic: >NC_003310.1-cand-27680-27759
  source 1..80: mol_type = other DNA
aagatagcttcagagtgaggatagtcaaaaagataaatatatagagtataatcattctcgtatactctgccctttattac

SEQ ID NO: 23117 - DNA, 80 bp, synthetic construct
  misc_feature 1..80: note = Synthetic: >NC_003310.1-cand-27760-27839
  source 1..80: mol_type = other DNA
atcgcccgcattgggcaacgaataacaaaatgcaagcatcttgttaacaggctcgtaaattgggataaaattatgttttt

SEQ ID NO: 23118 - DNA, 80 bp, synthetic construct
  misc_feature 1..80: note = Synthetic: >NC_003310.1-cand-27840-27919
  source 1..80: mol_type = other DNA
attgtttatctattttattcaagagaatattcaggaagttccttttccggttgtatctcgtcgcagtatatatcatttgt

SEQ ID NO: 23119 - DNA, 80 bp, synthetic construct
  misc_feature 1..80: note = Synthetic: >NC_003310.1-cand-27920-27999
  source 1..80: mol_type = other DNA
acattgtttcatattttttaatagtctacaccttttagtaggactagtatcgtacaattcatagctgtattttgaattcc

SEQ ID NO: 23120 - DNA, 80 bp, synthetic construct
  misc_feature 1..80: note = Synthetic: >NC_003310.1-cand-28000-28079
  source 1..80: mol_type = other DNA
aatcacgtataaaaatatcttccaattgttgacgaagacctaatccatcatccggtgtaatattaatagatgctccacat

SEQ ID NO: 23121 - DNA, 80 bp, synthetic construct
  misc_feature 1..80: note = Synthetic: >NC_003310.1-cand-28080-28159
  source 1..80: mol_type = other DNA
atatccgtaaagtaatttcctgtccaatttgatgtacctatatacgccgttttatcggttaccatatattttgcatggtt

SEQ ID NO: 23122 - DNA, 80 bp, synthetic construct
  misc_feature 1..80: note = Synthetic: >NC_003310.1-cand-28160-28239
  source 1..80: mol_type = other DNA
taccctagaatacggaatgggaggatcagcatctggtacaataaatagctttacttctatatctatgtttttagatttta

SEQ ID NO: 23123 - DNA, 80 bp, synthetic construct
  misc_feature 1..80: note = Synthetic: >NC_003310.1-cand-28240-28319
  source 1..80: mol_type = other DNA
gcatagctatagatcttaaaaagtttctcatgataaacgaagatcgttgccagcaactaatcaatagcttaacggatact

SEQ ID NO: 23124 - DNA, 80 bp, synthetic construct
  misc_feature 1..80: note = Synthetic: >NC_003310.1-cand-28320-28399
  source 1..80: mol_type = other DNA
tgtctgtctatagcggatcttcttaattcatcttctatataaggccaaaacaaaattttacccgcctttgaataaataat

SEQ ID NO: 23125 - DNA, 80 bp, synthetic construct
  misc_feature 1..80: note = Synthetic: >NC_003310.1-cand-28400-28479
  source 1..80: mol_type = other DNA
aggaataaagttcataacagatacataaacgaatttactcgcatttctgatacatgacaataaagcggttaaatcattgg

SEQ ID NO: 23126 - DNA, 80 bp, synthetic construct
  misc_feature 1..80: note = Synthetic: >NC_003310.1-cand-28480-28559
  source 1..80: mol_type = other DNA
ttctttccatagtacataattgttgtggtgcagaagcaataaatacagagtgtggaacaccgcttacgttaatactaaga

SEQ ID NO: 23127 - DNA, 80 bp, synthetic construct
  misc_feature 1..80: note = Synthetic: >NC_003310.1-cand-28560-28639
  source 1..80: mol_type = other DNA
ggatgatctgtattataatacgacggataaaagtttttccaattatatggtagattgttaactccaagataccagtatac

SEQ ID NO: 23128 - DNA, 80 bp, synthetic construct
  misc_feature 1..80: note = Synthetic: >NC_003310.1-cand-28640-28719
  source 1..80: mol_type = other DNA
ctcaaaaatttgagtgagatccgctgccaagttcctattattgaagatcgcaatacccaattccttgacctgagttagtg

SEQ ID NO: 23129 - DNA, 80 bp, synthetic construct
  misc_feature 1..80: note = Synthetic: >NC_003310.1-cand-28720-28799
  source 1..80: mol_type = other DNA
atctccaatccatgttagcgcttcctaaataaatatgtgtattatcagatatccaaaattttgtatgaagaactcctcct

SEQ ID NO: 23130 - DNA, 80 bp, synthetic construct
  misc_feature 1..80: note = Synthetic: >NC_003310.1-cand-28800-28879
  source 1..80: mol_type = other DNA
aggatatttgtaatatctatgtatcgtacttcaactccggccatttgtagtctttcaacatcctttaatggtttgttgga

SEQ ID NO: 23131 - DNA, 80 bp, synthetic construct
  misc_feature 1..80: note = Synthetic: >NC_003310.1-cand-89850-89929
  source 1..80: mol_type = other DNA
tgtatgtattggagccattgtcttaactataatggtgcttgtatcgaaaaactttaatgcggataacggaagctcttcgc

SEQ ID NO: 23132 - DNA, 80 bp, synthetic construct
  misc_feature 1..80: note = Synthetic: >NC_003310.1-cand-90570-90649
  source 1..80: mol_type = other DNA
tttaatcacgtcagcgacatctaaattaaatataggtatatttattccacacacactacaatatgccacaccatcttcat

SEQ ID NO: 23133 - DNA, 80 bp, synthetic construct
  misc_feature 1..80: note = Synthetic: >NC_003310.1-cand-91120-91199
  source 1..80: mol_type = other DNA
ccgatgtgtctacataaatacgcaaagtctaaatattttttagagaatcttagttggtccaaattcttttccaagtacgg

SEQ ID NO: 23134 - DNA, 80 bp, synthetic construct
  misc_feature 1..80: note = Synthetic: >NC_003310.1-cand-91430-91509
  source 1..80: mol_type = other DNA
aactcgtactaatctcttctttaacagtctgttcaaatttatatcctatatacgaaaaaatagcaaccagtgtttgatca

SEQ ID NO: 23135 - DNA, 80 bp, synthetic construct
  misc_feature 1..80: note = Synthetic: >NC_003310.1-cand-91510-91589
  source 1..80: mol_type = other DNA
tccgcgtcaatattctgttctatcgtagtgtatagcaatcttatatcttcttctgtgatagtcgatacgttataaaggtt

SEQ ID NO: 23136 - DNA, 80 bp, synthetic construct
  misc_feature 1..80: note = Synthetic: >NC_003310.1-cand-91590-91669
  source 1..80: mol_type = other DNA
gataacgaaaatatttttatttcgtgaaataaagtcattgtaggattttggacttatattcgtgtctagtagatatgatt

SEQ ID NO: 23137 - DNA, 80 bp, synthetic construct
  misc_feature 1..80: note = Synthetic: >NC_003310.1-cand-91670-91749
  source 1..80: mol_type = other DNA
ttatttttggaatgatctcaattaaaatagtctctttagagtccatttaaagttacaaacaactaggaaattggtttatg

SEQ ID NO: 23138 - DNA, 80 bp, synthetic construct
  misc_feature 1..80: note = Synthetic: >NC_003310.1-cand-91830-91909
  source 1..80: mol_type = other DNA
gtgttaattgaaagcgagaaataatcataaattatttcattatcgcgatatccgttaagtttgtatcgtaatggcgtggt

SEQ ID NO: 23139 - DNA, 80 bp, synthetic construct
  misc_feature 1..80: note = Synthetic: >NC_003310.1-cand-91990-92069
  source 1..80: mol_type = other DNA
aaagataaaaacgaggatattttcccggaagatgtaataattccatctactaagcccaaaaccaaacgaaccactactcc

SEQ ID NO: 23140 - DNA, 80 bp, synthetic construct
  misc_feature 1..80: note = Synthetic: >NC_003310.1-cand-92070-92149
  source 1..80: mol_type = other DNA
tcgtaaaccagcggctactaaaagatcaaccaaaaaggataaagaaaaggaggaagtggaagaagtagaagaagtagtta

SEQ ID NO: 23141 - DNA, 80 bp, synthetic construct
  misc_feature 1..80: note = Synthetic: >NC_003310.1-cand-92270-92349
  source 1..80: mol_type = other DNA
aacctatggtacaagttgaagctggtaaagtaaatcatagtgctagaagcgatctctctgacctaaaggtggctaccgac

SEQ ID NO: 23142 - DNA, 80 bp, synthetic construct
  misc_feature 1..80: note = Synthetic: >NC_003310.1-cand-93430-93509
  source 1..80: mol_type = other DNA
ttcgatgaattcctatctatagtcgtagatcacgttaaatcatctacggatggatgataatagatctttacacaaataat

SEQ ID NO: 23143 - DNA, 80 bp, synthetic construct
  misc_feature 1..80: note = Synthetic: >NC_003310.1-cand-93510-93589
  source 1..80: mol_type = other DNA
tacaagaccgataaatggaaatggataaacggatgaaatctctcgctatgacagctttcttcggagagctaaacacgtta

SEQ ID NO: 23144 - DNA, 80 bp, synthetic construct
  misc_feature 1..80: note = Synthetic: >NC_003310.1-cand-93590-93669
  source 1..80: mol_type = other DNA
gatattatggcattgataatgtctatatttaaacgccatccaaacaataccattttttcagtggataaggatggtcaatt

SEQ ID NO: 23145 - DNA, 80 bp, synthetic construct
  misc_feature 1..80: note = Synthetic: >NC_003310.1-cand-93670-93749
  source 1..80: mol_type = other DNA
tatgattgatttcgaatacgataattataaggcttctcaatatttggatctgaccctcactccgatatctggaaatgaat

SEQ ID NO: 23146 - DNA, 80 bp, synthetic construct
  misc_feature 1..80: note = Synthetic: >NC_003310.1-cand-93830-93909
  source 1..80: mol_type = other DNA
actactccccgtcttaaacgatttataaaaaaataccgcaatagatcatatactcgtatcagtcgagatacagaaaagct

SEQ ID NO: 23147 - DNA, 80 bp, synthetic construct
  misc_feature 1..80: note = Synthetic: >NC_003461.1-cand-4540-4619
  source 1..80: mol_type = other DNA
gcagtttgctatcctttaatggatgtaaatccacatatgaatctagtcatctgggcagcttcagtagaaatcacaagtgt

SEQ ID NO: 23148 - DNA, 80 bp, synthetic construct
  misc_feature 1..80: note = Synthetic: >NC_003461.1-cand-4620-4699
  source 1..80: mol_type = other DNA
cgatgctgtgttccaacctgcaattccgaaagaatttcgctattacccaaatgttgttgcaaaaagcatcgggaaaatca

SEQ ID NO: 23149 - DNA, 80 bp, synthetic construct
  misc_feature 1..80: note = Synthetic: >NC_003461.1-cand-4700-4779
  source 1..80: mol_type = other DNA
ggaggatataagtctacactcctcaataatgacacccattagctctaaatcgtaccattaatcaaatacagatcaattcg

SEQ ID NO: 23150 - DNA, 80 bp, synthetic construct
  misc_feature 1..80: note = Synthetic: >NC_003461.1-cand-4780-4859
  source 1..80: mol_type = other DNA
atacaatcagttcaaataagaaaaacgtagggacaaagtcctctaccaacatcaaggaagacaagagtctcaaaaagctc

SEQ ID NO: 23151 - DNA, 80 bp, synthetic construct
  misc_feature 1..80: note = Synthetic: >NC_003461.1-cand-4860-4939
  source 1..80: mol_type = other DNA
agcctaagcagagagaaaaacaacaacacaaagaaagaaaaggacaagatcacaaacaagaacaaaagcaaaaacaaaaa

SEQ ID NO: 23152 - DNA, 80 bp, synthetic construct
  misc_feature 1..80: note = Synthetic: >NC_003461.1-cand-4940-5019
  source 1..80: mol_type = other DNA
caagaacaaaaaagggaagaaaaacaaaagtatacacaaaaaccaaaaaagaaaaaaggccagagacaaaaacggaggca

SEQ ID NO: 23153 - DNA, 80 bp, synthetic construct
  misc_feature 1..80: note = Synthetic: >NC_003461.1-cand-5020-5099
  source 1..80: mol_type = other DNA
agaacaaaaatttaaacaaaaacagaatttaaattcataataaacaccaagatagagacaaaaatgcaaaaatcagagat

SEQ ID NO: 23154 - DNA, 80 bp, synthetic construct
  misc_feature 1..80: note = Synthetic: >NC_003461.1-cand-5090-5169
  source 1..80: mol_type = other DNA
aatcagagatcctcttcttagtatactcaagcttgctattatcttcatcattatgtcaaattccggtagaaaaactttca

SEQ ID NO: 23155 - DNA, 80 bp, synthetic construct
  misc_feature 1..80: note = Synthetic: >NC_003461.1-cand-5180-5259
  source 1..80: mol_type = other DNA
ttataatcaatgagggcaaattacttaaaatagcaggatcttatgaatctagatacatagtgttaagcttggtaccttca

SEQ ID NO: 23156 - DNA, 80 bp, synthetic construct
  misc_feature 1..80: note = Synthetic: >NC_003461.1-cand-5260-5339
  source 1..80: mol_type = other DNA
attgacctacaagatggatgtggaacaactcaaattattcaatacaagaatttattaaatagacttctaattcctctgaa

SEQ ID NO: 23157 - DNA, 80 bp, synthetic construct
  misc_feature 1..80: note = Synthetic: >NC_003461.1-cand-5340-5419
  source 1..80: mol_type = other DNA
ggatgccttggatcttcaggaatccctgataacaataactaatgacaccactgtgacaaatgataatccacaaactagat

SEQ ID NO: 23158 - DNA, 80 bp, synthetic construct
  misc_feature 1..80: note = Synthetic: >NC_003461.1-cand-5420-5499
  source 1..80: mol_type = other DNA
tctttggtgctgtcattggtaccatagcactaggagtagccacagctgctcaaataactgcgggcattgcattagctgaa

SEQ ID NO: 23159 - DNA, 80 bp, synthetic construct
  misc_feature 1..80: note = Synthetic: >NC_003461.1-cand-5500-5579
  source 1..80: mol_type = other DNA
gcacgagaagccaggaaggacatagcactaataaaagattccatagtcaagacacacaattctgtagaactcattcaaag

SEQ ID NO: 23160 - DNA, 80 bp, synthetic construct
  misc_feature 1..80: note = Synthetic: >NC_003461.1-cand-5580-5659
  source 1..80: mol_type = other DNA
aggtataggagaacagataattgcattaaagacattacaagattttgtaaatgacgagataagacctgcaataggagaac

SEQ ID NO: 23161 - DNA, 80 bp, synthetic construct
  misc_feature 1..80: note = Synthetic: >NC_003461.1-cand-5650-5729
  source 1..80: mol_type = other DNA
ataggagaactaaggtgtgagactacggcattgaaactagggatcaagctcacccaacactactctgaattagcaacagc

SEQ ID NO: 23162 - DNA, 80 bp, synthetic construct
  misc_feature 1..80: note = Synthetic: >NC_003461.1-cand-5730-5809
  source 1..80: mol_type = other DNA
attcagctccaatcttgggactataggagaaaaaagtcttaccttgcaggcattatcatctctctactctgctaatataa

SEQ ID NO: 23163 - DNA, 80 bp, synthetic construct
  misc_feature 1..80: note = Synthetic: >NC_003908.1-cand-2850-2929
  source 1..80: mol_type = other DNA
tgttacttacacgcacagaaaaacgcattgtctggaagacgctagctggtgatccctggataaagacacttacagctaaa

SEQ ID NO: 23164 - DNA, 80 bp, synthetic construct
  misc_feature 1..80: note = Synthetic: >NC_003908.1-cand-2970-3049
  source 1..80: mol_type = other DNA
gcgaacacgacgccattatggcacgcgttcttgataagccgcagacagctgatgtgttccagaataaggtgaacgtctgc

SEQ ID NO: 23165 - DNA, 80 bp, synthetic construct
  misc_feature 1..80: note = Synthetic: >NC_003908.1-cand-3050-3129
  source 1..80: mol_type = other DNA
tgggcgaaggctttagagccagtcttggccacggccaacattgtgctgacgagacagcagtgggagacgttgcacccatt

SEQ ID NO: 23166 - DNA, 80 bp, synthetic construct
  misc_feature 1..80: note = Synthetic: >NC_003908.1-cand-3130-3209
  source 1..80: mol_type = other DNA
caagcatgacagagcgtactcacctgaaatggcactgaacttcttttgcaccaggttctttggagtagacctggacagtg

SEQ ID NO: 23167 - DNA, 80 bp, synthetic construct
  misc_feature 1..80: note = Synthetic: >NC_003908.1-cand-3210-3289
  source 1..80: mol_type = other DNA
ggttattttccgctcctaccgtcgcacttacttacagggatcagcactgggataactcgccagggaagaacatgtatggg

SEQ ID NO: 23168 - DNA, 80 bp, synthetic construct
  misc_feature 1..80: note = Synthetic: >NC_003908.1-cand-3290-3369
  source 1..80: mol_type = other DNA
cttaatagagaggtagcaaaggagttgtcacggcgatatccgtgcatcacaaaagcggttgacacaggcagggtagctga

SEQ ID NO: 23169 - DNA, 80 bp, synthetic construct
  misc_feature 1..80: note = Synthetic: >NC_003908.1-cand-3370-3449
  source 1..80: mol_type = other DNA
tataaggaataataccatcaaggactactctccaacaattaatgtggttccattaaatcgccggttgccccactcgttga

SEQ ID NO: 23170 - DNA, 80 bp, synthetic construct
  misc_feature 1..80: note = Synthetic: >NC_003908.1-cand-3450-3529
  source 1..80: mol_type = other DNA
tcgttgaccacaaaggacagggtacaactgatcacagcggattcctatctaagatgaagggcaaatctgtgttggtgatc

SEQ ID NO: 23171 - DNA, 80 bp, synthetic construct
  misc_feature 1..80: note = Synthetic: >NC_003908.1-cand-3530-3609
  source 1..80: mol_type = other DNA
ggcgatcctatcagcattccagggaagaaagtagagtccatgggtccattgcccactaataccatcaggtgtgatctcga

SEQ ID NO: 23172 - DNA, 80 bp, synthetic construct
  misc_feature 1..80: note = Synthetic: >NC_003908.1-cand-3610-3689
  source 1..80: mol_type = other DNA
tttgggaatacctagccatgtcggtaaatatgacattatctttgtcaatgttaggaccccgtacaggaaccatcactacc

SEQ ID NO: 23173 - DNA, 80 bp, synthetic construct
  misc_feature 1..80: note = Synthetic: >NC_003908.1-cand-3690-3769
  source 1..80: mol_type = other DNA
aacagtgcgaggatcacgctatccaccacagcatgctaacgtgtaaggctgtccaccacctgaacactggcggaacatgt

SEQ ID NO: 23174 - DNA, 80 bp, synthetic construct
  misc_feature 1..80: note = Synthetic: >NC_003908.1-cand-3770-3849
  source 1..80: mol_type = other DNA
gtggctatagggtatgggcttgctgatcgcgcaaccgagaatatcatcactgcggtggcacgctcatttaggtttacccg

SEQ ID NO: 23175 - DNA, 80 bp, synthetic construct
  misc_feature 1..80: note = Synthetic: >NC_003908.1-cand-3850-3929
  source 1..80: mol_type = other DNA
tgtctgtcagcctaagaacactgccgaaaatactgaggttctcttcgtgttcttcggcaaggacaacggcaaccacacac

SEQ ID NO: 23176 - DNA, 80 bp, synthetic construct
  misc_feature 1..80: note = Synthetic: >NC_003908.1-cand-3930-4009
  source 1..80: mol_type = other DNA
atgaccaggacagactcggtgtagtgcttgacaacatctatcaagggtcaaccaggtacgaggcagggagagctccagcg

SEQ ID NO: 23177 - DNA, 80 bp, synthetic construct
  misc_feature 1..80: note = Synthetic: >NC_003908.1-cand-4010-4089
  source 1..80: mol_type = other DNA
tacagagtgatcagaggtgacattagcaagagcgctgaccaagctatcgttaatgctgctaatagcaaaggtcaaccagg

SEQ ID NO: 23178 - DNA, 80 bp, synthetic construct
  misc_feature 1..80: note = Synthetic: >NC_003908.1-cand-4090-4169
  source 1..80: mol_type = other DNA
ttccggagtgtgcggtgcactgtaccgaaaatggccggctgcttttgatagacagccaatagctgtcgggacggctagac

SEQ ID NO: 23179 - DNA, 80 bp, synthetic construct
  misc_feature 1..80: note = Synthetic: >NC_003908.1-cand-9240-9319
  source 1..80: mol_type = other DNA
cacgcctacagtcacgaagtggttcaaaggcatcaccctccacctgactgcaatgcgaccaacattgctgacaacgagaa

SEQ ID NO: 23180 - DNA, 80 bp, synthetic construct
  misc_feature 1..80: note = Synthetic: >NC_003908.1-cand-9420-9499
  source 1..80: mol_type = other DNA
ccatgaaccagtcagagtctgggcccaggagtcggcaccaggcgacccacatggatggccgcatgagatcatcatccact

SEQ ID NO: 23181 - DNA, 80 bp, synthetic construct
  misc_feature 1..80: note = Synthetic: >NC_003908.1-cand-9470-9549
  source 1..80: mol_type = other DNA
atggatggccgcatgagatcatcatccactattatcatcggcatccagtctacactgtcattgtgctgtgtggtgtcgct

SEQ ID NO: 23182 - DNA, 80 bp, synthetic construct
  misc_feature 1..80: note = Synthetic: >NC_003908.1-cand-9550-9629
  source 1..80: mol_type = other DNA
cttgctatcctggtaggcactgcatcatcagcagcttgcatcgccaaagcaagaagagactgcctgacgccatacgcgct

SEQ ID NO: 23183 - DNA, 80 bp, synthetic construct
  misc_feature 1..80: note = Synthetic: >NC_003908.1-cand-9630-9709
  source 1..80: mol_type = other DNA
tgcaccgaacgcaacggtacccacagcattagcggttttgtgctgcattcggccaaccaacgctgaaacatttggagaaa

SEQ ID NO: 23184 - DNA, 80 bp, synthetic construct
  misc_feature 1..80: note = Synthetic: >NC_003908.1-cand-9710-9789
  source 1..80: mol_type = other DNA
ctttgaaccatctgtggtttaacaaccaaccgtttctctgggcacagttgtgcattcctctggcagcgcttgttattctg

SEQ ID NO: 23185 - DNA, 80 bp, synthetic construct
  misc_feature 1..80: note = Synthetic: >NC_003908.1-cand-9760-9839
  source 1..80: mol_type = other DNA
tgcattcctctggcagcgcttgttattctgttccgctgcttttcatgctgcatgccttttttattggttgcaggcgtctg

SEQ ID NO: 23186 - DNA, 80 bp, synthetic construct
  misc_feature 1..80: note = Synthetic: >NC_003908.1-cand-9900-9979
  source 1..80: mol_type = other DNA
gtataaggcgttggtcgaacgcgcaggttacgcgccacttaacctggagatcacggtcgtctcatcggaattaacacctt

SEQ ID NO: 23187 - DNA, 80 bp, synthetic construct
  misc_feature 1..80: note = Synthetic: >NC_003908.1-cand-9950-10029
  source 1..80: mol_type = other DNA
tcacggtcgtctcatcggaattaacaccttcaactaacaaggagtacgtgacctgcaaattccacacagtcattccttca

SEQ ID NO: 23188 - DNA, 80 bp, synthetic construct
  misc_feature 1..80: note = Synthetic: >NC_003908.1-cand-10030-10109
  source 1..80: mol_type = other DNA
ccacaagttaaatgctgcgggtccctcgagtgcaaggcatcctcaaaggcggattacacatgccgcgtttttggcggtgt

SEQ ID NO: 23189 - DNA, 80 bp, synthetic construct
  misc_feature 1..80: note = Synthetic: >NC_003908.1-cand-10130-10209
  source 1..80: mol_type = other DNA
gcgcacaatgcttctgtgacagtgagaacacacaactgagtgaggcgtacgtcgagttcgctccagactgcactatagat

SEQ ID NO: 23190 - DNA, 80 bp, synthetic construct
  misc_feature 1..80: note = Synthetic: >NC_003908.1-cand-10190-10269
  source 1..80: mol_type = other DNA
ctccagactgcactatagatcacgcagtcgcactaaaagttcacacagctgctctgaaagtcggcctgcgtatagtatac

SEQ ID NO: 23191 - DNA, 80 bp, synthetic construct
  misc_feature 1..80: note = Synthetic: >NC_003908.1-cand-10270-10349
  source 1..80: mol_type = other DNA
ggcaacaccaccgcgcacctggatacgtttgtcaatggcgtcacgccaggttcctcacgggacctgaaggtcatagcagg

SEQ ID NO: 23192 - DNA, 80 bp, synthetic construct
  misc_feature 1..80: note = Synthetic: >NC_003908.1-cand-10320-10399
  source 1..80: mol_type = other DNA
ttcctcacgggacctgaaggtcatagcagggccgatatcagccgctttttcaccctttgaccataaggtcgtcatcagaa

SEQ ID NO: 23193 - DNA, 80 bp, synthetic construct
  misc_feature 1..80: note = Synthetic: >NC_003908.1-cand-10430-10509
  source 1..80: mol_type = other DNA
agtatggagctatgaaaccaggagcgttcggcgatattcaagcatcctcgcttgatgctacagacatagtagcccgcact

SEQ ID NO: 23194 - DNA, 80 bp, synthetic construct
  misc_feature 1..80: note = Synthetic: >NC_003908.1-cand-10510-10589
  source 1..80: mol_type = other DNA
gacatacggctgctgaagccttctgtcaagaacatccacgtcccctacacccaagcagtatcagggtatgaaatgtggaa

SEQ ID NO: 23195 - DNA, 80 bp, synthetic construct
  misc_feature 1..80: note = Synthetic: >NC_005079.1-cand-6060-6139
  source 1..80: mol_type = other DNA
taaagaccttcaacccctttattttattgcacaaagataagacactaaggtaatgtttttctatgttagagtgtgtggtg

SEQ ID NO: 23196 - DNA, 80 bp, synthetic construct
  misc_feature 1..80: note = Synthetic: >NC_005079.1-cand-6140-6219
  source 1..80: mol_type = other DNA
ctaaactgctggtccactgtggctacaccatcggtcctttcaacacagctaaaggtcacattgtaaacaatttccatcaa

SEQ ID NO: 23197 - DNA, 80 bp, synthetic construct
  misc_feature 1..80: note = Synthetic: >NC_005079.1-cand-6220-6299
  source 1..80: mol_type = other DNA
cttattgttacaaaagggacagcttgacacatcactatctagatgagcacctaagctcgatagggactctaataattccc

SEQ ID NO: 23198 - DNA, 80 bp, synthetic construct
  misc_feature 1..80: note = Synthetic: >NC_005079.1-cand-6300-6379
  source 1..80: mol_type = other DNA
ttctgtcagtcaatttgaatttgcccagacctttgctgaagacctcatccttgaaccacaatttaagtttgatgagttct

SEQ ID NO: 23199 - DNA, 80 bp, synthetic construct
  misc_feature 1..80: note = Synthetic: >NC_005079.1-cand-6380-6459
  source 1..80: mol_type = other DNA
tccctcactgtcgactctctaatgtctcctttcaaaccaataaacaatgactcattcaacctctcatcataatctaaaga

SEQ ID NO: 23200 - DNA, 80 bp, synthetic construct
  misc_feature 1..80: note = Synthetic: >NC_005079.1-cand-6460-6539
  source 1..80: mol_type = other DNA
attccttttcaaatgttctaggttttccaaccccaagctttgattcttaacgtttgatagactatgaattaatcgttgat

SEQ ID NO: 23201 - DNA, 80 bp, synthetic construct
  misc_feature 1..80: note = Synthetic: >NC_005079.1-cand-6540-6619
  source 1..80: mol_type = other DNA
attcctggtcctcaatatcaatctcaagcatggatttggatgctttcaaaatcccgataagcaaccatcttattctttca

SEQ ID NO: 23202 - DNA, 80 bp, synthetic construct
  misc_feature 1..80: note = Synthetic: >NC_005079.1-cand-6620-6699
  source 1..80: mol_type = other DNA
atcacccaatcagcaacaaatctattgttgtaattgctcctgccatcaacaataggaaccaaagtcacgcccgacttttg

SEQ ID NO: 23203 - DNA, 80 bp, synthetic construct
  misc_feature 1..80: note = Synthetic: >NC_005079.1-cand-6700-6779
  source 1..80: mol_type = other DNA
caggtcatgcttcaggtttaaaagctttgacatgtcagctttccatttcttctcgaactcatctgggtttactcttacaa

SEQ ID NO: 23204 - DNA, 80 bp, synthetic construct
  misc_feature 1..80: note = Synthetic: >NC_005079.1-cand-6740-6819
  source 1..80: mol_type = other DNA
ttccatttcttctcgaactcatctgggtttactcttacaaaggtctccagcagaattagggttttcccagttaatttgaa

SEQ ID NO: 23205 - DNA, 80 bp, synthetic construct
  misc_feature 1..80: note = Synthetic: >NC_005079.1-cand-6860-6939
  source 1..80: mol_type = other DNA
ccattgtcagatagtattacatctacgaatctttgatcagtgtttgcctggcaggcgtgtgcttcacaggactcaagttc

SEQ ID NO: 23206 - DNA, 80 bp, synthetic construct
  misc_feature 1..80: note = Synthetic: >NC_005079.1-cand-6940-7019
  source 1..80: mol_type = other DNA
aacaagactagagagcaacttgaagccttctgtgagcaagggactgggatgcacctgagataggaatgtgaccttttgat

SEQ ID NO: 23207 - DNA, 80 bp, synthetic construct
  misc_feature 1..80: note = Synthetic: >NC_005079.1-cand-7020-7099
  source 1..80: mol_type = other DNA
gtccaaactcgcacctctcaggaatgtgctttctaataagccctttcaactcttggacatattcatccatggccaagtgt

SEQ ID NO: 23208 - DNA, 80 bp, synthetic construct
  misc_feature 1..80: note = Synthetic: >NC_005080.1-cand-0-79
  source 1..80: mol_type = other DNA
acagtggatcctaggcgtaacttcatcattaaatctcagattctgctctgagtgtgacttactgcgaagaggcagacaaa

SEQ ID NO: 23209 - DNA, 80 bp, synthetic construct
  misc_feature 1..80: note = Synthetic: >NC_005080.1-cand-100-179
  source 1..80: mol_type = other DNA
tccaagtctaaccagccagactcctcaagagccacacagccagccgcagaatttaggagggtagctcacagcagtctata

SEQ ID NO: 23210 - DNA, 80 bp, synthetic construct
  misc_feature 1..80: note = Synthetic: >NC_005080.1-cand-160-239
  source 1..80: mol_type = other DNA
gtagctcacagcagtctatatggtagatataactgtaagtgctgctggtttgctgataccaatttgataacctgtaatga

SEQ ID NO: 23211 - DNA, 80 bp, synthetic construct
  misc_feature 1..80: note = Synthetic: >NC_005080.1-cand-4110-4189
  source 1..80: mol_type = other DNA
tggagatagataaacagcatcacataactctttatacacatcagacctgagcacatctggatcaaaatccttcacctcat

SEQ ID NO: 23212 - DNA, 80 bp, synthetic construct
  misc_feature 1..80: note = Synthetic: >NC_005080.1-cand-4150-4229
  source 1..80: mol_type = other DNA
tcagacctgagcacatctggatcaaaatccttcacctcatgcattgacacctctgctttaatctctctcaacactccaaa

SEQ ID NO: 23213 - DNA, 80 bp, synthetic construct
  misc_feature 1..80: note = Synthetic: >NC_005080.1-cand-4270-4349
  source 1..80: mol_type = other DNA
gatagattctttgatttcaacttggtgatctcaacttttgtcccctcactattagccatcttggctagtgtcatttgtac

SEQ ID NO: 23214 - DNA, 80 bp, synthetic construct
  misc_feature 1..80: note = Synthetic: >NC_005080.1-cand-4350-4429
  source 1..80: mol_type = other DNA
gtcatttctaataccctcaaaggcccttacttgatcctctgttaaactctcatacatcactgataattcttcttgattgg

SEQ ID NO: 23215 - DNA, 80 bp, synthetic construct
  misc_feature 1..80: note = Synthetic: >NC_005080.1-cand-4430-4509
  source 1..80: mol_type = other DNA
ttctggttcttgaaccggtgctcacaagacctgttagattttttaatattaagtagtccatggaatcaggatcaagatta

SEQ ID NO: 23216 - DNA, 80 bp, synthetic construct
  misc_feature 1..80: note = Synthetic: >NC_005080.1-cand-4510-4589
  source 1..80: mol_type = other DNA
tacctgccttttgttttaaacctctcagccatagtagaaacgcatgttgaaacaagtttctccttatcataaacagaaag

SEQ ID NO: 23217 - DNA, 80 bp, synthetic construct
  misc_feature 1..80: note = Synthetic: >NC_005080.1-cand-4620-4699
  source 1..80: mol_type = other DNA
taccacacttttattgcttgacagatccagagctgtgctagtgatgttaggcctgtagggattgcttttcagttcacctg

SEQ ID NO: 23218 - DNA, 80 bp, synthetic construct
  misc_feature 1..80: note = Synthetic: >NC_005080.1-cand-4670-4749
  source 1..80: mol_type = other DNA
gcctgtagggattgcttttcagttcacctgtaactttaagtcttcctctattgaagagagaaatgcagaaggacaaaatc

SEQ ID NO: 23219 - DNA, 80 bp, synthetic construct
  misc_feature 1..80: note = Synthetic: >NC_005080.1-cand-4750-4829
  source 1..80: mol_type = other DNA
tctttacacactcctggaatttgagtatctgaggaagtcttagcctctttggaaaagaatctgtccaatcctcttatcat

SEQ ID NO: 23220 - DNA, 80 bp, synthetic construct
  misc_feature 1..80: note = Synthetic: >NC_005080.1-cand-4870-4949
  source 1..80: mol_type = other DNA
gggtttacaacaacacaatcaaacttgactttgggctcaataaacttctcaaaacactttatttgatctgtcaggcgatc

SEQ ID NO: 23221 - DNA, 80 bp, synthetic construct
  misc_feature 1..80: note = Synthetic: >NC_005080.1-cand-4920-4999
  source 1..80: mol_type = other DNA
aaaacactttatttgatctgtcaggcgatcaggtgtctctttggttaccaagtgacacagataactaacatttaatagat

SEQ ID NO: 23222 - DNA, 80 bp, synthetic construct
  misc_feature 1..80: note = Synthetic: >NC_005080.1-cand-5000-5079
  source 1..80: mol_type = other DNA
atttaaaccttcttgcaaagtaaagatctgcatcttccccttcacccaaaattgtctggaaaagttccacagccatcctc

SEQ ID NO: 23223 - DNA, 80 bp, synthetic construct
  misc_feature 1..80: note = Synthetic: >NC_005080.1-cand-5080-5159
  source 1..80: mol_type = other DNA
tgaatcagcacctctgatccagacatgcagtcgacccttaactttgacatcaaatccacatgatggatttgatttgcata

SEQ ID NO: 23224 - DNA, 80 bp, synthetic construct
  misc_feature 1..80: note = Synthetic: >NC_005080.1-cand-5130-5209
  source 1..80: mol_type = other DNA
caaatccacatgatggatttgatttgcatatgccatcaagaaatatcttagaccttgtaaaaatgtctggttccttttgg

SEQ ID NO: 23225 - DNA, 80 bp, synthetic construct
  misc_feature 1..80: note = Synthetic: >NC_005080.1-cand-5240-5319
  source 1..80: mol_type = other DNA
atcttaatattggccttgtcattgtcatgagttcgtggctaaaatccaaccagctggtcatttcctcacacatttcaatt

SEQ ID NO: 23226 - DNA, 80 bp, synthetic construct
  misc_feature 1..80: note = Synthetic: >NC_005080.1-cand-5320-5399
  source 1..80: mol_type = other DNA
aacacatcctccgaaaatataggcaggaaaaatctctttggatcacagtaaaaagagccttgttcttccaataccccatt

SEQ ID NO: 23227 - DNA, 80 bp, synthetic construct
  misc_feature 1..80: note = Synthetic: >NC_005081.1-cand-2210-2289
  source 1..80: mol_type = other DNA
gtcgagtttccccactgcctctctgatgacagcttcttgtatctctgtcaagttagccaatctcaaattctgaccgtttt

SEQ ID NO: 23228 - DNA, 80 bp, synthetic construct
  misc_feature 1..80: note = Synthetic: >NC_005081.1-cand-2260-2339
  source 1..80: mol_type = other DNA
agttagccaatctcaaattctgaccgtttttttccggctgtctaggaccagcaactggtttccttgtcagatcaatactt

SEQ ID NO: 23229 - DNA, 80 bp, synthetic construct
  misc_feature 1..80: note = Synthetic: >NC_005081.1-cand-2340-2419
  source 1..80: mol_type = other DNA
gtgttgtcccatgacctgcctgtgatttgtgatctagaaccaatataaggccaaccatcgccagaaagacaaagtttgta

SEQ ID NO: 23230 - DNA, 80 bp, synthetic construct
  misc_feature 1..80: note = Synthetic: >NC_005081.1-cand-2420-2499
  source 1..80: mol_type = other DNA
caaaaggttttcataaggatttctattgcctggtttctcatcaataaacatgccttctcttcgtttaacctgaatggttg

SEQ ID NO: 23231 - DNA, 80 bp, synthetic construct
  misc_feature 1..80: note = Synthetic: >NC_005081.1-cand-2530-2609
  source 1..80: mol_type = other DNA
tgactctgattgtttccaacatgtttccaccatcaagaatagatgctccagcctttactgcagctgaaagactgaagttg

SEQ ID NO: 23232 - DNA, 80 bp, synthetic construct
  misc_feature 1..80: note = Synthetic: >NC_005081.1-cand-2580-2659
  source 1..80: mol_type = other DNA
gcctttactgcagctgaaagactgaagttgtaaccagaaatattgatggagctttcatctttagtcacaatctgaaggca

SEQ ID NO: 23233 - DNA, 80 bp, synthetic construct
  misc_feature 1..80: note = Synthetic: >NC_005081.1-cand-2660-2739
  source 1..80: mol_type = other DNA
gtcatgttcctgagtcagtctgtcaaggtcacttaagtttggatacttcacagtgtatagaagcccaagtgaggttaaag

SEQ ID NO: 23234 - DNA, 80 bp, synthetic construct
  misc_feature 1..80: note = Synthetic: >NC_005081.1-cand-2740-2819
  source 1..80: mol_type = other DNA
cttgtatgacactgttcattgtctcacctccttgaacagtcatgcatgcaattgtcaatgcaggaacagagccaaactga

SEQ ID NO: 23235 - DNA, 80 bp, synthetic construct
  misc_feature 1..80: note = Synthetic: >NC_005081.1-cand-2820-2899
  source 1..80: mol_type = other DNA
ttgtttagctttgaagggtctttaacatcccatatcctcaccacaccatttcccccagtcccttgctgttgaaatcccag

SEQ ID NO: 23236 - DNA, 80 bp, synthetic construct
  misc_feature 1..80: note = Synthetic: >NC_005081.1-cand-2900-2979
  source 1..80: mol_type = other DNA
tgttctcaatatctctgatcttttagcaagttgtgactgggacaagttacccatgtaaaccccctgagagcctgtctctg

SEQ ID NO: 23237 - DNA, 80 bp, synthetic construct
  misc_feature 1..80: note = Synthetic: >NC_005081.1-cand-2980-3059
  source 1..80: mol_type = other DNA
ctcttcttatcttgttttttaatttctcaaggtcagacgccaactccatcagttcatccctccccagatctcccaccttg

SEQ ID NO: 23238 - DNA, 80 bp, synthetic construct
  misc_feature 1..80: note = Synthetic: >NC_005081.1-cand-3060-3139
  source 1..80: mol_type = other DNA
aaaactgtgtttcgttgaacactcctcatggacatgagtctgtcaacctctttattcaggtccctcaacttattgaggtc

SEQ ID NO: 23239 - DNA, 80 bp, synthetic construct
  misc_feature 1..80: note = Synthetic: >NC_005081.1-cand-3140-3219
  source 1..80: mol_type = other DNA
ttcttccccctttttagtctttctgagtgcccgctgcacctgtgccacttggttgaagtcgatgctgtcagcaattagct

SEQ ID NO: 23240 - DNA, 80 bp, synthetic construct
  misc_feature 1..80: note = Synthetic: >NC_005081.1-cand-3230-3309
  source 1..80: mol_type = other DNA
caaaacatctgacttgacagtctgagtgaattggctcaaacctctccttaaggactgagtccatctaaagcttggaacct

SEQ ID NO: 23241 - DNA, 80 bp, synthetic construct
  misc_feature 1..80: note = Synthetic: >NC_005081.1-cand-3320-3399
  source 1..80: mol_type = other DNA
tgccatgccagaagttctggtgattttgatctagaatagagttgctcagtgaaagtgttagacactatgcctaggatcca

SEQ ID NO: 23242 - DNA, 80 bp, synthetic construct
  misc_feature 1..80: note = Synthetic: >NC_005082.1-cand-0-79
  source 1..80: mol_type = other DNA
acagtggatcctaggcgtaactttcacgcctataagttgagattttcacaacttgaacccatttacaaacatgggcaatt

SEQ ID NO: 23243 - DNA, 80 bp, synthetic construct
  misc_feature 1..80: note = Synthetic: >NC_005082.1-cand-6510-6589
  source 1..80: mol_type = other DNA
aatctccattgtaggagctcctcttgattctctcagcagatcaataagcaaccatctgaatctttcagtcgcccaatctg

SEQ ID NO: 23244 - DNA, 80 bp, synthetic construct
  misc_feature 1..80: note = Synthetic: >NC_005082.1-cand-6590-6669
  source 1..80: mol_type = other DNA
gcagcaaatctgtgttgtagttgcctctaccgtcaaccacaggaaccagtgtaatacccgttctgtgaatgtcctctttt

SEQ ID NO: 23245 - DNA, 80 bp, synthetic construct
  misc_feature 1..80: note = Synthetic: >NC_005082.1-cand-6670-6749
  source 1..80: mol_type = other DNA
aaactaagcaattttgccatgtcggttttccacttcttttcaaactcttcaggattcacacggacaaatgtttcaaggag

SEQ ID NO: 23246 - DNA, 80 bp, synthetic construct
  misc_feature 1..80: note = Synthetic: >NC_005082.1-cand-6750-6829
  source 1..80: mol_type = other DNA
tatcaatgtcttattgaagaacctgtaaccgtcaggtatcacctttggtagtgtgggtgcaaccaccccattttcagaga

SEQ ID NO: 23247 - DNA, 80 bp, synthetic construct
  misc_feature 1..80: note = Synthetic: >NC_005082.1-cand-6830-6909
  source 1..80: mol_type = other DNA
gtattgtatcaacaaatttctgttcaaagttgcactcacaagaattcttcctgcaggattcaatctcgaccaggcatgat

SEQ ID NO: 23248 - DNA, 80 bp, synthetic construct
  misc_feature 1..80: note = Synthetic: >NC_005082.1-cand-6910-6989
  source 1..80: mol_type = other DNA
aggagcttgaagccctctgttaagaccattggtacttcgacttgagaaagtaatgcctccttctgataagacagttcagg

SEQ ID NO: 23249 - DNA, 80 bp, synthetic construct
  misc_feature 1..80: note = Synthetic: >NC_005082.1-cand-6990-7069
  source 1..80: mol_type = other DNA
tatgtcaggcacttgtcttctgataaaatctttcaaaacaaagactttttcatccattgtcaaatttcgcctaggatcca

SEQ ID NO: 23250 - DNA, 80 bp, synthetic construct
  misc_feature 1..80: note = Synthetic: >NC_005215.1-cand-0-79
  source 1..80: mol_type = other DNA
agtagactccgcacgaagaagcaaacactgaataaaggagatacagaatggtagggtgggtttgcatcttcctcgtggtc

SEQ ID NO: 23251 - DNA, 80 bp, synthetic construct
  misc_feature 1..80: note = Synthetic: >NC_005215.1-cand-80-159
  source 1..80: mol_type = other DNA
cttactactgcaactgctgggctaacacggaatctttatgagttgaagatagaatgtccacatactgtgggtttaggtca

SEQ ID NO: 23252 - DNA, 80 bp, synthetic construct
  misc_feature 1..80: note = Synthetic: >NC_005215.1-cand-160-239
  source 1..80: mol_type = other DNA
gggttacgtgacaggttcagtggaaattacacctattctcttaacgcaggtagctgatctgaagattgagagttcttgta

SEQ ID NO: 23253 - DNA, 80 bp, synthetic construct
  misc_feature 1..80: note = Synthetic: >NC_005215.1-cand-240-319
  source 1..80: mol_type = other DNA
atttcgatttgcatgtcccggctaccactacccaaaaatacaatcaggttgactggaccaaaaaaagttcaactacagaa

SEQ ID NO: 23254 - DNA, 80 bp, synthetic construct
  misc_feature 1..80: note = Synthetic: >NC_005215.1-cand-320-399
  source 1..80: mol_type = other DNA
agcacaaatgcaggtgcaactacatttgaggctaaaacaaaagagataaatttgaaaggcacatgtaatattcctccaac

SEQ ID NO: 23255 - DNA, 80 bp, synthetic construct
  misc_feature 1..80: note = Synthetic: >NC_005215.1-cand-410-489
  source 1..80: mol_type = other DNA
gctgcatataaatcaaggaagacagtaatttgttatgatttagcctgtaatcaaacacattgtcttcctacggtccattt

SEQ ID NO: 23256 - DNA, 80 bp, synthetic construct
  misc_feature 1..80: note = Synthetic: >NC_005215.1-cand-490-569
  source 1..80: mol_type = other DNA
gattgctcctgttcaaacgtgcatgtctgtgcggagctgtatgataggtttgctgtcaagcaggattcaagtgatatatg

SEQ ID NO: 23257 - DNA, 80 bp, synthetic construct
  misc_feature 1..80: note = Synthetic: >NC_005215.1-cand-610-689
  source 1..80: mol_type = other DNA
atgtttcatcccaacacatacaattgcactcacacaacctggtcatacctatgatactatgacattgccagtgacttgtt

SEQ ID NO: 23258 - DNA, 80 bp, synthetic construct
  misc_feature 1..80: note = Synthetic: >NC_005215.1-cand-640-719
  source 1..80: mol_type = other DNA
cacacaacctggtcatacctatgatactatgacattgccagtgacttgttttttagtagctaaaaagttgggaacacagc

SEQ ID NO: 23259 - DNA, 80 bp, synthetic construct
  misc_feature 1..80: note = Synthetic: >NC_005219.1-cand-40-119
  source 1..80: mol_type = other DNA
ggatatggaagtggctagtgatggccagtttagtatggcctgttttgacactgagaaatgtctatgacatgaaaattgag

SEQ ID NO: 23260 - DNA, 80 bp, synthetic construct
  misc_feature 1..80: note = Synthetic: >NC_005219.1-cand-150-229
  source 1..80: mol_type = other DNA
agtgtgataggttatgtagaattaccccccgtgccattggccgacacagcacagatggtgcctgagagttcttgtaacat

SEQ ID NO: 23261 - DNA, 80 bp, synthetic construct
  misc_feature 1..80: note = Synthetic: >NC_005219.1-cand-190-269
  source 1..80: mol_type = other DNA
ccgacacagcacagatggtgcctgagagttcttgtaacatggataatcaccaatcgttgaatacaataacaaaatatacc

SEQ ID NO: 23262 - DNA, 80 bp, synthetic construct
  misc_feature 1..80: note = Synthetic: >NC_005219.1-cand-270-349
  source 1..80: mol_type = other DNA
caagtaagttggagaggaaaggctgatcagtcacagtctagtcaaaattcatttgagacagtgtccactgaagttgactt

SEQ ID NO: 23263 - DNA, 80 bp, synthetic construct
  misc_feature 1..80: note = Synthetic: >NC_005219.1-cand-350-429
  source 1..80: mol_type = other DNA
gaaaggaacatgtgttctaaaacacaaaatggtggaagaatcataccgtagtaggaaatcagtaacctgttacgacctgt

SEQ ID NO: 23264 - DNA, 80 bp, synthetic construct
  misc_feature 1..80: note = Synthetic: >NC_005219.1-cand-430-509
  source 1..80: mol_type = other DNA
cttgcaatagcacttactgcaagccaacactatacatgattgtaccaattcatgcatgcaatatgatgaaaagctgtttg

SEQ ID NO: 23265 - DNA, 80 bp, synthetic construct
  misc_feature 1..80: note = Synthetic: >NC_005219.1-cand-510-589
  source 1..80: mol_type = other DNA
attgcattgggaccatacagagtacaggtggtttatgagagaagttactgtatgacaggagtcctgattgaagggaaatg

SEQ ID NO: 23266 - DNA, 80 bp, synthetic construct
  misc_feature 1..80: note = Synthetic: >NC_005219.1-cand-590-669
  source 1..80: mol_type = other DNA
ctttgtcccagatcaaagtgtggtcagtattatcaagcatgggatctttgatattgcaagtgttcatattgtatgtttct

SEQ ID NO: 23267 - DNA, 80 bp, synthetic construct
  misc_feature 1..80: note = Synthetic: >NC_005219.1-cand-670-749
  source 1..80: mol_type = other DNA
ttgttgcagttaaagggaatacttataaaatttttgaacaggttaagaaatcctttgaatcaacatgcaatgatacagag

SEQ ID NO: 23268 - DNA, 80 bp, synthetic construct
  misc_feature 1..80: note = Synthetic: >NC_005219.1-cand-790-869
  source 1..80: mol_type = other DNA
actctgcaccaatatatgttccaacacttgatgatttcagatccatggaagcatttacaggaatcttcagatcaccacat

SEQ ID NO: 23269 - DNA, 80 bp, synthetic construct
  misc_feature 1..80: note = Synthetic: >NC_005219.1-cand-910-989
  source 1..80: mol_type = other DNA
attctatagtcggacctgccaatgcaaaagttcctcatagtgctagctcagatacattgagcttgattgcctattcaggt

SEQ ID NO: 23270 - DNA, 80 bp, synthetic construct
  misc_feature 1..80: note = Synthetic: >NC_005219.1-cand-990-1069
  source 1..80: mol_type = other DNA
ataccatcttattcttcccttagcatcctaacaagttcaacagaagctaagcatgtattcagccctgggttgttcccaaa

SEQ ID NO: 23271 - DNA, 80 bp, synthetic construct
  misc_feature 1..80: note = Synthetic: >NC_005219.1-cand-1070-1149
  source 1..80: mol_type = other DNA
acttaatcacacaaattgtgataaaagtgccataccactcatatggactgggatgattgatttacctggatactacgaag

SEQ ID NO: 23272 - DNA, 80 bp, synthetic construct
  misc_feature 1..80: note = Synthetic: >NC_005219.1-cand-1110-1189
  source 1..80: mol_type = other DNA
atatggactgggatgattgatttacctggatactacgaagctgtccacccttgtacagttttttgcgtattatcaggtcc

SEQ ID NO: 23273 - DNA, 80 bp, synthetic construct
  misc_feature 1..80: note = Synthetic: >NC_005219.1-cand-1230-1309
  source 1..80: mol_type = other DNA
aacataacctctcccatgtgcttagtgtcaaaacaaaatcgattccggttaacagaacagcaagtgaattttgtgtgtca

SEQ ID NO: 23274 - DNA, 80 bp, synthetic construct
  misc_feature 1..80: note = Synthetic: >NC_005831.2-cand-17640-17719
  source 1..80: mol_type = other DNA
gtaatgaatattgttgttttaaacatgcattgggttgtgattatgtttacaatccgtatgcttttgatatacaacagtgg

SEQ ID NO: 23275 - DNA, 80 bp, synthetic construct
  misc_feature 1..80: note = Synthetic: >NC_005831.2-cand-17730-17809
  source 1..80: mol_type = other DNA
gttccttgagccaaaaccaccacacattctgtaacattcatagaaacgagcatgatgcctctggtgatgctgttatgaca

SEQ ID NO: 23276 - DNA, 80 bp, synthetic construct
  misc_feature 1..80: note = Synthetic: >NC_005831.2-cand-17810-17889
  source 1..80: mol_type = other DNA
cgttgtttggcagtacatgattgttttgtcaaaaatgttgattggactgtaacgtacccctttattgcaaatgagaaatt

SEQ ID NO: 23277 - DNA, 80 bp, synthetic construct
  misc_feature 1..80: note = Synthetic: >NC_005831.2-cand-17890-17969
  source 1..80: mol_type = other DNA
tatcaatggctgtgggcgtaatgtccagggacatgttgttcgtgcagccttgaaattgtataaacctagtgttattcatg

SEQ ID NO: 23278 - DNA, 80 bp, synthetic construct
  misc_feature 1..80: note = Synthetic: >NC_005831.2-cand-17970-18049
  source 1..80: mol_type = other DNA
acattggtaatcctaaaggtgtacgttgtgctgttactgatgccaaatggtactgttatgacaagcaacctgttaatagt

SEQ ID NO: 23279 - DNA, 80 bp, synthetic construct
  misc_feature 1..80: note = Synthetic: >NC_005831.2-cand-18050-18129
  source 1..80: mol_type = other DNA
aatgtcaagttgttggattatgattatgcaacccatggtcaacttgatggtctttgtttattctggaattgtaatgttga

SEQ ID NO: 23280 - DNA, 80 bp, synthetic construct
  misc_feature 1..80: note = Synthetic: >NC_005831.2-cand-18130-18209
  source 1..80: mol_type = other DNA
tatgtatccagaattttcaattgtgtgtcgttttgacacacgtactcgttctgtttttaatttagaaggtgttaatggtg

SEQ ID NO: 23281 - DNA, 80 bp, synthetic construct
  misc_feature 1..80: note = Synthetic: >NC_005831.2-cand-18210-18289
  source 1..80: mol_type = other DNA
gttctctttatgttaacaaacatgcgtttcatacaccagcatatgataaacgtgcttttgttaaattaaaacctatgccc

SEQ ID NO: 23282 - DNA, 80 bp, synthetic construct
  misc_feature 1..80: note = Synthetic: >NC_005831.2-cand-18280-18359
  source 1..80: mol_type = other DNA
acctatgccctttttttactttgatgacagtgattgtgatgttgtgcaagaacaagttaattatgtaccccttcgcgcta

SEQ ID NO: 23283 - DNA, 80 bp, synthetic construct
  misc_feature 1..80: note = Synthetic: >NC_005831.2-cand-18350-18429
  source 1..80: mol_type = other DNA
cttcgcgctagtagttgtgttactcgttgtaatataggtggtgctgtttgttcaaaacatgcaaatttgtatcaaaaata

SEQ ID NO: 23284 - DNA, 80 bp, synthetic construct
  misc_feature 1..80: note = Synthetic: >NC_005831.2-cand-18430-18509
  source 1..80: mol_type = other DNA
tgttgaggcatataatacatttacacaggcaggttttaacatttgggtaccacatagttttgatgtttataatttgtggc

SEQ ID NO: 23285 - DNA, 80 bp, synthetic construct
  misc_feature 1..80: note = Synthetic: >NC_005831.2-cand-18510-18589
  source 1..80: mol_type = other DNA
aaatttttattgaaactaatttacaaagtcttgaaaatatagcatttaatgttgtaaaaaaagggtgttttactggtgtt

SEQ ID NO: 23286 - DNA, 80 bp, synthetic construct
  misc_feature 1..80: note = Synthetic: >NC_005831.2-cand-18590-18669
  source 1..80: mol_type = other DNA
gatggtgagttacctgttgcagttgttaacgacaaagtttttgttcgctatggcgatgttgacaacttggtttttacaaa

SEQ ID NO: 23287 - DNA, 80 bp, synthetic construct
  misc_feature 1..80: note = Synthetic: >NC_005831.2-cand-18670-18749
  source 1..80: mol_type = other DNA
taaaacaacattgcctactaatgttgcttttgaattgtttgcaaaacgaaaaatgggtttaacaccaccattgtctattc

SEQ ID NO: 23288 - DNA, 80 bp, synthetic construct
  misc_feature 1..80: note = Synthetic: >NC_005831.2-cand-18750-18829
  source 1..80: mol_type = other DNA
tcaaaaatctcggtgttgttgctacatataaatttgttttatgggattatgaagctgaaagaccttttacctcatatact

SEQ ID NO: 23289 - DNA, 80 bp, synthetic construct
  misc_feature 1..80: note = Synthetic: >NC_005831.2-cand-18830-18909
  source 1..80: mol_type = other DNA
aagagtgtatgtaaatacactgattttaatgaggatgtttgtgtttgttttgacaatagtattcagggttcgtatgagcg

SEQ ID NO: 23290 - DNA, 80 bp, synthetic construct
  misc_feature 1..80: note = Synthetic: >NC_006213.1-cand-7990-8069
  source 1..80: mol_type = other DNA
aatgctttaatagcaactgcgcattcttctataaaacagggtacgcagatttataaagttttggatacctttttaagctg

SEQ ID NO: 23291 - DNA, 80 bp, synthetic construct
  misc_feature 1..80: note = Synthetic: >NC_006213.1-cand-8070-8149
  source 1..80: mol_type = other DNA
tgctcgtaaaagttgttctattgattcagatgttgatactaagtgtttagctgattctgtcatgtctgctgtatcggcag

SEQ ID NO: 23292 - DNA, 80 bp, synthetic construct
  misc_feature 1..80: note = Synthetic: >NC_006213.1-cand-8150-8229
  source 1..80: mol_type = other DNA
gtcttgaattgacggatgaaagttgtaataacttggtgccaacatatttgaagagtgacaacattgtggcagctgattta

SEQ ID NO: 23293 - DNA, 80 bp, synthetic construct
  misc_feature 1..80: note = Synthetic: >NC_006213.1-cand-8230-8309
  source 1..80: mol_type = other DNA
ggtgttctgattcaaaattctgcaaagcatgtgcagggtaatgttgctaaaatagctggtgtttcctgtatatggtctgt

SEQ ID NO: 23294 - DNA, 80 bp, synthetic construct
  misc_feature 1..80: note = Synthetic: >NC_006213.1-cand-8310-8389
  source 1..80: mol_type = other DNA
ggatgcttttaatcagtttagttctgatttccagcataaattgaagaaagcatgttgtaaaactggtttgaaactgaagc

SEQ ID NO: 23295 - DNA, 80 bp, synthetic construct
  misc_feature 1..80: note = Synthetic: >NC_006213.1-cand-8370-8449
  source 1..80: mol_type = other DNA
aactggtttgaaactgaagcttacttataataagcagatggctaatgtctctgttttaactacaccctttagtcttaaag

SEQ ID NO: 23296 - DNA, 80 bp, synthetic construct
  misc_feature 1..80: note = Synthetic: >NC_006213.1-cand-8470-8549
  source 1..80: mol_type = other DNA
tttgtttatgtgtgttttgtgttgagtttggtctgttttattggactgtggtgcttaatgcccacttacacagtacacaa

SEQ ID NO: 23297 - DNA, 80 bp, synthetic construct
  misc_feature 1..80: note = Synthetic: >NC_006213.1-cand-8550-8629
  source 1..80: mol_type = other DNA
atcagattttcagcttcccgtttatgccagttataaagttttagataatggtgttattagagatgttagcgttgaagatg

SEQ ID NO: 23298 - DNA, 80 bp, synthetic construct
  misc_feature 1..80: note = Synthetic: >NC_006213.1-cand-8630-8709
  source 1..80: mol_type = other DNA
tttgtttcgctaacaaatttgaacaatttgatcaatggtatgagtctacatttggtctaagttattatagtaacagtatg

SEQ ID NO: 23299 - DNA, 80 bp, synthetic construct
  misc_feature 1..80: note = Synthetic: >NC_006213.1-cand-8710-8789
  source 1..80: mol_type = other DNA
gcttgtcccattgttgttgctgtaatagatcaggattttggctctacagtgtttaatgtccctaccaaagtgttacgata

SEQ ID NO: 23300 - DNA, 80 bp, synthetic construct
  misc_feature 1..80: note = Synthetic: >NC_006213.1-cand-8790-8869
  source 1..80: mol_type = other DNA
tggttatcatgtgttgcactttattacacatgcactttctgctgatggagtgcagtgttatacgccacatagtcaaatat

SEQ ID NO: 23301 - DNA, 80 bp, synthetic construct
  misc_feature 1..80: note = Synthetic: >NC_006213.1-cand-8870-8949
  source 1..80: mol_type = other DNA
cgtattctaatttttatgctagtggctgtgtgctttcctctgcttgcactatgtttacaatggccgatggtagtccacaa

SEQ ID NO: 23302 - DNA, 80 bp, synthetic construct
  misc_feature 1..80: note = Synthetic: >NC_006213.1-cand-8970-9049
  source 1..80: mol_type = other DNA
gcttatgcaaaatgcttctctgtatagttcattggtacctcacgtgcggtataatcttgctaatgctaaaggttttatcc

SEQ ID NO: 23303 - DNA, 80 bp, synthetic construct
  misc_feature 1..80: note = Synthetic: >NC_006213.1-cand-9030-9109
  source 1..80: mol_type = other DNA
taatgctaaaggttttatccgttttccagaagtgttgcgagaagggcttgtacgtatcgtgcgtactcgttctatgtcgt

SEQ ID NO: 23304 - DNA, 80 bp, synthetic construct
  misc_feature 1..80: note = Synthetic: >NC_006213.1-cand-9110-9189
  source 1..80: mol_type = other DNA
attgcagagttggattatgtgaggaagctgatgagggtatatgctttaattttaatggttcttgggtgcttaataatgat

SEQ ID NO: 23305 - DNA, 80 bp, synthetic construct
  misc_feature 1..80: note = Synthetic: >NC_006213.1-cand-9200-9279
  source 1..80: mol_type = other DNA
cattgcctgggaccttttgtggtagagatgtttttgatttaatttatcagctatttaaaggtttagcacagcctgtggat

SEQ ID NO: 23306 - DNA, 80 bp, synthetic construct
  misc_feature 1..80: note = Synthetic: >NC_006213.1-cand-15710-15789
  source 1..80: mol_type = other DNA
cataaataatggacctcatgaattctgttcacaacacacaatgcttgtaaagatggatggtgacgatgtctaccttccat

SEQ ID NO: 23307 - DNA, 80 bp, synthetic construct
  misc_feature 1..80: note = Synthetic: >NC_006213.1-cand-15790-15869
  source 1..80: mol_type = other DNA
atcctaatcctagtcgtatattaggagctggatgttttgtagatgatttgttaaagactgatagtgttcttttaatagaa

SEQ ID NO: 23308 - DNA, 80 bp, synthetic construct
  misc_feature 1..80: note = Synthetic: >NC_006213.1-cand-15870-15949
  source 1..80: mol_type = other DNA
cgatttgtaagtcttgcaatagatgcttatccacttgtgtatcatgaaaatgaagaataccaaaaggtttttcgtgttta

SEQ ID NO: 23309 - DNA, 80 bp, synthetic construct
  misc_feature 1..80: note = Synthetic: >NC_006213.1-cand-15950-16029
  source 1..80: mol_type = other DNA
tttggcgtatataaagaagttgtacaatgacctgggtaatcagatcttggatagctacagtgttattttaagtacttgtg

SEQ ID NO: 23310 - DNA, 80 bp, synthetic construct
  misc_feature 1..80: note = Synthetic: >NC_006213.1-cand-16030-16109
  source 1..80: mol_type = other DNA
atggacaaaagttcactgatgagtccttttacaagaacatgtatttaagaagtgcagttatgcagagtgttggagcttgc

SEQ ID NO: 23311 - DNA, 80 bp, synthetic construct
  misc_feature 1..80: note = Synthetic: >NC_006213.1-cand-16120-16199
  source 1..80: mol_type = other DNA
cttctcaaacatcattacgttgtggcagttgcatcagaaagcctcttctttgctgcaagtgttgttatgatcatgttatg

SEQ ID NO: 23312 - DNA, 80 bp, synthetic construct
  misc_feature 1..80: note = Synthetic: >NC_006213.1-cand-16200-16279
  source 1..80: mol_type = other DNA
gcgactgatcataaatatgtcttgagtgtttcaccatatgtgtgtaatgcaccaggatgtgatgtaaatgatgttaccaa

SEQ ID NO: 23313 - DNA, 80 bp, synthetic construct
  misc_feature 1..80: note = Synthetic: >NC_006213.1-cand-16290-16369
  source 1..80: mol_type = other DNA
ggtggtatgtcatattattgtgaagaccataagccacaatattcattcaagttggtaatgaatggtctggtttttggtct

SEQ ID NO: 23314 - DNA, 80 bp, synthetic construct
  misc_feature 1..80: note = Synthetic: >NC_006213.1-cand-16370-16449
  source 1..80: mol_type = other DNA
atataaacaatcttgtacaggatctccgtacatagacgattttaatcgtatagctagttgtaaatggaccgatgtggatg

SEQ ID NO: 23315 - DNA, 80 bp, synthetic construct
  misc_feature 1..80: note = Synthetic: >NC_006213.1-cand-16450-16529
  source 1..80: mol_type = other DNA
attacatactagctaatgaatgtacagagcgcttgaaattgtttgctgcagaaacgcaaaaggcaaccgaggaagccttt

SEQ ID NO: 23316 - DNA, 80 bp, synthetic construct
  misc_feature 1..80: note = Synthetic: >NC_006213.1-cand-16530-16609
  source 1..80: mol_type = other DNA
aagcagagttatgcatcagcaacaatacaagagattgttagtgagcgcgaattgattctctcttgggagattggaaaagt

SEQ ID NO: 23317 - DNA, 80 bp, synthetic construct
  misc_feature 1..80: note = Synthetic: >NC_006213.1-cand-16610-16689
  source 1..80: mol_type = other DNA
taagccaccacttaataaaaattatgtttttactggctaccattttactaaaaatggtaagacagttttaggtgagtatg

SEQ ID NO: 23318 - DNA, 80 bp, synthetic construct
  misc_feature 1..80: note = Synthetic: >NC_006213.1-cand-16690-16769
  source 1..80: mol_type = other DNA
tttttgataagagtgagttgactaatggtgtgtattatcgcgccacaaccacttataagctatctgtaggagatgttttt

SEQ ID NO: 23319 - DNA, 80 bp, synthetic construct
  misc_feature 1..80: note = Synthetic: >NC_006213.1-cand-16770-16849
  source 1..80: mol_type = other DNA
gttttaacctctcattcagtagctaatttaagtgctcctacgcttgttccgcaggagaattatagtagtattagatttgc

SEQ ID NO: 23320 - DNA, 80 bp, synthetic construct
  misc_feature 1..80: note = Synthetic: >NC_006213.1-cand-16850-16929
  source 1..80: mol_type = other DNA
tagtgtttatagtgtgcttgagacgtttcagaacaatgttgttaattatcaacacattggtatgaaacgttactgcaccg

SEQ ID NO: 23321 - DNA, 80 bp, synthetic construct
  misc_feature 1..80: note = Synthetic: >NC_006213.1-cand-16930-17009
  source 1..80: mol_type = other DNA
tgcaaggacctcctggtacagggaagtcacatcttgctattggtcttgctgtattctattgtacagcacgtgttgtatac

SEQ ID NO: 23322 - DNA, 80 bp, synthetic construct
  misc_feature 1..80: note = Synthetic: >NC_007543.1-cand-890-969
  source 1..80: mol_type = other DNA
aattggtggtgttttgatgatggaagattaaaaaagcataatggtgctggttaccctctgattgtcgcaaattcgaaatt

SEQ ID NO: 23323 - DNA, 80 bp, synthetic construct
  misc_feature 1..80: note = Synthetic: >NC_007543.1-cand-980-1059
  source 1..80: mol_type = other DNA
aaaattttaatttccggagatatcgaattaaatcctggacctgatatactagttacactaaatgactacataactaaata

SEQ ID NO: 23324 - DNA, 80 bp, synthetic construct
  misc_feature 1..80: note = Synthetic: >NC_007543.1-cand-1070-1149
  source 1..80: mol_type = other DNA
cttgaatgcactttcgacatttttctagaggatgatggatcaattacatatacatgttacatgaaattggaatcagcaga

SEQ ID NO: 23325 - DNA, 80 bp, synthetic construct
  misc_feature 1..80: note = Synthetic: >NC_007543.1-cand-1140-1219
  source 1..80: mol_type = other DNA
aatcagcagaagcaattggtagtgggagatctaagaaggaagctaaaagaattgcagcatatgacattcttgatcaactt

SEQ ID NO: 23326 - DNA, 80 bp, synthetic construct
  misc_feature 1..80: note = Synthetic: >NC_007544.1-cand-0-79
  source 1..80: mol_type = other DNA
ttaaaaaagagctggacttggaggtgtgtcaacatggcaaattcatttagagaaatgctgtattggtacagaaaaattat

SEQ ID NO: 23327 - DNA, 80 bp, synthetic construct
  misc_feature 1..80: note = Synthetic: >NC_007544.1-cand-90-169
  source 1..80: mol_type = other DNA
ttaccatgtgtgaatgtaaacatatggagaagagagatagcatataaagcaaatggaatatgtcttaactgtctaaatga

SEQ ID NO: 23328 - DNA, 80 bp, synthetic construct
  misc_feature 1..80: note = Synthetic: >NC_007544.1-cand-180-259
  source 1..80: mol_type = other DNA
tgtccatgtgattattgtggaatacggcataaatgtgaaaattgcttaaactcagactgtttcatgaatacaaacaatga

SEQ ID NO: 23329 - DNA, 80 bp, synthetic construct
  misc_feature 1..80: note = Synthetic: >NC_007544.1-cand-270-349
  source 1..80: mol_type = other DNA
catagatggattacttttgatgaagaaccaagtcagatggtattgtttgagtattggattatgtataaagactattttct

SEQ ID NO: 23330 - DNA, 80 bp, synthetic construct
  misc_feature 1..80: note = Synthetic: >NC_007544.1-cand-360-439
  source 1..80: mol_type = other DNA
aattataattataaagcacaattgaaaattcttaatatgaataaaaatcggagatttcatattaatgagagcaaaaagaa

SEQ ID NO: 23331 - DNA, 80 bp, synthetic construct
  misc_feature 1..80: note = Synthetic: >NC_007544.1-cand-450-529
  source 1..80: mol_type = other DNA
gtaccaattacttctcaatatctaaaatttaaatttaataataagatttacattatgtttgggacttttctgacttcaaa

SEQ ID NO: 23332 - DNA, 80 bp, synthetic construct
  misc_feature 1..80: note = Synthetic: >NC_007544.1-cand-660-739
  source 1..80: mol_type = other DNA
actgaaattaatgcacgtagaccaatttctgagtgtgattatttaatcgaagcatgcctatgtaacgaaaacaatgaatg

SEQ ID NO: 23333 - DNA, 80 bp, synthetic construct
  misc_feature 1..80: note = Synthetic: >NC_007544.1-cand-750-829
  source 1..80: mol_type = other DNA
gctgtaatgggaagagacaaaatacctgtaactaaaagtttagctatgaaatatttttgtaaaaacattaatactgaatt

SEQ ID NO: 23334 - DNA, 80 bp, synthetic construct
  misc_feature 1..80: note = Synthetic: >NC_007544.1-cand-840-919
  source 1..80: mol_type = other DNA
ggtcattcaaagtgtcatgtcgtttcagaatgcccaagatggaatcaacaattaagagtattaaatgcgtctactttgaa

SEQ ID NO: 23335 - DNA, 80 bp, synthetic construct
  misc_feature 1..80: note = Synthetic: >NC_007544.1-cand-930-1009
  source 1..80: mol_type = other DNA
agacggcaatttatgaatgaagttgttgaatggtttgaaaactttactcaattaacgggaatgcattatgacttcattaa

SEQ ID NO: 23336 - DNA, 80 bp, synthetic construct
  misc_feature 1..80: note = Synthetic: >NC_007544.1-cand-1000-1079
  source 1..80: mol_type = other DNA
acttcattaaaacatgtgtgtataataaagtaataataagtcattttagaaaagaaattgaggattatataaattctggt

SEQ ID NO: 23337 - DNA, 80 bp, synthetic construct
  misc_feature 1..80: note = Synthetic: >NC_007544.1-cand-1090-1169
  source 1..80: mol_type = other DNA
ctctatcttctgtcataccagatggacacgctttatataccaacattgacatattaaggatttctcttatgttagctatt

SEQ ID NO: 23338 - DNA, 80 bp, synthetic construct
  misc_feature 1..80: note = Synthetic: >NC_007572.1-cand-1460-1539
  source 1..80: mol_type = other DNA
ttatttctttaataccaagtaatccgaactaccaaactccaatagcttcatctagtactgtaagaatggatttagagaga

SEQ ID NO: 23339 - DNA, 80 bp, synthetic construct
  misc_feature 1..80: note = Synthetic: >NC_007572.1-cand-1540-1619
  source 1..80: mol_type = other DNA
aaaatcaatgatttacgtgatgacttcaatgctttagcgagttcagttgcattaagtgatatactttccctcgctatgtc

SEQ ID NO: 23340 - DNA, 80 bp, synthetic construct
  misc_feature 1..80: note = Synthetic: >NC_007572.1-cand-1620-1699
  source 1..80: mol_type = other DNA
accattaacattttctaatctattagaatcagttccggctattacttcatcggttaaggatgttgctgctagtgttatga

SEQ ID NO: 23341 - DNA, 80 bp, synthetic construct
  misc_feature 1..80: note = Synthetic: >NC_007572.1-cand-1700-1779
  source 1..80: mol_type = other DNA
aaaaatttagaagtactaaaatgttcaaaaaagcagcaaaacaaaattatcgggagtttgtcattggagacttattggaa

SEQ ID NO: 23342 - DNA, 80 bp, synthetic construct
  misc_feature 1..80: note = Synthetic: >NC_007572.1-cand-1780-1859
  source 1..80: mol_type = other DNA
gacgttactaatgttgctaggaataataattcgttgaactatagtgatattacttcggccatgatggtttcaactactaa

SEQ ID NO: 23343 - DNA, 80 bp, synthetic construct
  misc_feature 1..80: note = Synthetic: >NC_007572.1-cand-1860-1939
  source 1..80: mol_type = other DNA
cagattacaaattactgatgtagatactttttcagaaatagtatcacgatcagctgacaattttatttcaaatagatctt

SEQ ID NO: 23344 - DNA, 80 bp, synthetic construct
  misc_feature 1..80: note = Synthetic: >NC_007572.1-cand-1940-2019
  source 1..80: mol_type = other DNA
atagaatgatagaaaataatactgttcatgaaataacgcctacaagaagattttcatatgacattaaaaccttacagcaa

SEQ ID NO: 23345 - DNA, 80 bp, synthetic construct
  misc_feature 1..80: note = Synthetic: >NC_007572.1-cand-2020-2099
  source 1..80: mol_type = other DNA
cgaaatttcgacatagataaattctctaaactagcttctcaatctcccgttatatctgcaatagttgattttgctaccat

SEQ ID NO: 23346 - DNA, 80 bp, synthetic construct
  misc_feature 1..80: note = Synthetic: >NC_007572.1-cand-2100-2179
  source 1..80: mol_type = other DNA
aaaagcaatacgtgatacttatggcattagtgatgatatcatatacaaattagtggcatctgacgctcctactattttgt

SEQ ID NO: 23347 - DNA, 80 bp, synthetic construct
  misc_feature 1..80: note = Synthetic: >NC_007572.1-cand-2190-2269
  source 1..80: mol_type = other DNA
tcagaataatccactcatacggaatagaattactaatctaataaatcaatgcaaattgtaaacagtgatgagatctcaat

SEQ ID NO: 23348 - DNA, 80 bp, synthetic construct
  misc_feature 1..80: note = Synthetic: >NC_007573.1-cand-130-209
  source 1..80: mol_type = other DNA
ggatcaagaatacttagattcattaactcattcataatcatatgtaagcacatagtgactacgtctaaatcagctattga

SEQ ID NO: 23349 - DNA, 80 bp, synthetic construct
  misc_feature 1..80: note = Synthetic: >NC_007573.1-cand-230-309
  source 1..80: mol_type = other DNA
attcggaacataacacaaagaatgcgcatgaagaatatgaagaggtaatgaagcagataagagaaatgcgtattcatatg

SEQ ID NO: 23350 - DNA, 80 bp, synthetic construct
  misc_feature 1..80: note = Synthetic: >NC_007573.1-cand-330-409
  source 1..80: mol_type = other DNA
acatgatgataatgttaaatggagaatgagtgaatctattcgcagagaaaagaaacatgaaatgaagatgagtgataata

SEQ ID NO: 23351 - DNA, 80 bp, synthetic construct
  misc_feature 1..80: note = Synthetic: >NC_007573.1-cand-430-509
  source 1..80: mol_type = other DNA
cataatgatacaaatatatgtgaaaaatctggattagagacggaagtttgtctatgaaatccctgcgcttcctgctggtg

SEQ ID NO: 23352 - DNA, 80 bp, synthetic construct
  misc_feature 1..80: note = Synthetic: >NC_007573.1-cand-520-599
  source 1..80: mol_type = other DNA
atcccgttcatttctagcgagtagagaaaaacattgtacccgaaacgctgagttgaggatcaatgtagatatgaaaaatt

SEQ ID NO: 23353 - DNA, 80 bp, synthetic construct
  misc_feature 1..80: note = Synthetic: >NC_007574.1-cand-70-149
  source 1..80: mol_type = other DNA
tgaacgtgggaataacttgaatttcgcagatacctacgtatatacatggaaccaacagtactcgtatcatgaaaatgcat

SEQ ID NO: 23354 - DNA, 80 bp, synthetic construct
  misc_feature 1..80: note = Synthetic: >NC_009238.1-cand-2020-2099
  source 1..80: mol_type = other DNA
cacagacaaatataaaggcccaactacctatacaattaatccaccaggagaccctagaacactgcatgtgtacaatagta

SEQ ID NO: 23355 - DNA, 80 bp, synthetic construct
  misc_feature 1..80: note = Synthetic: >NC_009238.1-cand-2090-2169
  source 1..80: mol_type = other DNA
tacaatagtaatacacccaaagcaaaggttaccagtgagagatattctgttgaatcatgggccccagaccccagtagaaa

SEQ ID NO: 23356 - DNA, 80 bp, synthetic construct
  misc_feature 1..80: note = Synthetic: >NC_009238.1-cand-2170-2249
  source 1..80: mol_type = other DNA
tgacaattgtagatattttggaagagtggtaggtggtgctgcaacacctccagttgtatcatatggtaacaactctacta

SEQ ID NO: 23357 - DNA, 80 bp, synthetic construct
  misc_feature 1..80: note = Synthetic: >NC_009238.1-cand-2250-2329
  source 1..80: mol_type = other DNA
ttccactattggatgaaaatggcattggtatactttgcttgcagggaagattgtacattacttgtgcagatatgcttgga

SEQ ID NO: 23358 - DNA, 80 bp, synthetic construct
  misc_feature 1..80: note = Synthetic: >NC_009238.1-cand-2330-2409
  source 1..80: mol_type = other DNA
acagctaatagtagaatccatacccctatggctaggttttttaggctacattttagacaaagaagggttaagaatccttt

SEQ ID NO: 23359 - DNA, 80 bp, synthetic construct
  misc_feature 1..80: note = Synthetic: >NC_009238.1-cand-2410-2489
  source 1..80: mol_type = other DNA
tacaatgaatgtgctgtataaacaagtgtttaacagacccacagaaactgttgatgcacaggttggtgtaacagaggtga

SEQ ID NO: 23360 - DNA, 80 bp, synthetic construct
  misc_feature 1..80: note = Synthetic: >NC_009238.1-cand-2490-2569
  source 1..80: mol_type = other DNA
ctatggtagaagaaataggcccactgccccccagtatacaaactaccctccccaccagtgtaaatcttactcagcttcca

SEQ ID NO: 23361 - DNA, 80 bp, synthetic construct
  misc_feature 1..80: note = Synthetic: >NC_009238.1-cand-2570-2649
  source 1..80: mol_type = other DNA
cgcactgtaacacttcagtcccaggctcctttgttaaatactcaacaaaattcaaagtgaatgtattataataaagctgt

SEQ ID NO: 23362 - DNA, 80 bp, synthetic construct
  misc_feature 1..80: note = Synthetic: >NC_009238.1-cand-2650-2729
  source 1..80: mol_type = other DNA
ttattcaaaccacttttctagtatgttttttccattggttacattcatttgcatagtggcaaactcagtaaggcctatat

SEQ ID NO: 23363 - DNA, 80 bp, synthetic construct
  misc_feature 1..80: note = Synthetic: >NC_009238.1-cand-2730-2809
  source 1..80: mol_type = other DNA
aattatcaagaacttctttccaatacacaacattactttgaatttcttcatcaaagtcacttacaggtctataccatatt

SEQ ID NO: 23364 - DNA, 80 bp, synthetic construct
  misc_feature 1..80: note = Synthetic: >NC_009238.1-cand-2810-2889
  source 1..80: mol_type = other DNA
agcaataacaacatagctattccactgtgtaatattctttgtgatagtaactgtggtgttttttctaggctttctcttaa

SEQ ID NO: 23365 - DNA, 80 bp, synthetic construct
  misc_feature 1..80: note = Synthetic: >NC_009238.1-cand-2900-2979
  source 1..80: mol_type = other DNA
atagtgaacataacagttttttcaaatctcacagcaactgtttctggaatacaatattcattcatggttacaatccctgg

SEQ ID NO: 23366 - DNA, 80 bp, synthetic construct
  misc_feature 1..80: note = Synthetic: >NC_009238.1-cand-2980-3059
  source 1..80: mol_type = other DNA
gggaaatatttgtgacctcttattaacatgttttttttctaagttaacctcaacacaaccatcaaggtagtctcttaagt

SEQ ID NO: 23367 - DNA, 80 bp, synthetic construct
  misc_feature 1..80: note = Synthetic: >NC_009238.1-cand-3060-3139
  source 1..80: mol_type = other DNA
tatcaagattatttaccccattaccagaaggtagttgcttttcaatacctatttgacctttgacatcttcaaacacaacc

SEQ ID NO: 23368 - DNA, 80 bp, synthetic construct
  misc_feature 1..80: note = Synthetic: >NC_009238.1-cand-3140-3219
  source 1..80: mol_type = other DNA
atatattgatcaagagcaactccaagttcaaatggtagtttttctgaaggtatgttaatgttcaaggctttgccaccaca

SEQ ID NO: 23369 - DNA, 80 bp, synthetic construct
  misc_feature 1..80: note = Synthetic: >NC_009238.1-cand-3220-3299
  source 1..80: mol_type = other DNA
caaatttaacaaagcagtggctaatgtggttttgccactgttaattgggcctttgaaaagccaatatctgtgttttggct

SEQ ID NO: 23370 - DNA, 80 bp, synthetic construct
  misc_feature 1..80: note = Synthetic: >NC_010563.1-cand-2730-2809
  source 1..80: mol_type = other DNA
actaaccgattgactctctctgaaattttagaaacgatggaaacactaacaccatttgcgacacattggtcacaaatggt

SEQ ID NO: 23371 - DNA, 80 bp, synthetic construct
  misc_feature 1..80: note = Synthetic: >NC_010563.1-cand-2810-2889
  source 1..80: mol_type = other DNA
atctacagtttctgccagctgtgtgggtgttttgcacctgacattgtgaagagcagctgcaacaaacttagttaacaatg

SEQ ID NO: 23372 - DNA, 80 bp, synthetic construct
  misc_feature 1..80: note = Synthetic: >NC_010563.1-cand-2890-2969
  source 1..80: mol_type = other DNA
gagtttcttcccccataacaaagaacctcgacttgaactccgccacaaagttcccaacaacacttttgggactgacaaat

SEQ ID NO: 23373 - DNA, 80 bp, synthetic construct
  misc_feature 1..80: note = Synthetic: >NC_010563.1-cand-2970-3049
  source 1..80: mol_type = other DNA
ttgttcaactttgatgatagatattcatgaaaacatacaatttccaaccagtcagggctatcctcgtctatgtgctcata

SEQ ID NO: 23374 - DNA, 80 bp, synthetic construct
  misc_feature 1..80: note = Synthetic: >NC_010563.1-cand-3050-3129
  source 1..80: mol_type = other DNA
tgcaggcaatttcattatagatatctgatcatcactggaagtgtaagataacacatccacatcatacagtttgtaaattg

SEQ ID NO: 23375 - DNA, 80 bp, synthetic construct
  misc_feature 1..80: note = Synthetic: >NC_010563.1-cand-3130-3209
  source 1..80: mol_type = other DNA
catagttgagaaactgttccgttattaaagcatataagtcagataagttgtgtaaaattccttgtcccatatctaataca

SEQ ID NO: 23376 - DNA, 80 bp, synthetic construct
  misc_feature 1..80: note = Synthetic: >NC_010563.1-cand-3210-3289
  source 1..80: mol_type = other DNA
gacataatgtgacttggaatttcattttccctttgtaagaagttgtggtagaactgttctgttacacttgatgtttgaca

SEQ ID NO: 23377 - DNA, 80 bp, synthetic construct
  misc_feature 1..80: note = Synthetic: >NC_010563.1-cand-3290-3369
  source 1..80: mol_type = other DNA
ttccatgagcccaagacttcttttgattttccccacacaatatgcctgagcaacattaaatggtacctcgacaactttat

SEQ ID NO: 23378 - DNA, 80 bp, synthetic construct
  misc_feature 1..80: note = Synthetic: >NC_010563.1-cand-3370-3449
  source 1..80: mol_type = other DNA
gaagatgccatttaaggatgtccaatagtggtccaagattcaacttagctctacttttgggttctgtcaaattgagattg

SEQ ID NO: 23379 - DNA, 80 bp, synthetic construct
  misc_feature 1..80: note = Synthetic: >NC_010563.1-cand-3490-3569
  source 1..80: mol_type = other DNA
cccattttgaatgatccaatgacatactaatatcaccattgttcacagccatcttcatgtcacagatggccctctcaaac

SEQ ID NO: 23380 - DNA, 80 bp, synthetic construct
  misc_feature 1..80: note = Synthetic: >NC_010563.1-cand-3530-3609
  source 1..80: mol_type = other DNA
gttcacagccatcttcatgtcacagatggccctctcaaactctttctctgaatttaaacacgaatatctcatagatgatg

SEQ ID NO: 23381 - DNA, 80 bp, synthetic construct
  misc_feature 1..80: note = Synthetic: >NC_010563.1-cand-3610-3689
  source 1..80: mol_type = other DNA
tgatcatttcagaaaaatcctctactaatctagtcattaattttgtattcaagtcaccaacataaagctccctgttagat

SEQ ID NO: 23382 - DNA, 80 bp, synthetic construct
  misc_feature 1..80: note = Synthetic: >NC_010563.1-cand-3690-3769
  source 1..80: mol_type = other DNA
ccaacttgctccttataacttaatccaaattttagatttcctgtatttgtgcttacgcttgtgaactctgtcggtgaatc

SEQ ID NO: 23383 - DNA, 80 bp, synthetic construct
  misc_feature 1..80: note = Synthetic: >NC_010563.1-cand-3770-3849
  source 1..80: mol_type = other DNA
ttctgagtaaaaacagaggtttcttagagctgcacttgtaaaaaacgttttgtcaagctttttggctatggcctctgcat

SEQ ID NO: 23384 - DNA, 80 bp, synthetic construct
  misc_feature 1..80: note = Synthetic: >NC_010563.1-cand-3850-3929
  source 1..80: mol_type = other DNA
tgctttctcttgtgctcactcgggcatcttcctgcactctaagtgcttctgaactcaaacctaatctagacctacttttg

SEQ ID NO: 23385 - DNA, 80 bp, synthetic construct
  misc_feature 1..80: note = Synthetic: >NC_010563.1-cand-3930-4009
  source 1..80: mol_type = other DNA
tgctcatagctacctaatttttgatcaaaacccccttgtatcagcaaatacttgaaacactctaagtagtcagtttcctc

SEQ ID NO: 23386 - DNA, 80 bp, synthetic construct
  misc_feature 1..80: note = Synthetic: >NC_011504.2-cand-480-559
  source 1..80: mol_type = other DNA
caatcaaaaaaacgtgagaacgctagaagaatgggaaagtggaaaaaatccttatgaaccaagagaagtgactgcagcaa

SEQ ID NO: 23387 - DNA, 80 bp, synthetic construct
  misc_feature 1..80: note = Synthetic: >NC_011504.2-cand-570-649
  source 1..80: mol_type = other DNA
tgagctgccgtcgactgtcctcggaagcggcggagttctttacagtaagcaccatcggacctgatggctgactgagaagc

SEQ ID NO: 23388 - DNA, 80 bp, synthetic construct
  misc_feature 1..80: note = Synthetic: >NC_011504.2-cand-660-739
  source 1..80: mol_type = other DNA
catatcgcgtgtggctcaagccttaatcccgtttaaccaatccggtcagcaccggacgttaatggaaggaacggtcttaa

SEQ ID NO: 23389 - DNA, 80 bp, synthetic construct
  misc_feature 1..80: note = Synthetic: >NC_011505.2-cand-110-189
  source 1..80: mol_type = other DNA
aaatctattggtaggagtgaacagtacatttcaccagatgcagaagcattcaataaatacatgctgtcgaagtctccaga

SEQ ID NO: 23390 - DNA, 80 bp, synthetic construct
  misc_feature 1..80: note = Synthetic: >NC_011505.2-cand-200-279
  source 1..80: mol_type = other DNA
ccatctgattctgcttcaaacgatccactcaccagtttttcgattagatcgaatgcagttaagacaaatgcagacgctgg

SEQ ID NO: 23391 - DNA, 80 bp, synthetic construct
  misc_feature 1..80: note = Synthetic: >NC_011505.2-cand-290-369
  source 1..80: mol_type = other DNA
gattcatcagcacaatcacgaccttcaagtaatgtcggatgcgatcaagtggatttctccttaaataaaggcttaaaagt

SEQ ID NO: 23392 - DNA, 80 bp, synthetic construct
  misc_feature 1..80: note = Synthetic: >NC_011505.2-cand-380-459
  source 1..80: mol_type = other DNA
ttggactcatcaatatcaatatctacggatactaaaaaggagaaatcaaaacaaaaccataaaagtaggaagcactaccc

SEQ ID NO: 23393 - DNA, 80 bp, synthetic construct
  misc_feature 1..80: note = Synthetic: >NC_011505.2-cand-470-549
  source 1..80: mol_type = other DNA
gcagagtctgattcagatgattatgtactggatgattcagatagtgatgatggtaaatgtaagaactgtaaatataagaa

SEQ ID NO: 23394 - DNA, 80 bp, synthetic construct
  misc_feature 1..80: note = Synthetic: >NC_011505.2-cand-560-639
  source 1..80: mol_type = other DNA
gcattaagaatgagaatgaaacaagtcgcaatgcaattgattgaagatttgtaagtctgacctgggaacacactagggag

SEQ ID NO: 23395 - DNA, 80 bp, synthetic construct
  misc_feature 1..80: note = Synthetic: >NC_011506.2-cand-0-79
  source 1..80: mol_type = other DNA
attaaaggctcaatggcgtatcgaaaacgtggagcgcgtcgtgagacgaatctaaaacaagatgaacgaatgcaagaaaa

SEQ ID NO: 23396 - DNA, 80 bp, synthetic construct
  misc_feature 1..80: note = Synthetic: >NC_011506.2-cand-80-159
  source 1..80: mol_type = other DNA
agaagatagcaagaacattaataatgacagtcctaaatcacaattatcagaaaaagtattatctaagaaagaagagataa

SEQ ID NO: 23397 - DNA, 80 bp, synthetic construct
  misc_feature 1..80: note = Synthetic: >NC_011506.2-cand-160-239
  source 1..80: mol_type = other DNA
ttacagataatcaagaagaagttaagatatctgatgaggtaaaaaaatctaataaagaagaatcgaaacagttgttagaa

SEQ ID NO: 23398 - DNA, 80 bp, synthetic construct
  misc_feature 1..80: note = Synthetic: >NC_011506.2-cand-240-319
  source 1..80: mol_type = other DNA
gtacttaaaacaaaagaggaacatcaaaaagaagttcagtatgaaatattacaaaaaactatccctacatttgaaccaaa

SEQ ID NO: 23399 - DNA, 80 bp, synthetic construct
  misc_feature 1..80: note = Synthetic: >NC_011506.2-cand-320-399
  source 1..80: mol_type = other DNA
agagtcaatactcaaaaaattagaagacataaaaccagaacaagcaaagaaacaaactaaactgtttcgaatatttgaac

SEQ ID NO: 23400 - DNA, 80 bp, synthetic construct
  misc_feature 1..80: note = Synthetic: >NC_011506.2-cand-400-479
  source 1..80: mol_type = other DNA
cgaaacaattgcctatttatagagctaatggagaaagagagcttcgtaatagatggtattggaaattgaaacgagatact

SEQ ID NO: 23401 - DNA, 80 bp, synthetic construct
  misc_feature 1..80: note = Synthetic: >NC_011506.2-cand-480-559
  source 1..80: mol_type = other DNA
cttcctgatggagattatgatgttagagagtattttttaaatttatatgatcaagtattaatggaaatgccggattatct

SEQ ID NO: 23402 - DNA, 80 bp, synthetic construct
  misc_feature 1..80: note = Synthetic: >NC_012776.1-cand-1340-1419
  source 1..80: mol_type = other DNA
caggtccactggttgggccaaacactgagagtcccaacacagggaccccatgaccgtcactccgctttgcggagtgacgg

SEQ ID NO: 23403 - DNA, 80 bp, synthetic construct
  misc_feature 1..80: note = Synthetic: >NC_012776.1-cand-1460-1539
  source 1..80: mol_type = other DNA
tgttctgaagatcatgtctgcaggcagcaagttccttatgggctcttggtaaagttgcccattcactgctgattcataca

SEQ ID NO: 23404 - DNA, 80 bp, synthetic construct
  misc_feature 1..80: note = Synthetic: >NC_012776.1-cand-1540-1619
  source 1..80: mol_type = other DNA
tgatacagtccatcagtgcacaatgtggtgtaatctctttcttccctttcttggacttggtcacaacaattccagtatgc

SEQ ID NO: 23405 - DNA, 80 bp, synthetic construct
  misc_feature 1..80: note = Synthetic: >NC_012776.1-cand-1620-1699
  source 1..80: mol_type = other DNA
tggttgcaaaaggtcttgtatgagtcccaaacctggtcctcgaactttctagaggcctcttttgacatttgaatatcaat

SEQ ID NO: 23406 - DNA, 80 bp, synthetic construct
  misc_feature 1..80: note = Synthetic: >NC_012776.1-cand-1700-1779
  source 1..80: mol_type = other DNA
gaatttcacgtcccttctaccttgactgtgaaggagtttttcaatgtcatccttcccctgacaggttatcaccatgccaa

SEQ ID NO: 23407 - DNA, 80 bp, synthetic construct
  misc_feature 1..80: note = Synthetic: >NC_012776.1-cand-1790-1869
  source 1..80: mol_type = other DNA
ttccaacactgctgtggttagtccaggttgggtggagcaaagctgagtgaaatccatgccatgacagtacttgctgtcat

SEQ ID NO: 23408 - DNA, 80 bp, synthetic construct
  misc_feature 1..80: note = Synthetic: >NC_012776.1-cand-1870-1949
  source 1..80: mol_type = other DNA
ttttgaattgtttttgatccgtgggctctctgtagaagtggaggcaaagtctttcttctggctggaatattgctatctcc

SEQ ID NO: 23409 - DNA, 80 bp, synthetic construct
  misc_feature 1..80: note = Synthetic: >NC_012776.1-cand-1920-1999
  source 1..80: mol_type = other DNA
ctttcttctggctggaatattgctatctccaccggatcatcaggtctaccttcaatgtccatccatgttctccccttggg

SEQ ID NO: 23410 - DNA, 80 bp, synthetic construct
  misc_feature 1..80: note = Synthetic: >NC_012776.1-cand-2080-2159
  source 1..80: mol_type = other DNA
ctctttcgttctgtggaggtgtagggtcctttggagtcatatcaatgactgtgttgtcccaggatctgccttttatgctg

SEQ ID NO: 23411 - DNA, 80 bp, synthetic construct
  misc_feature 1..80: note = Synthetic: >NC_012776.1-cand-2110-2189
  source 1..80: mol_type = other DNA
ttggagtcatatcaatgactgtgttgtcccaggatctgccttttatgctggttctggaagagatgtatggccaaccctca

SEQ ID NO: 23412 - DNA, 80 bp, synthetic construct
  misc_feature 1..80: note = Synthetic: >NC_012776.1-cand-2190-2269
  source 1..80: mol_type = other DNA
cctgataagcagatcttgtatagtagattctcatacgggtttctttctcctggaacctcagacacaaacatctgtacttt

SEQ ID NO: 23413 - DNA, 80 bp, synthetic construct
  misc_feature 1..80: note = Synthetic: >NC_012776.1-cand-2270-2349
  source 1..80: mol_type = other DNA
gttccttgcagttagagttgccttgatcacgtcatcaatatttctgctgttcaattcaatggtctccaacatgtctcctc

SEQ ID NO: 23414 - DNA, 80 bp, synthetic construct
  misc_feature 1..80: note = Synthetic: >NC_012776.1-cand-2350-2429
  source 1..80: mol_type = other DNA
ccttcatgagagacgcaccagctttgaccaatgaagcaagactcaagttgtaacctgaaatgttgatcgcagaatcacaa

SEQ ID NO: 23415 - DNA, 80 bp, synthetic construct
  misc_feature 1..80: note = Synthetic: >NC_012776.1-cand-2430-2509
  source 1..80: mol_type = other DNA
ttgcttacatagtctaaaactggatgcttgttctttagcttgtccagatcatccatgttgggaaactttgcggtgtaaat

SEQ ID NO: 23416 - DNA, 80 bp, synthetic construct
  misc_feature 1..80: note = Synthetic: >NC_012776.1-cand-2510-2589
  source 1..80: mol_type = other DNA
gaggcccagatctacacaggcttggacactatcattcagatctacccttgtctgtctggttaaacaggccagtgtcagac

SEQ ID NO: 23417 - DNA, 80 bp, synthetic construct
  misc_feature 1..80: note = Synthetic: >NC_012776.1-cand-2590-2669
  source 1..80: mol_type = other DNA
ttggcatagtgccaaactgattgttcaggagagaagagtctttgacgtcccagaccctcacaactgtgttccttgttggc

SEQ ID NO: 23418 - DNA, 80 bp, synthetic construct
  misc_feature 1..80: note = Synthetic: >NC_012777.1-cand-3340-3419
  source 1..80: mol_type = other DNA
gacgttgaagggaacctcaacatatttatgaacatgccaggacagtaatgttgagatatgctcaattggcttatcaaaat

SEQ ID NO: 23419 - DNA, 80 bp, synthetic construct
  misc_feature 1..80: note = Synthetic: >NC_012777.1-cand-3420-3499
  source 1..80: mol_type = other DNA
ctttaatgtacttgatattttttaaaactgtcaagaagagaagcggacacatagttgggccccacttgctgtgatccatg

SEQ ID NO: 23420 - DNA, 80 bp, synthetic construct
  misc_feature 1..80: note = Synthetic: >NC_012777.1-cand-3500-3579
  source 1..80: mol_type = other DNA
ttgtagctaagattcccttctctaatgcactgcttcatctctgagattgcctcctcaaactgtgcttcatcgtttaagca

SEQ ID NO: 23421 - DNA, 80 bp, synthetic construct
  misc_feature 1..80: note = Synthetic: >NC_012777.1-cand-3570-3649
  source 1..80: mol_type = other DNA
cgtttaagcagctcccatttagctgaccagtgagagactcaaaaaagtcttccacaaaccttgtgtacatcttagtcttc

SEQ ID NO: 23422 - DNA, 80 bp, synthetic construct
  misc_feature 1..80: note = Synthetic: >NC_012777.1-cand-3650-3729
  source 1..80: mol_type = other DNA
atgtcaccgatgtacaattctctattcccaccaacctgttccttgtatgataaagagaactggagcctacccgtgtctgg

SEQ ID NO: 23423 - DNA, 80 bp, synthetic construct
  misc_feature 1..80: note = Synthetic: >NC_012777.1-cand-3730-3809
  source 1..80: mol_type = other DNA
accagcaccattgtaggaggtgggtgactcatctgaatagaaacacaagtttttcagagtggacgtaatgcatttagtga

SEQ ID NO: 23424 - DNA, 80 bp, synthetic construct
  misc_feature 1..80: note = Synthetic: >NC_012777.1-cand-3810-3889
  source 1..80: mol_type = other DNA
aagacagcagtttacacatagcctcagaattactctctctttcacttatcctggcatcttcgtagagttttttgtaatca

SEQ ID NO: 23425 - DNA, 80 bp, synthetic construct
  misc_feature 1..80: note = Synthetic: >NC_012777.1-cand-3890-3969
  source 1..80: mol_type = other DNA
aacttataattaagtcttagtctggaattgtgcttgaatctaccagagtagtgattcacatttagttgcaataagatggt

SEQ ID NO: 23426 - DNA, 80 bp, synthetic construct
  misc_feature 1..80: note = Synthetic: >NC_012777.1-cand-3970-4049
  source 1..80: mol_type = other DNA
cttaaagcatttgaaccaatctccctcttcataaaactttcttgtgatgttttttgtgaacatctctatgggacaggatt

SEQ ID NO: 23427 - DNA, 80 bp, synthetic construct
  misc_feature 1..80: note = Synthetic: >NC_012777.1-cand-4050-4129
  source 1..80: mol_type = other DNA
ctaacactgtctctgtcatgactaattttgagtattttggtgagtttccaactcgctcacagaaatcttcatagaatgaa

SEQ ID NO: 23428 - DNA, 80 bp, synthetic construct
  misc_feature 1..80: note = Synthetic: >NC_012777.1-cand-4130-4209
  source 1..80: mol_type = other DNA
tccggaaagagtgactcttcaaaatcttcaactaaatgataagaaacctctgagagtatgagatttctatctctgtgatt

SEQ ID NO: 23429 - DNA, 80 bp, synthetic construct
  misc_feature 1..80: note = Synthetic: >NC_012777.1-cand-4210-4289
  source 1..80: mol_type = other DNA
ggccactaaatctctcaaagcttcagaaacacttataccctcagtgtcttgaaccttttttgggttttgtttgtgttgat

SEQ ID NO: 23430 - DNA, 80 bp, synthetic construct
  misc_feature 1..80: note = Synthetic: >NC_012777.1-cand-4290-4369
  source 1..80: mol_type = other DNA
actttgagaaaatcttgtctatagaacatctgatcttactcagagattcagatggcaagagttcttcaagtggtactgaa

SEQ ID NO: 23431 - DNA, 80 bp, synthetic construct
  misc_feature 1..80: note = Synthetic: >NC_012777.1-cand-4370-4449
  source 1..80: mol_type = other DNA
tcttcgctctcctcgagatctattgattctgacacactagtctgactatcccttgttgttgtttttttcttcttttcttt

SEQ ID NO: 23432 - DNA, 80 bp, synthetic construct
  misc_feature 1..80: note = Synthetic: >NC_012777.1-cand-4450-4529
  source 1..80: mol_type = other DNA
tctattttcttcagccattgtgtgtgaaattgatttcaggattttgtattccagttgttcaggacttaagcaaaacttag

SEQ ID NO: 23433 - DNA, 80 bp, synthetic construct
  misc_feature 1..80: note = Synthetic: >NC_012777.1-cand-4530-4609
  source 1..80: mol_type = other DNA
ttttattgtggaacttctcaacaatatcacacagggaaactccgaccaacttatcataatcatagtccacagaattcccc

SEQ ID NO: 23434 - DNA, 80 bp, synthetic construct
  misc_feature 1..80: note = Synthetic: >NC_021928.1-cand-9230-9309
  source 1..80: mol_type = other DNA
gcagctcaatagaccagactgttaattaatcaacaaagttattctgtaatataaactgatcttataagtgaaaagatgcc

SEQ ID NO: 23435 - DNA, 80 bp, synthetic construct
  misc_feature 1..80: note = Synthetic: >NC_021928.1-cand-9310-9389
  source 1..80: mol_type = other DNA
tatccaaggaggttgatagacaaatagtaaaagtagcaattgtaacaaaactctaaggaaaaagtaattcgagaaatatt

SEQ ID NO: 23436 - DNA, 80 bp, synthetic construct
  misc_feature 1..80: note = Synthetic: >NC_021928.1-cand-9390-9469
  source 1..80: mol_type = other DNA
atagactgacttcagagcaaacacaacatcgatccataatagtcaatataatcaataatactctatgagaccttacctat

SEQ ID NO: 23437 - DNA, 80 bp, synthetic construct
  misc_feature 1..80: note = Synthetic: >NC_021928.1-cand-9470-9549
  source 1..80: mol_type = other DNA
caacagcaaaaaacacagtccatcaagcggaacccaactcgctccatccttaatcatccactgaaagaaaaaatatacga

SEQ ID NO: 23438 - DNA, 80 bp, synthetic construct
  misc_feature 1..80: note = Synthetic: >NC_021928.1-cand-9540-9619
  source 1..80: mol_type = other DNA
aaatatacgaaggaccatcggccaccgggtccaaacaatctagcacaaaaattcaaacaaccgccaaactctgttcggcc

SEQ ID NO: 23439 - DNA, 80 bp, synthetic construct
  misc_feature 1..80: note = Synthetic: >NC_021928.1-cand-9620-9699
  source 1..80: mol_type = other DNA
tcaacaaacaatccgccaagccatctgtcattcctataccaacacacaaccatcccattcctcaaaagcaattcaatccg

SEQ ID NO: 23440 - DNA, 80 bp, synthetic construct
  misc_feature 1..80: note = Synthetic: >NC_021928.1-cand-9700-9779
  source 1..80: mol_type = other DNA
cgacccaaagaagactctccacatatccagctaatccgtcgatccgacacatcatcgtatcttttaagaaaaaaaagaga

SEQ ID NO: 23441 - DNA, 80 bp, synthetic construct
  misc_feature 1..80: note = Synthetic: >NC_021928.1-cand-9780-9859
  source 1..80: mol_type = other DNA
tgagcaattgatacattctatttttcatacacatagtaaatattaaatcataaattcaccatagaccaagaccaaagatt

SEQ ID NO: 23442 - DNA, 80 bp, synthetic construct
  misc_feature 1..80: note = Synthetic: >NC_021928.1-cand-9860-9939
  source 1..80: mol_type = other DNA
gaaagactagaatgatcctgtacagcgatagacaagcaatgaggaacaaaaaagatagacaatctccaacaacaaatggc

SEQ ID NO: 23443 - DNA, 80 bp, synthetic construct
  misc_feature 1..80: note = Synthetic: >NC_021928.1-cand-9970-10049
  source 1..80: mol_type = other DNA
gcacccccaagatggccgaccacactgatgtcctactgccagaagttcatctgagctctcccattgtacggcataaactc

SEQ ID NO: 23444 - DNA, 80 bp, synthetic construct
  misc_feature 1..80: note = Synthetic: >NC_021928.1-cand-10020-10099
  source 1..80: mol_type = other DNA
ctgagctctcccattgtacggcataaactcatttattacatattattgggaaatttaccaaatcaaataagtcctgaaga

SEQ ID NO: 23445 - DNA, 80 bp, synthetic construct
  misc_feature 1..80: note = Synthetic: >NC_021928.1-cand-10100-10179
  source 1..80: mol_type = other DNA
tcttggacccctatctacaatcaattggagccaggtaagaagagaagagagcaaattatgcttacgtttaatatctgtaa

SEQ ID NO: 23446 - DNA, 80 bp, synthetic construct
  misc_feature 1..80: note = Synthetic: >NC_021928.1-cand-10180-10259
  source 1..80: mol_type = other DNA
ggaataatcttctaaaacatgtaccctcattgagagaggtagatccaacgcgtcaatgtaaaaacctgtattggccacga

SEQ ID NO: 23447 - DNA, 80 bp, synthetic construct
  misc_feature 1..80: note = Synthetic: >NC_021928.1-cand-10260-10339
  source 1..80: mol_type = other DNA
cctcttcagttttttaaggatttagatttcaatcaatttaaagggaaaattgaaaggtgggaaaagattcaacatgctac

SEQ ID NO: 23448 - DNA, 80 bp, synthetic construct
  misc_feature 1..80: note = Synthetic: >NC_021928.1-cand-10340-10419
  source 1..80: mol_type = other DNA
acagcttgtagtcaataagagaatcgtgagttttttagatttaatcagtgacaaattaatatcaaggaaagatttattta

SEQ ID NO: 23449 - DNA, 80 bp, synthetic construct
  misc_feature 1..80: note = Synthetic: >NC_021928.1-cand-10420-10499
  source 1..80: mol_type = other DNA
ctagtgctaggtgcaggcataatggtcatgatagagattcaagattaagagaattagttgatattgaatcaagctggaat

SEQ ID NO: 23450 - DNA, 80 bp, synthetic construct
  misc_feature 1..80: note = Synthetic: >NC_021928.1-cand-15580-15659
  source 1..80: mol_type = other DNA
ttattgagagtgtaccatacaaacagattcaggcagaaatagagtgtcatctgggctttgtacaagagtacaagtgttta

SEQ ID NO: 23451 - DNA, 80 bp, synthetic construct
  misc_feature 1..80: note = Synthetic: >NC_021928.1-cand-15660-15739
  source 1..80: mol_type = other DNA
tggaatggtgtcactgaaactactgatttgtcagccattagctgtgctgaattcattattaattctattggagtagattc

SEQ ID NO: 23452 - DNA, 80 bp, synthetic construct
  misc_feature 1..80: note = Synthetic: >NC_021928.1-cand-15740-15819
  source 1..80: mol_type = other DNA
agtcacattaattcattgtgatggagaagaaggatttgatactcctcaagaggagatatcatcagctgtcatccatgtat

SEQ ID NO: 23453 - DNA, 80 bp, synthetic construct
  misc_feature 1..80: note = Synthetic: >NC_021928.1-cand-15820-15899
  source 1..80: mol_type = other DNA
tacaaataacttgcagctgtcttaaaaaggatgggttattactcttaaagacaagttgggtaccctttactagattttct

SEQ ID NO: 23454 - DNA, 80 bp, synthetic construct
  misc_feature 1..80: note = Synthetic: >NC_021928.1-cand-15910-15989
  source 1..80: mol_type = other DNA
ctatatgctggactttttcatctcaaattatactcatacgaagtgcatatagtgacccctctaatcatgaagtttactta

SEQ ID NO: 23455 - DNA, 80 bp, synthetic construct
  misc_feature 1..80: note = Synthetic: >NC_021928.1-cand-15990-16069
  source 1..80: mol_type = other DNA
gtttgcaaaagatcagaggatggctggttttctgacttaagaactgctatattaaatgcccagacattgacccaatccaa

SEQ ID NO: 23456 - DNA, 80 bp, synthetic construct
  misc_feature 1..80: note = Synthetic: >NC_021928.1-cand-16070-16149
  source 1..80: mol_type = other DNA
ttatacaatattatctccaaatattataaatcattactgggaacaattaatacaccaaaaggataatatcttaaatatta

SEQ ID NO: 23457 - DNA, 80 bp, synthetic construct
  misc_feature 1..80: note = Synthetic: >NC_021928.1-cand-16150-16229
  source 1..80: mol_type = other DNA
taaatgataccatcacgtcatctgatcctcaatactttttatctgataatcagaagatcctacaagcaggtggatccctt

SEQ ID NO: 23458 - DNA, 80 bp, synthetic construct
  misc_feature 1..80: note = Synthetic: >NC_021928.1-cand-16230-16309
  source 1..80: mol_type = other DNA
agctgtcagcaatggataaatatcacaaatttcaattctcttgtaaatttgtacaaacacttagcttctatttatacaat

SEQ ID NO: 23459 - DNA, 80 bp, synthetic construct
  misc_feature 1..80: note = Synthetic: >NC_021928.1-cand-16320-16399
  source 1..80: mol_type = other DNA
gaaattattgaaatactgaagagtgagggagatgaatatctaggtttgatatggtctccatacaatattggagctcaagg

SEQ ID NO: 23460 - DNA, 80 bp, synthetic construct
  misc_feature 1..80: note = Synthetic: >NC_021928.1-cand-16400-16479
  source 1..80: mol_type = other DNA
gaaaataaatactatactacggttattatcagaaaaagtgatgctctatattgttaaaaattggaaattaattgattatc

SEQ ID NO: 23461 - DNA, 80 bp, synthetic construct
  misc_feature 1..80: note = Synthetic: >NC_021928.1-cand-16480-16559
  source 1..80: mol_type = other DNA
atgcaaaaattgattttaaacataacttagaatgtggtgaatttgatgccggctgtttctttaaaccagacttgttgtac

SEQ ID NO: 23462 - DNA, 80 bp, synthetic construct
  misc_feature 1..80: note = Synthetic: >NC_021928.1-cand-16560-16639
  source 1..80: mol_type = other DNA
aagtatacaccaaatccacggtaccttcgtaaaacaatttcaaataatgtgttagttgaattgattactgtaaaaatggt

SEQ ID NO: 23463 - DNA, 80 bp, synthetic construct
  misc_feature 1..80: note = Synthetic: >NC_021928.1-cand-16640-16719
  source 1..80: mol_type = other DNA
gctaaaattatcccgaccaaaacaaaagcagatttggaaattattaggttgcactctctttgttggaatacaagatgaac

SEQ ID NO: 23464 - DNA, 80 bp, synthetic construct
  misc_feature 1..80: note = Synthetic: >NC_021928.1-cand-16720-16799
  source 1..80: mol_type = other DNA
agttaggaataaatgagcaaaaaatagacagtaatccagataaatatatccaattcaatgatgcaaacgatgaaagagat

SEQ ID NO: 23465 - DNA, 80 bp, synthetic construct
  misc_feature 1..80: note = Synthetic: >NC_021928.1-cand-16800-16879
  source 1..80: mol_type = other DNA
gtttttggtgatatattataataaattcaacacaaatttaatgattaatgataataatcatgcaagatatccatatcaaa

SEQ ID NO: 23466 - DNA, 80 bp, synthetic construct
  misc_feature 1..80: note = Synthetic: >NC_025114.1-cand-4970-5049
  source 1..80: mol_type = other DNA
ctcccccgactgcaagtactacgatggctacacgggccagcccgtccactacatcgacgacatcggtcaaaaccccgatg

SEQ ID NO: 23467 - DNA, 80 bp, synthetic construct
  misc_feature 1..80: note = Synthetic: >NC_025114.1-cand-5050-5129
  source 1..80: mol_type = other DNA
gcgctgactgggctgacttcgtgaacatcgtgtcctctgcccctttcattgtccccatggctgacgttaatgataagggc

SEQ ID NO: 23468 - DNA, 80 bp, synthetic construct
  misc_feature 1..80: note = Synthetic: >NC_025114.1-cand-5130-5209
  source 1..80: mol_type = other DNA
cggttctacacctcccgcatcatcatcgtcacgtccaacttccctggacctaacccccgctccgctcgctgtgtcgctgc

SEQ ID NO: 23469 - DNA, 80 bp, synthetic construct
  misc_feature 1..80: note = Synthetic: >NC_025114.1-cand-5210-5289
  source 1..80: mol_type = other DNA
acttgagcgccgcctgcacgttcgcatcaacgtgacggcgcgcgaaggtgttaccttctcagcggcggaggccctcaagc

SEQ ID NO: 23470 - DNA, 80 bp, synthetic construct
  misc_feature 1..80: note = Synthetic: >NC_025114.1-cand-5290-5369
  source 1..80: mol_type = other DNA
ccatctcccccccccgctccactcgttactgcaaattttccaatcccctgactgaattttccatgttctctctggccgtt

SEQ ID NO: 23471 - DNA, 80 bp, synthetic construct
  misc_feature 1..80: note = Synthetic: >NC_025114.1-cand-5370-5449
  source 1..80: mol_type = other DNA
gactacaaatctgttgttcttcccaacactcctgtctcttgctttgatgaactggttgatttcattctgcactccctgag

SEQ ID NO: 23472 - DNA, 80 bp, synthetic construct
  misc_feature 1..80: note = Synthetic: >NC_025114.1-cand-5450-5529
  source 1..80: mol_type = other DNA
cgagcgcaactcggtgagcaccctgctctcgggcatggtgcgcaccgatgtggttcgccagggagctactgactctccta

SEQ ID NO: 23473 - DNA, 80 bp, synthetic construct
  misc_feature 1..80: note = Synthetic: >NC_025114.1-cand-5530-5609
  source 1..80: mol_type = other DNA
accttcccctcccctccgtcctcccttccgttcccagccaggaccccttcgtcaaggctgtgaatgagaaccgtcctgtc

SEQ ID NO: 23474 - DNA, 80 bp, synthetic construct
  misc_feature 1..80: note = Synthetic: >NC_025114.1-cand-5610-5689
  source 1..80: mol_type = other DNA
tctttcttatctaagctctggtcgtggcgagcacctgtcttcgctgcgacttctttcctctctctcattgctgctactct

SEQ ID NO: 23475 - DNA, 80 bp, synthetic construct
  misc_feature 1..80: note = Synthetic: >NC_025114.1-cand-5690-5769
  source 1..80: mol_type = other DNA
caccatcgtccgttgtcttcgcgacctccggaacccgcaaggtgcgtacaatggagcccctgttcctaagccaaggaaaa

SEQ ID NO: 23476 - DNA, 80 bp, synthetic construct
  misc_feature 1..80: note = Synthetic: >NC_025114.1-cand-5770-5849
  source 1..80: mol_type = other DNA
aggacctccaaaaacaacccacctacacgggcccggtccgacgccagggtttcgaccctgccgtcatgaagataatggcc

SEQ ID NO: 23477 - DNA, 80 bp, synthetic construct
  misc_feature 1..80: note = Synthetic: >NC_025114.1-cand-5850-5929
  source 1..80: mol_type = other DNA
aatgttgactcctttgtctccctttcgggcactaagcccatctggaccatgtcctgcctctgggttggcggtcgtaactt

SEQ ID NO: 23478 - DNA, 80 bp, synthetic construct
  misc_feature 1..80: note = Synthetic: >NC_025114.1-cand-5930-6009
  source 1..80: mol_type = other DNA
gattgtcccgtcccacgcattcgagtccgatgatctggagatcacccacattcgcgttggatcgcgcacgtttgacgtgt

SEQ ID NO: 23479 - DNA, 80 bp, synthetic construct
  misc_feature 1..80: note = Synthetic: >NC_025114.1-cand-6010-6089
  source 1..80: mol_type = other DNA
cgcgtgttacgcgagtggatgacggtgagttatctctgatcgcggtcccggatgggccggaacacaagagtttgatccgc

SEQ ID NO: 23480 - DNA, 80 bp, synthetic construct
  misc_feature 1..80: note = Synthetic: >NC_025114.1-cand-6090-6169
  source 1..80: mol_type = other DNA
tttatccgccctgcctctcccaagtctggcatccttgcctccaaattctctgacactcctgtctttgtctccttctggaa

SEQ ID NO: 23481 - DNA, 80 bp, synthetic construct
  misc_feature 1..80: note = Synthetic: >NC_025114.1-cand-6170-6249
  source 1..80: mol_type = other DNA
tggcaaaccccactctaccccgctccctggtgttgtggacgaaagggattcgttcacataccgctgctcctccttccagg

SEQ ID NO: 23482 - DNA, 80 bp, synthetic construct
  misc_feature 1..80: note = Synthetic: >NC_038506.1-cand-1630-1709
  source 1..80: mol_type = other DNA
taaaatgatccttgaaaaggttaaagttgaatatcagaaaacaatgggttccatggtttgtgacatatgtcatcatgagt

SEQ ID NO: 23483 - DNA, 80 bp, synthetic construct
  misc_feature 1..80: note = Synthetic: >NC_038506.1-cand-1710-1789
  source 1..80: mol_type = other DNA
gtgagactgttaaagagcttgagtcacataaacagagctgtgttgaaggtcaatgcccatactgtatgactgtgacagag

SEQ ID NO: 23484 - DNA, 80 bp, synthetic construct
  misc_feature 1..80: note = Synthetic: >NC_038506.1-cand-1790-1869
  source 1..80: mol_type = other DNA
gcaacccagagtgccctgcaggctcatttttccatctgtaaattgacagggagatttcatgaggccttaaaaaaatctct

SEQ ID NO: 23485 - DNA, 80 bp, synthetic construct
  misc_feature 1..80: note = Synthetic: >NC_038506.1-cand-1870-1949
  source 1..80: mol_type = other DNA
taaaaaacctgaggtgcatagagggtgttatcgcacacttggtgtatttagataccgtagtagatgctatgtaggccttg

SEQ ID NO: 23486 - DNA, 80 bp, synthetic construct
  misc_feature 1..80: note = Synthetic: >NC_038506.1-cand-1960-2039
  source 1..80: mol_type = other DNA
ccttttaaccattgagttagtgctatgggcagcaagtgctgagacaccacttttagaacctggatggtctgacacagccc

SEQ ID NO: 23487 - DNA, 80 bp, synthetic construct
  misc_feature 1..80: note = Synthetic: >NC_038506.1-cand-2030-2109
  source 1..80: mol_type = other DNA
gacacagcccatggtgttggagagttaccactaaagacagatctagagctagatttttctctaccatcatcttcttcata

SEQ ID NO: 23488 - DNA, 80 bp, synthetic construct
  misc_feature 1..80: note = Synthetic: >NC_038506.1-cand-2120-2199
  source 1..80: mol_type = other DNA
agaaggctaacaaatcctgcaaataaagaggagtcattgccatttcattttcagatggaaaaacaggttattcacgctga

SEQ ID NO: 23489 - DNA, 80 bp, synthetic construct
  misc_feature 1..80: note = Synthetic: >NC_038506.1-cand-2200-2279
  source 1..80: mol_type = other DNA
aatacaatctctgggtcattggatggatgctacattcaacatcaaaactgcattccattgttacggagcttgtaaacaat

SEQ ID NO: 23490 - DNA, 80 bp, synthetic construct
  misc_feature 1..80: note = Synthetic: >NC_038506.1-cand-2260-2339
  source 1..80: mol_type = other DNA
ttacggagcttgtaaacaatattcttatccttggcaaacagcaaaatgtttttttgaaaaggactatcagtatgaaacag

SEQ ID NO: 23491 - DNA, 80 bp, synthetic construct
  misc_feature 1..80: note = Synthetic: >NC_038506.1-cand-2370-2449
  source 1..80: mol_type = other DNA
gtgttggcacaggttgtactgcctgtgggatttaccttgataagttaaaatcagttggtaaagcctataaggtaatatct

SEQ ID NO: 23492 - DNA, 80 bp, synthetic construct
  misc_feature 1..80: note = Synthetic: >NC_038506.1-cand-2460-2539
  source 1..80: mol_type = other DNA
ccagaaaagtatgtatccagctaggcacagaacaggtatgtaaacatatcgatgcaaatgactgtctagttacaccatca

SEQ ID NO: 23493 - DNA, 80 bp, synthetic construct
  misc_feature 1..80: note = Synthetic: >NC_038506.1-cand-2540-2619
  source 1..80: mol_type = other DNA
gttaaagtttgtatcataggaacagtatctaagatccaaccgtctgacacattgttgttcttagggcccctagagcaagg

SEQ ID NO: 23494 - DNA, 80 bp, synthetic construct
  misc_feature 1..80: note = Synthetic: >NC_038506.1-cand-2580-2659
  source 1..80: mol_type = other DNA
cgtctgacacattgttgttcttagggcccctagagcaaggtggtgttatattaaagcaatggtgcacaacatcatgtact

SEQ ID NO: 23495 - DNA, 80 bp, synthetic construct
  misc_feature 1..80: note = Synthetic: >NC_038506.1-cand-2710-2789
  source 1..80: mol_type = other DNA
tgagcacactgggtccttcagaaagatatgtggatttgcaacaactccagtttgtgagtatcaaggtaatactatttcag

SEQ ID NO: 23496 - DNA, 80 bp, synthetic construct
  misc_feature 1..80: note = Synthetic: >NC_038506.1-cand-2790-2869
  source 1..80: mol_type = other DNA
gatatcaaagactcatggcaacaaaggactcatttcaatcattcaacctgacagatccacacataacatcaagtaaattg

SEQ ID NO: 23497 - DNA, 80 bp, synthetic construct
  misc_feature 1..80: note = Synthetic: >NC_038506.1-cand-2870-2949
  source 1..80: mol_type = other DNA
gaatggatagatccagatggtaataccagagaccatgtaaatctaattttaaatagagatgtgtcctttcaagatttgag

SEQ ID NO: 23498 - DNA, 80 bp, synthetic construct
  misc_feature 1..80: note = Synthetic: >NC_039218.1-cand-80-159
  source 1..80: mol_type = other DNA
ggaccaggccgattgccaaacggactggtattgatgcgcatgatgggagtgctgtggcatatggtcgctggaacggccag

SEQ ID NO: 23499 - DNA, 80 bp, synthetic construct
  misc_feature 1..80: note = Synthetic: >NC_039218.1-cand-160-239
  source 1..80: mol_type = other DNA
gaatccgatcctcaagcgattctgggcgactgttccggtacggcaggccattgcagcgctccgtaaaatccgaaagacag

SEQ ID NO: 23500 - DNA, 80 bp, synthetic construct
  misc_feature 1..80: note = Synthetic: >NC_039218.1-cand-240-319
  source 1..80: mol_type = other DNA
ttggactgctattggactctttaaataaaagaagagggaagagaaggtcaaccaccggattgctcacgccaatcttgcta

SEQ ID NO: 23501 - DNA, 80 bp, synthetic construct
  misc_feature 1..80: note = Synthetic: >NC_039218.1-cand-320-399
  source 1..80: mol_type = other DNA
gcttgcctggcgaccctggtgttctctgcgacagttcgcagagagagaacagggaacatggtgatcagggcagaaggaaa

SEQ ID NO: 23502 - DNA, 80 bp, synthetic construct
  misc_feature 1..80: note = Synthetic: >NC_039218.1-cand-380-459
  source 1..80: mol_type = other DNA
gtgatcagggcagaaggaaaggacgcagccacgcaagtggaagtcatgaatggaacatgcaccattcttgccacagacat

SEQ ID NO: 23503 - DNA, 80 bp, synthetic construct
  misc_feature 1..80: note = Synthetic: >NC_039218.1-cand-490-569
  source 1..80: mol_type = other DNA
cgagtgtgtcaccattgactcgggagaagaaccagttgatgtggattgcttctgcaaaggcgttgagcgagtgtcactgg

SEQ ID NO: 23504 - DNA, 80 bp, synthetic construct
  misc_feature 1..80: note = Synthetic: >NC_039218.1-cand-570-649
  source 1..80: mol_type = other DNA
aatacggaaggtgtgggaaaccagctggcggtagaaacaggaggtcagtgtcgattccggtgcatgctcatagtgatctc

SEQ ID NO: 23505 - DNA, 80 bp, synthetic construct
  misc_feature 1..80: note = Synthetic: >NC_039218.1-cand-680-759
  source 1..80: mol_type = other DNA
gactcagtcaagacacatctgacacgtgtggaaggctgggtttggaaaaacaagttcctgacagcggccttttgtgcagt

SEQ ID NO: 23506 - DNA, 80 bp, synthetic construct
  misc_feature 1..80: note = Synthetic: >NC_039218.1-cand-730-809
  source 1..80: mol_type = other DNA
caagttcctgacagcggccttttgtgcagttgtgtggatggtaacggacagcctgccgacaaggttcattgtcataacgg

SEQ ID NO: 23507 - DNA, 80 bp, synthetic construct
  misc_feature 1..80: note = Synthetic: >NC_039218.1-cand-810-889
  source 1..80: mol_type = other DNA
tggccctttgcctggctcctacatatgccacacgatgcacacacctgcagaaccgggactttgtctcagggacccaaggg

SEQ ID NO: 23508 - DNA, 80 bp, synthetic construct
  misc_feature 1..80: note = Synthetic: >NC_039218.1-cand-890-969
  source 1..80: mol_type = other DNA
acgactagagtttcattggtgttggaattaggcggctgtgtcaccctcacagctgaaggcaagccatcagtggatgtttg

SEQ ID NO: 23509 - DNA, 80 bp, synthetic construct
  misc_feature 1..80: note = Synthetic: >NC_039218.1-cand-970-1049
  source 1..80: mol_type = other DNA
gctcgacgacatacaccaggagaacccggccaagacacgagagtattgtcttcatgccaagctggcaaactccaaggtgg

SEQ ID NO: 23510 - DNA, 80 bp, synthetic construct
  misc_feature 1..80: note = Synthetic: >NC_039218.1-cand-1050-1129
  source 1..80: mol_type = other DNA
ccgcacgttgtccagccatgggtccagcgacactgccagaggagcaccaggcgagcacagtctgtagacgagaccagagt

SEQ ID NO: 23511 - DNA, 80 bp, synthetic construct
  misc_feature 1..80: note = Synthetic: >NC_039218.1-cand-1150-1229
  source 1..80: mol_type = other DNA
ttgtggactgttcgggaagggcagcattgtggcttgtgccaagtttagctgtgaggccaaaaagaaggcaactggatatg

SEQ ID NO: 23512 - DNA, 80 bp, synthetic construct
  misc_feature 1..80: note = Synthetic: >NC_039218.1-cand-1210-1289
  source 1..80: mol_type = other DNA
aaagaaggcaactggatatgtgtacgatgtcaacaaaatcacatatgtggtgaaggtggaacctcacacgggtgactatc

SEQ ID NO: 23513 - DNA, 80 bp, synthetic construct
  misc_feature 1..80: note = Synthetic: >NC_039218.1-cand-1290-1369
  source 1..80: mol_type = other DNA
tagcggccaacgagtcgcacagcaaccggaagacagcatctttcacaacgcagtccgagaagaccatcttgacactggga

SEQ ID NO: 23514 - DNA, 80 bp, synthetic construct
  misc_feature 1..80: note = Synthetic: >NC_044854.1-cand-1110-1189
  source 1..80: mol_type = other DNA
ctgctccttgagctctttggcgtgttctggaacccgcccgatgtatccaattttatagcgtcccttcttcctgatttcca

SEQ ID NO: 23515 - DNA, 80 bp, synthetic construct
  misc_feature 1..80: note = Synthetic: >NC_044854.1-cand-1200-1279
  source 1..80: mol_type = other DNA
cccgaagatctggcccgggatctggttccagttattcttggtggtatagggctagccattgggttcaccagagacaaggt

SEQ ID NO: 23516 - DNA, 80 bp, synthetic construct
  misc_feature 1..80: note = Synthetic: >NC_044854.1-cand-1280-1359
  source 1..80: mol_type = other DNA
cactaaggtcatgaagagtgccgtagatggcctccgggccgctacgcagttgggacagtatgggttagaaatattctcac

SEQ ID NO: 23517 - DNA, 80 bp, synthetic construct
  misc_feature 1..80: note = Synthetic: >NC_044854.1-cand-1360-1439
  source 1..80: mol_type = other DNA
tccttaagaagtatttctttggtggagaccagactgaacggaccctcaaaggcattgaagcagcagtaatagacatggag

SEQ ID NO: 23518 - DNA, 80 bp, synthetic construct
  misc_feature 1..80: note = Synthetic: >NC_044854.1-cand-1440-1519
  source 1..80: mol_type = other DNA
gtgttgtcctccacatcagtgacacagctggtgagagacaagcaggcagccaaggcttacatgaacattctggataatga

SEQ ID NO: 23519 - DNA, 80 bp, synthetic construct
  misc_feature 1..80: note = Synthetic: >NC_044854.1-cand-1520-1599
  source 1..80: mol_type = other DNA
agaggaaaaagcaagaaagctctctgccaagaatgctgaccctcatgtaatatcctcaacaaacgccctaatatcgcgta

SEQ ID NO: 23520 - DNA, 80 bp, synthetic construct
  misc_feature 1..80: note = Synthetic: >NC_044854.1-cand-1600-1679
  source 1..80: mol_type = other DNA
tagctatggcgcggtccgcattggccaaggctcaagctgaaatgaccagtcgaatgaggccagtcgtcattatgatgtgt

SEQ ID NO: 23521 - DNA, 80 bp, synthetic construct
  misc_feature 1..80: note = Synthetic: >NC_044854.1-cand-1680-1759
  source 1..80: mol_type = other DNA
ggcccccctgggattgggaagactaaagctgcggaacacctggcaaaacgactggccaatgagatcagacctggtggcaa

SEQ ID NO: 23522 - DNA, 80 bp, synthetic construct
  misc_feature 1..80: note = Synthetic: >NC_044854.1-cand-1770-1849
  source 1..80: mol_type = other DNA
gtgccacgtgaggctgttgaccactgggatggctatcatggtgaggaagtgatgctatgggatgattatggtatgacaaa

SEQ ID NO: 23523 - DNA, 80 bp, synthetic construct
  misc_feature 1..80: note = Synthetic: >NC_044854.1-cand-1840-1919
  source 1..80: mol_type = other DNA
gtatgacaaaaatacaagatgactgcaataagctccaggctattgctgattctgccccactcactctgaattgtgatagg

SEQ ID NO: 23524 - DNA, 80 bp, synthetic construct
  misc_feature 1..80: note = Synthetic: >NC_044854.1-cand-1920-1999
  source 1..80: mol_type = other DNA
atagaaaataaagggatgcaatttgtgtcagatgcaatagtcatcactaccaatgccccagggcccgcccctgtggactt

SEQ ID NO: 23525 - DNA, 80 bp, synthetic construct
  misc_feature 1..80: note = Synthetic: >NC_044854.1-cand-2000-2079
  source 1..80: mol_type = other DNA
catcaatcttggccccgtgtgcagacgggttgatttcctggtttactgctccgccccagaggtagaacagataaggaaag

SEQ ID NO: 23526 - DNA, 80 bp, synthetic construct
  misc_feature 1..80: note = Synthetic: >NC_044854.1-cand-2080-2159
  source 1..80: mol_type = other DNA
tcagccctggtgacacatcagcattaaaggattgcttcaagccagacttctcccatctgaagatggatttggccccacaa

SEQ ID NO: 23527 - DNA, 80 bp, synthetic construct
  misc_feature 1..80: note = Synthetic: >NC_044854.1-cand-2160-2239
  source 1..80: mol_type = other DNA
ggagggtttgacaaccagggaaacacaccatttggcaagggcgttatgaagccaacaaccatcaataggctactcataca

SEQ ID NO: 23528 - DNA, 80 bp, synthetic construct
  misc_feature 1..80: note = Synthetic: >NC_044854.1-cand-2200-2279
  source 1..80: mol_type = other DNA
gcgttatgaagccaacaaccatcaataggctactcatacaagctgtggctctcaccatggagaggcaggatgagttccgg

SEQ ID NO: 23529 - DNA, 80 bp, synthetic construct
  misc_feature 1..80: note = Synthetic: >NC_044854.1-cand-2320-2399
  source 1..80: mol_type = other DNA
cagcattcaccaccatggcacgcgacaacgggttgggcatcttgagcatggcgggcttaggcaagaagctgcgcggcgtc

SEQ ID NO: 23530 - DNA, 80 bp, synthetic construct
  misc_feature 1..80: note = Synthetic: >NC_044932.1-cand-240-319
  source 1..80: mol_type = other DNA
gtcatcacgtacaacaagcaagatgacaaggtcagtggagttcccatcgtttccactgttgagacatcccctctgcatga

SEQ ID NO: 23531 - DNA, 80 bp, synthetic construct
  misc_feature 1..80: note = Synthetic: >NC_044932.1-cand-320-399
  source 1..80: mol_type = other DNA
caccgcatacagtgtccctcccctggatcaaagggaaaaggttgatgcaaaggagcccctaacaggttcaatactcgaga

SEQ ID NO: 23532 - DNA, 80 bp, synthetic construct
  misc_feature 1..80: note = Synthetic: >NC_044932.1-cand-400-479
  source 1..80: mol_type = other DNA
tgtgggatggtgagatctaccactacggcctctatgtggagaagggtttggtcctcggcgtgcacaagccaccatccgcc

SEQ ID NO: 23533 - DNA, 80 bp, synthetic construct
  misc_feature 1..80: note = Synthetic: >NC_044932.1-cand-480-559
  source 1..80: mol_type = other DNA
ttgagcctggcacgcatagagttaacccccctctctctctactggaggacagtctatacaccaccctacctagtggctcc

SEQ ID NO: 23534 - DNA, 80 bp, synthetic construct
  misc_feature 1..80: note = Synthetic: >NC_044932.1-cand-590-669
  source 1..80: mol_type = other DNA
attcccctacacggcttttgacaacaactgctacaccttttgctgttgggtcttagacctaaacgactcatggcttaata

SEQ ID NO: 23535 - DNA, 80 bp, synthetic construct
  misc_feature 1..80: note = Synthetic: >NC_044932.1-cand-640-719
  source 1..80: mol_type = other DNA
tcttagacctaaacgactcatggcttaataggaaatgtgtatcaaggactactggcttctacagaccctaccaggattgg

SEQ ID NO: 23536 - DNA, 80 bp, synthetic construct
  misc_feature 1..80: note = Synthetic: >NC_044932.1-cand-720-799
  source 1..80: mol_type = other DNA
aatagaaaacccctaccaaccatggatgagagtaaactcaaaaaggtggccaatgtgtttctgtgtggtctatccagctt

SEQ ID NO: 23537 - DNA, 80 bp, synthetic construct
  misc_feature 1..80: note = Synthetic: >NC_044932.1-cand-800-879
  source 1..80: mol_type = other DNA
attcaccaggcctattaaggacctcgtaggtagactcaaaccattgaacatcctcaacattgtcaccaactgtgattgga

SEQ ID NO: 23538 - DNA, 80 bp, synthetic construct
  misc_feature 1..80: note = Synthetic: >NC_044932.1-cand-880-959
  source 1..80: mol_type = other DNA
ctttccccggtgttgtagaagctctcatcctactggcagaactctttggcattttctggaccccaccggacatatccgct

SEQ ID NO: 23539 - DNA, 80 bp, synthetic construct
  misc_feature 1..80: note = Synthetic: >NC_044932.1-cand-960-1039
  source 1..80: mol_type = other DNA
ttcgtagcctccctgttgggcgactacgagatgcaagggcctgaggacattgcaaccgagatcgtgccagttgttctcgg

SEQ ID NO: 23540 - DNA, 80 bp, synthetic construct
  misc_feature 1..80: note = Synthetic: >NC_044932.1-cand-1040-1119
  source 1..80: mol_type = other DNA
tggtattggcatggtccttggtttcaccaaagagaggattggccgactactgagttcagctgcatcatcactcagggcat

SEQ ID NO: 23541 - DNA, 80 bp, synthetic construct
  misc_feature 1..80: note = Synthetic: >NC_044932.1-cand-1120-1199
  source 1..80: mol_type = other DNA
gcaaggagattggcaactacgggatagaggtggtcaaattggtgatgaaatggttctttcccaccaaaaatgaagtgaat

SEQ ID NO: 23542 - DNA, 80 bp, synthetic construct
  misc_feature 1..80: note = Synthetic: >NC_044932.1-cand-1200-1279
  source 1..80: mol_type = other DNA
gaaatggagatggttagggcgatagaagatgcggtacttgacttcgaggcaatagaaaacaaccatatgacagccctgct

SEQ ID NO: 23543 - DNA, 80 bp, synthetic construct
  misc_feature 1..80: note = Synthetic: >NC_044932.1-cand-1280-1359
  source 1..80: mol_type = other DNA
caaagacaagaacagcctagccactttcctcagagcactagacatggaggaggagaaagcgcggaaattgtcaaccaaat

SEQ ID NO: 23544 - DNA, 80 bp, synthetic construct
  misc_feature 1..80: note = Synthetic: >NC_044932.1-cand-1360-1439
  source 1..80: mol_type = other DNA
ccgcgtcaccagacataatcggtaccataaacgcccttctagccaggctcgccgccgctagatccctagtccacagggcc

SEQ ID NO: 23545 - DNA, 80 bp, synthetic construct
  misc_feature 1..80: note = Synthetic: >NC_044932.1-cand-1440-1519
  source 1..80: mol_type = other DNA
aaggaagagatgtcatccaggatgcgtcctgttgtcattatgatttctggccgacccggaatagggaagacacaccttgc

SEQ ID NO: 23546 - DNA, 80 bp, synthetic construct
  misc_feature 1..80: note = Synthetic: >NC_007363.1-cand-930-1009
  source 1..80: mol_type = other DNA
agagtatcggcaggaacagcagagtgctgtggatgttgacgatggtcattttgtcaacatagagctggagtaaaaaacta

SEQ ID NO: 23547 - DNA, 80 bp, synthetic construct
  misc_feature 1..80: note = Synthetic: >NC_000883.2-cand-270-349
  source 1..80: mol_type = other DNA
aggaaatgacgtcacaggaaatgacgtaattgtccgccatcttgtaccggaagtcccgcctaccggcggcgaccggcggc

SEQ ID NO: 23548 - DNA, 80 bp, synthetic construct
  misc_feature 1..80: note = Synthetic: >NC_026426.1-cand-1410-1489
  source 1..80: mol_type = other DNA
cgaacccgatcgtgccttcctttgacatgaataatgaaggatcttatttcttcggagacaatgcagaggagtatgacaat

SEQ ID NO: 23549 - DNA, 80 bp, synthetic construct
  misc_feature 1..80: note = Synthetic: >EVD70-cand-450-529
  source 1..80: mol_type = other DNA
cccctgaatgcggctaatcccaaccacggagcaaatgctcacaatccagtgagtggtttgtcgtaatgcgcaagtctgtg

SEQ ID NO: 23550 - DNA, 80 bp, synthetic construct
  misc_feature 1..80: note = Synthetic: >JX443691.1-cand-80-159
  source 1..80: mol_type = other DNA
aaaagcttaaagatgccgagaaggcagtggaggtggacccagatgacgttaacaagagcacactacaaagtagacgggca

SEQ ID NO: 23551 - DNA, 80 bp, synthetic construct
  misc_feature 1..80: note = Synthetic: >AdVE4-cand-12120-12199
  source 1..80: mol_type = other DNA
caacgcatcatggcgctgacgacccgcaaccccgaagcctttagacagcagccccaggccaaccggctctcggccatttt

SEQ ID NO: 23552 - DNA, 80 bp, synthetic construct
  misc_feature 1..80: note = Synthetic: >NC_003310.1-cand-84910-84989
  source 1..80: mol_type = other DNA
acttgataggtgaaaagattaattatccgggtctcttaaaggatggcgaaattattgcaaacgacgtagatagtaatttt

SEQ ID NO: 23553 - DNA, 80 bp, synthetic construct
  misc_feature 1..80: note = Synthetic: >NC_007380.1-cand-650-729
  source 1..80: mol_type = other DNA
aaacggaaaatggcgagaacaattaggtcaaaagttcgaagagataagatggctgattgaagaagtgagacacagattga

SEQ ID NO: 23554 - DNA, 80 bp, synthetic construct
  misc_feature 1..80: note = Synthetic: >NC_001611.1-cand-181370-181449
  source 1..80: mol_type = other DNA
tacgaaaatcggaaatacgccgttacacacttaccttcaacagtataccaaacatagtcctcgtgtggtgtatgctcttt

SEQ ID NO: 23555 - DNA, 80 bp, synthetic construct
  misc_feature 1..80: note = Synthetic: >NC_007375.1-cand-0-79
  source 1..80: mol_type = other DNA
aaagcaggcaaaccatttgaatggatgtcaatccgaccttacttttcttgaaagttccagcgcaaaatgccataagtact

SEQ ID NO: 23556 - DNA, 80 bp, synthetic construct
  misc_feature 1..80: note = Synthetic: >NC_004906.1-cand-0-79
  source 1..80: mol_type = other DNA
aaagcagggtgacaaagacataatggattccaacactgtgtcaagctttcaggtagactgctttctttggcatgtccgca

SEQ ID NO: 23557 - DNA, 80 bp, synthetic construct
  misc_feature 1..80: note = Synthetic: >AdVB3-cand-26530-26609
  source 1..80: mol_type = other DNA
aaagtaaaaaaccgatctctgcgctcgctcaccagaagttgtttgtatcacaagagcgaagaccaacttcagcgcactct

SEQ ID NO: 23558 - DNA, 80 bp, synthetic construct
  misc_feature 1..80: note = Synthetic: >NC_001611.1-cand-181530-181609
  source 1..80: mol_type = other DNA
acaggtcatattctcataatgttactcaattggcacgaacaaaaatacgggaaattacaaaaggaagaaggacaccattt

SEQ ID NO: 23559 - DNA, 80 bp, synthetic construct
  misc_feature 1..80: note = Synthetic: >NC_002640.1-cand-10550-10629
  source 1..80: mol_type = other DNA
cgctgggaaagaccagagatcctgctgtctctgcaacatcaatccaggcacagagcgccgcaagatggattggtgttgtt

SEQ ID NO: 23560 - DNA, 80 bp, synthetic construct
  misc_feature 1..80: note = Synthetic: >HCV.A20-cand-5760-5839
  source 1..80: mol_type = other DNA
aacactagtaagtaccccaacatgtatgtgcctgtcggtgcagtgaccgaacaagggtacctcaatctgggtgggcgcca

SEQ ID NO: 23561 - DNA, 80 bp, synthetic construct
  misc_feature 1..80: note = Synthetic: >MH539866.1-cand-3570-3649
  source 1..80: mol_type = other DNA
aacagactaaatatcagctaaaaaaaacaaacccttaacacctatataatcccatttgcttattacgaggcttttgttcc

SEQ ID NO: 23562 - DNA, 80 bp, synthetic construct
  misc_feature 1..80: note = Synthetic: >NC_001611.1-cand-45780-45859
  source 1..80: mol_type = other DNA
tagatttccaaagatacacacattaggatacagactgttataatcaaagattaatacattattactaaacattttttgtt

SEQ ID NO: 23563 - DNA, 80 bp, synthetic construct
  misc_feature 1..80: note = Synthetic: >NC_003310.1-cand-37710-37789
  source 1..80: mol_type = other DNA
cttaaagactataccatatcctcctgtagatatgtgataaaaatcgtcgtttataggataaaatcgtttatctttttgtt

SEQ ID NO: 23564 - DNA, 80 bp, synthetic construct
  misc_feature 1..80: note = Synthetic: >NC_003310.1-cand-77850-77929
  source 1..80: mol_type = other DNA
ttaacatggaagttatcgctgatcgtctagacgatatagtgaaacaaaatatagcggatgaaaaatttgtagattttgtt

SEQ ID NO: 23565 - DNA, 80 bp, synthetic construct
  misc_feature 1..80: note = Synthetic: >NC_001611.1-cand-53720-53799
  source 1..80: mol_type = other DNA
aacggctacctcattagcatccgcatattgtattatctcagtgcaaagattactacacttgatggttcctaaattttgtt

SEQ ID NO: 23566 - DNA, 80 bp, synthetic construct
  misc_feature 1..80: note = Synthetic: >NC_001611.1-cand-72860-72939
  source 1..80: mol_type = other DNA
aacaaagtagttgttaactttgattatcctaatcaggaatatgactattttcacatgtactttatgttgaggaccgtata

SEQ ID NO: 23567 - DNA, 80 bp, synthetic construct
  misc_feature 1..80: note = Synthetic: >NC_001611.1-cand-108530-108609
  source 1..80: mol_type = other DNA
aacaaatttcctaaatatccctttaattgagtcattcgaagcgtcaatagaatatgtctcttaactatttccggctgttg

SEQ ID NO: 23568 - DNA, 80 bp, synthetic construct
  misc_feature 1..80: note = Synthetic: >AF482713.1-cand-80-159
  source 1..80: mol_type = other DNA
aacaacagctcgtgactgctcggcaaaagctcaaagatgccgaaaagacggtggaggtggacccggatgaggttaacaag

SEQ ID NO: 23569 - DNA, 80 bp, synthetic construct
  misc_feature 1..80: note = Synthetic: >NC_003310.1-cand-77590-77669
  source 1..80: mol_type = other DNA
atagcacctagacaagttgctggtacaggtgttcagttttatatgattgttatcggtgttataatattggcagcgttgtt

SEQ ID NO: 23570 - DNA, 80 bp, synthetic construct
  misc_feature 1..80: note = Synthetic: >NC_003310.1-cand-98820-98899
  source 1..80: mol_type = other DNA
aacaagatcgatagacactgccgtatataggagaaaaacaactcttcgggttgtaggtactaggaaaaatccaaattgcg

SEQ ID NO: 23571 - DNA, 80 bp, synthetic construct
  misc_feature 1..80: note = Synthetic: >EVD70-cand-850-929
  source 1..80: mol_type = other DNA
aacaagatttcagccaagacccatccaagttcacagagcctgtagctgaagccctaaaagctggagccccagtcctaaaa

SEQ ID NO: 23572 - DNA, 80 bp, synthetic construct
  misc_feature 1..80: note = Synthetic: >AdVB3-cand-19360-19439
  source 1..80: mol_type = other DNA
aacaagccatgcctaacagacccaattacattggattcagggataactttgtaggcctaatgtactacaacagtactgga

SEQ ID NO: 23573 - DNA, 80 bp, synthetic construct
  misc_feature 1..80: note = Synthetic: >EVA90-cand-5400-5479
  source 1..80: mol_type = other DNA
cctggattagactttgctctctctctattgaagaagaacatcagaaaatgccaaacagaccaggggcacttcaccttgtt

SEQ ID NO: 23574 - DNA, 80 bp, synthetic construct
  misc_feature 1..80: note = Synthetic: >NC_001611.1-cand-78200-78279
  source 1..80: mol_type = other DNA
aacacaatgaaccaacacgggctcgtttcgttgatcacatttagataagaaggcggttacgtcgtcaaaatatttactaa

SEQ ID NO: 23575 - DNA, 80 bp, synthetic construct
  misc_feature 1..80: note = Synthetic: >AdVB7-cand-33690-33769
  source 1..80: mol_type = other DNA
attctcgtattttgtatagcaaaacgcggccctggcacaacacactcttcttcgtcttctatcctgccgcttagtgtgtt

SEQ ID NO: 23576 - DNA, 80 bp, synthetic construct
  misc_feature 1..80: note = Synthetic: >NC_001611.1-cand-117600-117679
  source 1..80: mol_type = other DNA
ggatgaatcacatacgtataatctgatgaacaatacagcagttacaagatttttagcgtattatcctccgatgatgtgtt

SEQ ID NO: 23577 - DNA, 80 bp, synthetic construct
  misc_feature 1..80: note = Synthetic: >NC_001611.1-cand-129360-129439
  source 1..80: mol_type = other DNA
atgtggtgttctaacctatcaactgccgctgtatcacaacaatagtgtccgatggaattaagattatgatccaatgtgtt

SEQ ID NO: 23578 - DNA, 80 bp, synthetic construct
  misc_feature 1..80: note = Synthetic: >NC_003310.1-cand-151630-151709
  source 1..80: mol_type = other DNA
aagataatacattttcttacaattaacgagaatggcgtttgatatatcagttaatgcgtctaaaacaataaatgcattag

SEQ ID NO: 23579 - DNA, 80 bp, synthetic construct
  misc_feature 1..80: note = Synthetic: >NC_001611.1-cand-52300-52379
  source 1..80: mol_type = other DNA
gacagcttctagaagttgatacaacataggactagccgcggtaacttttatttttagaaagtatccatcacttctatctt

SEQ ID NO: 23580 - DNA, 80 bp, synthetic construct
  misc_feature 1..80: note = Synthetic: >NC_001611.1-cand-177620-177699
  source 1..80: mol_type = other DNA
caacgcatggtgaaccagaatccactaaatcaataccatctgatgtctgtgataggtatcctctaaagaaattctatctt

SEQ ID NO: 23581 - DNA, 80 bp, synthetic construct
  misc_feature 1..80: note = Synthetic: >NC_003310.1-cand-60240-60319
  source 1..80: mol_type = other DNA
atccttgacttgaggagatctaaacaatctagttttgagaacatcgataagttcatcgggaatgacatacatactatctt

SEQ ID NO: 23582 - DNA, 80 bp, synthetic construct
  misc_feature 1..80: note = Synthetic: >NC_003310.1-cand-86040-86119
  source 1..80: mol_type = other DNA
gattttatggagtatatattcttgacgcatcttaatccttctagaattagaattacaaaagaaacggctatcactatctt

SEQ ID NO: 23583 - DNA, 80 bp, synthetic construct
  misc_feature 1..80: note = Synthetic: >NC_001611.1-cand-106130-106209
  source 1..80: mol_type = other DNA
atacgccgcattctctgtagtcgacgctctcaaatgggaaacaatctccattatttttttggaatcggatactatatctt

SEQ ID NO: 23584 - DNA, 80 bp, synthetic construct
  misc_feature 1..80: note = Synthetic: >NC_001611.1-cand-147870-147949
  source 1..80: mol_type = other DNA
aagatattaatggagtatacgagccgggaaaaagaagatggttaaaaataaagcgagactatttgaacgagggttccatg

SEQ ID NO: 23585 - DNA, 80 bp, synthetic construct
  misc_feature 1..80: note = Synthetic: >NC_003310.1-cand-126120-126199
  source 1..80: mol_type = other DNA
gctgctgttcctctgtaaataaatctttatcaagcactccagcacccgcagagaagtcatcaagcatattgtaatatctt

SEQ ID NO: 23586 - DNA, 80 bp, synthetic construct
  misc_feature 1..80: note = Synthetic: >NC_003310.1-cand-75930-76009
  source 1..80: mol_type = other DNA
agaatcgtaatggataatgacgataacattctaggaatgttgttttcggatagagttcaatcctttaagattaacatctt

SEQ ID NO: 23587 - DNA, 80 bp, synthetic construct
  misc_feature 1..80: note = Synthetic: >NC_003310.1-cand-141690-141769
  source 1..80: mol_type = other DNA
aagattaaacataagggaatgtcatttgtattttataagccaaagcattctaccgttgttaaatacttgtctggaggagg

SEQ ID NO: 23588 - DNA, 80 bp, synthetic construct
  misc_feature 1..80: note = Synthetic: >HCV.A17-cand-4400-4479
  source 1..80: mol_type = other DNA
aagattcgcaccactgtacgcagtggaagcgaagagaatacaaaagctagaacacacaatcaacaattacatacagttca

SEQ ID NO: 23589 - DNA, 80 bp, synthetic construct
  misc_feature 1..80: note = Synthetic: >AdVB7-cand-26100-26179
  source 1..80: mol_type = other DNA
aagattgggacagccaggcagaggaggtggacagcctggaggaagacagtttggaggaggaagacgaggaggcagaggag

SEQ ID NO: 23590 - DNA, 80 bp, synthetic construct
  misc_feature 1..80: note = Synthetic: >NC_001611.1-cand-62230-62309
  source 1..80: mol_type = other DNA
aagcaaatgatgacttgatagaatatctcctcaaggaatacactcctcagatttatacatattctaatgagcacgttccc

SEQ ID NO: 23591 - DNA, 80 bp, synthetic construct
  misc_feature 1..80: note = Synthetic: >AdVB7-cand-26020-26099
  source 1..80: mol_type = other DNA
aagcaagaagctgaaggtgcagctgacgcccccagaggatatggaggaagactgggacagtcaggcagaggaggagatgg

SEQ ID NO: 23592 - DNA, 80 bp, synthetic construct
  misc_feature 1..80: note = Synthetic: >NC_001611.1-cand-71740-71819
  source 1..80: mol_type = other DNA
aagcaattacagatttctccgtgataggtattgatgaaggacagttctttccagacattgttgaattctgtgagcgtatg

SEQ ID NO: 23593 - DNA, 80 bp, synthetic construct
  misc_feature 1..80: note = Synthetic: >NC_003310.1-cand-8280-8359
  source 1..80: mol_type = other DNA
tgtatcatcgtctagtttatcagtgtcctatgatatattcctgttatcatcattagttaatgaaaataactctcgtgctt

SEQ ID NO: 23594 - DNA, 80 bp, synthetic construct
  misc_feature 1..80: note = Synthetic: >NC_003310.1-cand-108550-108629
  source 1..80: mol_type = other DNA
ctcgagatgggcccgttctctgaatatagaacatcatttccaaatctaacttctagtctagaaataatatcggtcttatt

SEQ ID NO: 23595 - DNA, 80 bp, synthetic construct
  misc_feature 1..80: note = Synthetic: >NC_001611.1-cand-53490-53569
  source 1..80: mol_type = other DNA
ctatcaaatggataatttaagagaataaacgcgtctgctaatccttgaacaccaataccgataggtctatgtctcttatt

SEQ ID NO: 23596 - DNA, 80 bp, synthetic construct
  misc_feature 1..80: note = Synthetic: >NC_001611.1-cand-50350-50429
  source 1..80: mol_type = other DNA
tagtcgtgcaatttattttcgggtttaaattctttaatatcgacaatttcatacgctcctcttttgaaactaaacttatt

SEQ ID NO: 23597 - DNA, 80 bp, synthetic construct
  misc_feature 1..80: note = Synthetic: >NC_001611.1-cand-35540-35619
  source 1..80: mol_type = other DNA
tcaatgatatgattatcgttttcatcttttatcaccatatagtttctaagatatgggattttacttaatataatattatt

SEQ ID NO: 23598 - DNA, 80 bp, synthetic construct
  misc_feature 1..80: note = Synthetic: >NC_001611.1-cand-46420-46499
  source 1..80: mol_type = other DNA
atagaatccaatttgtacgaatccaatttttcagatttttgaatgaatgaatacagatcaaaaaatatagttccattatt

SEQ ID NO: 23599 - DNA, 80 bp, synthetic construct
  misc_feature 1..80: note = Synthetic: >AdVB3-cand-34000-34079
  source 1..80: mol_type = other DNA
cattttctaactcctcaaacatcatattacattcctgcaccattcccagataattttcagctttccagccttcaattatt

SEQ ID NO: 23600 - DNA, 80 bp, synthetic construct
  misc_feature 1..80: note = Synthetic: >NC_003310.1-cand-9620-9699
  source 1..80: mol_type = other DNA
aatacatagatgaaccaaatgatataagactaacagtatgcattatccgaaatattaataacattacatattatatcaat

SEQ ID NO: 23601 - DNA, 80 bp, synthetic construct
  misc_feature 1..80: note = Synthetic: >NC_003310.1-cand-70910-70989
  source 1..80: mol_type = other DNA
tataatataggtgtatttgagcactagaaacggtcgatgcatcggtaaatatagctgtatctaatgttctagtcggtatt

SEQ ID NO: 23602 - DNA, 80 bp, synthetic construct
  misc_feature 1..80: note = Synthetic: >NC_001611.1-cand-132500-132579
  source 1..80: mol_type = other DNA
cgactttttgtttatattaaatattttaaaatttatagctgatagcaattcatgtactacggataatgtagacgcgtatt

SEQ ID NO: 23603 - DNA, 80 bp, synthetic construct
  misc_feature 1..80: note = Synthetic: >NC_003310.1-cand-96340-96419
  source 1..80: mol_type = other DNA
aatacggatttgttcttgtagataatgttgatttcgctacaattatagaacgaagtaaaaagtttattaatggcgcatct

SEQ ID NO: 23604 - DNA, 80 bp, synthetic construct
  misc_feature 1..80: note = Synthetic: >NC_003310.1-cand-61680-61759
  source 1..80: mol_type = other DNA
ctgactagataaactatcagtaagttttatagagatagatgaacaattagcgtattgagaagcatttagtgtaacgtatt

SEQ ID NO: 23605 - DNA, 80 bp, synthetic construct
  misc_feature 1..80: note = Synthetic: >NC_001611.1-cand-83180-83259
  source 1..80: mol_type = other DNA
tctctgcagtatcgactgttctagaggatgttcaagcagctggtatctctagacaatttacttctatgactaaatctatt

SEQ ID NO: 23606 - DNA, 80 bp, synthetic construct
  misc_feature 1..80: note = Synthetic: >AdVB7-cand-34480-34559
  source 1..80: mol_type = other DNA
aatagcaggggacgctacagtgcagtacaagcgcagacctccccaattggctccagcaaaaacaagattagaataagcat

SEQ ID NO: 23607 - DNA, 80 bp, synthetic construct
  misc_feature 1..80: note = Synthetic: >EVD70-cand-4420-4499
  source 1..80: mol_type = other DNA
ttgaaccagtatgtttgataatacatggatctccaggcactgggaagtcagtggcatctaacctcattgccagagctatt

SEQ ID NO: 23608 - DNA, 80 bp, synthetic construct
  misc_feature 1..80: note = Synthetic: >NC_001611.1-cand-45940-46019
  source 1..80: mol_type = other DNA
aatagctttaacagtggacccttgatgactgtactcgctttatacccgaataccatggattgaggaagcacatatgttga

SEQ ID NO: 23609 - DNA, 80 bp, synthetic construct
  misc_feature 1..80: note = Synthetic: >AdVB7-cand-1030-1109
  source 1..80: mol_type = other DNA
ttggactgtccggagctgcctggacatggctgtaagtcttgtgaatttcacaggaataacactggaatgaaagaactatt

SEQ ID NO: 23610 - DNA, 80 bp, synthetic construct
  misc_feature 1..80: note = Synthetic: >NC_003310.1-cand-74740-74819
  source 1..80: mol_type = other DNA
aattctgctagttcttgagacattgatttatttgatgaatctatttggttctctagatactctaccatttctgccgcata

SEQ ID NO: 23611 - DNA, 80 bp, synthetic construct
  misc_feature 1..80: note = Synthetic: >NC_001611.1-cand-81100-81179
  source 1..80: mol_type = other DNA
gacctctcttaatttcagaagaaaactttttttcgtattcctgacgtctagagtttatatcaataaaaaagttaagaatt

SEQ ID NO: 23612 - DNA, 80 bp, synthetic construct
  misc_feature 1..80: note = Synthetic: >NC_001611.1-cand-169430-169509
  source 1..80: mol_type = other DNA
tatagtaagcattctatctttaagggattttctgacaaagttagaaaaaatgatttagacatgaatgtggtaaaagaatt

SEQ ID NO: 23613 - DNA, 80 bp, synthetic construct
  misc_feature 1..80: note = Synthetic: >NC_003310.1-cand-108860-108939
  source 1..80: mol_type = other DNA
taaaagaattttttcgggttccaaacattaacagattagtatgaagataaacactcatattatcaggaacattatcaatt

SEQ ID NO: 23614 - DNA, 80 bp, synthetic construct
  misc_feature 1..80: note = Synthetic: >EVD70-cand-1490-1569
  source 1..80: mol_type = other DNA
aattgtgttaccatggatgaacagtgcaccaatggattttgctcttagacataacaactggacattagccgttattccgg

SEQ ID NO: 23615 - DNA, 80 bp, synthetic construct
  misc_feature 1..80: note = Synthetic: >EVB69-cand-7250-7329
  source 1..80: mol_type = other DNA
tgcctgaccctccctgcgttttcaaccttacgcaggaaatggttggactccttctaaattagagacaatttgaaacaatt

SEQ ID NO: 23616 - DNA, 80 bp, synthetic construct
  misc_feature 1..80: note = Synthetic: >NC_001611.1-cand-80940-81019
  source 1..80: mol_type = other DNA
ttcttggatttcatataagaaactataaagtccgcactactgttaagaatgattactaacgcaactatatagtttaaatt

SEQ ID NO: 23617 - DNA, 80 bp, synthetic construct
  misc_feature 1..80: note = Synthetic: >NC_001611.1-cand-96190-96269
  source 1..80: mol_type = other DNA
taaatgttatggccatagaggatgttattatgaatcattaaaaaaattaactgaggatgattgattagaaaatataaatt

SEQ ID NO: 23618 - DNA, 80 bp, synthetic construct
  misc_feature 1..80: note = Synthetic: >NC_003310.1-cand-82400-82479
  source 1..80: mol_type = other DNA
agttactttaataaccgttagacataaaattgattctatgaaaactgtgtttcaggtatttaacgaatcatccataaatt

SEQ ID NO: 23619 - DNA, 80 bp, synthetic construct
  misc_feature 1..80: note = Synthetic: >NC_003310.1-cand-77510-77589
  source 1..80: mol_type = other DNA
aatttattaatacaggatctagcaaaggaaattgtgccattaaggcgttgatgcaattgactactaaggccactactcaa

SEQ ID NO: 23620 - DNA, 80 bp, synthetic construct
  misc_feature 1..80: note = Synthetic: >NC_003310.1-cand-83860-83939
  source 1..80: mol_type = other DNA
atgatattaacgttcctaattctctcatctatcaaaagttaatttctattcatgaaaagttttggccattattagaaatt

SEQ ID NO: 23621 - DNA, 80 bp, synthetic construct
  misc_feature 1..80: note = Synthetic: >NC_001611.1-cand-68190-68269
  source 1..80: mol_type = other DNA
cgcggtcgtcgataacaaattaaagatacaaaacgtaattatagatgaatgttacggagccccaggatctccaacaaatt

SEQ ID NO: 23622 - DNA, 80 bp, synthetic construct
  misc_feature 1..80: note = Synthetic: >EVA76-cand-7180-7259
  source 1..80: mol_type = other DNA
cacaagaccacgtgcggtcactgtgtctcctagcatggcacaatggtagggaaacctatgaggaatttgttgataaaatt

SEQ ID NO: 23623 - DNA, 80 bp, synthetic construct
  misc_feature 1..80: note = Synthetic: >NC_003310.1-cand-117100-117179
  source 1..80: mol_type = other DNA
aattttattctagaattgataggagtcgccaaatgtaccttatacgttatatctcccttgatgcgttccatttgtgtatc

SEQ ID NO: 23624 - DNA, 80 bp, synthetic construct
  misc_feature 1..80: note = Synthetic: >NC_001611.1-cand-93170-93249
  source 1..80: mol_type = other DNA
aatttttttataataattctcgtattaagtataacgatgccaagttacttaaaatggttacatcagttataaaaaataaa

SEQ ID NO: 23625 - DNA, 80 bp, synthetic construct
  misc_feature 1..80: note = Synthetic: >NC_001611.1-cand-147630-147709
  source 1..80: mol_type = other DNA
acaaaaagaaagaatataaaaactctaacatgtgtttgtttgtgtttgactgtttgtactttgatggattcgatatgacg

SEQ ID NO: 23626 - DNA, 80 bp, synthetic construct
  misc_feature 1..80: note = Synthetic: >AdVB3-cand-8940-9019
  source 1..80: mol_type = other DNA
gcataggcgctggaaaaggtagttgagtgtggtggcaatgtgctcggtgacaaagaaatacatgatccatcgtctcaacg

SEQ ID NO: 23627 - DNA, 80 bp, synthetic construct
  misc_feature 1..80: note = Synthetic: >AdVB3-cand-9100-9179
  source 1..80: mol_type = other DNA
ttacgcgcggacacggtcaactcctcttccaaaagacggatgagttcggcgatggtggtgcgcacctcgcgctcgaaagc

SEQ ID NO: 23628 - DNA, 80 bp, synthetic construct
  misc_feature 1..80: note = Synthetic: >AdVB3-cand-9160-9239
  source 1..80: mol_type = other DNA
cgcacctcgcgctcgaaagcccccgggatttcttcctcaatctcttcttcttccactaacatctcttcctcttcaggtgg

SEQ ID NO: 23629 - DNA, 80 bp, synthetic construct
  misc_feature 1..80: note = Synthetic: >AdVB3-cand-9610-9689
  source 1..80: mol_type = other DNA
gggatctctctttcttctccttcctcctcttgggagggtaagacgatgctgctggtgatgaaattaaaataggcagtttt

SEQ ID NO: 23630 - DNA, 80 bp, synthetic construct
  misc_feature 1..80: note = Synthetic: >AdVB3-cand-9920-9999
  source 1..80: mol_type = other DNA
cgaggatggcttgctgcacctgggtaagggtggcttggaagtcgtcaaagtccacaaagcggtggtaggccccggtgttg

SEQ ID NO: 23631 - DNA, 80 bp, synthetic construct
  misc_feature 1..80: note = Synthetic: >AdVB3-cand-10210-10289
  source 1..80: mol_type = other DNA
tcttccagcatgaggcggtggtagccgtagatgtacctggacatccaggtgacaccggaggcggtggtggatgcacgtgg

SEQ ID NO: 23632 - DNA, 80 bp, synthetic construct
  misc_feature 1..80: note = Synthetic: >AdVB3-cand-10240-10319
  source 1..80: mol_type = other DNA
atgtacctggacatccaggtgacaccggaggcggtggtggatgcacgtgggaactcgcgcacgcggttccagatgttgcg

SEQ ID NO: 23633 - DNA, 80 bp, synthetic construct
  misc_feature 1..80: note = Synthetic: >AdVB3-cand-10320-10399
  source 1..80: mol_type = other DNA
cagcggcatgaagtagttcatggtaggcacggtctgaccagtaaggcgcgcgcagtcattgacgctctgtagacacggag

SEQ ID NO: 23634 - DNA, 80 bp, synthetic construct
  misc_feature 1..80: note = Synthetic: >AdVB3-cand-10440-10519
  source 1..80: mol_type = other DNA
gaacgtgaacgggttgggtcgcggtgtaccccggttcgagtccaaagctaaacaatcaaactcggatcggccggagccgc

SEQ ID NO: 23635 - DNA, 80 bp, synthetic construct
  misc_feature 1..80: note = Synthetic: >AdVB3-cand-10480-10559
  source 1..80: mol_type = other DNA
tccaaagctaaacaatcaaactcggatcggccggagccgcggctaacgtggtattggctatcccgtctcgacccagccga

SEQ ID NO: 23636 - DNA, 80 bp, synthetic construct
  misc_feature 1..80: note = Synthetic: >AdVB3-cand-10560-10639
  source 1..80: mol_type = other DNA
cgaatatccagggtacggagtagagtcgtttttgctgctttgttgctttttcctggacgggtgccattgccacgtcaagc

SEQ ID NO: 23637 - DNA, 80 bp, synthetic construct
  misc_feature 1..80: note = Synthetic: >AdVB3-cand-10640-10719
  source 1..80: mol_type = other DNA
tttagaacgctcagttctcgggccgtgagtggctcgcgcccatagtctggagaatcagccgccagggttgcgttgcggta

SEQ ID NO: 23638 - DNA, 80 bp, synthetic construct
  misc_feature 1..80: note = Synthetic: >AdVB3-cand-10720-10799
  source 1..80: mol_type = other DNA
tgccccggttcgagccaaagcgcggctcgtattggccggtttccgcgacaagcgagggtttggcagccccgtcatttcca

SEQ ID NO: 23639 - DNA, 80 bp, synthetic construct
  misc_feature 1..80: note = Synthetic: >AdVB3-cand-10800-10879
  source 1..80: mol_type = other DNA
agaccccgccagccgacttcgccagtttacgggagcgagccctttttttttttttttgttttttgttgaccagatgcatc

SEQ ID NO: 23640 - DNA, 80 bp, synthetic construct
  misc_feature 1..80: note = Synthetic: >AdVB3-cand-10880-10959
  source 1..80: mol_type = other DNA
cagtgctgcgacagatgcgcccccagcaacaggccccttctcagcaacagccacaaaaggctcttcttgctcctgcaact

SEQ ID NO: 23641 - DNA, 80 bp, synthetic construct
  misc_feature 1..80: note = Synthetic: >AdVB3-cand-10960-11039
  source 1..80: mol_type = other DNA
actgcagctgcagccgtgagcggcgcgggacagcccgcctatgatctggacttggaagagggcgagggattggcgcgcct

SEQ ID NO: 23642 - DNA, 80 bp, synthetic construct
  misc_feature 1..80: note = Synthetic: >EVA76-cand-2210-2289
  source 1..80: mol_type = other DNA
acaatcatcagtcaccctagtgataccttggatcagtaacagccatttcagaacacaggcaacaggtggattctttgatt

SEQ ID NO: 23643 - DNA, 80 bp, synthetic construct
  misc_feature 1..80: note = Synthetic: >EVA76-cand-2280-2359
  source 1..80: mol_type = other DNA
ttctttgattactatgcatcaggagttgtcaccatttggtaccagacaaactttgtggtaccatcaggagcccctaccag

SEQ ID NO: 23644 - DNA, 80 bp, synthetic construct
  misc_feature 1..80: note = Synthetic: >EVA76-cand-2360-2439
  source 1..80: mol_type = other DNA
tgcatacatcattgcactgggagcagcacagaaaaacttcactctcagattgtgcaaagacactgaagccatctcacaaa

SEQ ID NO: 23645 - DNA, 80 bp, synthetic construct
  misc_feature 1..80: note = Synthetic: >EVA76-cand-2440-2519
  source 1..80: mol_type = other DNA
ctgcaatattacaaggtgatccagtggaggacatgattaacactgctgtcagcaacacactgtcacaaactatagggaga

SEQ ID NO: 23646 - DNA, 80 bp, synthetic construct
  misc_feature 1..80: note = Synthetic: >EVA76-cand-2520-2599
  source 1..80: mol_type = other DNA
cctcaaactcaaacaactgctgaaaacaccagacctagcacacaccaaattggcacaggagaagttcctgcacttcaagc

SEQ ID NO: 23647 - DNA, 80 bp, synthetic construct
  misc_feature 1..80: note = Synthetic: >EVA76-cand-2620-2699
  source 1..80: mol_type = other DNA
ctaacaccacagatgaaaacatgattgaaaccagagcagtcattaacaaacatagcactgaagagacttgcatagaacac

SEQ ID NO: 23648 - DNA, 80 bp, synthetic construct
  misc_feature 1..80: note = Synthetic: >EVA76-cand-2680-2759
  source 1..80: mol_type = other DNA
aagagacttgcatagaacacttcttctccagagcaggccttgtgagcatgatctccctcctagtgtccgaggaaacaacc

SEQ ID NO: 23649 - DNA, 80 bp, synthetic construct
  misc_feature 1..80: note = Synthetic: >EVA76-cand-2760-2839
  source 1..80: mol_type = other DNA
caagcttatgccaactgggaaattgacacaatgggatttgtccagatgagaagaaaacttgaaatgttcacatacatgag

SEQ ID NO: 23650 - DNA, 80 bp, synthetic construct
  misc_feature 1..80: note = Synthetic: >EVA76-cand-2840-2919
  source 1..80: mol_type = other DNA
gttcaatgctgaattcacatttgtagccacaggactcaatggcacagcccctcaaacaatgctacagtatatgtatgttc

SEQ ID NO: 23651 - DNA, 80 bp, synthetic construct
  misc_feature 1..80: note = Synthetic: >EVA76-cand-2920-2999
  source 1..80: mol_type = other DNA
caccaggtgcaccagtaccgacagatagagactccttccaatggcagacagcaacaaacccctctgtgtttgttaaaatg

SEQ ID NO: 23652 - DNA, 80 bp, synthetic construct
  misc_feature 1..80: note = Synthetic: >EVA76-cand-3000-3079
  source 1..80: mol_type = other DNA
tcagaccccccagcccaagtgtctgtcccattcatgtcaccagcaagtgcttaccagtggttctatgatgggtaccccac

SEQ ID NO: 23653 - DNA, 80 bp, synthetic construct
  misc_feature 1..80: note = Synthetic: >EVA76-cand-3080-3159
  source 1..80: mol_type = other DNA
atttggctcacaccctgtgtcagaagatcttaggtatggtataagcccaaacaacaaaatgggcaccttttcaatcagag

SEQ ID NO: 23654 - DNA, 80 bp, synthetic construct
  misc_feature 1..80: note = Synthetic: >EVA76-cand-3160-3239
  source 1..80: mol_type = other DNA
tggttggatccggtcagctcacagaagctgttgtgatcaggattttcatgcgcattaagcacgtgcgcgcctgggtccca

SEQ ID NO: 23655 - DNA, 80 bp, synthetic construct
  misc_feature 1..80: note = Synthetic: >EVA76-cand-3240-3319
  source 1..80: mol_type = other DNA
agacccatccgatcccagaaatacatagtgaaaaattaccctaactttgacccagccgttaaaccacacagcaccagcag

SEQ ID NO: 23656 - DNA, 80 bp, synthetic construct
  misc_feature 1..80: note = Synthetic: >EVA76-cand-3350-3429
  source 1..80: mol_type = other DNA
tggacaacaatcaggagcaatctatgttggaaattacagaattgtcaacaggcacctggcaacaaagaaagactgggaga

SEQ ID NO: 23657 - DNA, 80 bp, synthetic construct
  misc_feature 1..80: note = Synthetic: >EVA76-cand-3400-3479
  source 1..80: mol_type = other DNA
ggcacctggcaacaaagaaagactgggagaacttggtatgggaatcatatgaaagagatttacttgtctccactaccact

SEQ ID NO: 23658 - DNA, 80 bp, synthetic construct
  misc_feature 1..80: note = Synthetic: >EVB69-cand-4390-4469
  source 1..80: mol_type = other DNA
caagtccaaatgccgtattgagcctgtatgtctgctcctacacgggagtcctggcgccggcaaatcagtagcaacaaatc

SEQ ID NO: 23659 - DNA, 80 bp, synthetic construct
  misc_feature 1..80: note = Synthetic: >EVB69-cand-4470-4549
  source 1..80: mol_type = other DNA
taattggaaggtcacttgctgaaaagcttaacagctcagtgtactcactacccccagatccagatcacttcgatggctat

SEQ ID NO: 23660 - DNA, 80 bp, synthetic construct
  misc_feature 1..80: note = Synthetic: >EVB69-cand-4550-4629
  source 1..80: mol_type = other DNA
aaacagcaggccgtggtgatcatggacgatctgtgccagaatcccgacgggaaagatgtctccttgttctgtcaaatggt

SEQ ID NO: 23661 - DNA, 80 bp, synthetic construct
  misc_feature 1..80: note = Synthetic: >EVB69-cand-4640-4719
  source 1..80: mol_type = other DNA
gacttcgtaccacccatggctgccctggaagagaaaggcattttgttcacctccccgttcgtgttggcatctaccaatgc

SEQ ID NO: 23662 - DNA, 80 bp, synthetic construct
  misc_feature 1..80: note = Synthetic: >EVB69-cand-4730-4809
  source 1..80: mol_type = other DNA
aatgccccaactgtgtcagacagtagggccttggcaaggaggttccactttgacatgaacattgaagttatttccatgta

SEQ ID NO: 23663 - DNA, 80 bp, synthetic construct
  misc_feature 1..80: note = Synthetic: >EVB69-cand-4800-4879
  source 1..80: mol_type = other DNA
tttccatgtatagccaaaatggcaagataaacatgccaatgtcggtgaacacatgtgatgaggagtgttgtccagtcaac

SEQ ID NO: 23664 - DNA, 80 bp, synthetic construct
  misc_feature 1..80: note = Synthetic: >EVB69-cand-4880-4959
  source 1..80: mol_type = other DNA
tttaaaaagtgttgcccgctagtgtgtgggaaagctatccagttcatagacagaagaacccaagtcagatactcccttga

SEQ ID NO: 23665 - DNA, 80 bp, synthetic construct
  misc_feature 1..80: note = Synthetic: >EVB69-cand-4930-5009
  source 1..80: mol_type = other DNA
cagaagaacccaagtcagatactcccttgacatgttggtgactgagatgttcagggaatacaatcacaggcacagtgttg

SEQ ID NO: 23666 - DNA, 80 bp, synthetic construct
  misc_feature 1..80: note = Synthetic: >EVB69-cand-5040-5119
  source 1..80: mol_type = other DNA
caccgatatacagagaaattaagatcagcgtaacaccagagacaccaccaccaccggccattgcagacttgctcaagtca

SEQ ID NO: 23667 - DNA, 80 bp, synthetic construct
  misc_feature 1..80: note = Synthetic: >EVB69-cand-5120-5199
  source 1..80: mol_type = other DNA
gtggatagtgaagccgtgagggagtactgcaaagaaaaaggatggctagttccagaaattaactccaccctacagattga

SEQ ID NO: 23668 - DNA, 80 bp, synthetic construct
  misc_feature 1..80: note = Synthetic: >EVB69-cand-5200-5279
  source 1..80: mol_type = other DNA
gaagcacgttagccgggccttcatctgtttgcaagcactaaccaccttcgtctcagtggccgggatcatctacataattt

SEQ ID NO: 23669 - DNA, 80 bp, synthetic construct
  misc_feature 1..80: note = Synthetic: >EVB69-cand-5230-5309
  source 1..80: mol_type = other DNA
gcaagcactaaccaccttcgtctcagtggccgggatcatctacataatttataaactctttgcaggcttccaaggagcat

SEQ ID NO: 23670 - DNA, 80 bp, synthetic construct
  misc_feature 1..80: note = Synthetic: >EVB69-cand-5350-5429
  source 1..80: mol_type = other DNA
aaggcaagcaaaagtgcagggtcccgtgtttgaatttgccgtcgcaatgatgaagagaaactcaagcacagtgaagactg

SEQ ID NO: 23671 - DNA, 80 bp, synthetic construct
  misc_feature 1..80: note = Synthetic: >EVB69-cand-5430-5509
  source 1..80: mol_type = other DNA
agtatggtgaattcaccatgttaggcatttatgacaggtgggctgttttgccgcgccatgccaagcctggaccaacaatc

SEQ ID NO: 23672 - DNA, 80 bp, synthetic construct
  misc_feature 1..80: note = Synthetic: >EVB69-cand-5510-5589
  source 1..80: mol_type = other DNA
ctgatgaatgaccaggaagtgggcgtgttggatgctaaagaattagtggataaggacggtacaaacctagaattgacact

SEQ ID NO: 23673 - DNA, 80 bp, synthetic construct
  misc_feature 1..80: note = Synthetic: >EVB69-cand-5590-5669
  source 1..80: mol_type = other DNA
gctcaagttgaacaggaatgaaaaattcagagacatcagaggcttcctggccaaggaggaggtggaagttaacgaagcag

SEQ ID NO: 23674 - DNA, 80 bp, synthetic construct
  misc_feature 1..80: note = Synthetic: >EVB80-cand-60-139
  source 1..80: mol_type = other DNA
ggtacctttgtgcgcctgttttatactcccgtcccccggttgtaacttagaagtaacactcacacgaccaatagtaggcg

SEQ ID NO: 23675 - DNA, 80 bp, synthetic construct
  misc_feature 1..80: note = Synthetic: >EVB80-cand-140-219
  source 1..80: mol_type = other DNA
tggcacgccagccatgtctcgatcaagcacttctgttaccccggactgagtatcaataggctgctcacacggccgaagga

SEQ ID NO: 23676 - DNA, 80 bp, synthetic construct
  misc_feature 1..80: note = Synthetic: >EVB80-cand-220-299
  source 1..80: mol_type = other DNA
gaaaacattcgttatccggccaactacttcgagaaacctagtaccaccatgaaggttgcgcagtgtttcgctccgcacaa

SEQ ID NO: 23677 - DNA, 80 bp, synthetic construct
  misc_feature 1..80: note = Synthetic: >EVB80-cand-390-469
  source 1..80: mol_type = other DNA
atgggacgcttcaatactgacatggtgcgaagagtctattgagctagttggtattcctccggcccctgaatgcggctaat

SEQ ID NO: 23678 - DNA, 80 bp, synthetic construct
  misc_feature 1..80: note = Synthetic: >EVB80-cand-620-699
  source 1..80: mol_type = other DNA
ctattggattggccatcctgtgactaacagagctattgtatacctatttgttggttttgtaccactgaattacaaggctt

SEQ ID NO: 23679 - DNA, 80 bp, synthetic construct
  misc_feature 1..80: note = Synthetic: >EVB80-cand-700-779
  source 1..80: mol_type = other DNA
taaacaccctcaacttcataatactactcaactcatcaaaatgggagctcaagtatccacccaaaaagctgggtcacatg

SEQ ID NO: 23680 - DNA, 80 bp, synthetic construct
  misc_feature 1..80: note = Synthetic: >EVB80-cand-780-859
  source 1..80: mol_type = other DNA
agacgaacttgaacacaggcagcaactccaccatacattacacgaatataaatttttacaaagatgcagcctccaactcc

SEQ ID NO: 23681 - DNA, 80 bp, synthetic construct
  misc_feature 1..80: note = Synthetic: >EVB80-cand-860-939
  source 1..80: mol_type = other DNA
tccaataggcaagatctgagtcaagatccaagcaagttcacggaaccaatgttagacgtgatggttaagtcactcccagc

SEQ ID NO: 23682 - DNA, 80 bp, synthetic construct
  misc_feature 1..80: note = Synthetic: >EVB80-cand-940-1019
  source 1..80: mol_type = other DNA
tctcaattcaccaagtgctgaggaatgtgggtacagcgaccgtgtcagatcaatcaccctaggcaactcgaccataacaa

SEQ ID NO: 23683 - DNA, 80 bp, synthetic construct
  misc_feature 1..80: note = Synthetic: >EVB80-cand-1020-1099
  source 1..80: mol_type = other DNA
cacaagagagtgccaacgtagtggtagcatatggcaaatggcccgattacctgaaagatgaggaagccacggctgaagat

SEQ ID NO: 23684 - DNA, 80 bp, synthetic construct
  misc_feature 1..80: note = Synthetic: >EVB80-cand-1100-1179
  source 1..80: mol_type = other DNA
caacccacccaaccggatgtggcaacatgtaggttctacacgctggactcagtggagtggagcaagaattcccaagggtg

SEQ ID NO: 23685 - DNA, 80 bp, synthetic construct
  misc_feature 1..80: note = Synthetic: >EVB80-cand-1180-1259
  source 1..80: mol_type = other DNA
gtggtggaaattcccagaagcgctaaaagatatgggactcttcggacagaacatgctgtaccactatctaggcagaacag

SEQ ID NO: 23686 - DNA, 80 bp, synthetic construct
  misc_feature 1..80: note = Synthetic: >EVB80-cand-1260-1339
  source 1..80: mol_type = other DNA
ggtacaccattcatgttcaatgcaatgcatcaaagttccatcaagggtgcttgttggttgtgtgtgtccccgaggccgag

SEQ ID NO: 23687 - DNA, 80 bp, synthetic construct
  misc_feature 1..80: note = Synthetic: >EVB80-cand-1340-1419
  source 1..80: mol_type = other DNA
atgggatgtgctatgaaggatggaaaggttactgcagaaaatctcacgaaaggtgagagcgcatgcactttctcagaaac

SEQ ID NO: 23688 - DNA, 80 bp, synthetic construct
  misc_feature 1..80: note = Synthetic: >EVB80-cand-1420-1499
  source 1..80: mol_type = other DNA
agcagccactagtgaaaacgggaaggtgcagaatgcagtttgcaacgcggccatgggtgtaggtgttgggaacttgacca

SEQ ID NO: 23689 - DNA, 80 bp, synthetic construct
  misc_feature 1..80: note = Synthetic: >EVB80-cand-1500-1579
  source 1..80: mol_type = other DNA
tttacccacaccagtggataaatctgcgcaccaacaatagcgccaccatagtcatgccgtacatcaacagtgtcccaatg

SEQ ID NO: 23690 - DNA, 80 bp, synthetic construct
  misc_feature 1..80: note = Synthetic: >FJ532244.1-cand-1090-1169
  source 1..80: mol_type = other DNA
agagaaattgaagaagaaatcagcattctaccaatcataccttcggaggactcagtctatgggaatccaactggatcaaa

SEQ ID NO: 23691 - DNA, 80 bp, synthetic construct
  misc_feature 1..80: note = Synthetic: >FJ532244.1-cand-1200-1279
  source 1..80: mol_type = other DNA
gtaaagaggctgtaaatcattttcatctgggagatgacatggatcctgagctcaggcagctagcacaatccctgatagat

SEQ ID NO: 23692 - DNA, 80 bp, synthetic construct
  misc_feature 1..80: note = Synthetic: >FJ532244.1-cand-1260-1339
  source 1..80: mol_type = other DNA
tagcacaatccctgatagatgcgaaggtgaaggagatttcaaaccaggagcctttgaagttgtgaaaagatggtagactc

SEQ ID NO: 23693 - DNA, 80 bp, synthetic construct
  misc_feature 1..80: note = Synthetic: >FJ532244.1-cand-1360-1439
  source 1..80: mol_type = other DNA
gtgccaacagttattcatctcaggactattctgcactaatcaatgtgatagttttaagtagttagaatgtgaagggtggt

SEQ ID NO: 23694 - DNA, 80 bp, synthetic construct
  misc_feature 1..80: note = Synthetic: >FJ532244.1-cand-1450-1529
  source 1..80: mol_type = other DNA
attataagggtgggattgtttacttacacgggtaaagggccatattaaagaattgcactataaatcatgatagccataag

SEQ ID NO: 23695 - DNA, 80 bp, synthetic construct
  misc_feature 1..80: note = Synthetic: >FJ532244.1-cand-1500-1579
  source 1..80: mol_type = other DNA
aattgcactataaatcatgatagccataagaagtaaattgcactacatagtaatatatagttttaagttaagtttgcttt

SEQ ID NO: 23696 - DNA, 80 bp, synthetic construct
  misc_feature 1..80: note = Synthetic: >FJ532244.1-cand-1580-1659
  source 1..80: mol_type = other DNA
gtgatttgatcaatgatgctatgctgactgatcaatgactaatgaatgtaattgagtagataagtttcgtttgatcttag

SEQ ID NO: 23697 - DNA, 80 bp, synthetic construct
  misc_feature 1..80: note = Synthetic: >FJ532244.1-cand-1670-1749
  source 1..80: mol_type = other DNA
tgataagtttagatataggttaagaataggtttgataggttaagtgtaatcatatatttagacctcatagattaacttta

SEQ ID NO: 23698 - DNA, 80 bp, synthetic construct
  misc_feature 1..80: note = Synthetic: >FJ532244.1-cand-1760-1839
  source 1..80: mol_type = other DNA
aatgtcattggatgtaaattttgttccttgcttgagctatgcaacactaacattgattaagcacatttctacctcatccc

SEQ ID NO: 23699 - DNA, 80 bp, synthetic construct
  misc_feature 1..80: note = Synthetic: >FJ532244.1-cand-1830-1909
  source 1..80: mol_type = other DNA
acctcatcccattaccctcccctttattctacctcatttattctacctcattagttatttctcttgaatgcttttcaagg

SEQ ID NO: 23700 - DNA, 80 bp, synthetic construct
  misc_feature 1..80: note = Synthetic: >FJ608550.1-cand-10-89
  source 1..80: mol_type = other DNA
gcaagaagaagcaaaaaatcagtaaagtgaatttaaaatggaagggtggttgttggccatcctaggagtctactctactc

SEQ ID NO: 23701 - DNA, 80 bp, synthetic construct
  misc_feature 1..80: note = Synthetic: >FJ608550.1-cand-70-149
  source 1..80: mol_type = other DNA
cctaggagtctactctactctgacttctgtcctgcctaaaacaatttatgagttgaagatggaatgcccgcatacagttg

SEQ ID NO: 23702 - DNA, 80 bp, synthetic construct
  misc_feature 1..80: note = Synthetic: >FJ608550.1-cand-170-249
  source 1..80: mol_type = other DNA
atgggttcagttgagttgggtctattagacattgggaaggtcccagacattaaaattgagagctcttgcaacttcgatct

SEQ ID NO: 23703 - DNA, 80 bp, synthetic construct
  misc_feature 1..80: note = Synthetic: >FJ608550.1-cand-250-329
  source 1..80: mol_type = other DNA
ccataccactgcatcaaaccaaaagagcttcacgcaagttgaatggaggaaaaaaagcgaaacaactgacactacagagg

SEQ ID NO: 23704 - DNA, 80 bp, synthetic construct
  misc_feature 1..80: note = Synthetic: >FJ608550.1-cand-340-419
  source 1..80: mol_type = other DNA
aacatttgaggcacagacaaaaacagcaaatctaagagggacatgtgtgcttgctcctgacctttatgacactctaaaga

SEQ ID NO: 23705 - DNA, 80 bp, synthetic construct
  misc_feature 1..80: note = Synthetic: >FJ608550.1-cand-420-499
  source 1..80: mol_type = other DNA
gaattaagaaaacagttttatgttatgacttaatctgcaaccaaacacaatgtcagcctactgtctatctcattgcccct

SEQ ID NO: 23706 - DNA, 80 bp, synthetic construct
  misc_feature 1..80: note = Synthetic: >HCV.A14-cand-3790-3869
  source 1..80: mol_type = other DNA
gtgtgtctgattacatcaagggactgggtgatgcatttggaacaggattcaccgatgctgtatccagagaagtggaagcc

SEQ ID NO: 23707 - DNA, 80 bp, synthetic construct
  misc_feature 1..80: note = Synthetic: >HCV.A14-cand-3870-3949
  source 1..80: mol_type = other DNA
ctgaaaaaccacctaattggctctgaaggagcggtggaaaaaatcctcaaaaacttgatcaagctaatttcagcactggt

SEQ ID NO: 23708 - DNA, 80 bp, synthetic construct
  misc_feature 1..80: note = Synthetic: >HCV.A14-cand-3950-4029
  source 1..80: mol_type = other DNA
catagtaattagaagtgattatgacatggtcaccctcacagcaactctagccctgatcggatgtcacggaagcccttggg

SEQ ID NO: 23709 - DNA, 80 bp, synthetic construct
  misc_feature 1..80: note = Synthetic: >HCV.A14-cand-4030-4109
  source 1..80: mol_type = other DNA
catggatcaaagcaaaaacggcttccattttaggcatcccaattgcccagaaacagagcgcgtcttggctaaagaaattc

SEQ ID NO: 23710 - DNA, 80 bp, synthetic construct
  misc_feature 1..80: note = Synthetic: >HCV.A14-cand-4190-4269
  source 1..80: mol_type = other DNA
gattataccagcagctaaagaaaaggttgaattcctgaataacctgaaacaattacctctgctggagaaccaaatctcaa

SEQ ID NO: 23711 - DNA, 80 bp, synthetic construct
  misc_feature 1..80: note = Synthetic: >HCV.A14-cand-4270-4349
  source 1..80: mol_type = other DNA
acctagaacaatctgccgcttcacaagaggaccttgaagccatgtttggaaacgtgtcatacctagcccacttctgccgt

SEQ ID NO: 23712 - DNA, 80 bp, synthetic construct
  misc_feature 1..80: note = Synthetic: >HCV.A14-cand-4350-4429
  source 1..80: mol_type = other DNA
aaattccagccactttatgcaactgaagcaaaaagagtctatgctctagagaagaggatgaacaactacatgcagttcaa

SEQ ID NO: 23713 - DNA, 80 bp, synthetic construct
  misc_feature 1..80: note = Synthetic: >HCV.A14-cand-4510-4589
  source 1..80: mol_type = other DNA
ttgccagagccatagctgacaagtatcactccagtgtgtactcactcccaccagacccagatcactttgatggatataaa

SEQ ID NO: 23714 - DNA, 80 bp, synthetic construct
  misc_feature 1..80: note = Synthetic: >HCV.A14-cand-4590-4669
  source 1..80: mol_type = other DNA
caacaagtggtgacagttatggatgacctatgccagaaccctgacggcaaggacatgtcattgttttgccaaatggtatc

SEQ ID NO: 23715 - DNA, 80 bp, synthetic construct
  misc_feature 1..80: note = Synthetic: >HCV.A14-cand-4670-4749
  source 1..80: mol_type = other DNA
cactgtagacttcatccctccaatggcttcccttgaagagaaaggagtgtctttcacctccaaatttgtcatcgcatcca

SEQ ID NO: 23716 - DNA, 80 bp, synthetic construct
  misc_feature 1..80: note = Synthetic: >HCV.A14-cand-4750-4829
  source 1..80: mol_type = other DNA
ctaatgccagcaacatcatagtaccaacagtgtcagattccgatgccatccgcagcagattttatatggactgtgacatt

SEQ ID NO: 23717 - DNA, 80 bp, synthetic construct
  misc_feature 1..80: note = Synthetic: >HCV.A14-cand-4830-4909
  source 1..80: mol_type = other DNA
gaggtgacggactcatataaaacagacctgggcagattggatgcgggtagggccgccaaactctgctcggagaacaacac

SEQ ID NO: 23718 - DNA, 80 bp, synthetic construct
  misc_feature 1..80: note = Synthetic: >HCV.A14-cand-4910-4989
  source 1..80: mol_type = other DNA
tgccaacttcaaaagctgcagcccactggtgtgcgggaaagccattcagctgagagataggaaatccaaggttagatata

SEQ ID NO: 23719 - DNA, 80 bp, synthetic construct
  misc_feature 1..80: note = Synthetic: >HCV.A14-cand-4990-5069
  source 1..80: mol_type = other DNA
gtgtggacacagtggtgtctgaactcattagagagtacaataatagatctgccataggaaacaccatagaagccctgttc

SEQ ID NO: 23720 - DNA, 80 bp, synthetic construct
  misc_feature 1..80: note = Synthetic: >HCV.A14-cand-5080-5159
  source 1..80: mol_type = other DNA
ccaagtttagacccataagaatcagccttgaggagaaaccagctccggacgccattagcgacctgcttgctagcgtggac

SEQ ID NO: 23721 - DNA, 80 bp, synthetic construct
  misc_feature 1..80: note = Synthetic: >HCV.A14-cand-5160-5239
  source 1..80: mol_type = other DNA
agtgaagaagtgcgccagtactgcagagaccaagggtggattataccagagacacccaccaatgtggagcgacacctcaa

SEQ ID NO: 23722 - DNA, 80 bp, synthetic construct
  misc_feature 1..80: note = Synthetic: >HCV.A20-cand-2330-2409
  source 1..80: mol_type = other DNA
ttacatctcaatgttctaccaaacaaaaatagtggtgcctgcttccaccccaaccaacatggacatcctgggatttgtgt

SEQ ID NO: 23723 - DNA, 80 bp, synthetic construct
  misc_feature 1..80: note = Synthetic: >HCV.A20-cand-2410-2489
  source 1..80: mol_type = other DNA
cagcatgcaatgacttctcagtcagattgctgagagacaccacacacatcagccagaaagcaatgccacaaggtattgaa

SEQ ID NO: 23724 - DNA, 80 bp, synthetic construct
  misc_feature 1..80: note = Synthetic: >HCV.A20-cand-2490-2569
  source 1..80: mol_type = other DNA
gatctgatagctgaagttgcaagtaatgcactgaagttatcacaaccaaaacccaacacaacccaacagagtttaccaaa

SEQ ID NO: 23725 - DNA, 80 bp, synthetic construct
  misc_feature 1..80: note = Synthetic: >HCV.A20-cand-2570-2649
  source 1..80: mol_type = other DNA
cactagtagttcagaaccaactcactcacaagaagtgccagcactgactgcagtggaaacaggagcaaccagcagtgtgg

SEQ ID NO: 23726 - DNA, 80 bp, synthetic construct
  misc_feature 1..80: note = Synthetic: >HCV.A20-cand-2650-2729
  source 1..80: mol_type = other DNA
taccagccgatctggtccagactcgacatgtcatccaaacacgcagccgaagtgagtccacagtggagtcattctttgca

SEQ ID NO: 23727 - DNA, 80 bp, synthetic construct
  misc_feature 1..80: note = Synthetic: >HCV.A20-cand-2740-2819
  source 1..80: mol_type = other DNA
gtgtcaccatcatgtcagtggaaaactacaatgaaactgcaagcatctctaaatccaaattgtttgccaagtggaacatc

SEQ ID NO: 23728 - DNA, 80 bp, synthetic construct
  misc_feature 1..80: note = Synthetic: >HCV.A20-cand-2810-2889
  source 1..80: mol_type = other DNA
gtggaacatcacctacacagacactgtccagttgagaagaaaattggaaatgttcacatactccagatttgacattgagt

SEQ ID NO: 23729 - DNA, 80 bp, synthetic construct
  misc_feature 1..80: note = Synthetic: >HCV.A20-cand-2890-2969
  source 1..80: mol_type = other DNA
tcacatttgtggtcactgagcggtattacaccgcaaactcaggacatgcactaaatcaagtgtaccaaatcatgtatgtt

SEQ ID NO: 23730 - DNA, 80 bp, synthetic construct
  misc_feature 1..80: note = Synthetic: >HCV.A20-cand-2970-3049
  source 1..80: mol_type = other DNA
cctcctggtgcaccagtgccacaaaaatgggatgattacacatggcaaacgtcatccaacccatcagtcttctacacata

SEQ ID NO: 23731 - DNA, 80 bp, synthetic construct
  misc_feature 1..80: note = Synthetic: >HCV.A20-cand-3050-3129
  source 1..80: mol_type = other DNA
tggtacagcaccagccagaatttcaataccatatgttgggatagccaatgcctactcccacttttatgatgggtttgcaa

SEQ ID NO: 23732 - DNA, 80 bp, synthetic construct
  misc_feature 1..80: note = Synthetic: >HCV.A20-cand-3130-3209
  source 1..80: mol_type = other DNA
aagtgccaattgagggtgagaccacagatccaggtgatgcatattatggtgcaacatccatcaatgactttggaatctta

SEQ ID NO: 23733 - DNA, 80 bp, synthetic construct
  misc_feature 1..80: note = Synthetic: >HCV.A20-cand-3210-3289
  source 1..80: mol_type = other DNA
gcagtgagagtggtcaatgaacacaatccagtgcaagtatcatcaaagattagagtgtacatgaaaccaaaacatgtgcg

SEQ ID NO: 23734 - DNA, 80 bp, synthetic construct
  misc_feature 1..80: note = Synthetic: >HCV.A20-cand-3250-3329
  source 1..80: mol_type = other DNA
catcaaagattagagtgtacatgaaaccaaaacatgtgcgtgtgtggtgccccagaccaccaagagccgtcccttacttt

SEQ ID NO: 23735 - DNA, 80 bp, synthetic construct
  misc_feature 1..80: note = Synthetic: >HCV.A20-cand-3370-3449
  source 1..80: mol_type = other DNA
tatcaacaaagaacttaaccacctatggatttggccaccaaaacaaagcagtttacacagctggttacaaaatttgcaac

SEQ ID NO: 23736 - DNA, 80 bp, synthetic construct
  misc_feature 1..80: note = Synthetic: >HCV.A20-cand-3450-3529
  source 1..80: mol_type = other DNA
taccacctggccacccaagaggatctacagaatgcagtgagcattatgtggaacagagatctgatagttgccgaatcaaa

SEQ ID NO: 23737 - DNA, 80 bp, synthetic construct
  misc_feature 1..80: note = Synthetic: >HCV.A20-cand-3530-3609
  source 1..80: mol_type = other DNA
agcccaaggcacagattccattgctaggtgcaactgcaacacaggagtgtactactgtgagtctagaagaaagtactacc

SEQ ID NO: 23738 - DNA, 80 bp, synthetic construct
  misc_feature 1..80: note = Synthetic: >HCV.A9-cand-6560-6639
  source 1..80: mol_type = other DNA
cagggatagtgacaggcagtgcagttgggtgtgatcccgatctcttctggagtaaaataccagtaatgctagatggacat

SEQ ID NO: 23739 - DNA, 80 bp, synthetic construct
  misc_feature 1..80: note = Synthetic: >HCV.A9-cand-6640-6719
  source 1..80: mol_type = other DNA
ctcatagcctttgattactctggatatgatgccagcctgagccctgtgtggtttgcttgtctgaaactgctgcttgagaa

SEQ ID NO: 23740 - DNA, 80 bp, synthetic construct
  misc_feature 1..80: note = Synthetic: >HCV.A9-cand-6800-6879
  source 1..80: mol_type = other DNA
ttgtgcgaggtggcatgccatcaggatgttctggcaccagcattttcaactcaatgatcaacaacatcataatcagaaca

SEQ ID NO: 23741 - DNA, 80 bp, synthetic construct
  misc_feature 1..80: note = Synthetic: >HCV.A9-cand-6880-6959
  source 1..80: mol_type = other DNA
ctaatgctgaaggtgtacaaaggcattgacctggatcaatttaggatgattgcatatggtgacgacgtgattgcatccta

SEQ ID NO: 23742 - DNA, 80 bp, synthetic construct
  misc_feature 1..80: note = Synthetic: >HCV.A9-cand-6950-7029
  source 1..80: mol_type = other DNA
ttgcatcctacccctggccaattgatgcctccttgcttgctgaagccggcaaagggtatggtctgatcatgacaccagca

SEQ ID NO: 23743 - DNA, 80 bp, synthetic construct
  misc_feature 1..80: note = Synthetic: >HCV.A9-cand-7120-7199
  source 1..80: mol_type = other DNA
gttcacccagtcatgcccatgaaggacattcatgaatcaatcaggtggaccaaagaccccaagaatacccaagaccatgt

SEQ ID NO: 23744 - DNA, 80 bp, synthetic construct
  misc_feature 1..80: note = Synthetic: >HCV.A9-cand-7280-7359
  source 1..80: mol_type = other DNA
ttgggcgctgtttaactctacctgcgttttcaaccctgcgcaggaagtggttggactccttttaaaaattagagaacaat

SEQ ID NO: 23745 - DNA, 80 bp, synthetic construct
  misc_feature 1..80: note = Synthetic: >HCV.A9-cand-7340-7419
  source 1..80: mol_type = other DNA
tttaaaaattagagaacaatttgataataatttaaattggcttaaccctaccgcactcaccgaactagacaacggtgcgg

SEQ ID NO: 23746 - DNA, 80 bp, synthetic construct
  misc_feature 1..80: note = Synthetic: >HCV.B1-cand-40-119
  source 1..80: mol_type = other DNA
actggtatcacggtacctttgtgcgcctgttttatacacccctccccaaattgtaacttagaagcatatcacaaacggat

SEQ ID NO: 23747 - DNA, 80 bp, synthetic construct
  misc_feature 1..80: note = Synthetic: >HCV.B1-cand-120-199
  source 1..80: mol_type = other DNA
caataggcggctcagtaagccaactgagtctcgatcaagcacttctgttaccccggactgagtatcaataagctgctcac

SEQ ID NO: 23748 - DNA, 80 bp, synthetic construct
  misc_feature 1..80: note = Synthetic: >HCV.B1-cand-380-459
  source 1..80: mol_type = other DNA
ccatgggacgcttcaatactgacatggtgcgaagagtctattgagctaattggtagtcctccggcccctgaatgcggcta

SEQ ID NO: 23749 - DNA, 80 bp, synthetic construct
  misc_feature 1..80: note = Synthetic: >HCV.B1-cand-540-619
  source 1..80: mol_type = other DNA
tgggtgtccgtgtttcctttttattcttatactggctgctttatggtgacaattgaaagattgttaccatatagctattg

SEQ ID NO: 23750 - DNA, 80 bp, synthetic construct
  misc_feature 1..80: note = Synthetic: >HCV.B1-cand-620-699
  source 1..80: mol_type = other DNA
gattggccatccggtgacaaacagagcaattatttacctgtttgttggttttataccactaaaccacaaggatttaaata

SEQ ID NO: 23751 - DNA, 80 bp, synthetic construct
  misc_feature 1..80: note = Synthetic: >HCV.B1-cand-700-779
  source 1..80: mol_type = other DNA
ctctaaacttcattctattacttaacacagcaaaatgggagctcaagtgtctacacagaagacaggtgcacatgagactg

SEQ ID NO: 23752 - DNA, 80 bp, synthetic construct
  misc_feature 1..80: note = Synthetic: >HCV.B1-cand-780-859
  source 1..80: mol_type = other DNA
gcttgaatgccagtggcaactccatcatccattacacaaacataaattactacaaggatgcagcatccaactcagcaaac

SEQ ID NO: 23753 - DNA, 80 bp, synthetic construct
  misc_feature 1..80: note = Synthetic: >HCV.B1-cand-860-939
  source 1..80: mol_type = other DNA
aggcaagacttcacacaagacccaggtaagttcactgaaccagtgaaagacattatgatcaaatcgatgcctgcgttgaa

SEQ ID NO: 23754 - DNA, 80 bp, synthetic construct
  misc_feature 1..80: note = Synthetic: >HCV.B6-cand-4890-4969
  source 1..80: mol_type = other DNA
tgtgtgcggaaaagccattcagttcattgatagaagaactcaagttaggtattccttggacatgttagtcaccgagatgt

SEQ ID NO: 23755 - DNA, 80 bp, synthetic construct
  misc_feature 1..80: note = Synthetic: >HCV.B6-cand-4970-5049
  source 1..80: mol_type = other DNA
tcagagagtacaatcacagacacagtgtgggagcgactctggaagctcttttccaagggccaccagtgtacagggagatc

SEQ ID NO: 23756 - DNA, 80 bp, synthetic construct
  misc_feature 1..80: note = Synthetic: >HCV.B6-cand-5050-5129
  source 1..80: mol_type = other DNA
aaaattagtgtcgcacctgaaaccccaccaccaccagcgattgcggacttgttgaaatcggtggacagtgaagctgttag

SEQ ID NO: 23757 - DNA, 80 bp, synthetic construct
  misc_feature 1..80: note = Synthetic: >HCV.B6-cand-5130-5209
  source 1..80: mol_type = other DNA
agagtactgcaaggaaaaagggtggttggttcctgaaattaactctactctccaaattgagaagcatgtcagtcgggcct

SEQ ID NO: 23758 - DNA, 80 bp, synthetic construct
  misc_feature 1..80: note = Synthetic: >HCV.B6-cand-5210-5289
  source 1..80: mol_type = other DNA
ttatctgcctccaagcactgacaaccttcgtgtctgtggctggaatcatttacatcatctataaactgtttgcaggattc

SEQ ID NO: 23759 - DNA, 80 bp, synthetic construct
  misc_feature 1..80: note = Synthetic: >HCV.B6-cand-5310-5389
  source 1..80: mol_type = other DNA
gcccaaccaaaaacccaaagtgcccactctaaggcaggcgaaagtgcaaggccccgcctttgagttcgcggtggccatga

SEQ ID NO: 23760 - DNA, 80 bp, synthetic construct
  misc_feature 1..80: note = Synthetic: >HCV.B6-cand-5380-5459
  source 1..80: mol_type = other DNA
gtggccatgatgaagaggaactccagtacagtaaaaacagaatatggcgaatttacaatgttgggtgtctatgacaggtg

SEQ ID NO: 23761 - DNA, 80 bp, synthetic construct
  misc_feature 1..80: note = Synthetic: >HCV.B6-cand-5460-5539
  source 1..80: mol_type = other DNA
ggctgtcttaccacgccatgccaaacctgggccaaccattctcatgaatgaccaggaggtcggcgtgctggatgccaagg

SEQ ID NO: 23762 - DNA, 80 bp, synthetic construct
  misc_feature 1..80: note = Synthetic: >HCV.B6-cand-5540-5619
  source 1..80: mol_type = other DNA
aattagtggacaaagatggtacaaacctggagttgacgctactgaagctcaatcgaaatgagaaattcagagatatcagg

SEQ ID NO: 23763 - DNA, 80 bp, synthetic construct
  misc_feature 1..80: note = Synthetic: >HCV.B6-cand-5620-5699
  source 1..80: mol_type = other DNA
ggatttctagccaaagaggaagtggaggtcaatgaagctgttttggcaatcaacaccagcaagttccccaatatgtacat

SEQ ID NO: 23764 - DNA, 80 bp, synthetic construct
  misc_feature 1..80: note = Synthetic: >HCV.B6-cand-5710-5789
  source 1..80: mol_type = other DNA
caggttacagattacggcttcctgaacctaggtggcacacctactaagagaatgctaatgtacaactttcctacaagagc

SEQ ID NO: 23765 - DNA, 80 bp, synthetic construct
  misc_feature 1..80: note = Synthetic: >HCV.B6-cand-5840-5919
  source 1..80: mol_type = other DNA
atgttggtgggaatggtcatcaaggtttttcagcagctctccttaagcactacttcaatgatgaacaaggagagattgaa

SEQ ID NO: 23766 - DNA, 80 bp, synthetic construct
  misc_feature 1..80: note = Synthetic: >HCV.B6-cand-5890-5969
  source 1..80: mol_type = other DNA
tacttcaatgatgaacaaggagagattgaattcatcgagagctcaaaggatgcagggtttccaatcatcaacacaccaag

SEQ ID NO: 23767 - DNA, 80 bp, synthetic construct
  misc_feature 1..80: note = Synthetic: >HCV.B6-cand-5970-6049
  source 1..80: mol_type = other DNA
caagacaaaattggaaccgagcgtcttccaccaggtctttgaagggaacaaagaaccagcagttcttagaaatggtgatc

SEQ ID NO: 23768 - DNA, 80 bp, synthetic construct
  misc_feature 1..80: note = Synthetic: >HCV.B6-cand-6050-6129
  source 1..80: mol_type = other DNA
cacgccttaaagccaactttgaggaggccatattttctaaatacattgggaacgttaacacacatgtggacgaatacatg

SEQ ID NO: 23769 - DNA, 80 bp, synthetic construct
  misc_feature 1..80: note = Synthetic: >HCV.B6-cand-6130-6209
  source 1..80: mol_type = other DNA
ctagaagcagtggatcactatgcagggcaactggccacccttgatattaacactgaaccgatgaaactggaagatgcagt

SEQ ID NO: 23770 - DNA, 80 bp, synthetic construct
  misc_feature 1..80: note = Synthetic: >KY225961.1-cand-7030-7109
  source 1..80: mol_type = other DNA
acgaaagtttttattacaatcaggccttaaagcaaagcccagactaaaacgttcagcccctactacccgtgcaccatcca

SEQ ID NO: 23771 - DNA, 80 bp, synthetic construct
  misc_feature 1..80: note = Synthetic: >KY225961.1-cand-7110-7189
  source 1..80: mol_type = other DNA
ccaaacgcaaaaaggttaaaaaataattgttgtggtacttacactattttattatacatgtttgtttgttcatgtgttgt

SEQ ID NO: 23772 - DNA, 80 bp, synthetic construct
  misc_feature 1..80: note = Synthetic: >KY225961.1-cand-7190-7269
  source 1..80: mol_type = other DNA
ctgtttgtatatgtttgtgtatatgttgtatgtgttatgtgtcatgtttgtgtacatgttctatgtccttgtcagtttcc

SEQ ID NO: 23773 - DNA, 80 bp, synthetic construct
  misc_feature 1..80: note = Synthetic: >KY225961.1-cand-7270-7349
  source 1..80: mol_type = other DNA
tgtttgtgtatatatgtaataaactattgtgtgtattgtaaactatttgtattgtttgggtgtatccatgagtaaggtgc

SEQ ID NO: 23774 - DNA, 80 bp, synthetic construct
  misc_feature 1..80: note = Synthetic: >KY225961.1-cand-7350-7429
  source 1..80: mol_type = other DNA
tgtccctaaagtgccctaccctgccctgcctattatgcatacctatgtaatagtatttgtatgatatgtattgtatagtt

SEQ ID NO: 23775 - DNA, 80 bp, synthetic construct
  misc_feature 1..80: note = Synthetic: >KY225961.1-cand-7440-7519
  source 1..80: mol_type = other DNA
ctgcctccattttactttacctccattttgtgcaggtaaccgatttcggttgctggcacaaacgtgttttttttaaacta

SEQ ID NO: 23776 - DNA, 80 bp, synthetic construct
  misc_feature 1..80: note = Synthetic: >KY225961.1-cand-7520-7599
  source 1..80: mol_type = other DNA
caatttaaacaatacagttaatcctttcccttcctgcactgcttttgcctatacttgcatatgtgactcatatatacatg

SEQ ID NO: 23777 - DNA, 80 bp, synthetic construct
  misc_feature 1..80: note = Synthetic: >KY225961.1-cand-7600-7679
  source 1..80: mol_type = other DNA
cagtgcagttgcaaaatgtttaattatactcatagtttaaacatgcttataggcacatattttaacttactttcaatgct

SEQ ID NO: 23778 - DNA, 80 bp, synthetic construct
  misc_feature 1..80: note = Synthetic: >KY225961.1-cand-7680-7759
  source 1..80: mol_type = other DNA
taagtgcagttttggcttgcacaatagtttgttatgccaaaatatgtcttgtaaaagtgactcactaacatttgttatgc

SEQ ID NO: 23779 - DNA, 80 bp, synthetic construct
  misc_feature 1..80: note = Synthetic: >KY225961.1-cand-7760-7839
  source 1..80: mol_type = other DNA
caaaatatgtcttgtaaaagtgactcactaacatttattgccaggtgtggactgaccgttttgggtcacattgttcatgt

SEQ ID NO: 23780 - DNA, 80 bp, synthetic construct
  misc_feature 1..80: note = Synthetic: >LC270039.1-cand-10-89
  source 1..80: mol_type = other DNA
ataccagtaaaaaatagggtgtaaccgaaaacggtcagaccgaaaccggtgtatatatatagaacacagtgtagctaacg

SEQ ID NO: 23781 - DNA, 80 bp, synthetic construct
  misc_feature 1..80: note = Synthetic: >LC270039.1-cand-100-179
  source 1..80: mol_type = other DNA
tttgaggatccagcaacacgaccccggaccctgcacgaattgtgtgaggtgctggaagaatcggtgcatgaaataaggct

SEQ ID NO: 23782 - DNA, 80 bp, synthetic construct
  misc_feature 1..80: note = Synthetic: >LC270039.1-cand-180-259
  source 1..80: mol_type = other DNA
gcagtgtgtgcagtgcaaaaaagagctacaacgaagagaggtatacaagtttctatttacagatttacgaatagtatata

SEQ ID NO: 23783 - DNA, 80 bp, synthetic construct
  misc_feature 1..80: note = Synthetic: >LC270039.1-cand-260-339
  source 1..80: mol_type = other DNA
gagacaataatccatatggcgtgtgtattatgtgcctacgctttttatctaagataagtgaatataggcattatcaatat

SEQ ID NO: 23784 - DNA, 80 bp, synthetic construct
  misc_feature 1..80: note = Synthetic: >LC270039.1-cand-340-419
  source 1..80: mol_type = other DNA
tcactttatgggaaaacattagaagagagggtaagaaaaccattaagtgaaataactattagatgtataatttgtcaaac

SEQ ID NO: 23785 - DNA, 80 bp, synthetic construct
  misc_feature 1..80: note = Synthetic: >LC270039.1-cand-420-499
  source 1..80: mol_type = other DNA
gccattatgtcctgaagaaaaagaaagacatgttaatgcaaacaagcgatttcataatattatgggtcgttggacagggc

SEQ ID NO: 23786 - DNA, 80 bp, synthetic construct
  misc_feature 1..80: note = Synthetic: >MH539866.1-cand-2760-2839
  source 1..80: mol_type = other DNA
caacctgtgaatatcaaggcaacactgtgtcaggattccagagaatgatggccacaagagattcattccaatcattcaat

SEQ ID NO: 23787 - DNA, 80 bp, synthetic construct
  misc_feature 1..80: note = Synthetic: >MH539866.1-cand-2840-2919
  source 1..80: mol_type = other DNA
gtatcagaaccgcacattaccagcaaccgtcttgagtggattgaccccgacagcagtataaaggatcatataaatatggt

SEQ ID NO: 23788 - DNA, 80 bp, synthetic construct
  misc_feature 1..80: note = Synthetic: >MH539866.1-cand-2910-2989
  source 1..80: mol_type = other DNA
taaatatggttctaaaccgtgatgtttcctttcaggacttaagtgataacccttgtaaggtggacttacacacacaatcc

SEQ ID NO: 23789 - DNA, 80 bp, synthetic construct
  misc_feature 1..80: note = Synthetic: >MH539866.1-cand-3020-3099
  source 1..80: mol_type = other DNA
tttacattagtatgtacagttggactaacagagtgtgcaaactttattacctctatcaaagcatgtgactcggctatgtg

SEQ ID NO: 23790 - DNA, 80 bp, synthetic construct
  misc_feature 1..80: note = Synthetic: >MH539866.1-cand-3170-3249
  source 1..80: mol_type = other DNA
tcaggttcattgttcaaatgttgtcatgatactgattgcacagaagaaggcctcgcagcgtctcctcctcatttagatcg

SEQ ID NO: 23791 - DNA, 80 bp, synthetic construct
  misc_feature 1..80: note = Synthetic: >MH539866.1-cand-3250-3329
  source 1..80: mol_type = other DNA
agtcactggttacaaccaaatagactcagataaagtttatgatgatggtgccccaccttgttcaatcaagtgttggttta

SEQ ID NO: 23792 - DNA, 80 bp, synthetic construct
  misc_feature 1..80: note = Synthetic: >MH539866.1-cand-3330-3409
  source 1..80: mol_type = other DNA
ccaaatctggtgagtggttgttgggcatattaaatggcaattgggtggttgttgccgtcctggttgtggttctaatattg

SEQ ID NO: 23793 - DNA, 80 bp, synthetic construct
  misc_feature 1..80: note = Synthetic: >MH539866.1-cand-3410-3489
  source 1..80: mol_type = other DNA
tccatccttctgtttagttttttctgcccagtaagaaatagaaaaaataaatcaaactgatcctgcatgcatgtaaaccg

SEQ ID NO: 23794 - DNA, 80 bp, synthetic construct
  misc_feature 1..80: note = Synthetic: >MH539866.1-cand-3490-3569
  source 1..80: mol_type = other DNA
tgtctaacttcactgacatatgtatttatatattattactaataaatatttatactaacttttatttttatacaggtatt

SEQ ID NO: 23795 - DNA, 80 bp, synthetic construct
  misc_feature 1..80: note = Synthetic: >MH539867.1-cand-100-179
  source 1..80: mol_type = other DNA
caggcaaaagcttaaagatgccgaaagagcagtggaggtggaccccgatgatgttaacaagagcacactacagagtagac

SEQ ID NO: 23796 - DNA, 80 bp, synthetic construct
  misc_feature 1..80: note = Synthetic: >MH539867.1-cand-270-349
  source 1..80: mol_type = other DNA
ctgttgatccaacagggattgagcctgatgaccatttgaaagagaaatcatcattgagatatggtaatgtccttgatgtg

SEQ ID NO: 23797 - DNA, 80 bp, synthetic construct
  misc_feature 1..80: note = Synthetic: >MH539867.1-cand-350-429
  source 1..80: mol_type = other DNA
aactcaattgatttagaagagccaagtggacagacagctgactggaaatctattggtttgtacatattgagttttgcaat

SEQ ID NO: 23798 - DNA, 80 bp, synthetic construct
  misc_feature 1..80: note = Synthetic: >MH539867.1-cand-470-549
  source 1..80: mol_type = other DNA
ggccgccaaacagttaaagagaataaaggcactagaatacggtttaaggatgattcatcttatgaagaggtcaatggaat

SEQ ID NO: 23799 - DNA, 80 bp, synthetic construct
  misc_feature 1..80: note = Synthetic: >MH539867.1-cand-510-589
  source 1..80: mol_type = other DNA
ggtttaaggatgattcatcttatgaagaggtcaatggaatcaggaaaccaagacatctttatgtttcaatgcctacagct

SEQ ID NO: 23800 - DNA, 80 bp, synthetic construct
  misc_feature 1..80: note = Synthetic: >MH539867.1-cand-560-639
  source 1..80: mol_type = other DNA
agacatctttatgtttcaatgcctacagctcaatctacgatgaaagcagatgaaatcactccaggacggtttcgtacaat

SEQ ID NO: 23801 - DNA, 80 bp, synthetic construct
  misc_feature 1..80: note = Synthetic: >NC_001563.2-cand-4600-4679
  source 1..80: mol_type = other DNA
tgttctttgggacacaccatcacccaaggagtacaagaagggtgataccaccactggcgtttacagaatcatgactcgag

SEQ ID NO: 23802 - DNA, 80 bp, synthetic construct
  misc_feature 1..80: note = Synthetic: >NC_001563.2-cand-4640-4719
  source 1..80: mol_type = other DNA
ggtgataccaccactggcgtttacagaatcatgactcgaggtctgcttggcagttaccaagctggagccggagtgatggt

SEQ ID NO: 23803 - DNA, 80 bp, synthetic construct
  misc_feature 1..80: note = Synthetic: >NC_001563.2-cand-4760-4839
  source 1..80: mol_type = other DNA
gctgctctcatgagtggtgagggacgtctggatccctactgggggagcgtgaaagaggaccgactttgctatggggggcc

SEQ ID NO: 23804 - DNA, 80 bp, synthetic construct
  misc_feature 1..80: note = Synthetic: >NC_001563.2-cand-4840-4919
  source 1..80: mol_type = other DNA
atggaaactccaacataaatggaatggacatgatgaggtccaaatgattgtcgtggagccagggaaaaatgtgaaaaacg

SEQ ID NO: 23805 - DNA, 80 bp, synthetic construct
  misc_feature 1..80: note = Synthetic: >NC_001563.2-cand-4880-4959
  source 1..80: mol_type = other DNA
caaatgattgtcgtggagccagggaaaaatgtgaaaaacgtccagaccaagcccggagtgtttaagacaccagaaggaga

SEQ ID NO: 23806 - DNA, 80 bp, synthetic construct
  misc_feature 1..80: note = Synthetic: >NC_001563.2-cand-5010-5089
  source 1..80: mol_type = other DNA
ttgtagacaaaaatggagatgtgattggattgtatgggaacggcgtcatcatgcctaatggttcatacataagcgccatt

SEQ ID NO: 23807 - DNA, 80 bp, synthetic construct
  misc_feature 1..80: note = Synthetic: >NC_001563.2-cand-5090-5169
  source 1..80: mol_type = other DNA
gtgcaaggagagagaatggaagaaccggcaccagctggcttcgaacctgaaatgttgaggaagaaacagatcactgtcct

SEQ ID NO: 23808 - DNA, 80 bp, synthetic construct
  misc_feature 1..80: note = Synthetic: >NC_001563.2-cand-5170-5249
  source 1..80: mol_type = other DNA
tgatctgcaccccggagcaggaaagacacgcaagatacttccccaaatcatcaaggaggccatcaacaaaagattgagga

SEQ ID NO: 23809 - DNA, 80 bp, synthetic construct
  misc_feature 1..80: note = Synthetic: >NC_001563.2-cand-5250-5329
  source 1..80: mol_type = other DNA
cggctgtgctggcacccaccagggtcgttgctgctgagatgtctgaggccctgagaggacttcccattcggtaccaaacc

SEQ ID NO: 23810 - DNA, 80 bp, synthetic construct
  misc_feature 1..80: note = Synthetic: >NC_001563.2-cand-5330-5409
  source 1..80: mol_type = other DNA
tcagcagtgcacagagagcacagtggaaatgagatcgttgatgtcatgtgccatgccaccctcacacacaggctgatgtc

SEQ ID NO: 23811 - DNA, 80 bp, synthetic construct
  misc_feature 1..80: note = Synthetic: >NC_001563.2-cand-5410-5489
  source 1..80: mol_type = other DNA
tccacacagagtccccaactacaacctgttcataatggatgaagcccatttcacggatccagcgagcatcgcagccagag

SEQ ID NO: 23812 - DNA, 80 bp, synthetic construct
  misc_feature 1..80: note = Synthetic: >NC_001563.2-cand-5490-5569
  source 1..80: mol_type = other DNA
gatacatagcaaccaaggttgaattgggcgaagccgccgcgattttcatgacggcaacgccacccgggacttctgacccc

SEQ ID NO: 23813 - DNA, 80 bp, synthetic construct
  misc_feature 1..80: note = Synthetic: >NC_001563.2-cand-5570-5649
  source 1..80: mol_type = other DNA
tttccagagtctaatgctcctatctcggacatgcaaacagagatcccagacagagcctggaacactggatatgaatggat

SEQ ID NO: 23814 - DNA, 80 bp, synthetic construct
  misc_feature 1..80: note = Synthetic: >NC_001563.2-cand-5650-5729
  source 1..80: mol_type = other DNA
aactgagtatgttggaaagaccgtttggtttgttccaagtgtgaaaatgggaaatgagattgccctctgtctgcaacggg

SEQ ID NO: 23815 - DNA, 80 bp, synthetic construct
  misc_feature 1..80: note = Synthetic: >NC_001563.2-cand-5740-5819
  source 1..80: mol_type = other DNA
ggttatccagctgaacagaaagtcctatgagacagagtaccccaagtgtaagaacgatgattgggattttgtcatcacca

SEQ ID NO: 23816 - DNA, 80 bp, synthetic construct
  misc_feature 1..80: note = Synthetic: >NC_001563.2-cand-5820-5899
  source 1..80: mol_type = other DNA
cagacatatcagaaatgggagccaacttcaaggcgagcagagtgatcgacagccgcaaaagcgtgaaacccaccatcatt

SEQ ID NO: 23817 - DNA, 80 bp, synthetic construct
  misc_feature 1..80: note = Synthetic: >NC_001611.1-cand-98100-98179
  source 1..80: mol_type = other DNA
gtagttctgcgcaaggcataatcgatataggccgcatgtgatttactcatttatagtgataagtaataactatgttttaa

SEQ ID NO: 23818 - DNA, 80 bp, synthetic construct
  misc_feature 1..80: note = Synthetic: >NC_001611.1-cand-98180-98259
  source 1..80: mol_type = other DNA
aaatcataacagtagtttaactagtcttctctgatgtttgttttcgatacttttcgaatcagaagtcatactagaataaa

SEQ ID NO: 23819 - DNA, 80 bp, synthetic construct
  misc_feature 1..80: note = Synthetic: >NC_001611.1-cand-98340-98419
  source 1..80: mol_type = other DNA
ggatcgtttagaatactaaattgaacactgttcacatccttccaagaagaagacttagtaacggacttaacatgagacat

SEQ ID NO: 23820 - DNA, 80 bp, synthetic construct
  misc_feature 1..80: note = Synthetic: >NC_001611.1-cand-98420-98499
  source 1..80: mol_type = other DNA
aaataaatccaaattttttttacaaacattactagccaccataatggcgctatcttttaaccagctatcgcttacacatt

SEQ ID NO: 23821 - DNA, 80 bp, synthetic construct
  misc_feature 1..80: note = Synthetic: >NC_001611.1-cand-98500-98579
  source 1..80: mol_type = other DNA
tcagcaatctaacatttttaaagagactacaatatattctcatggtatcgattacacctctaccgaatagagtaggaagt

SEQ ID NO: 23822 - DNA, 80 bp, synthetic construct
  misc_feature 1..80: note = Synthetic: >NC_001611.1-cand-98660-98739
  source 1..80: mol_type = other DNA
gtatagattgttttcagtaagatgattattagatttaatagcatctcgttcgcgtttaaacagtttattgcgtgcgctaa

SEQ ID NO: 23823 - DNA, 80 bp, synthetic construct
  misc_feature 1..80: note = Synthetic: >NC_001611.1-cand-98900-98979
  source 1..80: mol_type = other DNA
tctagaaatctgaagaaagtaattagctccgtattccaaactaggtaatgggcttttacctagagacagattaagttctg

SEQ ID NO: 23824 - DNA, 80 bp, synthetic construct
  misc_feature 1..80: note = Synthetic: >NC_001611.1-cand-99580-99659
  source 1..80: mol_type = other DNA
atatgtgtgcaaagactgttctcttggtggcgtcgctatatgttccagtaatggcggaaaactttttagaaatgttatat

SEQ ID NO: 23825 - DNA, 80 bp, synthetic construct
  misc_feature 1..80: note = Synthetic: >NC_001611.1-cand-99740-99819
  source 1..80: mol_type = other DNA
ttttacatacacatcagcatcttgaatagaaacgataccatcttctggaacctcaacaatctcggcagactccggataac

SEQ ID NO: 23826 - DNA, 80 bp, synthetic construct
  misc_feature 1..80: note = Synthetic: >NC_001611.1-cand-99820-99899
  source 1..80: mol_type = other DNA
cagttggtgggccatcactaacaataactagatcatccaacaatctactcacatatgcatctatataatctttttcatct

SEQ ID NO: 23827 - DNA, 80 bp, synthetic construct
  misc_feature 1..80: note = Synthetic: >NC_001611.1-cand-99900-99979
  source 1..80: mol_type = other DNA
tgtgagtaccctggatacgaaataaatttattatccgtatttccataataaggtttagtataaacagagagcgatgttgc

SEQ ID NO: 23828 - DNA, 80 bp, synthetic construct
  misc_feature 1..80: note = Synthetic: >NC_001611.1-cand-99950-100029
  source 1..80: mol_type = other DNA
aggtttagtataaacagagagcgatgttgccgcatgaacttcagttacagtcgccgttggttggtttatttgacctatta

SEQ ID NO: 23829 - DNA, 80 bp, synthetic construct
  misc_feature 1..80: note = Synthetic: >NC_001611.1-cand-100030-100109
  source 1..80: mol_type = other DNA
ctctcctaggtttctctataaacgatggtttaatttgtacattcttaaccatatatccaataaagctcaattcaggaaca

SEQ ID NO: 23830 - DNA, 80 bp, synthetic construct
  misc_feature 1..80: note = Synthetic: >NC_001611.1-cand-100110-100189
  source 1..80: mol_type = other DNA
taaacaaattctttgttgaacgtttcaaagtcgaacgaagagtcgcgaataacgatatcggatactggattgaaggtcac

SEQ ID NO: 23831 - DNA, 80 bp, synthetic construct
  misc_feature 1..80: note = Synthetic: >NC_001611.1-cand-100190-100269
  source 1..80: mol_type = other DNA
cgttacggtaatttttgaatcggatagtttaagactgctaaatgtatcttccacatcaaacggagttttaatataaacgt

SEQ ID NO: 23832 - DNA, 80 bp, synthetic construct
  misc_feature 1..80: note = Synthetic: >NC_001611.1-cand-100270-100349
  source 1..80: mol_type = other DNA
atactgtagatggttctttaatagtgtcattaggagttaagccaatagaaatatcattaagttcactagaatatccagaa

SEQ ID NO: 23833 - DNA, 80 bp, synthetic construct
  misc_feature 1..80: note = Synthetic: >NC_001611.1-cand-108290-108369
  source 1..80: mol_type = other DNA
ataatattattatccacatcttcatatgatccaaattctggaatagatgtatcacacgctctggctacccagataaccaa

SEQ ID NO: 23834 - DNA, 80 bp, synthetic construct
  misc_feature 1..80: note = Synthetic: >NC_001611.1-cand-108370-108449
  source 1..80: mol_type = other DNA
aaagtcgcacgctccaggatatacattgtataaaaagctatcgtttttaagtagtgtttttttttgcgtatatacgaagg

SEQ ID NO: 23835 - DNA, 80 bp, synthetic construct
  misc_feature 1..80: note = Synthetic: >NC_001611.1-cand-108450-108529
  source 1..80: mol_type = other DNA
gattgaaaatagtattatcgacgtaactatattccaaattattcttatgcgaatagataataatatcgtccttaatatct

SEQ ID NO: 23836 - DNA, 80 bp, synthetic construct
  misc_feature 1..80: note = Synthetic: >NC_001611.1-cand-108680-108759
  source 1..80: mol_type = other DNA
tatagggctcgttctacctcctgccctttacccacctgtaataccaattgtggactcactatatatcgcatatttatatc

SEQ ID NO: 23837 - DNA, 80 bp, synthetic construct
  misc_feature 1..80: note = Synthetic: >NC_001611.1-cand-108860-108939
  source 1..80: mol_type = other DNA
aaatatagatcaaacaacacctatgataaaggagaatatcggttttatatcccgcagtagacgtctattcgcccatagat

SEQ ID NO: 23838 - DNA, 80 bp, synthetic construct
  misc_feature 1..80: note = Synthetic: >NC_001611.1-cand-109470-109549
  source 1..80: mol_type = other DNA
acagtgtatgaaaagttacaactggtcatagaaaatgattcacaatttatatgttcattggctgtggaatcagaacttcc

SEQ ID NO: 23839 - DNA, 80 bp, synthetic construct
  misc_feature 1..80: note = Synthetic: >NC_001611.1-cand-109630-109709
  source 1..80: mol_type = other DNA
gcaaacgtgataaggatacgttactaaaatattttacttaggagttagaatttatagacgactcatttagtttattacta

SEQ ID NO: 23840 - DNA, 80 bp, synthetic construct
  misc_feature 1..80: note = Synthetic: >NC_001611.1-cand-109710-109789
  source 1..80: mol_type = other DNA
ttactagcattattggtattcttcttgtcatcttgttcagaaatatataacaatgctatacctaatactaaatacattat

SEQ ID NO: 23841 - DNA, 80 bp, synthetic construct
  misc_feature 1..80: note = Synthetic: >NC_001611.1-cand-109790-109869
  source 1..80: mol_type = other DNA
catgcttgcaatggctctaacaacgacgaaccaaaatgaatttggtcgtagcttttgttcacaaaaatacataaagaaat

SEQ ID NO: 23842 - DNA, 80 bp, synthetic construct
  misc_feature 1..80: note = Synthetic: >NC_001611.1-cand-109870-109949
  source 1..80: mol_type = other DNA
gtctacataaatctatggcgccattggcatcttgaaatagcgccagtcctcctacagattttaatatagctgtataacat

SEQ ID NO: 23843 - DNA, 80 bp, synthetic construct
  misc_feature 1..80: note = Synthetic: >NC_001611.1-cand-109950-110029
  source 1..80: mol_type = other DNA
gacatttattcatcatcaaaagagacagagtcaccatctgtcatatttagattttttttcatgtgttcaaagtatcctct

SEQ ID NO: 23844 - DNA, 80 bp, synthetic construct
  misc_feature 1..80: note = Synthetic: >NC_001611.1-cand-110030-110109
  source 1..80: mol_type = other DNA
actcatttcattataatagtttatcatacttagaattttaggacggatcaatgagtaagacttgactaaatcgtcagtag

SEQ ID NO: 23845 - DNA, 80 bp, synthetic construct
  misc_feature 1..80: note = Synthetic: >NC_001611.1-cand-110110-110189
  source 1..80: mol_type = other DNA
taatttgcgcatcgtctattctacatccgcttcgtcgaataatgtatagcattgctttgagattctccatagctatcaag

SEQ ID NO: 23846 - DNA, 80 bp, synthetic construct
  misc_feature 1..80: note = Synthetic: >NC_001611.1-cand-110190-110269
  source 1..80: mol_type = other DNA
tctttatacaatgacatggaaatatctgtgaacactttatacttctccaacatcgatgccttaacatcatcacctacttt

SEQ ID NO: 23847 - DNA, 80 bp, synthetic construct
  misc_feature 1..80: note = Synthetic: >NC_001611.1-cand-110340-110419
  source 1..80: mol_type = other DNA
gatgattgccttaagtctccaatcttttgtttagaatgattagctacagagtccaacgcttggctgactagcatattatt

SEQ ID NO: 23848 - DNA, 80 bp, synthetic construct
  misc_feature 1..80: note = Synthetic: >NC_001611.1-cand-110420-110499
  source 1..80: mol_type = other DNA
atctttagaaattgtattcttcaatgaggcgtttatcatatctgtaatttcgttagtcatattacagtctgactgggttg

SEQ ID NO: 23849 - DNA, 80 bp, synthetic construct
  misc_feature 1..80: note = Synthetic: >NC_001722.1-cand-4600-4679
  source 1..80: mol_type = other DNA
agtattattcctggaaaagatagagcccgctcaagaggaacatgaaaaatatcatagcattataaaagaactaacccata

SEQ ID NO: 23850 - DNA, 80 bp, synthetic construct
  misc_feature 1..80: note = Synthetic: >NC_001722.1-cand-4680-4759
  source 1..80: mol_type = other DNA
aatttggaataccccttctagtagcaagacagatagtaaactcatgtgcccaatgccaacagaaaggagaagccatacat

SEQ ID NO: 23851 - DNA, 80 bp, synthetic construct
  misc_feature 1..80: note = Synthetic: >NC_001722.1-cand-4760-4839
  source 1..80: mol_type = other DNA
gggcaagtaaatgcagaaataggcgtttggcaaatggactacacacacttagaaggaaaaatcattatagtagcagtaca

SEQ ID NO: 23852 - DNA, 80 bp, synthetic construct
  misc_feature 1..80: note = Synthetic: >NC_001722.1-cand-4840-4919
  source 1..80: mol_type = other DNA
tgttgcaagtggattcatagaagcagaagtcatcccacaggaatcaggaaggcagacagcactcttcctattaaaactgg

SEQ ID NO: 23853 - DNA, 80 bp, synthetic construct
  misc_feature 1..80: note = Synthetic: >NC_001722.1-cand-4920-4999
  source 1..80: mol_type = other DNA
ccagtaggtggccaataacgcacttgcacacagacaatggccccaacttcacttcacaggaagtgaagatggtggcatgg

SEQ ID NO: 23854 - DNA, 80 bp, synthetic construct
  misc_feature 1..80: note = Synthetic: >NC_001722.1-cand-5000-5079
  source 1..80: mol_type = other DNA
tgggtaggtatagaacaatcctttggagtaccttacaacccacaaagccagggagtagtagaagcaatgaatcaccacct

SEQ ID NO: 23855 - DNA, 80 bp, synthetic construct
  misc_feature 1..80: note = Synthetic: >NC_001722.1-cand-5080-5159
  source 1..80: mol_type = other DNA
aaagaatcagataagtagaattagagaacaggcaaatacaatagaaacaatagtactgatggcagttcattgcatgaatt

SEQ ID NO: 23856 - DNA, 80 bp, synthetic construct
  misc_feature 1..80: note = Synthetic: >NC_001722.1-cand-5190-5269
  source 1..80: mol_type = other DNA
ccccagcagaaagactaatcaacatgattaccacagaacaagaaatacaattcctccaaagaaaaaattcaaattttaaa

SEQ ID NO: 23857 - DNA, 80 bp, synthetic construct
  misc_feature 1..80: note = Synthetic: >NC_001722.1-cand-5240-5319
  source 1..80: mol_type = other DNA
ttcctccaaagaaaaaattcaaattttaaaaatttccaggtctattacagagaaggcagagatcagctgtggaaaggacc

SEQ ID NO: 23858 - DNA, 80 bp, synthetic construct
  misc_feature 1..80: note = Synthetic: >NC_001722.1-cand-5320-5399
  source 1..80: mol_type = other DNA
tggtgaactactgtggaagggagaaggagcagtcatagtcaaggtagggacagacataaaagtagtaccaagaaggaagg

SEQ ID NO: 23859 - DNA, 80 bp, synthetic construct
  misc_feature 1..80: note = Synthetic: >NC_001722.1-cand-5400-5479
  source 1..80: mol_type = other DNA
ccaagattatcagggactatggaggaagacaggaactggatagtagtccccacctggagggtgccagggaggatggagaa

SEQ ID NO: 23860 - DNA, 80 bp, synthetic construct
  misc_feature 1..80: note = Synthetic: >NC_001722.1-cand-5480-5559
  source 1..80: mol_type = other DNA
atggcatgcccttgtcaagtacctgaaatacagaacaaaagacctagaggaggtgcgctatgttccccaccacaaggtgg

SEQ ID NO: 23861 - DNA, 80 bp, synthetic construct
  misc_feature 1..80: note = Synthetic: >NC_001722.1-cand-5560-5639
  source 1..80: mol_type = other DNA
gatgggcatggtggacttgcagcagggtaatattcccactacaaggaaaaagtcatctagaaatacaggcatattggaac

SEQ ID NO: 23862 - DNA, 80 bp, synthetic construct
  misc_feature 1..80: note = Synthetic: >NC_001722.1-cand-5640-5719
  source 1..80: mol_type = other DNA
ctaacaccagaaaaaggatggctctcctctcatgcagtaagattaacctggtatacagaaaagttctggacagatgttac

SEQ ID NO: 23863 - DNA, 80 bp, synthetic construct
  misc_feature 1..80: note = Synthetic: >NC_001722.1-cand-5720-5799
  source 1..80: mol_type = other DNA
cccagactgtgcagacatcctaatacatagcacttatttctcttgctttacggcaggtgaagtaagaagagccatcagag

SEQ ID NO: 23864 - DNA, 80 bp, synthetic construct
  misc_feature 1..80: note = Synthetic: >NC_001722.1-cand-5800-5879
  source 1..80: mol_type = other DNA
gggaaaagttattgtcctgctgcaactatccccaagctcataaagcacaggtaccatcacttcaatacctagccctagta

SEQ ID NO: 23865 - DNA, 80 bp, synthetic construct
  misc_feature 1..80: note = Synthetic: >NC_001722.1-cand-9740-9819
  source 1..80: mol_type = other DNA
agacattagtgtggcagtttgactccatgctggcctataactacaaggccttcactctgtacccagaagagtttgggcac

SEQ ID NO: 23866 - DNA, 80 bp, synthetic construct
  misc_feature 1..80: note = Synthetic: >NC_001722.1-cand-9880-9959
  source 1..80: mol_type = other DNA
agtgaataacaggaacaaccatacttggtcaaggcaggaagtagctactaagaaacagctgaggctgcagggactttcca

SEQ ID NO: 23867 - DNA, 80 bp, synthetic construct
  misc_feature 1..80: note = Synthetic: >NC_001796.2-cand-20-99
  source 1..80: mol_type = other DNA
tggaaatataaatttaaattaaaattaacttaggattaaagacattgactagaaggtcaagaaaagggaactctataatt

SEQ ID NO: 23868 - DNA, 80 bp, synthetic construct
  misc_feature 1..80: note = Synthetic: >NC_001796.2-cand-100-179
  source 1..80: mol_type = other DNA
tcaaaaatgttgagcctatttgatacatttaatgcacgtaggcaagaaaacataacaaaatcagccggtggagctatcat

SEQ ID NO: 23869 - DNA, 80 bp, synthetic construct
  misc_feature 1..80: note = Synthetic: >NC_001796.2-cand-180-259
  source 1..80: mol_type = other DNA
tcctggacagaaaaatactgtctctatatttgctcttggaccgacaataactgatgataatgagaaaatgacattagctc

SEQ ID NO: 23870 - DNA, 80 bp, synthetic construct
  misc_feature 1..80: note = Synthetic: >NC_001796.2-cand-260-339
  source 1..80: mol_type = other DNA
ttctttttttatctcattcactggataatgagaaacaacatgcacaaagggcagggttcctggtgtccttattatcaatg

SEQ ID NO: 23871 - DNA, 80 bp, synthetic construct
  misc_feature 1..80: note = Synthetic: >NC_001796.2-cand-340-419
  source 1..80: mol_type = other DNA
gcttatgccaatccagagctctacctaacaacaaatggaagtaatgcagatgtcaagtatgtcatatacatgatcgagaa

SEQ ID NO: 23872 - DNA, 80 bp, synthetic construct
  misc_feature 1..80: note = Synthetic: >NC_001796.2-cand-420-499
  source 1..80: mol_type = other DNA
agatctaaaacggcaaaagtatggaggatttgtggttaagacgagagagatggtatatgacaagacaactgattggatat

SEQ ID NO: 23873 - DNA, 80 bp, synthetic construct
  misc_feature 1..80: note = Synthetic: >NC_001796.2-cand-500-579
  source 1..80: mol_type = other DNA
ttggaagtgacctggattgtgatcaggaaactatgttgcagaacggaagaaacaattcaacaattgaagaccttgtccac

SEQ ID NO: 23874 - DNA, 80 bp, synthetic construct
  misc_feature 1..80: note = Synthetic: >NC_001796.2-cand-580-659
  source 1..80: mol_type = other DNA
acatttgggtatccatcatgtttaggagctcttataatacagatctggatagttctggtcaaagctatcactagtatctc

SEQ ID NO: 23875 - DNA, 80 bp, synthetic construct
  misc_feature 1..80: note = Synthetic: >NC_001796.2-cand-660-739
  source 1..80: mol_type = other DNA
agggttaagaaaaggctttttcacccgattggaagctttcagacaagatggaacagtgcaggcagggctggtattgagcg

SEQ ID NO: 23876 - DNA, 80 bp, synthetic construct
  misc_feature 1..80: note = Synthetic: >NC_001796.2-cand-740-819
  source 1..80: mol_type = other DNA
gtgacacagtggatcagattgggtcaattatgcggtctcaacagagcttggtaactcttatggttgaaacattaataaca

SEQ ID NO: 23877 - DNA, 80 bp, synthetic construct
  misc_feature 1..80: note = Synthetic: >NC_001796.2-cand-820-899
  source 1..80: mol_type = other DNA
atgaatactagcagaaatgacctcacaaccatagaaaagaatatacaaattgttggtaactatataagagatgcaggtct

SEQ ID NO: 23878 - DNA, 80 bp, synthetic construct
  misc_feature 1..80: note = Synthetic: >NC_001796.2-cand-900-979
  source 1..80: mol_type = other DNA
cgcttcattcttcaatacaatcagatatggaattgagactagaatggcagctttgactctatccactctcagaccagaca

SEQ ID NO: 23879 - DNA, 80 bp, synthetic construct
  misc_feature 1..80: note = Synthetic: >NC_001796.2-cand-980-1059
  source 1..80: mol_type = other DNA
tcaatagattaaaagctttgatggaactgtatttatcaaagggaccacgcgctcctttcatctgtatcctcagagatccc

SEQ ID NO: 23880 - DNA, 80 bp, synthetic construct
  misc_feature 1..80: note = Synthetic: >NC_001796.2-cand-1060-1139
  source 1..80: mol_type = other DNA
atacatggtgagttcgcaccaggcaactatcctgccatatggagctatgcaatgggagtggcagttgtacaaaatagagc

SEQ ID NO: 23881 - DNA, 80 bp, synthetic construct
  misc_feature 1..80: note = Synthetic: >NC_001906.3-cand-1730-1809
  source 1..80: mol_type = other DNA
gctccaaatcattctctatgacacactcttataaataaatttaagagagtggattgagattgagttatggacctgtgtca

SEQ ID NO: 23882 - DNA, 80 bp, synthetic construct
  misc_feature 1..80: note = Synthetic: >NC_001906.3-cand-1810-1889
  source 1..80: mol_type = other DNA
taatatacctttgtcttttaataaattacttataccacccacatatgatgaatatgagttcgcagtagtttgtcttataa

SEQ ID NO: 23883 - DNA, 80 bp, synthetic construct
  misc_feature 1..80: note = Synthetic: >NC_001906.3-cand-1890-1969
  source 1..80: mol_type = other DNA
tttaaatcactctaaagccatgcttgaacctcaactttggatagtcacactgcaatgaatacatttagatatcctcagag

SEQ ID NO: 23884 - DNA, 80 bp, synthetic construct
  misc_feature 1..80: note = Synthetic: >NC_001906.3-cand-1970-2049
  source 1..80: mol_type = other DNA
tatttaactcactaaatctcagtagtagtaagtctcactggtgatgggatacaagtgcaagttccttttcaaatggtgct

SEQ ID NO: 23885 - DNA, 80 bp, synthetic construct
  misc_feature 1..80: note = Synthetic: >NC_001906.3-cand-2050-2129
  source 1..80: mol_type = other DNA
caaatctaaggatcctcttgctgaataggctatctactatgcactggaaaatataatgaactttacctcatacataacta

SEQ ID NO: 23886 - DNA, 80 bp, synthetic construct
  misc_feature 1..80: note = Synthetic: >NC_001906.3-cand-2100-2179
  source 1..80: mol_type = other DNA
atataatgaactttacctcatacataactaaatgatcaaagtttgtactgagtacatctattaaagtttataacaggcta

SEQ ID NO: 23887 - DNA, 80 bp, synthetic construct
  misc_feature 1..80: note = Synthetic: >NC_001906.3-cand-2210-2289
  source 1..80: mol_type = other DNA
ttattttagataacagtatatgagtggcatgggtctagacaacttgatcattatattaagaaaaacttaggatccaagac

SEQ ID NO: 23888 - DNA, 80 bp, synthetic construct
  misc_feature 1..80: note = Synthetic: >NC_001906.3-cand-2290-2369
  source 1..80: mol_type = other DNA
cataaatctaggatcctttacaatctcagaccctggtgcaaggttatatatagagcccaattctcctaattaaacagtgt

SEQ ID NO: 23889 - DNA, 80 bp, synthetic construct
  misc_feature 1..80: note = Synthetic: >NC_001906.3-cand-2370-2449
  source 1..80: mol_type = other DNA
ctcaggttgacaaatggacaagttggatctagtcaatgatggcctcgatattattgactttattcagaagaaccaaaaag

SEQ ID NO: 23890 - DNA, 80 bp, synthetic construct
  misc_feature 1..80: note = Synthetic: >NC_001906.3-cand-2450-2529
  source 1..80: mol_type = other DNA
aaatacaaaagacatacggacgatcaagcatccaacaaccaagtaccaaagacaggacaagagcatgggaggacttcttg

SEQ ID NO: 23891 - DNA, 80 bp, synthetic construct
  misc_feature 1..80: note = Synthetic: >NC_001906.3-cand-2570-2649
  source 1..80: mol_type = other DNA
tgcctaagaatgatggaggtactgaaggaagaaatgtggaggatctatccagtgttacttcctcagatggaactattgga

SEQ ID NO: 23892 - DNA, 80 bp, synthetic construct
  misc_feature 1..80: note = Synthetic: >NC_001906.3-cand-2610-2689
  source 1..80: mol_type = other DNA
ggatctatccagtgttacttcctcagatggaactattggacaaagagtgtcaaacacccgagcttgggcagaagacccag

SEQ ID NO: 23893 - DNA, 80 bp, synthetic construct
  misc_feature 1..80: note = Synthetic: >NC_001906.3-cand-2690-2769
  source 1..80: mol_type = other DNA
atgacatacaactggacccaatggttacagacgttgtataccatgatcatggaggagaatgtaccggacatggaccttct

SEQ ID NO: 23894 - DNA, 80 bp, synthetic construct
  misc_feature 1..80: note = Synthetic: >NC_001906.3-cand-2770-2849
  source 1..80: mol_type = other DNA
tcaagccctgagagagggtggagttatcacatgtcaggaacacacgatgggaatgtacgtgctgtacctgatacaaaggt

SEQ ID NO: 23895 - DNA, 80 bp, synthetic construct
  misc_feature 1..80: note = Synthetic: >NC_001906.3-cand-2850-2929
  source 1..80: mol_type = other DNA
gttgcccaatgctcccaaaactacagttcctgaagaagttagggaaattgatttaattgggttggaggacaaatttgcat

SEQ ID NO: 23896 - DNA, 80 bp, synthetic construct
  misc_feature 1..80: note = Synthetic: >NC_001906.3-cand-2930-3009
  source 1..80: mol_type = other DNA
cagcgggattaaatccagctgcagttccctttgtccccaagaatcaatcaaccccaactgaggagcctccagtcatcccg

SEQ ID NO: 23897 - DNA, 80 bp, synthetic construct
  misc_feature 1..80: note = Synthetic: >NC_002211.1-cand-960-1039
  source 1..80: mol_type = other DNA
aacagctccataatagctgacatgattgtatcattatcattactggaaacattgtatgaaatgaaggatgtggttgaagt

SEQ ID NO: 23898 - DNA, 80 bp, synthetic construct
  misc_feature 1..80: note = Synthetic: >NC_002211.1-cand-1000-1079
  source 1..80: mol_type = other DNA
tactggaaacattgtatgaaatgaaggatgtggttgaagtgtacagcaggcagtgcttatgaatgtaaaataaaaatcct

SEQ ID NO: 23899 - DNA, 80 bp, synthetic construct
  misc_feature 1..80: note = Synthetic: >NC_002640.1-cand-0-79
  source 1..80: mol_type = other DNA
gttagtctgtgtggaccgacaaggacagttccaaatcggaagcttgcttaacacagttctaacagtttgtttgaatagag

SEQ ID NO: 23900 - DNA, 80 bp, synthetic construct
  misc_feature 1..80: note = Synthetic: >NC_002640.1-cand-80-159
  source 1..80: mol_type = other DNA
agcagatctctggaaaaatgaaccaacgaaaaaaggtggttagaccacctttcaatatgctgaaacgcgagagaaaccgc

SEQ ID NO: 23901 - DNA, 80 bp, synthetic construct
  misc_feature 1..80: note = Synthetic: >NC_002640.1-cand-160-239
  source 1..80: mol_type = other DNA
gtatcaacccctcaagggttggtgaagagattctcaaccggacttttttctgggaaaggacccttacggatggtgctagc

SEQ ID NO: 23902 - DNA, 80 bp, synthetic construct
  misc_feature 1..80: note = Synthetic: >NC_002640.1-cand-220-299
  source 1..80: mol_type = other DNA
cccttacggatggtgctagcattcatcacgtttttgcgagtcctttccatcccaccaacagcagggattctgaagagatg

SEQ ID NO: 23903 - DNA, 80 bp, synthetic construct
  misc_feature 1..80: note = Synthetic: >NC_002640.1-cand-310-389
  source 1..80: mol_type = other DNA
aagaaaaataaggccatcaagatactgattggattcaggaaggagataggccgcatgctgaacatcttgaacgggagaaa

SEQ ID NO: 23904 - DNA, 80 bp, synthetic construct
  misc_feature 1..80: note = Synthetic: >NC_002640.1-cand-390-469
  source 1..80: mol_type = other DNA
aaggtcaacgataacattgctgtgcttgattcccaccgtaatggcgttttccctcagcacaagagatggcgaacccctca

SEQ ID NO: 23905 - DNA, 80 bp, synthetic construct
  misc_feature 1..80: note = Synthetic: >NC_002640.1-cand-410-489
  source 1..80: mol_type = other DNA
tgtgcttgattcccaccgtaatggcgttttccctcagcacaagagatggcgaacccctcatgatagtggcaaaacatgaa

SEQ ID NO: 23906 - DNA, 80 bp, synthetic construct
  misc_feature 1..80: note = Synthetic: >NC_002640.1-cand-550-629
  source 1..80: mol_type = other DNA
atggacttgggtgaaatgtgtgaggacactgtcacgtataaatgccccctactggtcaataccgaacctgaagacattga

SEQ ID NO: 23907 - DNA, 80 bp, synthetic construct
  misc_feature 1..80: note = Synthetic: >NC_002640.1-cand-630-709
  source 1..80: mol_type = other DNA
ttgctggtgcaacctcacgtctacctgggtcatgtatgggacatgcacccagagcggagaacggagacgagagaagcgct

SEQ ID NO: 23908 - DNA, 80 bp, synthetic construct
  misc_feature 1..80: note = Synthetic: >NC_002640.1-cand-700-779
  source 1..80: mol_type = other DNA
gagaagcgctcagtagctttaacaccacattcaggaatgggattggaaacaagagctgagacatggatgtcatcggaagg

SEQ ID NO: 23909 - DNA, 80 bp, synthetic construct
  misc_feature 1..80: note = Synthetic: >NC_002640.1-cand-790-869
  source 1..80: mol_type = other DNA
catgctcagagagtagagagctggatactcagaaacccaggattcgcgctcttggcaggatttatggcttatatgattgg

SEQ ID NO: 23910 - DNA, 80 bp, synthetic construct
  misc_feature 1..80: note = Synthetic: >NC_002640.1-cand-870-949
  source 1..80: mol_type = other DNA
gcaaacaggaatccagcgaactgtcttctttgtcctaatgatgctggtcgccccatcctacggaatgcgatgcgtaggag

SEQ ID NO: 23911 - DNA, 80 bp, synthetic construct
  misc_feature 1..80: note = Synthetic: >NC_002640.1-cand-950-1029
  source 1..80: mol_type = other DNA
taggaaacagagactttgtggaaggagtctcaggtggagcatgggtcgacctggtgctagaacatggaggatgcgtcaca

SEQ ID NO: 23912 - DNA, 80 bp, synthetic construct
  misc_feature 1..80: note = Synthetic: >NC_002640.1-cand-1030-1109
  source 1..80: mol_type = other DNA
accatggcccagggaaaaccaaccttggattttgaactgactaagacaacagccaaggaagtggctctgttaagaaccta

SEQ ID NO: 23913 - DNA, 80 bp, synthetic construct
  misc_feature 1..80: note = Synthetic: >NC_002640.1-cand-3710-3789
  source 1..80: mol_type = other DNA
tgttcaagatgtcaccaggatacgtgctgggtgtgtttttaaggaaactcacttcaagagagacagcactaatggtaata

SEQ ID NO: 23914 - DNA, 80 bp, synthetic construct
  misc_feature 1..80: note = Synthetic: >NC_002640.1-cand-3790-3869
  source 1..80: mol_type = other DNA
ggaatggccatgacaacggtgctttcaattccacatgaccttatggaactcattgatggaatatcactgggactaatttt

SEQ ID NO: 23915 - DNA, 80 bp, synthetic construct
  misc_feature 1..80: note = Synthetic: >NC_002640.1-cand-3870-3949
  source 1..80: mol_type = other DNA
gctaaaaatagtaacacagtttgacaacacccaagtgggaaccttagctctttccttgactttcataagatcaacaatgc

SEQ ID NO: 23916 - DNA, 80 bp, synthetic construct
  misc_feature 1..80: note = Synthetic: >NC_002640.1-cand-3950-4029
  source 1..80: mol_type = other DNA
cattggtcatggcttggaggaccattatggctgtgttgtttgtggtcacactcattcctttgtgcaggacaagctgtctt

SEQ ID NO: 23917 - DNA, 80 bp, synthetic construct
  misc_feature 1..80: note = Synthetic: >NC_002640.1-cand-4030-4109
  source 1..80: mol_type = other DNA
caaaaacagtctcattgggtagaaataacagcactcatcctaggagcccaagctctgccagtgtacctaatgactcttat

SEQ ID NO: 23918 - DNA, 80 bp, synthetic construct
  misc_feature 1..80: note = Synthetic: >NC_002640.1-cand-4120-4199
  source 1..80: mol_type = other DNA
tcaagaagatcttggcctcttaacgagggcataatggctgtgggtttggttagtctcttaggaagcgctcttttaaagaa

SEQ ID NO: 23919 - DNA, 80 bp, synthetic construct
  misc_feature 1..80: note = Synthetic: >NC_002640.1-cand-4200-4279
  source 1..80: mol_type = other DNA
tgatgtccctttagctggcccaatggtggcaggaggcttacttctggcggcttacgtgatgagtggtagctcagcagatc

SEQ ID NO: 23920 - DNA, 80 bp, synthetic construct
  misc_feature 1..80: note = Synthetic: >NC_002640.1-cand-4280-4359
  source 1..80: mol_type = other DNA
tgtcactagagaaggccgccaacgtgcagtgggatgaaatggcagacataacaggctcaagcccaatcgtagaagtgaag

SEQ ID NO: 23921 - DNA, 80 bp, synthetic construct
  misc_feature 1..80: note = Synthetic: >NC_002640.1-cand-4360-4439
  source 1..80: mol_type = other DNA
caggatgaagatggctctttctccatacgggacgtcgaggaaaccaatatgataacccttttggtgaaactggcactgat

SEQ ID NO: 23922 - DNA, 80 bp, synthetic construct
  misc_feature 1..80: note = Synthetic: >NC_002640.1-cand-4440-4519
  source 1..80: mol_type = other DNA
aacagtgtcaggtctctaccccttggcaattccagtcacaatgaccttatggtacatgtggcaagtgaaaacacaaagat

SEQ ID NO: 23923 - DNA, 80 bp, synthetic construct
  misc_feature 1..80: note = Synthetic: >NC_002640.1-cand-4520-4599
  source 1..80: mol_type = other DNA
caggagccctgtgggacgtcccctcacccgctgccactaaaaaagccgcactgtctgaaggagtgtacaggatcatgcaa

SEQ ID NO: 23924 - DNA, 80 bp, synthetic construct
  misc_feature 1..80: note = Synthetic: >NC_002640.1-cand-4600-4679
  source 1..80: mol_type = other DNA
agagggttattcgggaaaactcaggttggagtagggatacacatggaaggtgtatttcacacaatgtggcatgtaacaag

SEQ ID NO: 23925 - DNA, 80 bp, synthetic construct
  misc_feature 1..80: note = Synthetic: >NC_002640.1-cand-4680-4759
  source 1..80: mol_type = other DNA
aggatcagtgatctgccacgagactgggagattggagccatcttgggctgacgtcaggaatgacatgatatcatacggtg

SEQ ID NO: 23926 - DNA, 80 bp, synthetic construct
  misc_feature 1..80: note = Synthetic: >NC_002640.1-cand-4770-4849
  source 1..80: mol_type = other DNA
gcttggagacaaatgggacaaagaagaagacgttcaggtcctcgccatagaaccaggaaaaaatcctaaacatgtccaaa

SEQ ID NO: 23927 - DNA, 80 bp, synthetic construct
  misc_feature 1..80: note = Synthetic: >NC_002640.1-cand-4860-4939
  source 1..80: mol_type = other DNA
ccttttcaagaccctaactggagaaattggagcagtaacattagatttcaaacccggaacgtctggttctcccatcatca

SEQ ID NO: 23928 - DNA, 80 bp, synthetic construct
  misc_feature 1..80: note = Synthetic: >NC_002640.1-cand-4940-5019
  source 1..80: mol_type = other DNA
acaggaaaggaaaagtcatcggactctatggaaatggagtagttaccaaatcaggtgattacgtcagtgccataacgcaa

SEQ ID NO: 23929 - DNA, 80 bp, synthetic construct
  misc_feature 1..80: note = Synthetic: >NC_002640.1-cand-7570-7649
  source 1..80: mol_type = other DNA
acaggagagacactgggagagaagtggaagagacagctaaactcattagacagaaaagagtttgaagagtataaaagaag

SEQ ID NO: 23930 - DNA, 80 bp, synthetic construct
  misc_feature 1..80: note = Synthetic: >NC_002640.1-cand-7650-7729
  source 1..80: mol_type = other DNA
tggaatactagaagtggacaggactgaagccaagtctgccctgaaagatgggtctaaaatcaagcatgcagtatcaagag

SEQ ID NO: 23931 - DNA, 80 bp, synthetic construct
  misc_feature 1..80: note = Synthetic: >NC_002640.1-cand-7730-7809
  source 1..80: mol_type = other DNA
ggtccagtaagatcagatggattgttgagagagggatggtaaagccaaaagggaaagttgtagatcttggctgtgggaga

SEQ ID NO: 23932 - DNA, 80 bp, synthetic construct
  misc_feature 1..80: note = Synthetic: >NC_002640.1-cand-7810-7889
  source 1..80: mol_type = other DNA
ggaggatggtcttattacatggcgacactcaagaacgtgactgaagtgaaagggtatacaaaaggaggtccaggacatga

SEQ ID NO: 23933 - DNA, 80 bp, synthetic construct
  misc_feature 1..80: note = Synthetic: >NC_002640.1-cand-7860-7939
  source 1..80: mol_type = other DNA
agggtatacaaaaggaggtccaggacatgaagaaccgattcccatggctacttatggttggaatttggtcaaactccatt

SEQ ID NO: 23934 - DNA, 80 bp, synthetic construct
  misc_feature 1..80: note = Synthetic: >NC_002640.1-cand-8000-8079
  source 1..80: mol_type = other DNA
gggagtcatcttctaatccaacaatagaggaaggaagaacattaagagttttgaagatggtggagccatggctctcttca

SEQ ID NO: 23935 - DNA, 80 bp, synthetic construct
  misc_feature 1..80: note = Synthetic: >NC_002640.1-cand-8050-8129
  source 1..80: mol_type = other DNA
ttgaagatggtggagccatggctctcttcaaaacctgaattctgcatcaaagtccttaacccctacatgccaacagtcat

SEQ ID NO: 23936 - DNA, 80 bp, synthetic construct
  misc_feature 1..80: note = Synthetic: >NC_002640.1-cand-8130-8209
  source 1..80: mol_type = other DNA
agaagagctggagaaactgcagagaaaacatggtgggaaccttgtcagatgcccgctgtccaggaactccacccatgaga

SEQ ID NO: 23937 - DNA, 80 bp, synthetic construct
  misc_feature 1..80: note = Synthetic: >NC_002640.1-cand-8210-8289
  source 1..80: mol_type = other DNA
tgtattgggtgtcaggagcgtcgggaaacattgtgagctctgtgaacacaacatcaaagatgttgttgaacaggttcaca

SEQ ID NO: 23938 - DNA, 80 bp, synthetic construct
  misc_feature 1..80: note = Synthetic: >NC_002640.1-cand-8250-8329
  source 1..80: mol_type = other DNA
tgtgaacacaacatcaaagatgttgttgaacaggttcacaacaaggcataggaaacccacttatgagaaggacgtagatc

SEQ ID NO: 23939 - DNA, 80 bp, synthetic construct
  misc_feature 1..80: note = Synthetic: >NC_002640.1-cand-8370-8449
  source 1..80: mol_type = other DNA
accagacatgacaatcattgggagaaggcttcagcgattgcaagaagagcacaaagaaacctggcattatgatcaggaaa

SEQ ID NO: 23940 - DNA, 80 bp, synthetic construct
  misc_feature 1..80: note = Synthetic: >NC_002640.1-cand-8440-8519
  source 1..80: mol_type = other DNA
gatcaggaaaacccatacagaacctgggcgtatcatggaagctatgaagctccttcgacaggctctgcatcctccatggt

SEQ ID NO: 23941 - DNA, 80 bp, synthetic construct
  misc_feature 1..80: note = Synthetic: >NC_002640.1-cand-8530-8609
  source 1..80: mol_type = other DNA
gtaaaactgctaacaaaaccctgggatgtgattccaatggtgactcagttagccatgacagatacaaccccttttgggca

SEQ ID NO: 23942 - DNA, 80 bp, synthetic construct
  misc_feature 1..80: note = Synthetic: >NC_002640.1-cand-8610-8689
  source 1..80: mol_type = other DNA
acaaagagtgttcaaagagaaggtggataccagaacaccacaaccaaaacccggtacacgaatggttatgaccacgacag

SEQ ID NO: 23943 - DNA, 80 bp, synthetic construct
  misc_feature 1..80: note = Synthetic: >NC_002640.1-cand-8710-8789
  source 1..80: mol_type = other DNA
cttggaaagaagaaaaatcccagactgtgcacaagggaagagttcatctcaaaagttagatcaaacgcagccataggcgc

SEQ ID NO: 23944 - DNA, 80 bp, synthetic construct
  misc_feature 1..80: note = Synthetic: >NC_002640.1-cand-8790-8869
  source 1..80: mol_type = other DNA
agtctttcaggaagaacagggatggacatcagccagtgaagctgtgaatgacagccggttttgggaactggttgacaaag

SEQ ID NO: 23945 - DNA, 80 bp, synthetic construct
  misc_feature 1..80: note = Synthetic: >NC_002728.1-cand-6940-7019
  source 1..80: mol_type = other DNA
aaaaacaacactcatgaccttgtcggtgatgtgagattagccggagttataatggcaggagttgctattgggattgcaac

SEQ ID NO: 23946 - DNA, 80 bp, synthetic construct
  misc_feature 1..80: note = Synthetic: >NC_002728.1-cand-7030-7109
  source 1..80: mol_type = other DNA
atcactgcaggtgtagcactatatgaggcaatgaagaatgctgacaacatcaacaaactcaaaagcagcattgaatcaac

SEQ ID NO: 23947 - DNA, 80 bp, synthetic construct
  misc_feature 1..80: note = Synthetic: >NC_002728.1-cand-7110-7189
  source 1..80: mol_type = other DNA
taatgaagctgtcgttaaacttcaagagactgcagaaaagacagtctatgtgctgactgctctacaggattacattaata

SEQ ID NO: 23948 - DNA, 80 bp, synthetic construct
  misc_feature 1..80: note = Synthetic: >NC_002728.1-cand-7190-7269
  source 1..80: mol_type = other DNA
ctaatttagtaccgacaattgacaagataagctgcaaacagacagaactctcactagatctggcattatcaaagtacctc

SEQ ID NO: 23949 - DNA, 80 bp, synthetic construct
  misc_feature 1..80: note = Synthetic: >NC_002728.1-cand-7270-7349
  source 1..80: mol_type = other DNA
tctgatttgctttttgtatttggccccaaccttcaagacccagtttctaattcaatgactatacaggctatatctcaggc

SEQ ID NO: 23950 - DNA, 80 bp, synthetic construct
  misc_feature 1..80: note = Synthetic: >NC_002728.1-cand-7350-7429
  source 1..80: mol_type = other DNA
attcggtggaaattatgaaacactgctaagaacattgggttacgctacagaagactttgatgatcttctagaaagtgaca

SEQ ID NO: 23951 - DNA, 80 bp, synthetic construct
  misc_feature 1..80: note = Synthetic: >NC_002728.1-cand-7430-7509
  source 1..80: mol_type = other DNA
gcataacaggtcaaatcatctatgttgatctaagtagctactatataattgtcagggtttattttcctattctgactgaa

SEQ ID NO: 23952 - DNA, 80 bp, synthetic construct
  misc_feature 1..80: note = Synthetic: >NC_002728.1-cand-7510-7589
  source 1..80: mol_type = other DNA
attcaacaggcctatatccaagagttgttaccagtgagcttcaacaatgataattcagaatggatcagtattgtcccaaa

SEQ ID NO: 23953 - DNA, 80 bp, synthetic construct
  misc_feature 1..80: note = Synthetic: >NC_002728.1-cand-7610-7689
  source 1..80: mol_type = other DNA
cattaatatcaaatatagagattggattttgcctaattacaaagaggagcgtgatctgcaaccaagattatgccacacct

SEQ ID NO: 23954 - DNA, 80 bp, synthetic construct
  misc_feature 1..80: note = Synthetic: >NC_002728.1-cand-7690-7769
  source 1..80: mol_type = other DNA
atgaccaacaacatgagagaatgtttaacgggatcgactgagaagtgtcctcgagagctggttgtttcatcacatgttcc

SEQ ID NO: 23955 - DNA, 80 bp, synthetic construct
  misc_feature 1..80: note = Synthetic: >NC_002728.1-cand-7790-7869
  source 1..80: mol_type = other DNA
gggttctgtttgccaattgcataagtgttacatgtcagtgtcaaacaacaggcagggcaatctcacaatcaggagaacaa

SEQ ID NO: 23956 - DNA, 80 bp, synthetic construct
  misc_feature 1..80: note = Synthetic: >NC_002728.1-cand-7850-7929
  source 1..80: mol_type = other DNA
tctcacaatcaggagaacaaactctgctgatgattgacaacaccacctgtcctacagccgtactcggtaatgtgattatc

SEQ ID NO: 23957 - DNA, 80 bp, synthetic construct
  misc_feature 1..80: note = Synthetic: >NC_002728.1-cand-7950-8029
  source 1..80: mol_type = other DNA
gtcagtaaattataattctgaaggcattgctatcggtcctccagtctttacagataaagttgatatatcaagtcagatat

SEQ ID NO: 23958 - DNA, 80 bp, synthetic construct
  misc_feature 1..80: note = Synthetic: >NC_002728.1-cand-8010-8089
  source 1..80: mol_type = other DNA
tgatatatcaagtcagatatccagcatgaatcagtccttacaacagtctaaggactatatcaaagaggctcaacgactcc

SEQ ID NO: 23959 - DNA, 80 bp, synthetic construct
  misc_feature 1..80: note = Synthetic: >NC_002728.1-cand-8090-8169
  source 1..80: mol_type = other DNA
ttgatactgttaatccatcattaataagcatgttgtctatgatcatactgtatgtattatcgatcgcatcgttgtgtata

SEQ ID NO: 23960 - DNA, 80 bp, synthetic construct
  misc_feature 1..80: note = Synthetic: >NC_002728.1-cand-8170-8249
  source 1..80: mol_type = other DNA
gggttgattacatttatcagttttatcattgttgagaaaaagagaaacacctacagcagattagaggataggagagtcag

SEQ ID NO: 23961 - DNA, 80 bp, synthetic construct
  misc_feature 1..80: note = Synthetic: >NC_002728.1-cand-12080-12159
  source 1..80: mol_type = other DNA
agaagtgttattatcttacacccgaaatggttctaatgtattgtgatgtcctagagggaaggatgatgatggagacaaca

SEQ ID NO: 23962 - DNA, 80 bp, synthetic construct
  misc_feature 1..80: note = Synthetic: >NC_002728.1-cand-12130-12209
  source 1..80: mol_type = other DNA
ctagagggaaggatgatgatggagacaacagtcaaatcggatatcaagtaccaacctctaatctcgagatccaatgccct

SEQ ID NO: 23963 - DNA, 80 bp, synthetic construct
  misc_feature 1..80: note = Synthetic: >NC_002728.1-cand-12240-12319
  source 1..80: mol_type = other DNA
catgggaaacagaatttacaatatagtgtctatgatagagcctttagttcttgcactactccaactcaaggatgaggcta

SEQ ID NO: 23964 - DNA, 80 bp, synthetic construct
  misc_feature 1..80: note = Synthetic: >NC_002728.1-cand-12330-12409
  source 1..80: mol_type = other DNA
gggtgcatttctgcatcactgcataaaggaaatgcatcaagaattgagtgagtgtggttttacagatcagaagattcggt

SEQ ID NO: 23965 - DNA, 80 bp, synthetic construct
  misc_feature 1..80: note = Synthetic: >NC_002728.1-cand-12400-12479
  source 1..80: mol_type = other DNA
aagattcggtctatgtttattgatgatcttttatccattctaaatatcgataatatacatctgttggcagagttcttttc

SEQ ID NO: 23966 - DNA, 80 bp, synthetic construct
  misc_feature 1..80: note = Synthetic: >NC_002728.1-cand-12480-12559
  source 1..80: mol_type = other DNA
tttctttcgtacgtttggccatcctattcttgaggctaaagttgctgcagaaaaagtgagagaacatatgttggcagata

SEQ ID NO: 23967 - DNA, 80 bp, synthetic construct
  misc_feature 1..80: note = Synthetic: >NC_002728.1-cand-12560-12639
  source 1..80: mol_type = other DNA
aagttcttgaatatgcccctataatgaaagcacatgctatattctgcgggactataataaatgggtatagggatagacac

SEQ ID NO: 23968 - DNA, 80 bp, synthetic construct
  misc_feature 1..80: note = Synthetic: >NC_002728.1-cand-12630-12709
  source 1..80: mol_type = other DNA
ggatagacacggaggagcctggcctcctctttacctccccgcacatgcatctaaacatataatccgtttgaaaaattctg

SEQ ID NO: 23969 - DNA, 80 bp, synthetic construct
  misc_feature 1..80: note = Synthetic: >NC_002728.1-cand-12720-12799
  source 1..80: mol_type = other DNA
gaccattgatgactgtgtcaagaattgggaatcattctgtgggattcaatttgattgtttcatggagctgaaattggaca

SEQ ID NO: 23970 - DNA, 80 bp, synthetic construct
  misc_feature 1..80: note = Synthetic: >NC_002728.1-cand-12800-12879
  source 1..80: mol_type = other DNA
gtgatctgagtatgtatatgaaagataaagctttatctccaatcaaagacgaatgggacagtgtatacccacgtgaagtg

SEQ ID NO: 23971 - DNA, 80 bp, synthetic construct
  misc_feature 1..80: note = Synthetic: >NC_002728.1-cand-12880-12959
  source 1..80: mol_type = other DNA
ttgagctataccccaccgaagtcaaccgagccaagaagattggttgacgtttttgtaaatgatgaaaactttgatccata

SEQ ID NO: 23972 - DNA, 80 bp, synthetic construct
  misc_feature 1..80: note = Synthetic: >NC_002728.1-cand-12960-13039
  source 1..80: mol_type = other DNA
caacatgctggaatatgtcttatccggtgcttatctcgaggatgaacaattcaatgtttcttatagcttgaaggagaaag

SEQ ID NO: 23973 - DNA, 80 bp, synthetic construct
  misc_feature 1..80: note = Synthetic: >NC_002728.1-cand-13040-13119
  source 1..80: mol_type = other DNA
agacgaagcaagctggacgattgttcgcaaagatgacctacaaaatgcgtgcatgtcaagtcatagcagaggccctgata

SEQ ID NO: 23974 - DNA, 80 bp, synthetic construct
  misc_feature 1..80: note = Synthetic: >NC_002728.1-cand-13120-13199
  source 1..80: mol_type = other DNA
gcctcaggtgtcggtaaatattttaaggagaacgggatggttaaggatgagcacgaacttttgaagacactcttccaatt

SEQ ID NO: 23975 - DNA, 80 bp, synthetic construct
  misc_feature 1..80: note = Synthetic: >NC_002728.1-cand-13200-13279
  source 1..80: mol_type = other DNA
gtctatttcctcagttcctcgagggaacagtcagggtaatgatcctcaatccatcaataatatagaaagagatttccaat

SEQ ID NO: 23976 - DNA, 80 bp, synthetic construct
  misc_feature 1..80: note = Synthetic: >NC_002728.1-cand-13290-13369
  source 1..80: mol_type = other DNA
ggtcactaccaatgtgaaagacaaaaagaataactcttttaataaggttaaatctgctctcaataatccgtgccaagctg

SEQ ID NO: 23977 - DNA, 80 bp, synthetic construct
  misc_feature 1..80: note = Synthetic: >NC_002728.1-cand-15890-15969
  source 1..80: mol_type = other DNA
tagctaagactgttgctcagaccgttcttgagattataacaaaggctgacaaggatgttttaaagcaacaccttgcaata

SEQ ID NO: 23978 - DNA, 80 bp, synthetic construct
  misc_feature 1..80: note = Synthetic: >NC_002728.1-cand-15970-16049
  source 1..80: mol_type = other DNA
gactctgacgataacatcaacagcttaatcacagaatttctaatagttgatcctgaactgtttgcactttatctaggaca

SEQ ID NO: 23979 - DNA, 80 bp, synthetic construct
  misc_feature 1..80: note = Synthetic: >NC_002728.1-cand-16050-16129
  source 1..80: mol_type = other DNA
atctatatcaataaaatgggcctttgaaattcatcataggcgtcctagaggaagacatactatggtcgacctattgtcag

SEQ ID NO: 23980 - DNA, 80 bp, synthetic construct
  misc_feature 1..80: note = Synthetic: >NC_002728.1-cand-16130-16209
  source 1..80: mol_type = other DNA
atcttgtatcaaatacatcaaagcacacttacaaagtgttgtcaaatgccttgtcacatcctagagtattcaagagattt

SEQ ID NO: 23981 - DNA, 80 bp, synthetic construct
  misc_feature 1..80: note = Synthetic: >NC_002728.1-cand-16210-16289
  source 1..80: mol_type = other DNA
gtaaactgtggcttgctattgcctacacagggtccttaccttcatcaacaagattttgaaaagttgtctcaaaaccttct

SEQ ID NO: 23982 - DNA, 80 bp, synthetic construct
  misc_feature 1..80: note = Synthetic: >NC_002728.1-cand-16290-16369
  source 1..80: mol_type = other DNA
tgtaacatcttatatgatttatctaatgaactggtgtgacttcaagaaatccccctttttaatcgccgaacaggatgaaa

SEQ ID NO: 23983 - DNA, 80 bp, synthetic construct
  misc_feature 1..80: note = Synthetic: >NC_002728.1-cand-16370-16449
  source 1..80: mol_type = other DNA
ctgtgataagtctacgagaggatataataacatccaaacatctctgtgttataattgacttatatgcaaatcaccataaa

SEQ ID NO: 23984 - DNA, 80 bp, synthetic construct
  misc_feature 1..80: note = Synthetic: >NC_002728.1-cand-16450-16529
  source 1..80: mol_type = other DNA
cctccttggataatagatctaaacccacaagaaaaaatatgtgtactgcgtgactttatttctaaatctaggcatgtgga

SEQ ID NO: 23985 - DNA, 80 bp, synthetic construct
  misc_feature 1..80: note = Synthetic: >NC_002728.1-cand-16530-16609
  source 1..80: mol_type = other DNA
cacgtcctccagatcatggaatacttctgacctggattttgtaatattctatgcatctttgacttatttgagaagaggta

SEQ ID NO: 23986 - DNA, 80 bp, synthetic construct
  misc_feature 1..80: note = Synthetic: >NC_002728.1-cand-16610-16689
  source 1..80: mol_type = other DNA
taataaaacaattaaggataagacaagttactgaggttatagataccacaacaatgttaagggacaatataattgtagag

SEQ ID NO: 23987 - DNA, 80 bp, synthetic construct
  misc_feature 1..80: note = Synthetic: >NC_002728.1-cand-16690-16769
  source 1..80: mol_type = other DNA
aatcctcctattaaaacaggagtgttagacatcagaggttgtataatatacaatttagaggaaatcctgtctatgaacac

SEQ ID NO: 23988 - DNA, 80 bp, synthetic construct
  misc_feature 1..80: note = Synthetic: >NC_002728.1-cand-16770-16849
  source 1..80: mol_type = other DNA
aaaatcagcatcaaaaaagatctttaatcttaatagtaggccgtcagtggagaatcataaatatagaaggataggtctca

SEQ ID NO: 23989 - DNA, 80 bp, synthetic construct
  misc_feature 1..80: note = Synthetic: >NC_002728.1-cand-16850-16929
  source 1..80: mol_type = other DNA
actcatcatcttgttacaaggcattaaatctatcacctctgattcaaaggtatttgccgtcgggagctcaaaggttgttt

SEQ ID NO: 23990 - DNA, 80 bp, synthetic construct
  misc_feature 1..80: note = Synthetic: >NC_002728.1-cand-16900-16979
  source 1..80: mol_type = other DNA
tatttgccgtcgggagctcaaaggttgtttataggagaaggttctgggagcatgatgttattatatcagtctacattggg

SEQ ID NO: 23991 - DNA, 80 bp, synthetic construct
  misc_feature 1..80: note = Synthetic: >NC_002728.1-cand-17010-17089
  source 1..80: mol_type = other DNA
agatggagattatataccaggtcaaagagaactgaaactatttccctctgaatactcaattgctgaggaagacccatctc

SEQ ID NO: 23992 - DNA, 80 bp, synthetic construct
  misc_feature 1..80: note = Synthetic: >NC_002728.1-cand-17100-17179
  source 1..80: mol_type = other DNA
attgaaaggactagtggtgcccctattcaatggaagaccagaaacaacatggatcgggaatttagactcctacgagtata

SEQ ID NO: 23993 - DNA, 80 bp, synthetic construct
  misc_feature 1..80: note = Synthetic: >NC_003310.1-cand-144200-144279
  source 1..80: mol_type = other DNA
gctactttagctataagggtaaaatagttcctcaggattctaatgatttggctagattcaacatttatagtatttgtacc

SEQ ID NO: 23994 - DNA, 80 bp, synthetic construct
  misc_feature 1..80: note = Synthetic: >NC_003310.1-cand-144280-144359
  source 1..80: mol_type = other DNA
gcatacagatcaaaaaataccatcatcatagcatgcgactatgatatcatgttagatatagaaggtaaacatcaaccatt

SEQ ID NO: 23995 - DNA, 80 bp, synthetic construct
  misc_feature 1..80: note = Synthetic: >NC_003310.1-cand-144360-144439
  source 1..80: mol_type = other DNA
ttatctattcccatctattgatgtttttaacgctacaatcatagaagcgtataatctgtatacagctggagattatcatc

SEQ ID NO: 23996 - DNA, 80 bp, synthetic construct
  misc_feature 1..80: note = Synthetic: >NC_003310.1-cand-144520-144599
  source 1..80: mol_type = other DNA
attataattgatgggaaatgtaatagtaattttttatcataaaagttgtaaagtaaataataaacaataaatattgaact

SEQ ID NO: 23997 - DNA, 80 bp, synthetic construct
  misc_feature 1..80: note = Synthetic: >NC_003310.1-cand-144600-144679
  source 1..80: mol_type = other DNA
agtagtatgttgtatattgagcaatcagagatgatgctggtacctcttatcacggtgaccgtagttgcgggaacaatatt

SEQ ID NO: 23998 - DNA, 80 bp, synthetic construct
  misc_feature 1..80: note = Synthetic: >NC_003310.1-cand-144760-144839
  source 1..80: mol_type = other DNA
aaaagataaagagtcctaattccagcaaatctagtaaatcaactgatagcgaatcagactgggaggatcactgtagtgct

SEQ ID NO: 23999 - DNA, 80 bp, synthetic construct
  misc_feature 1..80: note = Synthetic: >NC_003310.1-cand-144840-144919
  source 1..80: mol_type = other DNA
atggaacaaaactatgacgtagataatatttctagaaatgagatattgaacgatgatagcttcgctggtagtttaatatg

SEQ ID NO: 24000 - DNA, 80 bp, synthetic construct
  misc_feature 1..80: note = Synthetic: >NC_003310.1-cand-144920-144999
  source 1..80: mol_type = other DNA
ggataacgaatccaatgtcatggcgcctagcacaaaacacatttacgatagtgttgctggaagcacgctgctaataaata

SEQ ID NO: 24001 - DNA, 80 bp, synthetic construct
  misc_feature 1..80: note = Synthetic: : >NC_003310.1-cand-145000-145079
  source 1..80: mol_type = other DNA
atgatcgtaatgaactgactatttatcagaatactacagtagtaattaatgatacagagactgttgaaatacttaatgaa

SEQ ID NO: 24002 - DNA, 80 bp, synthetic construct
  misc_feature 1..80: note = Synthetic: >NC_003310.1-cand-145080-145159
  source 1..80: mol_type = other DNA
gataccaaacagattcctagctattcttccaatcctttcgtaaattataataaaaccagtatttgtagcaagtcaaatcc

SEQ ID NO: 24003 - DNA, 80 bp, synthetic construct
  misc_feature 1..80: note = Synthetic: >NC_003310.1-cand-145160-145239
  source 1..80: mol_type = other DNA
gttcattgcagaactcaacaataaatttagtgataataatccgtttaggagagcacatagcgacgattatcttaataagc

SEQ ID NO: 24004 - DNA, 80 bp, synthetic construct
  misc_feature 1..80: note = Synthetic: >NC_003310.1-cand-145240-145319
  source 1..80: mol_type = other DNA
aataacaataacaataacaagatcatgaacacgatgatatagaatcatcggttgtatcattgtctgattagtttcctttt

SEQ ID NO: 24005 - DNA, 80 bp, synthetic construct
  misc_feature 1..80: note = Synthetic: >NC_003310.1-cand-145330-145409
  source 1..80: mol_type = other DNA
aagtaatatttagtattaattaccgccgatgcattatacaaatatggagatattccctgtattcggcatttctaaaatta

SEQ ID NO: 24006 - DNA, 80 bp, synthetic construct
  misc_feature 1..80: note = Synthetic: >NC_003310.1-cand-145410-145489
  source 1..80: mol_type = other DNA
gcaattttattgctaataatgactgtagatattatatagatgtagagcatcaaaaaattatatctgatgagatcaataga

SEQ ID NO: 24007 - DNA, 80 bp, synthetic construct
  misc_feature 1..80: note = Synthetic: >NC_003310.1-cand-145490-145569
  source 1..80: mol_type = other DNA
cagatggatgaaacggtacttcttaccaacatcttaagcgtagaagttgtaaatggcaatgagatgtaccatcttattcc

SEQ ID NO: 24008 - DNA, 80 bp, synthetic construct
  misc_feature 1..80: note = Synthetic: >NC_003310.1-cand-145570-145649
  source 1..80: mol_type = other DNA
ccatagactatcgacgattatactctgtattagttctgttggaggatgtgttatctctatagataatgacgtcaatgata

SEQ ID NO: 24009 - DNA, 80 bp, synthetic construct
  misc_feature 1..80: note = Synthetic: >NC_003310.1-cand-191210-191289
  source 1..80: mol_type = other DNA
gaatatgtaaaaaggaaagtagtgttgttgagtttattttgaattgtggtatcccagatgaaaatgatgttaaattagat

SEQ ID NO: 24010 - DNA, 80 bp, synthetic construct
  misc_feature 1..80: note = Synthetic: >NC_003310.1-cand-191230-191309
  source 1..80: mol_type = other DNA
agtgttgttgagtttattttgaattgtggtatcccagatgaaaatgatgttaaattagatctatataaaataattcagta

SEQ ID NO: 24011 - DNA, 80 bp, synthetic construct
  misc_feature 1..80: note = Synthetic: >NC_003310.1-cand-191540-191619
  source 1..80: mol_type = other DNA
ctgtcatcgcccgtagggaaacacatcttaaaatattagaaatattgcttagagaaccattgtctattgactgtataaaa

SEQ ID NO: 24012 - DNA, 80 bp, synthetic construct
  misc_feature 1..80: note = Synthetic: >NC_004162.2-cand-11650-11729
  source 1..80: mol_type = other DNA
actaataaaaatcaaatgaataccataattggcaaacggaagagatgtaggtacttaagcttcctaaaagcagccgaact

SEQ ID NO: 24013 - DNA, 80 bp, synthetic construct
  misc_feature 1..80: note = Synthetic: >NC_004162.2-cand-11730-11809
  source 1..80: mol_type = other DNA
cactttgagatgtaggcatagcataccgaactcttccacgattctccgaacccacagggacgtaggagatgttattttgt

SEQ ID NO: 24014 - DNA, 80 bp, synthetic construct
  misc_feature 1..80: note = Synthetic: >NC_004296.1-cand-670-749
  source 1..80: mol_type = other DNA
aggttgacttgaatgatgcagtacaagcattgacagatttgggtttgatctacacagcaaagtatcccaacacttcagac

SEQ ID NO: 24015 - DNA, 80 bp, synthetic construct
  misc_feature 1..80: note = Synthetic: >NC_004296.1-cand-1490-1569
  source 1..80: mol_type = other DNA
tgacataaggaaactccttgaatcacaaggaagaaaagacattaaactaattgatattgccctcagcaaaactgattcca

SEQ ID NO: 24016 - DNA, 80 bp, synthetic construct
  misc_feature 1..80: note = Synthetic: >NC_004296.1-cand-1770-1849
  source 1..80: mol_type = other DNA
gtgttcagaacatcgacacctagagtcgttctgtaaatggacgcccccgtgacccaccgccaataggcggtgggtcacgg

SEQ ID NO: 24017 - DNA, 80 bp, synthetic construct
  misc_feature 1..80: note = Synthetic: >NC_004296.1-cand-2910-2989
  source 1..80: mol_type = other DNA
ggatggacaagtggaaagttgagattatgctcataagagcgtggtcatagaggttctttttgtgggcatcagacagattg

SEQ ID NO: 24018 - DNA, 80 bp, synthetic construct
  misc_feature 1..80: note = Synthetic: >NC_004297.1-cand-20-99
  source 1..80: mol_type = other DNA
ggttgtctttttttgaggccttgtgcgctgtacttctccaaatgggaaacaagcaagccaaagccccagaatcaaaagac

SEQ ID NO: 24019 - DNA, 80 bp, synthetic construct
  misc_feature 1..80: note = Synthetic: >NC_004297.1-cand-100-179
  source 1..80: mol_type = other DNA
agtccgagagccagcctgatcccagatgccacacatctagggccacagttctgtaagagctgctggttcgaaaacaaggg

SEQ ID NO: 24020 - DNA, 80 bp, synthetic construct
  misc_feature 1..80: note = Synthetic: >NC_004297.1-cand-180-259
  source 1..80: mol_type = other DNA
cctggttgagtgcaacaaccactatctgtgtctcaactgcctcaccttacttctaagtgtcagcaacaggtgtcccattt

SEQ ID NO: 24021 - DNA, 80 bp, synthetic construct
  misc_feature 1..80: note = Synthetic: >NC_004297.1-cand-260-339
  source 1..80: mol_type = other DNA
gcaagatgcctctccccacaaaactgagaccatcagccgctccaacagcacctccaaccggagcagcggacagcatcaga

SEQ ID NO: 24022 - DNA, 80 bp, synthetic construct
  misc_feature 1..80: note = Synthetic: >NC_004297.1-cand-330-409
  source 1..80: mol_type = other DNA
cagcatcagacccccaccctacagtccctgaatctcccaccgacccccaccactcccatcctccccccgacaccccccgg

SEQ ID NO: 24023 - DNA, 80 bp, synthetic construct
  misc_feature 1..80: note = Synthetic: >NC_004297.1-cand-440-519
  source 1..80: mol_type = other DNA
gagccaaccatcaccaaaaaactactcaatgtcttcgatgcattcatccttcctagtcagctcctcacatgttctgccct

SEQ ID NO: 24024 - DNA, 80 bp, synthetic construct
  misc_feature 1..80: note = Synthetic: >NC_004297.1-cand-520-599
  source 1..80: mol_type = other DNA
tcaatctcaatttaccaccacttgattgtaccatcacctttccccttgacttactataacagagagcataacccttgaac

SEQ ID NO: 24025 - DNA, 80 bp, synthetic construct
  misc_feature 1..80: note = Synthetic: >NC_004297.1-cand-600-679
  source 1..80: mol_type = other DNA
tccacccagttgtccactgcctcaagaaccgcactcaagatcccctcacaactcggcgctgcagccctaagtgtggagac

SEQ ID NO: 24026 - DNA, 80 bp, synthetic construct
  misc_feature 1..80: note = Synthetic: >NC_004297.1-cand-680-759
  source 1..80: mol_type = other DNA
aatgtccacccctgaccactgcatccttaaccccagcctgtctatcatcatatcactcaatgccccaatcagcaggtcag

SEQ ID NO: 24027 - DNA, 80 bp, synthetic construct
  misc_feature 1..80: note = Synthetic: >NC_004297.1-cand-760-839
  source 1..80: mol_type = other DNA
acgaagtgtccccaacctctctcacaaatatctcaagatcctggtcttgtataacaggtgtaaaggatgccaatttcttt

SEQ ID NO: 24028 - DNA, 80 bp, synthetic construct
  misc_feature 1..80: note = Synthetic: >NC_005062.1-cand-1610-1689
  source 1..80: mol_type = other DNA
gttcacagagattggtttaacgatctagctctgccttggaaacatgagggaatggtgggttggaacaatgctgaacgcct

SEQ ID NO: 24029 - DNA, 80 bp, synthetic construct
  misc_feature 1..80: note = Synthetic: >NC_005062.1-cand-1660-1739
  source 1..80: mol_type = other DNA
aatggtgggttggaacaatgctgaacgcctggttgagtttggagttcctcatgccgtgaagatggatgtttacaaccttg

SEQ ID NO: 24030 - DNA, 80 bp, synthetic construct
  misc_feature 1..80: note = Synthetic: >NC_005062.1-cand-1770-1849
  source 1..80: mol_type = other DNA
tcgccggagccccactggcgcacatcgagggaaccaaatatcacctgaagagcggccatgtcacctgtgaggtgggactg

SEQ ID NO: 24031 - DNA, 80 bp, synthetic construct
  misc_feature 1..80: note = Synthetic: >NC_005062.1-cand-1850-1929
  source 1..80: mol_type = other DNA
gaaaaactcaagatgaagggtcttacctatacaatgtgcgacaaggcaaagttcacgtggaaaagagctcccacagacag

SEQ ID NO: 24032 - DNA, 80 bp, synthetic construct
  misc_feature 1..80: note = Synthetic: >NC_005062.1-cand-1930-2009
  source 1..80: mol_type = other DNA
tgggcacgacacagttgtcatggaagtcgctttctctggaacaaagccttgcagaatacccgtcagggctgtggcacatg

SEQ ID NO: 24033 - DNA, 80 bp, synthetic construct
  misc_feature 1..80: note = Synthetic: >NC_005062.1-cand-2010-2089
  source 1..80: mol_type = other DNA
gatccccagatgtggatgtggccatgctcataacgccaaatccaacaatcgaaaacaatggaggtggctttatagagatg

SEQ ID NO: 24034 - DNA, 80 bp, synthetic construct
  misc_feature 1..80: note = Synthetic: >NC_005062.1-cand-2040-2119
  source 1..80: mol_type = other DNA
taacgccaaatccaacaatcgaaaacaatggaggtggctttatagagatgcagctccccccaggagacaacatcatctat

SEQ ID NO: 24035 - DNA, 80 bp, synthetic construct
  misc_feature 1..80: note = Synthetic: >NC_005062.1-cand-2220-2299
  source 1..80: mol_type = other DNA
aacatgcgtgggacttcggttccactggcggatttttgagctcaatcggaaaggcgctgcacactgtcctcggaggcgca

SEQ ID NO: 24036 - DNA, 80 bp, synthetic construct
  misc_feature 1..80: note = Synthetic: >NC_005062.1-cand-2230-2309
  source 1..80: mol_type = other DNA
ggacttcggttccactggcggatttttgagctcaatcggaaaggcgctgcacactgtcctcggaggcgcattcaacagcg

SEQ ID NO: 24037 - DNA, 80 bp, synthetic construct
  misc_feature 1..80: note = Synthetic: >NC_005062.1-cand-2330-2409
  source 1..80: mol_type = other DNA
ctaccgaggattctgttgggaatatcccttgcgtggctgggtttaaacatgagaaaccccaccatgtcaatgagtttcct

SEQ ID NO: 24038 - DNA, 80 bp, synthetic construct
  misc_feature 1..80: note = Synthetic: >NC_005062.1-cand-2370-2449
  source 1..80: mol_type = other DNA
gtttaaacatgagaaaccccaccatgtcaatgagtttcctactggcgggaggcctggtcctaaccatgacgcttggagtg

SEQ ID NO: 24039 - DNA, 80 bp, synthetic construct
  misc_feature 1..80: note = Synthetic: >NC_005062.1-cand-2490-2569
  source 1..80: mol_type = other DNA
aacttcgctgtggtgaaggtttggtcgtgtggagagaggtgtcagaatggtatgataactatgctttttaccctgaaaca

SEQ ID NO: 24040 - DNA, 80 bp, synthetic construct
  misc_feature 1..80: note = Synthetic: >NC_005062.1-cand-2530-2609
  source 1..80: mol_type = other DNA
gtcagaatggtatgataactatgctttttaccctgaaacaccggcggcccttgcttcggctttgaaggagatggttgaag

SEQ ID NO: 24041 - DNA, 80 bp, synthetic construct
  misc_feature 1..80: note = Synthetic: >NC_005062.1-cand-2650-2729
  source 1..80: mol_type = other DNA
ggccatgtggagaagctcggtatcagaactgaatcttgcgctggccgaaggagatgcaaacctcaccgtggtggtggata

SEQ ID NO: 24042 - DNA, 80 bp, synthetic construct
  misc_feature 1..80: note = Synthetic: >NC_005062.1-cand-2670-2749
  source 1..80: mol_type = other DNA
tatcagaactgaatcttgcgctggccgaaggagatgcaaacctcaccgtggtggtggataaacacgatcctaccgactac

SEQ ID NO: 24043 - DNA, 80 bp, synthetic construct
  misc_feature 1..80: note = Synthetic: >NC_005062.1-cand-2820-2899
  source 1..80: mol_type = other DNA
caatgatctggagtgtcccggaggccccccgacggtttctggtgggcacagagggaagcagtgagtgtccactggcaaag

SEQ ID NO: 24044 - DNA, 80 bp, synthetic construct
  misc_feature 1..80: note = Synthetic: >NC_005234.1-cand-1940-2019
  source 1..80: mol_type = other DNA
cttactaatcattgaatcaatcatgtgggcagctagtgcatcagaaactgtcttggagccaagctggaatgacaatgcac

SEQ ID NO: 24045 - DNA, 80 bp, synthetic construct
  misc_feature 1..80: note = Synthetic: >NC_005234.1-cand-2020-2099
  source 1..80: mol_type = other DNA
atggtgttggcgttgtcccaatgcatactgacctggaacttgatttctctcttccatcaagttctaagtacacatataag

SEQ ID NO: 24046 - DNA, 80 bp, synthetic construct
  misc_feature 1..80: note = Synthetic: >NC_005234.1-cand-2100-2179
  source 1..80: mol_type = other DNA
agaaaactgacaagtccattgaatcaagaacaatcagtagatcttcacatagagatagagagtcaagggatctctacaag

SEQ ID NO: 24047 - DNA, 80 bp, synthetic construct
  misc_feature 1..80: note = Synthetic: >NC_005234.1-cand-2180-2259
  source 1..80: mol_type = other DNA
tgttcatgcattaggtcattggtttgatggaaggcttaacctaaagacatcttttcattgttatggtgcatgtactaagt

SEQ ID NO: 24048 - DNA, 80 bp, synthetic construct
  misc_feature 1..80: note = Synthetic: >NC_005234.1-cand-2240-2319
  source 1..80: mol_type = other DNA
ttatggtgcatgtactaagtatgaatacccttggcacacggcaaaatgccactttgaaagagatttcgaatatgagaaca

SEQ ID NO: 24049 - DNA, 80 bp, synthetic construct
  misc_feature 1..80: note = Synthetic: >NC_005234.1-cand-2340-2419
  source 1..80: mol_type = other DNA
gattgccctgggattggtactggctgtactgcatgcgggctatacattgaccagcttaaacctgtaggcagtgcatataa

SEQ ID NO: 24050 - DNA, 80 bp, synthetic construct
  misc_feature 1..80: note = Synthetic: >NC_005234.1-cand-2420-2499
  source 1..80: mol_type = other DNA
gctgatcacagtccgttacagccgtaaagtatgtgttcagtttggtgaagaaaatctatgcaagacaattgatatgaatg

SEQ ID NO: 24051 - DNA, 80 bp, synthetic construct
  misc_feature 1..80: note = Synthetic: >NC_005234.1-cand-2500-2579
  source 1..80: mol_type = other DNA
attgctttgttacaagacatgttaaagtatgtatcatcggtacagtttcaaagttctcgcaaggtgataccctagtattc

SEQ ID NO: 24052 - DNA, 80 bp, synthetic construct
  misc_feature 1..80: note = Synthetic: >NC_005234.1-cand-2600-2679
  source 1..80: mol_type = other DNA
gggtttgatatttaaggattggtgcactagcacatgccaatttggtgatccaggagacattatgagtcctaaagacaaag

SEQ ID NO: 24053 - DNA, 80 bp, synthetic construct
  misc_feature 1..80: note = Synthetic: >NC_005234.1-cand-2660-2739
  source 1..80: mol_type = other DNA
tatgagtcctaaagacaaaggtttcagctgccctgacttcacaggccatttccggaaaaaatgcaactttgcaacaacac

SEQ ID NO: 24054 - DNA, 80 bp, synthetic construct
  misc_feature 1..80: note = Synthetic: >NC_005234.1-cand-2740-2819
  source 1..80: mol_type = other DNA
ctgtgtgcgagtatgatggtaatatggtctctgggtataagaaagtaatggcaactattgattcctttcaatcatttaac

SEQ ID NO: 24055 - DNA, 80 bp, synthetic construct
  misc_feature 1..80: note = Synthetic: >NC_005234.1-cand-2820-2899
  source 1..80: mol_type = other DNA
actagttcaattcattatacagatgaaaggattgagtggaaagacccggatggaatgcttaaggaccaccttaatatact

SEQ ID NO: 24056 - DNA, 80 bp, synthetic construct
  misc_feature 1..80: note = Synthetic: >NC_005234.1-cand-2900-2979
  source 1..80: mol_type = other DNA
tgtcacaaaggatattgactttgaaaaccttggagagaacccgtgtaaagtaggacttcaaacatcatcaatagaaggtg

SEQ ID NO: 24057 - DNA, 80 bp, synthetic construct
  misc_feature 1..80: note = Synthetic: >NC_005234.1-cand-3000-3079
  source 1..80: mol_type = other DNA
ttcactctcacttgtcaaatctcactgacagagtgttcacgctttctaacatcaatcaaagcatgtgacatggcaatttg

SEQ ID NO: 24058 - DNA, 80 bp, synthetic construct
  misc_feature 1..80: note = Synthetic: >NC_005234.1-cand-3060-3139
  source 1..80: mol_type = other DNA
gcatgtgacatggcaatttgttatggtgcacaaagtgttacactcattagaggccaaaacacagtgaaggtttccgggaa

SEQ ID NO: 24059 - DNA, 80 bp, synthetic construct
  misc_feature 1..80: note = Synthetic: >NC_005234.1-cand-3120-3199
  source 1..80: mol_type = other DNA
acagtgaaggtttccgggaagggtgggcatagtggctcttcattcaagtgttgccatggaacagattgctctcaacaggg

SEQ ID NO: 24060 - DNA, 80 bp, synthetic construct
  misc_feature 1..80: note = Synthetic: >NC_005235.1-cand-4720-4799
  source 1..80: mol_type = other DNA
tatataagagctcaaagtcaagggttgttattgttcaaggaaatgtggagggcacagcagaggctatctgtggttactgg

SEQ ID NO: 24061 - DNA, 80 bp, synthetic construct
  misc_feature 1..80: note = Synthetic: >NC_005235.1-cand-4800-4879
  source 1..80: mol_type = other DNA
ttacgtaccatgtcccttgtgaaaactattagggttaaaccgcataaagaagtattgaaagctgtatccatctttaacag

SEQ ID NO: 24062 - DNA, 80 bp, synthetic construct
  misc_feature 1..80: note = Synthetic: >NC_005235.1-cand-4880-4959
  source 1..80: mol_type = other DNA
aaaagaggatattgggcaacaaaaagaccttgctgcattgcgattgtgcatagaagtttggcgctggtgtaaagcaaata

SEQ ID NO: 24063 - DNA, 80 bp, synthetic construct
  misc_feature 1..80: note = Synthetic: >NC_005235.1-cand-4960-5039
  source 1..80: mol_type = other DNA
atgcaccctatcaagaatggtttcatgctctgtggtttgaagacaaaacattttctgagtggcttgatagattcatccgt

SEQ ID NO: 24064 - DNA, 80 bp, synthetic construct
  misc_feature 1..80: note = Synthetic: >NC_005235.1-cand-5070-5149
  source 1..80: mol_type = other DNA
cagtgtgctgcactaatgattgcagatatcagaggtgatctatctgtcctacaagtacaggcaaatagaagagcttattc

SEQ ID NO: 24065 - DNA, 80 bp, synthetic construct
  misc_feature 1..80: note = Synthetic: >NC_005235.1-cand-5150-5229
  source 1..80: mol_type = other DNA
aggtaaacaatatgatgcctattgtgttcagacatataacgaagaaacaaagctctatgaaggtgaccttcgagtcacat

SEQ ID NO: 24066 - DNA, 80 bp, synthetic construct
  misc_feature 1..80: note = Synthetic: >NC_005235.1-cand-5230-5309
  source 1..80: mol_type = other DNA
tcaattttggactagactgtgcccgccttgaaatattctgggacaaacaaacatacatccttgagacttcaataacacaa

SEQ ID NO: 24067 - DNA, 80 bp, synthetic construct
  misc_feature 1..80: note = Synthetic: >NC_005235.1-cand-5320-5399
  source 1..80: mol_type = other DNA
tgaagatcatgatggatgaagtaacaaaagagttgttaaggtgtggaatgaggtttaaaactgaacaagtgtctaatgtg

SEQ ID NO: 24068 - DNA, 80 bp, synthetic construct
  misc_feature 1..80: note = Synthetic: >NC_005235.1-cand-5360-5439
  source 1..80: mol_type = other DNA
gtgtggaatgaggtttaaaactgaacaagtgtctaatgtgaaacacctagttttgttcaagacagaggcaggttttgagt

SEQ ID NO: 24069 - DNA, 80 bp, synthetic construct
  misc_feature 1..80: note = Synthetic: >NC_005235.1-cand-5480-5559
  source 1..80: mol_type = other DNA
tgcactacgtacaggtttaagagcaaaccaaactgttaaccacaaattcatgatatcaattaaggataacggccttagag

SEQ ID NO: 24070 - DNA, 80 bp, synthetic construct
  misc_feature 1..80: note = Synthetic: >NC_005235.1-cand-5560-5639
  source 1..80: mol_type = other DNA
ctattgcacaatatgatgatgaaagtcctcggtttttacttgcacatgcatttcatacaataagggatattagataccag

SEQ ID NO: 24071 - DNA, 80 bp, synthetic construct
  misc_feature 1..80: note = Synthetic: >NC_005235.1-cand-5600-5679
  source 1..80: mol_type = other DNA
tgcacatgcatttcatacaataagggatattagataccaggcagtagatgctgtaagtaatgtgtggtttatccataagg

SEQ ID NO: 24072 - DNA, 80 bp, synthetic construct
  misc_feature 1..80: note = Synthetic: >NC_005235.1-cand-5720-5799
  source 1..80: mol_type = other DNA
attagaaaatttcatgaaaaatttaccagcagcaatacctcctgctgcatactcattaatcatgaatagagctaagatat

SEQ ID NO: 24073 - DNA, 80 bp, synthetic construct
  misc_feature 1..80: note = Synthetic: >NC_005235.1-cand-5800-5879
  source 1..80: mol_type = other DNA
ctgttgatctattcatgttcaatgatttacttaggctcatcaacccatcaaatacgcttgacctatccggtttgcagcca

SEQ ID NO: 24074 - DNA, 80 bp, synthetic construct
  misc_feature 1..80: note = Synthetic: >NC_005235.1-cand-5880-5959
  source 1..80: mol_type = other DNA
actgaagatgggtttagcactgtaagcagtatgtcaagcagattatggtctgaagaggttagttttgttgatgaagatga

SEQ ID NO: 24075 - DNA, 80 bp, synthetic construct
  misc_feature 1..80: note = Synthetic: >NC_005235.1-cand-5960-6039
  source 1..80: mol_type = other DNA
agagattgatgatgagttcacaatagacttgcaggatgtggattttgaaaacattgatgtggaagctgatattgaacatt

SEQ ID NO: 24076 - DNA, 80 bp, synthetic construct
  misc_feature 1..80: note = Synthetic: >NC_005300.2-cand-710-789
  source 1..80: mol_type = other DNA
tgacacagtcagcaaccccaggcctaatgacctctccaacacagatagtccacccacaaagtgccacccccataaccgtt

SEQ ID NO: 24077 - DNA, 80 bp, synthetic construct
  misc_feature 1..80: note = Synthetic: >NC_005300.2-cand-790-869
  source 1..80: mol_type = other DNA
caagacacacatcccagtccaacgaacaggtctaaaagaaaccttaagatggaaataatcttgactttatctcagggttt

SEQ ID NO: 24078 - DNA, 80 bp, synthetic construct
  misc_feature 1..80: note = Synthetic: >NC_005300.2-cand-870-949
  source 1..80: mol_type = other DNA
aaaaaagtactatgggaaaatattaaggcttctgcaactcaccttagaggaggacactgaaggtctactggaatggtgta

SEQ ID NO: 24079 - DNA, 80 bp, synthetic construct
  misc_feature 1..80: note = Synthetic: >NC_005300.2-cand-950-1029
  source 1..80: mol_type = other DNA
agagaaatcttggtcttgattgtgatgacactttctttcaaaagagaattgaagaattctttataactggtgagggccat

SEQ ID NO: 24080 - DNA, 80 bp, synthetic construct
  misc_feature 1..80: note = Synthetic: >NC_005300.2-cand-1030-1109
  source 1..80: mol_type = other DNA
tttaatgaagttttacaatttagaacgccaggcacgttgagcaccacagagtcaacacctgctgggctgccaacagctga

SEQ ID NO: 24081 - DNA, 80 bp, synthetic construct
  misc_feature 1..80: note = Synthetic: >NC_005300.2-cand-1110-1189
  source 1..80: mol_type = other DNA
accttttaagtcctacttcgccaaaggattcctctcgatagattcaggttactactcagccaaatgttactcaggaacat

SEQ ID NO: 24082 - DNA, 80 bp, synthetic construct
  misc_feature 1..80: note = Synthetic: >NC_005300.2-cand-1190-1269
  source 1..80: mol_type = other DNA
ccaattcagggcttcaattgattaacattacccgacattcaactagaatagttgacacacctgggcctaagatcactaac

SEQ ID NO: 24083 - DNA, 80 bp, synthetic construct
  misc_feature 1..80: note = Synthetic: >NC_005300.2-cand-1270-1349
  source 1..80: mol_type = other DNA
ctaaagaccatcaactgcataaacttgaaggcatcgatcttcaaagaacatagagaggttgaaatcaatgtgcttctccc

SEQ ID NO: 24084 - DNA, 80 bp, synthetic construct
  misc_feature 1..80: note = Synthetic: >NC_005300.2-cand-1350-1429
  source 1..80: mol_type = other DNA
ccaagttgcagttaatctctcaaactgtcacgttgtaatcaaatcacatgtctgtgactactctttagacattgacggtg

SEQ ID NO: 24085 - DNA, 80 bp, synthetic construct
  misc_feature 1..80: note = Synthetic: >NC_005300.2-cand-1430-1509
  source 1..80: mol_type = other DNA
cggtgaggcttcctcacatttaccatgaaggagttttcatcccaggaacttacaaaatagtgatagataaaaaaaataag

SEQ ID NO: 24086 - DNA, 80 bp, synthetic construct
  misc_feature 1..80: note = Synthetic: >NC_005300.2-cand-1510-1589
  source 1..80: mol_type = other DNA
ttgaatgacagatgcaccttatttaccgactgtgtgataaaaggaagggaggttcgtaaaggacagtcagttttgaggca

SEQ ID NO: 24087 - DNA, 80 bp, synthetic construct
  misc_feature 1..80: note = Synthetic: >NC_005300.2-cand-1590-1669
  source 1..80: mol_type = other DNA
gtacaagacggaaatcaggattggcaaggcatcaaccggctctagaagattgctttcagaagaacccagtgatgactgta

SEQ ID NO: 24088 - DNA, 80 bp, synthetic construct
  misc_feature 1..80: note = Synthetic: >NC_005300.2-cand-1670-1749
  source 1..80: mol_type = other DNA
tatcaagaactcaactattaaggacagagactgcagagatccacggcgacaactatggtggcccgggtgacaaaataacc

SEQ ID NO: 24089 - DNA, 80 bp, synthetic construct
  misc_feature 1..80: note = Synthetic: >NC_005300.2-cand-1750-1829
  source 1..80: mol_type = other DNA
atctgcaatggctcaactattgtagaccaaagactgggcagtgaactaggatgctacaccatcaatagagtgaggtcatt

SEQ ID NO: 24090 - DNA, 80 bp, synthetic construct
  misc_feature 1..80: note = Synthetic: >NC_005300.2-cand-1840-1919
  source 1..80: mol_type = other DNA
gaaaacagtgccacagggaagaattgtgaaatagacagtgtcccagttaaatgcaggcagggttattgcctaagaatcac

SEQ ID NO: 24091 - DNA, 80 bp, synthetic construct
  misc_feature 1..80: note = Synthetic: >NC_005300.2-cand-1960-2039
  source 1..80: mol_type = other DNA
gaggttgtcttagatgcatgcgatacaagctgtgaaataatgatacctaagggcactggtgacatcctagttgactgttc

SEQ ID NO: 24092 - DNA, 80 bp, synthetic construct
  misc_feature 1..80: note = Synthetic: >NC_006577.2-cand-17740-17819
  source 1..80: mol_type = other DNA
taaaaatgataatagttcattatgttttaaagtatattttaagggacagacaacacatgagagttcaagtgctgtaaata

SEQ ID NO: 24093 - DNA, 80 bp, synthetic construct
  misc_feature 1..80: note = Synthetic: >NC_006577.2-cand-17820-17899
  source 1..80: mol_type = other DNA
ttcaacagatatatctaattagtaaatttttaaaagctaatccagtttggaatagtgctgtttttattagtccttataat

SEQ ID NO: 24094 - DNA, 80 bp, synthetic construct
  misc_feature 1..80: note = Synthetic: >NC_006577.2-cand-17900-17979
  source 1..80: mol_type = other DNA
agtcagaattatgttgctaagcgtgttttaggtgttcaaacacaaactgtagattctgctcaaggttcggaatatgatta

SEQ ID NO: 24095 - DNA, 80 bp, synthetic construct
  misc_feature 1..80: note = Synthetic: >NC_006577.2-cand-17990-18069
  source 1..80: mol_type = other DNA
tcacaaacagcagaaacagcccattctgttaatgttaatcgatttaatgttgccataactagagccaagaagggcatttt

SEQ ID NO: 24096 - DNA, 80 bp, synthetic construct
  misc_feature 1..80: note = Synthetic: >NC_006577.2-cand-18070-18149
  source 1..80: mol_type = other DNA
ttgtgttatgagtaatatgcaattatttgaatctcttaattttattactctacctttagataaaattcaaaatcaaactt

SEQ ID NO: 24097 - DNA, 80 bp, synthetic construct
  misc_feature 1..80: note = Synthetic: >NC_006577.2-cand-18150-18229
  source 1..80: mol_type = other DNA
tacctcgtttgcattgcacaactaatctttttaaagattgtagtaaaagttgcttaggttatcatccagcgcatgccccc

SEQ ID NO: 24098 - DNA, 80 bp, synthetic construct
  misc_feature 1..80: note = Synthetic: >NC_006577.2-cand-18200-18279
  source 1..80: mol_type = other DNA
tgcttaggttatcatccagcgcatgccccctcatttttagcagttgatgataaatataaggttaatgaaaatttggctgt

SEQ ID NO: 24099 - DNA, 80 bp, synthetic construct
  misc_feature 1..80: note = Synthetic: >NC_006577.2-cand-18280-18359
  source 1..80: mol_type = other DNA
aaatttaaatatttgtgaacctgttttaacatattctcgtttaatatctcttatgggttttaaattagatttgactcttg

SEQ ID NO: 24100 - DNA, 80 bp, synthetic construct
  misc_feature 1..80: note = Synthetic: >NC_006577.2-cand-18360-18439
  source 1..80: mol_type = other DNA
atggttattctaaattgtttattactaaagatgaagccattaaacgtgttagaggttgggttggttttgatgttgagggc

SEQ ID NO: 24101 - DNA, 80 bp, synthetic construct
  misc_feature 1..80: note = Synthetic: >NC_006577.2-cand-18440-18519
  source 1..80: mol_type = other DNA
gctcatgctactcgcgaaaacattggaacaaactttccactgcaaataggtttttcaactggtgtggattttgtagttga

SEQ ID NO: 24102 - DNA, 80 bp, synthetic construct
  misc_feature 1..80: note = Synthetic: >NC_006577.2-cand-18520-18599
  source 1..80: mol_type = other DNA
agctactggcttatttgctgagagagattgttatacttttaaaaaaactgtagctaaagctcctcctggtgaaaaattta

SEQ ID NO: 24103 - DNA, 80 bp, synthetic construct
  misc_feature 1..80: note = Synthetic: >NC_006577.2-cand-18600-18679
  source 1..80: mol_type = other DNA
aacatttaataccccttatgtcaaaaggtcaaaagtgggatattgttagaattagaattgttcaaatgttatctgattat

SEQ ID NO: 24104 - DNA, 80 bp, synthetic construct
  misc_feature 1..80: note = Synthetic: >NC_006577.2-cand-18680-18759
  source 1..80: mol_type = other DNA
cttttagacctttctgatagtgtagtatttattacttggtctgccagttttgaacttacttgtttaaggtattttgctaa

SEQ ID NO: 24105 - DNA, 80 bp, synthetic construct
  misc_feature 1..80: note = Synthetic: >NC_006577.2-cand-18760-18839
  source 1..80: mol_type = other DNA
attaggcagagagcttaattgtaatgtgtgttctaatcgtgctacatgctacaattctagaactggttattatggttgtt

SEQ ID NO: 24106 - DNA, 80 bp, synthetic construct
  misc_feature 1..80: note = Synthetic: >NC_006577.2-cand-18820-18899
  source 1..80: mol_type = other DNA
aactggttattatggttgttggcgccatagttatacttgtgattatgtgtataatccacttattgtagatatacaacagt

SEQ ID NO: 24107 - DNA, 80 bp, synthetic construct
  misc_feature 1..80: note = Synthetic: >NC_006577.2-cand-18920-18999
  source 1..80: mol_type = other DNA
actagtaatcacgatataatttgtaatgtacataaaggtgcacatgttgcgtcagctgatgcaattatgactcgttgttt

SEQ ID NO: 24108 - DNA, 80 bp, synthetic construct
  misc_feature 1..80: note = Synthetic: >NC_006577.2-cand-25450-25529
  source 1..80: mol_type = other DNA
tttttgtgataatattaatagtattttagatgaagttaatggtttacttgatactactcaattgcatgtagctgatactc

SEQ ID NO: 24109 - DNA, 80 bp, synthetic construct
  misc_feature 1..80: note = Synthetic: >NC_006577.2-cand-25530-25609
  source 1..80: mol_type = other DNA
ttatgcaaggtgtcacacttagctccaatcttaatactaatttgcattttgatgttgataatattaattttaaatcccta

SEQ ID NO: 24110 - DNA, 80 bp, synthetic construct
  misc_feature 1..80: note = Synthetic: >NC_006577.2-cand-25610-25689
  source 1..80: mol_type = other DNA
gttggatgtttaggtccacactgcggttcttcttctcgttctttttttgaagatttattgtttgacaaagttaaactttc

SEQ ID NO: 24111 - DNA, 80 bp, synthetic construct
  misc_feature 1..80: note = Synthetic: >NC_006577.2-cand-25690-25769
  source 1..80: mol_type = other DNA
agatgttggttttgttgaagcttataacaattgtactggtggtagtgaaattagagatcttctttgtgtacaatccttta

SEQ ID NO: 24112 - DNA, 80 bp, synthetic construct
  misc_feature 1..80: note = Synthetic: >NC_006577.2-cand-25770-25849
  source 1..80: mol_type = other DNA
atggtattaaagttttgcctcctattttgtctgaatctcaaatttctggttacaccacagccgctactgttgctgctatg

SEQ ID NO: 24113 - DNA, 80 bp, synthetic construct
  misc_feature 1..80: note = Synthetic: >NC_006577.2-cand-25850-25929
  source 1..80: mol_type = other DNA
tttccaccatggtcagcagcagctggcataccattttctcttaatgtacaatatagaattaatggtttgggtgttactat

SEQ ID NO: 24114 - DNA, 80 bp, synthetic construct
  misc_feature 1..80: note = Synthetic: >NC_006577.2-cand-25930-26009
  source 1..80: mol_type = other DNA
ggatgttcttaataaaaatcaaaagttgatagctactgcttttaataatgctcttctttctattcagaatggttttagtg

SEQ ID NO: 24115 - DNA, 80 bp, synthetic construct
  misc_feature 1..80: note = Synthetic: >NC_006577.2-cand-26010-26089
  source 1..80: mol_type = other DNA
ctaccaactctgcacttgctaaaatacaaagtgttgttaattctaatgctcaagcacttaatagtttgttacagcaatta

SEQ ID NO: 24116 - DNA, 80 bp, synthetic construct
  misc_feature 1..80: note = Synthetic: >NC_006577.2-cand-26100-26179
  source 1..80: mol_type = other DNA
ttggtgcaattagttcttctttacaagaaattttatctcgtctcgatgctttagaggctcaggttcagattgataggctt

SEQ ID NO: 24117 - DNA, 80 bp, synthetic construct
  misc_feature 1..80: note = Synthetic: >NC_006577.2-cand-26180-26259
  source 1..80: mol_type = other DNA
attaatggtcgtttaactgctttaaatgcttatgtctctcaacagcttagtgatatttctcttgtaaaatttggtgctgc

SEQ ID NO: 24118 - DNA, 80 bp, synthetic construct
  misc_feature 1..80: note = Synthetic: >NC_006577.2-cand-26260-26339
  source 1..80: mol_type = other DNA
tttagctatggagaaggttaatgagtgtgttaaaagtcaatctcctcgtattaatttttgtggtaatggtaatcatattt

SEQ ID NO: 24119 - DNA, 80 bp, synthetic construct
  misc_feature 1..80: note = Synthetic: >NC_006577.2-cand-26340-26419
  source 1..80: mol_type = other DNA
tgtcattagttcaaaatgctccttatggtttgttgtttatgcattttagttataaacctatttcttttaaaactgtttta

SEQ ID NO: 24120 - DNA, 80 bp, synthetic construct
  misc_feature 1..80: note = Synthetic: >NC_006577.2-cand-26420-26499
  source 1..80: mol_type = other DNA
gtaagtcctggtttgtgtatatcaggtgatgtaggtattgcacctaaacaagggtattttattaaacataatgatcattg

SEQ ID NO: 24121 - DNA, 80 bp, synthetic construct
  misc_feature 1..80: note = Synthetic: >NC_006577.2-cand-26500-26579
  source 1..80: mol_type = other DNA
gatgttcactggtagttcttactattatcctgaaccaatttcagataaaaatgttgtttttatgaatacttgttctgtta

SEQ ID NO: 24122 - DNA, 80 bp, synthetic construct
  misc_feature 1..80: note = Synthetic: >NC_006577.2-cand-26580-26659
  source 1..80: mol_type = other DNA
attttactaaagcgcctcttgtttatttgaatcattctgtaccaaaattgtctgattttgaatctgagttatctcattgg

SEQ ID NO: 24123 - DNA, 80 bp, synthetic construct
  misc_feature 1..80: note = Synthetic: >NC_006577.2-cand-26660-26739
  source 1..80: mol_type = other DNA
tttaaaaatcaaacatccattgcgcctaatttgactttaaatcttcatactattaatgctacttttttagatttgtatta

SEQ ID NO: 24124 - DNA, 80 bp, synthetic construct
  misc_feature 1..80: note = Synthetic: >NC_009826.1-cand-6930-7009
  source 1..80: mol_type = other DNA
aaggccaccacccagatgcagacctcataaaggctaatctgctatggagacagtgcatgggaggcaatatcacgcgagta

SEQ ID NO: 24125 - DNA, 80 bp, synthetic construct
  misc_feature 1..80: note = Synthetic: >NC_009826.1-cand-7010-7089
  source 1..80: mol_type = other DNA
gaggctgagaacaaggtcgagatccttgactgcttcaagccgctcaaagaggaagaagatgacagagagatctccgtgtc

SEQ ID NO: 24126 - DNA, 80 bp, synthetic construct
  misc_feature 1..80: note = Synthetic: >NC_009826.1-cand-7070-7149
  source 1..80: mol_type = other DNA
gacagagagatctccgtgtccgccgactgctttaagaagggaccggcgtttccccccgctctgccagtgtgggcaaggcc

SEQ ID NO: 24127 - DNA, 80 bp, synthetic construct
  misc_feature 1..80: note = Synthetic: >NC_009826.1-cand-7220-7299
  source 1..80: mol_type = other DNA
ccgataccacctgcgggccccccgcctgtcccgcttccgcggaggaaaaggaagccaatggaactatctgattctaccgt

SEQ ID NO: 24128 - DNA, 80 bp, synthetic construct
  misc_feature 1..80: note = Synthetic: >NC_009826.1-cand-7250-7329
  source 1..80: mol_type = other DNA
ccgcttccgcggaggaaaaggaagccaatggaactatctgattctaccgtgtcccaagtcatggccgacttggcggacgc

SEQ ID NO: 24129 - DNA, 80 bp, synthetic construct
  misc_feature 1..80: note = Synthetic: >NC_009826.1-cand-7320-7399
  source 1..80: mol_type = other DNA
tggcggacgccaggttcaaggtcgacacaccatccattgaaggccaggattctgcgttgggtactagcagccaacacgat

SEQ ID NO: 24130 - DNA, 80 bp, synthetic construct
  misc_feature 1..80: note = Synthetic: >NC_009826.1-cand-7480-7559
  source 1..80: mol_type = other DNA
ggaccctgacctttcgtcagggtcatggtcaaccgtcagcggtgaggacaacgtggtgtgttgctccatgtcatacacct

SEQ ID NO: 24131 - DNA, 80 bp, synthetic construct
  misc_feature 1..80: note = Synthetic: >NC_009826.1-cand-7570-7649
  source 1..80: mol_type = other DNA
gctcatcaccccttgctctgctgaagaggaaaaattacccatcaatcccttaagcaacaccttattacgccaccacaatc

SEQ ID NO: 24132 - DNA, 80 bp, synthetic construct
  misc_feature 1..80: note = Synthetic: >NC_009826.1-cand-7650-7729
  source 1..80: mol_type = other DNA
ttgtgtactccacctcctctcggagtgcgggtctgaggcagaaaaaggtcacttttgacaggctacaagtcctcgacgac

SEQ ID NO: 24133 - DNA, 80 bp, synthetic construct
  misc_feature 1..80: note = Synthetic: >NC_009826.1-cand-7730-7809
  source 1..80: mol_type = other DNA
cactacagagaggttgtggacgagatgaagcgattagcctccaaggttaaggccagactactgcccctagaggaagcctg

SEQ ID NO: 24134 - DNA, 80 bp, synthetic construct
  misc_feature 1..80: note = Synthetic: >NC_009826.1-cand-7810-7889
  source 1..80: mol_type = other DNA
tgggttaacaccaccccactccgcccgttccaagtacggatacggcgcgaaggaagttcgctctctcgacaagaaagccc

SEQ ID NO: 24135 - DNA, 80 bp, synthetic construct
  misc_feature 1..80: note = Synthetic: >NC_009826.1-cand-7890-7969
  source 1..80: mol_type = other DNA
ttaagcacatagagggtgtgtggcaagacttattggatgactctgataccccattgccgacaaccatcatggcaaaaaac

SEQ ID NO: 24136 - DNA, 80 bp, synthetic construct
  misc_feature 1..80: note = Synthetic: >NC_009826.1-cand-8000-8079
  source 1..80: mol_type = other DNA
gggaagaagcctgcacggctgatagtctaccccgaccttggagtccgcgtctgcgagaagcgggctttgtacgacgtagc

SEQ ID NO: 24137 - DNA, 80 bp, synthetic construct
  misc_feature 1..80: note = Synthetic: >NC_009826.1-cand-8020-8099
  source 1..80: mol_type = other DNA
gatagtctaccccgaccttggagtccgcgtctgcgagaagcgggctttgtacgacgtagctcaaaaactgccgacagccc

SEQ ID NO: 24138 - DNA, 80 bp, synthetic construct
  misc_feature 1..80: note = Synthetic: >NC_009826.1-cand-8130-8209
  source 1..80: mol_type = other DNA
ccccagcgcagcgggttgacttcttactgaaggcgtggaaatctaagaagatccccatggctttctcctatgacacccgc

SEQ ID NO: 24139 - DNA, 80 bp, synthetic construct
  misc_feature 1..80: note = Synthetic: >NC_009827.1-cand-2870-2949
  source 1..80: mol_type = other DNA
acacacgctatctggtggaaccaatacatgttggctcgggctgaagctatgatacatgattgggtgccagatttgcgggt

SEQ ID NO: 24140 - DNA, 80 bp, synthetic construct
  misc_feature 1..80: note = Synthetic: >NC_009827.1-cand-2960-3039
  source 1..80: mol_type = other DNA
agggatgccatcattctgctcacctgcttgttacacccacatctcgggtttgaggtcacaaagattttgttagccatctt

SEQ ID NO: 24141 - DNA, 80 bp, synthetic construct
  misc_feature 1..80: note = Synthetic: >NC_009827.1-cand-3040-3119
  source 1..80: mol_type = other DNA
agcccctctgtatatcctccagcacagtctgctcaaggtgccctactttgtgcgcgcccacatcctcctgcgggcttgta

SEQ ID NO: 24142 - DNA, 80 bp, synthetic construct
  misc_feature 1..80: note = Synthetic: >NC_009827.1-cand-3120-3199
  source 1..80: mol_type = other DNA
tgttcttccgcaaagtggcggccggtaaatatgtgcaagcttgcctcttgaggttgggcgcctggactggcacatacata

SEQ ID NO: 24143 - DNA, 80 bp, synthetic construct
  misc_feature 1..80: note = Synthetic: >NC_009827.1-cand-3190-3269
  source 1..80: mol_type = other DNA
cacatacatatacgatcatctagctcctctcagtgagtgggcgagcgacggcttgcgtgatctagccgtagctgttgagc

SEQ ID NO: 24144 - DNA, 80 bp, synthetic construct
  misc_feature 1..80: note = Synthetic: >NC_009827.1-cand-3230-3309
  source 1..80: mol_type = other DNA
gcgagcgacggcttgcgtgatctagccgtagctgttgagccagtcatcttttcccccatggagaaaaagatcattacgtg

SEQ ID NO: 24145 - DNA, 80 bp, synthetic construct
  misc_feature 1..80: note = Synthetic: >NC_009827.1-cand-3380-3459
  source 1..80: mol_type = other DNA
gtgctgctgggacccgcggatgacatgcgtcacggaggttggaagcttctggctcccatcaccgcatacgcccaacagac

SEQ ID NO: 24146 - DNA, 80 bp, synthetic construct
  misc_feature 1..80: note = Synthetic: >NC_009827.1-cand-3530-3609
  source 1..80: mol_type = other DNA
caggttgtatcaacagccactcagagtttcctggcgaccactatcaacggtgtcctatggactgtttatcacggtgctgg

SEQ ID NO: 24147 - DNA, 80 bp, synthetic construct
  misc_feature 1..80: note = Synthetic: >NC_009827.1-cand-3590-3669
  source 1..80: mol_type = other DNA
actgtttatcacggtgctggctcgaaaaaccttgccggaccaaaagggcccgtatgccagatgtatacaaatgttgacca

SEQ ID NO: 24148 - DNA, 80 bp, synthetic construct
  misc_feature 1..80: note = Synthetic: >NC_009827.1-cand-3700-3779
  source 1..80: mol_type = other DNA
ggctaggtcacttgccccctgcacctgtgggtctagcgacctctacctggtcacgagaggtgctgatgttatccctgcac

SEQ ID NO: 24149 - DNA, 80 bp, synthetic construct
  misc_feature 1..80: note = Synthetic: >NC_009827.1-cand-3790-3869
  source 1..80: mol_type = other DNA
tgatactcgcgctgctcttttgtcccccagacccataagcaccctcaaaggctcttcaggaggcccccttatgtgcccat

SEQ ID NO: 24150 - DNA, 80 bp, synthetic construct
  misc_feature 1..80: note = Synthetic: >NC_009827.1-cand-3830-3909
  source 1..80: mol_type = other DNA
accctcaaaggctcttcaggaggcccccttatgtgcccatcagggcacgtagtagggctcttcagggcggccgtgtgtac

SEQ ID NO: 24151 - DNA, 80 bp, synthetic construct
  misc_feature 1..80: note = Synthetic: >NC_009827.1-cand-3920-3999
  source 1..80: mol_type = other DNA
gccaaggccctggacttcatccctgtggagaatatggacacaaccatgcgatctcctgtgtttaccgacaactcctcgcc

SEQ ID NO: 24152 - DNA, 80 bp, synthetic construct
  misc_feature 1..80: note = Synthetic: >NC_009827.1-cand-3950-4029
  source 1..80: mol_type = other DNA
aatatggacacaaccatgcgatctcctgtgtttaccgacaactcctcgccgcctgcggtgcctcagacctaccaggtggg

SEQ ID NO: 24153 - DNA, 80 bp, synthetic construct
  misc_feature 1..80: note = Synthetic: >NC_009827.1-cand-4060-4139
  source 1..80: mol_type = other DNA
aagtactcgtgtcccggcagcttacgccacccagggatacaaggtgctagttctgaatccgtctgtagcggcaacgctga

SEQ ID NO: 24154 - DNA, 80 bp, synthetic construct
  misc_feature 1..80: note = Synthetic: >NC_019843.3-cand-4490-4569
  source 1..80: mol_type = other DNA
cagaagattttataaagcacgtccgcactaatggtggttacaattcttggcatttagtcgagggtgaactattggtgcaa

SEQ ID NO: 24155 - DNA, 80 bp, synthetic construct
  misc_feature 1..80: note = Synthetic: >NC_019843.3-cand-4570-4649
  source 1..80: mol_type = other DNA
gacttacgcttaaataagctcctgcattggtctgatcaaaccatatgctacaaggatagtgtgttttatgttgtaaagaa

SEQ ID NO: 24156 - DNA, 80 bp, synthetic construct
  misc_feature 1..80: note = Synthetic: >NC_019843.3-cand-4650-4729
  source 1..80: mol_type = other DNA
tagtacagcttttccatttgaaacactttcagcatgtcgtgcgtatttggattcacgcacgacacagcagttaacaatcg

SEQ ID NO: 24157 - DNA, 80 bp, synthetic construct
  misc_feature 1..80: note = Synthetic: >NC_019843.3-cand-4730-4809
  source 1..80: mol_type = other DNA
aagtcttagtgactgtcgatggtgtaaattttagaacagtcgttctaaataataagaacacttatagatcacagcttgga

SEQ ID NO: 24158 - DNA, 80 bp, synthetic construct
  misc_feature 1..80: note = Synthetic: >NC_019843.3-cand-4810-4889
  source 1..80: mol_type = other DNA
tgcgttttctttaatggtgctgatatttctgacaccattcctgatgagaaacagaatggtcacagtttatatctagcaga

SEQ ID NO: 24159 - DNA, 80 bp, synthetic construct
  misc_feature 1..80: note = Synthetic: >NC_019843.3-cand-4890-4969
  source 1..80: mol_type = other DNA
caatttgactgctgatgaaacaaaggcgcttaaagagttatatggccccgttgatcctactttcttacacagattctatt

SEQ ID NO: 24160 - DNA, 80 bp, synthetic construct
  misc_feature 1..80: note = Synthetic: >NC_019843.3-cand-4970-5049
  source 1..80: mol_type = other DNA
cacttaaggctgcagtccatgggtggaagatggttgtgtgtgataaggtacgttctctcaaattgagtgataataattgt

SEQ ID NO: 24161 - DNA, 80 bp, synthetic construct
  misc_feature 1..80: note = Synthetic: >NC_019843.3-cand-5050-5129
  source 1..80: mol_type = other DNA
tatcttaatgcagttattatgacacttgatttattgaaggacattaaatttgttatacctgctctacagcatgcatttat

SEQ ID NO: 24162 - DNA, 80 bp, synthetic construct
  misc_feature 1..80: note = Synthetic: >NC_019843.3-cand-5130-5209
  source 1..80: mol_type = other DNA
gaaacataagggcggtgattcaactgacttcatagccctcattatggcttatggcaattgcacatttggtgctccagatg

SEQ ID NO: 24163 - DNA, 80 bp, synthetic construct
  misc_feature 1..80: note = Synthetic: >NC_019843.3-cand-5220-5299
  source 1..80: mol_type = other DNA
gttacttcataccgtgcttgcaaaggctgagttatgctgttctgcacgcatggtttggagagagtggtgcaatgtctgtg

SEQ ID NO: 24164 - DNA, 80 bp, synthetic construct
  misc_feature 1..80: note = Synthetic: >NC_019843.3-cand-5300-5379
  source 1..80: mol_type = other DNA
gcataaaagatgttgttctacaaggcttaaaagcttgttgttacgtgggtgtgcaaactgttgaagatctgcgtgctcgc

SEQ ID NO: 24165 - DNA, 80 bp, synthetic construct
  misc_feature 1..80: note = Synthetic: >NC_019843.3-cand-5380-5459
  source 1..80: mol_type = other DNA
atgacatatgtatgccagtgtggtggtgaacgtcatcggcaattagtcgaacacaccaccccctggttgctgctctcagg

SEQ ID NO: 24166 - DNA, 80 bp, synthetic construct
  misc_feature 1..80: note = Synthetic: >NC_019843.3-cand-5460-5539
  source 1..80: mol_type = other DNA
cacaccaaatgaaaaattggtgacaacctccacggcgcctgattttgtagcatttaatgtctttcagggcattgaaacgg

SEQ ID NO: 24167 - DNA, 80 bp, synthetic construct
  misc_feature 1..80: note = Synthetic: >NC_019843.3-cand-5540-5619
  source 1..80: mol_type = other DNA
ctgttggccattatgttcatgctcgcctgaagggtggtcttattttaaagtttgactctggcaccgttagcaagacttca

SEQ ID NO: 24168 - DNA, 80 bp, synthetic construct
  misc_feature 1..80: note = Synthetic: >NC_019843.3-cand-5620-5699
  source 1..80: mol_type = other DNA
gactggaagtgcaaggtgacagatgtacttttccccggccaaaaatacagtagcgattgtaatgtcgtacggtattcttt

SEQ ID NO: 24169 - DNA, 80 bp, synthetic construct
  misc_feature 1..80: note = Synthetic: >NC_019843.3-cand-5700-5779
  source 1..80: mol_type = other DNA
ggacggtaatttcagaacagaggttgatcccgacctatctgctttctatgttaaggatggtaaatactttacaagtgaac

SEQ ID NO: 24170 - DNA, 80 bp, synthetic construct
  misc_feature 1..80: note = Synthetic: >NC_029647.1-cand-7330-7409
  source 1..80: mol_type = other DNA
ccagagcgtccactgtggatggttcagtcattgattcatggacccccgcttttaatttgaagcatcagcctttctttgct

SEQ ID NO: 24171 - DNA, 80 bp, synthetic construct
  misc_feature 1..80: note = Synthetic: >NC_029647.1-cand-7430-7509
  source 1..80: mol_type = other DNA
ttctaatgtttagtcaacaactcactaatgagtagttgtgagtttttgtaatctgtgaaatgtagattctttaattaatt

SEQ ID NO: 24172 - DNA, 80 bp, synthetic construct
  misc_feature 1..80: note = Synthetic: >NC_030791.1-cand-370-449
  source 1..80: mol_type = other DNA
aagaaacaccgtccgtcgcccacagaacgttaagttcccgggtggcgggcagatcgttggcggagtctacttgttgccgc

SEQ ID NO: 24173 - DNA, 80 bp, synthetic construct
  misc_feature 1..80: note = Synthetic: >NC_030791.1-cand-490-569
  source 1..80: mol_type = other DNA
ttcggagcgatcgcagcccaggggaagacgccaacgtatccccaaagctgcctcttcacagggtaaagcctggggcaagc

SEQ ID NO: 24174 - DNA, 80 bp, synthetic construct
  misc_feature 1..80: note = Synthetic: >NC_030791.1-cand-570-649
  source 1..80: mol_type = other DNA
ccgggtacccttggcccctgtatggtaacgagggctgtggctgggcagggtggctcctgtccccccgcggctctcgacct

SEQ ID NO: 24175 - DNA, 80 bp, synthetic construct
  misc_feature 1..80: note = Synthetic: >NC_030791.1-cand-650-729
  source 1..80: mol_type = other DNA
acttggggccccacygacccccggcaccgctcgcgaaacctcggtaaggtgatcgacaccatgacctgcgggtttgccga

SEQ ID NO: 24176 - DNA, 80 bp, synthetic construct
  misc_feature 1..80: note = Synthetic: >NC_030791.1-cand-730-809
  source 1..80: mol_type = other DNA
cctcatggggtacatccctgtcctaggcgcccccctagggggcgttgccagggctctggcacatggtgttagagttctgg

SEQ ID NO: 24177 - DNA, 80 bp, synthetic construct
  misc_feature 1..80: note = Synthetic: >NC_030791.1-cand-820-899
  source 1..80: mol_type = other DNA
caactatgcaacagggaacttgcctggttgctccttttctatcttcytactagccctcctgtcatgtctaacagtcccgg

SEQ ID NO: 24178 - DNA, 80 bp, synthetic construct
  misc_feature 1..80: note = Synthetic: >NC_030791.1-cand-890-969
  source 1..80: mol_type = other DNA
acagtcccggcatcggcttatgaagtccgcaactccagtggrgtctatcatctcaccaatgactgccccaacgctagtat

SEQ ID NO: 24179 - DNA, 80 bp, synthetic construct
  misc_feature 1..80: note = Synthetic: >NC_030791.1-cand-970-1049
  source 1..80: mol_type = other DNA
agtctatgaaacagacaacgccatcctacacgagcctgggtgcgtgccttgcgttcgcgagggtaatactagcaggtgtt

SEQ ID NO: 24180 - DNA, 80 bp, synthetic construct
  misc_feature 1..80: note = Synthetic: >NC_030791.1-cand-1050-1129
  source 1..80: mol_type = other DNA
gggaaccagtggcccccactttggcggtccgctatcgcggagcgcttactgacgatttgcggacgcatattgacctagtg

SEQ ID NO: 24181 - DNA, 80 bp, synthetic construct
  misc_feature 1..80: note = Synthetic: >NC_030791.1-cand-1080-1159
  source 1..80: mol_type = other DNA
gctatcgcggagcgcttactgacgatttgcggacgcatattgacctagtggtggcgtcagctaccctgtgctccgccttg

SEQ ID NO: 24182 - DNA, 80 bp, synthetic construct
  misc_feature 1..80: note = Synthetic: >NC_030791.1-cand-1230-1309
  source 1..80: mol_type = other DNA
ggatagtgcaagattgcaattgttcgatctacccgggccacgtcaccggccacaggatggcgtgggacatgatgcagaac

SEQ ID NO: 24183 - DNA, 80 bp, synthetic construct
  misc_feature 1..80: note = Synthetic: >NC_030791.1-cand-1290-1369
  source 1..80: mol_type = other DNA
cgtgggacatgatgcagaactgggcgccggccttgtcaatggttgccgcttacgctgtgagagtgcccggtgtcatcatt

SEQ ID NO: 24184 - DNA, 80 bp, synthetic construct
  misc_feature 1..80: note = Synthetic: >NC_030791.1-cand-1400-1479
  source 1..80: mol_type = other DNA
ttatttggcctcgcttactttggtatggcgggaaactgggcaaaggtaatactcatcatgctactcatgtccggcgtcga

SEQ ID NO: 24185 - DNA, 80 bp, synthetic construct
  misc_feature 1..80: note = Synthetic: >NC_030791.1-cand-1420-1499
  source 1..80: mol_type = other DNA
tggtatggcgggaaactgggcaaaggtaatactcatcatgctactcatgtccggcgtcgacgcggaaaccatggccgtcg

SEQ ID NO: 24186 - DNA, 80 bp, synthetic construct
  misc_feature 1..80: note = Synthetic: >NC_030791.1-cand-7990-8069
  source 1..80: mol_type = other DNA
gaccaccccgataccgaccaccataatggccaagaatgaagtcttctgcgtaaatcctgccaagggcgggaaaaagccag

SEQ ID NO: 24187 - DNA, 80 bp, synthetic construct
  misc_feature 1..80: note = Synthetic: >NC_030791.1-cand-8070-8149
  source 1..80: mol_type = other DNA
ctagactgattgtttaccctgacctaggtgtgagggtatgcgagaagcgggctttgtacgacatagctcaaaagcttccg

SEQ ID NO: 24188 - DNA, 80 bp, synthetic construct
  misc_feature 1..80: note = Synthetic: >NC_030791.1-cand-8170-8249
  source 1..80: mol_type = other DNA
gtacgggttccaatattcaccatcgcagcgggtcgartacytagttaagacgtggaagtccaaacggactcccatgggct

SEQ ID NO: 24189 - DNA, 80 bp, synthetic construct
  misc_feature 1..80: note = Synthetic: >NC_030791.1-cand-8230-8309
  source 1..80: mol_type = other DNA
caaacggactcccatgggcttctcatatgacacccgctgctttgattccactgtcacagaacaagacatccgcactgaga

SEQ ID NO: 24190 - DNA, 80 bp, synthetic construct
  misc_feature 1..80: note = Synthetic: >NC_030791.1-cand-8300-8379
  source 1..80: mol_type = other DNA
cgcactgagagcgagatctatcagtgctgcaacctcgaccccgaggctcgcaccatcattaacgcccttaccgagaggtt

SEQ ID NO: 24191 - DNA, 80 bp, synthetic construct
  misc_feature 1..80: note = Synthetic: >NC_030791.1-cand-8390-8469
  source 1..80: mol_type = other DNA
ggacccatgttcaactctaaaggtcagagggtcggttatcgaaggtgcagagccagcggagttttccccaccagcatggg

SEQ ID NO: 24192 - DNA, 80 bp, synthetic construct
  misc_feature 1..80: note = Synthetic: >NC_030791.1-cand-8470-8549
  source 1..80: mol_type = other DNA
aaacactatgacgtgctacatcaaagccaaagcggctgcagcagctgcagggctagagagcactgatttcctggtctgcg

SEQ ID NO: 24193 - DNA, 80 bp, synthetic construct
  misc_feature 1..80: note = Synthetic: >NC_030791.1-cand-8550-8629
  source 1..80: mol_type = other DNA
gcgatgacttggtggtcatttgcgagagcaagggagtcgaacgggatagggcggacctgcaagcctttgcagcggcaatg

SEQ ID NO: 24194 - DNA, 80 bp, synthetic construct
  misc_feature 1..80: note = Synthetic: >NC_030791.1-cand-8570-8649
  source 1..80: mol_type = other DNA
tgcgagagcaagggagtcgaacgggatagggcggacctgcaagcctttgcagcggcaatgaccaggtactccgctccacc

SEQ ID NO: 24195 - DNA, 80 bp, synthetic construct
  misc_feature 1..80: note = Synthetic: >NC_030791.1-cand-8740-8819
  source 1..80: mol_type = other DNA
agtctactacctcactagagaccctaccaacccactatccagggcagcttgggagaccgcccgtcactcacctgtaaact

SEQ ID NO: 24196 - DNA, 80 bp, synthetic construct
  misc_feature 1..80: note = Synthetic: >NC_030791.1-cand-8790-8869
  source 1..80: mol_type = other DNA
gggagaccgcccgtcactcacctgtaaactcctgggtgggcaacataatcatgtttgcccccaccatatgggtgaggatg

SEQ ID NO: 24197 - DNA, 80 bp, synthetic construct
  misc_feature 1..80: note = Synthetic: >NC_030791.1-cand-8870-8949
  source 1..80: mol_type = other DNA
gttctcatgactcactttttcgctctcctcctcaatgaggagcgattgaacgatccagtgagttttgagatgtatggtgc

SEQ ID NO: 24198 - DNA, 80 bp, synthetic construct
  misc_feature 1..80: note = Synthetic: >NC_030791.1-cand-8950-9029
  source 1..80: mol_type = other DNA
aacctacacggtctgcccaacagacttaccagacattatacaaagactccatgggctccgcgcatttgaactccatactt

SEQ ID NO: 24199 - DNA, 80 bp, synthetic construct
  misc_feature 1..80: note = Synthetic: >NC_030791.1-cand-9000-9079
  source 1..80: mol_type = other DNA
atgggctccgcgcatttgaactccatacttactctccagcagaactgacgcgggtggcagctaccctcaggaagcttggg

SEQ ID NO: 24200 - DNA, 80 bp, synthetic construct
  misc_feature 1..80: note = Synthetic: >NC_030791.1-cand-9150-9229
  source 1..80: mol_type = other DNA
gggctcgcatatgcggtctctacctcttcaactgggctgtcaggaccaagatcaaactcactccacttgcaggcgctggc

SEQ ID NO: 24201 - DNA, 80 bp, synthetic construct
  misc_feature 1..80: note = Synthetic: >NC_030791.1-cand-9190-9269
  source 1..80: mol_type = other DNA
caggaccaagatcaaactcactccacttgcaggcgctggccggctcgatctttcgagctggttcagcgtttgcgccggcg

SEQ ID NO: 24202 - DNA, 80 bp, synthetic construct
  misc_feature 1..80: note = Synthetic: >NC_034517.1-cand-80-159
  source 1..80: mol_type = other DNA
aaactcattgactgcagtggaatgtatcgattatcttgatcggctttatgctatccggcatgacattgtagaccaaatga

SEQ ID NO: 24203 - DNA, 80 bp, synthetic construct
  misc_feature 1..80: note = Synthetic: >NC_034517.1-cand-160-239
  source 1..80: mol_type = other DNA
tcaagcatgactggtcagacaataaggatgctgaagagccaataggcaaagtcttgctttttgcaggtatacctaacaac

SEQ ID NO: 24204 - DNA, 80 bp, synthetic construct
  misc_feature 1..80: note = Synthetic: >NC_034517.1-cand-240-319
  source 1..80: mol_type = other DNA
ataattactgctttagaaaagaaaatcataccagaccacccaagtgggaagacacttaaggcgttctttaaaatgacccc

SEQ ID NO: 24205 - DNA, 80 bp, synthetic construct
  misc_feature 1..80: note = Synthetic: >NC_034517.1-cand-310-389
  source 1..80: mol_type = other DNA
aaatgaccccggataattataaaatcactggagccctaattgagtttgttgaggtaactgtgactacagatgtcgataaa

SEQ ID NO: 24206 - DNA, 80 bp, synthetic construct
  misc_feature 1..80: note = Synthetic: >NC_034517.1-cand-430-509
  source 1..80: mol_type = other DNA
agtatttagaacaagaacttcacacgtttttcttgaagggtgaaattcaacagccttataaaatcactctccaagtagtc

SEQ ID NO: 24207 - DNA, 80 bp, synthetic construct
  misc_feature 1..80: note = Synthetic: >NC_034517.1-cand-470-549
  source 1..80: mol_type = other DNA
tgaaattcaacagccttataaaatcactctccaagtagtctcagtgagaactgatggttctaatatctcaacacagtggc

SEQ ID NO: 24208 - DNA, 80 bp, synthetic construct
  misc_feature 1..80: note = Synthetic: >NC_034517.1-cand-570-649
  source 1..80: mol_type = other DNA
gtagttcaatacatgaggcttgtacaggcagaaattagttatgtgagagaacatcttgtaaaggctgaagagagggcagc

SEQ ID NO: 24209 - DNA, 80 bp, synthetic construct
  misc_feature 1..80: note = Synthetic: >NC_034517.1-cand-630-709
  source 1..80: mol_type = other DNA
aaggctgaagagagggcagcactagaagctatgtttaacttaaagtttaatataagcagcttgaagacacaaccttattt

SEQ ID NO: 24210 - DNA, 80 bp, synthetic construct
  misc_feature 1..80: note = Synthetic: >NC_034517.1-cand-730-809
  source 1..80: mol_type = other DNA
ttaatcttattgcaccaaaaattgatgggttacttcaacacacaaaagagtggttatctaaaacacattccttttcattt

SEQ ID NO: 24211 - DNA, 80 bp, synthetic construct
  misc_feature 1..80: note = Synthetic: >NC_034517.1-cand-790-869
  source 1..80: mol_type = other DNA
aaacacattccttttcattttatgaagttaaaggctcagctgtttttgactgtttcaactctaatgaggccacacatggg

SEQ ID NO: 24212 - DNA, 80 bp, synthetic construct
  misc_feature 1..80: note = Synthetic: >NC_034517.1-cand-870-949
  source 1..80: mol_type = other DNA
actagatacccaatgtcaaagcagcccagaaattttttacttattcagtgttctttgatctcatcctataagccagcaac

SEQ ID NO: 24213 - DNA, 80 bp, synthetic construct
  misc_feature 1..80: note = Synthetic: >NC_034517.1-cand-950-1029
  source 1..80: mol_type = other DNA
gatcttatctgaccaagttgacagtagacgggcatgtaatcagtttcttagtattatacctgagactcctgtctcttcat

SEQ ID NO: 24214 - DNA, 80 bp, synthetic construct
  misc_feature 1..80: note = Synthetic: >NC_034517.1-cand-1020-1099
  source 1..80: mol_type = other DNA
gtctcttcattgattcatgatattgcctataaatacagcaatttaacacgggaagatatgcttgctttttattcacccag

SEQ ID NO: 24215 - DNA, 80 bp, synthetic construct
  misc_feature 1..80: note = Synthetic: >NC_034517.1-cand-1100-1179
  source 1..80: mol_type = other DNA
gatacatttcaatgctacacaaaatgtaaaagagccaggtacttttaaattaacagccaccagtttgaggccagactcca

SEQ ID NO: 24216 - DNA, 80 bp, synthetic construct
  misc_feature 1..80: note = Synthetic: >NC_034517.1-cand-1180-1259
  source 1..80: mol_type = other DNA
aggcaatgcttgatatattaagtaagcacaatgcctgtgagaagaaaggtgcattaattgaaagcttgaatataagcagc

SEQ ID NO: 24217 - DNA, 80 bp, synthetic construct
  misc_feature 1..80: note = Synthetic: >NC_034517.1-cand-1260-1339
  source 1..80: mol_type = other DNA
catattacacaatcggattgtgtcagtttggtgaccaaaattttatctgacttggagttaaacattacagaaacatctat

SEQ ID NO: 24218 - DNA, 80 bp, synthetic construct
  misc_feature 1..80: note = Synthetic: >NC_039476.1-cand-3870-3949
  source 1..80: mol_type = other DNA
caaaaatggacatacgcacaggcgtgtgcctcacttgacaaaaccacctccagcgggtacccccatcacgtccgaaagaa

SEQ ID NO: 24219 - DNA, 80 bp, synthetic construct
  misc_feature 1..80: note = Synthetic: >NC_039476.1-cand-4030-4109
  source 1..80: mol_type = other DNA
aacacatgacaccagtgtacacagcagcactcaaagacgagctagtcaagactgagaaaatctatggaaagatcaagaag

SEQ ID NO: 24220 - DNA, 80 bp, synthetic construct
  misc_feature 1..80: note = Synthetic: >NC_039476.1-cand-4130-4209
  source 1..80: mol_type = other DNA
cttgtccaccatgatccggtgcgctaggtcatttggtgggcttatggacgagatgaaggcacactgcatatcactcccag

SEQ ID NO: 24221 - DNA, 80 bp, synthetic construct
  misc_feature 1..80: note = Synthetic: >NC_039476.1-cand-4270-4349
  source 1..80: mol_type = other DNA
ataaatatcactatgatgcagactactctcgttgggattcaacacaacagagggcagtactagcagcagccttggaaatc

SEQ ID NO: 24222 - DNA, 80 bp, synthetic construct
  misc_feature 1..80: note = Synthetic: >NC_039476.1-cand-4430-4509
  source 1..80: mol_type = other DNA
agactttaaaattacaataaatgaagggctcccttctggtgtgccatgcacttctcaatggaactccatcgcacactggc

SEQ ID NO: 24223 - DNA, 80 bp, synthetic construct
  misc_feature 1..80: note = Synthetic: >NC_039476.1-cand-4650-4729
  source 1..80: mol_type = other DNA
ttgaaggagtatggcctgaaaccaacccgcccagacaaaaccgagggacccctgattatcagtgaagatttgaacggtct

SEQ ID NO: 24224 - DNA, 80 bp, synthetic construct
  misc_feature 1..80: note = Synthetic: >NC_039476.1-cand-5050-5129
  source 1..80: mol_type = other DNA
gcgatcgcaatctggctcccaattttgtgaatgaagatggcgtcgaatgacgccgctccatctactgatggtgcagccgg

SEQ ID NO: 24225 - DNA, 80 bp, synthetic construct
  misc_feature 1..80: note = Synthetic: >NC_039476.1-cand-5130-5209
  source 1..80: mol_type = other DNA
cctcgtgccagaaagtaacaatgaggtcatggctcttgaacccgtggctggtgccgccttggcagccccggtcaccggtc

SEQ ID NO: 24226 - DNA, 80 bp, synthetic construct
  misc_feature 1..80: note = Synthetic: >NC_039476.1-cand-5210-5289
  source 1..80: mol_type = other DNA
aaacaaatattatagacccttggattagagcaaattttgtccaggcccccaatggtgaatttacagtctctccccgaaat

SEQ ID NO: 24227 - DNA, 80 bp, synthetic construct
  misc_feature 1..80: note = Synthetic: >NC_039476.1-cand-5290-5369
  source 1..80: mol_type = other DNA
gcccctggtgaagtgctactgaatctagagttgggtccagaattaaatccttatctggcacatttagcaagaatgtacaa

SEQ ID NO: 24228 - DNA, 80 bp, synthetic construct
  misc_feature 1..80: note = Synthetic: >NC_039476.1-cand-5370-5449
  source 1..80: mol_type = other DNA
tgggtatgccggtgggatggaggtgcaggtcatgttggctgggaacgcgttcacagccggcaagttggtcttcgccgccg

SEQ ID NO: 24229 - DNA, 80 bp, synthetic construct
  misc_feature 1..80: note = Synthetic: >NC_039476.1-cand-5450-5529
  source 1..80: mol_type = other DNA
tgccaccccacttcccggttgaaaaccttagcccacagcaaatcaccatgttccctcatgtgatcatagatgtgagaacc

SEQ ID NO: 24230 - DNA, 80 bp, synthetic construct
  misc_feature 1..80: note = Synthetic: >NC_039476.1-cand-5530-5609
  source 1..80: mol_type = other DNA
ttggaacctgttttattaccactccctgatgttaggaataacttcttccattataaccagaaagatgatcccaagatgag

SEQ ID NO: 24231 - DNA, 80 bp, synthetic construct
  misc_feature 1..80: note = Synthetic: >NC_039476.1-cand-5610-5689
  source 1..80: mol_type = other DNA
aattgtggctatgctttatacccccctcaggtctaatggctcaggtgatgatgtgtttacagtctcctgtagagtgttga

SEQ ID NO: 24232 - DNA, 80 bp, synthetic construct
  misc_feature 1..80: note = Synthetic: >NC_039897.1-cand-1540-1619
  source 1..80: mol_type = other DNA
aggaaaaagcaaggaaactctcagtccgtagtgccgacccacacatagtgacctcagtcaacaatttgatatcacggata

SEQ ID NO: 24233 - DNA, 80 bp, synthetic construct
  misc_feature 1..80: note = Synthetic: >NC_039897.1-cand-1620-1699
  source 1..80: mol_type = other DNA
tccatggcgaggtcagccttagctaaagcccaggctgagatgacatgtcgcccacgcccagtagtcataatgatgtgtgg

SEQ ID NO: 24234 - DNA, 80 bp, synthetic construct
  misc_feature 1..80: note = Synthetic: >NC_039897.1-cand-1700-1779
  source 1..80: mol_type = other DNA
cccccccggcatcggaaaaaccaaggccgccgaacacctggctggccgattggcaaatgaaatcagaccgggaggtaagg

SEQ ID NO: 24235 - DNA, 80 bp, synthetic construct
  misc_feature 1..80: note = Synthetic: >NC_039897.1-cand-1780-1859
  source 1..80: mol_type = other DNA
ttggacttgtaccccgggaatccatagaccactgggacggataccatggcgaggatgtcctactatgggatgactatggc

SEQ ID NO: 24236 - DNA, 80 bp, synthetic construct
  misc_feature 1..80: note = Synthetic: >NC_039897.1-cand-1860-1939
  source 1..80: mol_type = other DNA
atgtcaaaaataacagaggactgcaacaagttacaagccatagatgacactgcacccctatcagttaattgtgacaggat

SEQ ID NO: 24237 - DNA, 80 bp, synthetic construct
  misc_feature 1..80: note = Synthetic: >NC_039897.1-cand-1940-2019
  source 1..80: mol_type = other DNA
agagaacaaaggcatgcaattttcttcagatgctataattataaccactaacgcccctggcccggccccagtggactttg

SEQ ID NO: 24238 - DNA, 80 bp, synthetic construct
  misc_feature 1..80: note = Synthetic: >NC_039897.1-cand-2020-2099
  source 1..80: mol_type = other DNA
tcaacctaggccctgtgtgtaggcgagtggatttcttagtctattgttctgcccctgaaattgagcaaatgagaagaacc

SEQ ID NO: 24239 - DNA, 80 bp, synthetic construct
  misc_feature 1..80: note = Synthetic: >NC_039897.1-cand-2100-2179
  source 1..80: mol_type = other DNA
caccctggtgatgccaatgccattaaggacctatataaaagggactattcgcacctaaaaatggaattagccccacaagg

SEQ ID NO: 24240 - DNA, 80 bp, synthetic construct
  misc_feature 1..80: note = Synthetic: >NC_039897.1-cand-2180-2259
  source 1..80: mol_type = other DNA
tggctttgatagccagggcaacacaccatttggaaagggcgtcatgaaacccacaacccttaataggctactcattcaag

SEQ ID NO: 24241 - DNA, 80 bp, synthetic construct
  misc_feature 1..80: note = Synthetic: >NC_039897.1-cand-2220-2299
  source 1..80: mol_type = other DNA
gtcatgaaacccacaacccttaataggctactcattcaagcaacagcattagctatggagcggcaagatgagttccagct

SEQ ID NO: 24242 - DNA, 80 bp, synthetic construct
  misc_feature 1..80: note = Synthetic: >NC_039897.1-cand-2380-2459
  source 1..80: mol_type = other DNA
taagtatggcaacattaggtaaaaggctcaggagtgtcaaatctatggagggcctgcgcaatgcattggtaggctataaa

SEQ ID NO: 24243 - DNA, 80 bp, synthetic construct
  misc_feature 1..80: note = Synthetic: >NC_039897.1-cand-2420-2499
  source 1..80: mol_type = other DNA
atctatggagggcctgcgcaatgcattggtaggctataaaattggagagtgtgatataatctggaataccagagtgtact

SEQ ID NO: 24244 - DNA, 80 bp, synthetic construct
  misc_feature 1..80: note = Synthetic: >NC_039897.1-cand-2500-2579
  source 1..80: mol_type = other DNA
caattaaaagtgatggtagtgctgtcacaatcaaggagaaacagaccccaacttcaccccaacaccaggccattagcaca

SEQ ID NO: 24245 - DNA, 80 bp, synthetic construct
  misc_feature 1..80: note = Synthetic: >NC_039897.1-cand-2580-2659
  source 1..80: mol_type = other DNA
gccactcttgcactctctagactgcgagccgccagagctcttgcgtatgcctcctgcctacagagtgcagtactgtcaat

SEQ ID NO: 24246 - DNA, 80 bp, synthetic construct
  misc_feature 1..80: note = Synthetic: >NC_039897.1-cand-2660-2739
  source 1..80: mol_type = other DNA
actccaagtagctggctctgccctggtggtgagcagggccgtgaaacgcatgtttggcacgcgcactgaacaacctatgt

SEQ ID NO: 24247 - DNA, 80 bp, synthetic construct
  misc_feature 1..80: note = Synthetic: >NC_039897.1-cand-2740-2819
  source 1..80: mol_type = other DNA
tagaaggcaagcacaaagagcacaactgcagagtgcaccgcgcagaggctgctggccatggtcctattgggcatgatgga

SEQ ID NO: 24248 - DNA, 80 bp, synthetic construct
  misc_feature 1..80: note = Synthetic: >NC_040876.1-cand-4120-4199
  source 1..80: mol_type = other DNA
cggaccttggcacaatgatcagatgtgccagggccttcggcggtctcatggatagcatgaaggcaagttgcatagccctc

SEQ ID NO: 24249 - DNA, 80 bp, synthetic construct
  misc_feature 1..80: note = Synthetic: >NC_040876.1-cand-4190-4269
  source 1..80: mol_type = other DNA
catagccctcccatgtagggtaggaatgaacatgaatgaagatggtcccatcatatttgacaaacattctaagtataggt

SEQ ID NO: 24250 - DNA, 80 bp, synthetic construct
  misc_feature 1..80: note = Synthetic: >NC_040876.1-cand-4270-4349
  source 1..80: mol_type = other DNA
accattatgatgctgactattcaaggtgggactcaacccagcaaaggagcattctctcggccgctatggaagtgatggtg

SEQ ID NO: 24251 - DNA, 80 bp, synthetic construct
  misc_feature 1..80: note = Synthetic: >NC_040876.1-cand-4350-4429
  source 1..80: mol_type = other DNA
cggttctctgccgagccagagctggcacaagtggttgcagaggacctcctggcacccagccaactggatgttggcgactt

SEQ ID NO: 24252 - DNA, 80 bp, synthetic construct
  misc_feature 1..80: note = Synthetic: >NC_040876.1-cand-4470-4549
  source 1..80: mol_type = other DNA
tgtacatcacagtggaattcaatagcacactggatcctgaccttgagtgcaatggcagaagtgtcgggtctctcaccaga

SEQ ID NO: 24253 - DNA, 80 bp, synthetic construct
  misc_feature 1..80: note = Synthetic: >NC_040876.1-cand-4510-4589
  source 1..80: mol_type = other DNA
ccttgagtgcaatggcagaagtgtcgggtctctcaccagatgttgttcaagcccactcctgtttctcattctacggtgac

SEQ ID NO: 24254 - DNA, 80 bp, synthetic construct
  misc_feature 1..80: note = Synthetic: >NC_040876.1-cand-4590-4669
  source 1..80: mol_type = other DNA
gatgagatcgtcagcactgacatcaatcttgatcccatgaagttgacacagaaactcagagaatatggtctggtccccac

SEQ ID NO: 24255 - DNA, 80 bp, synthetic construct
  misc_feature 1..80: note = Synthetic: >NC_040876.1-cand-4670-4749
  source 1..80: mol_type = other DNA
tcgacctgacaaaactgagggtcccctcgtaataactgaagacctcaccggcctaacgttcctgcgtaggtcaattgcac

SEQ ID NO: 24256 - DNA, 80 bp, synthetic construct
  misc_feature 1..80: note = Synthetic: >NC_040876.1-cand-4730-4809
  source 1..80: mol_type = other DNA
cctgcgtaggtcaattgcacgggacccagctgggtggtttggaaaactggaccaagactcaatcctcagacagttgtact

SEQ ID NO: 24257 - DNA, 80 bp, synthetic construct
  misc_feature 1..80: note = Synthetic: >NC_040876.1-cand-4840-4919
  source 1..80: mol_type = other DNA
atgagagcatggtccctcactcccagcgggccacacagcttatggcccttctcggtgaggcttcactgcatggcccccag

SEQ ID NO: 24258 - DNA, 80 bp, synthetic construct
  misc_feature 1..80: note = Synthetic: >NC_040876.1-cand-4920-4999
  source 1..80: mol_type = other DNA
ttttacaagaaggttagcaagatggtcatcaatgaaatcaaaagtggtggtctggaattttatgtgcccagacaagaggc

SEQ ID NO: 24259 - DNA, 80 bp, synthetic construct
  misc_feature 1..80: note = Synthetic: >NC_040876.1-cand-5000-5079
  source 1..80: mol_type = other DNA
catgttcagatggatgagattctctgacctcagcacatgggagggcgatcgcaatcttgctcccgagggtgtgaatgaag

SEQ ID NO: 24260 - DNA, 80 bp, synthetic construct
  misc_feature 1..80: note = Synthetic: >NC_040876.1-cand-5080-5159
  source 1..80: mol_type = other DNA
atggcgtcgaatgacgctgctccatcgaatgatggtgctgccaacctcgtaccagaggccaacaatgaggttatggcact

SEQ ID NO: 24261 - DNA, 80 bp, synthetic construct
  misc_feature 1..80: note = Synthetic: >NC_040876.1-cand-5160-5239
  source 1..80: mol_type = other DNA
tgaaccggtggtgggagcctcaattgcagctcctgttgtcggccaacaaaatataattgacccctggattagagaaaatt

SEQ ID NO: 24262 - DNA, 80 bp, synthetic construct
  misc_feature 1..80: note = Synthetic: >NC_040876.1-cand-5240-5319
  source 1..80: mol_type = other DNA
ttgtccaagcaccacagggtgagttcaccgtctcaccgaggaactcgcctggtgagatgctattaaatcttgaattgggc

SEQ ID NO: 24263 - DNA, 80 bp, synthetic construct
  misc_feature 1..80: note = Synthetic: >NC_040876.1-cand-5320-5399
  source 1..80: mol_type = other DNA
ccagaactcaacccttacctgagtcacctgtcccgcatgtataacgggtatgctggtggcatgcaggttcaggtggtcct

SEQ ID NO: 24264 - DNA, 80 bp, synthetic construct
  misc_feature 1..80: note = Synthetic: >AdVB7-cand-27620-27699
  source 1..80: mol_type = other DNA
ctatgattgatgtctaatggtggcgcggctgagctagctcgactgcgacacctagaccactgccgccgctttcgctgctt

SEQ ID NO: 24265 - DNA, 80 bp, synthetic construct
  misc_feature 1..80: note = Synthetic: >AdVB3-cand-3830-3909
  source 1..80: mol_type = other DNA
aagcaggtggcccagttgcgtgagcaaactgagtctgctgttgccacagcaaagtctaaataaagatctcaaatcaataa

SEQ ID NO: 24266 - DNA, 80 bp, synthetic construct
  misc_feature 1..80: note = Synthetic: >AdVB7-cand-7030-7109
  source 1..80: mol_type = other DNA
acggtaagagcccaacatgtagaactgattgactgccttgtagggacagcatcccttctccactgggagagagtatgctt

SEQ ID NO: 24267 - DNA, 80 bp, synthetic construct
  misc_feature 1..80: note = Synthetic: >NC_001611.1-cand-81020-81099
  source 1..80: mol_type = other DNA
aagcatcttggaaacataaaataactctgtagacgatacttgactttcgaataagtttgcagacaaacgaagaaagaaca

SEQ ID NO: 24268 - DNA, 80 bp, synthetic construct
  misc_feature 1..80: note = Synthetic: >AdVB7-cand-9770-9849
  source 1..80: mol_type = other DNA
aagcattatcctgacatctggccagatctttatagtagtcttgcatgagtcgttccacgggcacttcttcttcgcccgct

SEQ ID NO: 24269 - DNA, 80 bp, synthetic construct
  misc_feature 1..80: note = Synthetic: >AdVB7-cand-5750-5829
  source 1..80: mol_type = other DNA
ttgtcaaccagggggtccaccttctctacggtatgtaaacacatgtccccctcctccacatccaagaatgtgattggctt

SEQ ID NO: 24270 - DNA, 80 bp, synthetic construct
  misc_feature 1..80: note = Synthetic: >NC_035889.1-cand-9670-9749
  source 1..80: mol_type = other DNA
aagccaattgatgataggtttgcacatgccctcaggttcttgaatgatatgggaaaagttaggaaggacacacaagagtg

SEQ ID NO: 24271 - DNA, 80 bp, synthetic construct
  misc_feature 1..80: note = Synthetic: >NC_003310.1-cand-74500-74579
  source 1..80: mol_type = other DNA
aagccggctatatattctgctatattgttgctagtatcaataccttttctggctaagaagtcatatgtggtattcactat

SEQ ID NO: 24272 - DNA, 80 bp, synthetic construct
  misc_feature 1..80: note = Synthetic: >NC_001611.1-cand-128080-128159
  source 1..80: mol_type = other DNA
tggacaaccttaattggttggtcctccttatctcctccagtagcatgtggttcttcaataccagtgttagtaataggctt

SEQ ID NO: 24273 - DNA, 80 bp, synthetic construct
  misc_feature 1..80: note = Synthetic: >AdVB3-cand-29540-29619
  source 1..80: mol_type = other DNA
cactttctctagcagcagtgccaaagcaagcacaattcctaaaacagcttctgctattttaaagcttccaaaaatcgctt

SEQ ID NO: 24274 - DNA, 80 bp, synthetic construct
  misc_feature 1..80: note = Synthetic: >NC_004296.1-cand-310-389
  source 1..80: mol_type = other DNA
aagcggtcaacaatcttgttgaattaaaatcaactcaacaaaagagtatactgagagttgggactctaacctcagatgac

SEQ ID NO: 24275 - DNA, 80 bp, synthetic construct
  misc_feature 1..80: note = Synthetic: >NC_007557.1-cand-620-699
  source 1..80: mol_type = other DNA
agtttttgatgagggatcagtagtgcaatataatcgtgagtgatgtgtagcatgctctaccatggatggaaacatagctt

SEQ ID NO: 24276 - DNA, 80 bp, synthetic construct
  misc_feature 1..80: note = Synthetic: >EVD70-cand-1170-1249
  source 1..80: mol_type = other DNA
aagctccctgatgctttgaatcaaattggtatgtttggtcaaaacgtccaataccactacctgtataggagtgggttcct

SEQ ID NO: 24277 - DNA, 80 bp, synthetic construct
  misc_feature 1..80: note = Synthetic: >NC_003310.1-cand-67370-67449
  source 1..80: mol_type = other DNA
aagctggtaatagtttacagatattttccaattccgtaggcaaacgaatagatactataggtgtactagggaataagtat

SEQ ID NO: 24278 - DNA, 80 bp, synthetic construct
  misc_feature 1..80: note = Synthetic: >NC_003310.1-cand-123330-123409
  source 1..80: mol_type = other DNA
aagctgtggtgtaatcttattaactgtttcgatataatcatcgtaactacttctaacggctaaattttttttatccgcca

SEQ ID NO: 24279 - DNA, 80 bp, synthetic construct
  misc_feature 1..80: note = Synthetic: >NC_039477.1-cand-3580-3659
  source 1..80: mol_type = other DNA
aaggaacatactgtggggcacccattctaggccctgggggtgcaccaaaattgagcaccaaaaccaaattttggaggtca

SEQ ID NO: 24280 - DNA, 80 bp, synthetic construct
  misc_feature 1..80: note = Synthetic: >AdVB7-cand-29440-29519
  source 1..80: mol_type = other DNA
acaatttttatcattactagccttgcagctgtaacttatggccgttcacacctaactgtacctgttggctcaacatgtac

SEQ ID NO: 24281 - DNA, 80 bp, synthetic construct
  misc_feature 1..80: note = Synthetic: >AdVB7-cand-21080-21159
  source 1..80: mol_type = other DNA
acacaacaactctggctttgtaggataccttgcgcctactatgagacaaggggaaccttacccagccaattatccatacc

SEQ ID NO: 24282 - DNA, 80 bp, synthetic construct
  misc_feature 1..80: note = Synthetic: >NC_004296.1-cand-80-159
  source 1..80: mol_type = other DNA
acacaacaatctggcgatgagtgcctcaaaggaaataaaatcctttttgtggacacaatctttgaggagggaattatctg

SEQ ID NO: 24283 - DNA, 80 bp, synthetic construct
  misc_feature 1..80: note = Synthetic: >NC_003310.1-cand-129880-129959
  source 1..80: mol_type = other DNA
acacattcggattgcgagactccgttccggatagacgcaaattagacgatgtagcggatagtttcaatttggctatgaga

SEQ ID NO: 24284 - DNA, 80 bp, synthetic construct
  misc_feature 1..80: note = Synthetic: >AdVB7-cand-2050-2129
  source 1..80: mol_type = other DNA
acacccaccgaccatgccagcggttctgcaggaggagcagcaggaggacaatccgagagccggcctggaccctccggtgg

SEQ ID NO: 24285 - DNA, 80 bp, synthetic construct
  misc_feature 1..80: note = Synthetic: >NC_039477.1-cand-1990-2069
  source 1..80: mol_type = other DNA
acaccccacacgggaaaggagtgatgaagaccctcactaccggttctctgattgcccgtgcatcaggcctactgcatgag

SEQ ID NO: 24286 - DNA, 80 bp, synthetic construct
  misc_feature 1..80: note = Synthetic: >NC_001611.1-cand-72700-72779
  source 1..80: mol_type = other DNA
acacggtaataaaatgtcacaaccttttgctccttcatattcagctgaaatgagattattaagtatttataccggtgaga

SEQ ID NO: 24287 - DNA, 80 bp, synthetic construct
  misc_feature 1..80: note = Synthetic: >NC_003310.1-cand-23400-23479
  source 1..80: mol_type = other DNA
acactaaaatgattgaataatagatagtctaccattgtttcgtattcagatagtacagcgtagtacatggcatcttcaca

SEQ ID NO: 24288 - DNA, 80 bp, synthetic construct
  misc_feature 1..80: note = Synthetic: >NC_001611.1-cand-4190-4269
  source 1..80: mol_type = other DNA
acactacaatttagttattaatgtggttattgattggataaccgatgtgattgttcaatcaatattaagagggttggtaa

SEQ ID NO: 24289 - DNA, 80 bp, synthetic construct
  misc_feature 1..80: note = Synthetic: >NC_001611.1-cand-70940-71019
  source 1..80: mol_type = other DNA
cgataaattaatgatctatggattaccatggataacaactcaaacatctgcattatcaataaatagtaaaccgatagtgt

SEQ ID NO: 24290 - DNA, 80 bp, synthetic construct
  misc_feature 1..80: note = Synthetic: >AdVB3-cand-33360-33439
  source 1..80: mol_type = other DNA
acactatgcatagtcatagtatcacaatctggcaacagcgggtggtcttcagtcatagaagctcgggtttcattttcctc

SEQ ID NO: 24291 - DNA, 80 bp, synthetic construct
  misc_feature 1..80: note = Synthetic: >AdVB7-cand-1110-1189
  source 1..80: mol_type = other DNA
gtgctcgctttgctatatgagaatgcactgccactttatttacagtaagtgtatttaagtgaaatttaaaggaatagtgt

SEQ ID NO: 24292 - DNA, 80 bp, synthetic construct
  misc_feature 1..80: note = Synthetic: >NC_001611.1-cand-67870-67949
  source 1..80: mol_type = other DNA
acactcagcgaacgtatctcgtctaaattagaacaagaagcgaatgctagtgctcaaacaaaatgtgatatagaaatcgg

SEQ ID NO: 24293 - DNA, 80 bp, synthetic construct
  misc_feature 1..80: note = Synthetic: >NC_039476.1-cand-4190-4269
  source 1..80: mol_type = other DNA
acactgcatatcactcccagtccgagttggcatgaatatgaatgaagatggcccaataatatttgagaaacattccagat

SEQ ID NO: 24294 - DNA, 80 bp, synthetic construct
  misc_feature 1..80: note = Synthetic: >AdVB7-cand-17360-17439
  source 1..80: mol_type = other DNA
acactgccagcaaagtgactcccgccgccctggtgcggagagtgtaccgcgatggtcgcgctgaacctctgacgctgccg

SEQ ID NO: 24295 - DNA, 80 bp, synthetic construct
  misc_feature 1..80: note = Synthetic: >EVB84-cand-4940-5019
  source 1..80: mol_type = other DNA
gacagaagaacacaggtcaggtactcactggacatgctggtcactgagatgtttagagagtacaaccacagacacagtgt

SEQ ID NO: 24296 - DNA, 80 bp, synthetic construct
  misc_feature 1..80: note = Synthetic: >AF482713.1-cand-1600-1679
  source 1..80: mol_type = other DNA
agataattgataagttagttataagatagattagaacttgattaagtggataaatagccagatgacatcattgattgatc

SEQ ID NO: 24297 - DNA, 80 bp, synthetic construct
  misc_feature 1..80: note = Synthetic: >AF482713.1-cand-1680-1759
  source 1..80: mol_type = other DNA
ggctatttttattaatcaatataggatttaatcttaagttaaggttaattatcagtatccttaggtttaagataaactaa

SEQ ID NO: 24298 - DNA, 80 bp, synthetic construct
  misc_feature 1..80: note = Synthetic: >AF482713.1-cand-1760-1839
  source 1..80: mol_type = other DNA
caattattgtaatccattggatgtaaatttcgttcattgctttgctgctttctgctacactaattcacaacaacactacc

SEQ ID NO: 24299 - DNA, 80 bp, synthetic construct
  misc_feature 1..80: note = Synthetic: >AF482713.1-cand-1840-1919
  source 1..80: mol_type = other DNA
tcatcccaaaaccctcccctttatctacctcacataaaactacctcaatttcgatttctcttgattgcttttcaaggagc

SEQ ID NO: 24300 - DNA, 80 bp, synthetic construct
  misc_feature 1..80: note = Synthetic: >AF482714.1-cand-220-299
  source 1..80: mol_type = other DNA
caagagacaacttgcagatctggtggcagctcaaaaactggctacaaaaccagttgatccaacagggcttgagcctgatg

SEQ ID NO: 24301 - DNA, 80 bp, synthetic construct
  misc_feature 1..80: note = Synthetic: >AF482714.1-cand-320-399
  source 1..80: mol_type = other DNA
tccctgagatatggtaatgttctggatgtcaactctattgatctagaagaaccaagtggacagactgctgattggagatc

SEQ ID NO: 24302 - DNA, 80 bp, synthetic construct
  misc_feature 1..80: note = Synthetic: >AF482714.1-cand-470-549
  source 1..80: mol_type = other DNA
gggcggcagactgtcaaggacaacaaagggacaagaatccggtttaaagatgattcttcatttgaggaggtcaatggcat

SEQ ID NO: 24303 - DNA, 80 bp, synthetic construct
  misc_feature 1..80: note = Synthetic: >AF482714.1-cand-490-569
  source 1..80: mol_type = other DNA
caacaaagggacaagaatccggtttaaagatgattcttcatttgaggaggtcaatggcatccgaaagcctaaacatttgt

SEQ ID NO: 24304 - DNA, 80 bp, synthetic construct
  misc_feature 1..80: note = Synthetic: >AF482714.1-cand-570-649
  source 1..80: mol_type = other DNA
atgtatccatgcctacagcacaatcaacaatgaaggctgaagagataacaccaggcagatttagaacaattgcatgtggt

SEQ ID NO: 24305 - DNA, 80 bp, synthetic construct
  misc_feature 1..80: note = Synthetic: >AF482714.1-cand-620-699
  source 1..80: mol_type = other DNA
ccaggcagatttagaacaattgcatgtggtctttttcctgcacaagtcaaagctagaaacatcattagtcctgtcatggg

SEQ ID NO: 24306 - DNA, 80 bp, synthetic construct
  misc_feature 1..80: note = Synthetic: >AF482714.1-cand-730-809
  source 1..80: mol_type = other DNA
ttggatggaaaggatagaagatttcctggcagctgaatgtcctttcttacccaaaccaaaggcaccatctgaagcattca

SEQ ID NO: 24307 - DNA, 80 bp, synthetic construct
  misc_feature 1..80: note = Synthetic: >AF482714.1-cand-810-889
  source 1..80: mol_type = other DNA
tggccaccaataaagcctacttcttgaacagacaacgacaggttaatgagtcaaaagttcaggaaatagttgacctcatt

SEQ ID NO: 24308 - DNA, 80 bp, synthetic construct
  misc_feature 1..80: note = Synthetic: >AF482714.1-cand-890-969
  source 1..80: mol_type = other DNA
gatcacgcagagactgagtcagcaacattgtttacagatattgcaactccacactcagtatgggtgtttgcatgtgcacc

SEQ ID NO: 24309 - DNA, 80 bp, synthetic construct
  misc_feature 1..80: note = Synthetic: >AF482714.1-cand-970-1049
  source 1..80: mol_type = other DNA
agatcgttgcccaccaacagccttatatgttgccggtgttccagaactgggtgcattttttgctattctacaggatatgc

SEQ ID NO: 24310 - DNA, 80 bp, synthetic construct
  misc_feature 1..80: note = Synthetic: >AF482714.1-cand-1050-1129
  source 1..80: mol_type = other DNA
ggaatacaatcatggcatcaaagtctgtaggaacagctgaagagaagctgaagaaaaaatctgccttctaccagtcatac

SEQ ID NO: 24311 - DNA, 80 bp, synthetic construct
  misc_feature 1..80: note = Synthetic: >AF482714.1-cand-1120-1199
  source 1..80: mol_type = other DNA
ccagtcatacttgaggaggacacaatctatgggaattcagctggatcaaaagatcataatcctctatatgctatcatggg

SEQ ID NO: 24312 - DNA, 80 bp, synthetic construct
  misc_feature 1..80: note = Synthetic: >AdVB3-cand-32180-32259
  source 1..80: mol_type = other DNA
tttccgttggaagttactgttacgcttaataaacgcctgccagatagtcgcacatcctatgttatgacttttttatggtc

SEQ ID NO: 24313 - DNA, 80 bp, synthetic construct
  misc_feature 1..80: note = Synthetic: >AdVB3-cand-32260-32339
  source 1..80: mol_type = other DNA
cttgaatgctggtctagctccagaaactactcaggcaaccctcataacctccccatttaccttttcctatattacagaag

SEQ ID NO: 24314 - DNA, 80 bp, synthetic construct
  misc_feature 1..80: note = Synthetic: >AdVB3-cand-32340-32419
  source 1..80: mol_type = other DNA
atgactgacaacaaaaataaagttcaacattttttattgaaattccttttacagtattcgagtagttattttgcctcccc

SEQ ID NO: 24315 - DNA, 80 bp, synthetic construct
  misc_feature 1..80: note = Synthetic: >AdVB3-cand-32420-32499
  source 1..80: mol_type = other DNA
cttcccatttaacagaatacaccaatctctccccacgcacagctttaaacatttggataccattagagatagacatagtt

SEQ ID NO: 24316 - DNA, 80 bp, synthetic construct
  misc_feature 1..80: note = Synthetic: >AdVB3-cand-32460-32539
  source 1..80: mol_type = other DNA
agctttaaacatttggataccattagagatagacatagttttagattccacattccaaacagtttcagagcgagccaatc

SEQ ID NO: 24317 - DNA, 80 bp, synthetic construct
  misc_feature 1..80: note = Synthetic: >AdVB3-cand-32760-32839
  source 1..80: mol_type = other DNA
tccgcagtgtcctgaagcatgattttaatagcccttaacattaactttctggtgcgatgcgcgcagcaacgcattctgat

SEQ ID NO: 24318 - DNA, 80 bp, synthetic construct
  misc_feature 1..80: note = Synthetic: >AdVB3-cand-34340-34419
  source 1..80: mol_type = other DNA
acagtgcagtacaagcgcagacctccccaattggctccagcaaaaacaagattagaataagcatactggcaaccaccagt

SEQ ID NO: 24319 - DNA, 80 bp, synthetic construct
  misc_feature 1..80: note = Synthetic: >AdVB3-cand-34620-34699
  source 1..80: mol_type = other DNA
aggtggaaaaattagtctttccatcacaagacaagccacagggtctccagctttaccctcgtaaaacctgtcatcgtgat

SEQ ID NO: 24320 - DNA, 80 bp, synthetic construct
  misc_feature 1..80: note = Synthetic: >AdVB7-cand-120-199
  source 1..80: mol_type = other DNA
gtgggaaaatgacgtgacttatgtgggaggagctatgttgcaagttattgcggtaaatgtgacgtaaaacgaggtgtggt

SEQ ID NO: 24321 - DNA, 80 bp, synthetic construct
  misc_feature 1..80: note = Synthetic: >AdVB7-cand-160-239
  source 1..80: mol_type = other DNA
caagttattgcggtaaatgtgacgtaaaacgaggtgtggtttgaacacggaagtagacagttttcccacgcttactgaca

SEQ ID NO: 24322 - DNA, 80 bp, synthetic construct
  misc_feature 1..80: note = Synthetic: >AdVB7-cand-400-479
  source 1..80: mol_type = other DNA
accgtgtttttcacctaaatttccgcgtacggtgtcaaagtcctgtgtttttacgtaggtgtcagctgatcgctagggta

SEQ ID NO: 24323 - DNA, 80 bp, synthetic construct
  misc_feature 1..80: note = Synthetic: >AdVB7-cand-770-849
  source 1..80: mol_type = other DNA
ggttttttactgattctatgctgctagctgccgatgaaggattggacataaaccctcctcctgagacccttgttacccca

SEQ ID NO: 24324 - DNA, 80 bp, synthetic construct
  misc_feature 1..80: note = Synthetic: >AdVB7-cand-970-1049
  source 1..80: mol_type = other DNA
gagcagtccatccataccgcagtgaatgagggagtaaaagctgccagcgatgtttttaagttggactgtccggagctgcc

SEQ ID NO: 24325 - DNA, 80 bp, synthetic construct
  misc_feature 1..80: note = Synthetic: >AdVB7-cand-1190-1269
  source 1..80: mol_type = other DNA
agctgtttaataactgttgaatggtagatttatgttttttacttgtgattttttgtaggtcctgtgtctgatgatgagtc

SEQ ID NO: 24326 - DNA, 80 bp, synthetic construct
  misc_feature 1..80: note = Synthetic: >AdVB7-cand-1270-1349
  source 1..80: mol_type = other DNA
accttctcctgattcaactacctcacctcctgaaattcaggcgcccgcacctgcaaacgtatgcaagcccattcctgtaa

SEQ ID NO: 24327 - DNA, 80 bp, synthetic construct
  misc_feature 1..80: note = Synthetic: >AdVB7-cand-1320-1399
  source 1..80: mol_type = other DNA
ctgcaaacgtatgcaagcccattcctgtaaagcctaagcctgggaaacgccctgctgtggataagcttgaggacttgttg

SEQ ID NO: 24328 - DNA, 80 bp, synthetic construct
  misc_feature 1..80: note = Synthetic: >AdVB7-cand-21800-21879
  source 1..80: mol_type = other DNA
cctgcgccgcagtgcccttgctaccaaagaccgctgcatcaccctggaaaagtccacccagagcgtgcagggcccacgct

SEQ ID NO: 24329 - DNA, 80 bp, synthetic construct
  misc_feature 1..80: note = Synthetic: >AdVB7-cand-21980-22059
  source 1..80: mol_type = other DNA
ggtgcccaacagcatgctccaatctccccaagtgcagcccaccctgcgccgcaaccaggaggcgctatatcgcttcctaa

SEQ ID NO: 24330 - DNA, 80 bp, synthetic construct
  misc_feature 1..80: note = Synthetic: >AdVB7-cand-22040-22119
  source 1..80: mol_type = other DNA
ggcgctatatcgcttcctaaacacccactcatcttactttcgttctcaccgcgcacgcatcgaaagggccaccgcgtttg

SEQ ID NO: 24331 - DNA, 80 bp, synthetic construct
  misc_feature 1..80: note = Synthetic: >AdVB7-cand-22200-22279
  source 1..80: mol_type = other DNA
tttttactcattcgttttcattattcactcagaaatcaaatgggttctggcgggagtcaaagtgacccgcgggcagggat

SEQ ID NO: 24332 - DNA, 80 bp, synthetic construct
  misc_feature 1..80: note = Synthetic: >AdVB7-cand-22240-22319
  source 1..80: mol_type = other DNA
tgggttctggcgggagtcaaagtgacccgcgggcagggatacgttgcggaactgtaacctgttctgccacttgaactcgg

SEQ ID NO: 24333 - DNA, 80 bp, synthetic construct
  misc_feature 1..80: note = Synthetic: >AdVB7-cand-22490-22569
  source 1..80: mol_type = other DNA
aaggctgggtgtctcacgcttgccagcacggtcgggtcactgatggtagtcacatccaagtcttcagcattggccatccc

SEQ ID NO: 24334 - DNA, 80 bp, synthetic construct
  misc_feature 1..80: note = Synthetic: >AdVB7-cand-22680-22759
  source 1..80: mol_type = other DNA
tccctgggtacacggccttcataaaggcttcgtactgcttgaaagcttcctgagccttacttccctcggtatagaacatc

SEQ ID NO: 24335 - DNA, 80 bp, synthetic construct
  misc_feature 1..80: note = Synthetic: >AdVB7-cand-22760-22839
  source 1..80: mol_type = other DNA
ccacaggacttgctggaaaattgattagtagcacagttggcatcatttacacagcagcgggcatcgttgttggccaactg

SEQ ID NO: 24336 - DNA, 80 bp, synthetic construct
  misc_feature 1..80: note = Synthetic: >AdVB7-cand-22840-22919
  source 1..80: mol_type = other DNA
gaccacatttctgccccagcggttctgggtgatcttggctctgtctgggttctccttcatagcgcgctgtccgttctcgc

SEQ ID NO: 24337 - DNA, 80 bp, synthetic construct
  misc_feature 1..80: note = Synthetic: >AdVB7-cand-23080-23159
  source 1..80: mol_type = other DNA
ctgcatgaatcttcccatcatcgctgtcagggtcttcatgctactaaatgtcagcgggatgccacggtgctcctcgttca

SEQ ID NO: 24338 - DNA, 80 bp, synthetic construct
  misc_feature 1..80: note = Synthetic: >AdVB7-cand-23220-23299
  source 1..80: mol_type = other DNA
ttctcaggtcattatccagcctgtacctttccattagcacagccatcacttccatgcccttctcccaggcagataccagg

SEQ ID NO: 24339 - DNA, 80 bp, synthetic construct
  misc_feature 1..80: note = Synthetic: >AdVB7-cand-23420-23499
  source 1..80: mol_type = other DNA
ctgaagcccacggccaccaactgagcctgttctctttcttcttcgctgtcgtggccgatgtcttgcagagggacatgctt

SEQ ID NO: 24340 - DNA, 80 bp, synthetic construct
  misc_feature 1..80: note = Synthetic: >AdVB7-cand-23450-23529
  source 1..80: mol_type = other DNA
tctctttcttcttcgctgtcgtggccgatgtcttgcagagggacatgcttggtctttctgggcttcttcttgggagggat

SEQ ID NO: 24341 - DNA, 80 bp, synthetic construct
  misc_feature 1..80: note = Synthetic: >AdVB7-cand-23560-23639
  source 1..80: mol_type = other DNA
cagggatgaccgcgaagtttcgcttaccagtaccacctggctctcgatagaagaatcggaccccacgcgacggtaggtgt

SEQ ID NO: 24342 - DNA, 80 bp, synthetic construct
  misc_feature 1..80: note = Synthetic: >AdVB7-cand-23650-23729
  source 1..80: mol_type = other DNA
gggcagaggtggaggcgactgagatgggctgcggtctggccttggaagcggatggctggcagagcccattccgcgttcgg

SEQ ID NO: 24343 - DNA, 80 bp, synthetic construct
  misc_feature 1..80: note = Synthetic: >AdVB7-cand-23730-23809
  source 1..80: mol_type = other DNA
gggtgtgctcccgttggcggtcgcttgactgatttcctccgcggctggccattgtgttctcctaggcagagaaacaacag

SEQ ID NO: 24344 - DNA, 80 bp, synthetic construct
  misc_feature 1..80: note = Synthetic: >AdVE4-cand-4770-4849
  source 1..80: mol_type = other DNA
gcggaaagcaggttgcggagcagctgggacttaccgcaaccggtggggccgtagatgaccccgatgaccggctgcaggtg

SEQ ID NO: 24345 - DNA, 80 bp, synthetic construct
  misc_feature 1..80: note = Synthetic: >AdVE4-cand-4890-4969
  source 1..80: mol_type = other DNA
ggcgccacctcgtttatcatctggcgcacgtgcatattctcacgcactagttccgccaggagtcgctctccgcccagtga

SEQ ID NO: 24346 - DNA, 80 bp, synthetic construct
  misc_feature 1..80: note = Synthetic: >AdVE4-cand-4930-5009
  source 1..80: mol_type = other DNA
cacgcactagttccgccaggagtcgctctccgcccagtgaaaggagctcctggagcgaggcgaagttttttagcggctta

SEQ ID NO: 24347 - DNA, 80 bp, synthetic construct
  misc_feature 1..80: note = Synthetic: >AdVE4-cand-5010-5089
  source 1..80: mol_type = other DNA
agcccgtcggccatgggcattttagaaagtgtctgttgcaggagttccaatcggtcccagagctcggtgatgtgctctac

SEQ ID NO: 24348 - DNA, 80 bp, synthetic construct
  misc_feature 1..80: note = Synthetic: >AdVE4-cand-5050-5129
  source 1..80: mol_type = other DNA
ggagttccaatcggtcccagagctcggtgatgtgctctacggcatctcgatccagcagacctcctcgtttcgcgggttgg

SEQ ID NO: 24349 - DNA, 80 bp, synthetic construct
  misc_feature 1..80: note = Synthetic: >AdVE4-cand-5150-5229
  source 1..80: mol_type = other DNA
gccagacgatgggcgtccagcgtggccagggtccggtccttccagggtcgaagcgtccgcttcagggtggtctccgtcac

SEQ ID NO: 24350 - DNA, 80 bp, synthetic construct
  misc_feature 1..80: note = Synthetic: >AdVE4-cand-5250-5329
  source 1..80: mol_type = other DNA
gttgggcgcttgcgagggtgcgcttcaggctcatccggctggtcgagaaccgctcccgatcggcaccctgtgcgtcggcc

SEQ ID NO: 24351 - DNA, 80 bp, synthetic construct
  misc_feature 1..80: note = Synthetic: >AdVE4-cand-5330-5409
  source 1..80: mol_type = other DNA
aggtagcaattgaccataagttcgtagttaagcgcctcggccgcgtggcctttggcgcggagcttacctttggaagtctg

SEQ ID NO: 24352 - DNA, 80 bp, synthetic construct
  misc_feature 1..80: note = Synthetic: >AdVE4-cand-5370-5449
  source 1..80: mol_type = other DNA
ccgcgtggcctttggcgcggagcttacctttggaagtctgcccgcaagcgggacagagcagggacttcagggcgtagagc

SEQ ID NO: 24353 - DNA, 80 bp, synthetic construct
  misc_feature 1..80: note = Synthetic: >AdVE4-cand-5550-5629
  source 1..80: mol_type = other DNA
ggtcaaaaaccagttttccaccgttctttttgatgcgtttcttacctctggtctccatgagctcgtgtccccgctgggta

SEQ ID NO: 24354 - DNA, 80 bp, synthetic construct
  misc_feature 1..80: note = Synthetic: >AdVE4-cand-5570-5649
  source 1..80: mol_type = other DNA
ccgttctttttgatgcgtttcttacctctggtctccatgagctcgtgtccccgctgggtaacaaagaggctgtccgtgtc

SEQ ID NO: 24355 - DNA, 80 bp, synthetic construct
  misc_feature 1..80: note = Synthetic: >AdVE4-cand-5650-5729
  source 1..80: mol_type = other DNA
cccgtagaccgactttatgggccggtcctcgagtgggacgccgcggtcctcgtcgtagaggaaccccgtccactctgaga

SEQ ID NO: 24356 - DNA, 80 bp, synthetic construct
  misc_feature 1..80: note = Synthetic: >AdVE4-cand-5690-5769
  source 1..80: mol_type = other DNA
ccgcggtcctcgtcgtagaggaaccccgtccactctgagacgaaggcccgggtccaggccagcacaaaggaggccacgtg

SEQ ID NO: 24357 - DNA, 80 bp, synthetic construct
  misc_feature 1..80: note = Synthetic: >AdVE4-cand-5810-5889
  source 1..80: mol_type = other DNA
tccagtgtatgcaaacacatgtccccctcgtccacatccaggaaggtgattggtttgtaagtgtaggccacgtgaccagg

SEQ ID NO: 24358 - DNA, 80 bp, synthetic construct
  misc_feature 1..80: note = Synthetic: >AdVE4-cand-5890-5969
  source 1..80: mol_type = other DNA
ggtcccggccgggggggtataaaagggggcgggcccctgctcgtcctcactgtcttccgaatcgctgttcaggagcgtca

SEQ ID NO: 24359 - DNA, 80 bp, synthetic construct
  misc_feature 1..80: note = Synthetic: >AdVE4-cand-5980-6059
  source 1..80: mol_type = other DNA
taggtattccctctcaaaggcgggcatgacctccgcactcaggttgtcagtttctagaaacgaggaggatttgatattga

SEQ ID NO: 24360 - DNA, 80 bp, synthetic construct
  misc_feature 1..80: note = Synthetic: >AdVE4-cand-17790-17869
  source 1..80: mol_type = other DNA
atcaacagccgcctggacccggttccccccgtcggctccgtggagatgccgcaggtggaggaggagctgcctcccctgga

SEQ ID NO: 24361 - DNA, 80 bp, synthetic construct
  misc_feature 1..80: note = Synthetic: >AdVE4-cand-17880-17959
  source 1..80: mol_type = other DNA
gacaagcgtccccgtcccgacgcggaggagacgctgctgacgcacacggacgaaccgcccccgtacgaggaggcggtaaa

SEQ ID NO: 24362 - DNA, 80 bp, synthetic construct
  misc_feature 1..80: note = Synthetic: >AdVE4-cand-17920-17999
  source 1..80: mol_type = other DNA
cgcacacggacgaaccgcccccgtacgaggaggcggtaaaactgggcctgcccaccacgcgtcccatcgcgcctgtagct

SEQ ID NO: 24363 - DNA, 80 bp, synthetic construct
  misc_feature 1..80: note = Synthetic: >AdVE4-cand-18040-18119
  source 1..80: mol_type = other DNA
tggaattgcctcctccgcccactccccgcccctccacagtggctaagcccctgccgccggtggccgtggcccgcgcagga

SEQ ID NO: 24364 - DNA, 80 bp, synthetic construct
  misc_feature 1..80: note = Synthetic: >AdVE4-cand-18130-18209
  source 1..80: mol_type = other DNA
gccctcaggcgaactggcagagcactctgaacagcatcgtgggtctgggagtgcagagtgtgaagcgccgccgctgctat

SEQ ID NO: 24365 - DNA, 80 bp, synthetic construct
  misc_feature 1..80: note = Synthetic: >AdVE4-cand-18200-18279
  source 1..80: mol_type = other DNA
ccgctgctattaaaaaacactgtagcgcttaacttgcttgtctgtgtatatgtgtatgtccgccgccgctgctgtccaga

SEQ ID NO: 24366 - DNA, 80 bp, synthetic construct
  misc_feature 1..80: note = Synthetic: >AdVE4-cand-18280-18359
  source 1..80: mol_type = other DNA
aggaggagtgaagagaaaggcgcgtcgtcgagttgcaagatggccaccccatcgatgctgccccagtgggcgtacatgca

SEQ ID NO: 24367 - DNA, 80 bp, synthetic construct
  misc_feature 1..80: note = Synthetic: >AdVE4-cand-18360-18439
  source 1..80: mol_type = other DNA
catcgccggacaggacgcttcggagtacctcagtccgggtctggtgcagttcgcccgcgccacagacacctacttcagtc

SEQ ID NO: 24368 - DNA, 80 bp, synthetic construct
  misc_feature 1..80: note = Synthetic: >AdVE4-cand-18450-18529
  source 1..80: mol_type = other DNA
gtttagaaaccccacggtggcgcctacccacgatgtgaccaccgaccgcagccagcggctgacgctgcgcttcgtgcccg

SEQ ID NO: 24369 - DNA, 80 bp, synthetic construct
  misc_feature 1..80: note = Synthetic: >AdVE4-cand-18520-18599
  source 1..80: mol_type = other DNA
ttcgtgcccgtggaccgggaggacaacacctactcgtacaaagtgcgctacacgctggccgtgggcgacaaccgtgtgct

SEQ ID NO: 24370 - DNA, 80 bp, synthetic construct
  misc_feature 1..80: note = Synthetic: >AdVE4-cand-18560-18639
  source 1..80: mol_type = other DNA
aagtgcgctacacgctggccgtgggcgacaaccgtgtgctggacatggccagcacctactttgacatccgcggcgtgctg

SEQ ID NO: 24371 - DNA, 80 bp, synthetic construct
  misc_feature 1..80: note = Synthetic: >AdVE4-cand-18670-18749
  source 1..80: mol_type = other DNA
ggcactgcctacaacagtctggctcccaagggagcgcccaatacctgccagtggaaggatgctaacagcaaaatgcatac

SEQ ID NO: 24372 - DNA, 80 bp, synthetic construct
  misc_feature 1..80: note = Synthetic: >AdVE4-cand-18760-18839
  source 1..80: mol_type = other DNA
gctgccatgccaggtgttactgggaaaaagatagaagctgatgggctgcctattagaatagattcaacttctggaactga

SEQ ID NO: 24373 - DNA, 80 bp, synthetic construct
  misc_feature 1..80: note = Synthetic: >AdVE4-cand-18840-18919
  source 1..80: mol_type = other DNA
cacagtaatttatgctgataaaactttccaaccagaaccacaagttggaaatgacagttgggttgacaccaatgatgcag

SEQ ID NO: 24374 - DNA, 80 bp, synthetic construct
  misc_feature 1..80: note = Synthetic: >AdVE4-cand-18920-18999
  source 1..80: mol_type = other DNA
aggaaaaatatggaggcagagctctaaaggacactacaaatatgaaaccctgctatggttcattcgccaagcctaccaac

SEQ ID NO: 24375 - DNA, 80 bp, synthetic construct
  misc_feature 1..80: note = Synthetic: >AdVE4-cand-19000-19079
  source 1..80: mol_type = other DNA
aaagaaggtgggcaggctaacttaaaagattcagaaaccgccgccaccactcctaactatgatatagatctggctttctt

SEQ ID NO: 24376 - DNA, 80 bp, synthetic construct
  misc_feature 1..80: note = Synthetic: >EF177176.1-cand-350-429
  source 1..80: mol_type = other DNA
cagtgtatggagctacactagaaagtataactaaaaaacagttatgtgatttattaataaggtgctacagatgtcaaagt

SEQ ID NO: 24377 - DNA, 80 bp, synthetic construct
  misc_feature 1..80: note = Synthetic: >EF177176.1-cand-430-509
  source 1..80: mol_type = other DNA
ccgttaactccggaggaaaagcaattgcattgtgacagaaaaagacgatttcatctaatagcacatggttggaccgggtc

SEQ ID NO: 24378 - DNA, 80 bp, synthetic construct
  misc_feature 1..80: note = Synthetic: >EF177176.1-cand-520-599
  source 1..80: mol_type = other DNA
tgctggagacaaacatctagagaacctagagaatctacagtataatcatgcatggtaaagtaccaacgctgcaagacgtt

SEQ ID NO: 24379 - DNA, 80 bp, synthetic construct
  misc_feature 1..80: note = Synthetic: >EF177176.1-cand-670-749
  source 1..80: mol_type = other DNA
aggatgaggatgaagtagaccatttgcaggagcggccacagcaagctagacaagctaaacaacatacgtgttacctaata

SEQ ID NO: 24380 - DNA, 80 bp, synthetic construct
  misc_feature 1..80: note = Synthetic: >EF177176.1-cand-740-819
  source 1..80: mol_type = other DNA
ttacctaatacacgtaccttgttgtgagtgtaagtttgtggtgcagttggacattcacagtaccaaagaggacctgcgtg

SEQ ID NO: 24381 - DNA, 80 bp, synthetic construct
  misc_feature 1..80: note = Synthetic: >EF177176.1-cand-920-999
  source 1..80: mol_type = other DNA
gggaagggatgttgtggatggtttgaagtagaggcaattgtagaaaaaaaaacaggagataaaatatcagatgatgaaag

SEQ ID NO: 24382 - DNA, 80 bp, synthetic construct
  misc_feature 1..80: note = Synthetic: >EF177176.1-cand-970-1049
  source 1..80: mol_type = other DNA
aacaggagataaaatatcagatgatgaaagtgacgaggaggatgaaatagatacagatttagatggatttatagacaatt

SEQ ID NO: 24383 - DNA, 80 bp, synthetic construct
  misc_feature 1..80: note = Synthetic: >EF177176.1-cand-1050-1129
  source 1..80: mol_type = other DNA
catatatagaaaatatacaggcagacagagagacagctcaacaattgttgcaagtacaaacagcacatgcagataaacag

SEQ ID NO: 24384 - DNA, 80 bp, synthetic construct
  misc_feature 1..80: note = Synthetic: >EF177176.1-cand-1130-1209
  source 1..80: mol_type = other DNA
acgttgcaaaaactaaaacgaaagtatatagctagtccattaagtgatattagtaatcagcaaactgtgtgccgggaagg

SEQ ID NO: 24385 - DNA, 80 bp, synthetic construct
  misc_feature 1..80: note = Synthetic: >EF177176.1-cand-1210-1289
  source 1..80: mol_type = other DNA
agtaaaacgaaggcttattttatcagacctacaagacagcgggtatggcaatacattggaaactctggaaacacaagaac

SEQ ID NO: 24386 - DNA, 80 bp, synthetic construct
  misc_feature 1..80: note = Synthetic: >EF177176.1-cand-1290-1369
  source 1..80: mol_type = other DNA
aggtagatgaagaggtacagggacgtgggtgcgggaatacacaaaatggaggctcacaaaacagtacctatagtaacaat

SEQ ID NO: 24387 - DNA, 80 bp, synthetic construct
  misc_feature 1..80: note = Synthetic: >EF177176.1-cand-1370-1449
  source 1..80: mol_type = other DNA
agtgaggactctgtaatacatatggatattaatagaaacaatgaaacgccaacacaacaattgcaggacttgtttaaaag

SEQ ID NO: 24388 - DNA, 80 bp, synthetic construct
  misc_feature 1..80: note = Synthetic: >EF177176.1-cand-1450-1529
  source 1..80: mol_type = other DNA
tagcaatttacaaggtaaattaaattataaatttaaagaagtgtatggtattccattttcagaattggtgcgtacgttta

SEQ ID NO: 24389 - DNA, 80 bp, synthetic construct
  misc_feature 1..80: note = Synthetic: >EF177176.1-cand-1520-1599
  source 1..80: mol_type = other DNA
cgtacgtttaaaagtgatagtacatgttgcaatgattggatatgtgctatatttggtgttaatgaaacattagccgaggc

SEQ ID NO: 24390 - DNA, 80 bp, synthetic construct
  misc_feature 1..80: note = Synthetic: >EF177176.1-cand-1580-1659
  source 1..80: mol_type = other DNA
aatgaaacattagccgaggcactaaaaactataataaaaccacactgtatgtattatcatatgcaatgtttaacatgtac

SEQ ID NO: 24391 - DNA, 80 bp, synthetic construct
  misc_feature 1..80: note = Synthetic: >EF177176.1-cand-1670-1749
  source 1..80: mol_type = other DNA
atagtaatgatgctaattagatatacatgtggcaaaaacagaaaaacaattgcaaaagcattaagctcaatattaaatgt

SEQ ID NO: 24392 - DNA, 80 bp, synthetic construct
  misc_feature 1..80: note = Synthetic: >EVB81-cand-3670-3749
  source 1..80: mol_type = other DNA
tcggacttgtaactatgggaggtgaaggcgttgtcggctttgctgatgtgcgtgacctcttatggttggaagatgacgcc

SEQ ID NO: 24393 - DNA, 80 bp, synthetic construct
  misc_feature 1..80: note = Synthetic: >EVB81-cand-3750-3829
  source 1..80: mol_type = other DNA
atggagcaaggcgtcagggattacgtggaacagcttggaaatgcttttggatctggttttaccagccagatttgtgaaca

SEQ ID NO: 24394 - DNA, 80 bp, synthetic construct
  misc_feature 1..80: note = Synthetic: >EVB81-cand-3830-3909
  source 1..80: mol_type = other DNA
agtcaacctcctcaaggaatcacttatcggacaggactccattttagaaaaatcactcaaagccttggtcaagatcatat

SEQ ID NO: 24395 - DNA, 80 bp, synthetic construct
  misc_feature 1..80: note = Synthetic: >EVB81-cand-3910-3989
  source 1..80: mol_type = other DNA
cagcgttggttattgtggtaaggaatcatgacgatctgatcacagtgactgccactcttgccttaattggttgcacatcg

SEQ ID NO: 24396 - DNA, 80 bp, synthetic construct
  misc_feature 1..80: note = Synthetic: >EVB81-cand-3990-4069
  source 1..80: mol_type = other DNA
tcaccatggcgatggctaaaacaaaaagtatctcagtattatgggattcccatggccgagagacaaaacaatgggtggct

SEQ ID NO: 24397 - DNA, 80 bp, synthetic construct
  misc_feature 1..80: note = Synthetic: >EVB81-cand-4070-4149
  source 1..80: mol_type = other DNA
caagaagtttacggagatgaccaacgcctgcaaaggcatggagtggatagctgttaaaatccaaaagttcattgagtggt

SEQ ID NO: 24398 - DNA, 80 bp, synthetic construct
  misc_feature 1..80: note = Synthetic: >EVB81-cand-4150-4229
  source 1..80: mol_type = other DNA
tgaaagtgaaaatcctgccagaggtcaaagaaaagcacgagtttctcaccagactgaaacaactacccttattggagagt

SEQ ID NO: 24399 - DNA, 80 bp, synthetic construct
  misc_feature 1..80: note = Synthetic: >EVB81-cand-4230-4309
  source 1..80: mol_type = other DNA
cagattgcaaccatcgagcaaagtgcaccctcacaaagtgaccaagaacaactattctccaatgtgcagtactttgcaca

SEQ ID NO: 24400 - DNA, 80 bp, synthetic construct
  misc_feature 1..80: note = Synthetic: >EVB81-cand-4310-4389
  source 1..80: mol_type = other DNA
ttactgcaggaaatacgcgcccctgtatgctgctgaagcaaagagagtgttttcccttgaaaagaaaatgagcaactata

SEQ ID NO: 24401 - DNA, 80 bp, synthetic construct
  misc_feature 1..80: note = Synthetic: >EVB81-cand-4470-4549
  source 1..80: mol_type = other DNA
accaacttgatcggacgttcacttgcagaaaagctcaacagttcagtgtattcactaccaccggatccagatcatttcga

SEQ ID NO: 24402 - DNA, 80 bp, synthetic construct
  misc_feature 1..80: note = Synthetic: >EVB81-cand-4630-4709
  source 1..80: mol_type = other DNA
agatggtctccagtgttgacttcgtcccaccaatggcagcacttgaagaaaaaggcattctcttcacatcaccatttgtt

SEQ ID NO: 24403 - DNA, 80 bp, synthetic construct
  misc_feature 1..80: note = Synthetic: >EVB81-cand-4710-4789
  source 1..80: mol_type = other DNA
ctcgcctctaccaatgcaggatccatcaatgctcccactgtgtcggacagcagagccttggccagaaggttccactttga

SEQ ID NO: 24404 - DNA, 80 bp, synthetic construct
  misc_feature 1..80: note = Synthetic: >EVB81-cand-4790-4869
  source 1..80: mol_type = other DNA
catgaacattgaagtcatctcgatgtacagccagagtggcaagattaacatgccaatgtcagtgaagacttgtgatgagg

SEQ ID NO: 24405 - DNA, 80 bp, synthetic construct
  misc_feature 1..80: note = Synthetic: >EVB81-cand-4870-4949
  source 1..80: mol_type = other DNA
agtgttgcccagtcaactttaagagatgttgcccgctagtgtgtggtaaagctattcagttcattgacagaaaaacacag

SEQ ID NO: 24406 - DNA, 80 bp, synthetic construct
  misc_feature 1..80: note = Synthetic: >EVB81-cand-4930-5009
  source 1..80: mol_type = other DNA
tcattgacagaaaaacacaggtgaggtactcactggatatgcttgtaactgagatgttcagagaatacaatcacaggcat

SEQ ID NO: 24407 - DNA, 80 bp, synthetic construct
  misc_feature 1..80: note = Synthetic: >EVB81-cand-5030-5109
  source 1..80: mol_type = other DNA
ggcactcttccaaggcccgcccgtgtacagagagatcaaaattagtgttactccagaaaccccccccccaccagcaatag

SEQ ID NO: 24408 - DNA, 80 bp, synthetic construct
  misc_feature 1..80: note = Synthetic: >EVB86-cand-7240-7319
  source 1..80: mol_type = other DNA
gtttgaccttacctgcgttttcgaccttacgcaggagatggctggactccttttaaattagagtacaatttgatataatt

SEQ ID NO: 24409 - DNA, 80 bp, synthetic construct
  misc_feature 1..80: note = Synthetic: >EVB86-cand-7290-7369
  source 1..80: mol_type = other DNA
ttttaaattagagtacaatttgatataattcaattggcttaaccctaccacacccaccgaactagataacggtgtggtgg

SEQ ID NO: 24410 - DNA, 80 bp, synthetic construct
  misc_feature 1..80: note = Synthetic: >EVB87-cand-80-159
  source 1..80: mol_type = other DNA
ttatacacccttcccctactgtgacttagaagcaaaacaatgatgaccaatagcaagcgcagcactccagctgtgtttcg

SEQ ID NO: 24411 - DNA, 80 bp, synthetic construct
  misc_feature 1..80: note = Synthetic: >EVB87-cand-160-239
  source 1..80: mol_type = other DNA
gtcaagcacttctgtttccccggactgagtatcaataggccactcacgtggccgaaggagaaaacgtccgttacccggcc

SEQ ID NO: 24412 - DNA, 80 bp, synthetic construct
  misc_feature 1..80: note = Synthetic: >EVB87-cand-240-319
  source 1..80: mol_type = other DNA
aattacttcgagaaacccagtaacaccatagaggttgcgcagcgtttcgctccgcactcccccagtgtagatcaggtcga

SEQ ID NO: 24413 - DNA, 80 bp, synthetic construct
  misc_feature 1..80: note = Synthetic: >EVB87-cand-300-379
  source 1..80: mol_type = other DNA
cccagtgtagatcaggtcgatgagtcaccgcgttccccacgggcgaccgtggcggtggctgcgttggcggcctgcccatg

SEQ ID NO: 24414 - DNA, 80 bp, synthetic construct
  misc_feature 1..80: note = Synthetic: >EVB87-cand-630-709
  source 1..80: mol_type = other DNA
gccatccggtgtctaatagagcaattatattcctgtttgttggttttataccactgaatatcacagtttacaagaccctc

SEQ ID NO: 24415 - DNA, 80 bp, synthetic construct
  misc_feature 1..80: note = Synthetic: >EVB87-cand-710-789
  source 1..80: mol_type = other DNA
aattacatcctacgtttaaacaagacaaaatgggagctcaagtatcaacacagaagacaggagctcacgaaaccagcctc

SEQ ID NO: 24416 - DNA, 80 bp, synthetic construct
  misc_feature 1..80: note = Synthetic: >EVB87-cand-790-869
  source 1..80: mol_type = other DNA
agtgccagcggcacctccacaatccactacaccaatataaacttctataaggatgcagcttcaaactcactaagcaggca

SEQ ID NO: 24417 - DNA, 80 bp, synthetic construct
  misc_feature 1..80: note = Synthetic: >EVB87-cand-870-949
  source 1..80: mol_type = other DNA
ggaccttaggcaggacccctctaagtttaccgaaccaataaaggacatcatgatcaagaccttaccagccctcaactcac

SEQ ID NO: 24418 - DNA, 80 bp, synthetic construct
  misc_feature 1..80: note = Synthetic: >EVB87-cand-950-1029
  source 1..80: mol_type = other DNA
cgtctgcagaagagtgtggttatagcgatcgtgtccggtctatcactctgggaaattccacaattacaacccaggagtgt

SEQ ID NO: 24419 - DNA, 80 bp, synthetic construct
  misc_feature 1..80: note = Synthetic: >EVB87-cand-1030-1109
  source 1..80: mol_type = other DNA
gcgaacgtggtgatggcctatggagaatggccgtcatacctcaaggataatgaagctaccgcagaagataagccaacaca

SEQ ID NO: 24420 - DNA, 80 bp, synthetic construct
  misc_feature 1..80: note = Synthetic: >EVB87-cand-1110-1189
  source 1..80: mol_type = other DNA
accagacgtggcaacatgtagattctatacactagagtcagtaaactggcagaagggatccgctgggtggtggtggaaat

SEQ ID NO: 24421 - DNA, 80 bp, synthetic construct
  misc_feature 1..80: note = Synthetic: >EVB87-cand-1190-1269
  source 1..80: mol_type = other DNA
ttccgagcgcgttacgcgacatgggtttgtttgggcaaaacatgctataccattacttgggaagaacgggctacactata

SEQ ID NO: 24422 - DNA, 80 bp, synthetic construct
  misc_feature 1..80: note = Synthetic: >EVB87-cand-1260-1339
  source 1..80: mol_type = other DNA
ctacactatacacgtccaatgcaacgcctcaaagttccatcagggatgtttattggttgtgtgtgtacccgaagcagaaa

SEQ ID NO: 24423 - DNA, 80 bp, synthetic construct
  misc_feature 1..80: note = Synthetic: >EVB87-cand-1350-1429
  source 1..80: mol_type = other DNA
caaggtggataggaccgtagtggaagaaaccctatcaaagggtgaggtgcctattgaattcaccaatcagccaacagtgg

SEQ ID NO: 24424 - DNA, 80 bp, synthetic construct
  misc_feature 1..80: note = Synthetic: >EVD68-cand-6870-6949
  source 1..80: mol_type = other DNA
ttaaaatgatagcatacggagatgatgttattgctagttacccacacaaaattgatccaggtttattagcagaagcaggc

SEQ ID NO: 24425 - DNA, 80 bp, synthetic construct
  misc_feature 1..80: note = Synthetic: >EVD68-cand-6950-7029
  source 1..80: mol_type = other DNA
aagcactatggattggtaatgacaccagcggacaaaggtaccagtttcattgacactaattgggaaaatgtaactttttt

SEQ ID NO: 24426 - DNA, 80 bp, synthetic construct
  misc_feature 1..80: note = Synthetic: >EVD68-cand-7030-7109
  source 1..80: mol_type = other DNA
gaaaagatacttcagagcagatgatcaatacccctttcttatacatccagtgatgccaatgaaagagatacatgaatcta

SEQ ID NO: 24427 - DNA, 80 bp, synthetic construct
  misc_feature 1..80: note = Synthetic: >EVD68-cand-7110-7189
  source 1..80: mol_type = other DNA
ttagatggactaaagatcccagaaacacacaagatcatgttagatccttgtgttacctggcgtggcataatggagaagag

SEQ ID NO: 24428 - DNA, 80 bp, synthetic construct
  misc_feature 1..80: note = Synthetic: >EVD68-cand-7150-7229
  source 1..80: mol_type = other DNA
tagatccttgtgttacctggcgtggcataatggagaagaggcttacaatgaattttgtagaaaaattagaagtgtgcccg

SEQ ID NO: 24429 - DNA, 80 bp, synthetic construct
  misc_feature 1..80: note = Synthetic: >EVD68-cand-7270-7349
  source 1..80: mol_type = other DNA
acggaaatggttagattcgttttagataactctaattgaaacccaagttacagttactttcacttagaggtaaattttgg

SEQ ID NO: 24430 - DNA, 80 bp, synthetic construct
  misc_feature 1..80: note = Synthetic: >EVD70-cand-1290-1369
  source 1..80: mol_type = other DNA
actcttctaatagtggctatcccagaacaccaaattggaaagaaaggaacaggtacgtcagcaagctttgctgaagtcat

SEQ ID NO: 24431 - DNA, 80 bp, synthetic construct
  misc_feature 1..80: note = Synthetic: >EVD70-cand-3270-3349
  source 1..80: mol_type = other DNA
tccaataggagtaccataaagacaatgcccaacgatatcaatttgacaacagccggtcccggttatggaggagcttttgt

SEQ ID NO: 24432 - DNA, 80 bp, synthetic construct
  misc_feature 1..80: note = Synthetic: >EVD70-cand-3650-3729
  source 1..80: mol_type = other DNA
cctcttagtctgctcacatggagtgataggactcgtcaccgcaggcggtgagggaatagttgctttcacagacattagaa

SEQ ID NO: 24433 - DNA, 80 bp, synthetic construct
  misc_feature 1..80: note = Synthetic: >EVD70-cand-4520-4599
  source 1..80: mol_type = other DNA
ttcttactcactcccacctgatccaaaatattttgatgggtataaacaacagacagtggtcctgatggatgacttaatgc

SEQ ID NO: 24434 - DNA, 80 bp, synthetic construct
  misc_feature 1..80: note = Synthetic: >EVD70-cand-5200-5279
  source 1..80: mol_type = other DNA
ctgaactggtggtggagaagcacattagtagagcctttatagcgctacaggcaataaccacttttgtatcaattgctggg

SEQ ID NO: 24435 - DNA, 80 bp, synthetic construct
  misc_feature 1..80: note = Synthetic: >EVD70-cand-5370-5449
  source 1..80: mol_type = other DNA
accgccaaagtgcaaggaccttctcttgatttcgcacaagccataatgaggaagaatacagtaatagctaggactagcaa

SEQ ID NO: 24436 - DNA, 80 bp, synthetic construct
  misc_feature 1..80: note = Synthetic: >EVD70-cand-5680-5759
  source 1..80: mol_type = other DNA
atgcaatcctcagcgtaaacactagcaagttcccaaatatgtatataccagtaggacaaacactaaattatggtttcctt

SEQ ID NO: 24437 - DNA, 80 bp, synthetic construct
  misc_feature 1..80: note = Synthetic: >HCV.A14-cand-5240-5319
  source 1..80: mol_type = other DNA
cagagcagtgctggtgatgcaatccattgccactgtagtagcagttgtatctctggtgtatgtcatctacaaactatttg

SEQ ID NO: 24438 - DNA, 80 bp, synthetic construct
  misc_feature 1..80: note = Synthetic: >HCV.A14-cand-5320-5399
  source 1..80: mol_type = other DNA
ctggattccaaggtgcatactctggagcacccaagcaaacgctcaagaaacctgtgctcagcacagcaacagtgcaaggc

SEQ ID NO: 24439 - DNA, 80 bp, synthetic construct
  misc_feature 1..80: note = Synthetic: >HCV.A14-cand-5410-5489
  source 1..80: mol_type = other DNA
actttgccttgtcactactgagaaggaatatcagacaagtccaaacagaccaagggcacttcaccatgcttggagtcaga

SEQ ID NO: 24440 - DNA, 80 bp, synthetic construct
  misc_feature 1..80: note = Synthetic: >HCV.A14-cand-5490-5569
  source 1..80: mol_type = other DNA
gatcgcctagctatcctgccgcgacactcacaaccaggaaaaacaatctgggttgaacacaagcttgtgaacgttctgga

SEQ ID NO: 24441 - DNA, 80 bp, synthetic construct
  misc_feature 1..80: note = Synthetic: >HCV.A14-cand-5570-5649
  source 1..80: mol_type = other DNA
cgctgttgaattagtggatgaacaaggagtcaatttggaacttaccctagtcactctagacaccaatgagaagttcagag

SEQ ID NO: 24442 - DNA, 80 bp, synthetic construct
  misc_feature 1..80: note = Synthetic: >HCV.A14-cand-5650-5729
  source 1..80: mol_type = other DNA
atatcaccaaattcattccagaaaacatcagtgccgctagtgacgccacactagtgatcaacacagaacacatgccatca

SEQ ID NO: 24443 - DNA, 80 bp, synthetic construct
  misc_feature 1..80: note = Synthetic: >HCV.A14-cand-5730-5809
  source 1..80: mol_type = other DNA
atgtttgtgccagtaggtgacgtcgtgcagtacggatttctaaacctcagtggaaaaccaacccacagcactatgatgta

SEQ ID NO: 24444 - DNA, 80 bp, synthetic construct
  misc_feature 1..80: note = Synthetic: >HCV.A14-cand-5810-5889
  source 1..80: mol_type = other DNA
caatttccccacaaaggcaggacagtgtggaggagtggtaacatcagttgggaaaatcattggcatccacattggaggca

SEQ ID NO: 24445 - DNA, 80 bp, synthetic construct
  misc_feature 1..80: note = Synthetic: >HCV.A14-cand-5890-5969
  source 1..80: mol_type = other DNA
acgggaggcaaggattctgtgctggactcaagagaagttactttgcaagtgagcaaggtgaaatccagtggatcaagccc

SEQ ID NO: 24446 - DNA, 80 bp, synthetic construct
  misc_feature 1..80: note = Synthetic: >HCV.A14-cand-5970-6049
  source 1..80: mol_type = other DNA
aacaaagaaactggaaggctaaacatcaatgggccaactcgcactaaactcgagcccagtgtgttccatgacgtctttga

SEQ ID NO: 24447 - DNA, 80 bp, synthetic construct
  misc_feature 1..80: note = Synthetic: >HCV.A14-cand-6050-6129
  source 1..80: mol_type = other DNA
gggcaacaaagaaccagcagtcttaaaaagtaaagatcccagcctcgaggtggactttgaacaggcactgttctccaagt

SEQ ID NO: 24448 - DNA, 80 bp, synthetic construct
  misc_feature 1..80: note = Synthetic: >HCV.A14-cand-6130-6209
  source 1..80: mol_type = other DNA
atgtgggcaacatactacacgaacctgatgagtacgtgaaacaggcagccctccactatgcaaaccaactgaagcagcta

SEQ ID NO: 24449 - DNA, 80 bp, synthetic construct
  misc_feature 1..80: note = Synthetic: >HCV.A14-cand-6210-6289
  source 1..80: mol_type = other DNA
gacatagacaccaccaaaatgagcatggaggaagcgtgctacggcacagagaaccttgaggccattgacctccacactag

SEQ ID NO: 24450 - DNA, 80 bp, synthetic construct
  misc_feature 1..80: note = Synthetic: >HCV.A14-cand-6290-6369
  source 1..80: mol_type = other DNA
cgcaggttacccatacagtgctctgggaataaagaagagagatatcctagatcctaccaccagagacgtgactaaaatga

SEQ ID NO: 24451 - DNA, 80 bp, synthetic construct
  misc_feature 1..80: note = Synthetic: >HCV.A14-cand-6370-6449
  source 1..80: mol_type = other DNA
agttttacatggacaagtatggcctggacctaccttactccacctatgtgaaagatgagctcagctccatggacaagatc

SEQ ID NO: 24452 - DNA, 80 bp, synthetic construct
  misc_feature 1..80: note = Synthetic: >HCV.A14-cand-6450-6529
  source 1..80: mol_type = other DNA
aagaaagggaaatctcgcctgatagaagccagcagcctgaatgactcagtctacctcagaatgacttttgggcacctcta

SEQ ID NO: 24453 - DNA, 80 bp, synthetic construct
  misc_feature 1..80: note = Synthetic: >HCV.A20-cand-1060-1139
  source 1..80: mol_type = other DNA
tggacaatggccaacttatttgaatgccaaagatgccaaccctgtagaccaaccaacagaaccagacgtgtcagcgtgtc

SEQ ID NO: 24454 - DNA, 80 bp, synthetic construct
  misc_feature 1..80: note = Synthetic: >HCV.A20-cand-1140-1219
  source 1..80: mol_type = other DNA
gattttacacactgcaatcagtggagtggaagactgagtcaaagggatggtggtggaaattaccagatgctctaaaagac

SEQ ID NO: 24455 - DNA, 80 bp, synthetic construct
  misc_feature 1..80: note = Synthetic: >HCV.A20-cand-1230-1309
  source 1..80: mol_type = other DNA
ttggtcaaaacatgtactaccactatctcggaagatcagggtacactgtacacgtgcagtgtaatgcctcaaaattccac

SEQ ID NO: 24456 - DNA, 80 bp, synthetic construct
  misc_feature 1..80: note = Synthetic: >HCV.A20-cand-1270-1349
  source 1..80: mol_type = other DNA
gtacactgtacacgtgcagtgtaatgcctcaaaattccaccaaggagcacttggagtgtttgcagtgcccgaatattgtt

SEQ ID NO: 24457 - DNA, 80 bp, synthetic construct
  misc_feature 1..80: note = Synthetic: >HCV.A20-cand-1420-1499
  source 1..80: mol_type = other DNA
agtgtttgtggacacattcaccgcagcaacacaggcaacaaggaagttctgccccattgattatttgtttgggtgtggtg

SEQ ID NO: 24458 - DNA, 80 bp, synthetic construct
  misc_feature 1..80: note = Synthetic: >HCV.A20-cand-1460-1539
  source 1..80: mol_type = other DNA
aggaagttctgccccattgattatttgtttgggtgtggtgtgttgacaggtaacgcatttgtgttccctcatcaaattat

SEQ ID NO: 24459 - DNA, 80 bp, synthetic construct
  misc_feature 1..80: note = Synthetic: >HCV.A20-cand-1530-1609
  source 1..80: mol_type = other DNA
atcaaattatcaatttgagaaccaacaactcagctaccttagtgctgccctatgtgaacagcctggccattgattgcatg

SEQ ID NO: 24460 - DNA, 80 bp, synthetic construct
  misc_feature 1..80: note = Synthetic: >HCV.A20-cand-1630-1709
  source 1..80: mol_type = other DNA
cctcgcaataataccactaagtaagttacaattcccagacacttccagcacagagattccaattacagtcacaatagcac

SEQ ID NO: 24461 - DNA, 80 bp, synthetic construct
  misc_feature 1..80: note = Synthetic: >HCV.A20-cand-1690-1769
  source 1..80: mol_type = other DNA
aattacagtcacaatagcaccaatgtgttgtgagtttaatggcaacctgagaaacatcactgttccctcaactcaaggac

SEQ ID NO: 24462 - DNA, 80 bp, synthetic construct
  misc_feature 1..80: note = Synthetic: >HCV.A20-cand-1770-1849
  source 1..80: mol_type = other DNA
taccagtaatgaacacaccagggagcaatcagtacctaacatcagacaacttccaatccccgtgtgccctgcccgagttt

SEQ ID NO: 24463 - DNA, 80 bp, synthetic construct
  misc_feature 1..80: note = Synthetic: >HCV.A20-cand-1850-1929
  source 1..80: mol_type = other DNA
gatgtcacacaagccatcaacataccaggtgaagtgaagaacatcatggagattgctgaaattgacacaatgataccact

SEQ ID NO: 24464 - DNA, 80 bp, synthetic construct
  misc_feature 1..80: note = Synthetic: >HCV.A20-cand-1930-2009
  source 1..80: mol_type = other DNA
gaacttgagtgatgacaggaagaattccatggacatgtacagggtaccagtcaccaccagtgcaaacctggataacccca

SEQ ID NO: 24465 - DNA, 80 bp, synthetic construct
  misc_feature 1..80: note = Synthetic: >HCV.A20-cand-2010-2089
  source 1..80: mol_type = other DNA
tcttgtgtttgtctctatcaccagcctcagatgaaagactgtcttacaccatgctgggagaaattctgaattactacaca

SEQ ID NO: 24466 - DNA, 80 bp, synthetic construct
  misc_feature 1..80: note = Synthetic: >HCV.A20-cand-2090-2169
  source 1..80: mol_type = other DNA
cactgggcaggttcaatcaagtacactttcctcttttgtggatccatgatggcaactaggcaaactgctggtagcgtacg

SEQ ID NO: 24467 - DNA, 80 bp, synthetic construct
  misc_feature 1..80: note = Synthetic: >HCV.A20-cand-2170-2249
  source 1..80: mol_type = other DNA
ccccaccaggtgccaaaccaccaagaaccagaaaggaagccatgctgggcacacatgtgatctgggatgtgggactgcag

SEQ ID NO: 24468 - DNA, 80 bp, synthetic construct
  misc_feature 1..80: note = Synthetic: >HCV.A20-cand-2240-2319
  source 1..80: mol_type = other DNA
gggactgcagtcatcatgtacaatggtggtcccctggatcagcaacactgcatacaggcgcactgtgaaggatgacttca

SEQ ID NO: 24469 - DNA, 80 bp, synthetic construct
  misc_feature 1..80: note = Synthetic: >HCV.B1-cand-940-1019
  source 1..80: mol_type = other DNA
ctcaccctctgctgaggagtgcggttacagtgacagggtgcgttccatcaccctaggtaattccactattaccactcaag

SEQ ID NO: 24470 - DNA, 80 bp, synthetic construct
  misc_feature 1..80: note = Synthetic: >HCV.B1-cand-1020-1099
  source 1..80: mol_type = other DNA
agtgtgccaacgtggttgttgggtatggagtgtggccagaatacttgaaagacaatgaagccacagcagaggaccaaccc

SEQ ID NO: 24471 - DNA, 80 bp, synthetic construct
  misc_feature 1..80: note = Synthetic: >HCV.B1-cand-1100-1179
  source 1..80: mol_type = other DNA
acacaacctgacgtggccacatgtcgtttctacactttggaatcggtgcagtggatgaaaaattcagccgggtggtggtg

SEQ ID NO: 24472 - DNA, 80 bp, synthetic construct
  misc_feature 1..80: note = Synthetic: >HCV.B1-cand-1210-1289
  source 1..80: mol_type = other DNA
gttgtttggccaaaacatgcagtaccactacctgggaaggacagggtacactatacacgtgcaatgcaatgcctcaaaat

SEQ ID NO: 24473 - DNA, 80 bp, synthetic construct
  misc_feature 1..80: note = Synthetic: >HCV.B1-cand-1250-1329
  source 1..80: mol_type = other DNA
acagggtacactatacacgtgcaatgcaatgcctcaaaattccatcaaggatgcctgcttgtggtgtgtgtaccggaggc

SEQ ID NO: 24474 - DNA, 80 bp, synthetic construct
  misc_feature 1..80: note = Synthetic: >HCV.B1-cand-1340-1419
  source 1..80: mol_type = other DNA
tgctcaaacctgaacaacacgccagaatttgctgagctgtctggaggggatagtgccagaatgttcactgacacccaagt

SEQ ID NO: 24475 - DNA, 80 bp, synthetic construct
  misc_feature 1..80: note = Synthetic: >HCV.B1-cand-1430-1509
  source 1..80: mol_type = other DNA
aatgcaaagaaagtgcagacagcagtgtggaatgccggaatgggcgttggcgttggtaacctcaccatattcccacacca

SEQ ID NO: 24476 - DNA, 80 bp, synthetic construct
  misc_feature 1..80: note = Synthetic: >HCV.B1-cand-1500-1579
  source 1..80: mol_type = other DNA
tcccacaccaatggatcaacctgaggacaaacaacagcgcaaccctagtgatgccttacataaacagtgttcccatggat

SEQ ID NO: 24477 - DNA, 80 bp, synthetic construct
  misc_feature 1..80: note = Synthetic: >HCV.B1-cand-1580-1659
  source 1..80: mol_type = other DNA
aacatgtttagacacaataacttgacactgatgatcattccattcgtaccgcttaactacagtgaaggatcctcaccata

SEQ ID NO: 24478 - DNA, 80 bp, synthetic construct
  misc_feature 1..80: note = Synthetic: >HCV.B1-cand-1660-1739
  source 1..80: mol_type = other DNA
cgtgcccatcacagtcaccatcgcgcctatgtgtgcagagtacaatggtcttcggctggccagcaaccagggcttgcccg

SEQ ID NO: 24479 - DNA, 80 bp, synthetic construct
  misc_feature 1..80: note = Synthetic: >HCV.B1-cand-1760-1839
  source 1..80: mol_type = other DNA
acacaattcctgacttcggatgatttccagtcaccatcggcaatgccacaatttgatgtcactccagagatgcagatacc

SEQ ID NO: 24480 - DNA, 80 bp, synthetic construct
  misc_feature 1..80: note = Synthetic: >HCV.B1-cand-1810-1889
  source 1..80: mol_type = other DNA
atttgatgtcactccagagatgcagataccgggacgcgtaaacaatttgatggagatagccgaggtggactcagtggtgc

SEQ ID NO: 24481 - DNA, 80 bp, synthetic construct
  misc_feature 1..80: note = Synthetic: >HCV.B1-cand-1890-1969
  source 1..80: mol_type = other DNA
ctgtgaacaacacagacgacaacgtgagtagtctcaaagcctaccagatcccagtacagtctaacagtgacaatggtaag

SEQ ID NO: 24482 - DNA, 80 bp, synthetic construct
  misc_feature 1..80: note = Synthetic: >HCV.B1-cand-2000-2079
  source 1..80: mol_type = other DNA
gccaacaatgtactgaatagaaccctgttaggagaaatcctaaactattacacccactggagtggcagcataaaactcac

SEQ ID NO: 24483 - DNA, 80 bp, synthetic construct
  misc_feature 1..80: note = Synthetic: >HCV.B1-cand-2040-2119
  source 1..80: mol_type = other DNA
taaactattacacccactggagtggcagcataaaactcacattcatgttttgtgggtctgcaatggccactggcaaattc

SEQ ID NO: 24484 - DNA, 80 bp, synthetic construct
  misc_feature 1..80: note = Synthetic: >HCV.B1-cand-2150-2229
  source 1..80: mol_type = other DNA
gttccaaagaacagaaaagatgcaatgctgggcacccacgtcatatgggatgttgggctgcaatcaagctgcgtgctgtg

SEQ ID NO: 24485 - DNA, 80 bp, synthetic construct
  misc_feature 1..80: note = Synthetic: >HCV.B1-cand-3500-3579
  source 1..80: mol_type = other DNA
acttttgagggaccaggtcttgtggaagtccaagaaagtgaatactatccaaagagataccaatcacacgtgcttctcgc

SEQ ID NO: 24486 - DNA, 80 bp, synthetic construct
  misc_feature 1..80: note = Synthetic: >HCV.B1-cand-3580-3659
  source 1..80: mol_type = other DNA
cgcagggttctcagaaccaggcgattgtggtggaatcctgaggtgtgagcatggtgttatcggcatcgtaactatgggag

SEQ ID NO: 24487 - DNA, 80 bp, synthetic construct
  misc_feature 1..80: note = Synthetic: >HCV.B1-cand-3660-3739
  source 1..80: mol_type = other DNA
gtgagggcgttgttggctttgcagacgtgcgcgacctcctatggttggaagatgatgcaatggagcagggagtgagggac

SEQ ID NO: 24488 - DNA, 80 bp, synthetic construct
  misc_feature 1..80: note = Synthetic: >HCV.B1-cand-3740-3819
  source 1..80: mol_type = other DNA
tacgtggaacagcttggaaatgcctttggttcaggtttcaccaaccagatctgcgagcaggtcaacctcctaaaagaatc

SEQ ID NO: 24489 - DNA, 80 bp, synthetic construct
  misc_feature 1..80: note = Synthetic: >HCV.B1-cand-3820-3899
  source 1..80: mol_type = other DNA
actagtaggtcaagattccatcttggagaaatcactcaaagcattggtgaaaattatatcagctctggtgattgtggtga

SEQ ID NO: 24490 - DNA, 80 bp, synthetic construct
  misc_feature 1..80: note = Synthetic: >HCV.B1-cand-3900-3979
  source 1..80: mol_type = other DNA
gaaaccacgatgatttgataacagtaaccgccaccctagccctgatcggctgcacctcctccccatggcggtggctaaag

SEQ ID NO: 24491 - DNA, 80 bp, synthetic construct
  misc_feature 1..80: note = Synthetic: >HCV.B1-cand-3980-4059
  source 1..80: mol_type = other DNA
caaaaagtgtcccaatattatgggattcccatggccgagagccaaaacaacgggtggcttaagaagttcacagaaatgac

SEQ ID NO: 24492 - DNA, 80 bp, synthetic construct
  misc_feature 1..80: note = Synthetic: >HCV.B1-cand-4060-4139
  source 1..80: mol_type = other DNA
caatgcctgcaaaggaatggagtggattgccatcaagattcaaaaatttatagaatggctcaaagtcaagatcttgccag

SEQ ID NO: 24493 - DNA, 80 bp, synthetic construct
  misc_feature 1..80: note = Synthetic: >HCV.B1-cand-4140-4219
  source 1..80: mol_type = other DNA
aagtcaaagaaaaacacgagttcctcaacaggcttaaacaactcccccttctggaaagccaaattgccaccattgagcag

SEQ ID NO: 24494 - DNA, 80 bp, synthetic construct
  misc_feature 1..80: note = Synthetic: >HCV.B1-cand-4450-4529
  source 1..80: mol_type = other DNA
tggacgctcacttgcagaaaagctcaacagctcagtgtactcactaccaccagacccagaccactttgacggctacaaac

SEQ ID NO: 24495 - DNA, 80 bp, synthetic construct
  misc_feature 1..80: note = Synthetic: >HCV.B1-cand-4530-4609
  source 1..80: mol_type = other DNA
aacaggccgtcgtgatcatggatgacctgtgccagaacccagatggtaaagatgtctccttgttctgtcagatggtttct

SEQ ID NO: 24496 - DNA, 80 bp, synthetic construct
  misc_feature 1..80: note = Synthetic: >HCV.B1-cand-4610-4689
  source 1..80: mol_type = other DNA
agtgtagactttgtgccaccaatggcagcactagaagagaaaggcattttgttcacatctccgttcgttctggcttcaac

SEQ ID NO: 24497 - DNA, 80 bp, synthetic construct
  misc_feature 1..80: note = Synthetic: >HCV.B1-cand-4690-4769
  source 1..80: mol_type = other DNA
caatgcagggtccatcaatgctcccaccgtgtcagacagtagggccctagctagaaggttccactttgatatgaacatcg

SEQ ID NO: 24498 - DNA, 80 bp, synthetic construct
  misc_feature 1..80: note = Synthetic: >HCV.B1-cand-4770-4849
  source 1..80: mol_type = other DNA
aggtcatctccatgtacagccaaaatggcaaaataaacatgccaatgtcagtgaagacgtgtgatgaagagtgttgccca

SEQ ID NO: 24499 - DNA, 80 bp, synthetic construct
  misc_feature 1..80: note = Synthetic: >HCV.B1-cand-4850-4929
  source 1..80: mol_type = other DNA
gtcaactttaagaaatgctgtccactagtgtgtggaaaggctatccagtttattgacagaaggacacaagtcagatactc

SEQ ID NO: 24500 - DNA, 80 bp, synthetic construct
  misc_feature 1..80: note = Synthetic: >HCV.B1-cand-4900-4979
  source 1..80: mol_type = other DNA
tattgacagaaggacacaagtcagatactcccttgacatgctggtaactgagatgttcagggaatacaatcacaggcata

SEQ ID NO: 24501 - DNA, 80 bp, synthetic construct
  misc_feature 1..80: note = Synthetic: >HCV.B6-cand-2320-2399
  source 1..80: mol_type = other DNA
aatgtgatagtgccactgggagctcaatctaattgtagtatcttgtgctttgtatcagcgtgtaacgacttctcggtcag

SEQ ID NO: 24502 - DNA, 80 bp, synthetic construct
  misc_feature 1..80: note = Synthetic: >HCV.B6-cand-2400-2479
  source 1..80: mol_type = other DNA
aatgctgagagacaccaaattcattagtcaaactgcattttatcaaagcccagtggagggcgccatagagagagccattg

SEQ ID NO: 24503 - DNA, 80 bp, synthetic construct
  misc_feature 1..80: note = Synthetic: >HCV.B6-cand-2480-2559
  source 1..80: mol_type = other DNA
cacgggtcgctgacactatgccaagtggcccaaccaattcagaagcagtgcctgccctgacagcagtggaaacgggccac

SEQ ID NO: 24504 - DNA, 80 bp, synthetic construct
  misc_feature 1..80: note = Synthetic: >HCV.B6-cand-2560-2639
  source 1..80: mol_type = other DNA
acctcccaagtcgtccccagtgataacatgcaaaccaggcacgtgaagaactaccattcacgctccgaaaccagcgtcga

SEQ ID NO: 24505 - DNA, 80 bp, synthetic construct
  misc_feature 1..80: note = Synthetic: >HCV.B6-cand-2610-2689
  source 1..80: mol_type = other DNA
ctaccattcacgctccgaaaccagcgtcgagaactttctgtgtaggtctgcatgtgtatattttaccacatataagaacc

SEQ ID NO: 24506 - DNA, 80 bp, synthetic construct
  misc_feature 1..80: note = Synthetic: >HCV.B6-cand-2720-2799
  source 1..80: mol_type = other DNA
gggtaatcaccacaagacaagtggcccagctcaggagaaaactagaaatgtttacgtacttgcgtttcgacattgaactc

SEQ ID NO: 24507 - DNA, 80 bp, synthetic construct
  misc_feature 1..80: note = Synthetic: >HCV.B6-cand-2800-2879
  source 1..80: mol_type = other DNA
acctttgtcattacaagtgcgcaagaccaatccactatttcccaagacgcccctgtgcagacacatcagataatgtacgt

SEQ ID NO: 24508 - DNA, 80 bp, synthetic construct
  misc_feature 1..80: note = Synthetic: >HCV.B6-cand-2880-2959
  source 1..80: mol_type = other DNA
gccaccgggaggcccagtgccaaccaaagttgacgactatgcgtggcaaacatccaccaaccccagcgtcttttggaccg

SEQ ID NO: 24509 - DNA, 80 bp, synthetic construct
  misc_feature 1..80: note = Synthetic: >HCV.B6-cand-2960-3039
  source 1..80: mol_type = other DNA
agggtaacgctccaccacgtatgtcagttccctttatgagtatcggtaatgcttatagcacattttatgacgggtggtct

SEQ ID NO: 24510 - DNA, 80 bp, synthetic construct
  misc_feature 1..80: note = Synthetic: >HCV.B6-cand-3040-3119
  source 1..80: mol_type = other DNA
gatttttcaaacaaaggaatatatgggttgaacaccttgaacaacatgggaacattgtacatccgccacgttaacgggcc

SEQ ID NO: 24511 - DNA, 80 bp, synthetic construct
  misc_feature 1..80: note = Synthetic: >HCV.B6-cand-3120-3199
  source 1..80: mol_type = other DNA
caacccagtaccaattaccagcacagtgaggatatactttaagcccaagcatgttaaggcctgggtgcctaggcctccaa

SEQ ID NO: 24512 - DNA, 80 bp, synthetic construct
  misc_feature 1..80: note = Synthetic: >HCV.B6-cand-3200-3279
  source 1..80: mol_type = other DNA
ggctttgccagtacaaaacgtctaggcaagtcaactttacagtgactggagtgaccgagagtagggcaaatataaccacc

SEQ ID NO: 24513 - DNA, 80 bp, synthetic construct
  misc_feature 1..80: note = Synthetic: >HCV.B6-cand-3320-3399
  source 1..80: mol_type = other DNA
cgtacgtgggaaactatagggtggtgaatagacatttggccacgcacgctgactggcaaaactgtgtgtgggaggattac

SEQ ID NO: 24514 - DNA, 80 bp, synthetic construct
  misc_feature 1..80: note = Synthetic: >HCV.B6-cand-3360-3439
  source 1..80: mol_type = other DNA
cacgcacgctgactggcaaaactgtgtgtgggaggattacaatagggacctccttgtgagcaccaccaccgcacatgggt

SEQ ID NO: 24515 - DNA, 80 bp, synthetic construct
  misc_feature 1..80: note = Synthetic: >HCV.B6-cand-3480-3559
  source 1..80: mol_type = other DNA
cttttgtgcatcaaggaataaacactacccagtgacctttgaaggaccaggtctagtggaagttcaggagagtgaatact

SEQ ID NO: 24516 - DNA, 80 bp, synthetic construct
  misc_feature 1..80: note = Synthetic: >HCV.B6-cand-3520-3599
  source 1..80: mol_type = other DNA
gaaggaccaggtctagtggaagttcaggagagtgaatactatccaaagagataccaatctcatgtactgcttgctgcggg

SEQ ID NO: 24517 - DNA, 80 bp, synthetic construct
  misc_feature 1..80: note = Synthetic: >LC270039.1-cand-1790-1869
  source 1..80: mol_type = other DNA
ctacctgtgcattatattggtatagaacaggtttgtctaatattagtcaggtatatggtaccaccccagaatggatagaa

SEQ ID NO: 24518 - DNA, 80 bp, synthetic construct
  misc_feature 1..80: note = Synthetic: >LC270039.1-cand-1870-1949
  source 1..80: mol_type = other DNA
caccaaacagtattacagcatagctttgacaatagcatatttgattttggagaaatggtgcaatgggcatatgatcatga

SEQ ID NO: 24519 - DNA, 80 bp, synthetic construct
  misc_feature 1..80: note = Synthetic: >LC270039.1-cand-1950-2029
  source 1..80: mol_type = other DNA
tataacagatgatagtgacatagcatataaatatgcacagttagcagatgtaaatagcaatgctgcagcattcctaaaaa

SEQ ID NO: 24520 - DNA, 80 bp, synthetic construct
  misc_feature 1..80: note = Synthetic: >LC270039.1-cand-2030-2109
  source 1..80: mol_type = other DNA
gcaattcgcaagcaaaaatagtaaaggactgtgcaaccatgtgtagacattataaacgggcagaaagaaaacatatgaat

SEQ ID NO: 24521 - DNA, 80 bp, synthetic construct
  misc_feature 1..80: note = Synthetic: >LC270039.1-cand-2110-2189
  source 1..80: mol_type = other DNA
attggacaatggataaagtatagatgtgataggatagatgatggtggagattggaggcctatagtaagatttttaagata

SEQ ID NO: 24522 - DNA, 80 bp, synthetic construct
  misc_feature 1..80: note = Synthetic: >LC270039.1-cand-2190-2269
  source 1..80: mol_type = other DNA
tcaagacatagaatttacagcctttttagacgcatttaaaaaatttttaaaaggtatacctaaaaaaaattgtttagtat

SEQ ID NO: 24523 - DNA, 80 bp, synthetic construct
  misc_feature 1..80: note = Synthetic: >LC270039.1-cand-2270-2349
  source 1..80: mol_type = other DNA
tatatggacctgcaaacacaggaaaatcatattttggaatgagtttaattaggttcttaagtggatgtgtaatatcctat

SEQ ID NO: 24524 - DNA, 80 bp, synthetic construct
  misc_feature 1..80: note = Synthetic: >LC270039.1-cand-2350-2429
  source 1..80: mol_type = other DNA
gtaaactcaaaaagccatttttggctacaaccattaacagatgcaaaagtgggtatgatagatgatgtaacacctatatg

SEQ ID NO: 24525 - DNA, 80 bp, synthetic construct
  misc_feature 1..80: note = Synthetic: >LC270039.1-cand-2430-2509
  source 1..80: mol_type = other DNA
ttggacatatatagatgactatatgagaaatgcactggatggaaatgatatatcagtagatgtaaagcatagagccttag

SEQ ID NO: 24526 - DNA, 80 bp, synthetic construct
  misc_feature 1..80: note = Synthetic: >LC270039.1-cand-2510-2589
  source 1..80: mol_type = other DNA
tacaaataaaatgcccaccattaattttaacaacaaatacaaatgcaggaacagatcctaggtggccatatttacatagt

SEQ ID NO: 24527 - DNA, 80 bp, synthetic construct
  misc_feature 1..80: note = Synthetic: >LC270039.1-cand-2590-2669
  source 1..80: mol_type = other DNA
agattggtcgtgtttcatttcaaaaacccatttccatttgatgaaaatggcaatcccatatatgaaattaacaacgaaaa

SEQ ID NO: 24528 - DNA, 80 bp, synthetic construct
  misc_feature 1..80: note = Synthetic: >LC270039.1-cand-2750-2829
  source 1..80: mol_type = other DNA
ccggcacgtttaaatgcagtgcaggaaaaaatactagatctatacgaagctgatagtaatgacctaaacgcacaaattga

SEQ ID NO: 24529 - DNA, 80 bp, synthetic construct
  misc_feature 1..80: note = Synthetic: >LC270039.1-cand-2830-2909
  source 1..80: mol_type = other DNA
acattggaaattgactcgaatggaatgtgttttgttttacaaagcaaaggaactgggaataactcatataggccaccagg

SEQ ID NO: 24530 - DNA, 80 bp, synthetic construct
  misc_feature 1..80: note = Synthetic: >LC270039.1-cand-2910-2989
  source 1..80: mol_type = other DNA
tggtgccaccaatggcagtgtctaaggcaaaggcctgccaagctattgaactacaattggcattggaggcattaaacaaa

SEQ ID NO: 24531 - DNA, 80 bp, synthetic construct
  misc_feature 1..80: note = Synthetic: >LC270039.1-cand-2990-3069
  source 1..80: mol_type = other DNA
acacaatatagcacagatggatggacattacaacaaacaagtctagaaatgtggcgtgcagaaccacaaaaatactttaa

SEQ ID NO: 24532 - DNA, 80 bp, synthetic construct
  misc_feature 1..80: note = Synthetic: >LC270039.1-cand-3070-3149
  source 1..80: mol_type = other DNA
aaaacatgggtatacaataacagtgcaatacgataatgataaaaacaatactatggattatacaaattggaaggaaattt

SEQ ID NO: 24533 - DNA, 80 bp, synthetic construct
  misc_feature 1..80: note = Synthetic: >LC270039.1-cand-7160-7239
  source 1..80: mol_type = other DNA
cccacgtacctccacaaagaagaaaaaggttaaaaggtaaccattgtctgttgcgtaattgtctgtgtcatgtatgtgtt

SEQ ID NO: 24534 - DNA, 80 bp, synthetic construct
  misc_feature 1..80: note = Synthetic: >LC270039.1-cand-7240-7319
  source 1..80: mol_type = other DNA
gtgtatgtcaaaaacaggttaaaaggtaaccattgtttgttatgtaattgttttgtgtgtgtactgtgttgtttgcatgt

SEQ ID NO: 24535 - DNA, 80 bp, synthetic construct
  misc_feature 1..80: note = Synthetic: >LC270039.1-cand-7320-7399
  source 1..80: mol_type = other DNA
tatgtatgtgtgcatgtttgttgtatttgtcagttcctgtatgtatgttttgtgtatgtattaataaagtactgtattta

SEQ ID NO: 24536 - DNA, 80 bp, synthetic construct
  misc_feature 1..80: note = Synthetic: >LC270039.1-cand-7410-7489
  source 1..80: mol_type = other DNA
tatattagtcttatgttatggttgcacccacatgagtaacaatacagttgctcctaatctattgcatctcctgccctacc

SEQ ID NO: 24537 - DNA, 80 bp, synthetic construct
  misc_feature 1..80: note = Synthetic: >LC270039.1-cand-7490-7569
  source 1..80: mol_type = other DNA
ctgtgtcccctgccctaccctgtgtcctactttgttacactactaattagccttatactctccattttgtaccattttgt

SEQ ID NO: 24538 - DNA, 80 bp, synthetic construct
  misc_feature 1..80: note = Synthetic: >LC270039.1-cand-7570-7649
  source 1..80: mol_type = other DNA
actatccaccattttaaatcctaaccgaattcggttggtcttggcacaactttggttgtccttggcacagtaacaactat

SEQ ID NO: 24539 - DNA, 80 bp, synthetic construct
  misc_feature 1..80: note = Synthetic: >LC270039.1-cand-7650-7729
  source 1..80: mol_type = other DNA
ttttatataaatgtcagcaaactgcttaatcctttggtttcctgccgcccactggtctacacttgttgtcccgcctaaac

SEQ ID NO: 24540 - DNA, 80 bp, synthetic construct
  misc_feature 1..80: note = Synthetic: >LC270039.1-cand-7730-7809
  source 1..80: mol_type = other DNA
tgacttgctgactcacacgtcctgcagtgcagctaaacaatacattgcctaacattgcatgttttaaactgcttttagtc

SEQ ID NO: 24541 - DNA, 80 bp, synthetic construct
  misc_feature 1..80: note = Synthetic: >LC270039.1-cand-7810-7889
  source 1..80: mol_type = other DNA
acatattttatttaaactttcaatgcactaattacagtgttggcttacacaagtacatcctacgccaaatatgtcttgta

SEQ ID NO: 24542 - DNA, 80 bp, synthetic construct
  misc_feature 1..80: note = Synthetic: >LC270039.1-cand-7890-7969
  source 1..80: mol_type = other DNA
aaacataattgaatactgttactcaccaggtgtgcactacacgaccggttacggttaccgtacccacaaccacttttttt

SEQ ID NO: 24543 - DNA, 80 bp, synthetic construct
  misc_feature 1..80: note = Synthetic: >LR861845.1-cand-40-119
  source 1..80: mol_type = other DNA
aacggttgcaaccaaaaacggtgcatataaaagctttgtggaaaagtgcattacaggatggcgcgctttgacgatccaaa

SEQ ID NO: 24544 - DNA, 80 bp, synthetic construct
  misc_feature 1..80: note = Synthetic: >LR861845.1-cand-120-199
  source 1..80: mol_type = other DNA
gcaacgaccctacaagctaccagatttgtgcacagaattgaatacatcactacaagacgtatctattgcctgtgtatatt

SEQ ID NO: 24545 - DNA, 80 bp, synthetic construct
  misc_feature 1..80: note = Synthetic: >LR861845.1-cand-200-279
  source 1..80: mol_type = other DNA
gcaaagcaacattggaacgcacagaggtatatcaatttgcttttaaagatttatgtatagtgtatagagactgtatagca

SEQ ID NO: 24546 - DNA, 80 bp, synthetic construct
  misc_feature 1..80: note = Synthetic: >LR861845.1-cand-280-359
  source 1..80: mol_type = other DNA
tatgctgcatgccataaatgtatagacttttattccagaattagagaattaagatattattcaaactctgtatatggaga

SEQ ID NO: 24547 - DNA, 80 bp, synthetic construct
  misc_feature 1..80: note = Synthetic: >LR861845.1-cand-360-439
  source 1..80: mol_type = other DNA
gacactggaaaaaataactaatacagagttgtataatttgttaataaggtgcctgcggtgccagaaaccattgaacccag

SEQ ID NO: 24548 - DNA, 80 bp, synthetic construct
  misc_feature 1..80: note = Synthetic: >LR861845.1-cand-440-519
  source 1..80: mol_type = other DNA
cagaaaaacgtagacaccttaaggacaaacgaagatttcacagcatagctggacagtaccgagggcagtgtaatacatgt

SEQ ID NO: 24549 - DNA, 80 bp, synthetic construct
  misc_feature 1..80: note = Synthetic: >MG717393.1-cand-5520-5599
  source 1..80: mol_type = other DNA
caaggaatttatgataaatgtacaggcagatgggtttagggcaattgcacaactggatattgaaagtccccgattcctcc

SEQ ID NO: 24550 - DNA, 80 bp, synthetic construct
  misc_feature 1..80: note = Synthetic: >MG717393.1-cand-5600-5679
  source 1..80: mol_type = other DNA
tagctcatgcttatcatactctacgtgatgttaggtatcaggctgtacaggctgtagggaatgtttggtttcagacaaat

SEQ ID NO: 24551 - DNA, 80 bp, synthetic construct
  misc_feature 1..80: note = Synthetic: >MG717393.1-cand-5680-5759
  source 1..80: mol_type = other DNA
caacacaaattattcataaaccctatcatatcatcaggactattagagaattttatgaaaggacttccagcagcaattcc

SEQ ID NO: 24552 - DNA, 80 bp, synthetic construct
  misc_feature 1..80: note = Synthetic: >MG717393.1-cand-5760-5839
  source 1..80: mol_type = other DNA
tcctgcagcttattcattaatcatgaacaaagcaaaaatatctgtagacctttttatgtttaatgagttattggctttag

SEQ ID NO: 24553 - DNA, 80 bp, synthetic construct
  misc_feature 1..80: note = Synthetic: >MG717393.1-cand-5840-5919
  source 1..80: mol_type = other DNA
tgaatcccaaaaacacactcaaccttgatgggatagaagaaacttcagaaggttatagcacagtcacctcaatctcaagt

SEQ ID NO: 24554 - DNA, 80 bp, synthetic construct
  misc_feature 1..80: note = Synthetic: >MG717393.1-cand-5920-5999
  source 1..80: mol_type = other DNA
cgccagtggtccgaggaagtcagtttaatggcagatgatgatattgatgatgaggaagaatttactattgctcttgatga

SEQ ID NO: 24555 - DNA, 80 bp, synthetic construct
  misc_feature 1..80: note = Synthetic: >MG717393.1-cand-6000-6079
  source 1..80: mol_type = other DNA
cattgattttgagaaaatagatctcgatgaggacatacagcactttctgcaggatgagtctgcatacacaggagatttga

SEQ ID NO: 24556 - DNA, 80 bp, synthetic construct
  misc_feature 1..80: note = Synthetic: >MG717393.1-cand-6080-6159
  source 1..80: mol_type = other DNA
tgattcagacagaagaggtagagataaaacgaataagaggtgtaacacgagtgctagagccagttaagctcataaaaagt

SEQ ID NO: 24557 - DNA, 80 bp, synthetic construct
  misc_feature 1..80: note = Synthetic: >MG717393.1-cand-6160-6239
  source 1..80: mol_type = other DNA
tgggtgtcgaaaggattggctatagataaggtgtataatcctattgggatagtcttgatgtcacggtatatgtcaaagaa

SEQ ID NO: 24558 - DNA, 80 bp, synthetic construct
  misc_feature 1..80: note = Synthetic: >MG717393.1-cand-6240-6319
  source 1..80: mol_type = other DNA
ttataattttaataaaatacccttggcattgttgaacccttatgatttgacagaatttgagagtgtagtgaaaggatggg

SEQ ID NO: 24559 - DNA, 80 bp, synthetic construct
  misc_feature 1..80: note = Synthetic: >MG717393.1-cand-6320-6399
  source 1..80: mol_type = other DNA
gtgagactgttaatgatagattcatggaggttgatactgatgcacagaatttagtcagagagaaaaatattttgcctgag

SEQ ID NO: 24560 - DNA, 80 bp, synthetic construct
  misc_feature 1..80: note = Synthetic: >MG717393.1-cand-6400-6479
  source 1..80: mol_type = other DNA
gacatattaccagattctttattctcatttagacatgttgatgtgctcttgaagaggcttttccctcgtgaccctgtttc

SEQ ID NO: 24561 - DNA, 80 bp, synthetic construct
  misc_feature 1..80: note = Synthetic: >MG717393.1-cand-6470-6549
  source 1..80: mol_type = other DNA
accctgtttcttcattttattgataggctttattgcttatgccgttaattgttatatctagtgctctgttctcggagcat

SEQ ID NO: 24562 - DNA, 80 bp, synthetic construct
  misc_feature 1..80: note = Synthetic: >MH539865.1-cand-0-79
  source 1..80: mol_type = other DNA
agtagactccgagatagagaaattcagaaagatggaaaagtatagagaaatacatcagagagttagggaaatagcacctg

SEQ ID NO: 24563 - DNA, 80 bp, synthetic construct
  misc_feature 1..80: note = Synthetic: >MH539865.1-cand-80-159
  source 1..80: mol_type = other DNA
gatgtgcatccgcactagaatgtttagacctgcttgatcgtttatatgcagttaggcatgacatggtagatcagatgatc

SEQ ID NO: 24564 - DNA, 80 bp, synthetic construct
  misc_feature 1..80: note = Synthetic: >MH539865.1-cand-160-239
  source 1..80: mol_type = other DNA
aagcatgattggtcagataataaagatactgaaaggccaataggtcaagttctgttaatggcaggtatacccaatgatgt

SEQ ID NO: 24565 - DNA, 80 bp, synthetic construct
  misc_feature 1..80: note = Synthetic: >NC_001611.1-cand-1400-1479
  source 1..80: mol_type = other DNA
atccatgttcgagcatactagcatatttgtaacttcgtcgtaaagcgttaaatcaatagaataaaccattttgtggtgca

SEQ ID NO: 24566 - DNA, 80 bp, synthetic construct
  misc_feature 1..80: note = Synthetic: >NC_001611.1-cand-1470-1549
  source 1..80: mol_type = other DNA
ttgtggtgcaactttttacgaactagttgtatgagtttatcgtttacataagccattaacagctttaacagatgatctga

SEQ ID NO: 24567 - DNA, 80 bp, synthetic construct
  misc_feature 1..80: note = Synthetic: >NC_001611.1-cand-1550-1629
  source 1..80: mol_type = other DNA
gtaatatcctctattatacatttaatgttcacggtcttagtatttttagatatcaattgtaatttacacccatattctac

SEQ ID NO: 24568 - DNA, 80 bp, synthetic construct
  misc_feature 1..80: note = Synthetic: >NC_001611.1-cand-1710-1789
  source 1..80: mol_type = other DNA
attattagtttatattactgaattaataatataaaattcccaatcttgttataaacacacactgagaaacagcataaaca

SEQ ID NO: 24569 - DNA, 80 bp, synthetic construct
  misc_feature 1..80: note = Synthetic: >NC_001611.1-cand-1870-1949
  source 1..80: mol_type = other DNA
taacgctatcgaaacgacattgtcagaaattacaaacactacaacagatattccagctatcagattatgcggtccagagg

SEQ ID NO: 24570 - DNA, 80 bp, synthetic construct
  misc_feature 1..80: note = Synthetic: >NC_001611.1-cand-2030-2109
  source 1..80: mol_type = other DNA
acaggcattagatgtcagcatgtagtattagtagactatcaacgttcagaaaaaccaaacactacaacgtcatatatccc

SEQ ID NO: 24571 - DNA, 80 bp, synthetic construct
  misc_feature 1..80: note = Synthetic: >NC_001611.1-cand-2110-2189
  source 1..80: mol_type = other DNA
atctcccggtattgtgcttgtattattagtaagcattattgtgtgttgtctattatttgtttataggttcactcgaagaa

SEQ ID NO: 24572 - DNA, 80 bp, synthetic construct
  misc_feature 1..80: note = Synthetic: >NC_001611.1-cand-2190-2269
  source 1..80: mol_type = other DNA
ctaataaattacctttacaagatatggttgtgccataatttttataaatttttttatgagtatttttatgagtatttttc

SEQ ID NO: 24573 - DNA, 80 bp, synthetic construct
  misc_feature 1..80: note = Synthetic: >NC_001611.1-cand-2270-2349
  source 1..80: mol_type = other DNA
aaaaaatgtataaagtgtatgtcttatgtatatttataaaaatgctaaatgtgatgtatctatgttatttgtatttatct

SEQ ID NO: 24574 - DNA, 80 bp, synthetic construct
  misc_feature 1..80: note = Synthetic: >NC_001611.1-cand-2350-2429
  source 1..80: mol_type = other DNA
aaacaatacctctacctctagatattatacaaaaattttttatttcagtatattaaagtaaaatctagttaccttgaaaa

SEQ ID NO: 24575 - DNA, 80 bp, synthetic construct
  misc_feature 1..80: note = Synthetic: >NC_001611.1-cand-2430-2509
  source 1..80: mol_type = other DNA
taaatacagtgggtggttctgtatcaccagtaagaacataatggtcgaacacagtatccgattgagattttgcatacaat

SEQ ID NO: 24576 - DNA, 80 bp, synthetic construct
  misc_feature 1..80: note = Synthetic: >NC_001611.1-cand-2510-2589
  source 1..80: mol_type = other DNA
actagtctagaaagaaatttgtaatcatcttctgtgacgggagtccatatatctgtatcatcgtctagtttatcagtgtc

SEQ ID NO: 24577 - DNA, 80 bp, synthetic construct
  misc_feature 1..80: note = Synthetic: >NC_001611.1-cand-2670-2749
  source 1..80: mol_type = other DNA
atacatctccaaaactatcacttatacgtttatctttaacgatacctatacctagatggttatttactaacagacatttt

SEQ ID NO: 24578 - DNA, 80 bp, synthetic construct
  misc_feature 1..80: note = Synthetic: >NC_001611.1-cand-2750-2829
  source 1..80: mol_type = other DNA
ccagatctattgactataactcctatagtttccacattaaccaagtaatgatcatctattgttatataacaataacataa

SEQ ID NO: 24579 - DNA, 80 bp, synthetic construct
  misc_feature 1..80: note = Synthetic: >NC_001611.1-cand-2830-2909
  source 1..80: mol_type = other DNA
ctcttttccatttttatcagtatgtatatctatatcaacgtcgccgtagtgaatagtagtcattgatctattatatgaaa

SEQ ID NO: 24580 - DNA, 80 bp, synthetic construct
  misc_feature 1..80: note = Synthetic: >NC_001611.1-cand-2910-2989
  source 1..80: mol_type = other DNA
cggatatgtctagaacggcaattgtcttacgtccagttaacactttctttgatttaaagtctagagtctttgcaaacata

SEQ ID NO: 24581 - DNA, 80 bp, synthetic construct
  misc_feature 1..80: note = Synthetic: >NC_001611.1-cand-8260-8339
  source 1..80: mol_type = other DNA
tatattcagattatcatgagatgtgtttacactaactgtatcaataaacggcacaccatttagtcataaccgtaatccaa

SEQ ID NO: 24582 - DNA, 80 bp, synthetic construct
  misc_feature 1..80: note = Synthetic: >NC_001611.1-cand-8340-8419
  source 1..80: mol_type = other DNA
aaatttttaaagtatatcttaacgaaagaagttgtatcatcgttaggatttggtaaattattatctacagtgtatggtac

SEQ ID NO: 24583 - DNA, 80 bp, synthetic construct
  misc_feature 1..80: note = Synthetic: >NC_001611.1-cand-8420-8499
  source 1..80: mol_type = other DNA
taaatcctcataagtgtatatatctagagtaatgtttaatttatcaaatggttcataatatggatcctcatgacaatttc

SEQ ID NO: 24584 - DNA, 80 bp, synthetic construct
  misc_feature 1..80: note = Synthetic: >NC_001611.1-cand-8500-8579
  source 1..80: mol_type = other DNA
cgaagacgaaaatgagatatagacatggttactccttaaaaaaatacgaataatcgccttggctatttagtaagtgtcat

SEQ ID NO: 24585 - DNA, 80 bp, synthetic construct
  misc_feature 1..80: note = Synthetic: >NC_001611.1-cand-8570-8649
  source 1..80: mol_type = other DNA
taagtgtcatttaacactatacttatattaatccatggactcataatctctatacgggattaacggatgttctatatacg

SEQ ID NO: 24586 - DNA, 80 bp, synthetic construct
  misc_feature 1..80: note = Synthetic: >NC_001611.1-cand-8650-8729
  source 1..80: mol_type = other DNA
gggatgagtagttctcttctttaactttatactttttactaatcatatttagactaatgtatgggtaatagtgtttgaag

SEQ ID NO: 24587 - DNA, 80 bp, synthetic construct
  misc_feature 1..80: note = Synthetic: >NC_001611.1-cand-8970-9049
  source 1..80: mol_type = other DNA
ttatctcctctatgcaactgtaaatttctcaacgcgatatctccattaataatgatgtcaaattcgtgttgtatacccat

SEQ ID NO: 24588 - DNA, 80 bp, synthetic construct
  misc_feature 1..80: note = Synthetic: >NC_001611.1-cand-9050-9129
  source 1..80: mol_type = other DNA
actgaattgatgaacgaacgaataccgtcggcgttaatagtaatttactttttcatctttacatactcggtactagtttt

SEQ ID NO: 24589 - DNA, 80 bp, synthetic construct
  misc_feature 1..80: note = Synthetic: >NC_001611.1-cand-9290-9369
  source 1..80: mol_type = other DNA
cttcatcatcgtctattggataacgtctctgtattctacgatagagtgctactttaagatgagacatatccgtgttatca

SEQ ID NO: 24590 - DNA, 80 bp, synthetic construct
  misc_feature 1..80: note = Synthetic: >NC_001611.1-cand-9460-9539
  source 1..80: mol_type = other DNA
agtcccatggttccataaacagtgagtttatctttctttgaagagatattttgtagagatcttataaaactgtcaaatga

SEQ ID NO: 24591 - DNA, 80 bp, synthetic construct
  misc_feature 1..80: note = Synthetic: >NC_001611.1-cand-9540-9619
  source 1..80: mol_type = other DNA
catcgcatttatatctttagctaaatcgtatatgttaccatcgtaatatctaaccgcgtctatcttaaacgtttccatcg

SEQ ID NO: 24592 - DNA, 80 bp, synthetic construct
  misc_feature 1..80: note = Synthetic: >NC_001611.1-cand-9620-9699
  source 1..80: mol_type = other DNA
ctttaaagacgtttccgatagatggtctcatttcatcagtcatactaagccaacaaatataatcgtgtataacatctttg

SEQ ID NO: 24593 - DNA, 80 bp, synthetic construct
  misc_feature 1..80: note = Synthetic: >NC_001611.1-cand-9860-9939
  source 1..80: mol_type = other DNA
acgagaatgacataactaatcataactagttatcaaagtgtctaggatgcgtaattttttatatggtatagatcctgtaa

SEQ ID NO: 24594 - DNA, 80 bp, synthetic construct
  misc_feature 1..80: note = Synthetic: >NC_001611.1-cand-10020-10099
  source 1..80: mol_type = other DNA
acataactttagtaaagttgtctatattaactcttttattttccagccatcgtaatacccatgtttaagatagtatattc

SEQ ID NO: 24595 - DNA, 80 bp, synthetic construct
  misc_feature 1..80: note = Synthetic: >NC_001611.1-cand-10100-10179
  source 1..80: mol_type = other DNA
tctagttacactatggtctcatcgttgtttagaatatcacataccgaatctacatcaaattttagaaattggtctgtgtt

SEQ ID NO: 24596 - DNA, 80 bp, synthetic construct
  misc_feature 1..80: note = Synthetic: >NC_001611.1-cand-10260-10339
  source 1..80: mol_type = other DNA
tagtataccaattatcttttccgataatatatttacacacataatccattctctcaatcactacatctttaagtttttcg

SEQ ID NO: 24597 - DNA, 80 bp, synthetic construct
  misc_feature 1..80: note = Synthetic: >NC_001611.1-cand-61990-62069
  source 1..80: mol_type = other DNA
tatcttatgatgacttgataacttactttccagatagaaaatatcataaatatatttataaagtatttgaacatgtagat

SEQ ID NO: 24598 - DNA, 80 bp, synthetic construct
  misc_feature 1..80: note = Synthetic: >NC_001611.1-cand-62300-62379
  source 1..80: mol_type = other DNA
gcacgttcccatagctggttcaaaattaattctttgcggattttctcaagttacatttatggcgtatacaacgtctcata

SEQ ID NO: 24599 - DNA, 80 bp, synthetic construct
  misc_feature 1..80: note = Synthetic: >NC_001611.1-cand-62530-62609
  source 1..80: mol_type = other DNA
ccggtggccaaactccataatttgctttttctatttcggattttagaatttccaaattcaccagcgatttatctgttttg

SEQ ID NO: 24600 - DNA, 80 bp, synthetic construct
  misc_feature 1..80: note = Synthetic: >NC_001611.1-cand-62690-62769
  source 1..80: mol_type = other DNA
gttagatagatgcgctgcaaagtttcctattagggttccgcgctttacgtcacctagcatacttgaatcaccatccttta

SEQ ID NO: 24601 - DNA, 80 bp, synthetic construct
  misc_feature 1..80: note = Synthetic: >NC_001611.1-cand-63170-63249
  source 1..80: mol_type = other DNA
ctaaatcaaccaaggacagaaaaatgttagaattagaaaagtgtacatccaaaatacaaaatgttaccggatttatggaa

SEQ ID NO: 24602 - DNA, 80 bp, synthetic construct
  misc_feature 1..80: note = Synthetic: >NC_001611.1-cand-63410-63489
  source 1..80: mol_type = other DNA
aatttgttatgtgtctagaggctaaaacatatttctttaccacaggagaatggccgttgataataagtaccgatcaggat

SEQ ID NO: 24603 - DNA, 80 bp, synthetic construct
  misc_feature 1..80: note = Synthetic: >NC_001611.1-cand-63490-63569
  source 1..80: mol_type = other DNA
actatgctatttgcgtctgttgataatcatcctaagatgataaaaaacttaactcaactgtttaaatttgttccatctgc

SEQ ID NO: 24604 - DNA, 80 bp, synthetic construct
  misc_feature 1..80: note = Synthetic: >NC_001611.1-cand-63560-63639
  source 1..80: mol_type = other DNA
ttccatctgcagaggataactatttagcaaaattaacggcgttagtgaatggatgtgatttctttcctggactctatggg

SEQ ID NO: 24605 - DNA, 80 bp, synthetic construct
  misc_feature 1..80: note = Synthetic: >NC_001611.1-cand-63890-63969
  source 1..80: mol_type = other DNA
aatcatcttatttagagaccgttccgttaccctgtcaattaatgtacgcgttagaaccacgtaaggagattgatgtttca

SEQ ID NO: 24606 - DNA, 80 bp, synthetic construct
  misc_feature 1..80: note = Synthetic: >NC_001611.1-cand-64050-64129
  source 1..80: mol_type = other DNA
ctttggatattctaacgaaaactgtaacacgatagtgtttggcatctataaggataatttactactgagtataaatagtt

SEQ ID NO: 24607 - DNA, 80 bp, synthetic construct
  misc_feature 1..80: note = Synthetic: >NC_001611.1-cand-64370-64449
  source 1..80: mol_type = other DNA
acagtgcaacctctattggatataaactaatatggatccggttaattttatcaagacatatgcacctagaggttctatta

SEQ ID NO: 24608 - DNA, 80 bp, synthetic construct
  misc_feature 1..80: note = Synthetic: >NC_001611.1-cand-64530-64609
  source 1..80: mol_type = other DNA
ttattatcggaacacttggtagttgaatcaacatatagaaaaggagttcaaatagtcccattggatagtttttttgaagg

SEQ ID NO: 24609 - DNA, 80 bp, synthetic construct
  misc_feature 1..80: note = Synthetic: >NC_001611.1-cand-64690-64769
  source 1..80: mol_type = other DNA
gtattccatatggatttggtcataatagaatgtattgttttaaattggtagctgaatgttataaaaatgccggtattaat

SEQ ID NO: 24610 - DNA, 80 bp, synthetic construct
  misc_feature 1..80: note = Synthetic: >NC_001611.1-cand-64770-64849
  source 1..80: mol_type = other DNA
acatcatctaaacgaatattgggcaaagatatttttctaagccaaaacttcacagatgataatagatggataaagatata

SEQ ID NO: 24611 - DNA, 80 bp, synthetic construct
  misc_feature 1..80: note = Synthetic: >NC_001611.1-cand-65090-65169
  source 1..80: mol_type = other DNA
atcctttagagtatttctcactagtgtctagcattttagagcattccatgatctgtttatcattgatattggccggaaag

SEQ ID NO: 24612 - DNA, 80 bp, synthetic construct
  misc_feature 1..80: note = Synthetic: >NC_001611.1-cand-65900-65979
  source 1..80: mol_type = other DNA
atatatctctcaatacagattgtactatacattttgaaactatgtcaaaaattgtagaacgacgctgttctgcagccatt

SEQ ID NO: 24613 - DNA, 80 bp, synthetic construct
  misc_feature 1..80: note = Synthetic: >NC_001611.1-cand-76580-76659
  source 1..80: mol_type = other DNA
gacttggtatttggaaattagtgctctgtggaataaaataaaacaaggattcgtttactctcagaaacagaaacttgcaa

SEQ ID NO: 24614 - DNA, 80 bp, synthetic construct
  misc_feature 1..80: note = Synthetic: >NC_001611.1-cand-76980-77059
  source 1..80: mol_type = other DNA
caagccctgtccagttttcacactactgaaaaaagcggtgctgtcaaacaaaaacttggtttcaatgagtttaataactt

SEQ ID NO: 24615 - DNA, 80 bp, synthetic construct
  misc_feature 1..80: note = Synthetic: >NC_001611.1-cand-77150-77229
  source 1..80: mol_type = other DNA
tgtatgtttgggagaattaaatccaaacatcactcttcgaaaagaaacagatagatatgtagtagacataatagtcaata

SEQ ID NO: 24616 - DNA, 80 bp, synthetic construct
  misc_feature 1..80: note = Synthetic: >NC_001611.1-cand-77230-77309
  source 1..80: mol_type = other DNA
gattatacatcaagagagcagaaataaccgaattagtcgtcgaatatatgattgaacgatttatctcctttagcgtcatt

SEQ ID NO: 24617 - DNA, 80 bp, synthetic construct
  misc_feature 1..80: note = Synthetic: >NC_001611.1-cand-77330-77409
  source 1..80: mol_type = other DNA
gacattcattgaggacgaggataatattagatttactgtttatctaaatttcgttgaaccagaggaattgaatcttagta

SEQ ID NO: 24618 - DNA, 80 bp, synthetic construct
  misc_feature 1..80: note = Synthetic: >NC_001611.1-cand-77390-77469
  source 1..80: mol_type = other DNA
agaggaattgaatcttagtaagtttatgatggttcttccgggtgccgccaacaagggcaagattagtaaattcaagattc

SEQ ID NO: 24619 - DNA, 80 bp, synthetic construct
  misc_feature 1..80: note = Synthetic: >NC_001611.1-cand-77470-77549
  source 1..80: mol_type = other DNA
ctatctctgattatacaggttatgacgatttcaatcaaacaaaaaagctcaataagatgactgtagaactcatgaatcta

SEQ ID NO: 24620 - DNA, 80 bp, synthetic construct
  misc_feature 1..80: note = Synthetic: >NC_001611.1-cand-77550-77629
  source 1..80: mol_type = other DNA
aaagaattgggttctttcgatttggagaacgttaacgtgtatcctggagtatggaatacatacgatatcttcggtatcga

SEQ ID NO: 24621 - DNA, 80 bp, synthetic construct
  misc_feature 1..80: note = Synthetic: >NC_001611.1-cand-77630-77709
  source 1..80: mol_type = other DNA
ggccgctcgtggatacttatgcgaagccatgttaaacacctatggagaaggtttcgattatctgtatcagccttgtgatc

SEQ ID NO: 24622 - DNA, 80 bp, synthetic construct
  misc_feature 1..80: note = Synthetic: >NC_001611.1-cand-77710-77789
  source 1..80: mol_type = other DNA
ttctcgctagtttactatgtgctagttacgaaccagaatcagttaataaattcaagttcggcgcagctagtactcttaag

SEQ ID NO: 24623 - DNA, 80 bp, synthetic construct
  misc_feature 1..80: note = Synthetic: >NC_001611.1-cand-77790-77869
  source 1..80: mol_type = other DNA
agagctacgtttggagacaataaagcattgttaaacgcggctcttcataaaaagtcagaacctattaacgataatagtag

SEQ ID NO: 24624 - DNA, 80 bp, synthetic construct
  misc_feature 1..80: note = Synthetic: >NC_001611.1-cand-77870-77949
  source 1..80: mol_type = other DNA
ctgccacttttttagcaaggtccctaatataggaactggatattacaaatactttatcgacttgggtcttctcatgagaa

SEQ ID NO: 24625 - DNA, 80 bp, synthetic construct
  misc_feature 1..80: note = Synthetic: >NC_001611.1-cand-77950-78029
  source 1..80: mol_type = other DNA
tggaaaggaaactatctgataagatatcttctcaaaagattaaggagatggaagaaacagaagacttttaattcttatca

SEQ ID NO: 24626 - DNA, 80 bp, synthetic construct
  misc_feature 1..80: note = Synthetic: >NC_001611.1-cand-78370-78449
  source 1..80: mol_type = other DNA
catatttgaacttaacttcagatgatggtgcattcatagcatttttataatttcccaaatacacattattggttactctt

SEQ ID NO: 24627 - DNA, 80 bp, synthetic construct
  misc_feature 1..80: note = Synthetic: >NC_001611.1-cand-78850-78929
  source 1..80: mol_type = other DNA
gtgtggattttggtgcctattttatagctatgcgattggataagaaaacatatctaccgcaagctattaggcgaggtact

SEQ ID NO: 24628 - DNA, 80 bp, synthetic construct
  misc_feature 1..80: note = Synthetic: >NC_001611.1-cand-79090-79169
  source 1..80: mol_type = other DNA
gttccgatcttagtaatatggaatagtgttagataaatgcggtaacaaatgttcctgtaaggaaccataacagcttagat

SEQ ID NO: 24629 - DNA, 80 bp, synthetic construct
  misc_feature 1..80: note = Synthetic: >NC_001796.2-cand-2380-2459
  source 1..80: mol_type = other DNA
gatcaataagtgttgttactgctgcaacaccagatgatgaagaagaaatactaatgaaaaatagtaggacaaagaaaagt

SEQ ID NO: 24630 - DNA, 80 bp, synthetic construct
  misc_feature 1..80: note = Synthetic: >NC_001796.2-cand-2420-2499
  source 1..80: mol_type = other DNA
agaagaaatactaatgaaaaatagtaggacaaagaaaagttcttcaatacaccaagaagatgacaaaagaattaaaaaag

SEQ ID NO: 24631 - DNA, 80 bp, synthetic construct
  misc_feature 1..80: note = Synthetic: >NC_001796.2-cand-2540-2619
  source 1..80: mol_type = other DNA
tgacaaccagataccaacatcagactacagatccacatcaaaagggcagaagaaaatctcaaaaacaacaaccatcaaca

SEQ ID NO: 24632 - DNA, 80 bp, synthetic construct
  misc_feature 1..80: note = Synthetic: >NC_001796.2-cand-2640-2719
  source 1..80: mol_type = other DNA
gaaatacagacagaatcatcaggaacacaatcctcatcatggaatctcaccattgataacaacacagatcgaaccgaaca

SEQ ID NO: 24633 - DNA, 80 bp, synthetic construct
  misc_feature 1..80: note = Synthetic: >NC_001796.2-cand-2700-2779
  source 1..80: mol_type = other DNA
aacacagatcgaaccgaacagacaaacacaactcccccaacaacaacctccggatcaacttatacaaaagaatcaatccg

SEQ ID NO: 24634 - DNA, 80 bp, synthetic construct
  misc_feature 1..80: note = Synthetic: >NC_001796.2-cand-2780-2859
  source 1..80: mol_type = other DNA
aacaaactctggatccaaacccaagacacaaaagacaaatggaaaggaaaggaaggatacagaagagagcaatcgattta

SEQ ID NO: 24635 - DNA, 80 bp, synthetic construct
  misc_feature 1..80: note = Synthetic: >NC_001796.2-cand-2860-2939
  source 1..80: mol_type = other DNA
cagagagggcaattactctattgcagaatcttggtgtaattcaatccacatcaaaactagatttatatcaagacaaacga

SEQ ID NO: 24636 - DNA, 80 bp, synthetic construct
  misc_feature 1..80: note = Synthetic: >NC_001796.2-cand-2930-3009
  source 1..80: mol_type = other DNA
agacaaacgagttgtatgtgtagcaaatgtactaaacaatgtagatactgcatcaaagatagacttcttggcaggattag

SEQ ID NO: 24637 - DNA, 80 bp, synthetic construct
  misc_feature 1..80: note = Synthetic: >NC_001796.2-cand-3020-3099
  source 1..80: mol_type = other DNA
ttcaatggacaacgacacaaaattaacacagatacaaaatgaaatgctaaacctcaaagcagatctaaagaaaatggatg

SEQ ID NO: 24638 - DNA, 80 bp, synthetic construct
  misc_feature 1..80: note = Synthetic: >NC_001796.2-cand-3100-3179
  source 1..80: mol_type = other DNA
aatcacatagaagattgatagaaaatcaaagagaacaactgtcattgatcacgtcattaatttcaaatcttaaaattatg

SEQ ID NO: 24639 - DNA, 80 bp, synthetic construct
  misc_feature 1..80: note = Synthetic: >NC_001796.2-cand-3180-3259
  source 1..80: mol_type = other DNA
actgagagaggaggaaagaaagaccaaaatgaatccaatgagagagtatccatgatcaaaacaaaattgaaagaagaaaa

SEQ ID NO: 24640 - DNA, 80 bp, synthetic construct
  misc_feature 1..80: note = Synthetic: >NC_001796.2-cand-3260-3339
  source 1..80: mol_type = other DNA
gatcaagaaaactaggtttgacccacttatggagacacaagggattgacaagaatatacctgatctatatcgacatgcag

SEQ ID NO: 24641 - DNA, 80 bp, synthetic construct
  misc_feature 1..80: note = Synthetic: >NC_001796.2-cand-3340-3419
  source 1..80: mol_type = other DNA
gaaatacactagagaacgatgtgcaagttaaatcagagatattaagttcatacaatgaatcaaatgcaacaagactaata

SEQ ID NO: 24642 - DNA, 80 bp, synthetic construct
  misc_feature 1..80: note = Synthetic: >NC_001796.2-cand-3420-3499
  source 1..80: mol_type = other DNA
cccaaaaaagtgagcagtacaatgagatcactagttgcagttataagcaacagcaatctctcacaaagcacaaaacaatc

SEQ ID NO: 24643 - DNA, 80 bp, synthetic construct
  misc_feature 1..80: note = Synthetic: >NC_001796.2-cand-3510-3589
  source 1..80: mol_type = other DNA
gaactcaaacattgcaaaaatgatgaagaagtatctgaattaatggacatgttcaatgaagatgtcaataattgccaatg

SEQ ID NO: 24644 - DNA, 80 bp, synthetic construct
  misc_feature 1..80: note = Synthetic: >NC_001796.2-cand-3590-3669
  source 1..80: mol_type = other DNA
atccaacaaagaaacgacaccgaacaaacagacaagaaacaacagtagatcaaaatctatcaacacacacaaaatcaagc

SEQ ID NO: 24645 - DNA, 80 bp, synthetic construct
  misc_feature 1..80: note = Synthetic: >NC_001796.2-cand-6230-6309
  source 1..80: mol_type = other DNA
aacaaccacttgtacatgcaacggaatcggcaatagaatcaatcaaccacctaatcaaggagtaaaaattataacacata

SEQ ID NO: 24646 - DNA, 80 bp, synthetic construct
  misc_feature 1..80: note = Synthetic: >NC_001796.2-cand-6310-6389
  source 1..80: mol_type = other DNA
aagaatgtagtacaataggtatcaacggaatgctgttcaatacaaacaaagaaggaactcttgcattctacacaccagat

SEQ ID NO: 24647 - DNA, 80 bp, synthetic construct
  misc_feature 1..80: note = Synthetic: >NC_001796.2-cand-6380-6459
  source 1..80: mol_type = other DNA
cacaccagatgatataacattaaacaattctgttgcacttgatccaattgacatatcaatcgagctcaacaaggccaaat

SEQ ID NO: 24648 - DNA, 80 bp, synthetic construct
  misc_feature 1..80: note = Synthetic: >NC_001796.2-cand-6460-6539
  source 1..80: mol_type = other DNA
cagatctagaagaatcaaaagaatggataagaaagtcaaatcaaaaactagattctattgggaattggcatcaatctagc

SEQ ID NO: 24649 - DNA, 80 bp, synthetic construct
  misc_feature 1..80: note = Synthetic: >NC_001796.2-cand-6540-6619
  source 1..80: mol_type = other DNA
accacaatcataattattttgatgatgatcattatattgtttataatcaatataacgataattacaattgcaattaagta

SEQ ID NO: 24650 - DNA, 80 bp, synthetic construct
  misc_feature 1..80: note = Synthetic: >NC_001796.2-cand-6620-6699
  source 1..80: mol_type = other DNA
ttacagaattcaaaagagaaatcaaatggatcaaaatgacaagccatatgtactaacaaacaaataacatatctatagat

SEQ ID NO: 24651 - DNA, 80 bp, synthetic construct
  misc_feature 1..80: note = Synthetic: >NC_001796.2-cand-6700-6779
  source 1..80: mol_type = other DNA
catcagatattaagattataaaaaacttaggagtaaagttacgcaatccaactctactcatacaattgagaaagaaccca

SEQ ID NO: 24652 - DNA, 80 bp, synthetic construct
  misc_feature 1..80: note = Synthetic: >NC_001796.2-cand-6770-6849
  source 1..80: mol_type = other DNA
aaagaacccaatagacaaatccaaattcgagatggaatactggaagcataccaatcacggaaaggatgctggtaatgagc

SEQ ID NO: 24653 - DNA, 80 bp, synthetic construct
  misc_feature 1..80: note = Synthetic: >NC_001796.2-cand-6850-6929
  source 1..80: mol_type = other DNA
tggagacgtccatggctactcataacaacaagctcactaataagataatatatatattatggacaataatcctggtgtta

SEQ ID NO: 24654 - DNA, 80 bp, synthetic construct
  misc_feature 1..80: note = Synthetic: >NC_001796.2-cand-6930-7009
  source 1..80: mol_type = other DNA
ttatcaatagttttcatcatagtgctaattaattccatcaatagtgaaaaggtccataattcattgctacaagaaataaa

SEQ ID NO: 24655 - DNA, 80 bp, synthetic construct
  misc_feature 1..80: note = Synthetic: >NC_001796.2-cand-7010-7089
  source 1..80: mol_type = other DNA
taatgagtttatggagattacagaaaagatccaaatggcatcggataataccaatgatctaatacagtcaggagtgaaca

SEQ ID NO: 24656 - DNA, 80 bp, synthetic construct
  misc_feature 1..80: note = Synthetic: >NC_001796.2-cand-7090-7169
  source 1..80: mol_type = other DNA
caaggcttcttacaattcagagtcatgtccagaattatataccaatatcattgacacaacagatgtcggatcttaggaaa

SEQ ID NO: 24657 - DNA, 80 bp, synthetic construct
  misc_feature 1..80: note = Synthetic: >NC_001796.2-cand-7170-7249
  source 1..80: mol_type = other DNA
ttcattagtgaaattacaattagaaatgataatcaagaagtgccgcaacaaagaataacacatgatgtaggtataaaacc

SEQ ID NO: 24658 - DNA, 80 bp, synthetic construct
  misc_feature 1..80: note = Synthetic: >NC_001796.2-cand-7250-7329
  source 1..80: mol_type = other DNA
tttaaatccagatgatttttggaggtgcacgtctggtcttccatttttaatgagaaacccaaaaataaggttaatgccag

SEQ ID NO: 24659 - DNA, 80 bp, synthetic construct
  misc_feature 1..80: note = Synthetic: >NC_001796.2-cand-7330-7409
  source 1..80: mol_type = other DNA
ggccgggattattagccatgccaacgactgttgatggctgtgtcagaactccgtccttaattataaatgatctgatttat

SEQ ID NO: 24660 - DNA, 80 bp, synthetic construct
  misc_feature 1..80: note = Synthetic: >NC_001796.2-cand-7410-7489
  source 1..80: mol_type = other DNA
gcttatacctcaaatctaattactcgaggttgtcaggatataggaaaatcataccaagtcttacaggtagggataataac

SEQ ID NO: 24661 - DNA, 80 bp, synthetic construct
  misc_feature 1..80: note = Synthetic: >NC_001803.1-cand-10070-10149
  source 1..80: mol_type = other DNA
cataaatgataaggctatatcacctcctaaaaatttgatatggactagtttccctagaaattatatgccgtcacacatac

SEQ ID NO: 24662 - DNA, 80 bp, synthetic construct
  misc_feature 1..80: note = Synthetic: >NC_001803.1-cand-10150-10229
  source 1..80: mol_type = other DNA
aaaattatatagaacatgaaaaattaaaattttccgagagtgataaatcaagaagagtattagagtactatttaagagat

SEQ ID NO: 24663 - DNA, 80 bp, synthetic construct
  misc_feature 1..80: note = Synthetic: >NC_001803.1-cand-10230-10309
  source 1..80: mol_type = other DNA
aacaaattcaatgaatgtgatttatacaactgtgtagttaatcaaagttatcttaacaaccctaatcatgtggtatcttt

SEQ ID NO: 24664 - DNA, 80 bp, synthetic construct
  misc_feature 1..80: note = Synthetic: >NC_001803.1-cand-10310-10389
  source 1..80: mol_type = other DNA
gacaggcaaagaaagagaactcagtgtaggtagaatgtttgcaatgcaaccaggaatgttcagacaagttcaaatattag

SEQ ID NO: 24665 - DNA, 80 bp, synthetic construct
  misc_feature 1..80: note = Synthetic: >NC_001803.1-cand-10390-10469
  source 1..80: mol_type = other DNA
cagagaaaatgatagctgaaaacattttacaattctttcctgaaagtcttacaagatatggtgatctagaactacagaaa

SEQ ID NO: 24666 - DNA, 80 bp, synthetic construct
  misc_feature 1..80: note = Synthetic: >NC_001803.1-cand-10470-10549
  source 1..80: mol_type = other DNA
atattagaattgaaagcaggaataagtaacaaatcaaatcgttacaatgataattacaacaattacattagtaagtgctc

SEQ ID NO: 24667 - DNA, 80 bp, synthetic construct
  misc_feature 1..80: note = Synthetic: >NC_001803.1-cand-10550-10629
  source 1..80: mol_type = other DNA
tatcatcacagatctcagcaaattcaatcaagcatttcgatatgaaacatcatgtatttgtagtgatgtactggatgaac

SEQ ID NO: 24668 - DNA, 80 bp, synthetic construct
  misc_feature 1..80: note = Synthetic: >NC_001803.1-cand-10630-10709
  source 1..80: mol_type = other DNA
tgcatggtgtacaatctctatttttctggttacatttagctattcctcatgtcacaataatatgcacatataggcatgca

SEQ ID NO: 24669 - DNA, 80 bp, synthetic construct
  misc_feature 1..80: note = Synthetic: >NC_001803.1-cand-10710-10789
  source 1..80: mol_type = other DNA
cccccctatataagagatcatattgtagatcttaacaatgtagatgaacaaagtggattatatagatatcatatgggtgg

SEQ ID NO: 24670 - DNA, 80 bp, synthetic construct
  misc_feature 1..80: note = Synthetic: >NC_001803.1-cand-10790-10869
  source 1..80: mol_type = other DNA
tatcgaagggtggtgtcaaaaactatggaccatagaagctatatcactattggatctaatatctctcaaagggaaattct

SEQ ID NO: 24671 - DNA, 80 bp, synthetic construct
  misc_feature 1..80: note = Synthetic: >NC_001803.1-cand-10870-10949
  source 1..80: mol_type = other DNA
caattactgctttaattaatggtgacaatcaatcaatagatataagtaaaccagtcagactcatggaaggtcaaactcat

SEQ ID NO: 24672 - DNA, 80 bp, synthetic construct
  misc_feature 1..80: note = Synthetic: >NC_001803.1-cand-10950-11029
  source 1..80: mol_type = other DNA
gctcaagcagattatttgctagcattaaatagtcttaaattactgtataaagagtatgcaggcataggccacaaattaaa

SEQ ID NO: 24673 - DNA, 80 bp, synthetic construct
  misc_feature 1..80: note = Synthetic: >NC_001803.1-cand-11030-11109
  source 1..80: mol_type = other DNA
aggaactgagacttatatatcaagagatatgcaatttatgagtaaaacaattcaacataacggtgtatattacccagcta

SEQ ID NO: 24674 - DNA, 80 bp, synthetic construct
  misc_feature 1..80: note = Synthetic: >NC_001803.1-cand-11110-11189
  source 1..80: mol_type = other DNA
gtataaagaaagtcctaagagtgggaccgtggataaacactatacttgatgatttcaaagtgagtctagaatctataggt

SEQ ID NO: 24675 - DNA, 80 bp, synthetic construct
  misc_feature 1..80: note = Synthetic: >NC_001803.1-cand-11190-11269
  source 1..80: mol_type = other DNA
agtttgacacaagaattagaatatagaggagaaagtctattatgcagtttaatatttagaaatgtatggttatataatca

SEQ ID NO: 24676 - DNA, 80 bp, synthetic construct
  misc_feature 1..80: note = Synthetic: >NC_001803.1-cand-11270-11349
  source 1..80: mol_type = other DNA
aattgctttacaactaaaaaatcatgcattatgtaacaataaattatatttggacatattaaaggttctgaaacacttaa

SEQ ID NO: 24677 - DNA, 80 bp, synthetic construct
  misc_feature 1..80: note = Synthetic: >NC_001803.1-cand-13910-13989
  source 1..80: mol_type = other DNA
tcatattaatagattcaattttgtatttagttctacaggttgtaaaattagtatagagtatattttaaaagaccttataa

SEQ ID NO: 24678 - DNA, 80 bp, synthetic construct
  misc_feature 1..80: note = Synthetic: >NC_001803.1-cand-13990-14069
  source 1..80: mol_type = other DNA
ttaaagatcctaattgtatagcattcataggtgaaggagcagggaatttattattgcgtacagtagtggaacttcatccc

SEQ ID NO: 24679 - DNA, 80 bp, synthetic construct
  misc_feature 1..80: note = Synthetic: >NC_001803.1-cand-14050-14129
  source 1..80: mol_type = other DNA
cagtagtggaacttcatcccgatataagatatatttacagaagtctgaaggattgcaatgatcatagtttacctattgag

SEQ ID NO: 24680 - DNA, 80 bp, synthetic construct
  misc_feature 1..80: note = Synthetic: >NC_001803.1-cand-14130-14209
  source 1..80: mol_type = other DNA
tttttaaggctgtacaatggacatatcaacattgattatggtgaaaatttgaccattcctgctacagatgcaaccaacaa

SEQ ID NO: 24681 - DNA, 80 bp, synthetic construct
  misc_feature 1..80: note = Synthetic: >NC_001803.1-cand-14210-14289
  source 1..80: mol_type = other DNA
cattcattggtcttatttacatataaagtttgctgaacctatcagtctttttgtctgtgatgctgaattgcctgtaacag

SEQ ID NO: 24682 - DNA, 80 bp, synthetic construct
  misc_feature 1..80: note = Synthetic: >NC_001803.1-cand-14290-14369
  source 1..80: mol_type = other DNA
tcaactggagtaaaattataatagagtggagcaagcatgtaagaaaatgcaagtactgttcctcagttaataaatgtacg

SEQ ID NO: 24683 - DNA, 80 bp, synthetic construct
  misc_feature 1..80: note = Synthetic: >NC_001803.1-cand-14370-14449
  source 1..80: mol_type = other DNA
ttaatagtaaaatatcatgctcaagatgatatcgatttcaaattagacaatataactatattaaaaacttatgtatgctt

SEQ ID NO: 24684 - DNA, 80 bp, synthetic construct
  misc_feature 1..80: note = Synthetic: >NC_001803.1-cand-14470-14549
  source 1..80: mol_type = other DNA
ctgaagtttacttagtccttacaataggtcctgcaaatgtgttcccagtatttaatgtagtacaaaatgctaaattgata

SEQ ID NO: 24685 - DNA, 80 bp, synthetic construct
  misc_feature 1..80: note = Synthetic: >NC_001803.1-cand-14530-14609
  source 1..80: mol_type = other DNA
tacaaaatgctaaattgatactatcaagaaccaaaaatttcatcatgcctaagaaggctgataaagagtctattgatgca

SEQ ID NO: 24686 - DNA, 80 bp, synthetic construct
  misc_feature 1..80: note = Synthetic: >NC_001803.1-cand-14610-14689
  source 1..80: mol_type = other DNA
aatattaaaagtttgataccctttctttgttaccctataacaaaaaaaggaattaatactgcattgtcaaaactaaagag

SEQ ID NO: 24687 - DNA, 80 bp, synthetic construct
  misc_feature 1..80: note = Synthetic: >NC_001803.1-cand-14690-14769
  source 1..80: mol_type = other DNA
tgttgttagtggagatatactatcatattctatagcaggacgtaatgaagttttcagcaataaacttataaatcataagc

SEQ ID NO: 24688 - DNA, 80 bp, synthetic construct
  misc_feature 1..80: note = Synthetic: >NC_001803.1-cand-14770-14849
  source 1..80: mol_type = other DNA
atatgaacatcttaaaatggttcaatcatgttttaaatttcagatcaacagaactaaactataatcatttatatatggta

SEQ ID NO: 24689 - DNA, 80 bp, synthetic construct
  misc_feature 1..80: note = Synthetic: >NC_001803.1-cand-14850-14929
  source 1..80: mol_type = other DNA
gaatctacatatccttatctaagtgaattgttaaacagcttgacaactaatgaacttaaaaaactgattaaaatcacagg

SEQ ID NO: 24690 - DNA, 80 bp, synthetic construct
  misc_feature 1..80: note = Synthetic: >NC_001803.1-cand-14930-15009
  source 1..80: mol_type = other DNA
tagtttgttatacaactttcataatgaataatgaataaaaatcttatattaaaaattcccatagctacacactaacactg

SEQ ID NO: 24691 - DNA, 80 bp, synthetic construct
  misc_feature 1..80: note = Synthetic: >NC_001803.1-cand-15010-15089
  source 1..80: mol_type = other DNA
tattcaattatagttatttaaaattaaaaattatataattttttaataacttttagtgaactaatcctaaaattatcatt

SEQ ID NO: 24692 - DNA, 80 bp, synthetic construct
  misc_feature 1..80: note = Synthetic: >NC_001803.1-cand-15090-15169
  source 1..80: mol_type = other DNA
ttgatctaggaggaataaatttaaatccaaatctaattggtttatatgtatattaactaaactacgagatattagttttt

SEQ ID NO: 24693 - DNA, 80 bp, synthetic construct
  misc_feature 1..80: note = Synthetic: >NC_002640.1-cand-10150-10229
  source 1..80: mol_type = other DNA
catacggccataacccaggtcaggaacctgatcggaaaagaggaatacgtggattacatgccagtaatgaaaagatacag

SEQ ID NO: 24694 - DNA, 80 bp, synthetic construct
  misc_feature 1..80: note = Synthetic: >NC_002640.1-cand-10230-10309
  source 1..80: mol_type = other DNA
tgctccttcagagagtgaaggagttctgtaattaccaacaacaaacaccaaaggctattgaagtcaggccacttgtgcca

SEQ ID NO: 24695 - DNA, 80 bp, synthetic construct
  misc_feature 1..80: note = Synthetic: >NC_002640.1-cand-10310-10389
  source 1..80: mol_type = other DNA
cggtttgagcaaaccgtgctgcctgtagctccgccaataatgggaggcgtaataatccccagggaggccatgcgccacgg

SEQ ID NO: 24696 - DNA, 80 bp, synthetic construct
  misc_feature 1..80: note = Synthetic: >NC_002640.1-cand-10380-10459
  source 1..80: mol_type = other DNA
tgcgccacggaagctgtacgcgtggcatattggactagcggttagaggagacccctcccatcactgataaaacgcagcaa

SEQ ID NO: 24697 - DNA, 80 bp, synthetic construct
  misc_feature 1..80: note = Synthetic: >NC_002640.1-cand-10470-10549
  source 1..80: mol_type = other DNA
gaagccaggaggaagctgtactcctggtggaaggactagaggttagaggagacccccccaacacaaaaacagcatattga

SEQ ID NO: 24698 - DNA, 80 bp, synthetic construct
  misc_feature 1..80: note = Synthetic: >NC_002645.1-cand-10-89
  source 1..80: mol_type = other DNA
tctatctacagatagaaaagttgctttttagactttgtgtctacttttctcaactaaacgaaatttttgctatggccggc

SEQ ID NO: 24699 - DNA, 80 bp, synthetic construct
  misc_feature 1..80: note = Synthetic: >NC_002645.1-cand-90-169
  source 1..80: mol_type = other DNA
atctttgatgctggagtcgtagtgtaattgaaatttcatttgggttgcaacagtttggaagcaagtgctgtgtgtcctag

SEQ ID NO: 24700 - DNA, 80 bp, synthetic construct
  misc_feature 1..80: note = Synthetic: >NC_002645.1-cand-170-249
  source 1..80: mol_type = other DNA
tctaagggtttcgtgttccgtcacgagattccattctacaaacgccttactcgaggttccgtctcgtgtttgtgtggaag

SEQ ID NO: 24701 - DNA, 80 bp, synthetic construct
  misc_feature 1..80: note = Synthetic: >NC_002645.1-cand-250-329
  source 1..80: mol_type = other DNA
caaagttctgtctttgtggaaaccagtaactgttcctaatggcctgcaaccgtgtgacacttgccgtagcaagtgattct

SEQ ID NO: 24702 - DNA, 80 bp, synthetic construct
  misc_feature 1..80: note = Synthetic: >NC_002645.1-cand-330-409
  source 1..80: mol_type = other DNA
gaaatttctgcaaatggctgttctactattgcgcaagccgtccgccgttatagcgaggccgctagcaatggttttagggc

SEQ ID NO: 24703 - DNA, 80 bp, synthetic construct
  misc_feature 1..80: note = Synthetic: >NC_002645.1-cand-410-489
  source 1..80: mol_type = other DNA
atgccgatttgtttcattagatttgcaggattgcatcgttggcattgcagacgatacatatgttatgggtctgcatggca

SEQ ID NO: 24704 - DNA, 80 bp, synthetic construct
  misc_feature 1..80: note = Synthetic: >NC_002645.1-cand-490-569
  source 1..80: mol_type = other DNA
atcagacgttgttttgcaacataatgaaattttctgaccgtccttttatgcttcatgggtggttggttttttccaattca

SEQ ID NO: 24705 - DNA, 80 bp, synthetic construct
  misc_feature 1..80: note = Synthetic: >NC_002645.1-cand-570-649
  source 1..80: mol_type = other DNA
aattaccttttggaggaatttgatgttgtcttcggtaagagaggtggtggtaatgtgacatacactgaccagtatctctg

SEQ ID NO: 24706 - DNA, 80 bp, synthetic construct
  misc_feature 1..80: note = Synthetic: >NC_002645.1-cand-650-729
  source 1..80: mol_type = other DNA
tggcgccgatggcaaacctgttatgagtgaagatttatggcagtttgttgaccatttcggtgagaacgaagaaattatca

SEQ ID NO: 24707 - DNA, 80 bp, synthetic construct
  misc_feature 1..80: note = Synthetic: >NC_002645.1-cand-730-809
  source 1..80: mol_type = other DNA
tcaatggtcatacttacgtttgtgcttggcttactaagcgtaagcccttagattacaaacgtcagaacaaccttgccatt

SEQ ID NO: 24708 - DNA, 80 bp, synthetic construct
  misc_feature 1..80: note = Synthetic: >NC_002645.1-cand-810-889
  source 1..80: mol_type = other DNA
gaagagattgaatatgtgcatggtgatgctttgcatacactacgcaatggttctgttcttgaaatggctaaggaagtgaa

SEQ ID NO: 24709 - DNA, 80 bp, synthetic construct
  misc_feature 1..80: note = Synthetic: >NC_002645.1-cand-3420-3499
  source 1..80: mol_type = other DNA
aagatactcaaacaattggataacaactgctgggttaactcagttatgttacaaatacaattaactggtatacttgatgg

SEQ ID NO: 24710 - DNA, 80 bp, synthetic construct
  misc_feature 1..80: note = Synthetic: >NC_002645.1-cand-3500-3579
  source 1..80: mol_type = other DNA
tgactatgctatgcagttttttaaaatgggccgagttgccaagatgattgaacgctgctacactgctgagcaatgtatac

SEQ ID NO: 24711 - DNA, 80 bp, synthetic construct
  misc_feature 1..80: note = Synthetic: >NC_002645.1-cand-3580-3659
  source 1..80: mol_type = other DNA
gtggtgctatgggtgatgttggtttgtgtatgtatagactgcttaaagacttacacactggttttatggttatggattat

SEQ ID NO: 24712 - DNA, 80 bp, synthetic construct
  misc_feature 1..80: note = Synthetic: >NC_002645.1-cand-3660-3739
  source 1..80: mol_type = other DNA
aaatgtagttgtaccagtggtaggcttgaagaatcgggagctgttttgttttgtacgcccactaagaaggcgtttcctta

SEQ ID NO: 24713 - DNA, 80 bp, synthetic construct
  misc_feature 1..80: note = Synthetic: >NC_002645.1-cand-3740-3819
  source 1..80: mol_type = other DNA
tggtacttgtctaaattgtaacgcacctcgcatgtgtacaattaggcagttacaaggtaccataatatttgtgcaacaaa

SEQ ID NO: 24714 - DNA, 80 bp, synthetic construct
  misc_feature 1..80: note = Synthetic: >NC_002645.1-cand-3820-3899
  source 1..80: mol_type = other DNA
aaccagaacctgttaatcctgtttcttttgttgttaaaccagtctgctcatcaatttttcgtggtgctgtgtcttgtggt

SEQ ID NO: 24715 - DNA, 80 bp, synthetic construct
  misc_feature 1..80: note = Synthetic: >NC_002645.1-cand-3900-3979
  source 1..80: mol_type = other DNA
cattaccagactaacatctattcacaaaatttgtgtgtggatggttttggtgttaacaagattcagccctggacaaatga

SEQ ID NO: 24716 - DNA, 80 bp, synthetic construct
  misc_feature 1..80: note = Synthetic: >NC_002645.1-cand-3980-4059
  source 1..80: mol_type = other DNA
tgcacttaatactatttgtattaaggatgcagattataatgcaaaagttgaaatatctgttacaccaattaaaaatacag

SEQ ID NO: 24717 - DNA, 80 bp, synthetic construct
  misc_feature 1..80: note = Synthetic: >NC_002645.1-cand-4060-4139
  source 1..80: mol_type = other DNA
ttgatacaacacctaaggaagaatttgttgttaaagagaagttgaacgccttcctcgttcatgacaatgtagctttctac

SEQ ID NO: 24718 - DNA, 80 bp, synthetic construct
  misc_feature 1..80: note = Synthetic: >NC_002645.1-cand-4140-4219
  source 1..80: mol_type = other DNA
caaggtgatgttgatactgttgttaatggtgttgactttgactttattgtaaatgctgctaatgagaaccttgctcatgg

SEQ ID NO: 24719 - DNA, 80 bp, synthetic construct
  misc_feature 1..80: note = Synthetic: >NC_002645.1-cand-4220-4299
  source 1..80: mol_type = other DNA
tggaggacttgccaaagctttagatgtgtacactaaaggtaaacttcaacgtttatctaaagaacacattggattagcgg

SEQ ID NO: 24720 - DNA, 80 bp, synthetic construct
  misc_feature 1..80: note = Synthetic: >NC_002645.1-cand-4300-4379
  source 1..80: mol_type = other DNA
gtaaagtaaaagttggtacaggagttatggttgagtgtgatagccttagaatttttaatgttgttggtccacgcaagggt

SEQ ID NO: 24721 - DNA, 80 bp, synthetic construct
  misc_feature 1..80: note = Synthetic: >NC_002645.1-cand-4380-4459
  source 1..80: mol_type = other DNA
aaacatgaacgtgatttactcataaaagcttacaacactattaataatgaacaaggcacacctttaacaccaattttgag

SEQ ID NO: 24722 - DNA, 80 bp, synthetic construct
  misc_feature 1..80: note = Synthetic: >NC_002645.1-cand-4460-4539
  source 1..80: mol_type = other DNA
ctgtggtatttttggtatcaaactcgaaacttcattagaagttttgcttgatgtttgtaatacaaaagaagttaaagttt

SEQ ID NO: 24723 - DNA, 80 bp, synthetic construct
  misc_feature 1..80: note = Synthetic: >NC_002645.1-cand-4540-4619
  source 1..80: mol_type = other DNA
ttgtttatacagacacagaggtttgtaaggttaaggattttgtgtctggtttagtgaatgttcaaaaagttgagcaacct

SEQ ID NO: 24724 - DNA, 80 bp, synthetic construct
  misc_feature 1..80: note = Synthetic: >NC_002645.1-cand-4620-4699
  source 1..80: mol_type = other DNA
aaaatagaaccaaaaccagtgtccgtaattaaagttgcacccaagccttacagggtagatggtaaatttagttactttac

SEQ ID NO: 24725 - DNA, 80 bp, synthetic construct
  misc_feature 1..80: note = Synthetic: >NC_002645.1-cand-8540-8619
  source 1..80: mol_type = other DNA
gtcaggtcaaattttacttaattgtgcattaggtgcttttgctattttttgttgttttcttgtgacaaagtttagacgca

SEQ ID NO: 24726 - DNA, 80 bp, synthetic construct
  misc_feature 1..80: note = Synthetic: >NC_002645.1-cand-8620-8699
  source 1..80: mol_type = other DNA
tgtttggtgacctttctgtaggtgtttgcactgttgttgtggctgttttgcttaacaatgtctcttacattgtaactcag

SEQ ID NO: 24727 - DNA, 80 bp, synthetic construct
  misc_feature 1..80: note = Synthetic: >NC_002645.1-cand-8700-8779
  source 1..80: mol_type = other DNA
aatttagtaacaatgattgcttatgccatattgtatttctttgctactagaagcttacgctatgcatggatttggtgtgc

SEQ ID NO: 24728 - DNA, 80 bp, synthetic construct
  misc_feature 1..80: note = Synthetic: >NC_002645.1-cand-8780-8859
  source 1..80: mol_type = other DNA
tgcatatttaattgcgtatatttcttttgctccatggtggttgtgtgcttggtactttcttgctatgttgacaggtttgt

SEQ ID NO: 24729 - DNA, 80 bp, synthetic construct
  misc_feature 1..80: note = Synthetic: >NC_002645.1-cand-8860-8939
  source 1..80: mol_type = other DNA
tacctagtttgctgaagcttaaagtttcgacaaatcttttcgaaggtgacaaatttgtaggtacatttgaaagtgctgct

SEQ ID NO: 24730 - DNA, 80 bp, synthetic construct
  misc_feature 1..80: note = Synthetic: >NC_002645.1-cand-8940-9019
  source 1..80: mol_type = other DNA
gcaggaacatttgtcattgacatgcgttcttatgagaaacttgctaatagcatctctccagaaaagttgaaaagttatgc

SEQ ID NO: 24731 - DNA, 80 bp, synthetic construct
  misc_feature 1..80: note = Synthetic: >NC_002645.1-cand-9020-9099
  source 1..80: mol_type = other DNA
tgctagctataatagatataagtactatagtggtaatgcaaatgaagctgattaccgttgcgcttgttatgcctatttag

SEQ ID NO: 24732 - DNA, 80 bp, synthetic construct
  misc_feature 1..80: note = Synthetic: >NC_002645.1-cand-9100-9179
  source 1..80: mol_type = other DNA
caaaagcaatgttggacttttcgcgtgatcataatgacatcttgtacacacctccgactgtcagttatggttctacatta

SEQ ID NO: 24733 - DNA, 80 bp, synthetic construct
  misc_feature 1..80: note = Synthetic: >NC_002645.1-cand-9180-9259
  source 1..80: mol_type = other DNA
caggctggtttgcgcaaaatggcacaaccatctggctttgtggagaaatgtgttgtccgtgtctgctatggaaacactgt

SEQ ID NO: 24734 - DNA, 80 bp, synthetic construct
  misc_feature 1..80: note = Synthetic: >NC_002645.1-cand-9260-9339
  source 1..80: mol_type = other DNA
gttgaatgggttgtggcttggtgatattgtttattgcccacgtcatgttatcgcatctaacacaacttctgctatagatt

SEQ ID NO: 24735 - DNA, 80 bp, synthetic construct
  misc_feature 1..80: note = Synthetic: >NC_002645.1-cand-9340-9419
  source 1..80: mol_type = other DNA
atgatcacgaatatagtattatgcggttgcataatttttctataatatctggtacagcatttcttggtgttgtaggtgct

SEQ ID NO: 24736 - DNA, 80 bp, synthetic construct
  misc_feature 1..80: note = Synthetic: >NC_002645.1-cand-9420-9499
  source 1..80: mol_type = other DNA
actatgcatggagtaactcttaaaattaaggtttcacagactaacatgcacacacctagacattcttttagaacactaaa

SEQ ID NO: 24737 - DNA, 80 bp, synthetic construct
  misc_feature 1..80: note = Synthetic: >NC_002645.1-cand-9500-9579
  source 1..80: mol_type = other DNA
atctggtgaaggttttaacatcttagcatgctatgatggttgtgctcaaggtgtttttggtgtgaacatgagaactaatt

SEQ ID NO: 24738 - DNA, 80 bp, synthetic construct
  misc_feature 1..80: note = Synthetic: >NC_002645.1-cand-9580-9659
  source 1..80: mol_type = other DNA
ggactatccgtggttcatttattaatggtgcgtgtggttcccctggctacaatcttaaaaatggcgaggtggaatttgtt

SEQ ID NO: 24739 - DNA, 80 bp, synthetic construct
  misc_feature 1..80: note = Synthetic: >NC_002645.1-cand-9660-9739
  source 1..80: mol_type = other DNA
tatatgcatcaaattgaactcggaagtggtagccatgtaggttctagctttgatggtgttatgtatggtggttttgaaga

SEQ ID NO: 24740 - DNA, 80 bp, synthetic construct
  misc_feature 1..80: note = Synthetic: >NC_002645.1-cand-9740-9819
  source 1..80: mol_type = other DNA
ccaacctaatcttcaagttgaatctgcaaaccagatgttaacagttaatgtggttgcatttctttatgctgctatattga

SEQ ID NO: 24741 - DNA, 80 bp, synthetic construct
  misc_feature 1..80: note = Synthetic: >NC_002645.1-cand-12340-12419
  source 1..80: mol_type = other DNA
ccatggacggtttttgtcagtacaaaggcaagtgggtacaagtgcctataggtacaaatgaccctataagattttgtctt

SEQ ID NO: 24742 - DNA, 80 bp, synthetic construct
  misc_feature 1..80: note = Synthetic: >NC_002645.1-cand-12420-12499
  source 1..80: mol_type = other DNA
gaaaatactgtttgtaaagtttgtggttgttggcttaatcatggctgtacatgtgaccggactgctatccaaagttttga

SEQ ID NO: 24743 - DNA, 80 bp, synthetic construct
  misc_feature 1..80: note = Synthetic: >NC_002645.1-cand-12530-12609
  source 1..80: mol_type = other DNA
agtgccgctcgactagagccctgtaatggtacagacatagattactgtgtccgtgcatttgacgtttacaataaagatgc

SEQ ID NO: 24744 - DNA, 80 bp, synthetic construct
  misc_feature 1..80: note = Synthetic: >NC_002645.1-cand-12580-12659
  source 1..80: mol_type = other DNA
ccgtgcatttgacgtttacaataaagatgcgtcttttatcggaaaaaatctgaagtccaattgtgtgcgcttcaagaatg

SEQ ID NO: 24745 - DNA, 80 bp, synthetic construct
  misc_feature 1..80: note = Synthetic: >NC_002645.1-cand-12660-12739
  source 1..80: mol_type = other DNA
tagataaggatgacgcgttctatattgttaaacgttgcattaagtcagttatggaccacgagcagtccatgtataactta

SEQ ID NO: 24746 - DNA, 80 bp, synthetic construct
  misc_feature 1..80: note = Synthetic: >NC_002645.1-cand-12740-12819
  source 1..80: mol_type = other DNA
cttaaaggctgtaatgctgttgctaagcatgatttctttacttggcatgagggcagaaccatttatggtaatgttagtag

SEQ ID NO: 24747 - DNA, 80 bp, synthetic construct
  misc_feature 1..80: note = Synthetic: >NC_002645.1-cand-12820-12899
  source 1..80: mol_type = other DNA
acaggatcttactaaatacaccatgatggatttgtgcttcgctctgcgtaactttgatgaaaaagactgtgaagttttta

SEQ ID NO: 24748 - DNA, 80 bp, synthetic construct
  misc_feature 1..80: note = Synthetic: >NC_002645.1-cand-12910-12989
  source 1..80: mol_type = other DNA
ggttcttactggttgttgtagtactgattactttgaaatgaagaattggtttgaccccatagaaaatgaggacatacacc

SEQ ID NO: 24749 - DNA, 80 bp, synthetic construct
  misc_feature 1..80: note = Synthetic: >NC_002645.1-cand-12990-13069
  source 1..80: mol_type = other DNA
gtgtgtatgctgctttaggtaaggtagttgcaaatgcaatgcttaagtgtgttgctttttgcgacgaaatggtgctcaaa

SEQ ID NO: 24750 - DNA, 80 bp, synthetic construct
  misc_feature 1..80: note = Synthetic: >NC_002645.1-cand-13070-13149
  source 1..80: mol_type = other DNA
ggagttgttggtgttttgaccttagacaaccaagatcttaatgggaatttctatgacttcggtgactttgtattgtgtcc

SEQ ID NO: 24751 - DNA, 80 bp, synthetic construct
  misc_feature 1..80: note = Synthetic: >NC_002645.1-cand-13150-13229
  source 1..80: mol_type = other DNA
tcctggaatgggaataccctactgcacgtcatactattcttatatgatgcctgttatgggtatgactaattgtttagcta

SEQ ID NO: 24752 - DNA, 80 bp, synthetic construct
  misc_feature 1..80: note = Synthetic: >NC_002645.1-cand-13230-13309
  source 1..80: mol_type = other DNA
gtgagtgctttatgaaaagtgacatctttggtcaagacttcaaaacttttgatttgttgaaatatgatttcacagaacat

SEQ ID NO: 24753 - DNA, 80 bp, synthetic construct
  misc_feature 1..80: note = Synthetic: >NC_002645.1-cand-13350-13429
  source 1..80: mol_type = other DNA
aggattatcatcctgattgtgttgattgccatgacgagatgtgtattttgcattgttcaaattttaacacactcttcgca

SEQ ID NO: 24754 - DNA, 80 bp, synthetic construct
  misc_feature 1..80: note = Synthetic: >NC_002645.1-cand-13390-13469
  source 1..80: mol_type = other DNA
gtgtattttgcattgttcaaattttaacacactcttcgcaaccacaattccaaacacggcttttggacctctatgcagaa

SEQ ID NO: 24755 - DNA, 80 bp, synthetic construct
  misc_feature 1..80: note = Synthetic: >NC_002645.1-cand-13470-13549
  source 1..80: mol_type = other DNA
aagtgtttattgatggtgtacccgtagttgctactgctggttaccactttaaacaattaggacttgtgtggaacaaagat

SEQ ID NO: 24756 - DNA, 80 bp, synthetic construct
  misc_feature 1..80: note = Synthetic: >NC_002645.1-cand-13550-13629
  source 1..80: mol_type = other DNA
gttaacactcattctaccagacttactattactgaactcttacagtttgtgacagatccaacgcttatagttgcgtcatc

SEQ ID NO: 24757 - DNA, 80 bp, synthetic construct
  misc_feature 1..80: note = Synthetic: >NC_002645.1-cand-16200-16279
  source 1..80: mol_type = other DNA
gttctcacgctgctgttgattcgctctgtgcaaaagctgtcacagcctatagtgttgataagtgtacacgtattattcct

SEQ ID NO: 24758 - DNA, 80 bp, synthetic construct
  misc_feature 1..80: note = Synthetic: >NC_002645.1-cand-16280-16359
  source 1..80: mol_type = other DNA
gcacgtgccagagttgagtgttatagtggttttaaacctaacaataatagtgcacaatacgtgtttagtactgttaatgc

SEQ ID NO: 24759 - DNA, 80 bp, synthetic construct
  misc_feature 1..80: note = Synthetic: >NC_002645.1-cand-16360-16439
  source 1..80: mol_type = other DNA
gttacctgaagttaatgcagacattgttgtcgtggatgaggtgtctatgtgcactaactatgacttgtctgtgattaacc

SEQ ID NO: 24760 - DNA, 80 bp, synthetic construct
  misc_feature 1..80: note = Synthetic: >NC_002645.1-cand-16440-16519
  source 1..80: mol_type = other DNA
agcgtatatcatataaacacattgtatatgttggtgatcctcaacagcttccagctcctagagttcttatctctaaaggt

SEQ ID NO: 24761 - DNA, 80 bp, synthetic construct
  misc_feature 1..80: note = Synthetic: >NC_002645.1-cand-16520-16599
  source 1..80: mol_type = other DNA
gttatggaaccaattgactataatgttgtgacacaacgtatgtgtgctataggacccgatgtctttttacacaagtgtta

SEQ ID NO: 24762 - DNA, 80 bp, synthetic construct
  misc_feature 1..80: note = Synthetic: >NC_002645.1-cand-16600-16679
  source 1..80: mol_type = other DNA
cagatgtcctgctgaaatagttaacactgtttcagagcttgtttatgaaaacaagtttgtacctgtcaaagaagctagta

SEQ ID NO: 24763 - DNA, 80 bp, synthetic construct
  misc_feature 1..80: note = Synthetic: >NC_002645.1-cand-16680-16759
  source 1..80: mol_type = other DNA
agcagtgcttcaaaatctttgaacgcggtagtgttcaggtagacaatggctccagtataaataggcgtcaacttgatgtt

SEQ ID NO: 24764 - DNA, 80 bp, synthetic construct
  misc_feature 1..80: note = Synthetic: >NC_002645.1-cand-16760-16839
  source 1..80: mol_type = other DNA
gttaagcgatttatacataaaaactccacatggagcaaggctgtgtttatctcaccttacaatagtcaaaattatgtagc

SEQ ID NO: 24765 - DNA, 80 bp, synthetic construct
  misc_feature 1..80: note = Synthetic: >NC_002645.1-cand-16840-16919
  source 1..80: mol_type = other DNA
tgccaggcttttaggcttacaaactcagacagtggattctgctcaaggtagtgaatatgactatgttatattcgcacaga

SEQ ID NO: 24766 - DNA, 80 bp, synthetic construct
  misc_feature 1..80: note = Synthetic: >NC_002645.1-cand-16920-16999
  source 1..80: mol_type = other DNA
catcagatactgctcatgcctgtaatgccaatcgttttaacgttgccattactagagcaaagaaaggtattttctgtatt

SEQ ID NO: 24767 - DNA, 80 bp, synthetic construct
  misc_feature 1..80: note = Synthetic: >NC_002645.1-cand-17000-17079
  source 1..80: mol_type = other DNA
atgtctgacagaactttgtttgatgcacttaagttctttgaaatcactatgacagatttacagtctgaaagtagttgtgg

SEQ ID NO: 24768 - DNA, 80 bp, synthetic construct
  misc_feature 1..80: note = Synthetic: >NC_002645.1-cand-17080-17159
  source 1..80: mol_type = other DNA
tttgtttaaggattgtgcacgtaaccctattgatttaccaccaagtcatgccactacttatttgtcattgtctgatagat

SEQ ID NO: 24769 - DNA, 80 bp, synthetic construct
  misc_feature 1..80: note = Synthetic: >NC_002645.1-cand-17160-17239
  source 1..80: mol_type = other DNA
ttaagactagtggtgacttggctgttcaaataggtaacaacaatgtttgtacctatgaacatgtgatttcatatatgggt

SEQ ID NO: 24770 - DNA, 80 bp, synthetic construct
  misc_feature 1..80: note = Synthetic: >NC_002645.1-cand-17240-17319
  source 1..80: mol_type = other DNA
ttcaggtttgatgttagcatgcctggtagtcatagtttgttctgtactagagactttgccatgcgtcatgtcagaggttg

SEQ ID NO: 24771 - DNA, 80 bp, synthetic construct
  misc_feature 1..80: note = Synthetic: >NC_002645.1-cand-17320-17399
  source 1..80: mol_type = other DNA
gttaggaatggatgtggaaggtgcacatgtcacaggtgacaatgttggcactaatgtacctctacaagttggtttttcca

SEQ ID NO: 24772 - DNA, 80 bp, synthetic construct
  misc_feature 1..80: note = Synthetic: >NC_002645.1-cand-17400-17479
  source 1..80: mol_type = other DNA
atggtgttgattttgtagctcaacctgaaggttgtgttctaacaaacactggcagtgttgtaaaacctgttcgtgctcgt

SEQ ID NO: 24773 - DNA, 80 bp, synthetic construct
  misc_feature 1..80: note = Synthetic: >NC_002645.1-cand-21330-21409
  source 1..80: mol_type = other DNA
aactctgttattaacagactgagatgtgaccagttgtcctttgatgtaccagatggtttttattctacaagccctattca

SEQ ID NO: 24774 - DNA, 80 bp, synthetic construct
  misc_feature 1..80: note = Synthetic: >NC_002645.1-cand-21410-21489
  source 1..80: mol_type = other DNA
atccgttgagctacctgtgtctattgtgtcgctacctgtttatcataaacatacgtttattgtgttgtacgttgacttca

SEQ ID NO: 24775 - DNA, 80 bp, synthetic construct
  misc_feature 1..80: note = Synthetic: >NC_002645.1-cand-21490-21569
  source 1..80: mol_type = other DNA
aacctcagagtggcggtggcaagtgctttaactgttatcctgctggtgttaatattacactggccaattttaatgaaact

SEQ ID NO: 24776 - DNA, 80 bp, synthetic construct
  misc_feature 1..80: note = Synthetic: >NC_002645.1-cand-21560-21639
  source 1..80: mol_type = other DNA
taatgaaactaaagggcctttgtgtgttgacacatcacacttcactaccaaatacgttgctgtttatgccaatgttggta

SEQ ID NO: 24777 - DNA, 80 bp, synthetic construct
  misc_feature 1..80: note = Synthetic: >NC_002645.1-cand-21640-21719
  source 1..80: mol_type = other DNA
ggtggagtgctagtattaacacgggaaattgccctttttcttttggcaaagttaataactttgttaaatttggcagtgta

SEQ ID NO: 24778 - DNA, 80 bp, synthetic construct
  misc_feature 1..80: note = Synthetic: >NC_002645.1-cand-21720-21799
  source 1..80: mol_type = other DNA
tgtttttcgctaaaggatatacccggtggttgcgcaatgcctatagtggctaattgggcttatagtaagtactatactat

SEQ ID NO: 24779 - DNA, 80 bp, synthetic construct
  misc_feature 1..80: note = Synthetic: >NC_002645.1-cand-21800-21879
  source 1..80: mol_type = other DNA
aggctcattgtatgtttcttggagtgatggtgatggaattactggcgtcccacaacctgttgagggtgttagttccttta

SEQ ID NO: 24780 - DNA, 80 bp, synthetic construct
  misc_feature 1..80: note = Synthetic: >NC_002645.1-cand-21880-21959
  source 1..80: mol_type = other DNA
tgaatgttacattggacaaatgtactaaatataatatttatgatgtatctggtgtgggtgttattcgcgttagcaatgac

SEQ ID NO: 24781 - DNA, 80 bp, synthetic construct
  misc_feature 1..80: note = Synthetic: >NC_002645.1-cand-21960-22039
  source 1..80: mol_type = other DNA
acctttcttaatggaattacgtacacatcaacttcaggtaaccttctgggttttaaagatgttactaagggcaccatcta

SEQ ID NO: 24782 - DNA, 80 bp, synthetic construct
  misc_feature 1..80: note = Synthetic: >NC_002645.1-cand-22040-22119
  source 1..80: mol_type = other DNA
ctctatcactccttgtaacccaccagatcagcttgttgtttatcagcaagctgttgttggtgctatgttgtctgaaaatt

SEQ ID NO: 24783 - DNA, 80 bp, synthetic construct
  misc_feature 1..80: note = Synthetic: >NC_002645.1-cand-22120-22199
  source 1..80: mol_type = other DNA
ttactagttacggcttttctaatgttgtagaactgccgaaatttttctatgcgtccaatggcacttataattgcacagac

SEQ ID NO: 24784 - DNA, 80 bp, synthetic construct
  misc_feature 1..80: note = Synthetic: >NC_002645.1-cand-22200-22279
  source 1..80: mol_type = other DNA
gctgttttaacttattctagttttggcgtttgtgcagatggttctataattgctgttcaaccacgtaatgtttcatatga

SEQ ID NO: 24785 - DNA, 80 bp, synthetic construct
  misc_feature 1..80: note = Synthetic: >NC_002645.1-cand-22280-22359
  source 1..80: mol_type = other DNA
tagtgtttcagctatcgtcacagctaatttgtctataccttccaattggaccacttcggtccaggttgagtatttacaaa

SEQ ID NO: 24786 - DNA, 80 bp, synthetic construct
  misc_feature 1..80: note = Synthetic: >NC_002645.1-cand-22360-22439
  source 1..80: mol_type = other DNA
ttacaagtacacctatcgtagttgattgctccacttatgtttgcaatggtaatgtgcgctgtgttgaattgcttaagcag

SEQ ID NO: 24787 - DNA, 80 bp, synthetic construct
  misc_feature 1..80: note = Synthetic: >NC_002645.1-cand-22440-22519
  source 1..80: mol_type = other DNA
tatacttctgcttgtaaaactattgaagacgccttaagaaatagcgccaggctggagtctgcagatgttagtgagatgct

SEQ ID NO: 24788 - DNA, 80 bp, synthetic construct
  misc_feature 1..80: note = Synthetic: >NC_002645.1-cand-22520-22599
  source 1..80: mol_type = other DNA
cacttttgacaagaaagcgtttacacttgctaatgttagtagttttggtgactacaaccttagcagcgtcatacctagct

SEQ ID NO: 24789 - DNA, 80 bp, synthetic construct
  misc_feature 1..80: note = Synthetic: >NC_002645.1-cand-25170-25249
  source 1..80: mol_type = other DNA
ttgtcaatctttgacacctgggctaattgggattctaattgggcctttgttgcatttagcttttttatggccgtatcaac

SEQ ID NO: 24790 - DNA, 80 bp, synthetic construct
  misc_feature 1..80: note = Synthetic: >NC_002645.1-cand-25250-25329
  source 1..80: mol_type = other DNA
actcgttatgtgggtgatgtacttcgcaaacagtttcagacttttccgacgtgctcgaactttttgggcatggaatcctg

SEQ ID NO: 24791 - DNA, 80 bp, synthetic construct
  misc_feature 1..80: note = Synthetic: >NC_002645.1-cand-25330-25409
  source 1..80: mol_type = other DNA
aggttaatgcaatcactgtcacaaccgtgttgggacagacatactatcaacccattcaacaagctccaacaggcattact

SEQ ID NO: 24792 - DNA, 80 bp, synthetic construct
  misc_feature 1..80: note = Synthetic: >NC_002645.1-cand-25420-25499
  source 1..80: mol_type = other DNA
tgagcggcgtgctttacgttgacggacatagattggcttcaggtgttcaggttcataacctacctgaatacatgacagtt

SEQ ID NO: 24793 - DNA, 80 bp, synthetic construct
  misc_feature 1..80: note = Synthetic: >NC_002645.1-cand-25510-25589
  source 1..80: mol_type = other DNA
gcactactataatttatagtagagtcggaaggtccgtaaattcacaaaatagcacaggctgggttttctacgtacgagta

SEQ ID NO: 24794 - DNA, 80 bp, synthetic construct
  misc_feature 1..80: note = Synthetic: >NC_002645.1-cand-25590-25669
  source 1..80: mol_type = other DNA
aaacacggtgatttttctgcagtgagctctcccatgagcaacatgacagaaaacgaaagattgcttcattttttctaaac

SEQ ID NO: 24795 - DNA, 80 bp, synthetic construct
  misc_feature 1..80: note = Synthetic: >NC_002645.1-cand-25670-25749
  source 1..80: mol_type = other DNA
tgaacgaaaagatggctacagtcaaatgggctgatgcatctgaaccacaacgtggtcgtcagggtagaataccttattct

SEQ ID NO: 24796 - DNA, 80 bp, synthetic construct
  misc_feature 1..80: note = Synthetic: >NC_002645.1-cand-25750-25829
  source 1..80: mol_type = other DNA
ctttatagccctttgcttgttgatagtgaacaaccttggaaggtgatacctcgtaatttggtacccatcaacaagaaaga

SEQ ID NO: 24797 - DNA, 80 bp, synthetic construct
  misc_feature 1..80: note = Synthetic: >NC_002645.1-cand-25830-25909
  source 1..80: mol_type = other DNA
caaaaataagcttataggctattggaatgttcaaaaacgtttcagaactagaaagggcaaacgggtggatttgtcaccca

SEQ ID NO: 24798 - DNA, 80 bp, synthetic construct
  misc_feature 1..80: note = Synthetic: >NC_002645.1-cand-25910-25989
  source 1..80: mol_type = other DNA
agctgcatttttattatcttggcacaggaccccataaagatgcaaaatttagagagcgtgttgaaggtgtcgtctgggtt

SEQ ID NO: 24799 - DNA, 80 bp, synthetic construct
  misc_feature 1..80: note = Synthetic: >NC_002645.1-cand-25990-26069
  source 1..80: mol_type = other DNA
gctgttgatggtgctaaaactgaacctacaggttacggtgttaggcgcaagaattcagaaccagagataccacacttcaa

SEQ ID NO: 24800 - DNA, 80 bp, synthetic construct
  misc_feature 1..80: note = Synthetic: >NC_002645.1-cand-26070-26149
  source 1..80: mol_type = other DNA
tcaaaagctcccaaatggtgttactgttgttgaagaacctgactcccgtgctccttcccggtctcagtcgaggtcgcaga

SEQ ID NO: 24801 - DNA, 80 bp, synthetic construct
  misc_feature 1..80: note = Synthetic: >NC_002645.1-cand-26160-26239
  source 1..80: mol_type = other DNA
tggtgaatccaaacctcaatctcggaatccttcaagtgacagaaaccataacagtcaggatgacatcatgaaggcagttg

SEQ ID NO: 24802 - DNA, 80 bp, synthetic construct
  misc_feature 1..80: note = Synthetic: >NC_002645.1-cand-26240-26319
  source 1..80: mol_type = other DNA
ctgcggctcttaaatctttaggttttgacaagcctcaggaaaaagataaaaagtcagcgaaaacgggtactcctaagcct

SEQ ID NO: 24803 - DNA, 80 bp, synthetic construct
  misc_feature 1..80: note = Synthetic: >NC_002645.1-cand-26320-26399
  source 1..80: mol_type = other DNA
tctcgtaatcagagtcctgcttcttctcaaacttctgccaagagtcttgctcgttctcagagttctgaaacaaaagaaca

SEQ ID NO: 24804 - DNA, 80 bp, synthetic construct
  misc_feature 1..80: note = Synthetic: >NC_002645.1-cand-26400-26479
  source 1..80: mol_type = other DNA
aaagcatgaaatgcaaaagccacggtggaaaagacagcctaatgatgatgtgacatctaatgtcacacaatgttttggcc

SEQ ID NO: 24805 - DNA, 80 bp, synthetic construct
  misc_feature 1..80: note = Synthetic: >NC_002728.1-cand-1820-1899
  source 1..80: mol_type = other DNA
caaatgatactcttttatgggcaaaccgaagaaccaatgtctacatgtaaattgagctttggtattgcaatctaatactt

SEQ ID NO: 24806 - DNA, 80 bp, synthetic construct
  misc_feature 1..80: note = Synthetic: >NC_002728.1-cand-1900-1979
  source 1..80: mol_type = other DNA
gctcaaaatcttgaactattagtgtaatttctatcatcatagagttatcaagattttattatataagttggtgcagatct

SEQ ID NO: 24807 - DNA, 80 bp, synthetic construct
  misc_feature 1..80: note = Synthetic: >NC_002728.1-cand-1980-2059
  source 1..80: mol_type = other DNA
ttggacatgaattacacactacactctaatgaagacaaaatttacattacatatttaaggactatttcctatcctttcaa

SEQ ID NO: 24808 - DNA, 80 bp, synthetic construct
  misc_feature 1..80: note = Synthetic: >NC_002728.1-cand-2060-2139
  source 1..80: mol_type = other DNA
tggtacttggttatgaaggtttcttaatttaactaagctactgtctttgcactggaatatacaatacctcttacctcatt

SEQ ID NO: 24809 - DNA, 80 bp, synthetic construct
  misc_feature 1..80: note = Synthetic: >NC_002728.1-cand-2140-2219
  source 1..80: mol_type = other DNA
tcttactttaatatcatgttatttttttgataagtcacttaacttgaccaaggtctaccaggtaatgctcgcacaagtga

SEQ ID NO: 24810 - DNA, 80 bp, synthetic construct
  misc_feature 1..80: note = Synthetic: >NC_002728.1-cand-2220-2299
  source 1..80: mol_type = other DNA
actgcaatctcaacttagattaaacataatcatgcaaaatcactattttgtactactaactcattaagaaaaacttagga

SEQ ID NO: 24811 - DNA, 80 bp, synthetic construct
  misc_feature 1..80: note = Synthetic: >NC_002728.1-cand-2300-2379
  source 1..80: mol_type = other DNA
tccaagagatttactctaggatctcctattaagcttagcagtcattagttgagagttcaacttgcaaaactctaaccttc

SEQ ID NO: 24812 - DNA, 80 bp, synthetic construct
  misc_feature 1..80: note = Synthetic: >NC_002728.1-cand-2380-2459
  source 1..80: mol_type = other DNA
actctaataacaattcatccaatggataaattggaactagtcaatgatggcctcaatattattgactttattcagaagaa

SEQ ID NO: 24813 - DNA, 80 bp, synthetic construct
  misc_feature 1..80: note = Synthetic: >NC_002728.1-cand-2460-2539
  source 1..80: mol_type = other DNA
ccaaaaagaaatacagaagacatacggacgatcaagtattcaacaacccagcatcaaagatcaaacaaaagcctgggaag

SEQ ID NO: 24814 - DNA, 80 bp, synthetic construct
  misc_feature 1..80: note = Synthetic: >NC_002728.1-cand-2500-2579
  source 1..80: mol_type = other DNA
caacaacccagcatcaaagatcaaacaaaagcctgggaagattttctgcagtgcaccagtggagaatctgaacaagttga

SEQ ID NO: 24815 - DNA, 80 bp, synthetic construct
  misc_feature 1..80: note = Synthetic: >NC_002728.1-cand-2620-2699
  source 1..80: mol_type = other DNA
aacttggaggatctatccagtacttctcccacagatggaactattggaaagagagtgtcgaacacccgtgactgggcaga

SEQ ID NO: 24816 - DNA, 80 bp, synthetic construct
  misc_feature 1..80: note = Synthetic: >NC_002728.1-cand-2700-2779
  source 1..80: mol_type = other DNA
aggttcagatgacatacaactggacccagtggttacagacgttgtataccatgatcatggaggagaatgtaccggatatg

SEQ ID NO: 24817 - DNA, 80 bp, synthetic construct
  misc_feature 1..80: note = Synthetic: >NC_002728.1-cand-2780-2859
  source 1..80: mol_type = other DNA
gatttacttcaagccctgagagagggtggagtgattacacatcaggagcaaacaatgggaatgtatgtcttgtatctgat

SEQ ID NO: 24818 - DNA, 80 bp, synthetic construct
  misc_feature 1..80: note = Synthetic: >NC_002728.1-cand-2860-2939
  source 1..80: mol_type = other DNA
gcaaagatgctgtcctatgctcccgaaattgcagtttctaaagaagatcgggaaactgatctagttcatcttgagaataa

SEQ ID NO: 24819 - DNA, 80 bp, synthetic construct
  misc_feature 1..80: note = Synthetic: >NC_002728.1-cand-2940-3019
  source 1..80: mol_type = other DNA
actatctactacaggactgaatcccacagcagtaccgttcactctgagaaacctgtctgatcctgcaaaagactctcctg

SEQ ID NO: 24820 - DNA, 80 bp, synthetic construct
  misc_feature 1..80: note = Synthetic: >NC_002728.1-cand-3020-3099
  source 1..80: mol_type = other DNA
tgattgctgaacactactacggactaggagttaaagagcaaaacgttggccctcagactagcagaaatgtcaatttggac

SEQ ID NO: 24821 - DNA, 80 bp, synthetic construct
  misc_feature 1..80: note = Synthetic: >NC_002728.1-cand-5650-5729
  source 1..80: mol_type = other DNA
attctggaatctacatgattccacgaaccatgcttgagttcaggagaaacaatgccattgccttcaatcttctagtgtac

SEQ ID NO: 24822 - DNA, 80 bp, synthetic construct
  misc_feature 1..80: note = Synthetic: >NC_002728.1-cand-5680-5759
  source 1..80: mol_type = other DNA
tgcttgagttcaggagaaacaatgccattgccttcaatcttctagtgtacttgaagattgatgctgatttatccaaaatg

SEQ ID NO: 24823 - DNA, 80 bp, synthetic construct
  misc_feature 1..80: note = Synthetic: >NC_002728.1-cand-5820-5899
  source 1..80: mol_type = other DNA
gggaactttgtccgtcgtgcagggaagtattactctgttgattattgtaggaggaagattgataggatgaaattgcagtt

SEQ ID NO: 24824 - DNA, 80 bp, synthetic construct
  misc_feature 1..80: note = Synthetic: >NC_002728.1-cand-5890-5969
  source 1..80: mol_type = other DNA
aattgcagttttcactgggttccataggcggactaagtctccacattaagatcaatggtgtaatcagcaaacggctgttt

SEQ ID NO: 24825 - DNA, 80 bp, synthetic construct
  misc_feature 1..80: note = Synthetic: >NC_002728.1-cand-5970-6049
  source 1..80: mol_type = other DNA
gctcaaatgggattccaaaaaaacctttgtttctctttgatggacatcaatccttggctcaacagattgacctggaacaa

SEQ ID NO: 24826 - DNA, 80 bp, synthetic construct
  misc_feature 1..80: note = Synthetic: >NC_002728.1-cand-6050-6129
  source 1..80: mol_type = other DNA
cagttgtgagatcagccgagtagcagctgtgttgcagccttctattccaagagagttcatgatctatgatgatgtcttca

SEQ ID NO: 24827 - DNA, 80 bp, synthetic construct
  misc_feature 1..80: note = Synthetic: >NC_002728.1-cand-6130-6209
  source 1..80: mol_type = other DNA
ttgacaatacagggagaattctaaagggctaaacagaattcttctaaaatttaatcagtcatgagtttagtaatcatacc

SEQ ID NO: 24828 - DNA, 80 bp, synthetic construct
  misc_feature 1..80: note = Synthetic: >NC_002728.1-cand-6210-6289
  source 1..80: mol_type = other DNA
tagtcataatacatcacacaggactatttacaaaagacagttaaaaaatggaataatcatgtagtagtaattgagaacat

SEQ ID NO: 24829 - DNA, 80 bp, synthetic construct
  misc_feature 1..80: note = Synthetic: >NC_002728.1-cand-6290-6369
  source 1..80: mol_type = other DNA
tattagaatagtataactaaaatgtagtttttttgagtatttgatttaaaattagataactattacaaaaaacttaggag

SEQ ID NO: 24830 - DNA, 80 bp, synthetic construct
  misc_feature 1..80: note = Synthetic: >NC_002728.1-cand-6370-6449
  source 1..80: mol_type = other DNA
ccaagctcttgcctcgttcagaaggttaaacaagcattcttaccattggatcaacaaaaggattggttttatcgtctaag

SEQ ID NO: 24831 - DNA, 80 bp, synthetic construct
  misc_feature 1..80: note = Synthetic: >NC_002728.1-cand-6450-6529
  source 1..80: mol_type = other DNA
aaatttattgaaaggcaaagaaattcctggttttatgttgaatgaggtgtatcaaactaaggagaccttctaacagccag

SEQ ID NO: 24832 - DNA, 80 bp, synthetic construct
  misc_feature 1..80: note = Synthetic: >NC_002728.1-cand-6530-6609
  source 1..80: mol_type = other DNA
gtcataggaatataaataaaaataagaataaaattgattccatcggaagattcatttcaagaagtgatcaaatcaaagcg

SEQ ID NO: 24833 - DNA, 80 bp, synthetic construct
  misc_feature 1..80: note = Synthetic: >NC_002728.1-cand-6610-6689
  source 1..80: mol_type = other DNA
gttggcagacctaccaatcatataccacaagactcgacaatggtagttatacttgacaagagatgttattgtaatctttt

SEQ ID NO: 24834 - DNA, 80 bp, synthetic construct
  misc_feature 1..80: note = Synthetic: >NC_002728.1-cand-6700-6779
  source 1..80: mol_type = other DNA
ttgatgatctcggagtgtagtgttgggattctacattatgagaaattgagtaaaattggacttgtcaaaggagtaacaag

SEQ ID NO: 24835 - DNA, 80 bp, synthetic construct
  misc_feature 1..80: note = Synthetic: >NC_002728.1-cand-6780-6859
  source 1..80: mol_type = other DNA
aaaatacaagattaaaagcaatcctctcacaaaagacattgttataaaaatgattccgaatgtgtcgaacatgtctcagt

SEQ ID NO: 24836 - DNA, 80 bp, synthetic construct
  misc_feature 1..80: note = Synthetic: >NC_002728.1-cand-6860-6939
  source 1..80: mol_type = other DNA
gcacagggagtgtcatggaaaattataaaacacgattaaacggtatcttaacacctataaagggagcgttagagatctac

SEQ ID NO: 24837 - DNA, 80 bp, synthetic construct
  misc_feature 1..80: note = Synthetic: >NC_003310.1-cand-156900-156979
  source 1..80: mol_type = other DNA
tgttattatatctagacaccagcgtctacatgacgagcttccgagttccaattggttcaagttttacataagtataaagt

SEQ ID NO: 24838 - DNA, 80 bp, synthetic construct
  misc_feature 1..80: note = Synthetic: >NC_003310.1-cand-156980-157059
  source 1..80: mol_type = other DNA
ccgactattgttctatattatatatggttgttgatggatctatgatgtatgcgatagctgataatagaactcacgcaatt

SEQ ID NO: 24839 - DNA, 80 bp, synthetic construct
  misc_feature 1..80: note = Synthetic: >NC_003310.1-cand-157060-157139
  source 1..80: mol_type = other DNA
attagcaaaaatatattagacaatactacgattaacgatgagtgtagatgctgttattctgaaccacagattaggattct

SEQ ID NO: 24840 - DNA, 80 bp, synthetic construct
  misc_feature 1..80: note = Synthetic: >NC_003310.1-cand-157140-157219
  source 1..80: mol_type = other DNA
tgatagagatgagatgctcaatggatcatcgtgttatatgaacagacattgtattatgatgaatttacctgatgtaggcg

SEQ ID NO: 24841 - DNA, 80 bp, synthetic construct
  misc_feature 1..80: note = Synthetic: >NC_003310.1-cand-157240-157319
  source 1..80: mol_type = other DNA
gggaaatatgaacctgacatgattaagattgctctttcggtggctggtaatttaataagaaatcgagactacattcccgg

SEQ ID NO: 24842 - DNA, 80 bp, synthetic construct
  misc_feature 1..80: note = Synthetic: >NC_003310.1-cand-157300-157379
  source 1..80: mol_type = other DNA
aatcgagactacattcccgggagacgaggctatagctactacgtttacggtatagcctctagataatttttttaagcacg

SEQ ID NO: 24843 - DNA, 80 bp, synthetic construct
  misc_feature 1..80: note = Synthetic: >NC_003310.1-cand-157380-157459
  source 1..80: mol_type = other DNA
aaataaaaacataattttaaacaatctatttcatactattttgtgtgatcaacatgaacataaagatagatgatatgata

SEQ ID NO: 24844 - DNA, 80 bp, synthetic construct
  misc_feature 1..80: note = Synthetic: >NC_003310.1-cand-157540-157619
  source 1..80: mol_type = other DNA
agaaaaactactgatgttatcaaacctgattatcttgagtacaatgacttgttagatagagatgagatgtctactattct

SEQ ID NO: 24845 - DNA, 80 bp, synthetic construct
  misc_feature 1..80: note = Synthetic: >NC_003310.1-cand-157620-157699
  source 1..80: mol_type = other DNA
agaggaatattaggccttagaataaaatatggacgactcttaacgaaattagaaaattcgataatgatgttgaagaacaa

SEQ ID NO: 24846 - DNA, 80 bp, synthetic construct
  misc_feature 1..80: note = Synthetic: >NC_003310.1-cand-157700-157779
  source 1..80: mol_type = other DNA
ttcggtactatagaagaactcaagcagaagcttagattaaattctgaagagggagcagataatttttatagattatataa

SEQ ID NO: 24847 - DNA, 80 bp, synthetic construct
  misc_feature 1..80: note = Synthetic: >NC_003310.1-cand-157780-157859
  source 1..80: mol_type = other DNA
aggtacaaaaacaggatatcgtcaaacttactgtatacgattgcatatatctatgataggattgtatgcgtgcgtggtag

SEQ ID NO: 24848 - DNA, 80 bp, synthetic construct
  misc_feature 1..80: note = Synthetic: >NC_003310.1-cand-157850-157929
  source 1..80: mol_type = other DNA
tgcgtggtagatgtttggagaaatgagaaactgttttctagatggaaatattggttacaagcgattaaactgtttattga

SEQ ID NO: 24849 - DNA, 80 bp, synthetic construct
  misc_feature 1..80: note = Synthetic: >NC_003310.1-cand-157930-158009
  source 1..80: mol_type = other DNA
tgatcacatgcttgataagataaaatctatactgtagaatagactagtgtatgtggaaatgtcatagaaagttaaaagtt

SEQ ID NO: 24850 - DNA, 80 bp, synthetic construct
  misc_feature 1..80: note = Synthetic: >NC_003310.1-cand-158010-158089
  source 1..80: mol_type = other DNA
aatgagagcaaaaatatataaggttgtattccatatttgttatttttttctgtaatagttagaaaatacattcgatggtc

SEQ ID NO: 24851 - DNA, 80 bp, synthetic construct
  misc_feature 1..80: note = Synthetic: >NC_003310.1-cand-158090-158169
  source 1..80: mol_type = other DNA
tatctaccagattattatgtgttataaggtacttttctcataataaactagagtatgagtaagatagtgtttttcaaaac

SEQ ID NO: 24852 - DNA, 80 bp, synthetic construct
  misc_feature 1..80: note = Synthetic: >NC_003310.1-cand-158170-158249
  source 1..80: mol_type = other DNA
atataaatctaaaattgatggatgagatatacagctattaatttcgaaaatatattttaatctgataactttaaacatgg

SEQ ID NO: 24853 - DNA, 80 bp, synthetic construct
  misc_feature 1..80: note = Synthetic: >NC_003310.1-cand-182590-182669
  source 1..80: mol_type = other DNA
cgataaaccaaaagctttctaatgttagagaggtaacttatgcttcgtccaatctgccaggatcaagtggctatgttcat

SEQ ID NO: 24854 - DNA, 80 bp, synthetic construct
  misc_feature 1..80: note = Synthetic: >NC_003310.1-cand-182670-182749
  source 1..80: mol_type = other DNA
agaccatctgattctgttatttacagcagtataagacggtcacgtttacctagtgatagcgatagtgattatgaggatat

SEQ ID NO: 24855 - DNA, 80 bp, synthetic construct
  misc_feature 1..80: note = Synthetic: >NC_003310.1-cand-182830-182909
  source 1..80: mol_type = other DNA
ttgaagatatagatactgttgttagggaatatagacaaaaatatggcaatgcaatggcaaaaggacgtagtagttcccct

SEQ ID NO: 24856 - DNA, 80 bp, synthetic construct
  misc_feature 1..80: note = Synthetic: >NC_003310.1-cand-182910-182989
  source 1..80: mol_type = other DNA
aaacctgatccattatatagtactgttaagaaaacaactaaaagtctatctactggtgtagacatagttacaaaacaatc

SEQ ID NO: 24857 - DNA, 80 bp, synthetic construct
  misc_feature 1..80: note = Synthetic: >NC_003310.1-cand-182990-183069
  source 1..80: mol_type = other DNA
agactattctctattacctgacgttaatactggcagttctattgtgtcacctctcaccagaaaaggagctactagacgac

SEQ ID NO: 24858 - DNA, 80 bp, synthetic construct
  misc_feature 1..80: note = Synthetic: >NC_003310.1-cand-183070-183149
  source 1..80: mol_type = other DNA
gacctagacgccctacaaatgatggtctacagagtccaaatcctcctctccgtaatccacttcctcaacatgatgattat

SEQ ID NO: 24859 - DNA, 80 bp, synthetic construct
  misc_feature 1..80: note = Synthetic: >NC_003310.1-cand-183150-183229
  source 1..80: mol_type = other DNA
tctcctccacaagtacacagacctccgacacttcctcctaaaccagtccaaaatccgacacaacttccccctagaccagt

SEQ ID NO: 24860 - DNA, 80 bp, synthetic construct
  misc_feature 1..80: note = Synthetic: >NC_003310.1-cand-183230-183309
  source 1..80: mol_type = other DNA
aggtcaattacctcctcctatagatcaaccagataaaggatttagtaagtttgtatcacctagacggtgtagaagagcaa

SEQ ID NO: 24861 - DNA, 80 bp, synthetic construct
  misc_feature 1..80: note = Synthetic: >NC_003310.1-cand-183310-183389
  source 1..80: mol_type = other DNA
gctctggagtcatatgtggtatgatacaatcaaaaccaaacgatgatacctattcacttcttcaacggccaaaaattgaa

SEQ ID NO: 24862 - DNA, 80 bp, synthetic construct
  misc_feature 1..80: note = Synthetic: >NC_003310.1-cand-183390-183469
  source 1..80: mol_type = other DNA
ccagaatatgcggaggttggtaatggtatacccaagaacaatgttcctgtaataggtaataaacatagtaaaaaatatac

SEQ ID NO: 24863 - DNA, 80 bp, synthetic construct
  misc_feature 1..80: note = Synthetic: >NC_003310.1-cand-183470-183549
  source 1..80: mol_type = other DNA
atcgacgatgtcaaaaatatcaacaaaatttgataaatctacggcatttggagcagcaatgttactaactggtcagcagg

SEQ ID NO: 24864 - DNA, 80 bp, synthetic construct
  misc_feature 1..80: note = Synthetic: >NC_003310.1-cand-183550-183629
  source 1..80: mol_type = other DNA
ccattagccaacagactagatcaactacgttgagtagaaaagatcagatgagcaaggaagaaaagatattcgaagcagtt

SEQ ID NO: 24865 - DNA, 80 bp, synthetic construct
  misc_feature 1..80: note = Synthetic: >NC_003310.1-cand-183630-183709
  source 1..80: mol_type = other DNA
acaatgagtctatcaactataggttcaacgttgacgtctgcaggtatgacgggtggtccaaaactaatgattgcaggaat

SEQ ID NO: 24866 - DNA, 80 bp, synthetic construct
  misc_feature 1..80: note = Synthetic: >NC_003310.1-cand-183710-183789
  source 1..80: mol_type = other DNA
ggctataacggctataactggtataatagatacgataaaagatatatattacatgttttcaggacaggagaggccagtag

SEQ ID NO: 24867 - DNA, 80 bp, synthetic construct
  misc_feature 1..80: note = Synthetic: >NC_003310.1-cand-183770-183849
  source 1..80: mol_type = other DNA
aggacaggagaggccagtagatcctgttattaaattatttaataagtacgctggcttaatgtccgataataataaaatgg

SEQ ID NO: 24868 - DNA, 80 bp, synthetic construct
  misc_feature 1..80: note = Synthetic: >NC_003310.1-cand-183850-183929
  source 1..80: mol_type = other DNA
gtgtaagaaaatgtttgacacccggtgacgacacacttatttatatcgcatacagaaacgataccagttttaaacagaat

SEQ ID NO: 24869 - DNA, 80 bp, synthetic construct
  misc_feature 1..80: note = Synthetic: >NC_004297.1-cand-4670-4749
  source 1..80: mol_type = other DNA
actgccactggtgatgagaggatctttgatttccctttttacttccctctccttaaatagtgaaccattgttaaaagagg

SEQ ID NO: 24870 - DNA, 80 bp, synthetic construct
  misc_feature 1..80: note = Synthetic: >NC_004297.1-cand-4750-4829
  source 1..80: mol_type = other DNA
atgtaagaagagataaatacttctttgaaacaccaggccttttataatctggtccctcgatagttgtgcatccatcttta

SEQ ID NO: 24871 - DNA, 80 bp, synthetic construct
  misc_feature 1..80: note = Synthetic: >NC_004297.1-cand-4830-4909
  source 1..80: mol_type = other DNA
cttaaaaacttttttgcattgtagaccatgtcatccaattcttcctcagtggctgtgtctgcaggattagtgctcacatg

SEQ ID NO: 24872 - DNA, 80 bp, synthetic construct
  misc_feature 1..80: note = Synthetic: >NC_004297.1-cand-4910-4989
  source 1..80: mol_type = other DNA
accaaatctcacctttggttccagaaacttctcaaaacattttatctgatctgtcaatctatctggtgtttctttcgtaa

SEQ ID NO: 24873 - DNA, 80 bp, synthetic construct
  misc_feature 1..80: note = Synthetic: >NC_004297.1-cand-4990-5069
  source 1..80: mol_type = other DNA
tgaagtggcacatgtaggaaacattcaaaatgaacttgaacctattagtcatcatgctcttcacatcctcagataaaacc

SEQ ID NO: 24874 - DNA, 80 bp, synthetic construct
  misc_feature 1..80: note = Synthetic: >NC_004297.1-cand-5070-5149
  source 1..80: mol_type = other DNA
agattcattaatgtccttattaacctatagagcaggaactcaacatcagtgattaattcttcccttattttgtcaatgag

SEQ ID NO: 24875 - DNA, 80 bp, synthetic construct
  misc_feature 1..80: note = Synthetic: >NC_004297.1-cand-5150-5229
  source 1..80: mol_type = other DNA
gtccttatgatgataatctgatagataagccattacaaagtacctaagattttggaggagcttttgagaacgtttactgg

SEQ ID NO: 24876 - DNA, 80 bp, synthetic construct
  misc_feature 1..80: note = Synthetic: >NC_004297.1-cand-5230-5309
  source 1..80: mol_type = other DNA
ggtgagctaaaattaaaaccaggatcatctttgtcagagacctgatattgttcaactgcccttccagctcattgcaatct

SEQ ID NO: 24877 - DNA, 80 bp, synthetic construct
  misc_feature 1..80: note = Synthetic: >NC_004297.1-cand-5310-5389
  source 1..80: mol_type = other DNA
tctatccaagaaatcatagtgcttattgttgtttgtaaaacctcagctgaaaatattgctggaaaatatcttttaggatc

SEQ ID NO: 24878 - DNA, 80 bp, synthetic construct
  misc_feature 1..80: note = Synthetic: >NC_004297.1-cand-5390-5469
  source 1..80: mol_type = other DNA
agcataaaatgagcacacctcaccaactttgttatcattaatagcatagcacttcgagcactcccctgtcttttgataaa

SEQ ID NO: 24879 - DNA, 80 bp, synthetic construct
  misc_feature 1..80: note = Synthetic: >NC_004297.1-cand-5470-5549
  source 1..80: mol_type = other DNA
tcagttgtaattcagtgttacccaatgaaaactcttgacaatatgcttctttgcatctgaccacttgataccttgcgggt

SEQ ID NO: 24880 - DNA, 80 bp, synthetic construct
  misc_feature 1..80: note = Synthetic: >NC_004297.1-cand-5550-5629
  source 1..80: mol_type = other DNA
ccaaattcattctgtctcagctttacggtagaagaagttttcatagagttcaccaaagcgaggctcaatgaggaaagtct

SEQ ID NO: 24881 - DNA, 80 bp, synthetic construct
  misc_feature 1..80: note = Synthetic: >NC_004297.1-cand-5630-5709
  source 1..80: mol_type = other DNA
ctctaagtcagtggttcccagtagttccacatcccccatcacataagggaatgtttcttcctctgttctctgataactga

SEQ ID NO: 24882 - DNA, 80 bp, synthetic construct
  misc_feature 1..80: note = Synthetic: >NC_004297.1-cand-5710-5789
  source 1..80: mol_type = other DNA
ttgttgggacaactccggagacatcaaagtccataatcaaatcatagctgttaaggcagatcacctccatatcaatttta

SEQ ID NO: 24883 - DNA, 80 bp, synthetic construct
  misc_feature 1..80: note = Synthetic: >NC_004297.1-cand-5790-5869
  source 1..80: mol_type = other DNA
tagtggtccacactgatcccaacatcctttaaagcagtggtggccttcaaaatggttttctggaatattgaattgaggat

SEQ ID NO: 24884 - DNA, 80 bp, synthetic construct
  misc_feature 1..80: note = Synthetic: >NC_004297.1-cand-5870-5949
  source 1..80: mol_type = other DNA
ttgattcttactcaaacactgggaggactgtgtgattctagatcttagcctgttgcctcgctctccccatttctcgagat

SEQ ID NO: 24885 - DNA, 80 bp, synthetic construct
  misc_feature 1..80: note = Synthetic: >NC_004908.1-cand-970-1049
  source 1..80: mol_type = other DNA
ccaaatatgtaagagttaatagtctcaaactggcagtcggtctgaggaacgtgcctgctagatcaagtagaggactattt

SEQ ID NO: 24886 - DNA, 80 bp, synthetic construct
  misc_feature 1..80: note = Synthetic: >NC_004908.1-cand-1050-1129
  source 1..80: mol_type = other DNA
ggagccatagctggattcatagaaggaggttggccaggactagtcgctggctggtatggtttccagcattcaaatgatca

SEQ ID NO: 24887 - DNA, 80 bp, synthetic construct
  misc_feature 1..80: note = Synthetic: >NC_004908.1-cand-1140-1219
  source 1..80: mol_type = other DNA
atggctgcagatagggattcaactcaaaaggcaattgataaaataacatccaaggtgaataatatagtcgacaagatgaa

SEQ ID NO: 24888 - DNA, 80 bp, synthetic construct
  misc_feature 1..80: note = Synthetic: >NC_004908.1-cand-1220-1299
  source 1..80: mol_type = other DNA
caagcaatatgaaataattgatcatgaattcagtgaggttgaaactagactcaatatgatcaataataagattgatgacc

SEQ ID NO: 24889 - DNA, 80 bp, synthetic construct
  misc_feature 1..80: note = Synthetic: >NC_004908.1-cand-1310-1389
  source 1..80: mol_type = other DNA
cgtatgggcatataatgcagaattgctagtactacttgaaaatcaaaaaacactcgatgagcatgatgcgaacgtgaaca

SEQ ID NO: 24890 - DNA, 80 bp, synthetic construct
  misc_feature 1..80: note = Synthetic: >NC_004908.1-cand-1390-1469
  source 1..80: mol_type = other DNA
atctatataacaaggtgaagagggcactgggctccaatgctatggaagatgggaaaggctgtttcgagctataccataaa

SEQ ID NO: 24891 - DNA, 80 bp, synthetic construct
  misc_feature 1..80: note = Synthetic: >NC_004908.1-cand-1470-1549
  source 1..80: mol_type = other DNA
tgtgatgatcagtgcatggaaacaattcggaacgggacctataataggagaaagtatagagaggaatcaagactagaaag

SEQ ID NO: 24892 - DNA, 80 bp, synthetic construct
  misc_feature 1..80: note = Synthetic: >NC_004908.1-cand-1480-1559
  source 1..80: mol_type = other DNA
agtgcatggaaacaattcggaacgggacctataataggagaaagtatagagaggaatcaagactagaaaggcagaaaata

SEQ ID NO: 24893 - DNA, 80 bp, synthetic construct
  misc_feature 1..80: note = Synthetic: >NC_004908.1-cand-1620-1699
  source 1..80: mol_type = other DNA
gcctcatctcttgtgcttgcaatggggtttgctgccttcctgttctgggccatgtccaatggatcttgcagatgcaacat

SEQ ID NO: 24894 - DNA, 80 bp, synthetic construct
  misc_feature 1..80: note = Synthetic: >NC_004909.1-cand-0-79
  source 1..80: mol_type = other DNA
atccaaatcaaaagataatagcacttggctctgtttctataactattgcgacaatatgtttactcatgcagattgccatc

SEQ ID NO: 24895 - DNA, 80 bp, synthetic construct
  misc_feature 1..80: note = Synthetic: >NC_004909.1-cand-210-289
  source 1..80: mol_type = other DNA
agaaggaaagttgtcctaaagtagcagaatacaagaattggtcaaaaccgcaatgtcaaattacagggttcgcccctttc

SEQ ID NO: 24896 - DNA, 80 bp, synthetic construct
  misc_feature 1..80: note = Synthetic: >NC_004909.1-cand-330-409
  source 1..80: mol_type = other DNA
tttgggtgacaagagaaccttatgtatcgtgcggtcttggtaaatgttaccaatttgcacttgggcagggaaccactttg

SEQ ID NO: 24897 - DNA, 80 bp, synthetic construct
  misc_feature 1..80: note = Synthetic: >NC_004909.1-cand-390-469
  source 1..80: mol_type = other DNA
ttgggcagggaaccactttgaacaacaaacactcaaatggcacaatacatgataggagtccccatagaacccttttaatg

SEQ ID NO: 24898 - DNA, 80 bp, synthetic construct
  misc_feature 1..80: note = Synthetic: >NC_004909.1-cand-480-559
  source 1..80: mol_type = other DNA
gtgttccatttcatttgggaaccaaacaagtgtgcatagcatggtccagctcaagctgccatgatgggaaggcatggtta

SEQ ID NO: 24899 - DNA, 80 bp, synthetic construct
  misc_feature 1..80: note = Synthetic: >NC_004909.1-cand-580-659
  source 1..80: mol_type = other DNA
tgatagaaatgcgactgctagcatcatttatgatgggatgcttaccgacagtattggttcatggtctaagaacatcctca

SEQ ID NO: 24900 - DNA, 80 bp, synthetic construct
  misc_feature 1..80: note = Synthetic: >NC_004909.1-cand-650-729
  source 1..80: mol_type = other DNA
aacatcctcagaactcaggagtcagaatgcgtttgcatcaatggaacttgtacagtagtaatgactgatggaagtgcatc

SEQ ID NO: 24901 - DNA, 80 bp, synthetic construct
  misc_feature 1..80: note = Synthetic: >NC_004912.1-cand-920-999
  source 1..80: mol_type = other DNA
taccgctatatgatgcgataaaatgcatgaaaacattcttcggctggagagagcccaacatcatcaagccacacgagaag

SEQ ID NO: 24902 - DNA, 80 bp, synthetic construct
  misc_feature 1..80: note = Synthetic: >NC_004912.1-cand-1000-1079
  source 1..80: mol_type = other DNA
ggcataaatcccaattatcttctggcttggaagcaggtgctggcagaactccaggatattgaaaatgaggataaaatccc

SEQ ID NO: 24903 - DNA, 80 bp, synthetic construct
  misc_feature 1..80: note = Synthetic: >NC_004912.1-cand-1040-1119
  source 1..80: mol_type = other DNA
tggcagaactccaggatattgaaaatgaggataaaatcccaaaaacaaagaacatgaagaaaacaagccaattaatgtgg

SEQ ID NO: 24904 - DNA, 80 bp, synthetic construct
  misc_feature 1..80: note = Synthetic: >NC_004912.1-cand-1160-1239
  source 1..80: mol_type = other DNA
aggactgcaaagatattggcgatctgaaacagtatcaaagtgatgagccagagctcagatcgatagcaagctggatccag

SEQ ID NO: 24905 - DNA, 80 bp, synthetic construct
  misc_feature 1..80: note = Synthetic: >NC_004912.1-cand-1220-1299
  source 1..80: mol_type = other DNA
cgatagcaagctggatccagagtgagttcaacaaggcatgtgaattgaccgattcgagctggatagaactcgatgagata

SEQ ID NO: 24906 - DNA, 80 bp, synthetic construct
  misc_feature 1..80: note = Synthetic: >NC_004912.1-cand-1320-1399
  source 1..80: mol_type = other DNA
tgagcacattgcaagcatgagaaggaactacttcacagcggaagtgtctcattgcagggccactgagtacataatgaagg

SEQ ID NO: 24907 - DNA, 80 bp, synthetic construct
  misc_feature 1..80: note = Synthetic: >NC_004912.1-cand-1400-1479
  source 1..80: mol_type = other DNA
gggtttacataaatacagctttgctcaatgcatcttgtgcagccatggatgacttccaactgattccaatgataagcaaa

SEQ ID NO: 24908 - DNA, 80 bp, synthetic construct
  misc_feature 1..80: note = Synthetic: >NC_004912.1-cand-1570-1649
  source 1..80: mol_type = other DNA
aactttgtgagtatggaattctcccttactgacccaaggctggagccacacaaatgggaaaagtactgtgttcttgaagt

SEQ ID NO: 24909 - DNA, 80 bp, synthetic construct
  misc_feature 1..80: note = Synthetic: >NC_004912.1-cand-1660-1739
  source 1..80: mol_type = other DNA
ctcttgcggactgcaataggccaggtgtcaaggcccatgttcctgtatgtgagaactaacggaacctccaaaattaagat

SEQ ID NO: 24910 - DNA, 80 bp, synthetic construct
  misc_feature 1..80: note = Synthetic: >NC_004912.1-cand-1750-1829
  source 1..80: mol_type = other DNA
atggaaatgagacgctgccttcttcaatctcttcaacagattgagagcatgatcgaggctgagtcttctatcaaagagaa

SEQ ID NO: 24911 - DNA, 80 bp, synthetic construct
  misc_feature 1..80: note = Synthetic: >NC_004912.1-cand-1810-1889
  source 1..80: mol_type = other DNA
gagtcttctatcaaagagaaagacatgaccaaagaattctttgaaaacagatcggagacatggccaattggagagtcacc

SEQ ID NO: 24912 - DNA, 80 bp, synthetic construct
  misc_feature 1..80: note = Synthetic: >NC_004912.1-cand-1890-1969
  source 1..80: mol_type = other DNA
taagggagtggaggaaggctcaatcgggaaggtgtgcagaaccttactagcaaaatctgtgttcaacagcctatattcat

SEQ ID NO: 24913 - DNA, 80 bp, synthetic construct
  misc_feature 1..80: note = Synthetic: >NC_004912.1-cand-1950-2029
  source 1..80: mol_type = other DNA
gttcaacagcctatattcatctccacaactcgaaggattttcagctgaatcgagaaaactactactcattgttcaagcac

SEQ ID NO: 24914 - DNA, 80 bp, synthetic construct
  misc_feature 1..80: note = Synthetic: >NC_005062.1-cand-0-79
  source 1..80: mol_type = other DNA
tttcttgcacgtgcgtgcgcttgcttcagacagcaatagcagcggcagggttggtggaaggaattgcccgcatcagccag

SEQ ID NO: 24915 - DNA, 80 bp, synthetic construct
  misc_feature 1..80: note = Synthetic: >NC_005062.1-cand-40-119
  source 1..80: mol_type = other DNA
agcggcagggttggtggaaggaattgcccgcatcagccagtcgtgaacgtgttgagaaaaagacagcttaggagaacaag

SEQ ID NO: 24916 - DNA, 80 bp, synthetic construct
  misc_feature 1..80: note = Synthetic: >NC_005062.1-cand-240-319
  source 1..80: mol_type = other DNA
tgttgaagcgcataatggagattttgtggcatgccatggtcggaaccgcccgaagtcctctcttaaaatcattctggaag

SEQ ID NO: 24917 - DNA, 80 bp, synthetic construct
  misc_feature 1..80: note = Synthetic: >NC_005235.1-cand-870-949
  source 1..80: mol_type = other DNA
gttaaatatcctatttcaaggcatccaaggaactttttattgatccagtgctcactactgtcatcctacaacccagctac

SEQ ID NO: 24918 - DNA, 80 bp, synthetic construct
  misc_feature 1..80: note = Synthetic: >NC_005235.1-cand-960-1039
  source 1..80: mol_type = other DNA
gatcaggtcgacagcagacgggcatgtaactctgtgttgaacttgatccctgaaacaccaacctccttcttaatacatga

SEQ ID NO: 24919 - DNA, 80 bp, synthetic construct
  misc_feature 1..80: note = Synthetic: >NC_005235.1-cand-1040-1119
  source 1..80: mol_type = other DNA
tatggcatataggtatatcaatttgacaagagaagatatggtttcattttatgcacccaaaacccaattcatacccacac

SEQ ID NO: 24920 - DNA, 80 bp, synthetic construct
  misc_feature 1..80: note = Synthetic: >NC_005235.1-cand-1120-1199
  source 1..80: mol_type = other DNA
agaatgtaaaagaacctggaacttttaagctgactgctaactcgatgaggcctgagtcaaaggcaatgttagacatgttg

SEQ ID NO: 24921 - DNA, 80 bp, synthetic construct
  misc_feature 1..80: note = Synthetic: >NC_005235.1-cand-1200-1279
  source 1..80: mol_type = other DNA
ggtagccatgagcctggtgaaaagaaaggtgccctaattgagagtttaaacctaagcagccatatagtacagtctgaatg

SEQ ID NO: 24922 - DNA, 80 bp, synthetic construct
  misc_feature 1..80: note = Synthetic: >NC_005235.1-cand-1280-1359
  source 1..80: mol_type = other DNA
cgtcagcctgattactaaaatactttctgaccttgagctcaacataagtgaacccacaagtcatggctcctttacaacta

SEQ ID NO: 24923 - DNA, 80 bp, synthetic construct
  misc_feature 1..80: note = Synthetic: >NC_005235.1-cand-1360-1439
  source 1..80: mol_type = other DNA
aacatacatatgtagataatgttcttgagaagttttttcaaaatgaaattcaaagatatttattagatgttctaaaaaag

SEQ ID NO: 24924 - DNA, 80 bp, synthetic construct
  misc_feature 1..80: note = Synthetic: >NC_005235.1-cand-1440-1519
  source 1..80: mol_type = other DNA
acaactgcatggcatattgggcatctcattcgggatataacagaaagcttaattgctcattcaggtctcaaaagatcaaa

SEQ ID NO: 24925 - DNA, 80 bp, synthetic construct
  misc_feature 1..80: note = Synthetic: >NC_005235.1-cand-1520-1599
  source 1..80: mol_type = other DNA
gtactggtcagtacatgcatacaacaatgggaatgtcattttattcatactcccatctaaatcattggaggtagcagggt

SEQ ID NO: 24926 - DNA, 80 bp, synthetic construct
  misc_feature 1..80: note = Synthetic: >NC_005235.1-cand-1600-1679
  source 1..80: mol_type = other DNA
cttacataaggtttgtgacagtttttcgaatgggtccagggctagtcgataaagacaatctggatacaattctgactgat

SEQ ID NO: 24927 - DNA, 80 bp, synthetic construct
  misc_feature 1..80: note = Synthetic: >NC_005235.1-cand-1700-1779
  source 1..80: mol_type = other DNA
ttcaaaggttatgagtattgatttgaacaggttactagcgctcaatattgcatttgaaaaggcattaattgctacagcca

SEQ ID NO: 24928 - DNA, 80 bp, synthetic construct
  misc_feature 1..80: note = Synthetic: >NC_005235.1-cand-1750-1829
  source 1..80: mol_type = other DNA
catttgaaaaggcattaattgctacagccacatggtttcaatactatacagaggatcaaggccagttccccctacaacat

SEQ ID NO: 24929 - DNA, 80 bp, synthetic construct
  misc_feature 1..80: note = Synthetic: >NC_005235.1-cand-1830-1909
  source 1..80: mol_type = other DNA
gcaataaggtcagtttttgcttaccatttgttgttagctgtgtgccagaagatgaagttgtgtgccatttttgacaactt

SEQ ID NO: 24930 - DNA, 80 bp, synthetic construct
  misc_feature 1..80: note = Synthetic: >NC_005235.1-cand-1910-1989
  source 1..80: mol_type = other DNA
acgatatttaatacctgctgttacatcactttactctggattcccctctcttataaataagttattcgagcgccccttta

SEQ ID NO: 24931 - DNA, 80 bp, synthetic construct
  misc_feature 1..80: note = Synthetic: >NC_005235.1-cand-1990-2069
  source 1..80: mol_type = other DNA
agagtgctctggaagtatatgtttattataatattaagagtctacttgtggcccttgcacaaaataacaaggctagattt

SEQ ID NO: 24932 - DNA, 80 bp, synthetic construct
  misc_feature 1..80: note = Synthetic: >NC_005235.1-cand-2070-2149
  source 1..80: mol_type = other DNA
tattcaaaagtaaaacttttaggtctaacagtagatcaatcaactgttggagcaagtggaatctacccgtcattcatgtc

SEQ ID NO: 24933 - DNA, 80 bp, synthetic construct
  misc_feature 1..80: note = Synthetic: >NC_005301.3-cand-3100-3179
  source 1..80: mol_type = other DNA
caagtgagaagatgctattgagttggttgagtgaagacatcaaatcatcgagatgtggtgagtgcctctcaaatataaag

SEQ ID NO: 24934 - DNA, 80 bp, synthetic construct
  misc_feature 1..80: note = Synthetic: >NC_005301.3-cand-3180-3259
  source 1..80: mol_type = other DNA
aaagccgttgatgaaactgccaatctatcaggaaagattgagctgctcgcttataatctgcaactcaccaatcactgcag

SEQ ID NO: 24935 - DNA, 80 bp, synthetic construct
  misc_feature 1..80: note = Synthetic: >NC_005301.3-cand-3260-3339
  source 1..80: mol_type = other DNA
caactgtcaccccaatggtgtaaacattagtaacacttctaatgtgtgcaagagatgccccaagattgaagtggttagcc

SEQ ID NO: 24936 - DNA, 80 bp, synthetic construct
  misc_feature 1..80: note = Synthetic: >NC_005301.3-cand-3340-3419
  source 1..80: mol_type = other DNA
attgtgaaaataaaggctttgaggacagcaatgaatgcttaacagacctagataggcttgttaggctcacattaccaggg

SEQ ID NO: 24937 - DNA, 80 bp, synthetic construct
  misc_feature 1..80: note = Synthetic: >NC_005301.3-cand-3420-3499
  source 1..80: mol_type = other DNA
aaaactgagaaggagagaagagtcaaacgtaatgtggaatatcttataaaactgatgatgagcatgtcaggcattgattg

SEQ ID NO: 24938 - DNA, 80 bp, synthetic construct
  misc_feature 1..80: note = Synthetic: >NC_005301.3-cand-3500-3579
  source 1..80: mol_type = other DNA
tataaaatatcccacagggcagcttatcacccatggaagagtgagtgcaaaacataacgatgggaacctgaaagatagaa

SEQ ID NO: 24939 - DNA, 80 bp, synthetic construct
  misc_feature 1..80: note = Synthetic: >NC_005301.3-cand-3580-3659
  source 1..80: mol_type = other DNA
gcgatgacgaccaaagactagctgagaagatagacactgttaggaaagagctttcagaatctaaactgaaagattattca

SEQ ID NO: 24940 - DNA, 80 bp, synthetic construct
  misc_feature 1..80: note = Synthetic: >NC_005301.3-cand-3680-3759
  source 1..80: mol_type = other DNA
atcaaattcactaaaaaacctctcaaggcaaggtaaatcaaagtgttctgtgccaagatcttggctcgagaaagtactgt

SEQ ID NO: 24941 - DNA, 80 bp, synthetic construct
  misc_feature 1..80: note = Synthetic: >NC_005301.3-cand-3740-3819
  source 1..80: mol_type = other DNA
ttggctcgagaaagtactgtttgacctgaaggtgcctactaaggacgaagaagtgcttataaacatcagaaactcattga

SEQ ID NO: 24942 - DNA, 80 bp, synthetic construct
  misc_feature 1..80: note = Synthetic: >NC_005301.3-cand-3820-3899
  source 1..80: mol_type = other DNA
aagctagatccgagtttgttagaaataacgataaactactcataaggtcaaaagaagaactaaaaaaatgtttcgatgtg

SEQ ID NO: 24943 - DNA, 80 bp, synthetic construct
  misc_feature 1..80: note = Synthetic: >NC_005301.3-cand-3900-3979
  source 1..80: mol_type = other DNA
cagtcttttaaattgaaaaaaaacaagcaacctgtgccctttcaggttgactgtatattgttcaaagaagtggcagctga

SEQ ID NO: 24944 - DNA, 80 bp, synthetic construct
  misc_feature 1..80: note = Synthetic: >NC_005301.3-cand-3980-4059
  source 1..80: mol_type = other DNA
atgcatgaagaggtacattggcacaccttatgagggaattgtagacaccttagtttctctgattaatgtgttaacaaggt

SEQ ID NO: 24945 - DNA, 80 bp, synthetic construct
  misc_feature 1..80: note = Synthetic: >NC_005301.3-cand-4050-4129
  source 1..80: mol_type = other DNA
ttaacaaggtttacttggttccaggaagtggtgctatatggtaaaatatgtgagaccttcctcagatgctgcacagaatt

SEQ ID NO: 24946 - DNA, 80 bp, synthetic construct
  misc_feature 1..80: note = Synthetic: >NC_005301.3-cand-4150-4229
  source 1..80: mol_type = other DNA
tggttaagataaggcactgtaacattaacctatcagtcaaattgccatcaaataagaaagagaatatgttatgttgtcta

SEQ ID NO: 24947 - DNA, 80 bp, synthetic construct
  misc_feature 1..80: note = Synthetic: >NC_005301.3-cand-4210-4289
  source 1..80: mol_type = other DNA
agaatatgttatgttgtctatatagtggaaacatggagctcttgcaaggacctttctatttgaacaggagacaagctgtc

SEQ ID NO: 24948 - DNA, 80 bp, synthetic construct
  misc_feature 1..80: note = Synthetic: >NC_005301.3-cand-4290-4369
  source 1..80: mol_type = other DNA
cttggttcttcatacctttacattgtcattacactttacatacaagtgctgcagcagtacaggtgtctagaagttataaa

SEQ ID NO: 24949 - DNA, 80 bp, synthetic construct
  misc_feature 1..80: note = Synthetic: >NC_006577.2-cand-3660-3739
  source 1..80: mol_type = other DNA
cctactattacacatactaattgttggttgcgttctgtgttacttgtaatgcagaaattaccttttaagtttaaggattt

SEQ ID NO: 24950 - DNA, 80 bp, synthetic construct
  misc_feature 1..80: note = Synthetic: >NC_006577.2-cand-3740-3819
  source 1..80: mol_type = other DNA
agctattgaaaatatgtggttatcttataaggtgggttataatcaaagttttgttgattatttactgaccactattccta

SEQ ID NO: 24951 - DNA, 80 bp, synthetic construct
  misc_feature 1..80: note = Synthetic: >NC_006577.2-cand-3820-3899
  source 1..80: mol_type = other DNA
aagctattgttttgcctcaaggtggttttgtagctgattttgcttattggtttttaaaccagtttgatattaatgcgtat

SEQ ID NO: 24952 - DNA, 80 bp, synthetic construct
  misc_feature 1..80: note = Synthetic: >NC_006577.2-cand-3900-3979
  source 1..80: mol_type = other DNA
gctaattggtgttgtttaaaatgtggtttttcttttgatttaaatggtttggatgctttgtttttttatggagatattgt

SEQ ID NO: 24953 - DNA, 80 bp, synthetic construct
  misc_feature 1..80: note = Synthetic: >NC_006577.2-cand-3980-4059
  source 1..80: mol_type = other DNA
gtctcatgtttgtaagtgtggacataatatgactctaatagcagcggacttaccttgtacattacatttttcattatttg

SEQ ID NO: 24954 - DNA, 80 bp, synthetic construct
  misc_feature 1..80: note = Synthetic: >NC_006577.2-cand-4060-4139
  source 1..80: mol_type = other DNA
atgacaatttttgtgctttttgcacccctaaaaaaatttttattgctgcatgtgctgtggatgtaaacgtttgtcattct

SEQ ID NO: 24955 - DNA, 80 bp, synthetic construct
  misc_feature 1..80: note = Synthetic: >NC_006577.2-cand-4140-4219
  source 1..80: mol_type = other DNA
gtagctgttataggtgatgaacaaatagatggtaagtttgttactaaatttagtggtgataaatttgattttatagtagg

SEQ ID NO: 24956 - DNA, 80 bp, synthetic construct
  misc_feature 1..80: note = Synthetic: >NC_006577.2-cand-4220-4299
  source 1..80: mol_type = other DNA
ttatggaatgtcatttagtatgtcttcttttgagttacctcaattgtatggtttgtgtataacacctaatgtatgttttg

SEQ ID NO: 24957 - DNA, 80 bp, synthetic construct
  misc_feature 1..80: note = Synthetic: >NC_006577.2-cand-4300-4379
  source 1..80: mol_type = other DNA
ttaaaggtgatattataaatgttgctagacttgttaaagctgatgttattgttaatcctgctaatgggcatatgctccat

SEQ ID NO: 24958 - DNA, 80 bp, synthetic construct
  misc_feature 1..80: note = Synthetic: >NC_006577.2-cand-4380-4459
  source 1..80: mol_type = other DNA
ggtggtggagttgcaaaagctatagctgtagctgcaggtaaaaaattttctaaagaaactgctgctatggttaaatctaa

SEQ ID NO: 24959 - DNA, 80 bp, synthetic construct
  misc_feature 1..80: note = Synthetic: >NC_006577.2-cand-4460-4539
  source 1..80: mol_type = other DNA
aggtgtttgccaagtaggagattgttatgtttctaccggtggtaaattatgtaaaacaattcttaatattgtaggccctg

SEQ ID NO: 24960 - DNA, 80 bp, synthetic construct
  misc_feature 1..80: note = Synthetic: >NC_006577.2-cand-4530-4609
  source 1..80: mol_type = other DNA
gtaggccctgatgctagacaagatggaagacaatcttatgttttgttagcacgtgcttataagcatcttaataattatga

SEQ ID NO: 24961 - DNA, 80 bp, synthetic construct
  misc_feature 1..80: note = Synthetic: >NC_006577.2-cand-4610-4689
  source 1..80: mol_type = other DNA
ttgttgtttgtctactctcatatcggctggtatatttagtgttcctgctgatgtgtcattaacttaccttctaggtgttg

SEQ ID NO: 24962 - DNA, 80 bp, synthetic construct
  misc_feature 1..80: note = Synthetic: >NC_006577.2-cand-4690-4769
  source 1..80: mol_type = other DNA
ttgataaacaagttatccttgttagtaataataaagaagattttgatattattcaaaaatgtcaaattacttcagttgtt

SEQ ID NO: 24963 - DNA, 80 bp, synthetic construct
  misc_feature 1..80: note = Synthetic: >NC_006577.2-cand-4770-4849
  source 1..80: mol_type = other DNA
ggtactaaagcattggctgttagattaactgctaatgtaggccgtgttattaaatttgagacagatgcatacaaactttt

SEQ ID NO: 24964 - DNA, 80 bp, synthetic construct
  misc_feature 1..80: note = Synthetic: >NC_006577.2-cand-4850-4929
  source 1..80: mol_type = other DNA
tttgagtggtgatgattgttttgtttcaaattcttctgttatacaagaagttttattgcttcgtcatgatatacaattga

SEQ ID NO: 24965 - DNA, 80 bp, synthetic construct
  misc_feature 1..80: note = Synthetic: >NC_006577.2-cand-7480-7559
  source 1..80: mol_type = other DNA
ggttgcctgatttgtttatgttagaaactatgcattggttgattagatttattgtatttgtagctaatatgttacctgct

SEQ ID NO: 24966 - DNA, 80 bp, synthetic construct
  misc_feature 1..80: note = Synthetic: >NC_006577.2-cand-7560-7639
  source 1..80: mol_type = other DNA
tttgtcttgttgcggttttatatagttgttactgctatgtataaagtagttggttttattaggcatattgtctatggttg

SEQ ID NO: 24967 - DNA, 80 bp, synthetic construct
  misc_feature 1..80: note = Synthetic: >NC_006577.2-cand-7640-7719
  source 1..80: mol_type = other DNA
taataaagctggttgtttattttgttataaacgaaattgtagtgttcgtgttaagtgtagtactattgttggtggtgtaa

SEQ ID NO: 24968 - DNA, 80 bp, synthetic construct
  misc_feature 1..80: note = Synthetic: >NC_006577.2-cand-7720-7799
  source 1..80: mol_type = other DNA
ttcgttattatgatattactgctaatggtggtactggtttttgtgttaaacatcaatggaattgttttaattgccattct

SEQ ID NO: 24969 - DNA, 80 bp, synthetic construct
  misc_feature 1..80: note = Synthetic: >NC_006577.2-cand-7800-7879
  source 1..80: mol_type = other DNA
tttaaaccaggtaacacttttataactgtagaagctgctatagaactttctaaagagcttaaacgacctgtaaatccaac

SEQ ID NO: 24970 - DNA, 80 bp, synthetic construct
  misc_feature 1..80: note = Synthetic: >NC_006577.2-cand-7880-7959
  source 1..80: mol_type = other DNA
tgatgcttcacattatgtagttactgatattaagcaagttggttgtatgatgcgtttgttctatgatagagatggacagc

SEQ ID NO: 24971 - DNA, 80 bp, synthetic construct
  misc_feature 1..80: note = Synthetic: >NC_006577.2-cand-7960-8039
  source 1..80: mol_type = other DNA
gtgtttacgatgatgttgatgctagtttatttgtagatattaataatctgttacattctaaagttaaagttgttcctaat

SEQ ID NO: 24972 - DNA, 80 bp, synthetic construct
  misc_feature 1..80: note = Synthetic: >NC_006577.2-cand-8040-8119
  source 1..80: mol_type = other DNA
ttgtatgtagttgtagtagagagtgatgctgatagagctaattttctgaatgctgttgtgttttatgcacaatcattgta

SEQ ID NO: 24973 - DNA, 80 bp, synthetic construct
  misc_feature 1..80: note = Synthetic: >NC_006577.2-cand-8120-8199
  source 1..80: mol_type = other DNA
taggcctatattacttgtagacaaaaagttaattactacagcttgtaatggtatctctgtaacccagactatgtttgatg

SEQ ID NO: 24974 - DNA, 80 bp, synthetic construct
  misc_feature 1..80: note = Synthetic: >NC_006577.2-cand-8200-8279
  source 1..80: mol_type = other DNA
tttatgttgatacttttatgtctcattttgatgttgatagaaagagttttaataattttgttaacattgctcatgcttct

SEQ ID NO: 24975 - DNA, 80 bp, synthetic construct
  misc_feature 1..80: note = Synthetic: >NC_006577.2-cand-8280-8359
  source 1..80: mol_type = other DNA
cttagagagggtgtgcaattagaaaaggttttagatacttttgtgggatgtgtacgtaaatgttgttccattgattcaga

SEQ ID NO: 24976 - DNA, 80 bp, synthetic construct
  misc_feature 1..80: note = Synthetic: >NC_006577.2-cand-8360-8439
  source 1..80: mol_type = other DNA
tgttgaaacaagatttattactaaatctatgatatctgcagtagctgctggtttggaatttactgatgaaaattataaca

SEQ ID NO: 24977 - DNA, 80 bp, synthetic construct
  misc_feature 1..80: note = Synthetic: >NC_006577.2-cand-8440-8519
  source 1..80: mol_type = other DNA
atttggtacctacatatttaaagagtgataatattgtagctgctgatttaggtgttcttatacagaatggtgctaagcat

SEQ ID NO: 24978 - DNA, 80 bp, synthetic construct
  misc_feature 1..80: note = Synthetic: >NC_006577.2-cand-8520-8599
  source 1..80: mol_type = other DNA
gtacagggtaatgttgctaaggcagctaatatttcttgtatatggtttattgatgcttttaatcaacttactgctgattt

SEQ ID NO: 24979 - DNA, 80 bp, synthetic construct
  misc_feature 1..80: note = Synthetic: >NC_006577.2-cand-8600-8679
  source 1..80: mol_type = other DNA
acagcataaattaaaaaaagcatgtgttaaaactggcttgaagttaaaattgacttttaataagcaagaggcaagtgtcc

SEQ ID NO: 24980 - DNA, 80 bp, synthetic construct
  misc_feature 1..80: note = Synthetic: >NC_006577.2-cand-8680-8759
  source 1..80: mol_type = other DNA
ctattcttacaacacccttttcacttaaaggaggtgttgtattgagtaatttgttatatatattattttttgttagttta

SEQ ID NO: 24981 - DNA, 80 bp, synthetic construct
  misc_feature 1..80: note = Synthetic: >NC_006577.2-cand-13900-13979
  source 1..80: mol_type = other DNA
cgtgccacatatagttcgtaggaatctttcaaagtatactatgttagatctttgctatgcattgcgtcattttgatcgta

SEQ ID NO: 24982 - DNA, 80 bp, synthetic construct
  misc_feature 1..80: note = Synthetic: >NC_006577.2-cand-13980-14059
  source 1..80: mol_type = other DNA
atgattgttcaatattgtgtgaaattctttgtgagtatgctgattgtaaagaatcctacttttctaagaaagattggtat

SEQ ID NO: 24983 - DNA, 80 bp, synthetic construct
  misc_feature 1..80: note = Synthetic: >NC_006577.2-cand-14060-14139
  source 1..80: mol_type = other DNA
gattttgttgaaaatcctgatattattaatatatataaaaaattaggccctatttttaatagagctttacttaatactgt

SEQ ID NO: 24984 - DNA, 80 bp, synthetic construct
  misc_feature 1..80: note = Synthetic: >NC_006577.2-cand-14140-14219
  source 1..80: mol_type = other DNA
catttttgcagacaccttagttgaagtaggtttagttggtgttttaactttagataaccaagatttgtatggtcaatggt

SEQ ID NO: 24985 - DNA, 80 bp, synthetic construct
  misc_feature 1..80: note = Synthetic: >NC_006577.2-cand-14220-14299
  source 1..80: mol_type = other DNA
atgattttggtgattttatacaaacagccccagggtttggtgtggcagttgcagattcttactattcttatatgatgcct

SEQ ID NO: 24986 - DNA, 80 bp, synthetic construct
  misc_feature 1..80: note = Synthetic: >NC_006577.2-cand-14300-14379
  source 1..80: mol_type = other DNA
atgttgactatgtgtcatgtattagattgtgaattatttgttaatgatagttatagacaattcgatcttgtacagtatga

SEQ ID NO: 24987 - DNA, 80 bp, synthetic construct
  misc_feature 1..80: note = Synthetic: >NC_006577.2-cand-14350-14429
  source 1..80: mol_type = other DNA
ttatagacaattcgatcttgtacagtatgattttactgattacaagttagagttgtttaataagtattttaagtattggg

SEQ ID NO: 24988 - DNA, 80 bp, synthetic construct
  misc_feature 1..80: note = Synthetic: >NC_006577.2-cand-14460-14539
  source 1..80: mol_type = other DNA
gtgataatgataggtgtattattcattgtgctaattttaatatactatttagtatggttttacctaatacttgttttggt

SEQ ID NO: 24989 - DNA, 80 bp, synthetic construct
  misc_feature 1..80: note = Synthetic: >NC_006577.2-cand-14540-14619
  source 1..80: mol_type = other DNA
ccccttgttagacaaatttttgtagatggtgtaccgtttgttgtttctattggttaccattacaaagagttaggtgtagt

SEQ ID NO: 24990 - DNA, 80 bp, synthetic construct
  misc_feature 1..80: note = Synthetic: >NC_006577.2-cand-14620-14699
  source 1..80: mol_type = other DNA
tatgaacttagatgttgacacacaccgttatcgtttgtctcttaaagatttacttctttatgcagcagatcctgctatgc

SEQ ID NO: 24991 - DNA, 80 bp, synthetic construct
  misc_feature 1..80: note = Synthetic: >NC_006577.2-cand-14700-14779
  source 1..80: mol_type = other DNA
acgttgcatctgctagtgctctgcttgatttacgaacttgttgttttagtgtagctgccattacaagtggtataaaattt

SEQ ID NO: 24992 - DNA, 80 bp, synthetic construct
  misc_feature 1..80: note = Synthetic: >NC_006577.2-cand-14780-14859
  source 1..80: mol_type = other DNA
caaactgtaaaaccaggtaactttaaccaagacttttacgagtttgttaaaagtaaaggcttgtttaaagagggtagtac

SEQ ID NO: 24993 - DNA, 80 bp, synthetic construct
  misc_feature 1..80: note = Synthetic: >NC_006577.2-cand-14850-14929
  source 1..80: mol_type = other DNA
agggtagtacagttgatttgaaacattttttctttactcaagatggtaatgctgcaattactgattataattattataag

SEQ ID NO: 24994 - DNA, 80 bp, synthetic construct
  misc_feature 1..80: note = Synthetic: >NC_006577.2-cand-14930-15009
  source 1..80: mol_type = other DNA
tataatttacctactatggttgatattaagcagttattgtttgtattagaagttgtttataaatattttgaaatttatga

SEQ ID NO: 24995 - DNA, 80 bp, synthetic construct
  misc_feature 1..80: note = Synthetic: >NC_006577.2-cand-15010-15089
  source 1..80: mol_type = other DNA
tggtggttgtataccagcatcacaagttattgttaataattatgataaaagtgctggttatccatttaataaatttggta

SEQ ID NO: 24996 - DNA, 80 bp, synthetic construct
  misc_feature 1..80: note = Synthetic: >NC_006577.2-cand-15090-15169
  source 1..80: mol_type = other DNA
aagccagactttattatgaggcattatcatttgaggaacagaatgaaatttatgcatatactaaacgtaatgttctgccc

SEQ ID NO: 24997 - DNA, 80 bp, synthetic construct
  misc_feature 1..80: note = Synthetic: >NC_006577.2-cand-19000-19079
  source 1..80: mol_type = other DNA
agcaatctatgattgtttttgtaaatctgttaattggaatttagagtatccaataatttctaatgaggtcagtataaata

SEQ ID NO: 24998 - DNA, 80 bp, synthetic construct
  misc_feature 1..80: note = Synthetic: >NC_006577.2-cand-19080-19159
  source 1..80: mol_type = other DNA
catcttgtaggttattgcagcgtgtcatgcttaaagctgccatgctatgtaatagatacaacttatgttatgacataggc

SEQ ID NO: 24999 - DNA, 80 bp, synthetic construct
  misc_feature 1..80: note = Synthetic: >NC_006577.2-cand-19160-19239
  source 1..80: mol_type = other DNA
aatcctaaaggtttagcttgtgtcaaagattatgaatttaaattttatgatgcttttcctgtagccaagtctgttaaaca

SEQ ID NO: 25000 - DNA, 80 bp, synthetic construct
  misc_feature 1..80: note = Synthetic: >NC_006577.2-cand-19240-19319
  source 1..80: mol_type = other DNA
gttattttatgtctatgatgtgcataaagataattttaaagatggtttatgtatgttttggaattgtaatgttgataaat

SEQ ID NO: 25001 - DNA, 80 bp, synthetic construct
  misc_feature 1..80: note = Synthetic: >NC_006577.2-cand-19320-19399
  source 1..80: mol_type = other DNA
atccatctaattcaattgtttgtagatttgacactcgagtgttaaataaattaaaccttcctggatgtaatggtggtagt

SEQ ID NO: 25002 - DNA, 80 bp, synthetic construct
  misc_feature 1..80: note = Synthetic: >NC_006577.2-cand-19400-19479
  source 1..80: mol_type = other DNA
ttgtatgttaataaacatgcattccatactaatccttttactagaactgtttttgaaaatcttaagcctatgcctttttt

SEQ ID NO: 25003 - DNA, 80 bp, synthetic construct
  misc_feature 1..80: note = Synthetic: >NC_006577.2-cand-19480-19559
  source 1..80: mol_type = other DNA
ctattattcagatacgccttgtgtgtacgtagatggtttagaatctaaacaagttgattacgttcctttaagaagcgcca

SEQ ID NO: 25004 - DNA, 80 bp, synthetic construct
  misc_feature 1..80: note = Synthetic: >NC_006577.2-cand-19560-19639
  source 1..80: mol_type = other DNA
cttgtatcacacggtgtaatctaggtggagctgtttgttcaaagcatgctgaagaatattgtaactaccttgagtcttat

SEQ ID NO: 25005 - DNA, 80 bp, synthetic construct
  misc_feature 1..80: note = Synthetic: >NC_006577.2-cand-19640-19719
  source 1..80: mol_type = other DNA
aatatagttactacagcaggctttactttttgggtttataagaattttgatttttataatttatggaacacttttactac

SEQ ID NO: 25006 - DNA, 80 bp, synthetic construct
  misc_feature 1..80: note = Synthetic: >NC_006577.2-cand-19720-19799
  source 1..80: mol_type = other DNA
gttacagagtttagaaaacgtaatatataacttggttaatgttggtcattatgatggacgtacaggtgaattaccttgtg

SEQ ID NO: 25007 - DNA, 80 bp, synthetic construct
  misc_feature 1..80: note = Synthetic: >NC_006577.2-cand-19810-19889
  source 1..80: mol_type = other DNA
tgacaaagttgttgttaagattaataatgtagatactgttatttttaaaaataatacatcatttcctactaatatagctg

SEQ ID NO: 25008 - DNA, 80 bp, synthetic construct
  misc_feature 1..80: note = Synthetic: >NC_006577.2-cand-19890-19969
  source 1..80: mol_type = other DNA
ttgaattgtttacaaaacgtagtatccggcaccaccctgaacttaagattcttagaaatttgaacattgatatttgttgg

SEQ ID NO: 25009 - DNA, 80 bp, synthetic construct
  misc_feature 1..80: note = Synthetic: >NC_006577.2-cand-19970-20049
  source 1..80: mol_type = other DNA
aagcatgtcctgtgggattatgttaaagatagtttgttttgtagttccacttatggtgtttgtaaatacacagatttgaa

SEQ ID NO: 25010 - DNA, 80 bp, synthetic construct
  misc_feature 1..80: note = Synthetic: >NC_006577.2-cand-20050-20129
  source 1..80: mol_type = other DNA
gttcatcgaaaatttgaatatactttttgatggtcgtgacactggcgctttagaagcttttagaaaagcaagaaatggtg

SEQ ID NO: 25011 - DNA, 80 bp, synthetic construct
  misc_feature 1..80: note = Synthetic: >NC_006577.2-cand-20130-20209
  source 1..80: mol_type = other DNA
tttttattagtactgaaaaattaagtaggttatcaatgattaaaggtccgcaacgagctgatttaaatggtgtgattgtg

SEQ ID NO: 25012 - DNA, 80 bp, synthetic construct
  misc_feature 1..80: note = Synthetic: >NC_006577.2-cand-20210-20289
  source 1..80: mol_type = other DNA
gataaagttggagaactcaaagttgagttttggttcgctatgagaaaagatggtgacgatgttatcttcagccgaacaga

SEQ ID NO: 25013 - DNA, 80 bp, synthetic construct
  misc_feature 1..80: note = Synthetic: >NC_006577.2-cand-22860-22939
  source 1..80: mol_type = other DNA
ttattatgtttagctttactttttgttgtttttctattatttttgttatataacgataaatctcattaaatctaaacatg

SEQ ID NO: 25014 - DNA, 80 bp, synthetic construct
  misc_feature 1..80: note = Synthetic: >NC_006577.2-cand-22940-23019
  source 1..80: mol_type = other DNA
ttattaattatttttattttgcctacaacattagctgttataggtgattttaattgtactaattttgctattaatgattt

SEQ ID NO: 25015 - DNA, 80 bp, synthetic construct
  misc_feature 1..80: note = Synthetic: >NC_006577.2-cand-23020-23099
  source 1..80: mol_type = other DNA
aaacaccacagttcctcgcataagtgagtatgttgtggatgtttcttatggtttgggtacatattatatacttgatcgtg

SEQ ID NO: 25016 - DNA, 80 bp, synthetic construct
  misc_feature 1..80: note = Synthetic: >NC_006577.2-cand-23120-23199
  source 1..80: mol_type = other DNA
ttatttactggttatttccctaaatctggtgccaattttagggatctatctttaaaaggtactacatatttgagtactct

SEQ ID NO: 25017 - DNA, 80 bp, synthetic construct
  misc_feature 1..80: note = Synthetic: >NC_006577.2-cand-23200-23279
  source 1..80: mol_type = other DNA
ttggtatcagaaaccctttttatctgattttaataatggtattttttctagagttaagaatactaagttgtatgttaata

SEQ ID NO: 25018 - DNA, 80 bp, synthetic construct
  misc_feature 1..80: note = Synthetic: >NC_006577.2-cand-23280-23359
  source 1..80: mol_type = other DNA
aaactttgtatagtgagtttagtactatagttataggtagtgtttttattaacaactcttatactattgttgttcaacct

SEQ ID NO: 25019 - DNA, 80 bp, synthetic construct
  misc_feature 1..80: note = Synthetic: >NC_006577.2-cand-23360-23439
  source 1..80: mol_type = other DNA
cataatggtgttttggagattacagcttgtcaatacactatgtgtgagtatcctcatactatttgtaaatctaaaggtag

SEQ ID NO: 25020 - DNA, 80 bp, synthetic construct
  misc_feature 1..80: note = Synthetic: >NC_006577.2-cand-23440-23519
  source 1..80: mol_type = other DNA
ttctcgtaatgaatcttggcattttgataaatctgaacctttgtgtctgttcaagaaaaattttacttataatgtttcta

SEQ ID NO: 25021 - DNA, 80 bp, synthetic construct
  misc_feature 1..80: note = Synthetic: >NC_006577.2-cand-23520-23599
  source 1..80: mol_type = other DNA
cagattggttgtattttcatttttatcaagaacgtggcactttttatgcttattatgctgattctggcatgcctactact

SEQ ID NO: 25022 - DNA, 80 bp, synthetic construct
  misc_feature 1..80: note = Synthetic: >NC_006577.2-cand-23600-23679
  source 1..80: mol_type = other DNA
tttttatttagtttgtatcttggtactcttttatctcattattatgttttgcctttgacttgtaatgctatatcttctaa

SEQ ID NO: 25023 - DNA, 80 bp, synthetic construct
  misc_feature 1..80: note = Synthetic: >NC_006577.2-cand-23680-23759
  source 1..80: mol_type = other DNA
tactgataatgagactttacaatattgggtcacacctttgtctaaacgccaatatcttcttaaatttgacaaccgtggtg

SEQ ID NO: 25024 - DNA, 80 bp, synthetic construct
  misc_feature 1..80: note = Synthetic: >NC_006577.2-cand-23760-23839
  source 1..80: mol_type = other DNA
ttattactaatgctgttgattgttctagtagtttctttagcgagattcaatgtaaaactaaatctttattacctaatact

SEQ ID NO: 25025 - DNA, 80 bp, synthetic construct
  misc_feature 1..80: note = Synthetic: >NC_006577.2-cand-23840-23919
  source 1..80: mol_type = other DNA
ggtgtttatgacttatctggttttactgttaagcctgttgcaactgtacatcgtcgtattcctgatttacctgattgtga

SEQ ID NO: 25026 - DNA, 80 bp, synthetic construct
  misc_feature 1..80: note = Synthetic: >NC_006577.2-cand-23920-23999
  source 1..80: mol_type = other DNA
cattgataaatggcttaacaattttaatgtaccctcacctcttaattgggaacgtaaaattttttctaattgcaacttta

SEQ ID NO: 25027 - DNA, 80 bp, synthetic construct
  misc_feature 1..80: note = Synthetic: >NC_006577.2-cand-24000-24079
  source 1..80: mol_type = other DNA
atttgagtactttgcttcgtttagttcatactgattctttttcttgtaataattttgatgaatctaagatatatggtagt

SEQ ID NO: 25028 - DNA, 80 bp, synthetic construct
  misc_feature 1..80: note = Synthetic: >NC_006577.2-cand-24080-24159
  source 1..80: mol_type = other DNA
tgttttaagagtattgttttagataaatttgccatacccaactccagacgatctgatttgcagttgggcagttctggttt

SEQ ID NO: 25029 - DNA, 80 bp, synthetic construct
  misc_feature 1..80: note = Synthetic: >NC_006577.2-cand-29310-29389
  source 1..80: mol_type = other DNA
agattccgaggctgactcacctgttaaagatgtttttgaacttcattattctggttctattaggtttgatagtactttac

SEQ ID NO: 25030 - DNA, 80 bp, synthetic construct
  misc_feature 1..80: note = Synthetic: >NC_006577.2-cand-29390-29469
  source 1..80: mol_type = other DNA
caggctttgagacaattatgaaagttcttgaagagaatttaaatgcttacgttaattctaatcagaacactgattctgat

SEQ ID NO: 25031 - DNA, 80 bp, synthetic construct
  misc_feature 1..80: note = Synthetic: >NC_006577.2-cand-29470-29549
  source 1..80: mol_type = other DNA
tcgttgagttctaaacctcagcgtaaaagaggtgttaaacaattaccagaacagtttgactctcttaatttaagtgctgg

SEQ ID NO: 25032 - DNA, 80 bp, synthetic construct
  misc_feature 1..80: note = Synthetic: >NC_006577.2-cand-29550-29629
  source 1..80: mol_type = other DNA
tactcagcacatttcaaatgattttactcctgaggatcatagtttacttgctactcttgatgatccttatgtagaagact

SEQ ID NO: 25033 - DNA, 80 bp, synthetic construct
  misc_feature 1..80: note = Synthetic: >NC_006577.2-cand-29630-29709
  source 1..80: mol_type = other DNA
ctgttgcttaatgagaatgaatcctaattcgacactaggtggtaacccctcgctattattcggaataggacactctctat

SEQ ID NO: 25034 - DNA, 80 bp, synthetic construct
  misc_feature 1..80: note = Synthetic: >NC_006577.2-cand-29710-29789
  source 1..80: mol_type = other DNA
cagaatgaattcttgctgtaataacagatagagtaggttgttacagactatatattaattagtagaaattttatatttag

SEQ ID NO: 25035 - DNA, 80 bp, synthetic construct
  misc_feature 1..80: note = Synthetic: >NC_006577.2-cand-29790-29869
  source 1..80: mol_type = other DNA
acatttgattgttagagtagttataaggtttagctgtagtataaacgcctccgggaagagctatcaattgtagtgtttaa

SEQ ID NO: 25036 - DNA, 80 bp, synthetic construct
  misc_feature 1..80: note = Synthetic: >NC_007357.1-cand-20-99
  source 1..80: mol_type = other DNA
aatatggaaagaataaaagaactaagagatctaatgtcgcagtcccgcactcgcgagatactaacaaaaaccactgtgga

SEQ ID NO: 25037 - DNA, 80 bp, synthetic construct
  misc_feature 1..80: note = Synthetic: >NC_007357.1-cand-100-179
  source 1..80: mol_type = other DNA
tcatatggccataatcaagaaatacacatcaggaagacaagagaagaaccctgctctcagaatgaaatggatgatggcaa

SEQ ID NO: 25038 - DNA, 80 bp, synthetic construct
  misc_feature 1..80: note = Synthetic: >NC_007357.1-cand-180-259
  source 1..80: mol_type = other DNA
tgaaatatccaatcacagcagacaagagaataatggagatgattcctgaaaggaatgagcaaggacaaacgctttggagc

SEQ ID NO: 25039 - DNA, 80 bp, synthetic construct
  misc_feature 1..80: note = Synthetic: >NC_007357.1-cand-260-339
  source 1..80: mol_type = other DNA
aagacaaatgatgctgggtcggacagagtgatggtgtctcccctagctgtaacttggtggaacaggaatgggccgacaac

SEQ ID NO: 25040 - DNA, 80 bp, synthetic construct
  misc_feature 1..80: note = Synthetic: >NC_007357.1-cand-340-419
  source 1..80: mol_type = other DNA
aagtacagtccattatccaaaggtttacaaaacatactttgagaaggttgaaaggttaaaacatggaaccttcggtcccg

SEQ ID NO: 25041 - DNA, 80 bp, synthetic construct
  misc_feature 1..80: note = Synthetic: >NC_007357.1-cand-420-499
  source 1..80: mol_type = other DNA
ttcatttccgaaaccaagttaaaatacgtcgccgggtggatataaacccgggccatgcagatctcagtgctaaagaagca

SEQ ID NO: 25042 - DNA, 80 bp, synthetic construct
  misc_feature 1..80: note = Synthetic: >NC_007357.1-cand-500-579
  source 1..80: mol_type = other DNA
caagatgttatcatggaggtcgttttcccaaatgaagtgggagctagaatattgacatcagagtcgcaattgacaataac

SEQ ID NO: 25043 - DNA, 80 bp, synthetic construct
  misc_feature 1..80: note = Synthetic: >NC_007357.1-cand-580-659
  source 1..80: mol_type = other DNA
aaaagagaagaaagaagagctccaggattgtaaaattgctcctttaatggtggcatacatgttggaaagagaactggtcc

SEQ ID NO: 25044 - DNA, 80 bp, synthetic construct
  misc_feature 1..80: note = Synthetic: >NC_007357.1-cand-660-739
  source 1..80: mol_type = other DNA
gcaaaaccagatttctaccggtagcaggcggaacaagcagtgtgtacattgaggtattgcatttgactcaagggacctgt

SEQ ID NO: 25045 - DNA, 80 bp, synthetic construct
  misc_feature 1..80: note = Synthetic: >NC_009826.1-cand-510-589
  source 1..80: mol_type = other DNA
ccgggtacccttggcccctttacgccaatgaaggcctcgggtgggcagggtggttgctctccccccgaagctctcggcct

SEQ ID NO: 25046 - DNA, 80 bp, synthetic construct
  misc_feature 1..80: note = Synthetic: >NC_009826.1-cand-710-789
  source 1..80: mol_type = other DNA
ggcgtctcaagggctctcgcacacggtgtgaaggttcttgaagacgggataaactatgcaacagggaatctacccggttg

SEQ ID NO: 25047 - DNA, 80 bp, synthetic construct
  misc_feature 1..80: note = Synthetic: >NC_009826.1-cand-740-819
  source 1..80: mol_type = other DNA
aaggttcttgaagacgggataaactatgcaacagggaatctacccggttgccctttctctatctttgtccttgcacttct

SEQ ID NO: 25048 - DNA, 80 bp, synthetic construct
  misc_feature 1..80: note = Synthetic: >NC_009826.1-cand-790-869
  source 1..80: mol_type = other DNA
ccctttctctatctttgtccttgcacttctttggtgcctgaccgtccccgcttccgcagttccttaccgtaatgcttctg

SEQ ID NO: 25049 - DNA, 80 bp, synthetic construct
  misc_feature 1..80: note = Synthetic: >NC_009826.1-cand-900-979
  source 1..80: mol_type = other DNA
actcttccatagtctacgaggccgacaacctgatcttacacgcacctggttgtgtgccctgtgtcctggaagataatgtc

SEQ ID NO: 25050 - DNA, 80 bp, synthetic construct
  misc_feature 1..80: note = Synthetic: >NC_009826.1-cand-980-1059
  source 1..80: mol_type = other DNA
agtaggtgctgggtccaaatcacccccacgctgtcagccccgagcttcggagcagtcacggcccttcttcggagagccgt

SEQ ID NO: 25051 - DNA, 80 bp, synthetic construct
  misc_feature 1..80: note = Synthetic: >NC_009826.1-cand-1120-1199
  source 1..80: mol_type = other DNA
ggcattatccttggtaggccaaatgttcacctataagcctcgccagcatactacggtgcaggactgcaactgttccattt

SEQ ID NO: 25052 - DNA, 80 bp, synthetic construct
  misc_feature 1..80: note = Synthetic: >NC_009826.1-cand-1140-1219
  source 1..80: mol_type = other DNA
aaatgttcacctataagcctcgccagcatactacggtgcaggactgcaactgttccatttacagtggccatattaccggc

SEQ ID NO: 25053 - DNA, 80 bp, synthetic construct
  misc_feature 1..80: note = Synthetic: >NC_009826.1-cand-1220-1299
  source 1..80: mol_type = other DNA
caccggatggcatgggacatgatgatgaaatggtcccctacgacggccctgctgatggcccagttgttgcggattcccca

SEQ ID NO: 25054 - DNA, 80 bp, synthetic construct
  misc_feature 1..80: note = Synthetic: >NC_009826.1-cand-1340-1419
  source 1..80: mol_type = other DNA
ctgctcgccgccgcatactttgcgtcaacggctaactgggccaaggttatactggtcttgtttctgtttgcaggagttga

SEQ ID NO: 25055 - DNA, 80 bp, synthetic construct
  misc_feature 1..80: note = Synthetic: >NC_009826.1-cand-1380-1459
  source 1..80: mol_type = other DNA
ccaaggttatactggtcttgtttctgtttgcaggagttgatggccgcacccatactgtgggcggtactgttggtcaaggt

SEQ ID NO: 25056 - DNA, 80 bp, synthetic construct
  misc_feature 1..80: note = Synthetic: >NC_009826.1-cand-1460-1539
  source 1..80: mol_type = other DNA
ctgaagtcccttaccagtttctttaaccccgggccgcagcggcagttgcagttcgtaaataccaacgggagctggcatat

SEQ ID NO: 25057 - DNA, 80 bp, synthetic construct
  misc_feature 1..80: note = Synthetic: >NC_009826.1-cand-1540-1619
  source 1..80: mol_type = other DNA
caatagtactgcccttaactgtaatgacagcctccagaccgggtttatagccggcctcatgtatgcccataaattcaact

SEQ ID NO: 25058 - DNA, 80 bp, synthetic construct
  misc_feature 1..80: note = Synthetic: >NC_009826.1-cand-1600-1679
  source 1..80: mol_type = other DNA
gtatgcccataaattcaactcttctgggtgtccagaacggatgtctagctgtaggccccttgccgcattcgaccaaggct

SEQ ID NO: 25059 - DNA, 80 bp, synthetic construct
  misc_feature 1..80: note = Synthetic: >NC_009826.1-cand-1770-1849
  source 1..80: mol_type = other DNA
cagcccgggatgtctgcggtccagtctactgtttcacacctagcccagtggtcgttggcactactgaccgcagagggtgt

SEQ ID NO: 25060 - DNA, 80 bp, synthetic construct
  misc_feature 1..80: note = Synthetic: >NC_009827.1-cand-7990-8069
  source 1..80: mol_type = other DNA
ggaggacttgctagaagacaatgccaccccaatacctaccactatcatggccaagaatgaagtcttctgtgtagacccgt

SEQ ID NO: 25061 - DNA, 80 bp, synthetic construct
  misc_feature 1..80: note = Synthetic: >NC_009827.1-cand-8090-8169
  source 1..80: mol_type = other DNA
gcgcggttaattgtttatccagacttatccgtgcgggtttgcgagaagatggcactctacgatgtgacgcagaagttgcc

SEQ ID NO: 25062 - DNA, 80 bp, synthetic construct
  misc_feature 1..80: note = Synthetic: >NC_009827.1-cand-8170-8249
  source 1..80: mol_type = other DNA
taagaccgtgatgggatctgcatacggtttccagtactccccctcccaacgggtagagtacttgctcaaaatgtggcgct

SEQ ID NO: 25063 - DNA, 80 bp, synthetic construct
  misc_feature 1..80: note = Synthetic: >NC_009827.1-cand-8270-8349
  source 1..80: mol_type = other DNA
ttttcatatgacaccaggtgcttcgattcgaccgtcaccgagcgggatatccgaactgaagaggacatctaccaatcttg

SEQ ID NO: 25064 - DNA, 80 bp, synthetic construct
  misc_feature 1..80: note = Synthetic: >NC_009827.1-cand-8330-8409
  source 1..80: mol_type = other DNA
gaggacatctaccaatcttgccaactagaccctaccgcgaggaaagcaatatcatccctcacagaacgcctctattgtgg

SEQ ID NO: 25065 - DNA, 80 bp, synthetic construct
  misc_feature 1..80: note = Synthetic: >NC_009827.1-cand-8350-8429
  source 1..80: mol_type = other DNA
ccaactagaccctaccgcgaggaaagcaatatcatccctcacagaacgcctctattgtggtggcccgatgtttaactcca

SEQ ID NO: 25066 - DNA, 80 bp, synthetic construct
  misc_feature 1..80: note = Synthetic: >NC_009827.1-cand-8490-8569
  source 1..80: mol_type = other DNA
ggaacaccctcacttgttatcttaaggcacaggcggcgtgtagggcagccaacatcaaaaattttgacatgctggtatgc

SEQ ID NO: 25067 - DNA, 80 bp, synthetic construct
  misc_feature 1..80: note = Synthetic: >NC_009827.1-cand-8570-8649
  source 1..80: mol_type = other DNA
ggagatgatctggtggtcatttgtgagagcgccggcgtacaggaggatgtcgtagcactgagagcgtttacagacgctat

SEQ ID NO: 25068 - DNA, 80 bp, synthetic construct
  misc_feature 1..80: note = Synthetic: >NC_009827.1-cand-8650-8729
  source 1..80: mol_type = other DNA
gatcagatactcagctcccccaggagatgcgccacagcccacatacgaccttgagctgataacatcatgctcgtccaacg

SEQ ID NO: 25069 - DNA, 80 bp, synthetic construct
  misc_feature 1..80: note = Synthetic: >NC_009827.1-cand-8730-8809
  source 1..80: mol_type = other DNA
tctccgtagcccacgatggcaccggacagagatattactacctcacccgtgactgtaccactccacttgcgcgagctgct

SEQ ID NO: 25070 - DNA, 80 bp, synthetic construct
  misc_feature 1..80: note = Synthetic: >NC_009827.1-cand-8810-8889
  source 1..80: mol_type = other DNA
tgggagacagctcgccatacccctgtcaattcgtggttgggcaacatcatcatgtacgcccccacaatatgggtacgcat

SEQ ID NO: 25071 - DNA, 80 bp, synthetic construct
  misc_feature 1..80: note = Synthetic: >NC_009827.1-cand-8880-8959
  source 1..80: mol_type = other DNA
gggtacgcatggtcctcatgacccatttcttctccatcctccaatgccaggagcagttggaggcggcacttaattttgac

SEQ ID NO: 25072 - DNA, 80 bp, synthetic construct
  misc_feature 1..80: note = Synthetic: >NC_009827.1-cand-8970-9049
  source 1..80: mol_type = other DNA
taacctactccgtcactccactcgatctccctgcaatcattcaacgactccatggtatggcagctttttccctacatggg

SEQ ID NO: 25073 - DNA, 80 bp, synthetic construct
  misc_feature 1..80: note = Synthetic: >NC_009827.1-cand-9020-9099
  source 1..80: mol_type = other DNA
catggtatggcagctttttccctacatgggtactctccaactgaactcaacagggtgggagcgagcctcaggaagcttgg

SEQ ID NO: 25074 - DNA, 80 bp, synthetic construct
  misc_feature 1..80: note = Synthetic: >NC_009827.1-cand-9130-9209
  source 1..80: mol_type = other DNA
agccagagctgtcagagccaaactcattgcccaaggtgggaaagcagcgatatgcggcaagtacctctttaactgggcag

SEQ ID NO: 25075 - DNA, 80 bp, synthetic construct
  misc_feature 1..80: note = Synthetic: >NC_009827.1-cand-9210-9289
  source 1..80: mol_type = other DNA
tgaagaccaagctcaaactcactccattggctgcggcaagccagcttgatttgtcaggctggtttgtcgcaggctacgac

SEQ ID NO: 25076 - DNA, 80 bp, synthetic construct
  misc_feature 1..80: note = Synthetic: >NC_015783.1-cand-330-409
  source 1..80: mol_type = other DNA
agagagaatcaatggtttgcagcgttctttcacggtcatgctgctttctgcgggtgtggtgaccctgttgggcatcttaa

SEQ ID NO: 25077 - DNA, 80 bp, synthetic construct
  misc_feature 1..80: note = Synthetic: >NC_015783.1-cand-410-489
  source 1..80: mol_type = other DNA
cggcattgctcctcgctttcctaacgccggtccaccgagaccacctccagggctagaccagcttaatcccgagggcccgg

SEQ ID NO: 25078 - DNA, 80 bp, synthetic construct
  misc_feature 1..80: note = Synthetic: >NC_015783.1-cand-490-569
  source 1..80: mol_type = other DNA
caggtcccggagggcccccccgccatcttgccagctctgccggccccggcagaccctaaaccggcaccacggcgtggtgg

SEQ ID NO: 25079 - DNA, 80 bp, synthetic construct
  misc_feature 1..80: note = Synthetic: >NC_015783.1-cand-600-679
  source 1..80: mol_type = other DNA
cgccgccgacgcagaccataccgggtacgaagaaggagacctagaagatcttttcgccgccgcggccgaggacgatatgt

SEQ ID NO: 25080 - DNA, 80 bp, synthetic construct
  misc_feature 1..80: note = Synthetic: >NC_015783.1-cand-640-719
  source 1..80: mol_type = other DNA
ctagaagatcttttcgccgccgcggccgaggacgatatgtgagtaggcggaggcgccgccgctactacaggcgcagactg

SEQ ID NO: 25081 - DNA, 80 bp, synthetic construct
  misc_feature 1..80: note = Synthetic: >NC_015783.1-cand-740-819
  source 1..80: mol_type = other DNA
gcgacgaaagagacacagacagactctagtagtgaggcagtggcaacctgacgttgttaaaaagtgtaaaataacaggat

SEQ ID NO: 25082 - DNA, 80 bp, synthetic construct
  misc_feature 1..80: note = Synthetic: >NC_015783.1-cand-820-899
  source 1..80: mol_type = other DNA
ggatgcctcttataatctgtggctctggaagcacacagatgaactttataactcacatggacgatactccccctatggga

SEQ ID NO: 25083 - DNA, 80 bp, synthetic construct
  misc_feature 1..80: note = Synthetic: >NC_015783.1-cand-1000-1079
  source 1..80: mol_type = other DNA
acttagacctggccagataccaaggaaccactctaaaactttacagacaccaaacggtagactatatagttagctacaac

SEQ ID NO: 25084 - DNA, 80 bp, synthetic construct
  misc_feature 1..80: note = Synthetic: >NC_015783.1-cand-1080-1159
  source 1..80: mol_type = other DNA
agaacaggcccctttactataagtgaaatgacttacatgagcacacacccggctctcatgctactacaaaaacatagaat

SEQ ID NO: 25085 - DNA, 80 bp, synthetic construct
  misc_feature 1..80: note = Synthetic: >NC_015783.1-cand-1160-1239
  source 1..80: mol_type = other DNA
agttgtacccagcttcagaaccaagccaaaaggcaaaagagccataaaaattagaataagggccccaaaactaatgctca

SEQ ID NO: 25086 - DNA, 80 bp, synthetic construct
  misc_feature 1..80: note = Synthetic: >NC_015783.1-cand-1240-1319
  source 1..80: mol_type = other DNA
ccaagtggtactttacaaaagacatttgctccatgggcctctttcaactaatggcaacagctgcagaacttacaaaccca

SEQ ID NO: 25087 - DNA, 80 bp, synthetic construct
  misc_feature 1..80: note = Synthetic: >NC_015783.1-cand-1320-1399
  source 1..80: mol_type = other DNA
tggctcagagacaccacaaaaagcccagtagttggcttcagagtcttaaaaaacagcttatacacatgcctttccaactt

SEQ ID NO: 25088 - DNA, 80 bp, synthetic construct
  misc_feature 1..80: note = Synthetic: >NC_015783.1-cand-1400-1479
  source 1..80: mol_type = other DNA
aaaggaccaagcaatacaaggtgaaagaaagactgtacaaaatagattacacccagaaaacctacatggcacaggaccta

SEQ ID NO: 25089 - DNA, 80 bp, synthetic construct
  misc_feature 1..80: note = Synthetic: >NC_015783.1-cand-1480-1559
  source 1..80: mol_type = other DNA
atgctaaaggctgggaatacacatacacaaaactaatggcatctatattctactcagccaacagaaacagcacctacaac

SEQ ID NO: 25090 - DNA, 80 bp, synthetic construct
  misc_feature 1..80: note = Synthetic: >NC_015783.1-cand-1560-1639
  source 1..80: mol_type = other DNA
tggcaaaactatcaaactaactatgcaaacacatatacaaaatttaaagaaaaaagaacagcaaacttaaacttaattaa

SEQ ID NO: 25091 - DNA, 80 bp, synthetic construct
  misc_feature 1..80: note = Synthetic: >NC_015783.1-cand-1640-1719
  source 1..80: mol_type = other DNA
agcggaatacctatatcattaccctaacaatgtcacacaatctgactttatattagactacacactaacacacgactggg

SEQ ID NO: 25092 - DNA, 80 bp, synthetic construct
  misc_feature 1..80: note = Synthetic: >NC_019843.3-cand-10900-10979
  source 1..80: mol_type = other DNA
gttaatatgcagattatgggtgtggttatgcagagtggtgtgagaaaagttacatatggtactgcgcattggttgtttgc

SEQ ID NO: 25093 - DNA, 80 bp, synthetic construct
  misc_feature 1..80: note = Synthetic: >NC_019843.3-cand-10980-11059
  source 1..80: mol_type = other DNA
gacccttgtctcaacctatgtgataatcttacaagccactaaatttactttgtggaactacttgtttgagactattccca

SEQ ID NO: 25094 - DNA, 80 bp, synthetic construct
  misc_feature 1..80: note = Synthetic: >NC_019843.3-cand-11060-11139
  source 1..80: mol_type = other DNA
cacagttgttcccactcttatttgtgactatggccttcgttatgttgttggttaaacacaaacacacctttttgacactt

SEQ ID NO: 25095 - DNA, 80 bp, synthetic construct
  misc_feature 1..80: note = Synthetic: >NC_019843.3-cand-11140-11219
  source 1..80: mol_type = other DNA
ttcttgttgcctgtggctatttgtttgacttatgcaaacatagtctacgagcccactactcccatttcgtcagcgctgat

SEQ ID NO: 25096 - DNA, 80 bp, synthetic construct
  misc_feature 1..80: note = Synthetic: >NC_019843.3-cand-11220-11299
  source 1..80: mol_type = other DNA
tgcagttgcaaattggcttgcccccactaatgcttatatgcgcactacacatactgatattggtgtctacattagtatgt

SEQ ID NO: 25097 - DNA, 80 bp, synthetic construct
  misc_feature 1..80: note = Synthetic: >NC_019843.3-cand-11300-11379
  source 1..80: mol_type = other DNA
cacttgtattagtcattgtagtgaagagattgtacaacccatcactttctaactttgcgttagcattgtgcagtggtgta

SEQ ID NO: 25098 - DNA, 80 bp, synthetic construct
  misc_feature 1..80: note = Synthetic: >NC_019843.3-cand-11380-11459
  source 1..80: mol_type = other DNA
atgtggttgtacacttatagcattggagaagcctcaagccccattgcctatctggtttttgtcactacactcactagtga

SEQ ID NO: 25099 - DNA, 80 bp, synthetic construct
  misc_feature 1..80: note = Synthetic: >NC_019843.3-cand-11460-11539
  source 1..80: mol_type = other DNA
ttatacgattacagtctttgttactgtcaaccttgcaaaagtttgcacttatgccatctttgcttactcaccacagctta

SEQ ID NO: 25100 - DNA, 80 bp, synthetic construct
  misc_feature 1..80: note = Synthetic: >NC_019843.3-cand-11530-11609
  source 1..80: mol_type = other DNA
ccacagcttacacttgtgtttccggaagtgaagatgatacttttattatacacatgtttaggtttcatgtgtacttgcta

SEQ ID NO: 25101 - DNA, 80 bp, synthetic construct
  misc_feature 1..80: note = Synthetic: >NC_019843.3-cand-11610-11689
  source 1..80: mol_type = other DNA
ttttggtgtcttctctcttttgaaccttaagcttagagcacctatgggtgtctatgactttaaggtctcaacacaagagt

SEQ ID NO: 25102 - DNA, 80 bp, synthetic construct
  misc_feature 1..80: note = Synthetic: >NC_019843.3-cand-11690-11769
  source 1..80: mol_type = other DNA
tcagattcatgactgctaacaatctaactgcacctagaaattcttgggaggctatggctctgaactttaagttaataggt

SEQ ID NO: 25103 - DNA, 80 bp, synthetic construct
  misc_feature 1..80: note = Synthetic: >NC_019843.3-cand-11770-11849
  source 1..80: mol_type = other DNA
attggcggtacaccttgtataaaggttgctgctatgcagtctaaacttacagatcttaaatgcacatctgtggttctcct

SEQ ID NO: 25104 - DNA, 80 bp, synthetic construct
  misc_feature 1..80: note = Synthetic: >NC_019843.3-cand-11850-11929
  source 1..80: mol_type = other DNA
ctctgtgctccaacagttacacttagaggctaatagtagggcctgggctttctgtgttaaatgccataatgatatattgg

SEQ ID NO: 25105 - DNA, 80 bp, synthetic construct
  misc_feature 1..80: note = Synthetic: >NC_019843.3-cand-11930-12009
  source 1..80: mol_type = other DNA
cagcaacagaccccagtgaggctttcgagaaattcgtaagtctctttgctactttaatgactttttctggtaatgtagat

SEQ ID NO: 25106 - DNA, 80 bp, synthetic construct
  misc_feature 1..80: note = Synthetic: >NC_019843.3-cand-12010-12089
  source 1..80: mol_type = other DNA
cttgatgcgttagctagtgatatttttgacactcctagcgtacttcaagctactctttctgagttttcacacttagctac

SEQ ID NO: 25107 - DNA, 80 bp, synthetic construct
  misc_feature 1..80: note = Synthetic: >NC_019843.3-cand-12090-12169
  source 1..80: mol_type = other DNA
ctttgctgagttggaagctgcgcagaaagcctatcaggaagctatggactctggtgacacctcaccacaagttcttaagg

SEQ ID NO: 25108 - DNA, 80 bp, synthetic construct
  misc_feature 1..80: note = Synthetic: >NC_029647.1-cand-4760-4839
  source 1..80: mol_type = other DNA
cattctcaggcaaatgtactggaccaagggcccgaaccatcaagacccatctgaaagcatgttaccccaccagaatcgcg

SEQ ID NO: 25109 - DNA, 80 bp, synthetic construct
  misc_feature 1..80: note = Synthetic: >NC_029647.1-cand-4840-4919
  source 1..80: mol_type = other DNA
ccacacaattgatggccctgttgggcgagtcagcactccatggtcaaaacttctacaaaaagattagtggcatggtaatc

SEQ ID NO: 25110 - DNA, 80 bp, synthetic construct
  misc_feature 1..80: note = Synthetic: >NC_029647.1-cand-4920-4999
  source 1..80: mol_type = other DNA
aaagaagtgaagaatggtgggcatgagttctatgtgccaaagtttgagtccatgtacaagtggatgcggttctcagactt

SEQ ID NO: 25111 - DNA, 80 bp, synthetic construct
  misc_feature 1..80: note = Synthetic: >NC_029647.1-cand-5020-5099
  source 1..80: mol_type = other DNA
gcgatctcgctcccgattttgtgaatgaagatggcgtcgagtgacgctgctccatctacggatggtgcgggcaacctcgt

SEQ ID NO: 25112 - DNA, 80 bp, synthetic construct
  misc_feature 1..80: note = Synthetic: >NC_029647.1-cand-5080-5159
  source 1..80: mol_type = other DNA
gatggtgcgggcaacctcgttccagagagtcaacaagaggtgttgcccctcgccccagttgcaggcgctgcgttagcggc

SEQ ID NO: 25113 - DNA, 80 bp, synthetic construct
  misc_feature 1..80: note = Synthetic: >NC_029647.1-cand-5160-5239
  source 1..80: mol_type = other DNA
acctgtggtgggacaaacaaatataattgacccctggattaaagaaaattttgttcaagccccccagggtgagtttactg

SEQ ID NO: 25114 - DNA, 80 bp, synthetic construct
  misc_feature 1..80: note = Synthetic: >NC_029647.1-cand-5240-5319
  source 1..80: mol_type = other DNA
tctcacctaaaaattctcctggtgaaattttagttaatttggaattgggacccaaactcaacccctatctagaccacctt

SEQ ID NO: 25115 - DNA, 80 bp, synthetic construct
  misc_feature 1..80: note = Synthetic: >NC_029647.1-cand-5320-5399
  source 1..80: mol_type = other DNA
tcacgcatgtataattcatatgctggtggtatagatgtcatggtggtgttggcgggcaacgccttcacagccggcaaggt

SEQ ID NO: 25116 - DNA, 80 bp, synthetic construct
  misc_feature 1..80: note = Synthetic: >NC_029647.1-cand-5400-5479
  source 1..80: mol_type = other DNA
tttaatagcagctatccccccaaatttcccagtggaaggagtgtccgcttcacaggccactcaattcccccatgtgatta

SEQ ID NO: 25117 - DNA, 80 bp, synthetic construct
  misc_feature 1..80: note = Synthetic: >NC_029647.1-cand-5480-5559
  source 1..80: mol_type = other DNA
tagatgttaggacacttgaccctgtgcggctccccctcccggatgtgcgatccacgttcttccattatactaatgatact

SEQ ID NO: 25118 - DNA, 80 bp, synthetic construct
  misc_feature 1..80: note = Synthetic: >NC_029647.1-cand-5560-5639
  source 1..80: mol_type = other DNA
gaaccaaagatgaggttagttatttggctttacaccccacttagaactaatggcagtggtgatgattctttcactgtctc

SEQ ID NO: 25119 - DNA, 80 bp, synthetic construct
  misc_feature 1..80: note = Synthetic: >NC_029647.1-cand-5640-5719
  source 1..80: mol_type = other DNA
tgggcgcatactcacaaggccctcccaggactttgagtttgctttccttatccccccaacagtggaaacaaagacaaccc

SEQ ID NO: 25120 - DNA, 80 bp, synthetic construct
  misc_feature 1..80: note = Synthetic: >NC_029647.1-cand-5720-5799
  source 1..80: mol_type = other DNA
ccttttcagtgccaggcttctcagtgcaggaaatgtccaactcaaggtggccagctgccatctctgcaatggtcgtccgt

SEQ ID NO: 25121 - DNA, 80 bp, synthetic construct
  misc_feature 1..80: note = Synthetic: >NC_029647.1-cand-5800-5879
  source 1..80: mol_type = other DNA
gggaatgagccccaagtcgttcagttccagaatggcagggcccatctggatggtatgctgcttggtacgacacctgtgtc

SEQ ID NO: 25122 - DNA, 80 bp, synthetic construct
  misc_feature 1..80: note = Synthetic: >NC_029647.1-cand-5880-5959
  source 1..80: mol_type = other DNA
gcccaattacatagcatcctaccgaggcatttccactggcaactctcgttctgcttcctctgaggccgacgagagggccg

SEQ ID NO: 25123 - DNA, 80 bp, synthetic construct
  misc_feature 1..80: note = Synthetic: >NC_029647.1-cand-5960-6039
  source 1..80: mol_type = other DNA
ttggtagctttgatgtgtgggtccgcttacaagaacctgatggccagccctatgacatctttggtaagcagccagcccca

SEQ ID NO: 25124 - DNA, 80 bp, synthetic construct
  misc_feature 1..80: note = Synthetic: >NC_034516.1-cand-2420-2499
  source 1..80: mol_type = other DNA
attaataacagtccggtatagccggaaggtgtgtgtgcaatttggagaggaaaacttgtgtaagaccattgacatgaatg

SEQ ID NO: 25125 - DNA, 80 bp, synthetic construct
  misc_feature 1..80: note = Synthetic: >NC_034516.1-cand-2480-2559
  source 1..80: mol_type = other DNA
taagaccattgacatgaatgattgcttcatgtctaggcatgtaaaggtttgcataatagggactgtttctaaattctcac

SEQ ID NO: 25126 - DNA, 80 bp, synthetic construct
  misc_feature 1..80: note = Synthetic: >NC_034516.1-cand-2600-2679
  source 1..80: mol_type = other DNA
gggacttatctttaaggattggtgcacgtctacctgccaatatggtgatccaggagatatcatgagtcctagagacagag

SEQ ID NO: 25127 - DNA, 80 bp, synthetic construct
  misc_feature 1..80: note = Synthetic: >NC_034516.1-cand-2660-2739
  source 1..80: mol_type = other DNA
catgagtcctagagacagaggttttagttgtcctgagtttcctggtagttttagaaaaaaatgcaattttgcaacaacac

SEQ ID NO: 25128 - DNA, 80 bp, synthetic construct
  misc_feature 1..80: note = Synthetic: >NC_034516.1-cand-2740-2819
  source 1..80: mol_type = other DNA
cggtgtgtgagtactcaggtaatatggtatctggttataaaaaagtcatggccacaattgactcatttcaatcatttaat

SEQ ID NO: 25129 - DNA, 80 bp, synthetic construct
  misc_feature 1..80: note = Synthetic: >NC_034516.1-cand-2820-2899
  source 1..80: mol_type = other DNA
acaagtttaattcactttacagaagagaggattgaatggaaggatcctgacgggatgcttagggaccacctgaacatact

SEQ ID NO: 25130 - DNA, 80 bp, synthetic construct
  misc_feature 1..80: note = Synthetic: >NC_034516.1-cand-2850-2929
  source 1..80: mol_type = other DNA
attgaatggaaggatcctgacgggatgcttagggaccacctgaacatactagtaacaaaggacatcgactttgaaaatct

SEQ ID NO: 25131 - DNA, 80 bp, synthetic construct
  misc_feature 1..80: note = Synthetic: >NC_034516.1-cand-3000-3079
  source 1..80: mol_type = other DNA
tttacactggtatgtcaggtatctcttattgattgtgcacgatttttaacctccatcaaggcatgtgacatggctatctg

SEQ ID NO: 25132 - DNA, 80 bp, synthetic construct
  misc_feature 1..80: note = Synthetic: >NC_034516.1-cand-3030-3109
  source 1..80: mol_type = other DNA
gattgtgcacgatttttaacctccatcaaggcatgtgacatggctatctgctatggtgcacagagcgtatctttagttcg

SEQ ID NO: 25133 - DNA, 80 bp, synthetic construct
  misc_feature 1..80: note = Synthetic: >NC_034516.1-cand-3150-3229
  source 1..80: mol_type = other DNA
agtggttcttcctttaaatgttgtcatgaagtagactgctcgagtacaggtctgcaagcaagtgcaccacacctggacaa

SEQ ID NO: 25134 - DNA, 80 bp, synthetic construct
  misc_feature 1..80: note = Synthetic: >NC_034516.1-cand-3210-3289
  source 1..80: mol_type = other DNA
agtgcaccacacctggacaaagtaaacgggatttcggagcaagaaaatgacaaggtttatgatgatggtgcaccacaatg

SEQ ID NO: 25135 - DNA, 80 bp, synthetic construct
  misc_feature 1..80: note = Synthetic: >NC_034516.1-cand-3310-3389
  source 1..80: mol_type = other DNA
tgaagtccggagagtggattagtggaatcctacatggtaactgggttgtggttgttgtgcttgttattctactgttattt

SEQ ID NO: 25136 - DNA, 80 bp, synthetic construct
  misc_feature 1..80: note = Synthetic: >NC_034516.1-cand-3400-3479
  source 1..80: mol_type = other DNA
ttttgagtatcctttgtcctgtaagaaaacataagaggtcttaatcatatgagagactaataccttatgctaaccactga

SEQ ID NO: 25137 - DNA, 80 bp, synthetic construct
  misc_feature 1..80: note = Synthetic: >NC_034516.1-cand-3480-3559
  source 1..80: mol_type = other DNA
accaacacatataatacagtttaaattttgttgttgtatatattttgtctactcaaccttttattaatttttttctatta

SEQ ID NO: 25138 - DNA, 80 bp, synthetic construct
  misc_feature 1..80: note = Synthetic: >NC_034516.1-cand-3560-3639
  source 1..80: mol_type = other DNA
tattctaaaaaaaatagaatctttattttctcactatctatctctttcattcgtgggtgtttctttaacctgcggagcat

SEQ ID NO: 25139 - DNA, 80 bp, synthetic construct
  misc_feature 1..80: note = Synthetic: >NC_034517.1-cand-0-79
  source 1..80: mol_type = other DNA
agtagactccggaagagacagtctactaaagaaatggaaaaatacagagagattcatagaatcttacaggctcaccacat

SEQ ID NO: 25140 - DNA, 80 bp, synthetic construct
  misc_feature 1..80: note = Synthetic: >NC_034517.1-cand-2610-2689
  source 1..80: mol_type = other DNA
caacagaatccttctgtcctaaaattatatgaggagactaggaaaataaaagcgcaagctcgcattgtccgaaaatttca

SEQ ID NO: 25141 - DNA, 80 bp, synthetic construct
  misc_feature 1..80: note = Synthetic: >NC_034517.1-cand-2690-2769
  source 1..80: mol_type = other DNA
gaggactgaagctgatcgtggcttttttatcacaactctagctactcgttgccggttagaaattattgaagattattatg

SEQ ID NO: 25142 - DNA, 80 bp, synthetic construct
  misc_feature 1..80: note = Synthetic: >NC_034517.1-cand-2730-2809
  source 1..80: mol_type = other DNA
gctactcgttgccggttagaaattattgaagattattatgatgcaatctcaaagaatgttgcagaagagtatatttctta

SEQ ID NO: 25143 - DNA, 80 bp, synthetic construct
  misc_feature 1..80: note = Synthetic: >NC_034517.1-cand-2850-2929
  source 1..80: mol_type = other DNA
gagaaggctcttaggtgggcatctggagaaagtttcatagacttaagtaatgggaaatttattagaatgaagagaaagct

SEQ ID NO: 25144 - DNA, 80 bp, synthetic construct
  misc_feature 1..80: note = Synthetic: >NC_034517.1-cand-2890-2969
  source 1..80: mol_type = other DNA
acttaagtaatgggaaatttattagaatgaagagaaagctcatgtatgtcagtgctgatgcaactaagtggtcacctggg

SEQ ID NO: 25145 - DNA, 80 bp, synthetic construct
  misc_feature 1..80: note = Synthetic: >NC_034517.1-cand-3010-3089
  source 1..80: mol_type = other DNA
ataatggcctccctgatgagaggttgaagaactgtgtgatagatgcactccgccagatttataagactgacttcttcatg

SEQ ID NO: 25146 - DNA, 80 bp, synthetic construct
  misc_feature 1..80: note = Synthetic: >NC_034517.1-cand-3090-3169
  source 1..80: mol_type = other DNA
tcaagaaaattgaggcggtatatcgattctatggagactctggagccccatgtaaaggaattctgtgatttcttcccgga

SEQ ID NO: 25147 - DNA, 80 bp, synthetic construct
  misc_feature 1..80: note = Synthetic: >NC_034517.1-cand-3200-3279
  source 1..80: mol_type = other DNA
gttgcaaggtaacttaaataaatgctcttccctttttggtgttgccatgtcattattatttaagagattatggcaggaat

SEQ ID NO: 25148 - DNA, 80 bp, synthetic construct
  misc_feature 1..80: note = Synthetic: >NC_034517.1-cand-3260-3339
  source 1..80: mol_type = other DNA
taagagattatggcaggaattgttcccagaacttgattgcttttttgaatttgctcatcattcagatgatgctttgttca

SEQ ID NO: 25149 - DNA, 80 bp, synthetic construct
  misc_feature 1..80: note = Synthetic: >NC_034517.1-cand-3340-3419
  source 1..80: mol_type = other DNA
tttacggttatctagagccagttgacgatgggacagattggtttctatatgtctcacagcaaatacaggcagggaagttg

SEQ ID NO: 25150 - DNA, 80 bp, synthetic construct
  misc_feature 1..80: note = Synthetic: >NC_034517.1-cand-3420-3499
  source 1..80: mol_type = other DNA
tactggtatagtgtgaatacagagatgtggaaaagcatgtttaatctccatgaacatattctgttgctaggctctattaa

SEQ ID NO: 25151 - DNA, 80 bp, synthetic construct
  misc_feature 1..80: note = Synthetic: >NC_034517.1-cand-3500-3579
  source 1..80: mol_type = other DNA
gatttcaccaaagaagacgacattatcaccaacaaatgcagagttcttatcaacattctttgaaggttgtgctgtttcca

SEQ ID NO: 25152 - DNA, 80 bp, synthetic construct
  misc_feature 1..80: note = Synthetic: >NC_034517.1-cand-3580-3659
  source 1..80: mol_type = other DNA
taccatttgttaagatattgctaggttcactgtcagacttacctggccttggttattttgatgacttggctgctgcacag

SEQ ID NO: 25153 - DNA, 80 bp, synthetic construct
  misc_feature 1..80: note = Synthetic: >NC_034517.1-cand-3660-3739
  source 1..80: mol_type = other DNA
agtagatgtgtcaaggctttagatatgggtgcttcacctcagatcgcacaacttgctgtggcattatgtacaagtaaagt

SEQ ID NO: 25154 - DNA, 80 bp, synthetic construct
  misc_feature 1..80: note = Synthetic: >NC_034517.1-cand-3740-3819
  source 1..80: mol_type = other DNA
agaaagactttatgggacagctttaggaatggtcaatcatccagcaacatatcttcaagtaaagcatgaggatactccta

SEQ ID NO: 25155 - DNA, 80 bp, synthetic construct
  misc_feature 1..80: note = Synthetic: >NC_034517.1-cand-3820-3899
  source 1..80: mol_type = other DNA
tacccttaggagggaatgggtctatgtccattatggagttagcaaccgcagaaataggtatgtctgataaaaacctttta

SEQ ID NO: 25156 - DNA, 80 bp, synthetic construct
  misc_feature 1..80: note = Synthetic: >NC_034526.1-cand-1340-1419
  source 1..80: mol_type = other DNA
acctgcttttgattattccaatatccatttgcactaacttgtagaatgtgaattattgctactaattagttatataatta

SEQ ID NO: 25157 - DNA, 80 bp, synthetic construct
  misc_feature 1..80: note = Synthetic: >NC_034526.1-cand-1430-1509
  source 1..80: mol_type = other DNA
ggattattattcaattgcactaatttataggatgtgaattattactactaatcaggtgcacaatcagtgggtttgggtgg

SEQ ID NO: 25158 - DNA, 80 bp, synthetic construct
  misc_feature 1..80: note = Synthetic: >NC_034526.1-cand-1510-1589
  source 1..80: mol_type = other DNA
gtcattattccgttgaattactcagggtgggcttaggaccagtcaccttaagtgacatttttgtatatattgatgtagat

SEQ ID NO: 25159 - DNA, 80 bp, synthetic construct
  misc_feature 1..80: note = Synthetic: >NC_034526.1-cand-1590-1669
  source 1..80: mol_type = other DNA
atcatttggtaatcactaacatctatcttttcccgtttctgtttcctttctttactaacaacaacaaactacctcacata

SEQ ID NO: 25160 - DNA, 80 bp, synthetic construct
  misc_feature 1..80: note = Synthetic: >NC_034526.1-cand-1650-1729
  source 1..80: mol_type = other DNA
acaacaaactacctcacatacatataactacctcaacacatactacctcattgcgttatttcctgaatttctttttaggg

SEQ ID NO: 25161 - DNA, 80 bp, synthetic construct
  misc_feature 1..80: note = Synthetic: >NC_034555.1-cand-0-79
  source 1..80: mol_type = other DNA
attacaacgaccaacaaaatggcaactatggaagagttacagagagaaattaatgcccatgagggacagcttgtggtggc

SEQ ID NO: 25162 - DNA, 80 bp, synthetic construct
  misc_feature 1..80: note = Synthetic: >NC_034555.1-cand-80-159
  source 1..80: mol_type = other DNA
taggcaaaaggtgaaggacgcagaaaggcaatacgaaaaagaccctgatgatctcaataagagggcactacatgaccgtg

SEQ ID NO: 25163 - DNA, 80 bp, synthetic construct
  misc_feature 1..80: note = Synthetic: >NC_034555.1-cand-160-239
  source 1..80: mol_type = other DNA
aaagtgttgctgcctctatccagtcaaagatagatgagttaaagagacagcttgcggatcgggttgcaacaggaaagaca

SEQ ID NO: 25164 - DNA, 80 bp, synthetic construct
  misc_feature 1..80: note = Synthetic: >NC_034555.1-cand-270-349
  source 1..80: mol_type = other DNA
gagccaggagatcacctcaaagaaaggtctatgttgagttatggcaatgtcttggatcttaacaatcttgacattgagga

SEQ ID NO: 25165 - DNA, 80 bp, synthetic construct
  misc_feature 1..80: note = Synthetic: >NC_034555.1-cand-330-409
  source 1..80: mol_type = other DNA
aacaatcttgacattgaggagcccacaggccaaactgctgattggctgacaattattgtctatctgacatcatttgttat

SEQ ID NO: 25166 - DNA, 80 bp, synthetic construct
  misc_feature 1..80: note = Synthetic: >NC_034555.1-cand-410-489
  source 1..80: mol_type = other DNA
cccaatcatccttaaggcactgtacatgttaacaacaagaggcaggcaaactacaaaggataacaaagggatgagaatta

SEQ ID NO: 25167 - DNA, 80 bp, synthetic construct
  misc_feature 1..80: note = Synthetic: >NC_034555.1-cand-450-529
  source 1..80: mol_type = other DNA
ggcaggcaaactacaaaggataacaaagggatgagaattaggtttaaggatgatagctcttacgaggatgtcaatgggat

SEQ ID NO: 25168 - DNA, 80 bp, synthetic construct
  misc_feature 1..80: note = Synthetic: >NC_034555.1-cand-530-609
  source 1..80: mol_type = other DNA
tcaaaagccaaagcacctttacatttcaatgcccaatgcccagtcgagcatgaaggcagaggaaatcacaccagggcgat

SEQ ID NO: 25169 - DNA, 80 bp, synthetic construct
  misc_feature 1..80: note = Synthetic: >NC_034555.1-cand-620-699
  source 1..80: mol_type = other DNA
agtttgcgggctttacccagctcaagttaaggctaggaatatggttagtcctgtaatgagtgtgattggctttctggcat

SEQ ID NO: 25170 - DNA, 80 bp, synthetic construct
  misc_feature 1..80: note = Synthetic: >NC_034555.1-cand-710-789
  source 1..80: mol_type = other DNA
ttggactaacagaattcaggattggctgggtgctccatgtaaacttctcccagacttgtcaacacagagtcttcatgcta

SEQ ID NO: 25171 - DNA, 80 bp, synthetic construct
  misc_feature 1..80: note = Synthetic: >NC_034555.1-cand-800-879
  source 1..80: mol_type = other DNA
aaatgctgattacatagctcagcgacaaggcctgttggcaagcatggagacaaaagagtcaaagggcataagagaccatg

SEQ ID NO: 25172 - DNA, 80 bp, synthetic construct
  misc_feature 1..80: note = Synthetic: >NC_034556.1-cand-2950-3029
  source 1..80: mol_type = other DNA
cacaaaatggtctccaggtgacaattctgcaaaatttaggaggtttaccgcagcattacataatggtttacctgacaata

SEQ ID NO: 25173 - DNA, 80 bp, synthetic construct
  misc_feature 1..80: note = Synthetic: >NC_034556.1-cand-3030-3109
  source 1..80: mol_type = other DNA
aactccgtaattgtgtaattgatgctctgaaaaatgtgtacaaaactgacttttttatgtccaggaaactccgtgcatat

SEQ ID NO: 25174 - DNA, 80 bp, synthetic construct
  misc_feature 1..80: note = Synthetic: >NC_034556.1-cand-3100-3179
  source 1..80: mol_type = other DNA
ccgtgcatatatagattctatggatgggcttgaatcaaatgtaaaagagtttcttgaattttttcctgatgggcattgcg

SEQ ID NO: 25175 - DNA, 80 bp, synthetic construct
  misc_feature 1..80: note = Synthetic: >NC_034556.1-cand-3240-3319
  source 1..80: mol_type = other DNA
tagggatgtcattattatttaaggagatttggtcacaactatttccagagcttgattgtttctttgagtttgcccaccat

SEQ ID NO: 25176 - DNA, 80 bp, synthetic construct
  misc_feature 1..80: note = Synthetic: >NC_034556.1-cand-3270-3349
  source 1..80: mol_type = other DNA
ggtcacaactatttccagagcttgattgtttctttgagtttgcccaccattctgatgatgctttatttatttatggttat

SEQ ID NO: 25177 - DNA, 80 bp, synthetic construct
  misc_feature 1..80: note = Synthetic: >NC_034556.1-cand-3350-3429
  source 1..80: mol_type = other DNA
ttagaacccagtgatgatggcactgattggtttttatttgtgtcacaacaaatacaagcaggaaaattacattggtttag

SEQ ID NO: 25178 - DNA, 80 bp, synthetic construct
  misc_feature 1..80: note = Synthetic: >NC_034556.1-cand-3430-3509
  source 1..80: mol_type = other DNA
tgtaaatactgaaatgtggaagagtatgtttaacctgcatgaacatattttgttgttgggatcaataaaaatctccccta

SEQ ID NO: 25179 - DNA, 80 bp, synthetic construct
  misc_feature 1..80: note = Synthetic: >NC_034556.1-cand-3510-3589
  source 1..80: mol_type = other DNA
aaaagacaacattgtcccctacaaatgccgaattcttatctactttttttgagggttgtgctgtctcaattccatttatc

SEQ ID NO: 25180 - DNA, 80 bp, synthetic construct
  misc_feature 1..80: note = Synthetic: >NC_034556.1-cand-3590-3669
  source 1..80: mol_type = other DNA
aagatactattaggttctctttctgaccttcctggccttggttattttgatgatctggcagctgcacaaacacggtgtgt

SEQ ID NO: 25181 - DNA, 80 bp, synthetic construct
  misc_feature 1..80: note = Synthetic: >NC_034556.1-cand-3670-3749
  source 1..80: mol_type = other DNA
gaaggctatggatttgggagcatcaccgcagattgcacagttggctgtagctttgagcacaagtaaagtcgagaggttgt

SEQ ID NO: 25182 - DNA, 80 bp, synthetic construct
  misc_feature 1..80: note = Synthetic: >NC_034556.1-cand-3760-3839
  source 1..80: mol_type = other DNA
agttggtatggtaaattatccagggagttatctaagaactaaacatgtagaaacaccaatacctttaggtggcagtggag

SEQ ID NO: 25183 - DNA, 80 bp, synthetic construct
  misc_feature 1..80: note = Synthetic: >NC_034556.1-cand-3840-3919
  source 1..80: mol_type = other DNA
ccatgtccatcatggagcttgcaacagctggtattggtatgtctgataaaaatcttttaaaacagtcacttgtaggttat

SEQ ID NO: 25184 - DNA, 80 bp, synthetic construct
  misc_feature 1..80: note = Synthetic: >NC_034556.1-cand-3920-3999
  source 1..80: mol_type = other DNA
gttcataaacaccaaaagcatactacatacattctaggtctcttcaaatttcttatgaacttatctgatgagacatttca

SEQ ID NO: 25185 - DNA, 80 bp, synthetic construct
  misc_feature 1..80: note = Synthetic: >NC_034556.1-cand-4000-4079
  source 1..80: mol_type = other DNA
gcacgaacggcttggccaattttcatttatcggtaaagttcaatggaagattttcacacctaaatctgagtttgagtttt

SEQ ID NO: 25186 - DNA, 80 bp, synthetic construct
  misc_feature 1..80: note = Synthetic: >NC_034556.1-cand-4080-4159
  source 1..80: mol_type = other DNA
ctgacatgtactcatcaaagtttttaaagatttggactgagcaacaccctacttatgattatatcatacctaaaggtaga

SEQ ID NO: 25187 - DNA, 80 bp, synthetic construct
  misc_feature 1..80: note = Synthetic: >NC_034556.1-cand-4160-4239
  source 1..80: mol_type = other DNA
gataatttgttaatatatctggtgagaaagattaatgacccaagtatagttactgctatgacgatgcaatctcctcttca

SEQ ID NO: 25188 - DNA, 80 bp, synthetic construct
  misc_feature 1..80: note = Synthetic: >NC_034556.1-cand-5530-5609
  source 1..80: mol_type = other DNA
gataacaatcaaggacgatggtttaagggcaattgcacaatatgatgaagatagccctagatttcttcttgcccatgctt

SEQ ID NO: 25189 - DNA, 80 bp, synthetic construct
  misc_feature 1..80: note = Synthetic: >NC_034556.1-cand-5600-5679
  source 1..80: mol_type = other DNA
gcccatgcttttcacactataagggatataagatatcaagctgttgatgcagtgagtaatgtatggtacattcacaaagg

SEQ ID NO: 25190 - DNA, 80 bp, synthetic construct
  misc_feature 1..80: note = Synthetic: >NC_034556.1-cand-5680-5759
  source 1..80: mol_type = other DNA
tattaaattgtttttaaaccctataatctcttcaggtttatttgaaaactttatgaagaatattcctgcagctattcctc

SEQ ID NO: 25191 - DNA, 80 bp, synthetic construct
  misc_feature 1..80: note = Synthetic: >NC_034556.1-cand-5760-5839
  source 1..80: mol_type = other DNA
cagctgcatattcgttgattatgaacagggcaaaaatatctgttgacttgttcatgtttaacgacctcttgcgcctaatt

SEQ ID NO: 25192 - DNA, 80 bp, synthetic construct
  misc_feature 1..80: note = Synthetic: >NC_034556.1-cand-5840-5919
  source 1..80: mol_type = other DNA
aatccaaataatactctagacttaacaggtctggaaataacaggtgaaggatttagcactgttagcagcttatcaagtag

SEQ ID NO: 25193 - DNA, 80 bp, synthetic construct
  misc_feature 1..80: note = Synthetic: >NC_034556.1-cand-5920-5999
  source 1..80: mol_type = other DNA
gttgtggtcagaagaaatgagtctagttgatgatgaggaggaaattgatgatgagtttactattgacttacaagatgtag

SEQ ID NO: 25194 - DNA, 80 bp, synthetic construct
  misc_feature 1..80: note = Synthetic: >NC_034556.1-cand-6000-6079
  source 1..80: mol_type = other DNA
actttgagaacatagatctggaagcagatatagagcattttcttcaagatgaaagtgcctacacaggtgacttattaata

SEQ ID NO: 25195 - DNA, 80 bp, synthetic construct
  misc_feature 1..80: note = Synthetic: >NC_034556.1-cand-6080-6159
  source 1..80: mol_type = other DNA
tcaacagaagaaacagaggttaagaaaatgagaggcatcattaaactgctcgagcctgttaagttaataaagagttgggt

SEQ ID NO: 25196 - DNA, 80 bp, synthetic construct
  misc_feature 1..80: note = Synthetic: >NC_034556.1-cand-6160-6239
  source 1..80: mol_type = other DNA
gtctaaaggcttatgtattgaaaaagttaataacccagtcaatattgttctcatgactcgttatatatcaaaaaacttta

SEQ ID NO: 25197 - DNA, 80 bp, synthetic construct
  misc_feature 1..80: note = Synthetic: >NC_034556.1-cand-6220-6299
  source 1..80: mol_type = other DNA
ttatatatcaaaaaactttaattttgctaataagcaggtatctttattagacccatatgatttaacagaattggaaagta

SEQ ID NO: 25198 - DNA, 80 bp, synthetic construct
  misc_feature 1..80: note = Synthetic: >NC_034556.1-cand-6320-6399
  source 1..80: mol_type = other DNA
attgttgtagaccaatttgactcaattgataaggaagcccagtcacttgttagtaacaaaggaattattccagaagatgt

SEQ ID NO: 25199 - DNA, 80 bp, synthetic construct
  misc_feature 1..80: note = Synthetic: >NC_034556.1-cand-6400-6479
  source 1..80: mol_type = other DNA
gattcctgattcattattctcttttagacatactatggtgcttttaagaaggctttttccgcaggattcagtttcaacat

SEQ ID NO: 25200 - DNA, 80 bp, synthetic construct
  misc_feature 1..80: note = Synthetic: >NC_034563.1-cand-30-109
  source 1..80: mol_type = other DNA
ctactagctattgctgttttgatcagctcctgtttggccatcaaaaatgtatatgacatgaagatagagtgcccgcattc

SEQ ID NO: 25201 - DNA, 80 bp, synthetic construct
  misc_feature 1..80: note = Synthetic: >NC_034563.1-cand-80-159
  source 1..80: mol_type = other DNA
atatgacatgaagatagagtgcccgcattctgttaacttcggagaaaccagtgtgtcaggccaggtagagttacctccac

SEQ ID NO: 25202 - DNA, 80 bp, synthetic construct
  misc_feature 1..80: note = Synthetic: >NC_034563.1-cand-160-239
  source 1..80: mol_type = other DNA
tcccgattactgatgcagaacaattggtccctgagagttcttgtaacatggataaccaccaatctctcgctacaatcaat

SEQ ID NO: 25203 - DNA, 80 bp, synthetic construct
  misc_feature 1..80: note = Synthetic: >NC_034563.1-cand-240-319
  source 1..80: mol_type = other DNA
accctcacaaaggttatctggagaaaaaaatctgatcaagcatctgctaaccaaaattcatttgaggtagttgagtcaga

SEQ ID NO: 25204 - DNA, 80 bp, synthetic construct
  misc_feature 1..80: note = Synthetic: >NC_035889.1-cand-2040-2119
  source 1..80: mol_type = other DNA
gaggttgataaccgctaaccccgtaatcactgaaagcactgagaactctaagatgatgctggaacttgatccaccatttg

SEQ ID NO: 25205 - DNA, 80 bp, synthetic construct
  misc_feature 1..80: note = Synthetic: >NC_035889.1-cand-2160-2239
  source 1..80: mol_type = other DNA
cacccaccactggcacaggagtggcagcaccattggaaaagcatttgaagccactgtgagaggtgccaagagaatggcag

SEQ ID NO: 25206 - DNA, 80 bp, synthetic construct
  misc_feature 1..80: note = Synthetic: >NC_035889.1-cand-2240-2319
  source 1..80: mol_type = other DNA
tcttgggagacacagcctgggactttggatcagttggaggcgctctcaactcattgggcaagggcatccatcaaattttt

SEQ ID NO: 25207 - DNA, 80 bp, synthetic construct
  misc_feature 1..80: note = Synthetic: >NC_035889.1-cand-2320-2399
  source 1..80: mol_type = other DNA
ggagcagctttcaaatcattgtttggaggaatgtcctggttctcacaaatcctcattggaacgttgctgatgtggttggg

SEQ ID NO: 25208 - DNA, 80 bp, synthetic construct
  misc_feature 1..80: note = Synthetic: >NC_035889.1-cand-2360-2439
  source 1..80: mol_type = other DNA
tctcacaaatcctcattggaacgttgctgatgtggttgggtctgaacacaaagaatggatctatttcccttatgtgcttg

SEQ ID NO: 25209 - DNA, 80 bp, synthetic construct
  misc_feature 1..80: note = Synthetic: >NC_035889.1-cand-2540-2619
  source 1..80: mol_type = other DNA
tgttcgtctataacgacgttgaagcctggagggacaggtacaagtaccatcctgactccccccgtagattggcagcagca

SEQ ID NO: 25210 - DNA, 80 bp, synthetic construct
  misc_feature 1..80: note = Synthetic: >NC_035889.1-cand-2560-2639
  source 1..80: mol_type = other DNA
gaagcctggagggacaggtacaagtaccatcctgactccccccgtagattggcagcagcagtcaagcaagcctgggaaga

SEQ ID NO: 25211 - DNA, 80 bp, synthetic construct
  misc_feature 1..80: note = Synthetic: >NC_035889.1-cand-2620-2699
  source 1..80: mol_type = other DNA
gtcaagcaagcctgggaagatggtatctgcgggatctcctctgtttcaagaatggagaacatcatgtggagatcagtaga

SEQ ID NO: 25212 - DNA, 80 bp, synthetic construct
  misc_feature 1..80: note = Synthetic: >NC_035889.1-cand-2720-2799
  source 1..80: mol_type = other DNA
tggaagagaatggagttcaactgacggtcgttgtgggatctgtaaaaaaccccatgtggagaggtccacagagattgccc

SEQ ID NO: 25213 - DNA, 80 bp, synthetic construct
  misc_feature 1..80: note = Synthetic: >NC_035889.1-cand-2840-2919
  source 1..80: mol_type = other DNA
ggaaatcgtacttcgtcagagcagcaaagacaaataacagctttgtcgtggatggtgacacactgaaggaatgcccactc

SEQ ID NO: 25214 - DNA, 80 bp, synthetic construct
  misc_feature 1..80: note = Synthetic: >NC_035889.1-cand-2880-2959
  source 1..80: mol_type = other DNA
ctttgtcgtggatggtgacacactgaaggaatgcccactcgaacatagagcatggaacagctttcttgtggaggatcatg

SEQ ID NO: 25215 - DNA, 80 bp, synthetic construct
  misc_feature 1..80: note = Synthetic: >NC_035889.1-cand-2970-3049
  source 1..80: mol_type = other DNA
atttcacactagtgtctggctcaaggttagagaagattattcattagagtgtgatccagccgttattggaacagctgtta

SEQ ID NO: 25216 - DNA, 80 bp, synthetic construct
  misc_feature 1..80: note = Synthetic: >NC_035889.1-cand-3060-3139
  source 1..80: mol_type = other DNA
ggctgtacacagtgatctaggctactggattgagagtgagaagaatgacacatggaggctgaagagggcccatctaatcg

SEQ ID NO: 25217 - DNA, 80 bp, synthetic construct
  misc_feature 1..80: note = Synthetic: >NC_035889.1-cand-3120-3199
  source 1..80: mol_type = other DNA
gaagagggcccatctaatcgagatgaaaacatgtgaatggccaaagtcccacacattgtgggcagatggaatagaagaga

SEQ ID NO: 25218 - DNA, 80 bp, synthetic construct
  misc_feature 1..80: note = Synthetic: >NC_035889.1-cand-3200-3279
  source 1..80: mol_type = other DNA
gtgatctgatcattcccaagtctttagctgggccactcagccatcacaataccagagagggctacaggacccaaatgaaa

SEQ ID NO: 25219 - DNA, 80 bp, synthetic construct
  misc_feature 1..80: note = Synthetic: >NC_035889.1-cand-3280-3359
  source 1..80: mol_type = other DNA
gggccatggcacagtgaagagcttgaaattcggtttgaggaatgcccgggcactaaggtccacgtggaggaaacatgtgg

SEQ ID NO: 25220 - DNA, 80 bp, synthetic construct
  misc_feature 1..80: note = Synthetic: >NC_035889.1-cand-8550-8629
  source 1..80: mol_type = other DNA
cgagaaccacccatataggacatgggcttaccatggaagctatgaggcccccacacaagggtcagcgtcctctctaataa

SEQ ID NO: 25221 - DNA, 80 bp, synthetic construct
  misc_feature 1..80: note = Synthetic: >NC_035889.1-cand-8640-8719
  source 1..80: mol_type = other DNA
caggctcctgtcaaaaccctgggatgtggtgactggagtcacaggaatagccatgaccgacaccacaccgtatggtcagc

SEQ ID NO: 25222 - DNA, 80 bp, synthetic construct
  misc_feature 1..80: note = Synthetic: >NC_035889.1-cand-8710-8789
  source 1..80: mol_type = other DNA
tatggtcagcaaagagttttcaaggaaaaagtggacactagggtgccagacccccaagaaggcactcgtcaggttatgag

SEQ ID NO: 25223 - DNA, 80 bp, synthetic construct
  misc_feature 1..80: note = Synthetic: >NC_035889.1-cand-8790-8869
  source 1..80: mol_type = other DNA
catggtctcttcctggttgtggaaagagctaggcaaacacaaacggccacgagtctgtaccaaagaagagttcatcaaca

SEQ ID NO: 25224 - DNA, 80 bp, synthetic construct
  misc_feature 1..80: note = Synthetic: >NC_035889.1-cand-8900-8979
  source 1..80: mol_type = other DNA
tatttgaagaggaaaaagagtggaagactgcagtggaagctgtgaacgatccaaggttctgggctctagtggacaaggaa

SEQ ID NO: 25225 - DNA, 80 bp, synthetic construct
  misc_feature 1..80: note = Synthetic: >NC_035889.1-cand-8950-9029
  source 1..80: mol_type = other DNA
ccaaggttctgggctctagtggacaaggaaagagagcaccacctgagaggagagtgccagagttgtgtgtacaacatgat

SEQ ID NO: 25226 - DNA, 80 bp, synthetic construct
  misc_feature 1..80: note = Synthetic: >NC_035889.1-cand-8970-9049
  source 1..80: mol_type = other DNA
ggacaaggaaagagagcaccacctgagaggagagtgccagagttgtgtgtacaacatgatgggaaaaagagaaaagaaac

SEQ ID NO: 25227 - DNA, 80 bp, synthetic construct
  misc_feature 1..80: note = Synthetic: >NC_035889.1-cand-9160-9239
  source 1..80: mol_type = other DNA
gggagagagaactcaggaggtggtgttgaagggctgggattacaaagactcggatatgtcctagaagagatgagtcgcat

SEQ ID NO: 25228 - DNA, 80 bp, synthetic construct
  misc_feature 1..80: note = Synthetic: >NC_035889.1-cand-9190-9269
  source 1..80: mol_type = other DNA
gggctgggattacaaagactcggatatgtcctagaagagatgagtcgcataccaggaggaaggatgtatgcagatgacac

SEQ ID NO: 25229 - DNA, 80 bp, synthetic construct
  misc_feature 1..80: note = Synthetic: >NC_035889.1-cand-9270-9349
  source 1..80: mol_type = other DNA
tgctggctgggacacccgcatcagcaggttcgatctggagaatgaagctctaatcaccaaccaaatggagaaagggcata

SEQ ID NO: 25230 - DNA, 80 bp, synthetic construct
  misc_feature 1..80: note = Synthetic: >NC_035889.1-cand-9350-9429
  source 1..80: mol_type = other DNA
gggccttggcattggccataatcaagtacacataccaaaacaaagtggtaaaggtccttagaccagctgaaaaagggaaa

SEQ ID NO: 25231 - DNA, 80 bp, synthetic construct
  misc_feature 1..80: note = Synthetic: >NC_035889.1-cand-9470-9549
  source 1..80: mol_type = other DNA
gcggacaagttgtcacttacgctcttaacacatttaccaacctagtggtgcaactcattcggaatatggaggctgaggaa

SEQ ID NO: 25232 - DNA, 80 bp, synthetic construct
  misc_feature 1..80: note = Synthetic: >NC_035889.1-cand-9510-9589
  source 1..80: mol_type = other DNA
cctagtggtgcaactcattcggaatatggaggctgaggaagttctagagatgcaagacttgtggctgctgcggaggtcag

SEQ ID NO: 25233 - DNA, 80 bp, synthetic construct
  misc_feature 1..80: note = Synthetic: >NC_035889.1-cand-9590-9669
  source 1..80: mol_type = other DNA
agaaagtgaccaactggttgcagagcaacggatgggataggctcaaacgaatggcagtcagtggagatgattgcgttgtg

SEQ ID NO: 25234 - DNA, 80 bp, synthetic construct
  misc_feature 1..80: note = Synthetic: >NC_035889.1-cand-9750-9829
  source 1..80: mol_type = other DNA
gaaaccctcaactggatgggacaactgggaagaagttccgttttgctcccaccacttcaacaagctccatctcaaggacg

SEQ ID NO: 25235 - DNA, 80 bp, synthetic construct
  misc_feature 1..80: note = Synthetic: >NC_035889.1-cand-9810-9889
  source 1..80: mol_type = other DNA
caagctccatctcaaggacgggaggtccattgtggttccctgccgccaccaagatgaactgattggccgggcccgcgtct

SEQ ID NO: 25236 - DNA, 80 bp, synthetic construct
  misc_feature 1..80: note = Synthetic: >NC_038299.1-cand-3740-3819
  source 1..80: mol_type = other DNA
agactatatggaacagctgatggtatgataaatagccctatttcattcttaaaggttaataaagcccatattcctatccc

SEQ ID NO: 25237 - DNA, 80 bp, synthetic construct
  misc_feature 1..80: note = Synthetic: >NC_038299.1-cand-3840-3919
  source 1..80: mol_type = other DNA
tgtcaatcatggagctggcaactgcagggataggaatggcagataagaatatactaaagaatgcattttattcatataaa

SEQ ID NO: 25238 - DNA, 80 bp, synthetic construct
  misc_feature 1..80: note = Synthetic: >NC_038299.1-cand-3920-3999
  source 1..80: mol_type = other DNA
catacaaggagagatggtgatagatatattttaggtttatttaagtttttaatgtccctgagtgatgatgtattccagca

SEQ ID NO: 25239 - DNA, 80 bp, synthetic construct
  misc_feature 1..80: note = Synthetic: >NC_038299.1-cand-4000-4079
  source 1..80: mol_type = other DNA
tgataggttaggcgagtttagttttgtaggaaaggttcaatggaaagtttttaccccaaaatcagagtttgaattttatg

SEQ ID NO: 25240 - DNA, 80 bp, synthetic construct
  misc_feature 1..80: note = Synthetic: >NC_038299.1-cand-4070-4149
  source 1..80: mol_type = other DNA
gaattttatgatcagtattcggcaacatacttacagacatggtcgaaacagcacccagtatatgactatataataccacg

SEQ ID NO: 25241 - DNA, 80 bp, synthetic construct
  misc_feature 1..80: note = Synthetic: >NC_038299.1-cand-4160-4239
  source 1..80: mol_type = other DNA
aatcttctggtgtacctggttcgtaaactaaatgacccaagtatagtaacagcaatgacaatgcagtcaccccttcaatt

SEQ ID NO: 25242 - DNA, 80 bp, synthetic construct
  misc_feature 1..80: note = Synthetic: >NC_038299.1-cand-4240-4319
  source 1..80: mol_type = other DNA
gagatttaggatgcaggcaaaacaacatatgaaagtttgcaagctagatggtgaatgggtaacatttcgtgaagtactgg

SEQ ID NO: 25243 - DNA, 80 bp, synthetic construct
  misc_feature 1..80: note = Synthetic: >NC_038299.1-cand-4320-4399
  source 1..80: mol_type = other DNA
catcagcggatagctttgcatctagttaccagcctagtgaaaaggacctagacttgtttaatacattagtcagttgtaca

SEQ ID NO: 25244 - DNA, 80 bp, synthetic construct
  misc_feature 1..80: note = Synthetic: >NC_038299.1-cand-4400-4479
  source 1..80: mol_type = other DNA
ttctctaaggagtatgcatggaaagattttcttaatgaagttagatgtgaggtaaccacagctagacatgtccataggcc

SEQ ID NO: 25245 - DNA, 80 bp, synthetic construct
  misc_feature 1..80: note = Synthetic: >NC_038299.1-cand-4480-4559
  source 1..80: mol_type = other DNA
taaggtagcaagaacattcactgtaagggagaaggatcaagcaatacagaaccctataacctcagtcattggatataagt

SEQ ID NO: 25246 - DNA, 80 bp, synthetic construct
  misc_feature 1..80: note = Synthetic: >NC_038299.1-cand-4560-4639
  source 1..80: mol_type = other DNA
atgcatcaacagtagatgagattagtgatgttctagatagtgccttttttcctgactcattatctgcagatcttcaggtg

SEQ ID NO: 25247 - DNA, 80 bp, synthetic construct
  misc_feature 1..80: note = Synthetic: >NC_038299.1-cand-4640-4719
  source 1..80: mol_type = other DNA
atgaaagaaggagtttacagagaactgggtttagacataggactaccagatgtcttgaagaggattgcaccattattata

SEQ ID NO: 25248 - DNA, 80 bp, synthetic construct
  misc_feature 1..80: note = Synthetic: >NC_038299.1-cand-4720-4799
  source 1..80: mol_type = other DNA
taaagctggtaaatcaagaatagttatagttgaagggaacgtggagggtactgcagaatcaatatgtagttattggctta

SEQ ID NO: 25249 - DNA, 80 bp, synthetic construct
  misc_feature 1..80: note = Synthetic: >NC_038299.1-cand-4800-4879
  source 1..80: mol_type = other DNA
agaacatgtcactaattaagacaataaaggtcaaacccaggaaggaggttttgaaggctgtatccctctatggagctaaa

SEQ ID NO: 25250 - DNA, 80 bp, synthetic construct
  misc_feature 1..80: note = Synthetic: >NC_038299.1-cand-4880-4959
  source 1..80: mol_type = other DNA
gacaatctcagtatacaggatgacctagcagccactagaatctgtattgaagtatggagatggtgcaaggcaaacaatca

SEQ ID NO: 25251 - DNA, 80 bp, synthetic construct
  misc_feature 1..80: note = Synthetic: >NC_038299.1-cand-4960-5039
  source 1..80: mol_type = other DNA
gagtgtccaggattggttcactgcattatacttcgaaaatcaaacactatatgattggattgagagatttcgcagaaaag

SEQ ID NO: 25252 - DNA, 80 bp, synthetic construct
  misc_feature 1..80: note = Synthetic: >NC_038311.1-cand-3910-3989
  source 1..80: mol_type = other DNA
tcatggcttaagaaattcactgaaatgtgtaatgctgcacgtggtcttgaatggattggtaataaaatttcaaaatttat

SEQ ID NO: 25253 - DNA, 80 bp, synthetic construct
  misc_feature 1..80: note = Synthetic: >NC_038311.1-cand-3990-4069
  source 1..80: mol_type = other DNA
agattggatgaaatctatgctaccccaggcccaattgaaagttaaatacttgaatgaaataaagaaactcagtttgcttg

SEQ ID NO: 25254 - DNA, 80 bp, synthetic construct
  misc_feature 1..80: note = Synthetic: >NC_038311.1-cand-4070-4149
  source 1..80: mol_type = other DNA
aaaaacagattgaaaatctacgtgcggcagatagtgcaacacaagagaaaatcaaatgtgaaattgacaccctacatgat

SEQ ID NO: 25255 - DNA, 80 bp, synthetic construct
  misc_feature 1..80: note = Synthetic: >NC_038311.1-cand-4150-4229
  source 1..80: mol_type = other DNA
ctatcgtgcaaatttcttcctttgtatgcacatgaggcaaaaagaatcaaagtgctttataataaatgttccaatataat

SEQ ID NO: 25256 - DNA, 80 bp, synthetic construct
  misc_feature 1..80: note = Synthetic: >NC_038311.1-cand-4230-4309
  source 1..80: mol_type = other DNA
taaacaaagaaagagaagtgaaccggtggcggtgatgatacatggaccacccggtactggtaaatctataacaactaact

SEQ ID NO: 25257 - DNA, 80 bp, synthetic construct
  misc_feature 1..80: note = Synthetic: >NC_038311.1-cand-4310-4389
  source 1..80: mol_type = other DNA
tcttggctagaatgataacaaatgaaagtgatgtgtactcattacctccagatcccaaatattttgatggttatgacaat

SEQ ID NO: 25258 - DNA, 80 bp, synthetic construct
  misc_feature 1..80: note = Synthetic: >NC_038311.1-cand-4390-4469
  source 1..80: mol_type = other DNA
cagagtgttgtaatcatggatgatattatgcaaaatccagatggagaagacatgacactattttgccaaatggtttcaag

SEQ ID NO: 25259 - DNA, 80 bp, synthetic construct
  misc_feature 1..80: note = Synthetic: >NC_038311.1-cand-4480-4559
  source 1..80: mol_type = other DNA
ataccacccatggctgatttgcctgacaagggtaaaccatttgattcaagatttatcttatgtagtactaaccactcgct

SEQ ID NO: 25260 - DNA, 80 bp, synthetic construct
  misc_feature 1..80: note = Synthetic: >NC_038311.1-cand-4560-4639
  source 1..80: mol_type = other DNA
tttagccccacctactatatcttcattacccgcaatgaatagaagatttttctttgacttagatattgtagttcatgaca

SEQ ID NO: 25261 - DNA, 80 bp, synthetic construct
  misc_feature 1..80: note = Synthetic: >NC_038311.1-cand-4650-4729
  source 1..80: mol_type = other DNA
tacacaagggaaattagatgtatccaaagcttttcgaccttgtaatgttaacaccaaaattggcaatgcaaaatgttgtc

SEQ ID NO: 25262 - DNA, 80 bp, synthetic construct
  misc_feature 1..80: note = Synthetic: >NC_038311.1-cand-4730-4809
  source 1..80: mol_type = other DNA
catttgtatgtggtaaggcagtgwcattcaaagatcgcagcacttgctcaacatacaccttagctcaagtttacaatcac

SEQ ID NO: 25263 - DNA, 80 bp, synthetic construct
  misc_feature 1..80: note = Synthetic: >NC_038311.1-cand-4810-4889
  source 1..80: mol_type = other DNA
attttggaagaagacaaaagaaggagacaggtggtggatgtcatgtctgcaattttccaaggaccaatttctttagacgy

SEQ ID NO: 25264 - DNA, 80 bp, synthetic construct
  misc_feature 1..80: note = Synthetic: >NC_038311.1-cand-4890-4969
  source 1..80: mol_type = other DNA
tccaccaccaccagctatagyagatctgttacaatcagttagaacacctgaggtaatcaagtactgtcaagataataaat

SEQ ID NO: 25265 - DNA, 80 bp, synthetic construct
  misc_feature 1..80: note = Synthetic: >NC_038311.1-cand-4970-5049
  source 1..80: mol_type = other DNA
gggtcattccagcagagtgccaagtggaaagagacttaaatatagccaatagcataatagctattatagcaaatataata

SEQ ID NO: 25266 - DNA, 80 bp, synthetic construct
  misc_feature 1..80: note = Synthetic: >NC_038311.1-cand-5050-5129
  source 1..80: mol_type = other DNA
agtatagctggcattatatttgtaatttataaattgttttgttcattacaaggaccatactcaggtgaacctaaacctaa

SEQ ID NO: 25267 - DNA, 80 bp, synthetic construct
  misc_feature 1..80: note = Synthetic: >NC_038311.1-cand-5130-5209
  source 1..80: mol_type = other DNA
aaccaaagtacctgaaagaagagtagttgctcaaggtccagaagaagaatttggaaggtcaattctcaaaaacaatactt

SEQ ID NO: 25268 - DNA, 80 bp, synthetic construct
  misc_feature 1..80: note = Synthetic: >NC_038373.1-cand-1240-1319
  source 1..80: mol_type = other DNA
ggatcctgagctaaggcagttagcacagtccttagttgacactaaagtgaaggagatttcaaaccaggaacctttaaagc

SEQ ID NO: 25269 - DNA, 80 bp, synthetic construct
  misc_feature 1..80: note = Synthetic: >NC_038373.1-cand-1320-1399
  source 1..80: mol_type = other DNA
tttaaatgtggatggttaaagggctgatgagggctttctgggcttgtgccaaatattaatcatttcagggctttacacta

SEQ ID NO: 25270 - DNA, 80 bp, synthetic construct
  misc_feature 1..80: note = Synthetic: >NC_038373.1-cand-1410-1489
  source 1..80: mol_type = other DNA
tgactactatcagttacaatgtgatgggtgggcaatgggtttattgcactaatttagggttaagggccataattgatttg

SEQ ID NO: 25271 - DNA, 80 bp, synthetic construct
  misc_feature 1..80: note = Synthetic: >NC_038373.1-cand-1490-1569
  source 1..80: mol_type = other DNA
tagtaattagataagttagatttaagtgattagttaagtttaagtaattagttaagtttaggtaattagttgaggttaag

SEQ ID NO: 25272 - DNA, 80 bp, synthetic construct
  misc_feature 1..80: note = Synthetic: >NC_038373.1-cand-1570-1649
  source 1..80: mol_type = other DNA
tgatttaggtaagttaagataattaagaatatttagccgtatttactcattaggtataagtcatatacatcagatgtggt

SEQ ID NO: 25273 - DNA, 80 bp, synthetic construct
  misc_feature 1..80: note = Synthetic: >NC_038373.1-cand-1650-1729
  source 1..80: mol_type = other DNA
aatcttaggtagtttctatgggcatcatagatcgttgggaaatgataatcaatgagactgactgctgacgggttgattac

SEQ ID NO: 25274 - DNA, 80 bp, synthetic construct
  misc_feature 1..80: note = Synthetic: >NC_038373.1-cand-1730-1809
  source 1..80: mol_type = other DNA
ctgtgatctataaatttttgttaatactgactaatactaatcattattatctctttataaatgatatcaaactaatgttt

SEQ ID NO: 25275 - DNA, 80 bp, synthetic construct
  misc_feature 1..80: note = Synthetic: >NC_038373.1-cand-1810-1889
  source 1..80: mol_type = other DNA
tattaatccattggatgtaaatttcgttctggctatgctttgcttaatactaaccacaacattctacctcatcccaaccc

SEQ ID NO: 25276 - DNA, 80 bp, synthetic construct
  misc_feature 1..80: note = Synthetic: >NC_038373.1-cand-1880-1959
  source 1..80: mol_type = other DNA
atcccaacccctttccctttaaaactacctcaattatactacctcattagttttatctcttgattgcttttcaaggagca

SEQ ID NO: 25277 - DNA, 80 bp, synthetic construct
  misc_feature 1..80: note = Synthetic: >NC_038374.1-cand-0-79
  source 1..80: mol_type = other DNA
agtagactccgcaagaagaagcaaaaagttaaagagagaatataaaatggaagggtggttgttgatcttctgtggagtac

SEQ ID NO: 25278 - DNA, 80 bp, synthetic construct
  misc_feature 1..80: note = Synthetic: >NC_038374.1-cand-80-159
  source 1..80: mol_type = other DNA
ttactactatggtgtcagcactcccgaaagcagtctatgagcttaagatggaatgtccacataccgttggtctaggacaa

SEQ ID NO: 25279 - DNA, 80 bp, synthetic construct
  misc_feature 1..80: note = Synthetic: >NC_038374.1-cand-160-239
  source 1..80: mol_type = other DNA
ggctatatagctggctcagttgaattagggtttataagtctttcccgggtttctgagataaaggttgaaagctcttgcaa

SEQ ID NO: 25280 - DNA, 80 bp, synthetic construct
  misc_feature 1..80: note = Synthetic: >NC_038374.1-cand-240-319
  source 1..80: mol_type = other DNA
ctttgatctgcatatgacctcatcccaacaacagacatacacacaagttaattgggcgaagaaaagcacaactacagaaa

SEQ ID NO: 25281 - DNA, 80 bp, synthetic construct
  misc_feature 1..80: note = Synthetic: >NC_038374.1-cand-320-399
  source 1..80: mol_type = other DNA
caactaatgcaggtgctacaacgtttgaggcaacatcgaaaagtacaaatctacgtggaacttgtgtgttatcatctgat

SEQ ID NO: 25282 - DNA, 80 bp, synthetic construct
  misc_feature 1..80: note = Synthetic: >NC_038374.1-cand-400-479
  source 1..80: mol_type = other DNA
ctgtttgacacatataaaaaggtaaaaaagactgttctatgctatgatctttcatgcaatcagacacattgccagccaac

SEQ ID NO: 25283 - DNA, 80 bp, synthetic construct
  misc_feature 1..80: note = Synthetic: >NC_038374.1-cand-480-559
  source 1..80: mol_type = other DNA
agtccatttacttgcaccagtgattacatgtatgagtatacgaaattgcatggtaagcatcctcgagaatcgaattcaaa

SEQ ID NO: 25284 - DNA, 80 bp, synthetic construct
  misc_feature 1..80: note = Synthetic: >NC_039199.1-cand-1870-1949
  source 1..80: mol_type = other DNA
gcaatgattggcgtaagagaggaattaatagcagacataataaaggaagctaaagggaaagcagcagaaatgatggaaga

SEQ ID NO: 25285 - DNA, 80 bp, synthetic construct
  misc_feature 1..80: note = Synthetic: >NC_039199.1-cand-1950-2029
  source 1..80: mol_type = other DNA
ggaaatgagtcaacgatcaaaaataggaaatggtagtgtaaaattaacagaaaaagcaaaagagctcaacaaaattgttg

SEQ ID NO: 25286 - DNA, 80 bp, synthetic construct
  misc_feature 1..80: note = Synthetic: >NC_039199.1-cand-2030-2109
  source 1..80: mol_type = other DNA
aagatgaaagcacaagtggagaatccgaagaagaagaagaaccaaaagacacacaagacaatagtcaagaagatgacatt

SEQ ID NO: 25287 - DNA, 80 bp, synthetic construct
  misc_feature 1..80: note = Synthetic: >NC_039199.1-cand-2130-2209
  source 1..80: mol_type = other DNA
taataaaaataaacaatgggacaagtaaaaatggagtcctacctagtagacacctatcaaggcattccttacacagcagc

SEQ ID NO: 25288 - DNA, 80 bp, synthetic construct
  misc_feature 1..80: note = Synthetic: >NC_039199.1-cand-2210-2289
  source 1..80: mol_type = other DNA
tgttcaagttgatctaatagaaaaggacctgttacctgcaagcctaacaatatggttccctttgtttcaggccaacacac

SEQ ID NO: 25289 - DNA, 80 bp, synthetic construct
  misc_feature 1..80: note = Synthetic: >NC_039199.1-cand-2290-2369
  source 1..80: mol_type = other DNA
caccagcagtgctgctcgatcagctaaaaaccctgacaataaccactctgtatgctgcatcacaaaatggtccaatactc

SEQ ID NO: 25290 - DNA, 80 bp, synthetic construct
  misc_feature 1..80: note = Synthetic: >NC_039199.1-cand-2370-2449
  source 1..80: mol_type = other DNA
aaagtgaatgcatcagcccaaggtgcagcaatgtctgtacttcccaaaaaatttgaagtcaatgcgactgtagcactcga

SEQ ID NO: 25291 - DNA, 80 bp, synthetic construct
  misc_feature 1..80: note = Synthetic: >NC_039199.1-cand-2450-2529
  source 1..80: mol_type = other DNA
tgaatatagcaaactggaatttgacaaactcacagtctgtgaagtaaaaacagtttacttaacaaccatgaaaccatacg

SEQ ID NO: 25292 - DNA, 80 bp, synthetic construct
  misc_feature 1..80: note = Synthetic: >NC_039199.1-cand-2530-2609
  source 1..80: mol_type = other DNA
ggatggtatcaaaatttgtgagctcagccaaatcagttggcaaaaaaacacatgatctaatcgcactatgtgattttatg

SEQ ID NO: 25293 - DNA, 80 bp, synthetic construct
  misc_feature 1..80: note = Synthetic: >NC_039199.1-cand-2610-2689
  source 1..80: mol_type = other DNA
gatctagaaaagaacacacctgttacaataccagcattcatcaaatcagtttcaatcaaagagagtgagtcagctactgt

SEQ ID NO: 25294 - DNA, 80 bp, synthetic construct
  misc_feature 1..80: note = Synthetic: >NC_039199.1-cand-2690-2769
  source 1..80: mol_type = other DNA
tgaagctgctataagcagtgaagcagaccaagctctaacacaggccaaaattgcaccttatgcgggattaattatgatca

SEQ ID NO: 25295 - DNA, 80 bp, synthetic construct
  misc_feature 1..80: note = Synthetic: >NC_039199.1-cand-2770-2849
  source 1..80: mol_type = other DNA
tgactatgaacaatcccaaaggcatattcaaaaagcttggagctgggactcaagtcatagtagaactaggagcatatgtc

SEQ ID NO: 25296 - DNA, 80 bp, synthetic construct
  misc_feature 1..80: note = Synthetic: >NC_039199.1-cand-2850-2929
  source 1..80: mol_type = other DNA
caggctgaaagcataagcaaaatatgcaagacttggagccatcaagggacaagatatgtcttgaagtccagataacaacc

SEQ ID NO: 25297 - DNA, 80 bp, synthetic construct
  misc_feature 1..80: note = Synthetic: >NC_039199.1-cand-2930-3009
  source 1..80: mol_type = other DNA
aagcaccttggccaagagctactaaccctatctcatagatcataaagtcaccattctagttatataaaaatcaagttaga

SEQ ID NO: 25298 - DNA, 80 bp, synthetic construct
  misc_feature 1..80: note = Synthetic: >NC_039199.1-cand-3020-3099
  source 1..80: mol_type = other DNA
aatcaatcaagaacgggacaaataaaaatgtcttggaaagtggtgatcattttttcattgttaataacacctcaacacgg

SEQ ID NO: 25299 - DNA, 80 bp, synthetic construct
  misc_feature 1..80: note = Synthetic: >NC_039199.1-cand-3100-3179
  source 1..80: mol_type = other DNA
tcttaaagagagctacttagaagagtcatgtagcactataactgaaggatatctcagtgttctgaggacaggttggtaca

SEQ ID NO: 25300 - DNA, 80 bp, synthetic construct
  misc_feature 1..80: note = Synthetic: >NC_044856.1-cand-5380-5459
  source 1..80: mol_type = other DNA
taaatgatgatggcgtctaaggacgccccttcaaacatggacggcactagtggtgctggtcagctggtaccagaggcaaa

SEQ ID NO: 25301 - DNA, 80 bp, synthetic construct
  misc_feature 1..80: note = Synthetic: >NC_044856.1-cand-5500-5579
  source 1..80: mol_type = other DNA
gcaactgcagccgctacggcaggtcaagttaatatgattgacccctggattatgaataattttgtacagtcaccagaggg

SEQ ID NO: 25302 - DNA, 80 bp, synthetic construct
  misc_feature 1..80: note = Synthetic: >NC_044856.1-cand-5540-5619
  source 1..80: mol_type = other DNA
acccctggattatgaataattttgtacagtcaccagagggcgagttcacaatttccccaaacaacacgcctggtgacatt

SEQ ID NO: 25303 - DNA, 80 bp, synthetic construct
  misc_feature 1..80: note = Synthetic: >NC_044856.1-cand-5620-5699
  source 1..80: mol_type = other DNA
ttatttgatttacaattgggcccccatttgaatccattcctgcagcatctatcacaaatgtacaatggctgggttggcaa

SEQ ID NO: 25304 - DNA, 80 bp, synthetic construct
  misc_feature 1..80: note = Synthetic: >NC_044856.1-cand-5700-5779
  source 1..80: mol_type = other DNA
catgagggttagaattttgctagcagggaatgcgttttctgctggcaagataataatctgttgtgtgccacctggcttta

SEQ ID NO: 25305 - DNA, 80 bp, synthetic construct
  misc_feature 1..80: note = Synthetic: >NC_044856.1-cand-5780-5859
  source 1..80: mol_type = other DNA
ccgcccagaatatctctattgctcaagccacaatgttcccacatgtcattgctgatgttcgagttttagagcccattgag

SEQ ID NO: 25306 - DNA, 80 bp, synthetic construct
  misc_feature 1..80: note = Synthetic: >NC_044856.1-cand-5860-5939
  source 1..80: mol_type = other DNA
attccccttgatgatgttcggaatgtgctcttccacacaaatgagaatagacccacaatgcgcttattgtgcatgctcta

SEQ ID NO: 25307 - DNA, 80 bp, synthetic construct
  misc_feature 1..80: note = Synthetic: >NC_044856.1-cand-5960-6039
  source 1..80: mol_type = other DNA
gcgcgtctgcgggcacggatccgttcgtgattgcagggcgcgtcttaacgtgcccttctccagactttaatttcttgttt

SEQ ID NO: 25308 - DNA, 80 bp, synthetic construct
  misc_feature 1..80: note = Synthetic: >NC_044856.1-cand-6020-6099
  source 1..80: mol_type = other DNA
cagactttaatttcttgtttctagtcccccccagtgttgaacagaaaactaggcaattaactgtccccaacatcccatta

SEQ ID NO: 25309 - DNA, 80 bp, synthetic construct
  misc_feature 1..80: note = Synthetic: >NC_044856.1-cand-6100-6179
  source 1..80: mol_type = other DNA
aacaatctatcaaattctagagtgcccgccatgatcaataagatggctatttccccagatgctaatcaggttgtccaatt

SEQ ID NO: 25310 - DNA, 80 bp, synthetic construct
  misc_feature 1..80: note = Synthetic: >NC_044856.1-cand-6180-6259
  source 1..80: mol_type = other DNA
tcaaaatggcaggtgcactacagatggtcagctgttgggcacaaccccaatctctgcgagtcaagtggcccgcatccgcg

SEQ ID NO: 25311 - DNA, 80 bp, synthetic construct
  misc_feature 1..80: note = Synthetic: >NC_044856.1-cand-6260-6339
  source 1..80: mol_type = other DNA
gcaaagtcttttctacttcatcaggcaaaggattgaatctgtctgagctggatggcagtccataccatgcctttgaaagc

SEQ ID NO: 25312 - DNA, 80 bp, synthetic construct
  misc_feature 1..80: note = Synthetic: >NC_044856.1-cand-6340-6419
  source 1..80: mol_type = other DNA
cctgccccggttggtttccctgatcttgggcattgtgattggcatgtctcttccttcaaggcagatcaaaactccagaga

SEQ ID NO: 25313 - DNA, 80 bp, synthetic construct
  misc_feature 1..80: note = Synthetic: >NC_044856.1-cand-6460-6539
  source 1..80: mol_type = other DNA
tttgccccacacctgggttctattgaatacaccacttcgcaaaacccagatggtgatcagttaggcaccctaacctggat

SEQ ID NO: 25314 - DNA, 80 bp, synthetic construct
  misc_feature 1..80: note = Synthetic: >NC_044856.1-cand-6500-6579
  source 1..80: mol_type = other DNA
aaaacccagatggtgatcagttaggcaccctaacctggatctcatccccatcagaagatactcctggtcatggtacaatc

SEQ ID NO: 25315 - DNA, 80 bp, synthetic construct
  misc_feature 1..80: note = Synthetic: >NC_044856.1-cand-6570-6649
  source 1..80: mol_type = other DNA
tggtacaatcaacctatggaagattccttcctatggttccacagtcactgagtcagtccatcttgcacccccaatatacc

SEQ ID NO: 25316 - DNA, 80 bp, synthetic construct
  misc_feature 1..80: note = Synthetic: >NC_009823.1-cand-90-169
  source 1..80: mol_type = other DNA
atgagtgtcgtacagcctccaggcccccccctcccgggagagccatagtggtctgcggaaccggtgagtacaccggaatt

SEQ ID NO: 25317 - DNA, 80 bp, synthetic construct
  misc_feature 1..80: note = Synthetic: >NC_007367.1-cand-170-249
  source 1..80: mol_type = other DNA
aattctgtcacctctgactaaggggattttggggtttgtgttcacgctcaccgtgcccagtgagcgaggactgcagcgta

SEQ ID NO: 25318 - DNA, 80 bp, synthetic construct
  misc_feature 1..80: note = Synthetic: >HCV.B2-cand-7310-7389
  source 1..80: mol_type = other DNA
acaatttgatttaatttcaattggcttaaccctaccacatccaccgaactagataacggtgtggtaggggtaaattctcc

SEQ ID NO: 25319 - DNA, 80 bp, synthetic construct
  misc_feature 1..80: note = Synthetic: >AF482713.1-cand-10-89
  source 1..80: mol_type = other DNA
tgagaagctactactgcgaaagctggaatgagcaccctccaagaattacaagaaaatatcacagcacacgaacaacagct

SEQ ID NO: 25320 - DNA, 80 bp, synthetic construct
  misc_feature 1..80: note = Synthetic: >NC_007358.1-cand-2170-2249
  source 1..80: mol_type = other DNA
catggtgtctagggcccgaattgatgcacgaattgacttcgagtctggaaggattaagaaagaagagtttgctgagatca

SEQ ID NO: 25321 - DNA, 80 bp, synthetic construct
  misc_feature 1..80: note = Synthetic: >NC_001672.1-cand-10490-10569
  source 1..80: mol_type = other DNA
aaaaaaaaaaaaaaaaaaaaaaaaaaaaaaaaaaaaaaaaaaagccagaattgagctgaacctggagagctcattaaata

SEQ ID NO: 25322 - DNA, 80 bp, synthetic construct
  misc_feature 1..80: note = Synthetic: >NC_007359.1-cand-0-79
  source 1..80: mol_type = other DNA
aaagcaggtactgatccaaaatggaagactttgtgcgacaatgcttcaatccaatgattgtcgagcttgcggaaaaggca

SEQ ID NO: 25323 - DNA, 80 bp, synthetic construct
  misc_feature 1..80: note = Synthetic: >EVB85-cand-6940-7019
  source 1..80: mol_type = other DNA
tcccatcgatgcctcattgttagctgaagctggtaaagggtatggtctgatcatgacaccagctgataagggagagtgtt

SEQ ID NO: 25324 - DNA, 80 bp, synthetic construct
  misc_feature 1..80: note = Synthetic: >NC_026423.1-cand-100-179
  source 1..80: mol_type = other DNA
aacaggatacaccatggacacagtcaacagaacacataaatactcagaaaaaggaaagtggacaacgaacacagagactg

SEQ ID NO: 25325 - DNA, 80 bp, synthetic construct
  misc_feature 1..80: note = Synthetic: >NC_007380.1-cand-460-539
  source 1..80: mol_type = other DNA
aattgttggcgaaatttcaccattgccttctcttccaggacatactattgaggatgtcaaaaatgcaattggggtcctca

SEQ ID NO: 25326 - DNA, 80 bp, synthetic construct
  misc_feature 1..80: note = Synthetic: >NC_007358.1-cand-2250-2329
  source 1..80: mol_type = other DNA
tgaagatctgttccaccattgaagagctcggacggcaaaaatagtgaatttagcttgtccttcatgaaaaaatgccttgt

SEQ ID NO: 25327 - DNA, 80 bp, synthetic construct
  misc_feature 1..80: note = Synthetic: >NC_004906.1-cand-590-669
  source 1..80: mol_type = other DNA
acacagttcgagtctctgaaactctacagagattcacttggagaagcagtgatgagaatgggagatctccactccctcca

SEQ ID NO: 25328 - DNA, 80 bp, synthetic construct
  misc_feature 1..80: note = Synthetic: >EVA91-cand-6640-6719
  source 1..80: mol_type = other DNA
acactgggtatgatgctagtctttctcctgcttggtttagggctttggagattgtcctcaaaagattaggttataatcaa

SEQ ID NO: 25329 - DNA, 80 bp, synthetic construct
  misc_feature 1..80: note = Synthetic: >NC_009826.1-cand-260-339
  source 1..80: mol_type = other DNA
cgtagaccgtgcaccatgagcacgaatcctaaacctcaaagaaaaaccaaaagaaacaccaaccgccgcccacaggacgt

SEQ ID NO: 25330 - DNA, 80 bp, synthetic construct
  misc_feature 1..80: note = Synthetic: >NC_007363.1-cand-840-919
  source 1..80: mol_type = other DNA
tcgtcttttcttcaaatgcatttatcgtcgccttaaatacggtttgaaaagagggccttctacggaaggggtacctgagt

SEQ ID NO: 25331 - DNA, 80 bp, synthetic construct
  misc_feature 1..80: note = Synthetic: >EVA90-cand-7260-7339
  source 1..80: mol_type = other DNA
actgtaccaattggcaaagttttagctcttccaaattatgataacttgagaagaaattggcttgaactgttttaaataat

SEQ ID NO: 25332 - DNA, 80 bp, synthetic construct
  misc_feature 1..80: note = Synthetic: >NC_003310.1-cand-7560-7639
  source 1..80: mol_type = other DNA
aaatatctgatgttgttgttcgctgctatgataatcagatcattagccgatagtggtaacgctatcgaaacaacatcgcc

SEQ ID NO: 25333 - DNA, 80 bp, synthetic construct
  misc_feature 1..80: note = Synthetic: >NC_003310.1-cand-196700-196779
  source 1..80: mol_type = other DNA
aaatattaaacctctttctgatggtctctataaacgattgatttttcttaccctctagagtttcctacggtcgtgggtca

SEQ ID NO: 25334 - DNA, 80 bp, synthetic construct
  misc_feature 1..80: note = Synthetic: >AJ616855.1-cand-410-489
  source 1..80: mol_type = other DNA
aaatcaagaacaatcagtggaccttcatgtcgagatagaaagccaaggaatttctacaagtgttcatgctttaggtcatt

SEQ ID NO: 25335 - DNA, 80 bp, synthetic construct
  misc_feature 1..80: note = Synthetic: >HCV.B2-cand-610-689
  source 1..80: mol_type = other DNA
ccatatagctattggattggccatccggtgagcaacagagcaattatatttctatttgttggatatataccacttgattt

SEQ ID NO: 25336 - DNA, 80 bp, synthetic construct
  misc_feature 1..80: note = Synthetic: >AdVB7-cand-13130-13209
  source 1..80: mol_type = other DNA
aaatcacccaagtgagccgcgccctgggtcaggaagacacgggcagtttggaagccaccctgaacttcttgctaaccaac

SEQ ID NO: 25337 - DNA, 80 bp, synthetic construct
  misc_feature 1..80: note = Synthetic: >NC_003310.1-cand-126750-126829
  source 1..80: mol_type = other DNA
agtccggatgtattaatcgtagtcagtagacatctgacaaacgatgcattttgtaaatatatcaataagcattatgattt

SEQ ID NO: 25338 - DNA, 80 bp, synthetic construct
  misc_feature 1..80: note = Synthetic: >NC_003310.1-cand-82320-82399
  source 1..80: mol_type = other DNA
gaaatagcaagagatccgtacgcggtaataaatagaaacgtactactgagatatactaccgatatagagtataatgattt

SEQ ID NO: 25339 - DNA, 80 bp, synthetic construct
  misc_feature 1..80: note = Synthetic: >NC_001611.1-cand-55020-55099
  source 1..80: mol_type = other DNA
ttgtatccatttcgtttaatgacaaacatttttgttggtgtaataaaaaaaattatttaacttttcattaatagggattt

SEQ ID NO: 25340 - DNA, 80 bp, synthetic construct
  misc_feature 1..80: note = Synthetic: >NC_001611.1-cand-30600-30679
  source 1..80: mol_type = other DNA
aaatcgaatggtcggctctctggtttgctaccccaatgataacaatagtcttgtaaagataaaccgcaagaaaatttata

SEQ ID NO: 25341 - DNA, 80 bp, synthetic construct
  misc_feature 1..80: note = Synthetic: >NC_001611.1-cand-8810-8889
  source 1..80: mol_type = other DNA
atagaacgtgtcatctaccttattaactttcaccgcatagttgtttgcaaatacggttaatcctttgacctcgtcgattt

SEQ ID NO: 25342 - DNA, 80 bp, synthetic construct
  misc_feature 1..80: note = Synthetic: >NC_003310.1-cand-38910-38989
  source 1..80: mol_type = other DNA
tggtggatacgaagatgctatccatcagaatgtttccctgattagtattttctatatagctattcttctttaaacgattt

SEQ ID NO: 25343 - DNA, 80 bp, synthetic construct
  misc_feature 1..80: note = Synthetic: >NC_001611.1-cand-11300-11379
  source 1..80: mol_type = other DNA
aaatctattatattttatgaaagatatattactgctcacctctatatttcgtacatttttaaactgtttgtataatatct

SEQ ID NO: 25344 - DNA, 80 bp, synthetic construct
  misc_feature 1..80: note = Synthetic: >NC_003310.1-cand-134590-134669
  source 1..80: mol_type = other DNA
aaatgaacgccagaggcgtaaaagttaaattagatttcgaacgaaggcctccttcgttttataaaccattagataaagtt

SEQ ID NO: 25345 - DNA, 80 bp, synthetic construct
  misc_feature 1..80: note = Synthetic: >NC_003310.1-cand-186310-186389
  source 1..80: mol_type = other DNA
aaatgactataatctccttggatacaaaagacgccaaagatgctatagaagatgtgatagtagcaagtgcggtagccgaa

SEQ ID NO: 25346 - DNA, 80 bp, synthetic construct
  misc_feature 1..80: note = Synthetic: >NC_001430.1-cand-5620-5699
  source 1..80: mol_type = other DNA
aaatgagaagttcagagatatcagaggattcctgccaaagtatgaagatgattacaatgatgcaatcctcagcgtaaaca

SEQ ID NO: 25347 - DNA, 80 bp, synthetic construct
  misc_feature 1..80: note = Synthetic: >AdVB7-cand-33130-33209
  source 1..80: mol_type = other DNA
aaattaaatgtcgttccctcaaaaacacactacccacatacataatctcttttggcatgtgcatattaacaatctgtctg

SEQ ID NO: 25348 - DNA, 80 bp, synthetic construct
  misc_feature 1..80: note = Synthetic: >AdVB3-cand-19510-19589
  source 1..80: mol_type = other DNA
aactgtcatatcagcttttgcttgattctctgggagacagaaccagatacttcagcatgtggaatcaggctgtggacagt

SEQ ID NO: 25349 - DNA, 80 bp, synthetic construct
  misc_feature 1..80: note = Synthetic: >AdVB3-cand-22140-22219
  source 1..80: mol_type = other DNA
ggaaaggtgtcttgccacaactttctggtcagttgcatagcgccaagcaggtcaggagcagagatcttgaaatcacagtt

SEQ ID NO: 25350 - DNA, 80 bp, synthetic construct
  misc_feature 1..80: note = Synthetic: >NC_003310.1-cand-136500-136579
  source 1..80: mol_type = other DNA
tgtaagtctgtcgattctttcggttttataaacagaatccctttccaaagtcctaatcttactgagtttatcactaagtt

SEQ ID NO: 25351 - DNA, 80 bp, synthetic construct
  misc_feature 1..80: note = Synthetic: >NC_001611.1-cand-159810-159889
  source 1..80: mol_type = other DNA
aacttcacattcggagattctgaagaaccagtaacatataatattgatgactacgattgtacgtctacaggttgcagcat

SEQ ID NO: 25352 - DNA, 80 bp, synthetic construct
  misc_feature 1..80: note = Synthetic: >NC_001611.1-cand-162840-162919
  source 1..80: mol_type = other DNA
aacttctgtactagtggcagactgtgcatcaacagttacaaatgagttctgtgcagatcatccgttcatctatgtgatta

SEQ ID NO: 25353 - DNA, 80 bp, synthetic construct
  misc_feature 1..80: note = Synthetic: >NC_001611.1-cand-25440-25519
  source 1..80: mol_type = other DNA
tgactccatcttttagatgcgatactcctttatatgagccagaatcttcgtacctcaaactcgatatattcaaacaagtt

SEQ ID NO: 25354 - DNA, 80 bp, synthetic construct
  misc_feature 1..80: note = Synthetic: >NC_003310.1-cand-57360-57439
  source 1..80: mol_type = other DNA
aactttactcttccagcatccgtttctaaaaaaatattaacgagttccatttatatcatccaatattattgaaatgacgt

SEQ ID NO: 25355 - DNA, 80 bp, synthetic construct
  misc_feature 1..80: note = Synthetic: >NC_003310.1-cand-140890-140969
  source 1..80: mol_type = other DNA
ttaactcggtcggtttatctaccatagttacagaatttgtatccttatctataatataataatcaaaatcgtataaagtt

SEQ ID NO: 25356 - DNA, 80 bp, synthetic construct
  misc_feature 1..80: note = Synthetic: >EVD70-cand-5060-5139
  source 1..80: mol_type = other DNA
aactttcaaggaaattaaaatatctgtgacacctgagaccccagcacccgatgcaataaacgacctattgagatccatag

SEQ ID NO: 25357 - DNA, 80 bp, synthetic construct
  misc_feature 1..80: note = Synthetic: >NC_001611.1-cand-66540-66619
  source 1..80: mol_type = other DNA
attatgaagactcctggtaatactgatgctttttccagggaatattctatgactgaatgttctcaagaactacaaaagtt

SEQ ID NO: 25358 - DNA, 80 bp, synthetic construct
  misc_feature 1..80: note = Synthetic: >NC_003310.1-cand-110460-110539
  source 1..80: mol_type = other DNA
tcatctacaaaaacatactcgtgtccataatcctctaccatagtaacacgttttttagatctcatatgtgctaaaaagtt

SEQ ID NO: 25359 - DNA, 80 bp, synthetic construct
  misc_feature 1..80: note = Synthetic: >NC_001430.1-cand-1960-2039
  source 1..80: mol_type = other DNA
aagaaacacactgctaggcaacatcagcaggtattacacccactggtctggttcactggagatgactttcatgttttgtg

SEQ ID NO: 25360 - DNA, 80 bp, synthetic construct
  misc_feature 1..80: note = Synthetic: >NC_001611.1-cand-74140-74219
  source 1..80: mol_type = other DNA
aagaaactgacttgataaaaatggctgtaatctctaaggttacgtatagtctatatgatcaaaaagagattaatgctaca

SEQ ID NO: 25361 - DNA, 80 bp, synthetic construct
  misc_feature 1..80: note = Synthetic: >NC_003310.1-cand-133570-133649
  source 1..80: mol_type = other DNA
aagaaagagataggtctaacgcctattcgaaattagaaagtaatggattagttagactgaatgctttcttggaatccgga

SEQ ID NO: 25362 - DNA, 80 bp, synthetic construct
  misc_feature 1..80: note = Synthetic: >NC_001611.1-cand-123930-124009
  source 1..80: mol_type = other DNA
aagaaagcaatacgatttatgtgactttcctgccgaatttagagatggatatgtagcatcttcactagtgggaatcaatc

SEQ ID NO: 25363 - DNA, 80 bp, synthetic construct
  misc_feature 1..80: note = Synthetic: >NC_003310.1-cand-47600-47679
  source 1..80: mol_type = other DNA
acaatgagagacttgtctcctgttatcaatatactattcttgtgataatttatgtgtgaggcaaatttgtccacgttctt

SEQ ID NO: 25364 - DNA, 80 bp, synthetic construct
  misc_feature 1..80: note = Synthetic: >NC_003310.1-cand-43670-43749
  source 1..80: mol_type = other DNA
cgtagaaatactaatttgttttactctataaaatactattgcatctatttcatcgttttgtataacgtctttccaagtgt

SEQ ID NO: 25365 - DNA, 80 bp, synthetic construct
  misc_feature 1..80: note = Synthetic: >NC_001611.1-cand-19230-19309
  source 1..80: mol_type = other DNA
acactttattccctaattgagacgaccaatagtctaattttgcagccatgatagaatctgtgaaatgggtcatattatca

SEQ ID NO: 25366 - DNA, 80 bp, synthetic construct
  misc_feature 1..80: note = Synthetic: >EVD70-cand-690-769
  source 1..80: mol_type = other DNA
acactttctcttgaataattgagacaactcataatgggagcacaagtttctagacaacaaactggcacgcatgagaatgc

SEQ ID NO: 25367 - DNA, 80 bp, synthetic construct
  misc_feature 1..80: note = Synthetic: >EVD70-cand-4500-4579
  source 1..80: mol_type = other DNA
acagaaaaactgggtggggattcttactcactcccacctgatccaaaatattttgatgggtataaacaacagacagtggt

SEQ ID NO: 25368 - DNA, 80 bp, synthetic construct
  misc_feature 1..80: note = Synthetic: >NC_003310.1-cand-85880-85959
  source 1..80: mol_type = other DNA
acagaaacttgcaaagaagacattggcgccgtttaatttcctagtattcgtcaaacccaccactgaggataatgctatta

SEQ ID NO: 25369 - DNA, 80 bp, synthetic construct
  misc_feature 1..80: note = Synthetic: >NC_003310.1-cand-122450-122529
  source 1..80: mol_type = other DNA
acagaagttaataagcgtatagccatcgttaattatgcaaatttgaacgggtcccccttatcagtcgaggacttggatgt

SEQ ID NO: 25370 - DNA, 80 bp, synthetic construct
  misc_feature 1..80: note = Synthetic: >NC_007376.1-cand-570-649
  source 1..80: mol_type = other DNA
acagaggcctctgggattcctttcgtcagtccgaaagaggcgaagaaacaattgaagaaagatttgaaatcacagggaca

SEQ ID NO: 25371 - DNA, 80 bp, synthetic construct
  misc_feature 1..80: note = Synthetic: >NC_001611.1-cand-87360-87439
  source 1..80: mol_type = other DNA
atccccgttttaaatgcattaaataattccaatagagcgatttttgttcctataggaccttccaactgtggatactctgt

SEQ ID NO: 25372 - DNA, 80 bp, synthetic construct
  misc_feature 1..80: note = Synthetic: >NC_003310.1-cand-31250-31329
  source 1..80: mol_type = other DNA
attatacataaacatcgacaacatactattgtctattatctaagtcctgttgatccaaacccttgatctcctctatctgt

SEQ ID NO: 25373 - DNA, 80 bp, synthetic construct
  misc_feature 1..80: note = Synthetic: >NC_001611.1-cand-73740-73819
  source 1..80: mol_type = other DNA
ttcagatagcggacagctatattctctgtagctactcgtttggaatcacaaacattatttacatctaatttactatctgt

SEQ ID NO: 25374 - DNA, 80 bp, synthetic construct
  misc_feature 1..80: note = Synthetic: >NC_001611.1-cand-6040-6119
  source 1..80: mol_type = other DNA
ccatactcgtcatcctcataaagaacattgcagccattttctatgaacaaatcaataatttcaggaacaggatcatctgt

SEQ ID NO: 25375 - DNA, 80 bp, synthetic construct
  misc_feature 1..80: note = Synthetic: >NC_001430.1-cand-3770-3849
  source 1..80: mol_type = other DNA
acagattacatccagaaccttggtagcgcctttgggactggatttactgagaccatcagtgaaaaggctaaagagattca

SEQ ID NO: 25376 - DNA, 80 bp, synthetic construct
  misc_feature 1..80: note = Synthetic: >NC_001430.1-cand-1800-1879
  source 1..80: mol_type = other DNA
acagcatgttagaaatagtgcaaattgaatctatgatggaaattaacaatgtgaatgacgctagtggagtggagaggctc

SEQ ID NO: 25377 - DNA, 80 bp, synthetic construct
  misc_feature 1..80: note = Synthetic: >NC_001611.1-cand-70140-70219
  source 1..80: mol_type = other DNA
acaggggcaatgtttaccacaatgtataatataagaaacaatttgggtttaggtgatgataaactaactattgaagccat

SEQ ID NO: 25378 - DNA, 80 bp, synthetic construct
  misc_feature 1..80: note = Synthetic: >NC_001611.1-cand-50270-50349
  source 1..80: mol_type = other DNA
acaggtcgctatatccaccaatagaagttttcccaaaaaatattctaggaacagttctaccaccagtaatttgttcaaaa

SEQ ID NO: 25379 - DNA, 80 bp, synthetic construct
  misc_feature 1..80: note = Synthetic: >EVA89-cand-4370-4449
  source 1..80: mol_type = other DNA
gaggcgaagagggtctttgcattggaaaagcgcatctctaattacatgcagttcaagagcaaacaccgtattgaacctgt

SEQ ID NO: 25380 - DNA, 80 bp, synthetic construct
  misc_feature 1..80: note = Synthetic: >AdVB3-cand-5770-5849
  source 1..80: mol_type = other DNA
ctctacggtatgtaaacacatgtccccctcctccacatccaagaatgtgattggcttgtaagtgtaggccacgtgaccag

SEQ ID NO: 25381 - DNA, 80 bp, synthetic construct
  misc_feature 1..80: note = Synthetic: >AdVB3-cand-5940-6019
  source 1..80: mol_type = other DNA
gtaggtattccctctcaaaggcgggcataacctctgcacttaggttgtcagtttctaggaacgaggaggatttgatattg

SEQ ID NO: 25382 - DNA, 80 bp, synthetic construct
  misc_feature 1..80: note = Synthetic: >AdVB3-cand-6250-6329
  source 1..80: mol_type = other DNA
ttcatccggaactattctgactcgccatcccctattgtgcagggttattacatccacactggtggccacctcgcctcgga

SEQ ID NO: 25383 - DNA, 80 bp, synthetic construct
  misc_feature 1..80: note = Synthetic: >AdVB3-cand-6410-6489
  source 1..80: mol_type = other DNA
gggtccgcatctatggtaaatattcccggtagcaaatctttgtcaaaatagctaatggtggcgggatcatccaaggtcat

SEQ ID NO: 25384 - DNA, 80 bp, synthetic construct
  misc_feature 1..80: note = Synthetic: >AdVB3-cand-6440-6519
  source 1..80: mol_type = other DNA
agcaaatctttgtcaaaatagctaatggtggcgggatcatccaaggtcatctgccattctcgaactgccagcgcgcgctc

SEQ ID NO: 25385 - DNA, 80 bp, synthetic construct
  misc_feature 1..80: note = Synthetic: >AdVB3-cand-6560-6639
  source 1..80: mol_type = other DNA
agcgcggaggcatacatgccacagatatcgtagacatagagtggctcttcgaggatgccgatgtaagtgggataacagcg

SEQ ID NO: 25386 - DNA, 80 bp, synthetic construct
  misc_feature 1..80: note = Synthetic: >AdVB3-cand-6600-6679
  source 1..80: mol_type = other DNA
gtggctcttcgaggatgccgatgtaagtgggataacagcgcccccctctgatgcttgctcgcacatagtcatagagttca

SEQ ID NO: 25387 - DNA, 80 bp, synthetic construct
  misc_feature 1..80: note = Synthetic: >AdVB3-cand-6870-6949
  source 1..80: mol_type = other DNA
gctcggcggtgacaagtacatccagggcacagtagtcgagagtttcctgtatgatgtcataacgcggttggcttttcttt

SEQ ID NO: 25388 - DNA, 80 bp, synthetic construct
  misc_feature 1..80: note = Synthetic: >AdVB3-cand-6920-6999
  source 1..80: mol_type = other DNA
atgatgtcataacgcggttggcttttcttttcccacagctcgcggttaagaaggtattcttcgtgatccttccagtactc

SEQ ID NO: 25389 - DNA, 80 bp, synthetic construct
  misc_feature 1..80: note = Synthetic: >AdVB3-cand-7160-7239
  source 1..80: mol_type = other DNA
actttaaggaattgatacttgaagtcgatgtcatcacaggccccctgttcccagagttggaagttcacccgcttcttgta

SEQ ID NO: 25390 - DNA, 80 bp, synthetic construct
  misc_feature 1..80: note = Synthetic: >AdVB3-cand-7430-7509
  source 1..80: mol_type = other DNA
cccctgacatgaggcagcttcttgagttcttcaaaagtgagatctgtagggtcagtgagagcatagtgttcgagggccca

SEQ ID NO: 25391 - DNA, 80 bp, synthetic construct
  misc_feature 1..80: note = Synthetic: >AdVB3-cand-7500-7579
  source 1..80: mol_type = other DNA
cgagggcccattcgtgcaggtgagggttcgctttaagaaaggaggaccagaggtccactgctagtgctgtttgtaactgg

SEQ ID NO: 25392 - DNA, 80 bp, synthetic construct
  misc_feature 1..80: note = Synthetic: >AdVB3-cand-7540-7619
  source 1..80: mol_type = other DNA
ggaggaccagaggtccactgctagtgctgtttgtaactggtcccggtactgacgaaaatgctgccccactgccatctttt

SEQ ID NO: 25393 - DNA, 80 bp, synthetic construct
  misc_feature 1..80: note = Synthetic: >AdVB3-cand-7750-7829
  source 1..80: mol_type = other DNA
tagctgcttgccaaaggaccccatccaggtgtaggtttccacatcgtaggtgaggaagagcctttctgtgcgaggatgag

SEQ ID NO: 25394 - DNA, 80 bp, synthetic construct
  misc_feature 1..80: note = Synthetic: >AdVB3-cand-8160-8239
  source 1..80: mol_type = other DNA
ggagctcgaggacgagagcgcgcaggccggagttgtccagggtcctgagacgctgcggagtcaggttagtaggcagtgtc

SEQ ID NO: 25395 - DNA, 80 bp, synthetic construct
  misc_feature 1..80: note = Synthetic: >AdVB3-cand-8860-8939
  source 1..80: mol_type = other DNA
acagcccccacgggatctctcgcgcgcatgaccacctgggcgaggttgagctccacgtggcgggtgaagaccgcatagtt

SEQ ID NO: 25396 - DNA, 80 bp, synthetic construct
  misc_feature 1..80: note = Synthetic: >AdVB7-cand-10810-10889
  source 1..80: mol_type = other DNA
ttttttgttttttgttgcccagatgcatcccgtgctgcgacagatgcgcccccagcaacagcccccttctcagcagcagc

SEQ ID NO: 25397 - DNA, 80 bp, synthetic construct
  misc_feature 1..80: note = Synthetic: >AdVB7-cand-10890-10969
  source 1..80: mol_type = other DNA
tacaacgacagccacaaaaggctcttcctgctcctgtaactactgcggctgcagccgtcagcggcgcgggacagcccgcc

SEQ ID NO: 25398 - DNA, 80 bp, synthetic construct
  misc_feature 1..80: note = Synthetic: >AdVB7-cand-10970-11049
  source 1..80: mol_type = other DNA
tatgatctggagttggaagagggcgagggactggcgcgcctgggcgcaccatcgcccgagcggcacccgcccagccgact

SEQ ID NO: 25399 - DNA, 80 bp, synthetic construct
  misc_feature 1..80: note = Synthetic: >AdVB7-cand-11050-11129
  source 1..80: mol_type = other DNA
tctccagtttacgggagcgagccctcttttttttttttgttttttgttgcccagatgcatcccgtgctgcgacagatgcg

SEQ ID NO: 25400 - DNA, 80 bp, synthetic construct
  misc_feature 1..80: note = Synthetic: >AdVB7-cand-11130-11209
  source 1..80: mol_type = other DNA
cccccagcaacagcccccttctcagcagcagctacaacaacagccacaaaaggctcttcctgctcctgtaactactgcgg

SEQ ID NO: 25401 - DNA, 80 bp, synthetic construct
  misc_feature 1..80: note = Synthetic: >AdVB7-cand-11210-11289
  source 1..80: mol_type = other DNA
ctgcagccgtcagcggcgcgggacagcccgcctatgatctggaattggaagagggcgagggactggcgcgcctgggcgca

SEQ ID NO: 25402 - DNA, 80 bp, synthetic construct
  misc_feature 1..80: note = Synthetic: >AdVB7-cand-12020-12099
  source 1..80: mol_type = other DNA
tgtatcgcaatgacaggatgcaccgtgcggtgagcgccagcaggaggcgcgagctgagcgacagagaacttatgcacagc

SEQ ID NO: 25403 - DNA, 80 bp, synthetic construct
  misc_feature 1..80: note = Synthetic: >AdVB7-cand-12040-12119
  source 1..80: mol_type = other DNA
caccgtgcggtgagcgccagcaggaggcgcgagctgagcgacagagaacttatgcacagcttgcaaagagctctaacggg

SEQ ID NO: 25404 - DNA, 80 bp, synthetic construct
  misc_feature 1..80: note = Synthetic: >AdVB7-cand-12850-12929
  source 1..80: mol_type = other DNA
gggccagattacttcttccagaccagcagacagggcttgcagacagtgaacctgactcaggctttcaagaacctgaaggg

SEQ ID NO: 25405 - DNA, 80 bp, synthetic construct
  misc_feature 1..80: note = Synthetic: >AdVB7-cand-13050-13129
  source 1..80: mol_type = other DNA
caactcgtacttgggctacctgcttaacctgtatcgcgaggccatagggcagagccaggtggacgagcagacctatcaag

SEQ ID NO: 25406 - DNA, 80 bp, synthetic construct
  misc_feature 1..80: note = Synthetic: >AdVB7-cand-13310-13389
  source 1..80: mol_type = other DNA
gggcgacacctaccgccgcgctggacatgacagctcgaaacatggagcccagcatgtatgctagtaacaggcctttcatt

SEQ ID NO: 25407 - DNA, 80 bp, synthetic construct
  misc_feature 1..80: note = Synthetic: >AdVB7-cand-13520-13599
  source 1..80: mol_type = other DNA
atgacgggttcctgtgggacgatgtggacagcagcatattctccccgcctcccggttatacagtttggaagaaggaaggg

SEQ ID NO: 25408 - DNA, 80 bp, synthetic construct
  misc_feature 1..80: note = Synthetic: >AdVB7-cand-13730-13809
  source 1..80: mol_type = other DNA
gaataacccgcccgcgcttgatgggcgaggatgagtacttgaatgactctttgttgaggccagagagggaaaagaatttc

SEQ ID NO: 25409 - DNA, 80 bp, synthetic construct
  misc_feature 1..80: note = Synthetic: >AdVB7-cand-13810-13889
  source 1..80: mol_type = other DNA
cccaacaatggaatagagagcctggtggataagatgagtagatggaagacctatgcgcaggatcacagagacgagcccaa

SEQ ID NO: 25410 - DNA, 80 bp, synthetic construct
  misc_feature 1..80: note = Synthetic: >AdVB7-cand-14020-14099
  source 1..80: mol_type = other DNA
aacccgttcgctcatctgcgtcccagattcgggcgcatgttgtaaaagtgaaagtaaaataaaaatgcaactcaccaagg

SEQ ID NO: 25411 - DNA, 80 bp, synthetic construct
  misc_feature 1..80: note = Synthetic: >AdVB7-cand-14160-14239
  source 1..80: mol_type = other DNA
acgagccgtgctaggcggagcggtggtgtatccggagggtcctcctccttcttacgagagcgtgatgcagcaacaggcgg

SEQ ID NO: 25412 - DNA, 80 bp, synthetic construct
  misc_feature 1..80: note = Synthetic: >AdVE4-cand-31930-32009
  source 1..80: mol_type = other DNA
tgggggtgttgtcccttaggctggccgaccctgtcaccaccaagaatggggaaatcaccctcaatctgggggagggggtg

SEQ ID NO: 25413 - DNA, 80 bp, synthetic construct
  misc_feature 1..80: note = Synthetic: >AdVE4-cand-32010-32089
  source 1..80: mol_type = other DNA
gaccttgacgactcgggaaaactcattgcaaacacagtcaacaaggccattgcccctcttagtttttccaacaacaccat

SEQ ID NO: 25414 - DNA, 80 bp, synthetic construct
  misc_feature 1..80: note = Synthetic: >AdVE4-cand-32090-32169
  source 1..80: mol_type = other DNA
ttcccttaacatggatacccctttatacaccaaagatggaaaactatccttacaagtttctccaccattaagtatattaa

SEQ ID NO: 25415 - DNA, 80 bp, synthetic construct
  misc_feature 1..80: note = Synthetic: >AdVE4-cand-32170-32249
  source 1..80: mol_type = other DNA
gatcaacaattctaaatacattagctctagcttttggctcaggtttaggactgcgtggcagcgctctggcagtacagtta

SEQ ID NO: 25416 - DNA, 80 bp, synthetic construct
  misc_feature 1..80: note = Synthetic: >AdVE4-cand-32220-32299
  source 1..80: mol_type = other DNA
ctgcgtggcagcgctctggcagtacagttagcctctccacttacatttgatgataaagggaatataaagattaccctaaa

SEQ ID NO: 25417 - DNA, 80 bp, synthetic construct
  misc_feature 1..80: note = Synthetic: >AdVE4-cand-32320-32399
  source 1..80: mol_type = other DNA
caggaaatgcaattgaaagcaacattagttgggctaaaggtataaaatttgaagatggtgccatagctacaaacattggt

SEQ ID NO: 25418 - DNA, 80 bp, synthetic construct
  misc_feature 1..80: note = Synthetic: >AdVE4-cand-32420-32499
  source 1..80: mol_type = other DNA
cagtagtacagaaacaggagttaataatgcttatccaatccaagttaaacttggatctggtctcagctttgacagcacag

SEQ ID NO: 25419 - DNA, 80 bp, synthetic construct
  misc_feature 1..80: note = Synthetic: >AdVE4-cand-32500-32579
  source 1..80: mol_type = other DNA
gagctataatggctggcaataaagactatgataaattaactttgtggacaacgcctgacccatcaccaaactgtcaaata

SEQ ID NO: 25420 - DNA, 80 bp, synthetic construct
  misc_feature 1..80: note = Synthetic: >AdVE4-cand-32580-32659
  source 1..80: mol_type = other DNA
cttgcagaaaatgatgcaaaactaacactttgcttaactaagtgtgacagtcaaatactggccactgtatcagttttggt

SEQ ID NO: 25421 - DNA, 80 bp, synthetic construct
  misc_feature 1..80: note = Synthetic: >AdVE4-cand-32660-32739
  source 1..80: mol_type = other DNA
tgttagaagtggaaacttaaacccaattactggcacagtaagcagtgctcaagtttttctacgttttgatgcaaacggtg

SEQ ID NO: 25422 - DNA, 80 bp, synthetic construct
  misc_feature 1..80: note = Synthetic: >AdVE4-cand-32780-32859
  source 1..80: mol_type = other DNA
ctacaggcaaggagatagcatagatggcactccatacaccaatgctgttggtttcatgccaaattcaacagcttatccaa

SEQ ID NO: 25423 - DNA, 80 bp, synthetic construct
  misc_feature 1..80: note = Synthetic: >AdVE4-cand-32820-32899
  source 1..80: mol_type = other DNA
aatgctgttggtttcatgccaaattcaacagcttatccaaagacccaaagttctactactaaaaataatatagtgggaca

SEQ ID NO: 25424 - DNA, 80 bp, synthetic construct
  misc_feature 1..80: note = Synthetic: >AdVE4-cand-32900-32979
  source 1..80: mol_type = other DNA
agtatacatgaatggagatgtttcaaaacccatgcttcttactataactcttaatggtactgatgacaccaccagtgcat

SEQ ID NO: 25425 - DNA, 80 bp, synthetic construct
  misc_feature 1..80: note = Synthetic: >AdVE4-cand-32980-33059
  source 1..80: mol_type = other DNA
actcaatttcattttcatacacctggactaacggaagctatatcggagcaacatttggagctaactcatacaccttctcc

SEQ ID NO: 25426 - DNA, 80 bp, synthetic construct
  misc_feature 1..80: note = Synthetic: >AdVE4-cand-33060-33139
  source 1..80: mol_type = other DNA
tacatagcccaagaataatcccacactgcatgccaacccacctttttcctttatctataaatggaaactgaaacaaaaat

SEQ ID NO: 25427 - DNA, 80 bp, synthetic construct
  misc_feature 1..80: note = Synthetic: >AdVE4-cand-33140-33219
  source 1..80: mol_type = other DNA
aaagtttaagtgttttattgattcaacatttttttacaggattcgagtagttattttccctccaccctcccaactcatgg

SEQ ID NO: 25428 - DNA, 80 bp, synthetic construct
  misc_feature 1..80: note = Synthetic: >EF397003.1-cand-4290-4369
  source 1..80: mol_type = other DNA
attagatggtgagtgggtcacattcagggaggttctcgctgctgcagatagctttgcaacatcttatcaaccatcagaaa

SEQ ID NO: 25429 - DNA, 80 bp, synthetic construct
  misc_feature 1..80: note = Synthetic: >EF397003.1-cand-4370-4449
  source 1..80: mol_type = other DNA
aggacttggaccttttccagactcttgtgagctgtacattttctaaagaatatgcatggaaagattttctgaatgaagta

SEQ ID NO: 25430 - DNA, 80 bp, synthetic construct
  misc_feature 1..80: note = Synthetic: >EF397003.1-cand-4450-4529
  source 1..80: mol_type = other DNA
agatgtgaagttattactgctagacatattcatagatctaaagttgctaggacattcacagttagagaaaaggaccaggc

SEQ ID NO: 25431 - DNA, 80 bp, synthetic construct
  misc_feature 1..80: note = Synthetic: >EF397003.1-cand-4540-4619
  source 1..80: mol_type = other DNA
cctataacttcagttattggatataagtatgcatcaacagtagatgagataagtgatgtacttgatagttctcttttccc

SEQ ID NO: 25432 - DNA, 80 bp, synthetic construct
  misc_feature 1..80: note = Synthetic: >EF397003.1-cand-4620-4699
  source 1..80: mol_type = other DNA
tgattctctatcagctgacttgcagataatgaaagaaggtgtttatagagagttagggctagatataggattaccagaag

SEQ ID NO: 25433 - DNA, 80 bp, synthetic construct
  misc_feature 1..80: note = Synthetic: >EF397003.1-cand-4710-4789
  source 1..80: mol_type = other DNA
aatagcacccttactctataaatcaggacggtctagaattgttatagtagagggtaacatagaaggaactgctgagtcaa

SEQ ID NO: 25434 - DNA, 80 bp, synthetic construct
  misc_feature 1..80: note = Synthetic: >EF397003.1-cand-4790-4869
  source 1..80: mol_type = other DNA
tttgtagttattggcttaagagtatgtccttaattaagaccattaaggtcagacccaagaaggaagtattgaaggcagta

SEQ ID NO: 25435 - DNA, 80 bp, synthetic construct
  misc_feature 1..80: note = Synthetic: >EF397003.1-cand-4880-4959
  source 1..80: mol_type = other DNA
atcagaaagacaatttaggccttcaagatgatttagctgctacaagattatgtatagaagtatggcggtggtgtaaagca

SEQ ID NO: 25436 - DNA, 80 bp, synthetic construct
  misc_feature 1..80: note = Synthetic: >EF397003.1-cand-4960-5039
  source 1..80: mol_type = other DNA
aatgatcaggatgtaagagaatggtttaatgcattatattttgaaagacagacattgatggattgggttgagagatttag

SEQ ID NO: 25437 - DNA, 80 bp, synthetic construct
  misc_feature 1..80: note = Synthetic: >EF397003.1-cand-5050-5129
  source 1..80: mol_type = other DNA
gttgttcctgttgatcctgagattcaatgtgttggtttactgttatatgatcttctgggttataaaagtattttacagat

SEQ ID NO: 25438 - DNA, 80 bp, synthetic construct
  misc_feature 1..80: note = Synthetic: >EF397003.1-cand-5120-5199
  source 1..80: mol_type = other DNA
ttttacagatgcaggctaatagacgagcatattcaggaaaacaatatgatgcttattgtgttcagacttacaatgaggaa

SEQ ID NO: 25439 - DNA, 80 bp, synthetic construct
  misc_feature 1..80: note = Synthetic: >EF397003.1-cand-5200-5279
  source 1..80: mol_type = other DNA
acaaaactgtatgagggtgatttgcgtgtgacttttaactttggccttgattgtgcaaggttagaaatattttggaacaa

SEQ ID NO: 25440 - DNA, 80 bp, synthetic construct
  misc_feature 1..80: note = Synthetic: >EF397003.1-cand-5280-5359
  source 1..80: mol_type = other DNA
aagggaatatatattagaaacatctataacacagcgacatgtgttgaggctaatgatggaggaggtaacaaaggagctgc

SEQ ID NO: 25441 - DNA, 80 bp, synthetic construct
  misc_feature 1..80: note = Synthetic: >EF397003.1-cand-5360-5439
  source 1..80: mol_type = other DNA
tgagatgtggtatgaggtttaagacagagcaagttaatcaaaccaggagtttagtattgtttaaaacagaagccggattc

SEQ ID NO: 25442 - DNA, 80 bp, synthetic construct
  misc_feature 1..80: note = Synthetic: >EF397003.1-cand-5450-5529
  source 1..80: mol_type = other DNA
aaccaaatattccatgtattgtgtataaacattgtgtattacggactggtctaagaaccaaacagcctataaacaaagag

SEQ ID NO: 25443 - DNA, 80 bp, synthetic construct
  misc_feature 1..80: note = Synthetic: >EF397003.1-cand-5520-5599
  source 1..80: mol_type = other DNA
aaacaaagagttcatgataacaatccaatctgatgggttccgtgcgattgcacagatggatcaagaaagcccacggtttt

SEQ ID NO: 25444 - DNA, 80 bp, synthetic construct
  misc_feature 1..80: note = Synthetic: >EVA91-cand-2950-3029
  source 1..80: mol_type = other DNA
ttgaatggcaaaccgcctctaacccatcagtatttgtcaaaatgtcagatccccctgcacaagtgtctgtgcccttcatg

SEQ ID NO: 25445 - DNA, 80 bp, synthetic construct
  misc_feature 1..80: note = Synthetic: >EVA91-cand-3030-3109
  source 1..80: mol_type = other DNA
tcaccagctagtgcttaccaatggttttatgacggttatccatcttttggaccacatcccacatctaaagacttccagta

SEQ ID NO: 25446 - DNA, 80 bp, synthetic construct
  misc_feature 1..80: note = Synthetic: >EVA91-cand-3110-3189
  source 1..80: mol_type = other DNA
tggcatttgcccaaacaacttaatgggcactttctgtgtcagggttgtaggctccggtcagatcacagaccaagtggatg

SEQ ID NO: 25447 - DNA, 80 bp, synthetic construct
  misc_feature 1..80: note = Synthetic: >EVA91-cand-3190-3269
  source 1..80: mol_type = other DNA
tgcgcatctatatgcggatcaagcacgtcaaggcatggttaccccgtccactcagatcccaaccctacatgctcaaaaat

SEQ ID NO: 25448 - DNA, 80 bp, synthetic construct
  misc_feature 1..80: note = Synthetic: >EVA91-cand-3250-3329
  source 1..80: mol_type = other DNA
aaccctacatgctcaaaaattacccaaactttgatggaaccaaattgaagtgcacctccaaatctagaaccagtatcaaa

SEQ ID NO: 25449 - DNA, 80 bp, synthetic construct
  misc_feature 1..80: note = Synthetic: >EVA91-cand-3350-3429
  source 1..80: mol_type = other DNA
acaatcaggtgcggtgtacgtgggtaattacagaattgtcaacagacaccttgctacccagaaagattgggacaacctgg

SEQ ID NO: 25450 - DNA, 80 bp, synthetic construct
  misc_feature 1..80: note = Synthetic: >EVA91-cand-3430-3509
  source 1..80: mol_type = other DNA
tgtgggagtcctatgagagagatcttctagtttccactacgacagcccagggatgtgacataattgctagatgcaagtgc

SEQ ID NO: 25451 - DNA, 80 bp, synthetic construct
  misc_feature 1..80: note = Synthetic: >EVA91-cand-3510-3589
  source 1..80: mol_type = other DNA
agacatggagtgtattactgtaactcaatgaggaagcattacccagtgagctttggtgagccagcttttatttatgtgga

SEQ ID NO: 25452 - DNA, 80 bp, synthetic construct
  misc_feature 1..80: note = Synthetic: >EVA91-cand-3590-3669
  source 1..80: mol_type = other DNA
tgaaaatgaattttaccctgctaggtatcaatctcatgtaatatcttcagcaggtattgcagttccaggcgactgcggtg

SEQ ID NO: 25453 - DNA, 80 bp, synthetic construct
  misc_feature 1..80: note = Synthetic: >EVA91-cand-3680-3759
  source 1..80: mol_type = other DNA
atgcgagcatggtgtaattggtctggtcaccatgggcggcccgaacatcgtaggcttcgccgatgttagagatcttctct

SEQ ID NO: 25454 - DNA, 80 bp, synthetic construct
  misc_feature 1..80: note = Synthetic: >EVA91-cand-3760-3839
  source 1..80: mol_type = other DNA
ggttagatgatgaggttatggagcaaggtgtgactgattacattaagggccttggtgatgcctttggcacaggttttact

SEQ ID NO: 25455 - DNA, 80 bp, synthetic construct
  misc_feature 1..80: note = Synthetic: >EVA91-cand-3840-3919
  source 1..80: mol_type = other DNA
gattccatttctagggaaatccagcagcttaaaaattacctcttaggttcagaaaatgtggtagagaaaattcttaaagc

SEQ ID NO: 25456 - DNA, 80 bp, synthetic construct
  misc_feature 1..80: note = Synthetic: >EVA91-cand-3920-3999
  source 1..80: mol_type = other DNA
actgatcaaagtagtttcagcactagtgatagttgttaggagtgattatgacctagtcaccttgactgcaactcttgcct

SEQ ID NO: 25457 - DNA, 80 bp, synthetic construct
  misc_feature 1..80: note = Synthetic: >EVA91-cand-4000-4079
  source 1..80: mol_type = other DNA
taattggttgccacgggagcccttgggcttggctcaaatccaaagtctccagcttacttgacattcccattgctcaaaag

SEQ ID NO: 25458 - DNA, 80 bp, synthetic construct
  misc_feature 1..80: note = Synthetic: >EVA91-cand-4080-4159
  source 1..80: mol_type = other DNA
caaagtgactcatggctcaagaaattcacagaaatggctaacgctgctagaggccttgaatggattgccaataaaatcag

SEQ ID NO: 25459 - DNA, 80 bp, synthetic construct
  misc_feature 1..80: note = Synthetic: >EVA91-cand-4160-4239
  source 1..80: mol_type = other DNA
taaattcatagattgggtgagagaaaggattgttccagcagctaaagagaaggtggaatttctctctaacctcaagcagc

SEQ ID NO: 25460 - DNA, 80 bp, synthetic construct
  misc_feature 1..80: note = Synthetic: >EVB73-cand-5200-5279
  source 1..80: mol_type = other DNA
tcgaaaagcacgtcagccgagcctttatatgtctccaagcactaacaacctttgtttctgtggcaggaatcatctacatc

SEQ ID NO: 25461 - DNA, 80 bp, synthetic construct
  misc_feature 1..80: note = Synthetic: >EVB73-cand-5280-5359
  source 1..80: mol_type = other DNA
atctacaagttgtttgcagggttccagggagcctacacaggaatgcccaaccaaaaaccaaaagtacccacactaaggca

SEQ ID NO: 25462 - DNA, 80 bp, synthetic construct
  misc_feature 1..80: note = Synthetic: >EVB73-cand-5360-5439
  source 1..80: mol_type = other DNA
agcaaaagtgcaaggaccagcatttgagtttgctgtggccatgatgaagagaaactccagcacggtgaaaacagaatacg

SEQ ID NO: 25463 - DNA, 80 bp, synthetic construct
  misc_feature 1..80: note = Synthetic: >EVB73-cand-5440-5519
  source 1..80: mol_type = other DNA
gtgagttcactatgctgggcatttatgacagatgggccgtcctgccacgtcacgcaaaacctggaccaacaatcctcatg

SEQ ID NO: 25464 - DNA, 80 bp, synthetic construct
  misc_feature 1..80: note = Synthetic: >EVB73-cand-5520-5599
  source 1..80: mol_type = other DNA
aatgaccaagaggttggcgtgttggatgccaaggagttggtggataaagatggcataaatctagaactgacactactgaa

SEQ ID NO: 25465 - DNA, 80 bp, synthetic construct
  misc_feature 1..80: note = Synthetic: >EVB73-cand-5680-5759
  source 1..80: mol_type = other DNA
caataaacaccagcaaattcccaaacatgtacatcccagtgggacaagttacagattatggcttcttgaatctgggtggt

SEQ ID NO: 25466 - DNA, 80 bp, synthetic construct
  misc_feature 1..80: note = Synthetic: >EVB73-cand-5760-5839
  source 1..80: mol_type = other DNA
acacccaccaagagaatgctcatgtacaacttcccaacgagagcaggccagtgtggcggagtcctcatgtccaccggaaa

SEQ ID NO: 25467 - DNA, 80 bp, synthetic construct
  misc_feature 1..80: note = Synthetic: >EVB73-cand-5840-5919
  source 1..80: mol_type = other DNA
ggttttgggaatccatgttggaggaaatggtcaccagggcttctcagcagccctcctcaagcactacttcaatgatgaac

SEQ ID NO: 25468 - DNA, 80 bp, synthetic construct
  misc_feature 1..80: note = Synthetic: >EVB73-cand-5920-5999
  source 1..80: mol_type = other DNA
aaggagagatagagttcatagagagctcaaaggatgcaggattcccagtcatcaacacaccaagtaaaaccaaattagag

SEQ ID NO: 25469 - DNA, 80 bp, synthetic construct
  misc_feature 1..80: note = Synthetic: >EVB73-cand-6000-6079
  source 1..80: mol_type = other DNA
ccaagtgtcttccatcaagtatttgaagggaataaagagccagcagttctcagaaatggtgatccacgccttaaagtaaa

SEQ ID NO: 25470 - DNA, 80 bp, synthetic construct
  misc_feature 1..80: note = Synthetic: >EVB73-cand-6080-6159
  source 1..80: mol_type = other DNA
cttcgaggaagccatattctcaaaatatattgggaatgttaacacacatgtggatgaatatatgctggaagcagtggacc

SEQ ID NO: 25471 - DNA, 80 bp, synthetic construct
  misc_feature 1..80: note = Synthetic: >EVB73-cand-6160-6239
  source 1..80: mol_type = other DNA
actatgcaggacaattagccacccttgacatcagcactgaaccaatgaagctagaagatgctgtgtacggaactgaagga

SEQ ID NO: 25472 - DNA, 80 bp, synthetic construct
  misc_feature 1..80: note = Synthetic: >EVB73-cand-6240-6319
  source 1..80: mol_type = other DNA
ctggaggctcttgacttaacaacaagtgcaggatacccgtacgttgcgctaggcatcaagaagagagacatactatcgaa

SEQ ID NO: 25473 - DNA, 80 bp, synthetic construct
  misc_feature 1..80: note = Synthetic: >EVB73-cand-6320-6399
  source 1..80: mol_type = other DNA
gaagaccaaggacctaaccaagttaaaggagtgcatggataaatatggtctgaacttaccaatggtgacttatgtgaagg

SEQ ID NO: 25474 - DNA, 80 bp, synthetic construct
  misc_feature 1..80: note = Synthetic: >EVB73-cand-6400-6479
  source 1..80: mol_type = other DNA
atgagctcagattcagcagaaaaggtggccaaaggaaaatctagactcattgaagcatccagtttgaacgactcagtcgc

SEQ ID NO: 25475 - DNA, 80 bp, synthetic construct
  misc_feature 1..80: note = Synthetic: >EVB73-cand-6480-6559
  source 1..80: mol_type = other DNA
aatgagacagacatttggtaacctatacaaaacattccacctaaacccagggattgtgacaggtagtgcagttgggtgtg

SEQ ID NO: 25476 - DNA, 80 bp, synthetic construct
  misc_feature 1..80: note = Synthetic: >EVB80-cand-5540-5619
  source 1..80: mol_type = other DNA
cacgccaaaccaggaccaaccatcctgatgaatgatcaggaagtgagcgtagttgatgccaaagaactggtggacaagga

SEQ ID NO: 25477 - DNA, 80 bp, synthetic construct
  misc_feature 1..80: note = Synthetic: >EVB80-cand-5620-5699
  source 1..80: mol_type = other DNA
tggtaccaacctagaactgacactcctaaaactaaacaggaatgagaagttcagagacattcgaggcttcttagcaagag

SEQ ID NO: 25478 - DNA, 80 bp, synthetic construct
  misc_feature 1..80: note = Synthetic: >EVB80-cand-5700-5779
  source 1..80: mol_type = other DNA
aggaggctgaggtcaacgaagccgtacttgccattaacaccagcaagttcccaaacatgtacatcccagttggtcaagta

SEQ ID NO: 25479 - DNA, 80 bp, synthetic construct
  misc_feature 1..80: note = Synthetic: >EVB80-cand-5780-5859
  source 1..80: mol_type = other DNA
acagactatggcttcctaaacctgggagggacccccaccaaacgcatgctgatgtacaacttccccacacgtgctggaca

SEQ ID NO: 25480 - DNA, 80 bp, synthetic construct
  misc_feature 1..80: note = Synthetic: >EVB80-cand-5860-5939
  source 1..80: mol_type = other DNA
gtgtggtggcgtcttaatgtcaacaggaaaagttctcggaattcatgttggtggtaacggacaccagggcttctcagcgg

SEQ ID NO: 25481 - DNA, 80 bp, synthetic construct
  misc_feature 1..80: note = Synthetic: >EVB80-cand-5940-6019
  source 1..80: mol_type = other DNA
ccctgttacgccactacttcaatgatgagcaaggtgaaattgagttcattgagagctccaaagaagccggttttccagtt

SEQ ID NO: 25482 - DNA, 80 bp, synthetic construct
  misc_feature 1..80: note = Synthetic: >EVB80-cand-5990-6069
  source 1..80: mol_type = other DNA
gagagctccaaagaagccggttttccagttattaacactcctagcaagacaaagcttgaacccagtgtcttccatcaggt

SEQ ID NO: 25483 - DNA, 80 bp, synthetic construct
  misc_feature 1..80: note = Synthetic: >EVB80-cand-6110-6189
  source 1..80: mol_type = other DNA
gaccccaggctgaaagccaactttgaggaagccattttctccaagtatattggaaatgtgaacacacatgtggatgagta

SEQ ID NO: 25484 - DNA, 80 bp, synthetic construct
  misc_feature 1..80: note = Synthetic: >EVB80-cand-6180-6259
  source 1..80: mol_type = other DNA
tggatgagtacatgatggaggccgttgaccactatgccgggcaactagcaaccctagacatcagtacggaacccatgaaa

SEQ ID NO: 25485 - DNA, 80 bp, synthetic construct
  misc_feature 1..80: note = Synthetic: >EVB80-cand-6260-6339
  source 1..80: mol_type = other DNA
ctcgaagatgctgtttacggtactgaaggcctagaagcactggatctgaccactagtgcaggatacccttatgttgctct

SEQ ID NO: 25486 - DNA, 80 bp, synthetic construct
  misc_feature 1..80: note = Synthetic: >EVB80-cand-6340-6419
  source 1..80: mol_type = other DNA
cggcatcaagaagagagacatcctatccaagaagacaaaggacttgacaaagctgaaagagtgcatggacaagtatggat

SEQ ID NO: 25487 - DNA, 80 bp, synthetic construct
  misc_feature 1..80: note = Synthetic: >EVB80-cand-6420-6499
  source 1..80: mol_type = other DNA
taaaccttcctatggtcacctacgtgaaggatgaactgagatcagctgaaaaggtggctaaaggcaaatccagactgatc

SEQ ID NO: 25488 - DNA, 80 bp, synthetic construct
  misc_feature 1..80: note = Synthetic: >EVB80-cand-6500-6579
  source 1..80: mol_type = other DNA
gaggcatcgagcctcaatgactcagtagccatgagacaaacatttgggaacctatacaaaacattccatcttaatccagg

SEQ ID NO: 25489 - DNA, 80 bp, synthetic construct
  misc_feature 1..80: note = Synthetic: >EVB80-cand-6580-6659
  source 1..80: mol_type = other DNA
catagtgacaggcagcgcagttggatgtgaccctgatttattttggagcaaaatcccagttatgctcgatggccatctca

SEQ ID NO: 25490 - DNA, 80 bp, synthetic construct
  misc_feature 1..80: note = Synthetic: >EVB80-cand-6660-6739
  source 1..80: mol_type = other DNA
ttgcctttgattacagcgggtatgacgctagcctgagcccagtgtggtttgcctgtctgaaactgttgttggagaaactg

SEQ ID NO: 25491 - DNA, 80 bp, synthetic construct
  misc_feature 1..80: note = Synthetic: >EVB80-cand-6740-6819
  source 1..80: mol_type = other DNA
gggtacacgcacaaagaaaccaactacatagactacctgtgcaattcccaccatttgtacagagacaaacactactttgt

SEQ ID NO: 25492 - DNA, 80 bp, synthetic construct
  misc_feature 1..80: note = Synthetic: >EVB85-cand-1830-1909
  source 1..80: mol_type = other DNA
tcaacatcccaggtgaggtgcgcaatctcatggaaatcgctgaagtggattccgtggtaccagtgaacaacgtgaacaca

SEQ ID NO: 25493 - DNA, 80 bp, synthetic construct
  misc_feature 1..80: note = Synthetic: >EVB85-cand-1910-1989
  source 1..80: mol_type = other DNA
gtgactacacagatggacatgtaccgaatccctgtctcaaacactgcagatctacaacaacaagtgttcggcattcgctt

SEQ ID NO: 25494 - DNA, 80 bp, synthetic construct
  misc_feature 1..80: note = Synthetic: >EVB85-cand-1990-2069
  source 1..80: mol_type = other DNA
gcaaccagggttagacaatgttttaaagagaactctggtgggtgaaatactgaattactacgcccattggtcagggagtc

SEQ ID NO: 25495 - DNA, 80 bp, synthetic construct
  misc_feature 1..80: note = Synthetic: >EVB85-cand-2070-2149
  source 1..80: mol_type = other DNA
taaaatttacatttatgttctgtggtgctgccatggcaactggaaaattcctgatagcttactcaccaccaggtgctaac

SEQ ID NO: 25496 - DNA, 80 bp, synthetic construct
  misc_feature 1..80: note = Synthetic: >EVB85-cand-2160-2239
  source 1..80: mol_type = other DNA
acagaaaggacgccatgcttggcactcatattgtatgggacgtgggcctccaatccagctgcgtgctgtgcgttccttgg

SEQ ID NO: 25497 - DNA, 80 bp, synthetic construct
  misc_feature 1..80: note = Synthetic: >EVB85-cand-2240-2319
  source 1..80: mol_type = other DNA
attagtcagacacattacaggctcgtccagcaagacgagtacaccagcgcgggttttataacatgttggtatcaaacagg

SEQ ID NO: 25498 - DNA, 80 bp, synthetic construct
  misc_feature 1..80: note = Synthetic: >EVB85-cand-2320-2399
  source 1..80: mol_type = other DNA
catgatagtccccccgggcaccccgacatcatgttccataatgtgctttgtgtctgcatgcaatgacttctcagtgcgca

SEQ ID NO: 25499 - DNA, 80 bp, synthetic construct
  misc_feature 1..80: note = Synthetic: >EVB85-cand-2400-2479
  source 1..80: mol_type = other DNA
tgctcaaggacaccccattcatcagccaaagtgccctattacaaggagatgaagatgaagggagagcgagcctagtgact

SEQ ID NO: 25500 - DNA, 80 bp, synthetic construct
  misc_feature 1..80: note = Synthetic: >EVB85-cand-2480-2559
  source 1..80: mol_type = other DNA
gttgcagatacgattagccgtggaccaagcaactccgagagagtgcccgcactgacagcagctgaaaccggacacacatc

SEQ ID NO: 25501 - DNA, 80 bp, synthetic construct
  misc_feature 1..80: note = Synthetic: >EVB85-cand-2560-2639
  source 1..80: mol_type = other DNA
gcaggtgacaccagcagacacaatacaaaccagacatgtaaagaattaccattcccgctcagagtcctcaattgagaatt

SEQ ID NO: 25502 - DNA, 80 bp, synthetic construct
  misc_feature 1..80: note = Synthetic: >EVB85-cand-2640-2719
  source 1..80: mol_type = other DNA
tcttatgtagagcagcttgtgtgtatatggcagagtacaaaacaacctctgacacagaatccaagaagtatgtggcgtgg

SEQ ID NO: 25503 - DNA, 80 bp, synthetic construct
  misc_feature 1..80: note = Synthetic: >EVB85-cand-2720-2799
  source 1..80: mol_type = other DNA
aaaattaacactagacagatggtgcaactaaggcgaaaattcgaaatgttcacctacctcaggttcgacatggaaatcac

SEQ ID NO: 25504 - DNA, 80 bp, synthetic construct
  misc_feature 1..80: note = Synthetic: >EVB85-cand-2800-2879
  source 1..80: mol_type = other DNA
tctcgtgatcaccagtcgccaggatcaaggcaccagattggaccaagatatgccagtgttgacacaccaaataatgtaca

SEQ ID NO: 25505 - DNA, 80 bp, synthetic construct
  misc_feature 1..80: note = Synthetic: >EVB85-cand-2890-2969
  source 1..80: mol_type = other DNA
gggcccaatacccattaaagttgacgactatgcctggcaaacttcaaccaacccaagcatattttggacagaagggaacg

SEQ ID NO: 25506 - DNA, 80 bp, synthetic construct
  misc_feature 1..80: note = Synthetic: >EVB85-cand-2970-3049
  source 1..80: mol_type = other DNA
caccagctcgcatgtccatcccttttgtgagtataggcaatgcctacagtagcttctatgatggatggtcacactttaat

SEQ ID NO: 25507 - DNA, 80 bp, synthetic construct
  misc_feature 1..80: note = Synthetic: >EVB85-cand-3050-3129
  source 1..80: mol_type = other DNA
caacaaggatcatacgggtacaatacacttaacaaattaggtgacatatacatcagacatgtgagcggtgagagcccact

SEQ ID NO: 25508 - DNA, 80 bp, synthetic construct
  misc_feature 1..80: note = Synthetic: >EVB87-cand-5400-5479
  source 1..80: mol_type = other DNA
agtggccatgatgaaaagaaatgccagcactgcgaaaacagagtatggtgagttcaccatgcttgggatctatgatagat

SEQ ID NO: 25509 - DNA, 80 bp, synthetic construct
  misc_feature 1..80: note = Synthetic: >EVB87-cand-5480-5559
  source 1..80: mol_type = other DNA
gggcagtattaccccgccacgccaaaccaggtcccaccatcttaatgaatgaccaggaggtaggtgtggtggatgccaag

SEQ ID NO: 25510 - DNA, 80 bp, synthetic construct
  misc_feature 1..80: note = Synthetic: >EVB87-cand-5560-5639
  source 1..80: mol_type = other DNA
gaactagtggacaaggatggtaccaatctggagctgacacttttgaaactcaacaggaatgagaaattcagggacatccg

SEQ ID NO: 25511 - DNA, 80 bp, synthetic construct
  misc_feature 1..80: note = Synthetic: >EVB87-cand-5640-5719
  source 1..80: mol_type = other DNA
aggcttcttggcgcgcgaggaagctgaagttaacgaagctgtgcttgctattaacactagcaaatttccaaacatgtaca

SEQ ID NO: 25512 - DNA, 80 bp, synthetic construct
  misc_feature 1..80: note = Synthetic: >EVB87-cand-5720-5799
  source 1..80: mol_type = other DNA
tcccagttggtcaggtgacagactatggtttcctcaacctgggtggtactccaaccaaacgtatgctgatgtacaacttt

SEQ ID NO: 25513 - DNA, 80 bp, synthetic construct
  misc_feature 1..80: note = Synthetic: >EVB87-cand-5800-5879
  source 1..80: mol_type = other DNA
cccactcgtgctggacaatgtggcggcgtcctgatgtcaacaggcaaggttctcggaatacacgttggtggaaacggcca

SEQ ID NO: 25514 - DNA, 80 bp, synthetic construct
  misc_feature 1..80: note = Synthetic: >EVB87-cand-5880-5959
  source 1..80: mol_type = other DNA
ccaagggttctcggcagccctgttgcgccattacttcaacgacgaacagggcgagattgaatttatcgagagttctaaag

SEQ ID NO: 25515 - DNA, 80 bp, synthetic construct
  misc_feature 1..80: note = Synthetic: >EVB87-cand-5950-6029
  source 1..80: mol_type = other DNA
agttctaaagaggctggattcccagtcatcaacactcccagtaagacaaaacttgaacccagtgttttccatcacgtatt

SEQ ID NO: 25516 - DNA, 80 bp, synthetic construct
  misc_feature 1..80: note = Synthetic: >EVB87-cand-6070-6149
  source 1..80: mol_type = other DNA
cccagactgaaggccaacttcgaggaagccatattctccaaatacattgggaatgtgaacactcatgtggatgagtacat

SEQ ID NO: 25517 - DNA, 80 bp, synthetic construct
  misc_feature 1..80: note = Synthetic: >EVB87-cand-6110-6189
  source 1..80: mol_type = other DNA
aatacattgggaatgtgaacactcatgtggatgagtacatgatggaggctgtcgaccactatgcagggcaattggcaacc

SEQ ID NO: 25518 - DNA, 80 bp, synthetic construct
  misc_feature 1..80: note = Synthetic: >EVB87-cand-6190-6269
  source 1..80: mol_type = other DNA
ctagatatcagcacagagcccatgaaacttgaggatgctgtctatggtaccgagggcctagaggcactagatttaactac

SEQ ID NO: 25519 - DNA, 80 bp, synthetic construct
  misc_feature 1..80: note = Synthetic: >EVB87-cand-6280-6359
  source 1..80: mol_type = other DNA
tacccctacgtggccctcggcatcaagaagagggacatcctgtccaggaagaccagggatttgacgaaactaaaggaatg

SEQ ID NO: 25520 - DNA, 80 bp, synthetic construct
  misc_feature 1..80: note = Synthetic: >EVB87-cand-6350-6429
  source 1..80: mol_type = other DNA
taaaggaatgcatggacaagtatggactgaatctccccatggtcacatatgtcaaggatgaattgagatcagcagagaag

SEQ ID NO: 25521 - DNA, 80 bp, synthetic construct
  misc_feature 1..80: note = Synthetic: >EVB87-cand-6520-6599
  source 1..80: mol_type = other DNA
ttccacttgaacccaggtatagtgacaggcagcgcagttggctgcgatcctgacttattctggagcaaaatcccagtcat

SEQ ID NO: 25522 - DNA, 80 bp, synthetic construct
  misc_feature 1..80: note = Synthetic: >EVB87-cand-6600-6679
  source 1..80: mol_type = other DNA
gctcgacggccatcttatcgcctttgactatagtggttatgatgccagccttagtccagtatggtttgcttgtttgaaac

SEQ ID NO: 25523 - DNA, 80 bp, synthetic construct
  misc_feature 1..80: note = Synthetic: >EVB87-cand-6680-6759
  source 1..80: mol_type = other DNA
tgttgttggagaaattgggatattcacacaaagaaactaactacatagactacttgtgcaattcccatcatctgtacaga

SEQ ID NO: 25524 - DNA, 80 bp, synthetic construct
  misc_feature 1..80: note = Synthetic: >HCV.A16-cand-5970-6049
  source 1..80: mol_type = other DNA
actgggagactgaacattaatggcccaacccgtaccaaattggagcccagtgtattctatgatgtgtttgagggcagcaa

SEQ ID NO: 25525 - DNA, 80 bp, synthetic construct
  misc_feature 1..80: note = Synthetic: >HCV.A16-cand-6050-6129
  source 1..80: mol_type = other DNA
agaaccagcagtcttaaccagtaaggatcccagacttgaggttgattttgagcaagctttgttttccaagtatgtgggaa

SEQ ID NO: 25526 - DNA, 80 bp, synthetic construct
  misc_feature 1..80: note = Synthetic: >HCV.A16-cand-6130-6209
  source 1..80: mol_type = other DNA
acaccctgcatgagcctgacgagtatgtgacacaggctgctctccactatgcaaaccagctaaagcaattagatataaac

SEQ ID NO: 25527 - DNA, 80 bp, synthetic construct
  misc_feature 1..80: note = Synthetic: >HCV.A16-cand-6210-6289
  source 1..80: mol_type = other DNA
actaataagatgagcatggaagaagcatgctatggcactgaatatctagaggccatagacttgcacaccagtgccgggta

SEQ ID NO: 25528 - DNA, 80 bp, synthetic construct
  misc_feature 1..80: note = Synthetic: >HCV.A16-cand-6290-6369
  source 1..80: mol_type = other DNA
cccctatagtgccctgggtgtcaagaaaagagacatacttgacccaatcactagagatactaccaaaatgaaattctaca

SEQ ID NO: 25529 - DNA, 80 bp, synthetic construct
  misc_feature 1..80: note = Synthetic: >HCV.A16-cand-6370-6449
  source 1..80: mol_type = other DNA
tggataaatatgggttagacttgccctattccacctatgtgaaagatgagcttagatccttagataagattaagaaaggg

SEQ ID NO: 25530 - DNA, 80 bp, synthetic construct
  misc_feature 1..80: note = Synthetic: >HCV.A16-cand-6450-6529
  source 1..80: mol_type = other DNA
aaatcccgcttgattgaagccagtagtctaaatgactcagtctaccttaggatgactttcgggcatctctatgaaacttt

SEQ ID NO: 25531 - DNA, 80 bp, synthetic construct
  misc_feature 1..80: note = Synthetic: >HCV.A16-cand-6550-6629
  source 1..80: mol_type = other DNA
tgactgggtctgcagtagggtgtaatcctgatgtgttctggagcaaattaccgatcctgctgccaggatcgctctttgca

SEQ ID NO: 25532 - DNA, 80 bp, synthetic construct
  misc_feature 1..80: note = Synthetic: >HCV.A16-cand-6610-6689
  source 1..80: mol_type = other DNA
tgccaggatcgctctttgcatttgattattcaggatatgatgcaagtctcagcccagtgtggtttagagctttggaggtg

SEQ ID NO: 25533 - DNA, 80 bp, synthetic construct
  misc_feature 1..80: note = Synthetic: >HCV.A16-cand-6690-6769
  source 1..80: mol_type = other DNA
gttctccgagagatcggctactcagaggaggctgtatcactaatagaagggatcaaccacacccatcatgtgtatcggaa

SEQ ID NO: 25534 - DNA, 80 bp, synthetic construct
  misc_feature 1..80: note = Synthetic: >HCV.A16-cand-6770-6849
  source 1..80: mol_type = other DNA
caggacatattgtgtccttggtggaatgccttcaggttgttccggcacttccatcttcaattccatgatcaataacataa

SEQ ID NO: 25535 - DNA, 80 bp, synthetic construct
  misc_feature 1..80: note = Synthetic: >HCV.A16-cand-6890-6969
  source 1..80: mol_type = other DNA
tttagatgagctgaatatggtagcttatggagatgatgtgttagctagctatccattccctattgactgctcggagctag

SEQ ID NO: 25536 - DNA, 80 bp, synthetic construct
  misc_feature 1..80: note = Synthetic: >HCV.A16-cand-6930-7009
  source 1..80: mol_type = other DNA
ttagctagctatccattccctattgactgctcggagctagccaaaactggtaaagagtatggattgacaatgacacctgc

SEQ ID NO: 25537 - DNA, 80 bp, synthetic construct
  misc_feature 1..80: note = Synthetic: >HCV.A16-cand-7010-7089
  source 1..80: mol_type = other DNA
tgacaagtcaccttgctttaatgaagttacctgggaaaatgccacattcttaaagagaggcttcctgccagatcaccaat

SEQ ID NO: 25538 - DNA, 80 bp, synthetic construct
  misc_feature 1..80: note = Synthetic: >HCV.A16-cand-7090-7169
  source 1..80: mol_type = other DNA
tcccatttcttatccaccctaccatgcccatgagggagatccacgagtccattcgttggactaaagacgcacgcaacact

SEQ ID NO: 25539 - DNA, 80 bp, synthetic construct
  misc_feature 1..80: note = Synthetic: >HCV.A16-cand-7170-7249
  source 1..80: mol_type = other DNA
caggatcacgtgcgctctctgtgcctcttagcatggcataatgggaaggaggaatatgaaaaatttgtgagcacaattag

SEQ ID NO: 25540 - DNA, 80 bp, synthetic construct
  misc_feature 1..80: note = Synthetic: >HCV.A17-cand-5430-5509
  source 1..80: mol_type = other DNA
attagaacagccaaagtgcaaggaccagggtttgattacgcagtggccatggccaaaagaaacatcctcacggcaaccac

SEQ ID NO: 25541 - DNA, 80 bp, synthetic construct
  misc_feature 1..80: note = Synthetic: >HCV.A17-cand-5540-5619
  source 1..80: mol_type = other DNA
gcatgacaatgtagccattctaccaactcacgcctcaccaggagagacaatagtcattgatggaaaggaagtggaagtcc

SEQ ID NO: 25542 - DNA, 80 bp, synthetic construct
  misc_feature 1..80: note = Synthetic: >HCV.A17-cand-5590-5669
  source 1..80: mol_type = other DNA
tagtcattgatggaaaggaagtggaagtcctggacgccaaggcactagaagatcaagcaggaaccaatttggaaatcacc

SEQ ID NO: 25543 - DNA, 80 bp, synthetic construct
  misc_feature 1..80: note = Synthetic: >HCV.A17-cand-5670-5749
  source 1..80: mol_type = other DNA
attgtcactctcaaaagaaatgagaaattcagagacatcagaccacacatccccacgcaaatcaccgagacaaatgatgg

SEQ ID NO: 25544 - DNA, 80 bp, synthetic construct
  misc_feature 1..80: note = Synthetic: >HCV.A17-cand-5830-5909
  source 1..80: mol_type = other DNA
tcggtggccgccaaaccgcccgtacactaatgtacaacttcccaaccagagcaggccagtgtggtggtgtcatcacatgc

SEQ ID NO: 25545 - DNA, 80 bp, synthetic construct
  misc_feature 1..80: note = Synthetic: >HCV.A17-cand-5910-5989
  source 1..80: mol_type = other DNA
actggcaaggtcatcgggatgcatgttggagggaacggttcacatgggtttgcagcagccctgaaacgatcatacttcac

SEQ ID NO: 25546 - DNA, 80 bp, synthetic construct
  misc_feature 1..80: note = Synthetic: >HCV.A17-cand-5990-6069
  source 1..80: mol_type = other DNA
tcagagtcaaggtgaaatacagtggatgagaccatcaaaggaagtaggataccccatcatcaatgcaccatccaaaacaa

SEQ ID NO: 25547 - DNA, 80 bp, synthetic construct
  misc_feature 1..80: note = Synthetic: >HCV.A17-cand-6070-6149
  source 1..80: mol_type = other DNA
aactagaacccagtgcattccattatgtttttgaaggagtaaaggaaccagcagtactaactaagaatgaccccagattg

SEQ ID NO: 25548 - DNA, 80 bp, synthetic construct
  misc_feature 1..80: note = Synthetic: >HCV.A17-cand-6150-6229
  source 1..80: mol_type = other DNA
aaaactgactttgaagaagccatcttctcaaaatatgtgggcaacaagatcactgaggtggatgaatacatgaaagaagc

SEQ ID NO: 25549 - DNA, 80 bp, synthetic construct
  misc_feature 1..80: note = Synthetic: >HCV.A17-cand-6230-6309
  source 1..80: mol_type = other DNA
agtggaccattatgcaggacaactaatgtctctagacattaacacagaacaaatgtgtctggaagatgccatgtatggca

SEQ ID NO: 25550 - DNA, 80 bp, synthetic construct
  misc_feature 1..80: note = Synthetic: >HCV.A17-cand-6310-6389
  source 1..80: mol_type = other DNA
ctgatggtcttgaagctctggatctcagcaccagtgctggttatccttatgtggcaatgggaaagaagaaaagagacatc

SEQ ID NO: 25551 - DNA, 80 bp, synthetic construct
  misc_feature 1..80: note = Synthetic: >HCV.A17-cand-6390-6469
  source 1..80: mol_type = other DNA
ctaaacaaacaaaccagagacaccaaagaaatgcagagacttctagatacttatggaatcaacctacctctggtcaccta

SEQ ID NO: 25552 - DNA, 80 bp, synthetic construct
  misc_feature 1..80: note = Synthetic: >HCV.A17-cand-6470-6549
  source 1..80: mol_type = other DNA
tgtaaaagatgagcttagatccaaaaccaaagtggaacagggcaaatccagattgattgaagcctcgagcctgaatgact

SEQ ID NO: 25553 - DNA, 80 bp, synthetic construct
  misc_feature 1..80: note = Synthetic: >HCV.A17-cand-6550-6629
  source 1..80: mol_type = other DNA
cagtggctatgagaatggcttttggcaacctgtatgcagcattccacaagaacccaggtgtagtgacaggttcagctgta

SEQ ID NO: 25554 - DNA, 80 bp, synthetic construct
  misc_feature 1..80: note = Synthetic: >HCV.A17-cand-6710-6789
  source 1..80: mol_type = other DNA
tgatgcatctctcagtccagcttggtttgaagcactcaaaatggtactagaaaagattggatttggagacagagtagact

SEQ ID NO: 25555 - DNA, 80 bp, synthetic construct
  misc_feature 1..80: note = Synthetic: >HCV.A17-cand-6790-6869
  source 1..80: mol_type = other DNA
acattgattatctaaatcactcacaccacctttacaaaaacaaaacatattgtgtcaagggcggcatgccatctggctgc

SEQ ID NO: 25556 - DNA, 80 bp, synthetic construct
  misc_feature 1..80: note = Synthetic: >HCV.A18-cand-1220-1299
  source 1..80: mol_type = other DNA
ttattcggccaaaacatgtactatcactacctcggtaggtcaggttatacagttcatgtacagtgtaatgcatcaaaatt

SEQ ID NO: 25557 - DNA, 80 bp, synthetic construct
  misc_feature 1..80: note = Synthetic: >HCV.A18-cand-1230-1309
  source 1..80: mol_type = other DNA
aaaacatgtactatcactacctcggtaggtcaggttatacagttcatgtacagtgtaatgcatcaaaattccaccaggga

SEQ ID NO: 25558 - DNA, 80 bp, synthetic construct
  misc_feature 1..80: note = Synthetic: >HCV.A18-cand-1330-1409
  source 1..80: mol_type = other DNA
gcctgagtattgtctcgcaggtgattcgaactccaaaaccaattataccagttatattaatgccaatccaggtgaacggg

SEQ ID NO: 25559 - DNA, 80 bp, synthetic construct
  misc_feature 1..80: note = Synthetic: >HCV.A18-cand-1430-1509
  source 1..80: mol_type = other DNA
ttcacaccagactcgggagcagtcccgaaacgagaattccaaccagttgattacctcttcggttgtggtgtcatggcggg

SEQ ID NO: 25560 - DNA, 80 bp, synthetic construct
  misc_feature 1..80: note = Synthetic: >HCV.A18-cand-1510-1589
  source 1..80: mol_type = other DNA
taacgcatttgtcttcccacaccaaattataaatttgcgcacgaacaactgcgcgacattagttttgccttatgtgaatt

SEQ ID NO: 25561 - DNA, 80 bp, synthetic construct
  misc_feature 1..80: note = Synthetic: >HCV.A18-cand-1630-1709
  source 1..80: mol_type = other DNA
tatagtgatactgccactgtccaagttggattacaaccctgacgcaagcacaaaactgccaatcactgttacaatagcac

SEQ ID NO: 25562 - DNA, 80 bp, synthetic construct
  misc_feature 1..80: note = Synthetic: >HCV.A18-cand-1670-1749
  source 1..80: mol_type = other DNA
gacgcaagcacaaaactgccaatcactgttacaatagcaccaatgtgttgtgaattcaacggtttaaggaacctgaccat

SEQ ID NO: 25563 - DNA, 80 bp, synthetic construct
  misc_feature 1..80: note = Synthetic: >HCV.A18-cand-1760-1839
  source 1..80: mol_type = other DNA
caagggttgcctgtaatgaacactccaggaagcaatcagtaccttacctcagacaactttcaatcaccatgtgcattgcc

SEQ ID NO: 25564 - DNA, 80 bp, synthetic construct
  misc_feature 1..80: note = Synthetic: >HCV.A18-cand-1880-1959
  source 1..80: mol_type = other DNA
gtgaagaacttaatggaattagctgaaattgacactatgataccaatggacctgagtgaaggtaagaaaaacacaatgga

SEQ ID NO: 25565 - DNA, 80 bp, synthetic construct
  misc_feature 1..80: note = Synthetic: >HCV.A18-cand-1920-1999
  source 1..80: mol_type = other DNA
taccaatggacctgagtgaaggtaagaaaaacacaatggaaatgtaccgggttaaattgtctgatactggtaatcgcgac

SEQ ID NO: 25566 - DNA, 80 bp, synthetic construct
  misc_feature 1..80: note = Synthetic: >HCV.A18-cand-2000-2079
  source 1..80: mol_type = other DNA
aaaccaattttgtgtttgtctctctcgccggcatcagacccgcggctttcctacaccatgttgggtgaaatactaaatta

SEQ ID NO: 25567 - DNA, 80 bp, synthetic construct
  misc_feature 1..80: note = Synthetic: >HCV.A18-cand-2080-2159
  source 1..80: mol_type = other DNA
ttatacacactgggccggttctctaaaattttcattcctattttgtgggtccatgatggcaacaggcaaattactagttg

SEQ ID NO: 25568 - DNA, 80 bp, synthetic construct
  misc_feature 1..80: note = Synthetic: >HCV.A18-cand-2160-2239
  source 1..80: mol_type = other DNA
catactcaccgcctggtgctcagccacctcaagacagaaaagcagcaatgttaggcacacatgtaatctgggatattggc

SEQ ID NO: 25569 - DNA, 80 bp, synthetic construct
  misc_feature 1..80: note = Synthetic: >HCV.A18-cand-2240-2319
  source 1..80: mol_type = other DNA
ctacagtcctcatgcactatggtcgttccatggattagcaatactagttatcgcagaaccgcgaaggatgacttcaccga

SEQ ID NO: 25570 - DNA, 80 bp, synthetic construct
  misc_feature 1..80: note = Synthetic: >HCV.A18-cand-2320-2399
  source 1..80: mol_type = other DNA
gggcggttacattagcatgttttatcaaaccaggatagtggtccctgcatccacaccaaccagcatggacattctgtgtt

SEQ ID NO: 25571 - DNA, 80 bp, synthetic construct
  misc_feature 1..80: note = Synthetic: >HCV.A18-cand-2400-2479
  source 1..80: mol_type = other DNA
ttgtgtcagcttgcaacgattttactgtcaggttacttagggacaccacacatatatcccagtcagcaatgccacaaggc

SEQ ID NO: 25572 - DNA, 80 bp, synthetic construct
  misc_feature 1..80: note = Synthetic: >HCV.A18-cand-3750-3829
  source 1..80: mol_type = other DNA
agcacggtgtcatgggcttgatcacagccggtggaaatggattggttgcgttcgcagacatcagggatctttatgtggag

SEQ ID NO: 25573 - DNA, 80 bp, synthetic construct
  misc_feature 1..80: note = Synthetic: >HCV.A18-cand-3830-3909
  source 1..80: mol_type = other DNA
gatgaggcaatggaacaaggaattacttcatacattgagtccctcggtgcagcgtttggaagcgggttcactaaccaaat

SEQ ID NO: 25574 - DNA, 80 bp, synthetic construct
  misc_feature 1..80: note = Synthetic: >HCV.A18-cand-3910-3989
  source 1..80: mol_type = other DNA
tggagagaaaattagtgagatcacgtctatggtcaactcagtggtcactgaaaagctgctaaagaatctaataaaactag

SEQ ID NO: 25575 - DNA, 80 bp, synthetic construct
  misc_feature 1..80: note = Synthetic: >HCV.A18-cand-3990-4069
  source 1..80: mol_type = other DNA
ttagtggtctggtaattatagtaaggaattacgaagacaccaccacagtactggccactttagcgctgttagggtgtgat

SEQ ID NO: 25576 - DNA, 80 bp, synthetic construct
  misc_feature 1..80: note = Synthetic: >HCV.A18-cand-4070-4149
  source 1..80: mol_type = other DNA
gtatctccatggacttggctaaagaaaaaggtctgtgacatcttggagattccattcgtcatgaagcaaagtgattcatg

SEQ ID NO: 25577 - DNA, 80 bp, synthetic construct
  misc_feature 1..80: note = Synthetic: >HCV.A18-cand-4150-4229
  source 1..80: mol_type = other DNA
gatgaagaaattcacagaagcgtgcaatgccgccaaagggttggaatggatcagtaacaagatttctaaatttgtggaat

SEQ ID NO: 25578 - DNA, 80 bp, synthetic construct
  misc_feature 1..80: note = Synthetic: >HCV.A18-cand-4230-4309
  source 1..80: mol_type = other DNA
ggattaaaaataaaataattcccgaggctagagacaaggttgaattcgtttccaagctcaaacagttgggtatgctagaa

SEQ ID NO: 25579 - DNA, 80 bp, synthetic construct
  misc_feature 1..80: note = Synthetic: >HCV.A18-cand-4310-4389
  source 1..80: mol_type = other DNA
aaccagatcaatactatacaccaatcatgccccagccaagaacaacaagaaattctatttaacaatgttaggtggctagc

SEQ ID NO: 25580 - DNA, 80 bp, synthetic construct
  misc_feature 1..80: note = Synthetic: >HCV.A18-cand-4390-4469
  source 1..80: mol_type = other DNA
aatacaatccaggcgattttcaccactttacgcaacagaggcaaagagaataagtaaactagaaaacaccattaataact

SEQ ID NO: 25581 - DNA, 80 bp, synthetic construct
  misc_feature 1..80: note = Synthetic: >HCV.A18-cand-4470-4549
  source 1..80: mol_type = other DNA
acatacagttcaagagcaaacaccgtattgaaccagtatgtgttttaatacatggtagccctggtacaggaaaatctgtt

SEQ ID NO: 25582 - DNA, 80 bp, synthetic construct
  misc_feature 1..80: note = Synthetic: >HCV.A18-cand-4550-4629
  source 1..80: mol_type = other DNA
gccaccagcttgatgggacgcgcaatcgcggaaagggagaacacttccacttactcgctcccgccagacccagcacactt

SEQ ID NO: 25583 - DNA, 80 bp, synthetic construct
  misc_feature 1..80: note = Synthetic: >HCV.A18-cand-4630-4709
  source 1..80: mol_type = other DNA
tgatggctacaagcagcagggtgtggtcattatggatgacctcaatcaaaaccccgatgggcttgacatgaaactatttt

SEQ ID NO: 25584 - DNA, 80 bp, synthetic construct
  misc_feature 1..80: note = Synthetic: >HCV.A18-cand-4710-4789
  source 1..80: mol_type = other DNA
gccagatggtctctacagttgagttcataccaccaatggcttccttggaggaaaaaggtatattatttacatcagactat

SEQ ID NO: 25585 - DNA, 80 bp, synthetic construct
  misc_feature 1..80: note = Synthetic: >HCV.A18-cand-4790-4869
  source 1..80: mol_type = other DNA
gtactggcttcaaccaattccagtactattacaccacctactgtggcacacagtgatgccctaagccggagatttgcttt

SEQ ID NO: 25586 - DNA, 80 bp, synthetic construct
  misc_feature 1..80: note = Synthetic: >HCV.A18-cand-4870-4949
  source 1..80: mol_type = other DNA
tgacatggagatctgcccattgtcacaatacactatcaaaggcaaattgaatatggcagaagctaccagattgtgcaagg

SEQ ID NO: 25587 - DNA, 80 bp, synthetic construct
  misc_feature 1..80: note = Synthetic: >HCV.A18-cand-4950-5029
  source 1..80: mol_type = other DNA
aatgccctcaaccagcaaatttcaaaaagtgctgcccactggtgtgtggcaaggccatccaattaatggacaaatacacc

SEQ ID NO: 25588 - DNA, 80 bp, synthetic construct
  misc_feature 1..80: note = Synthetic: >HCV.A18-cand-6310-6389
  source 1..80: mol_type = other DNA
cactgatggtcttgaggcattggacctcagtactagtgcagggtacccatatgttgctatgggaaaaaagaaaagggata

SEQ ID NO: 25589 - DNA, 80 bp, synthetic construct
  misc_feature 1..80: note = Synthetic: >HCV.A18-cand-6390-6469
  source 1..80: mol_type = other DNA
tcctcaacaaacaaaccagagacaccaaggagatgcaaaggctactagatacttatggcataaacttaccattggtcaca

SEQ ID NO: 25590 - DNA, 80 bp, synthetic construct
  misc_feature 1..80: note = Synthetic: >HCV.A18-cand-6470-6549
  source 1..80: mol_type = other DNA
tatgtgaaggatgagctcagatcaaaaacaaaagtagaacaaggcaaatccaggttgattgaagcctcaagtctcaatga

SEQ ID NO: 25591 - DNA, 80 bp, synthetic construct
  misc_feature 1..80: note = Synthetic: >HCV.A18-cand-6550-6629
  source 1..80: mol_type = other DNA
ttcagttgccatgagaatggcatttggtaatctgtatgcagcttttcataaaaacccaggagtagtcacaggctcggcag

SEQ ID NO: 25592 - DNA, 80 bp, synthetic construct
  misc_feature 1..80: note = Synthetic: >HCV.A18-cand-6630-6709
  source 1..80: mol_type = other DNA
ttggttgtgacccagatttgttttggagcaagataccagtgttaatggaggaaaaactctttgctttcgactatacagga

SEQ ID NO: 25593 - DNA, 80 bp, synthetic construct
  misc_feature 1..80: note = Synthetic: >HCV.A18-cand-6710-6789
  source 1..80: mol_type = other DNA
tatgatgcttcactcagtcctgcttggtttgaggctctcaaaatggttcttgagaaaattggatttggagatagggtaga

SEQ ID NO: 25594 - DNA, 80 bp, synthetic construct
  misc_feature 1..80: note = Synthetic: >HCV.A18-cand-6790-6869
  source 1..80: mol_type = other DNA
ttacattgattacctaaaccactcccaccacctatacaaaaacaaaacttactgtgtcaagggtggcatgccatctggct

SEQ ID NO: 25595 - DNA, 80 bp, synthetic construct
  misc_feature 1..80: note = Synthetic: >HCV.A18-cand-6870-6949
  source 1..80: mol_type = other DNA
gctcaggcacatcaatttttaattcaatgattaataacttgataattaggacactcttactgaaaacctacaagggcata

SEQ ID NO: 25596 - DNA, 80 bp, synthetic construct
  misc_feature 1..80: note = Synthetic: >HCV.A18-cand-7120-7199
  source 1..80: mol_type = other DNA
cctgaaaagattctttagagcagatgaaaagtatccatttctgatacacccagtcatgccaatgaaagaaattcacgaat

SEQ ID NO: 25597 - DNA, 80 bp, synthetic construct
  misc_feature 1..80: note = Synthetic: >HCV.A18-cand-7200-7279
  source 1..80: mol_type = other DNA
ctattagatggaccaaagatcccagaaacacccaggatcacgttcgttcattgtgcctattggcctggcacaatggcgaa

SEQ ID NO: 25598 - DNA, 80 bp, synthetic construct
  misc_feature 1..80: note = Synthetic: >HCV.A18-cand-7280-7359
  source 1..80: mol_type = other DNA
gaagaatataacaaattcttagctaaaattaggagtgtgccaatcggaagagcgttattgctccctgagtactctacatt

SEQ ID NO: 25599 - DNA, 80 bp, synthetic construct
  misc_feature 1..80: note = Synthetic: >HCV.A18-cand-7350-7429
  source 1..80: mol_type = other DNA
actctacattgtaccgccgttggctcgactcattttagtaaccctacctcagtcgaattggattgggtcatactgttgta

SEQ ID NO: 25600 - DNA, 80 bp, synthetic construct
  misc_feature 1..80: note = Synthetic: >HCV.A19-cand-60-139
  source 1..80: mol_type = other DNA
attacggtacctttgtacgcctgttttatatccccttacccaagtaactttagaagtaattcacacagttcaatagagag

SEQ ID NO: 25601 - DNA, 80 bp, synthetic construct
  misc_feature 1..80: note = Synthetic: >HCV.A19-cand-190-269
  source 1..80: mol_type = other DNA
agctacatagactgtccccacggttgaaagtggcagatccgttatccgcttaagtacttcgagaagcctagtatcacctt

SEQ ID NO: 25602 - DNA, 80 bp, synthetic construct
  misc_feature 1..80: note = Synthetic: >HCV.A19-cand-270-349
  source 1..80: mol_type = other DNA
ggaatcttcgacgcgttgcgctcagcactctacccccgagtgtagcttaggctgatgagtctgggcataccccaccggcg

SEQ ID NO: 25603 - DNA, 80 bp, synthetic construct
  misc_feature 1..80: note = Synthetic: >HCV.A19-cand-600-679
  source 1..80: mol_type = other DNA
atctaagattgttatcatatagctattggattggccatccggtgattcacagagacttgaaagctaactcaccttactat

SEQ ID NO: 25604 - DNA, 80 bp, synthetic construct
  misc_feature 1..80: note = Synthetic: >HCV.A19-cand-1970-2049
  source 1..80: mol_type = other DNA
acaacaacaagtctatattttcaattagtttaagtcctgctgctgaccagagattgtccagaacaatgctaggtgagatt

SEQ ID NO: 25605 - DNA, 80 bp, synthetic construct
  misc_feature 1..80: note = Synthetic: >HCV.A19-cand-2040-2119
  source 1..80: mol_type = other DNA
aggtgagattcttaattactacacacactggactggttctattaaattcacattcctattttgtggtagtatgatggcga

SEQ ID NO: 25606 - DNA, 80 bp, synthetic construct
  misc_feature 1..80: note = Synthetic: >HCV.A19-cand-2120-2199
  source 1..80: mol_type = other DNA
caggaaagatgctgttaagttacagtcctccaggagccaaaccccccacaaccagaaaagaagccatgttaggcacacac

SEQ ID NO: 25607 - DNA, 80 bp, synthetic construct
  misc_feature 1..80: note = Synthetic: >HCV.A19-cand-2200-2279
  source 1..80: mol_type = other DNA
attgtatgggacttaggtttacaatccagtgcaactatggtggcgccttggatatcaaatgtgaattacaggcgttgtgt

SEQ ID NO: 25608 - DNA, 80 bp, synthetic construct
  misc_feature 1..80: note = Synthetic: >HCV.A19-cand-2280-2359
  source 1..80: mol_type = other DNA
taaagatgattttacagaaggtggttacatatgctgcttctatcagactgcaattgtggtacctccaaacactccaacag

SEQ ID NO: 25609 - DNA, 80 bp, synthetic construct
  misc_feature 1..80: note = Synthetic: >HCV.A19-cand-2360-2439
  source 1..80: mol_type = other DNA
acatgtatatgcttgcatttgttagtgcgtgtaatgacttctcagcgaggcttctgaaagatactccatttgttatccag

SEQ ID NO: 25610 - DNA, 80 bp, synthetic construct
  misc_feature 1..80: note = Synthetic: >HCV.A19-cand-2440-2519
  source 1..80: mol_type = other DNA
accacacctgtagcacacacccagggtattgatgatgttattgacactgtcgtggctaatgcactcaaggtgtccatgcc

SEQ ID NO: 25611 - DNA, 80 bp, synthetic construct
  misc_feature 1..80: note = Synthetic: >HCV.A19-cand-2520-2599
  source 1..80: mol_type = other DNA
acaagtacaagacacacagtctagtggaccagtcaactcaaaagaagtccctgcgttgaccgctgttgagacgggtgcca

SEQ ID NO: 25612 - DNA, 80 bp, synthetic construct
  misc_feature 1..80: note = Synthetic: >HCV.A19-cand-2600-2679
  source 1..80: mol_type = other DNA
ccagtcaagtagacccttcagatgtaatagaaacgcgccatgtcataaaccaaaggctaagatcagagtgcaccgtagaa

SEQ ID NO: 25613 - DNA, 80 bp, synthetic construct
  misc_feature 1..80: note = Synthetic: >HCV.A19-cand-2680-2759
  source 1..80: mol_type = other DNA
tccttctttggaagatctgcttgtgtggccataataggcttaagcaacaagaaacccacagatgccaatggaaaagaatt

SEQ ID NO: 25614 - DNA, 80 bp, synthetic construct
  misc_feature 1..80: note = Synthetic: >HCV.A19-cand-2760-2839
  source 1..80: mol_type = other DNA
gtttgcaacatggaccatctcatatctagacacatatcagttgaggagaaagttagagatgtttacctactctagatttg

SEQ ID NO: 25615 - DNA, 80 bp, synthetic construct
  misc_feature 1..80: note = Synthetic: >HCV.A19-cand-2840-2919
  source 1..80: mol_type = other DNA
acattgagatgacttttgtcataacagagagattcttcacctcaacatctgcagctgctagggattatgtatatcagatc

SEQ ID NO: 25616 - DNA, 80 bp, synthetic construct
  misc_feature 1..80: note = Synthetic: >HCV.A19-cand-2920-2999
  source 1..80: mol_type = other DNA
atgtacgtaccaccaggtgccccaatcccccagtcatgggatgattacacatggcaatcatccactaacccttcaatatt

SEQ ID NO: 25617 - DNA, 80 bp, synthetic construct
  misc_feature 1..80: note = Synthetic: >HCV.A19-cand-3000-3079
  source 1..80: mol_type = other DNA
ctacacgactgggaatgccaatccaagaatatcgatcccgttcgtgggcattgcagcagcttactcacacttttatgatg

SEQ ID NO: 25618 - DNA, 80 bp, synthetic construct
  misc_feature 1..80: note = Synthetic: >HCV.A19-cand-3080-3159
  source 1..80: mol_type = other DNA
gtttctccatagtccctttcaattcagtggatgctggtgcgtccaacaagtatggttattcctcaatcaatgactttggc

SEQ ID NO: 25619 - DNA, 80 bp, synthetic construct
  misc_feature 1..80: note = Synthetic: >HCV.A19-cand-3160-3239
  source 1..80: mol_type = other DNA
actctagcgatcaggattgttaacgaatatgacccagtaacaatagatgcaaaagttagggtatacctcaaaccaaaaca

SEQ ID NO: 25620 - DNA, 80 bp, synthetic construct
  misc_feature 1..80: note = Synthetic: >HCV.B2-cand-4790-4869
  source 1..80: mol_type = other DNA
gattatatcaatgtacagccaaaatggtaagatcaacatgccaatggccgtgaaaacctgtgatgaggagtgctgtccag

SEQ ID NO: 25621 - DNA, 80 bp, synthetic construct
  misc_feature 1..80: note = Synthetic: >HCV.B2-cand-4870-4949
  source 1..80: mol_type = other DNA
ccaactttaaaaagtgctgtccgttggtttgtggcaaggccatccagttcatagatagaaggactcaggtgaggtactcg

SEQ ID NO: 25622 - DNA, 80 bp, synthetic construct
  misc_feature 1..80: note = Synthetic: >HCV.B2-cand-4920-4999
  source 1..80: mol_type = other DNA
atagatagaaggactcaggtgaggtactcgttggacatgcttgttaccgaaatgttcagggaatacaaccacagacacag

SEQ ID NO: 25623 - DNA, 80 bp, synthetic construct
  misc_feature 1..80: note = Synthetic: >HCV.B2-cand-5040-5119
  source 1..80: mol_type = other DNA
gtgtacagagaaatcaaaattagtgtcgcaccagagacaccccccccacctgcaattgcagatctactaaaatctgtaga

SEQ ID NO: 25624 - DNA, 80 bp, synthetic construct
  misc_feature 1..80: note = Synthetic: >HCV.B2-cand-5120-5199
  source 1..80: mol_type = other DNA
cagtgaagcagtcagagagtattgcaaggagaagggatggttggtgcctgaaaccaactccacactgcaaatcgagaagc

SEQ ID NO: 25625 - DNA, 80 bp, synthetic construct
  misc_feature 1..80: note = Synthetic: >HCV.B2-cand-5200-5279
  source 1..80: mol_type = other DNA
atgttagtagagccttcatctgtctgcatgcacttaccacatttgtttcagtggcgggcatagtatacattatctacaag

SEQ ID NO: 25626 - DNA, 80 bp, synthetic construct
  misc_feature 1..80: note = Synthetic: >HCV.B2-cand-5280-5359
  source 1..80: mol_type = other DNA
ttgttcgccggcttccaaggtgcttacaccggattgcccaaccagaaacctaaggtgccaaccttgagacaagcaaaagt

SEQ ID NO: 25627 - DNA, 80 bp, synthetic construct
  misc_feature 1..80: note = Synthetic: >HCV.B2-cand-5360-5439
  source 1..80: mol_type = other DNA
ccaaggacctgcatttgaatttgctgtggcgatgatgaagagaaacgccagtactgtgaagactgaatacggtgagttca

SEQ ID NO: 25628 - DNA, 80 bp, synthetic construct
  misc_feature 1..80: note = Synthetic: >HCV.B2-cand-5440-5519
  source 1..80: mol_type = other DNA
caatgcttgggatctatgacaggtgggcagtgctgcctcgccacgctaaaccagggcctaccatcctaatgaacgaccag

SEQ ID NO: 25629 - DNA, 80 bp, synthetic construct
  misc_feature 1..80: note = Synthetic: >HCV.B2-cand-5520-5599
  source 1..80: mol_type = other DNA
gaggtgggtgtggttgacgcaaaagaattggtggataaggatggaactaacttggagctgacactcttaaagctcaatag

SEQ ID NO: 25630 - DNA, 80 bp, synthetic construct
  misc_feature 1..80: note = Synthetic: >HCV.B2-cand-5600-5679
  source 1..80: mol_type = other DNA
gaatgagaagtttagagacatccgaggcttcttagcaagggaggaagttgaggtcaatgaggccgtgcttgccattaaca

SEQ ID NO: 25631 - DNA, 80 bp, synthetic construct
  misc_feature 1..80: note = Synthetic: >HCV.B2-cand-5680-5759
  source 1..80: mol_type = other DNA
ccagtaaatttccaaacatgtatatccctgttggtcaagtgacagattatggcttccttaatttgggtgggacccccacc

SEQ ID NO: 25632 - DNA, 80 bp, synthetic construct
  misc_feature 1..80: note = Synthetic: >HCV.B2-cand-5760-5839
  source 1..80: mol_type = other DNA
aaacgcatgctaatgtacaacttccccacgcgtgcaggacagtgtggtggtgtcttgatgtcaactggtaaagtccttgg

SEQ ID NO: 25633 - DNA, 80 bp, synthetic construct
  misc_feature 1..80: note = Synthetic: >HCV.B2-cand-5840-5919
  source 1..80: mol_type = other DNA
aatacatgtcggtggtaacgggcaccagggcttctcagcggccctgttacgccactatttcaatgatgagcagggagaga

SEQ ID NO: 25634 - DNA, 80 bp, synthetic construct
  misc_feature 1..80: note = Synthetic: >HCV.B2-cand-5920-5999
  source 1..80: mol_type = other DNA
ttgagttcattgagagctccaaggaagctggcttcccagtcattaacactcccagcaaaacaaaacttgagcccagtgtc

SEQ ID NO: 25635 - DNA, 80 bp, synthetic construct
  misc_feature 1..80: note = Synthetic: >HCV.B2-cand-5970-6049
  source 1..80: mol_type = other DNA
cccagcaaaacaaaacttgagcccagtgtcttccaccaagtgtttgaagggaataaagaaccggcagtgctgaggaacgg

SEQ ID NO: 25636 - DNA, 80 bp, synthetic construct
  misc_feature 1..80: note = Synthetic: >HCV.B4-cand-4910-4989
  source 1..80: mol_type = other DNA
cattgataggagaacacaagtgagatactcactggatatgcttgtgactgaaatgtttagagaatacaaccacaggcaca

SEQ ID NO: 25637 - DNA, 80 bp, synthetic construct
  misc_feature 1..80: note = Synthetic: >HCV.B4-cand-5090-5169
  source 1..80: mol_type = other DNA
agacctgctgaagtcagtggatagtgaggcagtcagagagtactgcaaagaaaagggatggttagtgcctgaaatcaact

SEQ ID NO: 25638 - DNA, 80 bp, synthetic construct
  misc_feature 1..80: note = Synthetic: >HCV.B4-cand-5170-5249
  source 1..80: mol_type = other DNA
ccactctgcaaattgaaaagcacgtgagcagggccttcatctgcctacaagcgctcaccacctttgtctctgtggcaggg

SEQ ID NO: 25639 - DNA, 80 bp, synthetic construct
  misc_feature 1..80: note = Synthetic: >HCV.B4-cand-5250-5329
  source 1..80: mol_type = other DNA
atcatatacatcatttacaaactgtttgcaggcttccaaggagcttacactggcatgcccaaccaaaaacccaaagtgcc

SEQ ID NO: 25640 - DNA, 80 bp, synthetic construct
  misc_feature 1..80: note = Synthetic: >HCV.B4-cand-5330-5409
  source 1..80: mol_type = other DNA
aaccttgagacaggctaaagtgcaagggccagcttttgagtttgcagtggccatgatgaagagaaacgctagcaccgtga

SEQ ID NO: 25641 - DNA, 80 bp, synthetic construct
  misc_feature 1..80: note = Synthetic: >HCV.B4-cand-5410-5489
  source 1..80: mol_type = other DNA
aaaccgagtacggcgagttcacaatgcttggcatctatgacaggtgggcagtactaccccgccacgccaagcccggacct

SEQ ID NO: 25642 - DNA, 80 bp, synthetic construct
  misc_feature 1..80: note = Synthetic: >HCV.B4-cand-5490-5569
  source 1..80: mol_type = other DNA
accatcctaatgaatgaccaggaagtgggtgtggtggatgctaaagagctggtggacaaagatggtaccaacctggaact

SEQ ID NO: 25643 - DNA, 80 bp, synthetic construct
  misc_feature 1..80: note = Synthetic: >HCV.B4-cand-5570-5649
  source 1..80: mol_type = other DNA
gacactcttgaaactcaacagaaatgagaagttcagagacatccgaggcttcttggcacgtgaggaagctgaggtcaacg

SEQ ID NO: 25644 - DNA, 80 bp, synthetic construct
  misc_feature 1..80: note = Synthetic: >HCV.B4-cand-5650-5729
  source 1..80: mol_type = other DNA
aggctgtgcttgctattaacaccagcaagttcccaaacatgtacatcccagttggccaagtgacagactatggattcctc

SEQ ID NO: 25645 - DNA, 80 bp, synthetic construct
  misc_feature 1..80: note = Synthetic: >HCV.B4-cand-5730-5809
  source 1..80: mol_type = other DNA
aacctgggtggcacccccaccaagcgcatgctgatgtacaacttcccaacacgtgcaggacagtgtggtggtgtcctaat

SEQ ID NO: 25646 - DNA, 80 bp, synthetic construct
  misc_feature 1..80: note = Synthetic: >HCV.B4-cand-5810-5889
  source 1..80: mol_type = other DNA
gtcaacaggcaaggtcctcggaatacacgttggtggaaatggacaccaagggttctcagcagccctgctgcgccactatt

SEQ ID NO: 25647 - DNA, 80 bp, synthetic construct
  misc_feature 1..80: note = Synthetic: >HCV.B4-cand-6010-6089
  source 1..80: mol_type = other DNA
ggaacaaggagccagcagtgctgaggaatggagaccccaggctgaaggccaactttgaggaggccatcttctccaagtac

SEQ ID NO: 25648 - DNA, 80 bp, synthetic construct
  misc_feature 1..80: note = Synthetic: >HCV.B4-cand-6130-6209
  source 1..80: mol_type = other DNA
aagctgttgaccactatgcagggcaactagcaactctggacatcagcacagaacccatgaaactggaggatgcagtttat

SEQ ID NO: 25649 - DNA, 80 bp, synthetic construct
  misc_feature 1..80: note = Synthetic: >HCV.B4-cand-6210-6289
  source 1..80: mol_type = other DNA
ggtactgaaggcttagaggctctagatctgaccacaagtgcagggtacccctatgttgcccttggcattaagaagagaga

SEQ ID NO: 25650 - DNA, 80 bp, synthetic construct
  misc_feature 1..80: note = Synthetic: >HCV.B4-cand-6290-6369
  source 1..80: mol_type = other DNA
tatcctatccaagaagaccaaggacctgacaaagctgaaggagtgcatggacaagtatgggttgaacctcccaatggtca

SEQ ID NO: 25651 - DNA, 80 bp, synthetic construct
  misc_feature 1..80: note = Synthetic: >HCV.B4-cand-6370-6449
  source 1..80: mol_type = other DNA
cttatgtgaaggatgagctgagatcagcagagaaggtggctaaaggcaaatccaggctgattgaggcatcaagtctaaat

SEQ ID NO: 25652 - DNA, 80 bp, synthetic construct
  misc_feature 1..80: note = Synthetic: >LR861845.1-cand-4470-4549
  source 1..80: mol_type = other DNA
tctaatactgttgtggatgttggccccactaggccacctgtggttattgaacctgtagggcctactgatccatctattgt

SEQ ID NO: 25653 - DNA, 80 bp, synthetic construct
  misc_feature 1..80: note = Synthetic: >LR861845.1-cand-4520-4599
  source 1..80: mol_type = other DNA
acctgtagggcctactgatccatctattgttacgttggtagaggattccagtgttgttgcctctggtgctccggttccca

SEQ ID NO: 25654 - DNA, 80 bp, synthetic construct
  misc_feature 1..80: note = Synthetic: >LR861845.1-cand-4600-4679
  source 1..80: mol_type = other DNA
catttaccggaacctctgggtttgaaattacgtcttctggtactaccacaccagctgtgttggacatcacacctaccgtg

SEQ ID NO: 25655 - DNA, 80 bp, synthetic construct
  misc_feature 1..80: note = Synthetic: >LR861845.1-cand-4680-4759
  source 1..80: mol_type = other DNA
gactctgtttctatttcgtcaactagttttacaaatcctgcattttctgatccctctattattgaggtgccccaaacagg

SEQ ID NO: 25656 - DNA, 80 bp, synthetic construct
  misc_feature 1..80: note = Synthetic: >LR861845.1-cand-4760-4839
  source 1..80: mol_type = other DNA
ggaggtatcaggtaatatatttgttggtacaccaacatcgggcagccatggatatgaggaaatacctttacaaacatttg

SEQ ID NO: 25657 - DNA, 80 bp, synthetic construct
  misc_feature 1..80: note = Synthetic: >LR861845.1-cand-4840-4919
  source 1..80: mol_type = other DNA
catcttctgggtcaggtacggaacccattagtagtacccccctccctactgtgcggcgggtagcgggtccccgcctgtat

SEQ ID NO: 25658 - DNA, 80 bp, synthetic construct
  misc_feature 1..80: note = Synthetic: >LR861845.1-cand-4920-4999
  source 1..80: mol_type = other DNA
agtagggctaatcaacaggtccgtgtgtccacctcacagtttttaacacatccctcatcgttggttacatttgataatcc

SEQ ID NO: 25659 - DNA, 80 bp, synthetic construct
  misc_feature 1..80: note = Synthetic: >LR861845.1-cand-5000-5079
  source 1..80: mol_type = other DNA
agcttatgagcccctggacaccacactatcctttgagcctaccagtaatgttcctgattccgattttatggatattattc

SEQ ID NO: 25660 - DNA, 80 bp, synthetic construct
  misc_feature 1..80: note = Synthetic: >LR861845.1-cand-5080-5159
  source 1..80: mol_type = other DNA
gtttgcataggccagcattatcctctagacgtggcactgttagatttagtagattgggtcaaagggcaaccatgtttaca

SEQ ID NO: 25661 - DNA, 80 bp, synthetic construct
  misc_feature 1..80: note = Synthetic: >LR861845.1-cand-5180-5259
  source 1..80: mol_type = other DNA
gggtagggtacatttttaccatgatataagccccattgctgctacagaggaaattgaattgcagcctttaattagtgcta

SEQ ID NO: 25662 - DNA, 80 bp, synthetic construct
  misc_feature 1..80: note = Synthetic: >LR861845.1-cand-5240-5319
  source 1..80: mol_type = other DNA
gcagcctttaattagtgctacagatgatagtgacctgtttgatgtatatgcagacttcccacctcctgcgtccactacac

SEQ ID NO: 25663 - DNA, 80 bp, synthetic construct
  misc_feature 1..80: note = Synthetic: >LR861845.1-cand-5320-5399
  source 1..80: mol_type = other DNA
ctagcactataaacaaatcatttacatatccaaggtattccttgaccatgccttctactgctgcatcctcttacagtaat

SEQ ID NO: 25664 - DNA, 80 bp, synthetic construct
  misc_feature 1..80: note = Synthetic: >LR861845.1-cand-5400-5479
  source 1..80: mol_type = other DNA
gttacagtaccattaacatctgcatgggatgtacctatatatactggcccggacattatattgccatcccatactcctat

SEQ ID NO: 25665 - DNA, 80 bp, synthetic construct
  misc_feature 1..80: note = Synthetic: >LR861845.1-cand-5480-5559
  source 1..80: mol_type = other DNA
gtggcctagtacatctcctaccaatgcttccaccaccacctatataggtattcatggcacacaatattatttatggccat

SEQ ID NO: 25666 - DNA, 80 bp, synthetic construct
  misc_feature 1..80: note = Synthetic: >LR861845.1-cand-5640-5719
  source 1..80: mol_type = other DNA
ggtatatcttccaccaccttctgtggccagagttgtcaacactgatgattatgtgtctcgcacaagcatattttatcatg

SEQ ID NO: 25667 - DNA, 80 bp, synthetic construct
  misc_feature 1..80: note = Synthetic: >LR861845.1-cand-5720-5799
  source 1..80: mol_type = other DNA
caggcagttcccgattattaactgtaggcaatccatattttagggttgtacctaatggtgcaggtaataaacaggctgtt

SEQ ID NO: 25668 - DNA, 80 bp, synthetic construct
  misc_feature 1..80: note = Synthetic: >MG717392.1-cand-2610-2689
  source 1..80: mol_type = other DNA
cgcttgagcaaggtggaatcattttaaaacaatggtgcacaacatcctgtgtctttggtgaccctggtgatattatgtca

SEQ ID NO: 25669 - DNA, 80 bp, synthetic construct
  misc_feature 1..80: note = Synthetic: >MG717392.1-cand-2690-2769
  source 1..80: mol_type = other DNA
actactacaggtatgaaatgtcctgaacatacaggttcctttaggaaaatttgtggttttgcaaccacaccaacctgtga

SEQ ID NO: 25670 - DNA, 80 bp, synthetic construct
  misc_feature 1..80: note = Synthetic: >MG717392.1-cand-2770-2849
  source 1..80: mol_type = other DNA
gtatcaaggtaatactatctcgggatttcagagaatgatggctacaagagactcttttcagtcattcaatgtaacagaac

SEQ ID NO: 25671 - DNA, 80 bp, synthetic construct
  misc_feature 1..80: note = Synthetic: >MG717392.1-cand-2850-2929
  source 1..80: mol_type = other DNA
cgcacattaccagtaatcgtcttgaatggattgatcctgatagcagtataaaagatcatattaatatggtcttaaaccga

SEQ ID NO: 25672 - DNA, 80 bp, synthetic construct
  misc_feature 1..80: note = Synthetic: >MG717392.1-cand-2920-2999
  source 1..80: mol_type = other DNA
cttaaaccgagatgtttcatttcaggatttgagtgataatccctgtaaagtggatctacatacgcagtcaattgatggag

SEQ ID NO: 25673 - DNA, 80 bp, synthetic construct
  misc_feature 1..80: note = Synthetic: >MG717392.1-cand-3020-3099
  source 1..80: mol_type = other DNA
ttcactctggtatgtacagtgggactgactgaatgtgcaaattttatcacttcaatcaaagcatgtgactcagccatgtg

SEQ ID NO: 25674 - DNA, 80 bp, synthetic construct
  misc_feature 1..80: note = Synthetic: >MG717392.1-cand-3130-3209
  source 1..80: mol_type = other DNA
gggatcgaacacagttaaagtcgtagggaaaggtgggcattctggctcactgtttaagtgctgccatgatactgattgca

SEQ ID NO: 25675 - DNA, 80 bp, synthetic construct
  misc_feature 1..80: note = Synthetic: >MG717392.1-cand-3170-3249
  source 1..80: mol_type = other DNA
tctggctcactgtttaagtgctgccatgatactgattgcactgaggagggactagcagcatctccgccccatttagatcg

SEQ ID NO: 25676 - DNA, 80 bp, synthetic construct
  misc_feature 1..80: note = Synthetic: >MG717392.1-cand-3210-3289
  source 1..80: mol_type = other DNA
ctgaggagggactagcagcatctccgccccatttagatcgggttactggttataaccagatagattcagacaaagtatat

SEQ ID NO: 25677 - DNA, 80 bp, synthetic construct
  misc_feature 1..80: note = Synthetic: >MG717392.1-cand-3330-3409
  source 1..80: mol_type = other DNA
ctaagtcaggtgaatggctcctgggcatcttaaatggtaattgggttgttgttgcagtgttgattgtgattctcatatta

SEQ ID NO: 25678 - DNA, 80 bp, synthetic construct
  misc_feature 1..80: note = Synthetic: >MG717392.1-cand-3450-3529
  source 1..80: mol_type = other DNA
gaaagaataagtccaactaacacagcatgtttataaccttataaccttaattatgtatgtatttatataaccatatcact

SEQ ID NO: 25679 - DNA, 80 bp, synthetic construct
  misc_feature 1..80: note = Synthetic: >MG717392.1-cand-3490-3569
  source 1..80: mol_type = other DNA
ataaccttaattatgtatgtatttatataaccatatcactaaatatttatactaactcttatttttttataagtattaac

SEQ ID NO: 25680 - DNA, 80 bp, synthetic construct
  misc_feature 1..80: note = Synthetic: >MG717393.1-cand-40-119
  source 1..80: mol_type = other DNA
tatagagaaatacatcagagagtcaaggatataaatccaggatgtgcatctgcaattgaatgtttggacctacttgatcg

SEQ ID NO: 25681 - DNA, 80 bp, synthetic construct
  misc_feature 1..80: note = Synthetic: >MG717393.1-cand-120-199
  source 1..80: mol_type = other DNA
gttatacgcagtcaggcatgatatggttgatcagatgatcaagcatgattggtcagacaataaggatgttgaacggccta

SEQ ID NO: 25682 - DNA, 80 bp, synthetic construct
  misc_feature 1..80: note = Synthetic: >MG717393.1-cand-200-279
  source 1..80: mol_type = other DNA
tcggacaagtcctattaatggcagggatccctaacgatgtaattcaagggatggaaaagaaagtgatccctaccagccct

SEQ ID NO: 25683 - DNA, 80 bp, synthetic construct
  misc_feature 1..80: note = Synthetic: >MG717393.1-cand-280-359
  source 1..80: mol_type = other DNA
tccgggcagatcctcaagagtttttttcgtatgacacctgataactataagatcacaggtgcacttattgagttcattga

SEQ ID NO: 25684 - DNA, 80 bp, synthetic construct
  misc_feature 1..80: note = Synthetic: >NC_001611.1-cand-16250-16329
  source 1..80: mol_type = other DNA
tagttgataacaatttgttaataagatgtgctgggctcaatgtcttaataagaagtgtaagaggactatctccaaatttg

SEQ ID NO: 25685 - DNA, 80 bp, synthetic construct
  misc_feature 1..80: note = Synthetic: >NC_001611.1-cand-16450-16529
  source 1..80: mol_type = other DNA
attcctagtttcatcatccatgagattgtagaagctttgggattgtctgacataagatgtctatgaatatgatttttgcc

SEQ ID NO: 25686 - DNA, 80 bp, synthetic construct
  misc_feature 1..80: note = Synthetic: >NC_001611.1-cand-16730-16809
  source 1..80: mol_type = other DNA
tatgctgtttatcgcacgcgtttggatctgcgccgtgcgtcaatagcatcgcaactattctattattattaattttagaa

SEQ ID NO: 25687 - DNA, 80 bp, synthetic construct
  misc_feature 1..80: note = Synthetic: >NC_001611.1-cand-16810-16889
  source 1..80: mol_type = other DNA
gctatatgtaatggataatttccatcatcatccgtctcatttggagagtatcctctatgaagaagttcttcgacaaatcg

SEQ ID NO: 25688 - DNA, 80 bp, synthetic construct
  misc_feature 1..80: note = Synthetic: >NC_001611.1-cand-16890-16969
  source 1..80: mol_type = other DNA
ttcatctagtcctttaattccacaatacgcatgtagaatgtgataatttccagaaggttcaatagcttgtagcatattcc

SEQ ID NO: 25689 - DNA, 80 bp, synthetic construct
  misc_feature 1..80: note = Synthetic: >NC_001611.1-cand-17050-17129
  source 1..80: mol_type = other DNA
gtataaaaattaatatttctatttctatttctactataatttactctctataacaaatgtcataacttagttcttttatg

SEQ ID NO: 25690 - DNA, 80 bp, synthetic construct
  misc_feature 1..80: note = Synthetic: >NC_001611.1-cand-17130-17209
  source 1..80: mol_type = other DNA
tcaagaaggcactggtttagttcatctatgaatgtcacaccataactaccacgcataccatacttagagttatgataaag

SEQ ID NO: 25691 - DNA, 80 bp, synthetic construct
  misc_feature 1..80: note = Synthetic: >NC_001611.1-cand-17240-17319
  source 1..80: mol_type = other DNA
attaatctttgttggatcagtctctaagttaacacatgtcacacaggatccatttatagttatatcacatgatgatttat

SEQ ID NO: 25692 - DNA, 80 bp, synthetic construct
  misc_feature 1..80: note = Synthetic: >NC_001611.1-cand-17270-17349
  source 1..80: mol_type = other DNA
aacacatgtcacacaggatccatttatagttatatcacatgatgatttatggtgaattgattccggaagatcgctattgt

SEQ ID NO: 25693 - DNA, 80 bp, synthetic construct
  misc_feature 1..80: note = Synthetic: >NC_001611.1-cand-17350-17429
  source 1..80: mol_type = other DNA
attttgtggttccacaattcatttccatacatgttattatcacactgatattatgatgaactttatccagccgctgggtt

SEQ ID NO: 25694 - DNA, 80 bp, synthetic construct
  misc_feature 1..80: note = Synthetic: >NC_001611.1-cand-17430-17509
  source 1..80: mol_type = other DNA
gtaaacaacataacagatagtttattatctttaccaactccctctgccgccgcaacgaatctctgatccgtatccatgat

SEQ ID NO: 25695 - DNA, 80 bp, synthetic construct
  misc_feature 1..80: note = Synthetic: >NC_001611.1-cand-17510-17589
  source 1..80: mol_type = other DNA
ggtcatgtttatttctagcccgtatccagtcaacactatgttagcatttctatcgatatagctttcactcatataacact

SEQ ID NO: 25696 - DNA, 80 bp, synthetic construct
  misc_feature 1..80: note = Synthetic: >NC_001611.1-cand-17590-17669
  source 1..80: mol_type = other DNA
caccaataatagtagaattaatgtcgtaatttacaccaatagtaagttcggcggcaaagtaccaatacctgtaatcttgt

SEQ ID NO: 25697 - DNA, 80 bp, synthetic construct
  misc_feature 1..80: note = Synthetic: >NC_001611.1-cand-17740-17819
  source 1..80: mol_type = other DNA
atttgtaaaccatcttacttaaaatatgtaacaatagtacgatgaatgagtaataagaaatatgaaatctatcttatata

SEQ ID NO: 25698 - DNA, 80 bp, synthetic construct
  misc_feature 1..80: note = Synthetic: >NC_001611.1-cand-17820-17899
  source 1..80: mol_type = other DNA
cacataattattctatcaattttaccaattagttagtgtttaataaaaatatgggaatctaattaatttttccttacaca

SEQ ID NO: 25699 - DNA, 80 bp, synthetic construct
  misc_feature 1..80: note = Synthetic: >NC_001611.1-cand-17900-17979
  source 1..80: mol_type = other DNA
atcgacgtacatgagtctgagttccttgtttttgctaattatttcatccaatttattatttttgacgatgtcaagatctt

SEQ ID NO: 25700 - DNA, 80 bp, synthetic construct
  misc_feature 1..80: note = Synthetic: >NC_001611.1-cand-49150-49229
  source 1..80: mol_type = other DNA
gacgtctaaaccttcttattttatcacctgtttgcatggtgatttgtctgctttcttttaacatgatgtaatctctaaat

SEQ ID NO: 25701 - DNA, 80 bp, synthetic construct
  misc_feature 1..80: note = Synthetic: >NC_001611.1-cand-49310-49389
  source 1..80: mol_type = other DNA
atctacatcagtcttgtattccaaattaaacatggcaacggatttaattttatattcctctattaggtccttgtcgacaa

SEQ ID NO: 25702 - DNA, 80 bp, synthetic construct
  misc_feature 1..80: note = Synthetic: >NC_001611.1-cand-49390-49469
  source 1..80: mol_type = other DNA
taacagagtgcagataatcatttaatccgtcgtacatggttggaagatgcgcattaacaaaatctttaattgtcttgatg

SEQ ID NO: 25703 - DNA, 80 bp, synthetic construct
  misc_feature 1..80: note = Synthetic: >NC_001611.1-cand-49950-50029
  source 1..80: mol_type = other DNA
gtgacgtttattatttcaggaggaaaaaacctaacattgagaatgtcggagttaatagcttccagatacagtgattttgg

SEQ ID NO: 25704 - DNA, 80 bp, synthetic construct
  misc_feature 1..80: note = Synthetic: >NC_001611.1-cand-50110-50189
  source 1..80: mol_type = other DNA
taagctttgataaagccttccttgcaaattccggatacatgaacatgtcgccgacatgaatgagtattttttttcagtat

SEQ ID NO: 25705 - DNA, 80 bp, synthetic construct
  misc_feature 1..80: note = Synthetic: >NC_001611.1-cand-50430-50509
  source 1..80: mol_type = other DNA
tagaatatccagtgcgtttctacaaaaaggacatgtaaacttgacaaaaattgtgactttgttattggtcaacctttgtt

SEQ ID NO: 25706 - DNA, 80 bp, synthetic construct
  misc_feature 1..80: note = Synthetic: >NC_001611.1-cand-50510-50589
  source 1..80: mol_type = other DNA
gtacaaattcctcggccattttaatatttaagtgatataaaacattctcgacttatttaactctttagtcgagatatatg

SEQ ID NO: 25707 - DNA, 80 bp, synthetic construct
  misc_feature 1..80: note = Synthetic: >NC_001611.1-cand-50590-50669
  source 1..80: mol_type = other DNA
gacgcagatagctatatgataaccaactacagaaggcgaacgctataaaaaacataattacgacgagcatattcataaat

SEQ ID NO: 25708 - DNA, 80 bp, synthetic construct
  misc_feature 1..80: note = Synthetic: >NC_001611.1-cand-50670-50749
  source 1..80: mol_type = other DNA
atttttattcagcattacttgatatagtaatattaggcacagtcaaacattcaaccactctcgatacatcaactctctca

SEQ ID NO: 25709 - DNA, 80 bp, synthetic construct
  misc_feature 1..80: note = Synthetic: >NC_001611.1-cand-51050-51129
  source 1..80: mol_type = other DNA
agttcatcgggaatgacatacatactatctttaatagaactcttttcatccagttgaatggactcgtccttaaccaactg

SEQ ID NO: 25710 - DNA, 80 bp, synthetic construct
  misc_feature 1..80: note = Synthetic: >NC_001611.1-cand-51130-51209
  source 1..80: mol_type = other DNA
attaataagatcttctattttatcattttccagatgatatgtatgtccattaaagttaaattgtgtagcgcttcttttta

SEQ ID NO: 25711 - DNA, 80 bp, synthetic construct
  misc_feature 1..80: note = Synthetic: >NC_001611.1-cand-51210-51289
  source 1..80: mol_type = other DNA
gtctagcagccaatactttaacatcactaatatcaatatacaaaggagatgatttatcgacggtattaagaattcgtttt

SEQ ID NO: 25712 - DNA, 80 bp, synthetic construct
  misc_feature 1..80: note = Synthetic: >NC_001611.1-cand-51290-51369
  source 1..80: mol_type = other DNA
tcaacatccgtcaaaaccaattcctttttgcctgtatcatccagtttgccattctttgtaaagaaattattttctactag

SEQ ID NO: 25713 - DNA, 80 bp, synthetic construct
  misc_feature 1..80: note = Synthetic: >NC_001611.1-cand-51370-51449
  source 1..80: mol_type = other DNA
actattaataagactgataaggattcctccataattgcacaatccaaacttttttacaaaactagactttacgagatcta

SEQ ID NO: 25714 - DNA, 80 bp, synthetic construct
  misc_feature 1..80: note = Synthetic: >NC_001611.1-cand-51450-51529
  source 1..80: mol_type = other DNA
caggaatgcgtacttcaggtttcttagcttgtgattttttcttttgtggacattttctagtgaccaactcatctaccatt

SEQ ID NO: 25715 - DNA, 80 bp, synthetic construct
  misc_feature 1..80: note = Synthetic: >NC_001611.1-cand-51530-51609
  source 1..80: mol_type = other DNA
tcattgattttagcagtgaaataagctttcaatgcacgggcactgatactattaaaaacgagttgatcttcaaattccac

SEQ ID NO: 25716 - DNA, 80 bp, synthetic construct
  misc_feature 1..80: note = Synthetic: >NC_001611.1-cand-57980-58059
  source 1..80: mol_type = other DNA
tcactaggaaaaccctcacacataaacctaaccgcgaagcaatatatatacagtgaacacacaataagctttgaatgtta

SEQ ID NO: 25717 - DNA, 80 bp, synthetic construct
  misc_feature 1..80: note = Synthetic: >NC_001611.1-cand-58860-58939
  source 1..80: mol_type = other DNA
gaatggcatacatagaagaagaaaagagaaatttagttactgctatacagatgtatactcctcctgatggatcatctggt

SEQ ID NO: 25718 - DNA, 80 bp, synthetic construct
  misc_feature 1..80: note = Synthetic: >NC_001611.1-cand-59020-59099
  source 1..80: mol_type = other DNA
tattcatggtaaggtcttagaaatagacaaaatattagaaaaagtgtattcatcgcctaatgtatcgataattatttctg

SEQ ID NO: 25719 - DNA, 80 bp, synthetic construct
  misc_feature 1..80: note = Synthetic: >NC_001611.1-cand-59100-59179
  source 1..80: mol_type = other DNA
ctccttatttggaatccagcgttactatacacaatgttactcacatttatgatatgggtagagtttttgttcccgctcct

SEQ ID NO: 25720 - DNA, 80 bp, synthetic construct
  misc_feature 1..80: note = Synthetic: >NC_001611.1-cand-59260-59339
  source 1..80: mol_type = other DNA
atacgtctatttctatgatctgtcttatatgaagtctatacagcgaataaattcagaatttctacataattatatattgt

SEQ ID NO: 25721 - DNA, 80 bp, synthetic construct
  misc_feature 1..80: note = Synthetic: >NC_001611.1-cand-59830-59909
  source 1..80: mol_type = other DNA
ccacatctccttttgtagatatgactaaacattttgcagaaaaaagtttattagtgtttagataatcgtatacttcatca

SEQ ID NO: 25722 - DNA, 80 bp, synthetic construct
  misc_feature 1..80: note = Synthetic: >NC_001611.1-cand-59990-60069
  source 1..80: mol_type = other DNA
tttcttgagatcccacatcatttcaaccagagaagttttatccaataatttacctcgtactataccacatacaaaactag

SEQ ID NO: 25723 - DNA, 80 bp, synthetic construct
  misc_feature 1..80: note = Synthetic: >NC_001611.1-cand-60070-60149
  source 1..80: mol_type = other DNA
attttgtagtgacgtcgtacctggcattcctaccaaacaaaattttacttttagtttttttagaaaattctaaggtagaa

SEQ ID NO: 25724 - DNA, 80 bp, synthetic construct
  misc_feature 1..80: note = Synthetic: >NC_001611.1-cand-60350-60429
  source 1..80: mol_type = other DNA
agacaatgataaagttatcatgtccatgagagacgcgtctccgtatcgtataaatatttcattagatgttagacgcttca

SEQ ID NO: 25725 - DNA, 80 bp, synthetic construct
  misc_feature 1..80: note = Synthetic: >NC_001611.1-cand-60550-60629
  source 1..80: mol_type = other DNA
taactatgatatctctattaattatagatgtatatatttcattcgtcaaggatattagtatcgacttgctatcgtcatta

SEQ ID NO: 25726 - DNA, 80 bp, synthetic construct
  misc_feature 1..80: note = Synthetic: >NC_001611.1-cand-60870-60949
  source 1..80: mol_type = other DNA
cctaaaatattatctaatgttggattaatctttaccataactgtataaaatggagacggagtcataactattttaccgtt

SEQ ID NO: 25727 - DNA, 80 bp, synthetic construct
  misc_feature 1..80: note = Synthetic: >NC_001611.1-cand-61270-61349
  source 1..80: mol_type = other DNA
tatctttaagttttccgttagaaaagaaccacgaaactaatgttctgattgcgtctgactccgtcgctgaattaatggat

SEQ ID NO: 25728 - DNA, 80 bp, synthetic construct
  misc_feature 1..80: note = Synthetic: >NC_001611.1-cand-61430-61509
  source 1..80: mol_type = other DNA
ttccaacaagtgagcaattcccaaaatttcatctatatcattctcaaatccgaaattagaaattcccaagtagatatctt

SEQ ID NO: 25729 - DNA, 80 bp, synthetic construct
  misc_feature 1..80: note = Synthetic: >NC_001611.1-cand-61510-61589
  source 1..80: mol_type = other DNA
ttttcatccgatcattaataaaaatacgaactttattcggtaagacgatcatttactaaggagtaaaataggaagtaatg

SEQ ID NO: 25730 - DNA, 80 bp, synthetic construct
  misc_feature 1..80: note = Synthetic: >NC_001611.1-cand-61590-61669
  source 1..80: mol_type = other DNA
ttcgtatatcgttatcatcgtataaattaaaggtgtgttttttaccattaagtgacattataattttaccaatattggaa

SEQ ID NO: 25731 - DNA, 80 bp, synthetic construct
  misc_feature 1..80: note = Synthetic: >NC_001611.1-cand-61750-61829
  source 1..80: mol_type = other DNA
ttcatcatttcgctgtataataatagcgttttctctatctgtttccattacagctgcctgaagtttattggtcggataat

SEQ ID NO: 25732 - DNA, 80 bp, synthetic construct
  misc_feature 1..80: note = Synthetic: >NC_001796.2-cand-3670-3749
  source 1..80: mol_type = other DNA
agaatgaaacaatagatatcaatcaatatacaaataagaaaaacttaggattaaagaataaattaatccttatccaaaat

SEQ ID NO: 25733 - DNA, 80 bp, synthetic construct
  misc_feature 1..80: note = Synthetic: >NC_001796.2-cand-3750-3829
  source 1..80: mol_type = other DNA
gagtataactaactctgcaatatacacattcccagaatcatcattctttgaaaatggtcatatagaaccattaccactca

SEQ ID NO: 25734 - DNA, 80 bp, synthetic construct
  misc_feature 1..80: note = Synthetic: >NC_001796.2-cand-3830-3909
  source 1..80: mol_type = other DNA
aagtcaatgaacagagaaaagcagtaccccacattagagttgccaaaatcggaaatccaccaaaacatggatctcggtat

SEQ ID NO: 25735 - DNA, 80 bp, synthetic construct
  misc_feature 1..80: note = Synthetic: >NC_001796.2-cand-3910-3989
  source 1..80: mol_type = other DNA
ttagatgtcttcctactaggcttcttcgaaatggaacgaatcaaagacaaatacgggagtgtaaatgatctcgacagtga

SEQ ID NO: 25736 - DNA, 80 bp, synthetic construct
  misc_feature 1..80: note = Synthetic: >NC_001796.2-cand-3990-4069
  source 1..80: mol_type = other DNA
cccgagttacaaagtttgtggctctggatcattaccaatcggattggctaaatacactgggaatgaccaggaattattac

SEQ ID NO: 25737 - DNA, 80 bp, synthetic construct
  misc_feature 1..80: note = Synthetic: >NC_001796.2-cand-4070-4149
  source 1..80: mol_type = other DNA
aagctgcaaccaaactggacatagaagtgagaagaacagtcaaagcgaaagagatggttgtgtatacagtacaaaatata

SEQ ID NO: 25738 - DNA, 80 bp, synthetic construct
  misc_feature 1..80: note = Synthetic: >NC_001796.2-cand-4150-4229
  source 1..80: mol_type = other DNA
aaaccagaactatacccatggtctaatagactaagaaaaggaatgctgttcgatgccaacaaagttgctcttgctcctca

SEQ ID NO: 25739 - DNA, 80 bp, synthetic construct
  misc_feature 1..80: note = Synthetic: >NC_001796.2-cand-4230-4309
  source 1..80: mol_type = other DNA
atgtcttccactagataggagcataaaatttagagtaatcttcgtgaattgtacggcaattggatcaataaccttgttca

SEQ ID NO: 25740 - DNA, 80 bp, synthetic construct
  misc_feature 1..80: note = Synthetic: >NC_001796.2-cand-4300-4379
  source 1..80: mol_type = other DNA
accttgttcaaaattcctaagtcaatggcatcattatctctacccaacacaatatcaatcaatctgcaggtacatatcaa

SEQ ID NO: 25741 - DNA, 80 bp, synthetic construct
  misc_feature 1..80: note = Synthetic: >NC_001796.2-cand-4390-4469
  source 1..80: mol_type = other DNA
cagactgattccaaagggatagttcaaattttgaatgagaagggcgaaaaatcactgaatttcatgatccatctcggatt

SEQ ID NO: 25742 - DNA, 80 bp, synthetic construct
  misc_feature 1..80: note = Synthetic: >NC_001796.2-cand-4470-4549
  source 1..80: mol_type = other DNA
gatcaagagaaaaataggcagaatgtactctgttgaatactgtaaacagaaaatcgagaaaatgagattgatattttctt

SEQ ID NO: 25743 - DNA, 80 bp, synthetic construct
  misc_feature 1..80: note = Synthetic: >NC_001796.2-cand-4550-4629
  source 1..80: mol_type = other DNA
taggattagttggaggaatcagtcttcatgtcaatgcaactggatccatatcaaaaacactagcaagtcagctggtattc

SEQ ID NO: 25744 - DNA, 80 bp, synthetic construct
  misc_feature 1..80: note = Synthetic: >NC_001796.2-cand-4630-4709
  source 1..80: mol_type = other DNA
aaaagggagatttgttatcctttaatggatctaaatccgcatcttaatctggttatctgggcttcatcagtagagattac

SEQ ID NO: 25745 - DNA, 80 bp, synthetic construct
  misc_feature 1..80: note = Synthetic: >NC_001796.2-cand-4710-4789
  source 1..80: mol_type = other DNA
aagagtggatgcaattttccaaccttctttacctggcgaattcagatactatcctaatattatcgcaaaaggagttggga

SEQ ID NO: 25746 - DNA, 80 bp, synthetic construct
  misc_feature 1..80: note = Synthetic: >NC_001796.2-cand-4790-4869
  source 1..80: mol_type = other DNA
aaatcaaacaatggaactaataatctctacttcaatctggacgcatccattaagccgaagcaaataagggataatcaaaa

SEQ ID NO: 25747 - DNA, 80 bp, synthetic construct
  misc_feature 1..80: note = Synthetic: >NC_001796.2-cand-4870-4949
  source 1..80: mol_type = other DNA
acttaggacaaaagaggtcaacaccaacaactattagcagtcatactcgcaggaacaagaaagaagggacaaaaaaagca

SEQ ID NO: 25748 - DNA, 80 bp, synthetic construct
  misc_feature 1..80: note = Synthetic: >NC_001897.1-cand-50-129
  source 1..80: mol_type = other DNA
tgagtttctctaggagagtccctttcccagccagaggtggctggtcaaacaataccaaacgtaactaaacatctaagata

SEQ ID NO: 25749 - DNA, 80 bp, synthetic construct
  misc_feature 1..80: note = Synthetic: >NC_001897.1-cand-130-209
  source 1..80: mol_type = other DNA
acatagccctatgcctggtctccaccagttgaaggcatcttgcaataaaatgggtggattaagacgcttaaagcatggag

SEQ ID NO: 25750 - DNA, 80 bp, synthetic construct
  misc_feature 1..80: note = Synthetic: >NC_001897.1-cand-210-289
  source 1..80: mol_type = other DNA
tcaattatcttttctaactagtgatcttcactgggtggcagatggcgtgccataactctattagtgggataccacgctcg

SEQ ID NO: 25751 - DNA, 80 bp, synthetic construct
  misc_feature 1..80: note = Synthetic: >NC_001897.1-cand-290-369
  source 1..80: mol_type = other DNA
tggatcttatgcccacacagccatcctctagtaagtttgcaaggtgtctgatgaggcgtgggaacttattggaaataatt

SEQ ID NO: 25752 - DNA, 80 bp, synthetic construct
  misc_feature 1..80: note = Synthetic: >NC_001897.1-cand-340-419
  source 1..80: mol_type = other DNA
atgaggcgtgggaacttattggaaataattacttgctgcgaagcatcctactgccagcggatcaacacctggtaacaggt

SEQ ID NO: 25753 - DNA, 80 bp, synthetic construct
  misc_feature 1..80: note = Synthetic: >NC_001897.1-cand-460-539
  source 1..80: mol_type = other DNA
gattggttaaaacctgagtaattatggaagatacttagtacctaccaacttggtaacagtgcaaacactagttgtaaggc

SEQ ID NO: 25754 - DNA, 80 bp, synthetic construct
  misc_feature 1..80: note = Synthetic: >NC_001897.1-cand-520-599
  source 1..80: mol_type = other DNA
gcaaacactagttgtaaggcccacgaaggatgcccagaaggtacccgcaggtaacaagagacactgtggatctgatctgg

SEQ ID NO: 25755 - DNA, 80 bp, synthetic construct
  misc_feature 1..80: note = Synthetic: >NC_001897.1-cand-660-739
  source 1..80: mol_type = other DNA
gggatccctggtttccttattttagtgtaaatgtcattatggagacaatcaagagcattgcagatatggcgaccggtgta

SEQ ID NO: 25756 - DNA, 80 bp, synthetic construct
  misc_feature 1..80: note = Synthetic: >NC_001897.1-cand-700-779
  source 1..80: mol_type = other DNA
ggagacaatcaagagcattgcagatatggcgaccggtgtaactaaaaccattgatgccacaatcaattctgttaatgaga

SEQ ID NO: 25757 - DNA, 80 bp, synthetic construct
  misc_feature 1..80: note = Synthetic: >NC_001897.1-cand-780-859
  source 1..80: mol_type = other DNA
tcatcactaacacagataatgcttcaggtggagatatattgactaaagttgctgatgatgcttcaaatattttagggccc

SEQ ID NO: 25758 - DNA, 80 bp, synthetic construct
  misc_feature 1..80: note = Synthetic: >NC_001897.1-cand-860-939
  source 1..80: mol_type = other DNA
aactgttatgcgacaacatctgagccagaaaacaaggatgtggtgcaagcaaccaccactgtgaacaccactaatctgac

SEQ ID NO: 25759 - DNA, 80 bp, synthetic construct
  misc_feature 1..80: note = Synthetic: >NC_001897.1-cand-940-1019
  source 1..80: mol_type = other DNA
acagcacccatcagcaccaacgttaccatttacaccagacttttcgaatgttgacacgtttcattcaatggcttatgata

SEQ ID NO: 25760 - DNA, 80 bp, synthetic construct
  misc_feature 1..80: note = Synthetic: >NC_001897.1-cand-1010-1089
  source 1..80: mol_type = other DNA
gcttatgatactacaactggtagtaagaaccctaataagttagttaggttaacgacacatgcttgggctagtaccctaca

SEQ ID NO: 25761 - DNA, 80 bp, synthetic construct
  misc_feature 1..80: note = Synthetic: >NC_001897.1-cand-1100-1179
  source 1..80: mol_type = other DNA
cagattgatcatgttaatctaccagttgacttctgggatgaacagaggaaaccagcttatggccatgctaaatattttgc

SEQ ID NO: 25762 - DNA, 80 bp, synthetic construct
  misc_feature 1..80: note = Synthetic: >NC_001897.1-cand-1150-1229
  source 1..80: mol_type = other DNA
accagcttatggccatgctaaatattttgcagctgttcggtgtggatttcattttcaagtacaggtcaatgtgaatcagg

SEQ ID NO: 25763 - DNA, 80 bp, synthetic construct
  misc_feature 1..80: note = Synthetic: >NC_001897.1-cand-1230-1309
  source 1..80: mol_type = other DNA
gaactgctgggagtgctttggtagtgtatgaaccaaagccagtagttgattatgataaggatttggaatttggagcattt

SEQ ID NO: 25764 - DNA, 80 bp, synthetic construct
  misc_feature 1..80: note = Synthetic: >NC_002640.1-cand-8870-8949
  source 1..80: mol_type = other DNA
aaagggccctacaccaggaagggaaatgtgaatcgtgtgtctataacatgatgggaaaacgtgagaaaaagttaggagag

SEQ ID NO: 25765 - DNA, 80 bp, synthetic construct
  misc_feature 1..80: note = Synthetic: >NC_002640.1-cand-8950-9029
  source 1..80: mol_type = other DNA
tttggcagagccaagggaagccgagcaatctggtacatgtggctgggagcgcggtttctggaatttgaagccctgggttt

SEQ ID NO: 25766 - DNA, 80 bp, synthetic construct
  misc_feature 1..80: note = Synthetic: >NC_002640.1-cand-9000-9079
  source 1..80: mol_type = other DNA
gcggtttctggaatttgaagccctgggttttttgaatgaagatcactggtttggcagagaaaattcatggagtggagtgg

SEQ ID NO: 25767 - DNA, 80 bp, synthetic construct
  misc_feature 1..80: note = Synthetic: >NC_002640.1-cand-9110-9189
  source 1..80: mol_type = other DNA
tcctggaggagatagacaagaaggatggagacctaatgtatgctgatgacacagcaggctgggacacaagaatcactgag

SEQ ID NO: 25768 - DNA, 80 bp, synthetic construct
  misc_feature 1..80: note = Synthetic: >NC_002640.1-cand-9190-9269
  source 1..80: mol_type = other DNA
gatgaccttcaaaatgaggaactgatcacggaacagatggctccccaccacaagatcctagccaaagccattttcaaact

SEQ ID NO: 25769 - DNA, 80 bp, synthetic construct
  misc_feature 1..80: note = Synthetic: >NC_002640.1-cand-9230-9309
  source 1..80: mol_type = other DNA
ctccccaccacaagatcctagccaaagccattttcaaactaacctatcaaaacaaagtggtgaaagtcctcagacccaca

SEQ ID NO: 25770 - DNA, 80 bp, synthetic construct
  misc_feature 1..80: note = Synthetic: >NC_002640.1-cand-9350-9429
  source 1..80: mol_type = other DNA
aaagaggtagtggacaagttggaacatatggtttgaacacattcaccaacatggaagttcaactcatccgccaaatggaa

SEQ ID NO: 25771 - DNA, 80 bp, synthetic construct
  misc_feature 1..80: note = Synthetic: >NC_002640.1-cand-9430-9509
  source 1..80: mol_type = other DNA
gctgaaggagtcatcacacaagatgacatgcagaacccaaaagggttgaaagaaagagttgagaaatggctgaaagagtg

SEQ ID NO: 25772 - DNA, 80 bp, synthetic construct
  misc_feature 1..80: note = Synthetic: >NC_002640.1-cand-9510-9589
  source 1..80: mol_type = other DNA
tggtgtcgacaggttaaagaggatggcaatcagtggagacgattgcgtggtgaagcccctagatgagaggtttggcactt

SEQ ID NO: 25773 - DNA, 80 bp, synthetic construct
  misc_feature 1..80: note = Synthetic: >NC_002640.1-cand-9590-9669
  source 1..80: mol_type = other DNA
ccctcctcttcttgaacgacatgggaaaggtgaggaaagacattccgcagtgggaaccatctaagggatggaaaaactgg

SEQ ID NO: 25774 - DNA, 80 bp, synthetic construct
  misc_feature 1..80: note = Synthetic: >NC_002640.1-cand-9670-9749
  source 1..80: mol_type = other DNA
caagaggttcctttttgctcccaccactttcacaagatctttatgaaggatggccgctcactagttgttccatgtagaaa

SEQ ID NO: 25775 - DNA, 80 bp, synthetic construct
  misc_feature 1..80: note = Synthetic: >NC_002640.1-cand-9750-9829
  source 1..80: mol_type = other DNA
ccaggatgaactgatagggagagccagaatctcgcagggagctggatggagcttaagagaaacagcctgcctgggcaaag

SEQ ID NO: 25776 - DNA, 80 bp, synthetic construct
  misc_feature 1..80: note = Synthetic: >NC_002640.1-cand-9830-9909
  source 1..80: mol_type = other DNA
cttacgcccagatgtggtcgcttatgtacttccacagaagggatctgcgtttagcctccatggccatatgctcagcagtt

SEQ ID NO: 25777 - DNA, 80 bp, synthetic construct
  misc_feature 1..80: note = Synthetic: >NC_002640.1-cand-9910-9989
  source 1..80: mol_type = other DNA
ccaacggaatggtttccaacaagcagaacaacatggtcaatccacgctcatcaccagtggatgaccactgaagatatgct

SEQ ID NO: 25778 - DNA, 80 bp, synthetic construct
  misc_feature 1..80: note = Synthetic: >NC_002640.1-cand-9990-10069
  source 1..80: mol_type = other DNA
caaagtgtggaacagagtgtggatagaagacaaccctaatatgactgacaagactccagtccattcgtgggaagatatac

SEQ ID NO: 25779 - DNA, 80 bp, synthetic construct
  misc_feature 1..80: note = Synthetic: >NC_002640.1-cand-10070-10149
  source 1..80: mol_type = other DNA
cttacctagggaaaagagaggatttgtggtgtggatccctgattggactttcttccagagccacctgggcgaagaacatt

SEQ ID NO: 25780 - DNA, 80 bp, synthetic construct
  misc_feature 1..80: note = Synthetic: >NC_002645.1-cand-2150-2229
  source 1..80: mol_type = other DNA
gtttgttaatgacaaaattactgaattccaattggattacagtattgatgtcattgataatgaaataattgtcaaaccta

SEQ ID NO: 25781 - DNA, 80 bp, synthetic construct
  misc_feature 1..80: note = Synthetic: >NC_002645.1-cand-2230-2309
  source 1..80: mol_type = other DNA
atatcagcctatgtgttccactttatgtgagagactatgttgacaaatgggatgatttttgcagacaatatagtaacgag

SEQ ID NO: 25782 - DNA, 80 bp, synthetic construct
  misc_feature 1..80: note = Synthetic: >NC_002645.1-cand-2310-2389
  source 1..80: mol_type = other DNA
tcttggtttgaggatgattacagggcttttatcagtgttttggacatcactgatgctgctgtgaaagctgcagagtctaa

SEQ ID NO: 25783 - DNA, 80 bp, synthetic construct
  misc_feature 1..80: note = Synthetic: >NC_002645.1-cand-2390-2469
  source 1..80: mol_type = other DNA
agctttcgttgatactattgttccaccttgcccatctattttgaaagttatagatggaggcaaaatatggaatggtgtta

SEQ ID NO: 25784 - DNA, 80 bp, synthetic construct
  misc_feature 1..80: note = Synthetic: >NC_002645.1-cand-2470-2549
  source 1..80: mol_type = other DNA
ttaaaaatgttaactctgttagagactggcttaagtctttgaagttaaatctcacacaacagggtttgcttggaacatgt

SEQ ID NO: 25785 - DNA, 80 bp, synthetic construct
  misc_feature 1..80: note = Synthetic: >NC_002645.1-cand-2550-2629
  source 1..80: mol_type = other DNA
gcaaagcgttttaaacgttggcttggcattttgctagaggcctataatgcgtttttagacactgtggtttctactgttaa

SEQ ID NO: 25786 - DNA, 80 bp, synthetic construct
  misc_feature 1..80: note = Synthetic: >NC_002645.1-cand-2630-2709
  source 1..80: mol_type = other DNA
aattggtggcttgacctttaaaacatatgcttttgataaaccttacattgtgatacgtgatatcgtgtgtaaggttgaaa

SEQ ID NO: 25787 - DNA, 80 bp, synthetic construct
  misc_feature 1..80: note = Synthetic: >NC_002645.1-cand-2710-2789
  source 1..80: mol_type = other DNA
ataaaacagaagcagaatggattgagctttttccacataatgacaggattaagtcttttagtactttcgagagtgcttac

SEQ ID NO: 25788 - DNA, 80 bp, synthetic construct
  misc_feature 1..80: note = Synthetic: >NC_002645.1-cand-2780-2859
  source 1..80: mol_type = other DNA
gagtgcttacatgccaattgcagaccctacacattttgacattgaagaagttgaacttttagatgcagagtttgtagaac

SEQ ID NO: 25789 - DNA, 80 bp, synthetic construct
  misc_feature 1..80: note = Synthetic: >NC_002645.1-cand-2860-2939
  source 1..80: mol_type = other DNA
caggctgtggtggtattttggcagtaatagatgagcacgtcttttataagaaggatggtgtttattatccatcaaatggt

SEQ ID NO: 25790 - DNA, 80 bp, synthetic construct
  misc_feature 1..80: note = Synthetic: >NC_002645.1-cand-2940-3019
  source 1..80: mol_type = other DNA
actaacattctacctgttgcatttacaaaagccgctggtggtaaagtttcattttctgatgacgttgaagtaaaagacat

SEQ ID NO: 25791 - DNA, 80 bp, synthetic construct
  misc_feature 1..80: note = Synthetic: >NC_002645.1-cand-3020-3099
  source 1..80: mol_type = other DNA
tgaacctgtttacagagtcaagctttgctttgagtttgaagatgaaaaacttgtagatgtttgtgaaaaggcaattggca

SEQ ID NO: 25792 - DNA, 80 bp, synthetic construct
  misc_feature 1..80: note = Synthetic: >NC_002645.1-cand-3100-3179
  source 1..80: mol_type = other DNA
agaaaattaaacatgaaggtgactgggatagcttttgtaagactattcaatcagcactttctgttgtttcttgctatgta

SEQ ID NO: 25793 - DNA, 80 bp, synthetic construct
  misc_feature 1..80: note = Synthetic: >NC_002645.1-cand-3180-3259
  source 1..80: mol_type = other DNA
aatctacctacttattacatttatgatgaagaaggcggtaatgacttgagtttgcccgttatgatttctgaatggcctct

SEQ ID NO: 25794 - DNA, 80 bp, synthetic construct
  misc_feature 1..80: note = Synthetic: >NC_002645.1-cand-3260-3339
  source 1..80: mol_type = other DNA
ttctgttcaacaagctcaacaagaagctactttacctgatattgctgaggatgttgttgaccaagttgaagaagtcaata

SEQ ID NO: 25795 - DNA, 80 bp, synthetic construct
  misc_feature 1..80: note = Synthetic: >NC_002645.1-cand-3340-3419
  source 1..80: mol_type = other DNA
gcatttttgacattgagacagtggatgttaaacatgatgtgagtccttttgaaatgccatttgaagagttaaatggttta

SEQ ID NO: 25796 - DNA, 80 bp, synthetic construct
  misc_feature 1..80: note = Synthetic: >NC_002645.1-cand-7250-7329
  source 1..80: mol_type = other DNA
gtccactttgtcagttgattttaatggtgtcttacacaaggcatacattgatgtactacgtaatagctttggtaaagatc

SEQ ID NO: 25797 - DNA, 80 bp, synthetic construct
  misc_feature 1..80: note = Synthetic: >NC_002645.1-cand-7330-7409
  source 1..80: mol_type = other DNA
ttaatgctaatatgtctttagccgagtgcaagagagctttaggcctgtctattagtgatcatgaatttactagtgctatt

SEQ ID NO: 25798 - DNA, 80 bp, synthetic construct
  misc_feature 1..80: note = Synthetic: >NC_002645.1-cand-7410-7489
  source 1..80: mol_type = other DNA
tctaatgcacatcgttgtgacgtgttgttatctgatttgtcatttaacaactttgtcagttcgtatgctaaacctgagga

SEQ ID NO: 25799 - DNA, 80 bp, synthetic construct
  misc_feature 1..80: note = Synthetic: >NC_002645.1-cand-7490-7569
  source 1..80: mol_type = other DNA
aaaattatcagcttatgacttggcgtgttgtatgcgtgcaggtgctaaggttgttaatgccaatgttctgacaaaggacc

SEQ ID NO: 25800 - DNA, 80 bp, synthetic construct
  misc_feature 1..80: note = Synthetic: >NC_002645.1-cand-7580-7659
  source 1..80: mol_type = other DNA
tgtttggcatgcaaaggattttaacagtctttctgctgaaggtcgcaagtatattgtaaaaactagcaaagctaagggtt

SEQ ID NO: 25801 - DNA, 80 bp, synthetic construct
  misc_feature 1..80: note = Synthetic: >NC_002645.1-cand-7660-7739
  source 1..80: mol_type = other DNA
tgactttcttgttgacaattaatgaaaaccaagctgtcacgcaaatacctgcaactagcattgttgctaagcaaggtgct

SEQ ID NO: 25802 - DNA, 80 bp, synthetic construct
  misc_feature 1..80: note = Synthetic: >NC_002645.1-cand-7740-7819
  source 1..80: mol_type = other DNA
ggtgatgctggccattcattaacatggctgtggctactgtgtggtcttgtgtgtttgattcaattctacttgtgcttttt

SEQ ID NO: 25803 - DNA, 80 bp, synthetic construct
  misc_feature 1..80: note = Synthetic: >NC_002645.1-cand-7820-7899
  source 1..80: mol_type = other DNA
catgccctattttatgtacgatatcgtgagtagttttgagggttatgattttaagtatatagaaaatggtcagttgaaga

SEQ ID NO: 25804 - DNA, 80 bp, synthetic construct
  misc_feature 1..80: note = Synthetic: >NC_002645.1-cand-7900-7979
  source 1..80: mol_type = other DNA
attttgaagcgccacttaaatgcgtcagaaacgtttttgaaaactttgaggactggcattatgctaagtttggcttcaca

SEQ ID NO: 25805 - DNA, 80 bp, synthetic construct
  misc_feature 1..80: note = Synthetic: >NC_002645.1-cand-7980-8059
  source 1..80: mol_type = other DNA
cctttaaacaagcaaagctgtcctattgtagttggagtttctgaaattgttaatactgtcgctggcattccatctaatgt

SEQ ID NO: 25806 - DNA, 80 bp, synthetic construct
  misc_feature 1..80: note = Synthetic: >NC_002645.1-cand-8060-8139
  source 1..80: mol_type = other DNA
gtatcttgttggtaaaactttaatttttacactacaagctgcttttggtaatgctggtgtttgttatgacatttttggag

SEQ ID NO: 25807 - DNA, 80 bp, synthetic construct
  misc_feature 1..80: note = Synthetic: >NC_002645.1-cand-8140-8219
  source 1..80: mol_type = other DNA
tcacaacacctgaaaagtgcatttttacttctgcttgtactagattagaaggtttgggtggtaacaatgtttattgttat

SEQ ID NO: 25808 - DNA, 80 bp, synthetic construct
  misc_feature 1..80: note = Synthetic: >NC_002645.1-cand-8220-8299
  source 1..80: mol_type = other DNA
aacacagcgcttatggaaggttctttgccttacagttcaatacaagctaatgcatattataaatatgacaatggcaattt

SEQ ID NO: 25809 - DNA, 80 bp, synthetic construct
  misc_feature 1..80: note = Synthetic: >NC_002645.1-cand-8300-8379
  source 1..80: mol_type = other DNA
tattaagttgccagaagttattgcacaaggctttggttttagaacagtgcgtactattgccaccaaatactgccgcgtag

SEQ ID NO: 25810 - DNA, 80 bp, synthetic construct
  misc_feature 1..80: note = Synthetic: >NC_002645.1-cand-8380-8459
  source 1..80: mol_type = other DNA
gtgaatgtgttgaatccaatgcaggtgtgtgttttggctttgacaagtggtttgttaacgatggacgtgttgccaatggt

SEQ ID NO: 25811 - DNA, 80 bp, synthetic construct
  misc_feature 1..80: note = Synthetic: >NC_002645.1-cand-8460-8539
  source 1..80: mol_type = other DNA
tacgtttgtggtactggtttgtggaaccttgtatttaacatactttccatgttttcatcttcattctctgttgctgcaat

SEQ ID NO: 25812 - DNA, 80 bp, synthetic construct
  misc_feature 1..80: note = Synthetic: >NC_002645.1-cand-11090-11169
  source 1..80: mol_type = other DNA
gttggcctttttcttgtctaagcatagtgattttggtcttggtgatcttgtcgattcttattttgagaacgactccattt

SEQ ID NO: 25813 - DNA, 80 bp, synthetic construct
  misc_feature 1..80: note = Synthetic: >NC_002645.1-cand-11170-11249
  source 1..80: mol_type = other DNA
tgcaaagtgttgcatcttcttttgttggtatgccatcttttgttgcatatgaaacagcaagacaagagtatgaaaatgct

SEQ ID NO: 25814 - DNA, 80 bp, synthetic construct
  misc_feature 1..80: note = Synthetic: >NC_002645.1-cand-11250-11329
  source 1..80: mol_type = other DNA
gttgcaaatggttcctcaccacaaataatcaaacaattgaagaaggctatgaatgttgcaaaagctgagtttgacaggga

SEQ ID NO: 25815 - DNA, 80 bp, synthetic construct
  misc_feature 1..80: note = Synthetic: >NC_002645.1-cand-11310-11389
  source 1..80: mol_type = other DNA
aaagctgagtttgacagggaatcatctgttcaaaagaaaattaacagaatggctgaacaagctgctgcagctatgtacaa

SEQ ID NO: 25816 - DNA, 80 bp, synthetic construct
  misc_feature 1..80: note = Synthetic: >NC_002645.1-cand-11390-11469
  source 1..80: mol_type = other DNA
agaagcacgtgctgttaatagaaaatcaaaagttgttagtgccatgcatagtttactctttggcatgctccgacgtttgg

SEQ ID NO: 25817 - DNA, 80 bp, synthetic construct
  misc_feature 1..80: note = Synthetic: >NC_002645.1-cand-11470-11549
  source 1..80: mol_type = other DNA
acatgtctagtgttgacactatccttaatatggcacgtaatggtgttgtccctctttccgttatccctgctacttctgca

SEQ ID NO: 25818 - DNA, 80 bp, synthetic construct
  misc_feature 1..80: note = Synthetic: >NC_002645.1-cand-11540-11619
  source 1..80: mol_type = other DNA
tacttctgcagccaggctcgtcgtcgtagtaccagatcatgattcatttgtgaaaatgatggtagatggttttgtgcact

SEQ ID NO: 25819 - DNA, 80 bp, synthetic construct
  misc_feature 1..80: note = Synthetic: >NC_002645.1-cand-11620-11699
  source 1..80: mol_type = other DNA
acgctggtgttgtttggacattacaggaagttaaggataatgatggtaagaatgtgcatcttaaagatgttacaaaggaa

SEQ ID NO: 25820 - DNA, 80 bp, synthetic construct
  misc_feature 1..80: note = Synthetic: >NC_002645.1-cand-11700-11779
  source 1..80: mol_type = other DNA
aaccaggaaatacttgtttggcctctgattttgacttgtgaacgtgtcgttaaattgcagaacaatgaaataatgccggg

SEQ ID NO: 25821 - DNA, 80 bp, synthetic construct
  misc_feature 1..80: note = Synthetic: >NC_002645.1-cand-11780-11859
  source 1..80: mol_type = other DNA
caagatgaaggtcaaggccaccaaaggtgaaggtgatggaggcattactagtgaaggtaatgctctatacaacaatgaag

SEQ ID NO: 25822 - DNA, 80 bp, synthetic construct
  misc_feature 1..80: note = Synthetic: >NC_002645.1-cand-11860-11939
  source 1..80: mol_type = other DNA
gtggacgtgcattcatgtatgcatatgtgactacgaagcctggcatgaagtatgttaaatgggaacatgactctggtgtg

SEQ ID NO: 25823 - DNA, 80 bp, synthetic construct
  misc_feature 1..80: note = Synthetic: >NC_002645.1-cand-11940-12019
  source 1..80: mol_type = other DNA
gttacagttgaattggaaccaccttgcagatttgttatagacacacctactggaccccaaattaagtatctttattttgt

SEQ ID NO: 25824 - DNA, 80 bp, synthetic construct
  misc_feature 1..80: note = Synthetic: >NC_002645.1-cand-12020-12099
  source 1..80: mol_type = other DNA
taagaatcttaacaatttaaggagaggtgctgttttgggttacattggtgccactgtgagattgcaagctggcaaacaga

SEQ ID NO: 25825 - DNA, 80 bp, synthetic construct
  misc_feature 1..80: note = Synthetic: >NC_002645.1-cand-12100-12179
  source 1..80: mol_type = other DNA
ctgagtttgtttcaaactcccatttattaacacattgttcttttgctgttgacccagctgcagcctatcttgatgctgtt

SEQ ID NO: 25826 - DNA, 80 bp, synthetic construct
  misc_feature 1..80: note = Synthetic: >NC_002645.1-cand-12180-12259
  source 1..80: mol_type = other DNA
aaacaaggcgcaaaacctgttggcaattgtgtaaagatgttgactaatggttctggtagcggtcaggctattacttgtac

SEQ ID NO: 25827 - DNA, 80 bp, synthetic construct
  misc_feature 1..80: note = Synthetic: >NC_002645.1-cand-12260-12339
  source 1..80: mol_type = other DNA
cattgattccaacactacgcaggacacatatggtggcgcgtctgtttgtatttattgcagagcacatgttgcacatccaa

SEQ ID NO: 25828 - DNA, 80 bp, synthetic construct
  misc_feature 1..80: note = Synthetic: >NC_002645.1-cand-14930-15009
  source 1..80: mol_type = other DNA
cagattgtagatgaaaatggtaagtattatctaccatatccagatcctagccgtattatttctgctggtgtttttgtgga

SEQ ID NO: 25829 - DNA, 80 bp, synthetic construct
  misc_feature 1..80: note = Synthetic: >NC_002645.1-cand-15010-15089
  source 1..80: mol_type = other DNA
tgacatcactaagactgatgctgtcattcttttggaacgctatgtttctctggctatagatgcctacccattgtctaagc

SEQ ID NO: 25830 - DNA, 80 bp, synthetic construct
  misc_feature 1..80: note = Synthetic: >NC_002645.1-cand-15090-15169
  source 1..80: mol_type = other DNA
atcctaaacctgagtacaggaaggtgttttacgcattgttagactgggtcaaacatctcaacaagactcttaacgaaggt

SEQ ID NO: 25831 - DNA, 80 bp, synthetic construct
  misc_feature 1..80: note = Synthetic: >NC_002645.1-cand-15170-15249
  source 1..80: mol_type = other DNA
gttttggagtctttttctgttacacttttagatgaacatgagtctaagttttgggatgaaagcttttatgctagtatgta

SEQ ID NO: 25832 - DNA, 80 bp, synthetic construct
  misc_feature 1..80: note = Synthetic: >NC_002645.1-cand-15250-15329
  source 1..80: mol_type = other DNA
tgagaagtctacagtattacaagctgctggtctttgtgtagtatgtggttctcaaacagttctaagatgcggtgattgtt

SEQ ID NO: 25833 - DNA, 80 bp, synthetic construct
  misc_feature 1..80: note = Synthetic: >NC_002645.1-cand-15330-15409
  source 1..80: mol_type = other DNA
tacgcagaccgatgttgtgcactaagtgcgcctatgatcatgtgtttggcactgatcataagttcattttagctattaca

SEQ ID NO: 25834 - DNA, 80 bp, synthetic construct
  misc_feature 1..80: note = Synthetic: >NC_002645.1-cand-15410-15489
  source 1..80: mol_type = other DNA
ccatatgtgtgtaacacatctggctgcaatgtaaatgacgttacaaaactgtatcttggaggtttgaattattactgtgt

SEQ ID NO: 25835 - DNA, 80 bp, synthetic construct
  misc_feature 1..80: note = Synthetic: >NC_002645.1-cand-15490-15569
  source 1..80: mol_type = other DNA
agaccacaaaccacatctttcattcccactgtgttcagctggtaatgtctttggtttgtacaaaagttctgctttgggtt

SEQ ID NO: 25836 - DNA, 80 bp, synthetic construct
  misc_feature 1..80: note = Synthetic: >NC_002645.1-cand-15570-15649
  source 1..80: mol_type = other DNA
ccatggacattgatgtctttaacaaactttctacctctgattggtctgacattcgcgactacaagcttgctaatgatgca

SEQ ID NO: 25837 - DNA, 80 bp, synthetic construct
  misc_feature 1..80: note = Synthetic: >NC_002645.1-cand-15650-15729
  source 1..80: mol_type = other DNA
aaagagtcactaaggttgtttgcagctgaaacggtcaaggctaaagaggaaagtgttaagtcatcatacgcttatgctac

SEQ ID NO: 25838 - DNA, 80 bp, synthetic construct
  misc_feature 1..80: note = Synthetic: >NC_002645.1-cand-15730-15809
  source 1..80: mol_type = other DNA
cctaaaggagattgtaggtcctaaggaacttttgctcttatgggaaagtggaaaagccaaaccaccgttaaaccgtaatt

SEQ ID NO: 25839 - DNA, 80 bp, synthetic construct
  misc_feature 1..80: note = Synthetic: >NC_002645.1-cand-15810-15889
  source 1..80: mol_type = other DNA
ctgtttttacatgcttccaaattacaaaagactccaagtttcaagttggtgagtttgtgtttgagaaagtagattacggt

SEQ ID NO: 25840 - DNA, 80 bp, synthetic construct
  misc_feature 1..80: note = Synthetic: >NC_002645.1-cand-15890-15969
  source 1..80: mol_type = other DNA
tctgatacggttacttacaaatccactgctactactaagttagtaccaggtatgttgtttattttgacttctcataatgt

SEQ ID NO: 25841 - DNA, 80 bp, synthetic construct
  misc_feature 1..80: note = Synthetic: >NC_002645.1-cand-15970-16049
  source 1..80: mol_type = other DNA
tgctccacttagagcgccaacaatggcaaaccaggagaaatattctaccatttacaagttgcacccatcatttaatgtta

SEQ ID NO: 25842 - DNA, 80 bp, synthetic construct
  misc_feature 1..80: note = Synthetic: >NC_002645.1-cand-16050-16129
  source 1..80: mol_type = other DNA
gtgatgcttatgcaaatcttgtaccttattaccaacttattggcaaacagcgtataaccacaatacagggtcctcctggt

SEQ ID NO: 25843 - DNA, 80 bp, synthetic construct
  misc_feature 1..80: note = Synthetic: >NC_002645.1-cand-16120-16199
  source 1..80: mol_type = other DNA
tcctcctggtagtggaaaatcgcattgttctattggtattggtgtgtattaccctggagcgaggatcgtgttcaccgctt

SEQ ID NO: 25844 - DNA, 80 bp, synthetic construct
  misc_feature 1..80: note = Synthetic: >NC_002645.1-cand-22600-22679
  source 1..80: mol_type = other DNA
tgcccacaagtggtagtagagtggctggtcgcagtgccatagaagacatactttttagcaaacttgttacttctggactt

SEQ ID NO: 25845 - DNA, 80 bp, synthetic construct
  misc_feature 1..80: note = Synthetic: >NC_002645.1-cand-22680-22759
  source 1..80: mol_type = other DNA
ggcactgtggacgcagactacaaaaagtgcactaagggtctttccattgctgacttggcttgtgctcaatattataatgg

SEQ ID NO: 25846 - DNA, 80 bp, synthetic construct
  misc_feature 1..80: note = Synthetic: >NC_002645.1-cand-22760-22839
  source 1..80: mol_type = other DNA
cattatggttttgcctggcgtcgctgatgctgaacgaatggccatgtatacaggttctttaattggtggaattgctttag

SEQ ID NO: 25847 - DNA, 80 bp, synthetic construct
  misc_feature 1..80: note = Synthetic: >NC_002645.1-cand-22840-22919
  source 1..80: mol_type = other DNA
gaggtctaacatcagccgtttcaataccattttcattagcaattcaggcacgtttaaattatgttgcattgcagactgat

SEQ ID NO: 25848 - DNA, 80 bp, synthetic construct
  misc_feature 1..80: note = Synthetic: >NC_002645.1-cand-22920-22999
  source 1..80: mol_type = other DNA
gttttacaagaaaatcagaaaattcttgctgcatcttttaacaaagcaatgaccaacatagtagatgcctttactggtgt

SEQ ID NO: 25849 - DNA, 80 bp, synthetic construct
  misc_feature 1..80: note = Synthetic: >NC_002645.1-cand-23000-23079
  source 1..80: mol_type = other DNA
taatgatgctattacacaaacttcacaagccctacaaacagttgctactgcacttaacaagatccaggatgttgttaatc

SEQ ID NO: 25850 - DNA, 80 bp, synthetic construct
  misc_feature 1..80: note = Synthetic: >NC_002645.1-cand-23080-23159
  source 1..80: mol_type = other DNA
aacaaggcaactcattgaaccatttaacttctcagttgaggcagaattttcaagctatctctagctctattcaggctatc

SEQ ID NO: 25851 - DNA, 80 bp, synthetic construct
  misc_feature 1..80: note = Synthetic: >NC_002645.1-cand-23160-23239
  source 1..80: mol_type = other DNA
tatgacagacttgacactattcaggctgatcaacaagtagataggctgattactggtagattggctgctttgaatgtatt

SEQ ID NO: 25852 - DNA, 80 bp, synthetic construct
  misc_feature 1..80: note = Synthetic: >NC_002645.1-cand-23240-23319
  source 1..80: mol_type = other DNA
cgtttctcatacattgactaagtacactgaagttcgtgcttccagacagcttgcacaacaaaaagtgaatgagtgtgtca

SEQ ID NO: 25853 - DNA, 80 bp, synthetic construct
  misc_feature 1..80: note = Synthetic: >NC_002645.1-cand-23310-23389
  source 1..80: mol_type = other DNA
gagtgtgtcaaatcccagtctaagcgttatggcttctgtggaaatggcactcacattttctcaattgttaatgctgctcc

SEQ ID NO: 25854 - DNA, 80 bp, synthetic construct
  misc_feature 1..80: note = Synthetic: >NC_002645.1-cand-23400-23479
  source 1..80: mol_type = other DNA
gtttttctccacactgtcttgttgccgacacaatataaggatgttgaagcgtggtctgggttgtgcgttgatggtacaaa

SEQ ID NO: 25855 - DNA, 80 bp, synthetic construct
  misc_feature 1..80: note = Synthetic: >NC_002645.1-cand-23480-23559
  source 1..80: mol_type = other DNA
cggttatgtgttgcgacaacctaatcttgctctttacaaagaaggcaattattatagaatcacatctcgcataatgtttg

SEQ ID NO: 25856 - DNA, 80 bp, synthetic construct
  misc_feature 1..80: note = Synthetic: >NC_002645.1-cand-23560-23639
  source 1..80: mol_type = other DNA
aaccacgtattcctaccatggcagattttgttcaaattgaaaattgcaatgtcacatttgttaacatttctcgctctgag

SEQ ID NO: 25857 - DNA, 80 bp, synthetic construct
  misc_feature 1..80: note = Synthetic: >NC_002645.1-cand-23650-23729
  source 1..80: mol_type = other DNA
ttgtgccagagtatattgatgttaataagacgctgcaagaattaagttacaaattgccaaattacactgttccagaccta

SEQ ID NO: 25858 - DNA, 80 bp, synthetic construct
  misc_feature 1..80: note = Synthetic: >NC_002645.1-cand-23730-23809
  source 1..80: mol_type = other DNA
gttgtcgaacagtacaaccagactattttgaatttgaccagtgaaattagcacccttgaaaataaatctgcggagcttaa

SEQ ID NO: 25859 - DNA, 80 bp, synthetic construct
  misc_feature 1..80: note = Synthetic: >NC_002645.1-cand-23810-23889
  source 1..80: mol_type = other DNA
ttacactgttcaaaaattgcaaactctgattgacaacataaatagcacattagtcgacttaaagtggctcaaccgggttg

SEQ ID NO: 25860 - DNA, 80 bp, synthetic construct
  misc_feature 1..80: note = Synthetic: >NC_002645.1-cand-26480-26559
  source 1..80: mol_type = other DNA
ccagagaccttgaccacaactttggaagtgcaggtgttgtggccaatggtgttaaagctaaaggctatccacaatttgct

SEQ ID NO: 25861 - DNA, 80 bp, synthetic construct
  misc_feature 1..80: note = Synthetic: >NC_002645.1-cand-26560-26639
  source 1..80: mol_type = other DNA
gagcttgtgccgtcaacagctgctatgctgtttgatagtcacattgtttccaaagagtcaggcaacactgtggtcttgac

SEQ ID NO: 25862 - DNA, 80 bp, synthetic construct
  misc_feature 1..80: note = Synthetic: >NC_002645.1-cand-26640-26719
  source 1..80: mol_type = other DNA
tttcactactagagtgactgtgcccaaagaccatccacacttgggtaagtttcttgaggagttaaatgcattcactagag

SEQ ID NO: 25863 - DNA, 80 bp, synthetic construct
  misc_feature 1..80: note = Synthetic: >NC_002645.1-cand-26720-26799
  source 1..80: mol_type = other DNA
aaatgcaacaacatcctcttcttaaccctagtgcactagaattcaacccatctcaaacttcacctgcaactgctgaacca

SEQ ID NO: 25864 - DNA, 80 bp, synthetic construct
  misc_feature 1..80: note = Synthetic: >NC_002645.1-cand-26800-26879
  source 1..80: mol_type = other DNA
gtgcgtgatgaagtttctattgaaactgacataattgatgaagtaaactaaacatgccactgtgttgtttgaaattcagg

SEQ ID NO: 25865 - DNA, 80 bp, synthetic construct
  misc_feature 1..80: note = Synthetic: >NC_002645.1-cand-26880-26959
  source 1..80: mol_type = other DNA
ctttagttggaattttgcttttgttctttcttttattatctttcttttgcctgtttttagagagatttggcgccttggtg

SEQ ID NO: 25866 - DNA, 80 bp, synthetic construct
  misc_feature 1..80: note = Synthetic: >NC_002645.1-cand-26960-27039
  source 1..80: mol_type = other DNA
ccgtagatgaatacattgcttttctctgatctatgtatgatggtacgatcagagctgcttttaattaacatgatcccttg

SEQ ID NO: 25867 - DNA, 80 bp, synthetic construct
  misc_feature 1..80: note = Synthetic: >NC_002645.1-cand-27040-27119
  source 1..80: mol_type = other DNA
ctttggcttgacaaggatctagtcttatacacaatggtaagccagtggtagtaaaggtataagaaatttgctactatgtt

SEQ ID NO: 25868 - DNA, 80 bp, synthetic construct
  misc_feature 1..80: note = Synthetic: >NC_002645.1-cand-27120-27199
  source 1..80: mol_type = other DNA
actgaacctaggtgaacgctagtataactcattacaaatgtgctggagtaatcaaagatcgcattgacgagccaacaatg

SEQ ID NO: 25869 - DNA, 80 bp, synthetic construct
  misc_feature 1..80: note = Synthetic: >NC_002645.1-cand-27200-27279
  source 1..80: mol_type = other DNA
gaagagccagtcatttgtcttgagacctatctagttagtaactgctaatggaacggtttcgatatggatacacaaaaaaa

SEQ ID NO: 25870 - DNA, 80 bp, synthetic construct
  misc_feature 1..80: note = Synthetic: >NC_002728.1-cand-60-139
  source 1..80: mol_type = other DNA
gacaaacacttttggtcttggtattggatcctcaagaaatatatcatcatgagtgatatctttgaagaggcggctagttt

SEQ ID NO: 25871 - DNA, 80 bp, synthetic construct
  misc_feature 1..80: note = Synthetic: >NC_002728.1-cand-140-219
  source 1..80: mol_type = other DNA
taggagttatcaatctaagttagggagagatgggagggctagtgcagcaactgctactttgacaaccaagataaggatat

SEQ ID NO: 25872 - DNA, 80 bp, synthetic construct
  misc_feature 1..80: note = Synthetic: >NC_002728.1-cand-220-299
  source 1..80: mol_type = other DNA
ttgtaccagctactaatagtccagagctcagatgggaactaacattgtttgcacttgatgtgattagatctccgagtgct

SEQ ID NO: 25873 - DNA, 80 bp, synthetic construct
  misc_feature 1..80: note = Synthetic: >NC_002728.1-cand-280-359
  source 1..80: mol_type = other DNA
tgattagatctccgagtgctgccgagtcaatgaaagttggagctgctttcacactcatctctatgtattcagagagaccc

SEQ ID NO: 25874 - DNA, 80 bp, synthetic construct
  misc_feature 1..80: note = Synthetic: >NC_002728.1-cand-380-459
  source 1..80: mol_type = other DNA
cctcaatgacccagacattgaagctgtaataatagatgttggatcaatggtcaacggaataccagtaatggagaggagag

SEQ ID NO: 25875 - DNA, 80 bp, synthetic construct
  misc_feature 1..80: note = Synthetic: >NC_002728.1-cand-460-539
  source 1..80: mol_type = other DNA
gagacaaggctcaggaggagatggaaggcttgatgagaatcctcaaaactgctcgagacagcagcaagggaaaaacacct

SEQ ID NO: 25876 - DNA, 80 bp, synthetic construct
  misc_feature 1..80: note = Synthetic: >NC_003310.1-cand-162430-162509
  source 1..80: mol_type = other DNA
ttctatactctcatcttttgccaacacaaagggtggatatttgttcattggagttgataataatacacacaaagtaattg

SEQ ID NO: 25877 - DNA, 80 bp, synthetic construct
  misc_feature 1..80: note = Synthetic: >NC_003310.1-cand-162510-162589
  source 1..80: mol_type = other DNA
gattcacggtgggtcacgactacctcaaactggtagagagagatatagaaaagtatatccaaaaacttcctgttgtgcat

SEQ ID NO: 25878 - DNA, 80 bp, synthetic construct
  misc_feature 1..80: note = Synthetic: >NC_003310.1-cand-162590-162669
  source 1..80: mol_type = other DNA
ttctgcaagaaaaaagaggacatcaagtacgcatgtagattcatcaaggtgtataaacctggtgatgagactacctcgac

SEQ ID NO: 25879 - DNA, 80 bp, synthetic construct
  misc_feature 1..80: note = Synthetic: >NC_003310.1-cand-162670-162749
  source 1..80: mol_type = other DNA
atatgtgtgcgcaatcaaagtggaaagatgctgctgtgctgtgtttgcggattggccagaatcatggtacatggatacta

SEQ ID NO: 25880 - DNA, 80 bp, synthetic construct
  misc_feature 1..80: note = Synthetic: >NC_003310.1-cand-162750-162829
  source 1..80: mol_type = other DNA
gtggtagtatgaagaagtattctccagatgaatgggtgtcacatataaaattttaattagggtaaggtaaaactatatat

SEQ ID NO: 25881 - DNA, 80 bp, synthetic construct
  misc_feature 1..80: note = Synthetic: >NC_003310.1-cand-163680-163759
  source 1..80: mol_type = other DNA
gatacgtacggaaacacaccgtttatcctattatgtaaacacgatatcgacaacgcggaattgtttgagatatgtttaga

SEQ ID NO: 25882 - DNA, 80 bp, synthetic construct
  misc_feature 1..80: note = Synthetic: >NC_003310.1-cand-163760-163839
  source 1..80: mol_type = other DNA
gaatgctaatatagactctgtagactttaatggatatacacctcttcattatgtctcatgtcgtaataaatatgattttg

SEQ ID NO: 25883 - DNA, 80 bp, synthetic construct
  misc_feature 1..80: note = Synthetic: >NC_003310.1-cand-163840-163919
  source 1..80: mol_type = other DNA
taaagttattaatttctaaaggagcaaatgttaatgcacgtaatagattcggaactactccattttattgtggaattata

SEQ ID NO: 25884 - DNA, 80 bp, synthetic construct
  misc_feature 1..80: note = Synthetic: >NC_003310.1-cand-163920-163999
  source 1..80: mol_type = other DNA
cacggtatctcgcttataaaactatatttggaatcagacacagagttagaaatagataatgaacatatagttcgtcattt

SEQ ID NO: 25885 - DNA, 80 bp, synthetic construct
  misc_feature 1..80: note = Synthetic: >NC_003310.1-cand-164000-164079
  source 1..80: mol_type = other DNA
aataatttttgatgctgttgaatctttagattatctattgtccagaggagttattgatattaactatcgtactatataca

SEQ ID NO: 25886 - DNA, 80 bp, synthetic construct
  misc_feature 1..80: note = Synthetic: >NC_003310.1-cand-164080-164159
  source 1..80: mol_type = other DNA
acgaaacatctatttacgacgctgtcagttataatgcgtataatacgttagtctatctattaaacagaaatggtgatttt

SEQ ID NO: 25887 - DNA, 80 bp, synthetic construct
  misc_feature 1..80: note = Synthetic: >NC_003310.1-cand-164160-164239
  source 1..80: mol_type = other DNA
gagacgattactactagtggatgtacatgtatttcggaagcagtcgcgaacaacaacaaaataataatggatatactatt

SEQ ID NO: 25888 - DNA, 80 bp, synthetic construct
  misc_feature 1..80: note = Synthetic: >NC_003310.1-cand-164240-164319
  source 1..80: mol_type = other DNA
gtctaaacgaccatctttgaaaattatgataccatctatgatagcaattactaaacataaacaacataatgcagatttat

SEQ ID NO: 25889 - DNA, 80 bp, synthetic construct
  misc_feature 1..80: note = Synthetic: >NC_003310.1-cand-164320-164399
  source 1..80: mol_type = other DNA
tgaaaatgtgtataaaatatactgcgtgtatgaccgattatgatactcttatagatgtacaatcgctacatcaatataaa

SEQ ID NO: 25890 - DNA, 80 bp, synthetic construct
  misc_feature 1..80: note = Synthetic: >NC_003310.1-cand-164400-164479
  source 1..80: mol_type = other DNA
tggtatattttaaaatgttttgatgaaatagatatcatgaagagatgttatataaaaaataaaactgtattccaattagt

SEQ ID NO: 25891 - DNA, 80 bp, synthetic construct
  misc_feature 1..80: note = Synthetic: >NC_003310.1-cand-164480-164559
  source 1..80: mol_type = other DNA
tttttgtatcaaagacattaatactttaatgagatacggtagacatccttctttcgtgaaatgtaatattctcgacgtat

SEQ ID NO: 25892 - DNA, 80 bp, synthetic construct
  misc_feature 1..80: note = Synthetic: >NC_003310.1-cand-170120-170199
  source 1..80: mol_type = other DNA
gagtttatacactctcgaggatttactcatggaaaaatagaaccgatgaatatactgattagaaataaacgtatttcact

SEQ ID NO: 25893 - DNA, 80 bp, synthetic construct
  misc_feature 1..80: note = Synthetic: >NC_003310.1-cand-170200-170279
  source 1..80: mol_type = other DNA
aattgactattctagaactaacaaactatacaaaagtggaacacatatagattacaacgaggacatgataacttcaggaa

SEQ ID NO: 25894 - DNA, 80 bp, synthetic construct
  misc_feature 1..80: note = Synthetic: >NC_003310.1-cand-170290-170369
  source 1..80: mol_type = other DNA
tatgtgtgtagacaatcatcttggagcaacagtttcaagacgaggagatttagaaatgttgggatattgcatgatagaat

SEQ ID NO: 25895 - DNA, 80 bp, synthetic construct
  misc_feature 1..80: note = Synthetic: >NC_003310.1-cand-170370-170449
  source 1..80: mol_type = other DNA
ggttcggtggtaaacttccatggaaaaacgaaagtagtataaaagtaataaaacaaaaaaaagaatataaacaatttata

SEQ ID NO: 25896 - DNA, 80 bp, synthetic construct
  misc_feature 1..80: note = Synthetic: >NC_003310.1-cand-170450-170529
  source 1..80: mol_type = other DNA
gctactttttttgaggactgttttcctgaaggaaatgaacctctggaattagttagatatatagaattagtatacatgtt

SEQ ID NO: 25897 - DNA, 80 bp, synthetic construct
  misc_feature 1..80: note = Synthetic: >NC_003310.1-cand-170530-170609
  source 1..80: mol_type = other DNA
agattattctcaaactcctaattatgacagactacgtagactgtttatacaagattgaaattatattcttttttttatag

SEQ ID NO: 25898 - DNA, 80 bp, synthetic construct
  misc_feature 1..80: note = Synthetic: >NC_003310.1-cand-170620-170699
  source 1..80: mol_type = other DNA
agtgttacggatatctgatatctaatatctaatattaatattagactatctctatcgcgctacacgaccaatatcgatta

SEQ ID NO: 25899 - DNA, 80 bp, synthetic construct
  misc_feature 1..80: note = Synthetic: >NC_003310.1-cand-170690-170769
  source 1..80: mol_type = other DNA
atatcgattactatggatatctttagggaaatcgcatcttctatgaaaggaaagaatgtattcatttctccagcgtcaat

SEQ ID NO: 25900 - DNA, 80 bp, synthetic construct
  misc_feature 1..80: note = Synthetic: >NC_003310.1-cand-170770-170849
  source 1..80: mol_type = other DNA
ctcgtcagtattgacaatactgtattatggagctaatggatccactgctgaacagctatcaaaatatgtagaaaaggagg

SEQ ID NO: 25901 - DNA, 80 bp, synthetic construct
  misc_feature 1..80: note = Synthetic: >NC_003310.1-cand-170930-171009
  source 1..80: mol_type = other DNA
aaagattcctttttgggaaaaattggcgataagtttcaaactgttgacttcactgattgtcgcactatagatgcaatcaa

SEQ ID NO: 25902 - DNA, 80 bp, synthetic construct
  misc_feature 1..80: note = Synthetic: >NC_003310.1-cand-171010-171089
  source 1..80: mol_type = other DNA
taagtgtgtagatatctttactgagggaaaaatcaatccactattggatgaaccattgtctcctgatacctgtctcctag

SEQ ID NO: 25903 - DNA, 80 bp, synthetic construct
  misc_feature 1..80: note = Synthetic: >NC_003310.1-cand-171090-171169
  source 1..80: mol_type = other DNA
caattagtgccgtatactttaaagcaaaatggttgatgccattcgaaaaggaatttaccagtgattatcccttttacgta

SEQ ID NO: 25904 - DNA, 80 bp, synthetic construct
  misc_feature 1..80: note = Synthetic: >NC_003310.1-cand-171170-171249
  source 1..80: mol_type = other DNA
tctccaacggaaatggtagatgtaagtatgatgtctatttacggcgagccatttaatcacgcatctgtaaaagaatcatt

SEQ ID NO: 25905 - DNA, 80 bp, synthetic construct
  misc_feature 1..80: note = Synthetic: >NC_003310.1-cand-171250-171329
  source 1..80: mol_type = other DNA
cggtaacttttcaatcatagaactgtcatatgttggagatactagtatgatggtcattcttccaaacaagattgatggat

SEQ ID NO: 25906 - DNA, 80 bp, synthetic construct
  misc_feature 1..80: note = Synthetic: >NC_003310.1-cand-171410-171489
  source 1..80: mol_type = other DNA
cacattcctaagtttaaggtaataggttcgtataatcttgtggatacgctaataaagttgggactgacagatgtgttcta

SEQ ID NO: 25907 - DNA, 80 bp, synthetic construct
  misc_feature 1..80: note = Synthetic: >NC_003310.1-cand-171730-171809
  source 1..80: mol_type = other DNA
taattaagcacattcttaatattagaatattatatagttaagattttactaacaggttaacattttttttaaaaaataga

SEQ ID NO: 25908 - DNA, 80 bp, synthetic construct
  misc_feature 1..80: note = Synthetic: >NC_003310.1-cand-178210-178289
  source 1..80: mol_type = other DNA
atcaatacatatacattataggcggtcgtacccaacactgattatacatcggtacatacagtaaatagcatagatatgga

SEQ ID NO: 25909 - DNA, 80 bp, synthetic construct
  misc_feature 1..80: note = Synthetic: >NC_003310.1-cand-178290-178369
  source 1..80: mol_type = other DNA
ggaggatacaaatatttcaaataaagttatgagatacgcactgtcaataatatatggaagacattacctaacttctgaac

SEQ ID NO: 25910 - DNA, 80 bp, synthetic construct
  misc_feature 1..80: note = Synthetic: >NC_003310.1-cand-178370-178449
  source 1..80: mol_type = other DNA
tggaactataaatccaggctcttgcataaagatgaatatatatgttgtatgcgacatcaaagatgaaaaaatgttaagac

SEQ ID NO: 25911 - DNA, 80 bp, synthetic construct
  misc_feature 1..80: note = Synthetic: >NC_003310.1-cand-178450-178529
  source 1..80: mol_type = other DNA
ttatatatttagatataacacgaatatgtataacggatgggaattggtaacgatgacagaaagcagattgtcagctctgc

SEQ ID NO: 25912 - DNA, 80 bp, synthetic construct
  misc_feature 1..80: note = Synthetic: >NC_003310.1-cand-178530-178609
  source 1..80: mol_type = other DNA
atactattcttcatgacaataccataatgatgttacattgttatgaaacgtatatgttacaagatacatttaatgtgctt

SEQ ID NO: 25913 - DNA, 80 bp, synthetic construct
  misc_feature 1..80: note = Synthetic: >NC_003310.1-cand-178610-178689
  source 1..80: mol_type = other DNA
acggaacatatatttagaaacatctactaacgattttttatgcttgtattattaatggtatgtaatatgatttaattgat

SEQ ID NO: 25914 - DNA, 80 bp, synthetic construct
  misc_feature 1..80: note = Synthetic: >NC_003310.1-cand-178690-178769
  source 1..80: mol_type = other DNA
tgtgtacacgataccaatttgtcaagtatgaatacggagtacaaacataaactgaagtttaacattatttatttatgata

SEQ ID NO: 25915 - DNA, 80 bp, synthetic construct
  misc_feature 1..80: note = Synthetic: >NC_003310.1-cand-178930-179009
  source 1..80: mol_type = other DNA
tatatatcgttattgtttggtctatgccatggatatctttaaagaactaatcttaaaacatacggatgaaaatgttttga

SEQ ID NO: 25916 - DNA, 80 bp, synthetic construct
  misc_feature 1..80: note = Synthetic: >NC_003310.1-cand-179010-179089
  source 1..80: mol_type = other DNA
tttctccagtttccattttatctactttatctattctgaatcatggagtagctggttctacagctgaacaactatcaaaa

SEQ ID NO: 25917 - DNA, 80 bp, synthetic construct
  misc_feature 1..80: note = Synthetic: >NC_003310.1-cand-179090-179169
  source 1..80: mol_type = other DNA
tatatagagaatatgaatgagaatacacccgatgataagaaggatgacaataatgacatggacgtagatattccgtattg

SEQ ID NO: 25918 - DNA, 80 bp, synthetic construct
  misc_feature 1..80: note = Synthetic: >NC_003310.1-cand-179170-179249
  source 1..80: mol_type = other DNA
tgcgacactagctaccgcaaataaaatatacggtagtgatagtatcgagttccatgcctccttcctacaaaaaataaaag

SEQ ID NO: 25919 - DNA, 80 bp, synthetic construct
  misc_feature 1..80: note = Synthetic: >NC_003310.1-cand-179250-179329
  source 1..80: mol_type = other DNA
acgattttcaaactgtaaactttaataatgctaaccaaacaaaggaactaatcaacgaatgggttaagacaatgacaaat

SEQ ID NO: 25920 - DNA, 80 bp, synthetic construct
  misc_feature 1..80: note = Synthetic: >NC_003310.1-cand-179330-179409
  source 1..80: mol_type = other DNA
ggtaaaattaattccttattgactagtccgctatccattaatactcgtatgacagttattagcgccgtccattttaaagc

SEQ ID NO: 25921 - DNA, 80 bp, synthetic construct
  misc_feature 1..80: note = Synthetic: >NC_003310.1-cand-179470-179549
  source 1..80: mol_type = other DNA
gaatatagttaccagtgttgatatgatggtgggtaccgagaatgacttgcaatatgtacatattaatgaattattcggag

SEQ ID NO: 25922 - DNA, 80 bp, synthetic construct
  misc_feature 1..80: note = Synthetic: >NC_003310.1-cand-179630-179709
  source 1..80: mol_type = other DNA
aacatagaaaaaaatataacagatgaaaaatttaaaaaatggtgtggtatgttatctactaaaagtatagacttgtatat

SEQ ID NO: 25923 - DNA, 80 bp, synthetic construct
  misc_feature 1..80: note = Synthetic: >NC_003310.1-cand-179710-179789
  source 1..80: mol_type = other DNA
gccaaagtttaaagtggaaatgacggaaccgtataatctggtaccgattctagaaaatttaggacttactaatatatttg

SEQ ID NO: 25924 - DNA, 80 bp, synthetic construct
  misc_feature 1..80: note = Synthetic: >NC_004421.1-cand-20-99
  source 1..80: mol_type = other DNA
cggccccctcaccctcttttccggcggcgcatgttcgcgtcgtcgtaagtctggattcccaaggcccactcggttcaact

SEQ ID NO: 25925 - DNA, 80 bp, synthetic construct
  misc_feature 1..80: note = Synthetic: >NC_004421.1-cand-80-159
  source 1..80: mol_type = other DNA
aaggcccactcggttcaacttcggtttccggacaaatacaaagaacctcagtcctcttggtactttctcgcctgagtcta

SEQ ID NO: 25926 - DNA, 80 bp, synthetic construct
  misc_feature 1..80: note = Synthetic: >NC_004421.1-cand-160-239
  source 1..80: mol_type = other DNA
caaagcgagaaacctgcccctctaacgccagacgagcggcataaaactcgaacttctggcacgttccaccaccccttctc

SEQ ID NO: 25927 - DNA, 80 bp, synthetic construct
  misc_feature 1..80: note = Synthetic: >NC_004421.1-cand-240-319
  source 1..80: mol_type = other DNA
ctatcccaacccccattgcgctctcaaggtcgcgcttttccgagactagctcggattcaaaaagttcctggcacccttta

SEQ ID NO: 25928 - DNA, 80 bp, synthetic construct
  misc_feature 1..80: note = Synthetic: >NC_004421.1-cand-320-399
  source 1..80: mol_type = other DNA
ccccttcaggcccttaaggtaggaactgaccttgtgctgtgatctcggtgcggaagtgctactgcgtagtgattgtaaga

SEQ ID NO: 25929 - DNA, 80 bp, synthetic construct
  misc_feature 1..80: note = Synthetic: >NC_004421.1-cand-400-479
  source 1..80: mol_type = other DNA
tccttttgtggttctgccctggcaaggctacagagtgctgtgatccgctgcggatgccatcctggtaacaggacccccag

SEQ ID NO: 25930 - DNA, 80 bp, synthetic construct
  misc_feature 1..80: note = Synthetic: >NC_004421.1-cand-480-559
  source 1..80: mol_type = other DNA
tgtgcgcaacagtatgttcacggtcttccgtgttcaccacattcggaacactgctttcgtgaaacagtgtgtgtccaatc

SEQ ID NO: 25931 - DNA, 80 bp, synthetic construct
  misc_feature 1..80: note = Synthetic: >NC_004421.1-cand-560-639
  source 1..80: mol_type = other DNA
cctgtgatcagtatcaaccacaccacctaggaatgctaggaaggtaccccggttcgccgggatctgatcctaggctaatt

SEQ ID NO: 25932 - DNA, 80 bp, synthetic construct
  misc_feature 1..80: note = Synthetic: >NC_004421.1-cand-640-719
  source 1..80: mol_type = other DNA
gtctacggtggtgctcctttttattttccacttcaactcactggttacaactgcttgatttctgtgtttgctgcttttct

SEQ ID NO: 25933 - DNA, 80 bp, synthetic construct
  misc_feature 1..80: note = Synthetic: >NC_004421.1-cand-720-799
  source 1..80: mol_type = other DNA
ctgctctcactgccattctcaagtgttcacactgtccaagctcctttggttgttcgcttccacttgccactgtcaactct

SEQ ID NO: 25934 - DNA, 80 bp, synthetic construct
  misc_feature 1..80: note = Synthetic: >NC_004421.1-cand-800-879
  source 1..80: mol_type = other DNA
tgtcatggacccctcaaacttcaagctcttctccatctcccaccgcactgctaagcgctggtcgtggcgcagattccgtg

SEQ ID NO: 25935 - DNA, 80 bp, synthetic construct
  misc_feature 1..80: note = Synthetic: >NC_004421.1-cand-880-959
  source 1..80: mol_type = other DNA
tggagacacgtgagaaaaccctctattcttacgtggaccccgcggttgacgcctacttaaagcgcgaacgaaggtttccc

SEQ ID NO: 25936 - DNA, 80 bp, synthetic construct
  misc_feature 1..80: note = Synthetic: >NC_004421.1-cand-960-1039
  source 1..80: mol_type = other DNA
ttctcccttcccaaaccctcccatttctacgactgcctcttttgcaaccatccctctgaagacgatgaggattcactcct

SEQ ID NO: 25937 - DNA, 80 bp, synthetic construct
  misc_feature 1..80: note = Synthetic: >NC_004421.1-cand-1040-1119
  source 1..80: mol_type = other DNA
caccctcgacggagagtatggcgatccctgtccacttcactctggtgttcttgaccccaaacccagataccaaaagcccc

SEQ ID NO: 25938 - DNA, 80 bp, synthetic construct
  misc_feature 1..80: note = Synthetic: >NC_004421.1-cand-1120-1199
  source 1..80: mol_type = other DNA
ctgaggacattcttgaggattctaactggtgtgacgtccttaacgaggatgttacttacagcactgattctctccagaat

SEQ ID NO: 25939 - DNA, 80 bp, synthetic construct
  misc_feature 1..80: note = Synthetic: >NC_004421.1-cand-1200-1279
  source 1..80: mol_type = other DNA
gccttcgaccaactggctcttgctctgctccccggttctgctcaggtgaaggactcttcccacatctccaaactctactt

SEQ ID NO: 25940 - DNA, 80 bp, synthetic construct
  misc_feature 1..80: note = Synthetic: >NC_004421.1-cand-5130-5209
  source 1..80: mol_type = other DNA
aaccaggccctccgcaactaccaacttgctctcacgcagaaccggatggctgatgcaggtccgcgccccgaaccggtcgt

SEQ ID NO: 25941 - DNA, 80 bp, synthetic construct
  misc_feature 1..80: note = Synthetic: >NC_004421.1-cand-5210-5289
  source 1..80: mol_type = other DNA
gatttacctgtatgggccacctggcactgggaaatccttgcttggctccctccttgcctctgtcctcgctcagaagctct

SEQ ID NO: 25942 - DNA, 80 bp, synthetic construct
  misc_feature 1..80: note = Synthetic: >NC_004421.1-cand-5290-5369
  source 1..80: mol_type = other DNA
ctggtgatcccaacgatgtgtactcccccacatcagcttcctgtgaatacttcgatgggtacacaggacaagtcgtccac

SEQ ID NO: 25943 - DNA, 80 bp, synthetic construct
  misc_feature 1..80: note = Synthetic: >NC_004421.1-cand-5370-5449
  source 1..80: mol_type = other DNA
ttcattgacgacttgggacaagatccagagggccgtgactgggcaaatttccctaacctggtctcttctgctccttttat

SEQ ID NO: 25944 - DNA, 80 bp, synthetic construct
  misc_feature 1..80: note = Synthetic: >NC_004421.1-cand-5450-5529
  source 1..80: mol_type = other DNA
cgtgcccatggccaacctcgaggctaagggtactcactacacttccaaggtgatcgtcgtcacgtcgaacttcaccggcc

SEQ ID NO: 25945 - DNA, 80 bp, synthetic construct
  misc_feature 1..80: note = Synthetic: >NC_004421.1-cand-5530-5609
  source 1..80: mol_type = other DNA
ccaaccaacgggccgctcgatccatgggcgcgcttgaacgcagactccacctccggatctgtgttgaccgcaaagatgga

SEQ ID NO: 25946 - DNA, 80 bp, synthetic construct
  misc_feature 1..80: note = Synthetic: >NC_004421.1-cand-5610-5689
  source 1..80: mol_type = other DNA
tacaagttcgacgctgatgatgccctccgtccccttgaccttccttctaaataccttacctctcaaactaagctttctct

SEQ ID NO: 25947 - DNA, 80 bp, synthetic construct
  misc_feature 1..80: note = Synthetic: >NC_004421.1-cand-5690-5769
  source 1..80: mol_type = other DNA
cttcaaatgcttcaatctgaaacctgacctcaactctattttcctgcctgaatttaacgatttcgaccagctcgttgacg

SEQ ID NO: 25948 - DNA, 80 bp, synthetic construct
  misc_feature 1..80: note = Synthetic: >NC_004421.1-cand-5770-5849
  source 1..80: mol_type = other DNA
cgatcgttgctaggttggatcgggcctctggtgttagctcccgccttgctgctctcatcaagcggcagggtgcccactca

SEQ ID NO: 25949 - DNA, 80 bp, synthetic construct
  misc_feature 1..80: note = Synthetic: >NC_004421.1-cand-5850-5929
  source 1..80: mol_type = other DNA
gagcgcaccttcgagaccgctccttctgagatcgacgcggacgaggttctcgaaatcctctccaaatctaaacccgcccc

SEQ ID NO: 25950 - DNA, 80 bp, synthetic construct
  misc_feature 1..80: note = Synthetic: >NC_004421.1-cand-5930-6009
  source 1..80: mol_type = other DNA
tactcaccttactcttgagcgtgcgattgcatcaaacgctcctctttcttttattgacaccctctggaagtggcggagac

SEQ ID NO: 25951 - DNA, 80 bp, synthetic construct
  misc_feature 1..80: note = Synthetic: >NC_004421.1-cand-6020-6099
  source 1..80: mol_type = other DNA
tacgaccaccttcctcacagttctaggctttgtcatcactgtccttggtgttgccaaggtgctctggaccaagaaagagg

SEQ ID NO: 25952 - DNA, 80 bp, synthetic construct
  misc_feature 1..80: note = Synthetic: >NC_004421.1-cand-6100-6179
  source 1..80: mol_type = other DNA
acacaccggatgaaccgcaagcggcttattcgggcatgcctcaacttggtaagaaagacgccaaggcaaagggcccaaaa

SEQ ID NO: 25953 - DNA, 80 bp, synthetic construct
  misc_feature 1..80: note = Synthetic: >NC_004421.1-cand-6200-6279
  source 1..80: mol_type = other DNA
cgtgcgacaagccggcccctcccctgctcttcccaagattgccgacaacgtcttgccaatccaagccaggacgcctgccg

SEQ ID NO: 25954 - DNA, 80 bp, synthetic construct
  misc_feature 1..80: note = Synthetic: >NC_004421.1-cand-6280-6359
  source 1..80: mol_type = other DNA
gcgtcaacaaatgctctgctctttatctctactcccgcatctgcattgtccctacccacatcgttccagacaacactatc

SEQ ID NO: 25955 - DNA, 80 bp, synthetic construct
  misc_feature 1..80: note = Synthetic: >NC_004421.1-cand-6360-6439
  source 1..80: mol_type = other DNA
cagatccaactcgggaatgacgtgtatgattgggcaaccttgaaacacgttaggctcgggaaggagatgactgtgatctg

SEQ ID NO: 25956 - DNA, 80 bp, synthetic construct
  misc_feature 1..80: note = Synthetic: >NC_004909.1-cand-740-819
  source 1..80: mol_type = other DNA
gatactaaaatactattcattagagaagggaaaattgtccacattggtccactgtcaggaagtgctcagcatgtggagga

SEQ ID NO: 25957 - DNA, 80 bp, synthetic construct
  misc_feature 1..80: note = Synthetic: >NC_004909.1-cand-830-909
  source 1..80: mol_type = other DNA
tacccccggtatccagaagttagatgtgtttgcagagacaattggaagggctccaatagacccgtgctatatataaatgt

SEQ ID NO: 25958 - DNA, 80 bp, synthetic construct
  misc_feature 1..80: note = Synthetic: >NC_004909.1-cand-870-949
  source 1..80: mol_type = other DNA
attggaagggctccaatagacccgtgctatatataaatgtggcagattatagtgttgattctagttatgtgtgctcagga

SEQ ID NO: 25959 - DNA, 80 bp, synthetic construct
  misc_feature 1..80: note = Synthetic: >NC_004909.1-cand-940-1019
  source 1..80: mol_type = other DNA
gtgctcaggacttgttggcgacacaccaagaaatgacgatagctccagcagcagtaactgcagggatcctaataacgaga

SEQ ID NO: 25960 - DNA, 80 bp, synthetic construct
  misc_feature 1..80: note = Synthetic: >NC_004909.1-cand-1050-1129
  source 1..80: mol_type = other DNA
ttgacaatggaaatgatgtttggatgggacgaacaatcaagaaagattcgcgctctggttatgagactttcagggtcgtt

SEQ ID NO: 25961 - DNA, 80 bp, synthetic construct
  misc_feature 1..80: note = Synthetic: >NC_004909.1-cand-1140-1219
  source 1..80: mol_type = other DNA
ctacggctaattccaagtcacaaataaataggcaagtcatagttgacagtgataactggtctgggtattctggtatattc

SEQ ID NO: 25962 - DNA, 80 bp, synthetic construct
  misc_feature 1..80: note = Synthetic: >NC_004909.1-cand-1230-1309
  source 1..80: mol_type = other DNA
gaaaaacctgcatcaacaggtgtttttatgtggagttgataagagggagaccacaggagaccagagtatggtggacttca

SEQ ID NO: 25963 - DNA, 80 bp, synthetic construct
  misc_feature 1..80: note = Synthetic: >NC_004909.1-cand-1320-1399
  source 1..80: mol_type = other DNA
ttgtattttgtggaacttcaggtacctatggaacaggctcatggcctgatggagcgaatatcaatttcatgtctatataa

SEQ ID NO: 25964 - DNA, 80 bp, synthetic construct
  misc_feature 1..80: note = Synthetic: >NC_004910.1-cand-60-139
  source 1..80: mol_type = other DNA
aatctcgcactcgcgagatactgacaaaaaccactgtggatcatatggccataattaagaagtacacatcaggaagacag

SEQ ID NO: 25965 - DNA, 80 bp, synthetic construct
  misc_feature 1..80: note = Synthetic: >NC_004910.1-cand-140-219
  source 1..80: mol_type = other DNA
gagaagaatcccgctcttagaatgaaatggatgatggcgatgaaatacccgatcacagctgacaaaagaataatggagat

SEQ ID NO: 25966 - DNA, 80 bp, synthetic construct
  misc_feature 1..80: note = Synthetic: >NC_004910.1-cand-220-299
  source 1..80: mol_type = other DNA
gatccctgaaaggaatgagcaaggccaaactctttggagcaaaacaaatgacgctggatcagacagggtaatggtatcac

SEQ ID NO: 25967 - DNA, 80 bp, synthetic construct
  misc_feature 1..80: note = Synthetic: >NC_004910.1-cand-300-379
  source 1..80: mol_type = other DNA
ctctggctgtaacgtggtggaacagaaatggaccaacaacaagtacagtccattatccaaaggtgtataaaacctacttt

SEQ ID NO: 25968 - DNA, 80 bp, synthetic construct
  misc_feature 1..80: note = Synthetic: >NC_004910.1-cand-380-459
  source 1..80: mol_type = other DNA
gaaaaggttgaaagattaaaacacggaacctttggccctgttcatttccggaatcaagtcaaaatacgccgcagggttga

SEQ ID NO: 25969 - DNA, 80 bp, synthetic construct
  misc_feature 1..80: note = Synthetic: >NC_004910.1-cand-460-539
  source 1..80: mol_type = other DNA
catgaaccctggccatgcagatctcagcgctaaagaagcacaagatgtcatcatggaggtcgttttcccaaatgaagttg

SEQ ID NO: 25970 - DNA, 80 bp, synthetic construct
  misc_feature 1..80: note = Synthetic: >NC_004910.1-cand-530-609
  source 1..80: mol_type = other DNA
aatgaagttggagccaggatattgacatcagaatcacagctgacaataacaaaggaaaagagggaggaactcaagaattg

SEQ ID NO: 25971 - DNA, 80 bp, synthetic construct
  misc_feature 1..80: note = Synthetic: >NC_004910.1-cand-610-689
  source 1..80: mol_type = other DNA
taatattgctcctttaatggtggcatatatgttggaaagagaattggttcgcaagaccagattcctacccgtggctggcg

SEQ ID NO: 25972 - DNA, 80 bp, synthetic construct
  misc_feature 1..80: note = Synthetic: >NC_005235.1-cand-6040-6119
  source 1..80: mol_type = other DNA
tcttacaagatgaaagttcatatacaggtgacttactcattatgtcagaagaaactgaagtcaagaagatgagaggaatt

SEQ ID NO: 25973 - DNA, 80 bp, synthetic construct
  misc_feature 1..80: note = Synthetic: >NC_005235.1-cand-6120-6199
  source 1..80: mol_type = other DNA
ataaaactgctagagcctgttagacttataaaaagctgggtttccaaaggtttatgtattgagaaggtatatagcccaac

SEQ ID NO: 25974 - DNA, 80 bp, synthetic construct
  misc_feature 1..80: note = Synthetic: >NC_005235.1-cand-6200-6279
  source 1..80: mol_type = other DNA
caatattatattgatgactagatatctttcaaaaaatttcaatttttctggtagacaagtttcccttttagacccatatg

SEQ ID NO: 25975 - DNA, 80 bp, synthetic construct
  misc_feature 1..80: note = Synthetic: >NC_005235.1-cand-6320-6399
  source 1..80: mol_type = other DNA
atgtgttgttgatcagttcagtacatttgatcaggagacacagcttttggtatctcagaaaggcatctgcccagaggatg

SEQ ID NO: 25976 - DNA, 80 bp, synthetic construct
  misc_feature 1..80: note = Synthetic: >NC_005235.1-cand-6360-6439
  source 1..80: mol_type = other DNA
cagcttttggtatctcagaaaggcatctgcccagaggatgtggtacctgattcccttttttcatttaggcatactatagt

SEQ ID NO: 25977 - DNA, 80 bp, synthetic construct
  misc_feature 1..80: note = Synthetic: >NC_005235.1-cand-6440-6519
  source 1..80: mol_type = other DNA
tctcttacgtagactttttcctcaggactctgtttcaactttctactaattgtttatatttattttcattttccggagca

SEQ ID NO: 25978 - DNA, 80 bp, synthetic construct
  misc_feature 1..80: note = Synthetic: >NC_005236.1-cand-0-79
  source 1..80: mol_type = other DNA
agtagactccctaaagagctactccactaacaagagaaatggcaactatggaggaaatccagagagaaatcagtgctcac

SEQ ID NO: 25979 - DNA, 80 bp, synthetic construct
  misc_feature 1..80: note = Synthetic: >NC_005236.1-cand-90-169
  source 1..80: mol_type = other DNA
ttgtgatagcacgccagaaggtcaaggatgcagaaaagcagtatgagaaggatcctgatgacttaaacaagagggcactg

SEQ ID NO: 25980 - DNA, 80 bp, synthetic construct
  misc_feature 1..80: note = Synthetic: >NC_005236.1-cand-150-229
  source 1..80: mol_type = other DNA
acttaaacaagagggcactgcatgatcgggagagtgtcgcagcttcaatacaatcaaaaattgatgaactgaagcgccaa

SEQ ID NO: 25981 - DNA, 80 bp, synthetic construct
  misc_feature 1..80: note = Synthetic: >NC_005236.1-cand-200-279
  source 1..80: mol_type = other DNA
caatcaaaaattgatgaactgaagcgccaacttgccgacaggattgcagcagggaagaacatcgggcaagaccgggatcc

SEQ ID NO: 25982 - DNA, 80 bp, synthetic construct
  misc_feature 1..80: note = Synthetic: >NC_005236.1-cand-330-409
  source 1..80: mol_type = other DNA
acgggaatacactggacctgaatagtcttgacattgatgaacctacaggacaaacagctgattggctgactataattgtc

SEQ ID NO: 25983 - DNA, 80 bp, synthetic construct
  misc_feature 1..80: note = Synthetic: >NC_005236.1-cand-410-489
  source 1..80: mol_type = other DNA
tatctaacatcattcgtggtcccgatcatcttgaaggcactgtacatgttaacaacaagaggtaggcagacttcaaagga

SEQ ID NO: 25984 - DNA, 80 bp, synthetic construct
  misc_feature 1..80: note = Synthetic: >NC_005236.1-cand-500-579
  source 1..80: mol_type = other DNA
atgaggatcagattcaaggatgacagctcatatgaggatgtcaatgggatcagaaagcctaaacatctgtatgtgtcaat

SEQ ID NO: 25985 - DNA, 80 bp, synthetic construct
  misc_feature 1..80: note = Synthetic: >NC_005236.1-cand-590-669
  source 1..80: mol_type = other DNA
caatccagtatgaaggctgaagagataacaccaggaagattccgcactgcagtatgtgggctatatcctgcacagataaa

SEQ ID NO: 25986 - DNA, 80 bp, synthetic construct
  misc_feature 1..80: note = Synthetic: >NC_005236.1-cand-680-759
  source 1..80: mol_type = other DNA
atggtaagccctgtcatgagtgtagttgggtttttggcactagcaaaagactggacatctagaattgaagaatggcttgg

SEQ ID NO: 25987 - DNA, 80 bp, synthetic construct
  misc_feature 1..80: note = Synthetic: >NC_005236.1-cand-880-959
  source 1..80: mol_type = other DNA
tcaagccctcaggcaacattcaaaggatgctggatgtacactagttgaacatattgagtcaccatcgtcaatatgggtgt

SEQ ID NO: 25988 - DNA, 80 bp, synthetic construct
  misc_feature 1..80: note = Synthetic: >NC_005237.1-cand-3160-3239
  source 1..80: mol_type = other DNA
catttaagtgctgtcatgggaaagaatgttcattaactggcctccaagccagtgcaccacatttagataaggtaaatgga

SEQ ID NO: 25989 - DNA, 80 bp, synthetic construct
  misc_feature 1..80: note = Synthetic: >NC_005237.1-cand-3240-3319
  source 1..80: mol_type = other DNA
atctctgagttagaaaatgagaaagtttatgatgatggtgcacctgaatgtggcattacttgttggtttaaaaaatcagg

SEQ ID NO: 25990 - DNA, 80 bp, synthetic construct
  misc_feature 1..80: note = Synthetic: >NC_005237.1-cand-3320-3399
  source 1..80: mol_type = other DNA
tgaatgggttatgggtataatcaatgggaactgggttgtcctaattgtcttgtgtgtcctgctgctcttttctcttatcc

SEQ ID NO: 25991 - DNA, 80 bp, synthetic construct
  misc_feature 1..80: note = Synthetic: >NC_005237.1-cand-3400-3479
  source 1..80: mol_type = other DNA
tgttgagcatcctgtgtcctgttagaaagcataaaaaatcataaatcctgcttattaatcttcatagcatgtatcgagtt

SEQ ID NO: 25992 - DNA, 80 bp, synthetic construct
  misc_feature 1..80: note = Synthetic: >NC_005237.1-cand-3480-3559
  source 1..80: mol_type = other DNA
ttaaacactttaccattaaaaacttaacctggctctaatatctgataactaactttcatttttatttttatatggattaa

SEQ ID NO: 25993 - DNA, 80 bp, synthetic construct
  misc_feature 1..80: note = Synthetic: >NC_005237.1-cand-3530-3609
  source 1..80: mol_type = other DNA
aactttcatttttatttttatatggattaattactaaaaaaaatactctcttctatctcccaatcttttattgattcacc

SEQ ID NO: 25994 - DNA, 80 bp, synthetic construct
  misc_feature 1..80: note = Synthetic: >NC_005238.1-cand-0-79
  source 1..80: mol_type = other DNA
agtagactccggaagagacaaatcaaaaaaagatggagaaatatagagaaatacacagggatctgaaggagtttactatt

SEQ ID NO: 25995 - DNA, 80 bp, synthetic construct
  misc_feature 1..80: note = Synthetic: >NC_005238.1-cand-80-159
  source 1..80: mol_type = other DNA
aactcattaacagccgtggaatgcatggattacttggataggctctatgctgtccggcatgacattgttgaccagatgat

SEQ ID NO: 25996 - DNA, 80 bp, synthetic construct
  misc_feature 1..80: note = Synthetic: >NC_005238.1-cand-160-239
  source 1..80: mol_type = other DNA
aaaacatgaatggtcagacaataaagacagcgaggagccaataagtaaggtattgctgtttgctgggatacctaataatg

SEQ ID NO: 25997 - DNA, 80 bp, synthetic construct
  misc_feature 1..80: note = Synthetic: >NC_005238.1-cand-240-319
  source 1..80: mol_type = other DNA
tcataacagcattggaaaaaaaggttatccctgatcatccaagtggtaaaacactgcggtctttttttaagatgacacct

SEQ ID NO: 25998 - DNA, 80 bp, synthetic construct
  misc_feature 1..80: note = Synthetic: >NC_005238.1-cand-320-399
  source 1..80: mol_type = other DNA
gacaactatcgaataacaggttccttaatcgagtttgtggaggtaactgtgactgcagatgtagataagggtatcagaga

SEQ ID NO: 25999 - DNA, 80 bp, synthetic construct
  misc_feature 1..80: note = Synthetic: >NC_005238.1-cand-380-459
  source 1..80: mol_type = other DNA
gtagataagggtatcagagagaagaaaatgaaatatgagctaggtctgaaatatctagagcaagaactcatgacattttt

SEQ ID NO: 26000 - DNA, 80 bp, synthetic construct
  misc_feature 1..80: note = Synthetic: >NC_005238.1-cand-480-559
  source 1..80: mol_type = other DNA
acccttataaaattacatttaaagtagttgcagtccggacagatggatcaaatatttcaacacaatggcccagtgcaagg

SEQ ID NO: 26001 - DNA, 80 bp, synthetic construct
  misc_feature 1..80: note = Synthetic: >NC_005238.1-cand-560-639
  source 1..80: mol_type = other DNA
aatgatggtgtcgttcaatacatgagattggtacaggcagaaatcagttatgtaagggaacatttggttaaaactgaaga

SEQ ID NO: 26002 - DNA, 80 bp, synthetic construct
  misc_feature 1..80: note = Synthetic: >NC_005238.1-cand-640-719
  source 1..80: mol_type = other DNA
aagagctgcattagaagcaatgtttaacttgaaattcaacataagttctctaaagacacagccttattttatccctgaat

SEQ ID NO: 26003 - DNA, 80 bp, synthetic construct
  misc_feature 1..80: note = Synthetic: >NC_005238.1-cand-720-799
  source 1..80: mol_type = other DNA
ataaagggattgatctgattagacctgatatagatgggttagtgaactatgcccaaagctggatgtcaaagacccaagaa

SEQ ID NO: 26004 - DNA, 80 bp, synthetic construct
  misc_feature 1..80: note = Synthetic: >NC_005300.2-cand-2000-2079
  source 1..80: mol_type = other DNA
tgatacctaagggcactggtgacatcctagttgactgttcaggtgggcagcaacattttctaaaggacaatttgatagat

SEQ ID NO: 26005 - DNA, 80 bp, synthetic construct
  misc_feature 1..80: note = Synthetic: >NC_005300.2-cand-2080-2159
  source 1..80: mol_type = other DNA
ctaggatgccccaaaattccattattgggcaaaatggctatttacatttgcagaatgtcaaaccaccccaaaacaaccat

SEQ ID NO: 26006 - DNA, 80 bp, synthetic construct
  misc_feature 1..80: note = Synthetic: >NC_005300.2-cand-2160-2239
  source 1..80: mol_type = other DNA
ggctttcctcttctggttcagctttggctatgtaataacctgcatactttgcaaggccattttttacttgttaataattg

SEQ ID NO: 26007 - DNA, 80 bp, synthetic construct
  misc_feature 1..80: note = Synthetic: >NC_005300.2-cand-2240-2319
  source 1..80: mol_type = other DNA
ttggaacactagggaaaaggctcaagcagtatagagagttgaaacctcagacttgcaccatatgtgagacaactcctgta

SEQ ID NO: 26008 - DNA, 80 bp, synthetic construct
  misc_feature 1..80: note = Synthetic: >NC_005300.2-cand-2320-2399
  source 1..80: mol_type = other DNA
aatgcaatagatgctgagatgcatgacctcaattgcagttacaacatttgtccctactgtgcatctagactaacctcaga

SEQ ID NO: 26009 - DNA, 80 bp, synthetic construct
  misc_feature 1..80: note = Synthetic: >NC_005300.2-cand-2400-2479
  source 1..80: mol_type = other DNA
tgggcttgctaggcatgtgatacaatgccctaagcggaaggagaaagtggaagaaactgaactgtacttgaacttagaaa

SEQ ID NO: 26010 - DNA, 80 bp, synthetic construct
  misc_feature 1..80: note = Synthetic: >NC_005300.2-cand-2480-2559
  source 1..80: mol_type = other DNA
gaattccttgggttgtaagaaagctgttgcaggtgtcagagtcaactggtgtggcattgaaaagaagcagttggctgatt

SEQ ID NO: 26011 - DNA, 80 bp, synthetic construct
  misc_feature 1..80: note = Synthetic: >NC_005300.2-cand-2560-2639
  source 1..80: mol_type = other DNA
gtgctgcttgtgctattcactgtttcattatcaccagttcaatcagcacccattggtcaagggaagacaattgaggcata

SEQ ID NO: 26012 - DNA, 80 bp, synthetic construct
  misc_feature 1..80: note = Synthetic: >NC_005300.2-cand-2650-2729
  source 1..80: mol_type = other DNA
gaagggtacacaagtatatgcctctttgtactaggaagtatcctatttatagtttcttgcctaatgaaagggctggttga

SEQ ID NO: 26013 - DNA, 80 bp, synthetic construct
  misc_feature 1..80: note = Synthetic: >NC_005300.2-cand-2730-2809
  source 1..80: mol_type = other DNA
cagtgttggcaactccttcttccctggactgtccatttgcaaaacgtgctccataagcagcattaatggctttgaaattg

SEQ ID NO: 26014 - DNA, 80 bp, synthetic construct
  misc_feature 1..80: note = Synthetic: >NC_005300.2-cand-2810-2889
  source 1..80: mol_type = other DNA
agtcccataagtgctattgcagcttattctgttgcccctattgtaggcactgctctaccgataaagaaattcataagctg

SEQ ID NO: 26015 - DNA, 80 bp, synthetic construct
  misc_feature 1..80: note = Synthetic: >NC_005300.2-cand-2890-2969
  source 1..80: mol_type = other DNA
cacttgagcatctgcaaaaaaaggaaaaaaggaagtaatgtcatgttggctgtctgcaagctcatgtgtttcagggccac

SEQ ID NO: 26016 - DNA, 80 bp, synthetic construct
  misc_feature 1..80: note = Synthetic: >NC_005300.2-cand-2970-3049
  source 1..80: mol_type = other DNA
catggaagtaagtaacagagccctgtttatccgtagcatcatcaacaccacttttgttttgtgcatactgatactagcag

SEQ ID NO: 26017 - DNA, 80 bp, synthetic construct
  misc_feature 1..80: note = Synthetic: >NC_005300.2-cand-3050-3129
  source 1..80: mol_type = other DNA
tttgtgttgttagcacctcagcagtggagatggaaaacctaccagcagggacctgggaaagagaagaagacctaacaaat

SEQ ID NO: 26018 - DNA, 80 bp, synthetic construct
  misc_feature 1..80: note = Synthetic: >NC_005300.2-cand-3130-3209
  source 1..80: mol_type = other DNA
ttctgtcatcaggaatgccaggttacagagactgaatgcctctgcccttatgaagctctagtactcagaaagcctttatt

SEQ ID NO: 26019 - DNA, 80 bp, synthetic construct
  misc_feature 1..80: note = Synthetic: >NC_005300.2-cand-3210-3289
  source 1..80: mol_type = other DNA
cctagatagtacagctaaaggcatgaaaaatctgctaaattcaacaagtttagaaacgagtttatcaattgaggcaccat

SEQ ID NO: 26020 - DNA, 80 bp, synthetic construct
  misc_feature 1..80: note = Synthetic: >NC_006577.2-cand-15170-15249
  source 1..80: mol_type = other DNA
accttaactcaaatgaatttaaaatatgctatcagtgctaagaatagagctcgcactgtagcaggtgtttctattcttag

SEQ ID NO: 26021 - DNA, 80 bp, synthetic construct
  misc_feature 1..80: note = Synthetic: >NC_006577.2-cand-15250-15329
  source 1..80: mol_type = other DNA
tactatgacaggccgaatgttccatcaaaaatgtttgaagagtatagcagctacccgaggtgttcctgttgttataggaa

SEQ ID NO: 26022 - DNA, 80 bp, synthetic construct
  misc_feature 1..80: note = Synthetic: >NC_006577.2-cand-15330-15409
  source 1..80: mol_type = other DNA
ccactaaattttatggtggttgggacgatatgttacgtcatcttataaaggatgttgacaaccctgttcttatgggttgg

SEQ ID NO: 26023 - DNA, 80 bp, synthetic construct
  misc_feature 1..80: note = Synthetic: >NC_006577.2-cand-15410-15489
  source 1..80: mol_type = other DNA
gattatcctaaatgtgatcgtgctatgccaaatattttgcgtattgttagtagtttagttttggcccgcaaacatgaatt

SEQ ID NO: 26024 - DNA, 80 bp, synthetic construct
  misc_feature 1..80: note = Synthetic: >NC_006577.2-cand-15490-15569
  source 1..80: mol_type = other DNA
ttgttgttcacatggtgatagattttatcgccttgcgaatgaatgtgctcaagttttgagtgaaatagttatgtgtggcg

SEQ ID NO: 26025 - DNA, 80 bp, synthetic construct
  misc_feature 1..80: note = Synthetic: >NC_006577.2-cand-15570-15649
  source 1..80: mol_type = other DNA
gttgctattatgttaagcctggtggtactagcagtggtgatgcaactactgcttttgctaattctgtttttaatatatgt

SEQ ID NO: 26026 - DNA, 80 bp, synthetic construct
  misc_feature 1..80: note = Synthetic: >NC_006577.2-cand-15650-15729
  source 1..80: mol_type = other DNA
caggctgttactgctaatgtttgttctcttatggcctgtaatggccataagattgaagatttaagtatacgcaatttaca

SEQ ID NO: 26027 - DNA, 80 bp, synthetic construct
  misc_feature 1..80: note = Synthetic: >NC_006577.2-cand-15730-15809
  source 1..80: mol_type = other DNA
aaaacgcttatactctaatgtttatcgtacagattatgttgattatacatttgttaatgagtattatgaatttttatgta

SEQ ID NO: 26028 - DNA, 80 bp, synthetic construct
  misc_feature 1..80: note = Synthetic: >NC_006577.2-cand-15810-15889
  source 1..80: mol_type = other DNA
agcattttagtatgatgattttgagtgatgatggtgttgtctgttataactctgattatgctagtaagggttatatagct

SEQ ID NO: 26029 - DNA, 80 bp, synthetic construct
  misc_feature 1..80: note = Synthetic: >NC_006577.2-cand-15890-15969
  source 1..80: mol_type = other DNA
aatataagtgtttttcaacaagttttgtactatcagaataatgtctttatgtctgaatctaaatgttgggttgaaaatga

SEQ ID NO: 26030 - DNA, 80 bp, synthetic construct
  misc_feature 1..80: note = Synthetic: >NC_006577.2-cand-15970-16049
  source 1..80: mol_type = other DNA
tattactaatggtcctcatgaattttgttcccaacatactatgttagttaagatagatggtgattatgtttatttaccat

SEQ ID NO: 26031 - DNA, 80 bp, synthetic construct
  misc_feature 1..80: note = Synthetic: >NC_006577.2-cand-16050-16129
  source 1..80: mol_type = other DNA
atccagatccttctagaattttaggagctggttgttttgttgatgatttattgaagactgacagtgttcttttgatagag

SEQ ID NO: 26032 - DNA, 80 bp, synthetic construct
  misc_feature 1..80: note = Synthetic: >NC_006577.2-cand-16130-16209
  source 1..80: mol_type = other DNA
cgctttgtaagtctagctatagatgcttaccctttagtacatcatgaaaatgaagaataccaaaaagtctttcgtgtata

SEQ ID NO: 26033 - DNA, 80 bp, synthetic construct
  misc_feature 1..80: note = Synthetic: >NC_006577.2-cand-16210-16289
  source 1..80: mol_type = other DNA
tttagaatatataaaaaaactgtataatgatcttggtactcagatcttagatagttatagtgttattttaagtacttgtg

SEQ ID NO: 26034 - DNA, 80 bp, synthetic construct
  misc_feature 1..80: note = Synthetic: >NC_006577.2-cand-16290-16369
  source 1..80: mol_type = other DNA
atggtttaaagtttactgaagaatcattttacaagaatatgtatttaaaaagtgccgtgatgcagagtgtaggtgcatgc

SEQ ID NO: 26035 - DNA, 80 bp, synthetic construct
  misc_feature 1..80: note = Synthetic: >NC_006577.2-cand-16370-16449
  source 1..80: mol_type = other DNA
gttgtttgttcatcacaaacttctttgcgttgtggcagttgtatacgtaagcctttgttatgttgtaaatgttgttatga

SEQ ID NO: 26036 - DNA, 80 bp, synthetic construct
  misc_feature 1..80: note = Synthetic: >NC_007357.1-cand-740-819
  source 1..80: mol_type = other DNA
tgggaacagatgtacactcccggcggagaagtaagaaatgatgatgttgaccagagtttgatcatcgctgccagaaacat

SEQ ID NO: 26037 - DNA, 80 bp, synthetic construct
  misc_feature 1..80: note = Synthetic: >NC_007357.1-cand-810-889
  source 1..80: mol_type = other DNA
ccagaaacattgttaggagagcaacagtatcagcggacccactggcatcactcttggagatgtgtcacagcacacaaatt

SEQ ID NO: 26038 - DNA, 80 bp, synthetic construct
  misc_feature 1..80: note = Synthetic: >NC_007357.1-cand-900-979
  source 1..80: mol_type = other DNA
ggatggtggacatccttaggcaaaacccaactgaggagcaagctgtggatatatgcaaagcagcaatgggtttgaggatc

SEQ ID NO: 26039 - DNA, 80 bp, synthetic construct
  misc_feature 1..80: note = Synthetic: >NC_007357.1-cand-980-1059
  source 1..80: mol_type = other DNA
agttcatcctttagctttggaggcttcactttcaaaagaacaaatggatcatccgtcaagaaggaagaggaagtgcttac

SEQ ID NO: 26040 - DNA, 80 bp, synthetic construct
  misc_feature 1..80: note = Synthetic: >NC_007357.1-cand-1100-1179
  source 1..80: mol_type = other DNA
tatgaagaattcacaatggttgggcggagagcaacagctatcctgaggaaagcaactagaaggctgattcagttgatagt

SEQ ID NO: 26041 - DNA, 80 bp, synthetic construct
  misc_feature 1..80: note = Synthetic: >NC_007357.1-cand-1140-1219
  source 1..80: mol_type = other DNA
tcctgaggaaagcaactagaaggctgattcagttgatagtaagtggaagagatgaacaatcaatcgctgaagcgatcatt

SEQ ID NO: 26042 - DNA, 80 bp, synthetic construct
  misc_feature 1..80: note = Synthetic: >NC_007357.1-cand-1220-1299
  source 1..80: mol_type = other DNA
gtagcaatggtgttctcacaggaggattgcatgataaaggcagtccgaggcgatctgaatttcgtgaacagagcaaacca

SEQ ID NO: 26043 - DNA, 80 bp, synthetic construct
  misc_feature 1..80: note = Synthetic: >NC_007357.1-cand-1290-1369
  source 1..80: mol_type = other DNA
gagcaaaccaaagattgaaccccatgcatcaactcctgaggcacttccaaaaagatgcaaaagtgctgtttcagaactgg

SEQ ID NO: 26044 - DNA, 80 bp, synthetic construct
  misc_feature 1..80: note = Synthetic: >NC_007357.1-cand-1400-1479
  source 1..80: mol_type = other DNA
atgatcggaatattacctgacatgactccaagcgcagagatgtcactgagaggagtgagagttagtaagatgggagtaga

SEQ ID NO: 26045 - DNA, 80 bp, synthetic construct
  misc_feature 1..80: note = Synthetic: >NC_007357.1-cand-1460-1539
  source 1..80: mol_type = other DNA
gttagtaagatgggagtagatgaatattccagcacggagagagtggtggtgagtattgaccgtttcttgagggtccgaga

SEQ ID NO: 26046 - DNA, 80 bp, synthetic construct
  misc_feature 1..80: note = Synthetic: >NC_007357.1-cand-1550-1629
  source 1..80: mol_type = other DNA
aacgtactcttatctcctgaagaggttagtgaaacacagggaacagagaagttgacaataacatattcatcctcaatgat

SEQ ID NO: 26047 - DNA, 80 bp, synthetic construct
  misc_feature 1..80: note = Synthetic: >NC_007357.1-cand-1620-1699
  source 1..80: mol_type = other DNA
cctcaatgatgtgggaaatcaacggtcctgagtcagtgcttgttaacacttatcaatggatcatcaggaattgggagact

SEQ ID NO: 26048 - DNA, 80 bp, synthetic construct
  misc_feature 1..80: note = Synthetic: >NC_007357.1-cand-1700-1779
  source 1..80: mol_type = other DNA
gtaaagattcaatggtctcaagatcccacaatgctgtacaataagatggagtttgaatcgttccaatccttggtgccaaa

SEQ ID NO: 26049 - DNA, 80 bp, synthetic construct
  misc_feature 1..80: note = Synthetic: >NC_007357.1-cand-1760-1839
  source 1..80: mol_type = other DNA
ttccaatccttggtgccaaaggctgccagaagccaatatagtggatttgtgagaacactattccaacagatgcgtgatgt

SEQ ID NO: 26050 - DNA, 80 bp, synthetic construct
  misc_feature 1..80: note = Synthetic: >NC_007357.1-cand-1850-1929
  source 1..80: mol_type = other DNA
tttgatactgtccaaataatcaagctgctaccatttgcagcagccccaccggagccgagcagaatgcagttttcttctct

SEQ ID NO: 26051 - DNA, 80 bp, synthetic construct
  misc_feature 1..80: note = Synthetic: >NC_007357.1-cand-1890-1969
  source 1..80: mol_type = other DNA
cagccccaccggagccgagcagaatgcagttttcttctctaactgtgaatgtgagaggctcaggaatgagaatactcgtg

SEQ ID NO: 26052 - DNA, 80 bp, synthetic construct
  misc_feature 1..80: note = Synthetic: >NC_009825.1-cand-8200-8279
  source 1..80: mol_type = other DNA
ctccactgtaaccgaaaaggacatcagggtcgaggaagaggtctatcagtgttgtgacctggagcccgaagcccgcaaag

SEQ ID NO: 26053 - DNA, 80 bp, synthetic construct
  misc_feature 1..80: note = Synthetic: >NC_009825.1-cand-8280-8359
  source 1..80: mol_type = other DNA
tcatcaccgccctcacagatagactctatgtgggcggccctatgcacaacagcaagggagacctttgtgggtatcggaga

SEQ ID NO: 26054 - DNA, 80 bp, synthetic construct
  misc_feature 1..80: note = Synthetic: >NC_009825.1-cand-8360-8439
  source 1..80: mol_type = other DNA
tgtcgcgcaaccggcgtctacaccaccagcttcgggaacacgctgacgtgctatctcaaagccacggccgccatcagggc

SEQ ID NO: 26055 - DNA, 80 bp, synthetic construct
  misc_feature 1..80: note = Synthetic: >NC_009825.1-cand-8440-8519
  source 1..80: mol_type = other DNA
ggcggcgctgagagactgcactatgttggtttgcggtgatgacttagtcgtcatcgctgagagcgacggcgtagaggagg

SEQ ID NO: 26056 - DNA, 80 bp, synthetic construct
  misc_feature 1..80: note = Synthetic: >NC_009825.1-cand-8520-8599
  source 1..80: mol_type = other DNA
acaaccgagccctccgagccttcacggaggctatgacgagatactcggctcccccaggtgacgctccgcagccagcatat

SEQ ID NO: 26057 - DNA, 80 bp, synthetic construct
  misc_feature 1..80: note = Synthetic: >NC_009825.1-cand-8600-8679
  source 1..80: mol_type = other DNA
gacctggaactaataacatcatgttcatccaacgtctcagtcgcgcacgacgtgacgggtaaaaaggtatattacctaac

SEQ ID NO: 26058 - DNA, 80 bp, synthetic construct
  misc_feature 1..80: note = Synthetic: >NC_009825.1-cand-8680-8759
  source 1..80: mol_type = other DNA
ccgagaccctgaaactcccttggcgcgagctgtatgggagacagtccgacacactccagtcaattcctggttgggaaaca

SEQ ID NO: 26059 - DNA, 80 bp, synthetic construct
  misc_feature 1..80: note = Synthetic: >NC_009825.1-cand-8760-8839
  source 1..80: mol_type = other DNA
tcatagtctacgctcccacaatatgggtgcgcatgatattgatgacccactttttctcaatactccagagccaggaagcc

SEQ ID NO: 26060 - DNA, 80 bp, synthetic construct
  misc_feature 1..80: note = Synthetic: >NC_009825.1-cand-8840-8919
  source 1..80: mol_type = other DNA
cttgagaaagcactcgacttcgatatgtacggagtcacctactctatcactccgctggatttaccggcaatcattcaaag

SEQ ID NO: 26061 - DNA, 80 bp, synthetic construct
  misc_feature 1..80: note = Synthetic: >NC_009825.1-cand-8920-8999
  source 1..80: mol_type = other DNA
actccatggcttaagcgcgttcacgctgcacggatactctccacacgaactcaaccgggtggccggagccctcagaaaac

SEQ ID NO: 26062 - DNA, 80 bp, synthetic construct
  misc_feature 1..80: note = Synthetic: >NC_009825.1-cand-9010-9089
  source 1..80: mol_type = other DNA
cccgctgagagcgtggagacatcgggcccgagcagtccgcgctaagcttatcgcccagggaggtagagccaaaatatgtg

SEQ ID NO: 26063 - DNA, 80 bp, synthetic construct
  misc_feature 1..80: note = Synthetic: >NC_009825.1-cand-9080-9159
  source 1..80: mol_type = other DNA
aaaatatgtggcatatacctctttaactgggcggtaaaaaccaaactcaaactcactccattgcctgccgctgccaaact

SEQ ID NO: 26064 - DNA, 80 bp, synthetic construct
  misc_feature 1..80: note = Synthetic: >NC_009825.1-cand-9110-9189
  source 1..80: mol_type = other DNA
gcggtaaaaaccaaactcaaactcactccattgcctgccgctgccaaactcgatttatcgggttggtttacggtaggcgc

SEQ ID NO: 26065 - DNA, 80 bp, synthetic construct
  misc_feature 1..80: note = Synthetic: >NC_009825.1-cand-9240-9319
  source 1..80: mol_type = other DNA
tactcctgtgcctactcatacttacagtaggggtaggcatcttcctgctgcctgctcggtaggcagcttaacactccgac

SEQ ID NO: 26066 - DNA, 80 bp, synthetic construct
  misc_feature 1..80: note = Synthetic: >NC_009826.1-cand-310-389
  source 1..80: mol_type = other DNA
aagaaacaccaaccgccgcccacaggacgtcaagttcccgggcggtggtcagatcgttggtggagtttacttgttgccgc

SEQ ID NO: 26067 - DNA, 80 bp, synthetic construct
  misc_feature 1..80: note = Synthetic: >NC_009826.1-cand-420-499
  source 1..80: mol_type = other DNA
ctcggaagaattcggaacggtcgcaaccccgtggacggcgccagcctattcccaaggcgcgccgacccacgggccggtcc

SEQ ID NO: 26068 - DNA, 80 bp, synthetic construct
  misc_feature 1..80: note = Synthetic: >NC_009826.1-cand-3060-3139
  source 1..80: mol_type = other DNA
tggtttatggcaagtacgtgcaggcggccttgctccaccttggtaggctgaccggaacctacatttatgaccatcttgcc

SEQ ID NO: 26069 - DNA, 80 bp, synthetic construct
  misc_feature 1..80: note = Synthetic: >NC_009826.1-cand-3140-3219
  source 1..80: mol_type = other DNA
cccatgaaggattgggcagcgtctgggctccgcgaattaacggtggccacagaacccatcgtattctccgcgatggagac

SEQ ID NO: 26070 - DNA, 80 bp, synthetic construct
  misc_feature 1..80: note = Synthetic: >NC_009826.1-cand-3150-3229
  source 1..80: mol_type = other DNA
attgggcagcgtctgggctccgcgaattaacggtggccacagaacccatcgtattctccgcgatggagacgaaggtcatc

SEQ ID NO: 26071 - DNA, 80 bp, synthetic construct
  misc_feature 1..80: note = Synthetic: >NC_009826.1-cand-3300-3379
  source 1..80: mol_type = other DNA
gcgaaattttcctggggccggccgacgacatcaagacgtcgggttggcgactcctcgcccctatcaccgcgtatgcgcag

SEQ ID NO: 26072 - DNA, 80 bp, synthetic construct
  misc_feature 1..80: note = Synthetic: >NC_009826.1-cand-3390-3469
  source 1..80: mol_type = other DNA
gggtactgggcgccatagttctcagcctgaccggccgggacaaaaatgaagccgagggtgaggtgcagttcttatccacg

SEQ ID NO: 26073 - DNA, 80 bp, synthetic construct
  misc_feature 1..80: note = Synthetic: >NC_009826.1-cand-3450-3529
  source 1..80: mol_type = other DNA
aggtgcagttcttatccacggcaacacaaacgtttcttggcatttgtatcaatggagtgatgtggacactcttccatggg

SEQ ID NO: 26074 - DNA, 80 bp, synthetic construct
  misc_feature 1..80: note = Synthetic: >NC_009826.1-cand-3610-3689
  source 1..80: mol_type = other DNA
gccttccccccctggaaagggttcgctcacccggtgtacttgcgggtcggcggatctgtacctggttaccaggcatgcag

SEQ ID NO: 26075 - DNA, 80 bp, synthetic construct
  misc_feature 1..80: note = Synthetic: >NC_009826.1-cand-3620-3699
  source 1..80: mol_type = other DNA
cctggaaagggttcgctcacccggtgtacttgcgggtcggcggatctgtacctggttaccaggcatgcagacgtcattcc

SEQ ID NO: 26076 - DNA, 80 bp, synthetic construct
  misc_feature 1..80: note = Synthetic: >NC_009826.1-cand-3720-3799
  source 1..80: mol_type = other DNA
ctcgcgcctccttgctcagcccgagacccatcagttacctcaagggttcctcgggtggcccgatcatgtgcccttccggg

SEQ ID NO: 26077 - DNA, 80 bp, synthetic construct
  misc_feature 1..80: note = Synthetic: >NC_009826.1-cand-3760-3839
  source 1..80: mol_type = other DNA
caagggttcctcgggtggcccgatcatgtgcccttccgggcatgtggtaggtgttttcagggccgccgtgtgcacgcggg

SEQ ID NO: 26078 - DNA, 80 bp, synthetic construct
  misc_feature 1..80: note = Synthetic: >NC_009826.1-cand-3860-3939
  source 1..80: mol_type = other DNA
ttcgtcccggtcgaaaacctggagaccacgatgcgctcacctgtgttcactgacaacagtacgccccctgcagtccctca

SEQ ID NO: 26079 - DNA, 80 bp, synthetic construct
  misc_feature 1..80: note = Synthetic: >NC_009826.1-cand-3960-4039
  source 1..80: mol_type = other DNA
tccatgcacccaccggaagcgggaagagcacaaaggtgcccgccgcttacgcggcccaagggtacaaggtgctggtgcta

SEQ ID NO: 26080 - DNA, 80 bp, synthetic construct
  misc_feature 1..80: note = Synthetic: >NC_009826.1-cand-3990-4069
  source 1..80: mol_type = other DNA
caaaggtgcccgccgcttacgcggcccaagggtacaaggtgctggtgctaaacccgtccgtcgcagcaacgttcgggttc

SEQ ID NO: 26081 - DNA, 80 bp, synthetic construct
  misc_feature 1..80: note = Synthetic: >NC_009826.1-cand-4100-4179
  source 1..80: mol_type = other DNA
gaccccaacatcaggaccggagttaggactgtcaccaccggagccggtataacatactctacttatggcaagttcttcgc

SEQ ID NO: 26082 - DNA, 80 bp, synthetic construct
  misc_feature 1..80: note = Synthetic: >NC_009826.1-cand-4190-4269
  source 1..80: mol_type = other DNA
tgctcgggcggcgcgtatgacgtaatcatatgcgacgagtgccattcccaggacgctaccaccatccttgggataggcac

SEQ ID NO: 26083 - DNA, 80 bp, synthetic construct
  misc_feature 1..80: note = Synthetic: >NC_009826.1-cand-4260-4339
  source 1..80: mol_type = other DNA
ggataggcacagtccttgaccaggcagagacggctggagctaggctcgttgtcttggcgacggccattccccccggcagt

SEQ ID NO: 26084 - DNA, 80 bp, synthetic construct
  misc_feature 1..80: note = Synthetic: >NC_009826.1-cand-8210-8289
  source 1..80: mol_type = other DNA
tgctttgactcgaccattaccgaacatgacataatgactgaagagtccatttaccaatcatgtgacttgcagcctgaggc

SEQ ID NO: 26085 - DNA, 80 bp, synthetic construct
  misc_feature 1..80: note = Synthetic: >NC_009826.1-cand-8290-8369
  source 1..80: mol_type = other DNA
gcgcgtggcaatacggtcactcacccaacgcctgtactgtggaggcccaatgtataacagcaagggccagcaatgtggtt

SEQ ID NO: 26086 - DNA, 80 bp, synthetic construct
  misc_feature 1..80: note = Synthetic: >NC_009826.1-cand-8370-8449
  source 1..80: mol_type = other DNA
atcgtagatgccgcgccagcggcgtcttcaccactagtatgggcaacaccatgacgtgctacattaaggctttagcctcc

SEQ ID NO: 26087 - DNA, 80 bp, synthetic construct
  misc_feature 1..80: note = Synthetic: >NC_009826.1-cand-8440-8519
  source 1..80: mol_type = other DNA
tttagcctcctgtagagctgcaaagctccgggactgcacgctcctggtatgtggtgacgaccttgtggccatctgcgaga

SEQ ID NO: 26088 - DNA, 80 bp, synthetic construct
  misc_feature 1..80: note = Synthetic: >NC_009826.1-cand-8530-8609
  source 1..80: mol_type = other DNA
acacgaagatgaagcgagcctgagagccttcactgaggctatgaccaggtactccgctcccccgggtgatcccccggttc

SEQ ID NO: 26089 - DNA, 80 bp, synthetic construct
  misc_feature 1..80: note = Synthetic: >NC_009826.1-cand-8610-8689
  source 1..80: mol_type = other DNA
cagcttatgacctggagctcgtaacatcttgctcctcgaacgtgtccgtcgcccgcgatgcttcaggcaacagaatttac

SEQ ID NO: 26090 - DNA, 80 bp, synthetic construct
  misc_feature 1..80: note = Synthetic: >NC_009826.1-cand-8690-8769
  source 1..80: mol_type = other DNA
tatctcacgcgtgacccgcaggtaccacttgcgaaggctgcgtgggaaactgccaaacactccccggttaattcctggct

SEQ ID NO: 26091 - DNA, 80 bp, synthetic construct
  misc_feature 1..80: note = Synthetic: >NC_009826.1-cand-8770-8849
  source 1..80: mol_type = other DNA
agggaacatcatcatgtacgcgccgaccttgtgggctcggatagtgctgatgacgcactttttcagcgttctacagagcc

SEQ ID NO: 26092 - DNA, 80 bp, synthetic construct
  misc_feature 1..80: note = Synthetic: >NC_009826.1-cand-8850-8929
  source 1..80: mol_type = other DNA
aggaacagctggaaaaaaccctagcatttgaaatgtatgggtcagtttattctgttactccgctggatcttccagctatc

SEQ ID NO: 26093 - DNA, 80 bp, synthetic construct
  misc_feature 1..80: note = Synthetic: >NC_009826.1-cand-8930-9009
  source 1..80: mol_type = other DNA
attcaaagactccatggacttagcgcgttttcactccattcatactctccgagcgagatcaatagggtggctagttgcct

SEQ ID NO: 26094 - DNA, 80 bp, synthetic construct
  misc_feature 1..80: note = Synthetic: >NC_009826.1-cand-9030-9109
  source 1..80: mol_type = other DNA
ctttgagagcttggagacatcgggctcgagctgtacgcgctaagctcatcgcccagggaggtagggccgccatctgcggc

SEQ ID NO: 26095 - DNA, 80 bp, synthetic construct
  misc_feature 1..80: note = Synthetic: >NC_009826.1-cand-9090-9169
  source 1..80: mol_type = other DNA
gtagggccgccatctgcggcatctatctcttcaactgggcggtgaagacaaaacgcaaactcactccattagctgacgct

SEQ ID NO: 26096 - DNA, 80 bp, synthetic construct
  misc_feature 1..80: note = Synthetic: >NC_009826.1-cand-9130-9209
  source 1..80: mol_type = other DNA
ggtgaagacaaaacgcaaactcactccattagctgacgctgaccggctggacttgtccagctggttcaccgttggcgctg

SEQ ID NO: 26097 - DNA, 80 bp, synthetic construct
  misc_feature 1..80: note = Synthetic: >NC_009826.1-cand-9250-9329
  source 1..80: mol_type = other DNA
ccgcaacttactcctgtgcctactcctacttagcgtaggggtaggcatctttttactccccgctcggtgagctgggagct

SEQ ID NO: 26098 - DNA, 80 bp, synthetic construct
  misc_feature 1..80: note = Synthetic: >NC_009827.1-cand-20-99
  source 1..80: mol_type = other DNA
tccaccatgatcactcccctgtgaggaactactgtcttcacgcagaaagcgtctagccatggcgttagtatgagtgtcgt

SEQ ID NO: 26099 - DNA, 80 bp, synthetic construct
  misc_feature 1..80: note = Synthetic: >NC_009827.1-cand-80-159
  source 1..80: mol_type = other DNA
ggcgttagtatgagtgtcgtgcagcctccaggcccccccctcccgggagagccatagtagtctgcggaaccggtgagtac

SEQ ID NO: 26100 - DNA, 80 bp, synthetic construct
  misc_feature 1..80: note = Synthetic: >NC_009827.1-cand-4150-4229
  source 1..80: mol_type = other DNA
atacatgagcaaagctcatggtatagacccgaatatccggacgggtgtcaggaccatcaccacagggggtcccgtaacat

SEQ ID NO: 26101 - DNA, 80 bp, synthetic construct
  misc_feature 1..80: note = Synthetic: >NC_009827.1-cand-4270-4349
  source 1..80: mol_type = other DNA
aggaggagcatatgatatcatcatctgtgacgagtgccactccacagacccaacgacggtgcttggcatcggcactgtcc

SEQ ID NO: 26102 - DNA, 80 bp, synthetic construct
  misc_feature 1..80: note = Synthetic: >NC_009827.1-cand-4290-4369
  source 1..80: mol_type = other DNA
tcatctgtgacgagtgccactccacagacccaacgacggtgcttggcatcggcactgtcctagaccaggcagaaaccgcg

SEQ ID NO: 26103 - DNA, 80 bp, synthetic construct
  misc_feature 1..80: note = Synthetic: >NC_009827.1-cand-4380-4459
  source 1..80: mol_type = other DNA
tcacggtgctcgctacggcgacgccgccaggctctgtcactgtcccccatcctaatataacagagacagctctcccgact

SEQ ID NO: 26104 - DNA, 80 bp, synthetic construct
  misc_feature 1..80: note = Synthetic: >NC_009827.1-cand-4520-4599
  source 1..80: mol_type = other DNA
catctcatcttctgtcactcaaagaagaaatgcgacgaactgtctaaacaactaacctcattaggtctcaatgctgtcgc

SEQ ID NO: 26105 - DNA, 80 bp, synthetic construct
  misc_feature 1..80: note = Synthetic: >NC_009827.1-cand-4550-4629
  source 1..80: mol_type = other DNA
tgcgacgaactgtctaaacaactaacctcattaggtctcaatgctgtcgcattctatagaggtgtcgatgtggctgtgat

SEQ ID NO: 26106 - DNA, 80 bp, synthetic construct
  misc_feature 1..80: note = Synthetic: >NC_009827.1-cand-4630-4709
  source 1..80: mol_type = other DNA
ccccacctcaggcgacgtcgtcgtctgcgcgacggacgcccttatgaccggctacacgggcgactttgactctgtcattg

SEQ ID NO: 26107 - DNA, 80 bp, synthetic construct
  misc_feature 1..80: note = Synthetic: >NC_009827.1-cand-4710-4789
  source 1..80: mol_type = other DNA
attgtaacgtagccgtgacgcaggtggtagacttcagcttggacccaactttttccatagagaccaccacagtcccccaa

SEQ ID NO: 26108 - DNA, 80 bp, synthetic construct
  misc_feature 1..80: note = Synthetic: >NC_009827.1-cand-4760-4839
  source 1..80: mol_type = other DNA
ttttccatagagaccaccacagtcccccaagacgctgtctcgagaagccaacggcgtggtcgcacgggacgaggaaagcc

SEQ ID NO: 26109 - DNA, 80 bp, synthetic construct
  misc_feature 1..80: note = Synthetic: >NC_009827.1-cand-4930-5009
  source 1..80: mol_type = other DNA
atggtatgagctaactcctgcagagacaacggttagactacgtgcctacctaaacactcccgggttgcccgtctgccaag

SEQ ID NO: 26110 - DNA, 80 bp, synthetic construct
  misc_feature 1..80: note = Synthetic: >NC_009827.1-cand-4950-5029
  source 1..80: mol_type = other DNA
cagagacaacggttagactacgtgcctacctaaacactcccgggttgcccgtctgccaagaccacctggagttttgggag

SEQ ID NO: 26111 - DNA, 80 bp, synthetic construct
  misc_feature 1..80: note = Synthetic: >NC_009827.1-cand-5090-5169
  source 1..80: mol_type = other DNA
ggcgagaactttgcctacctcgtggcctatcaggccacggtgtgtgccagagccaaagcccccccgccgtcatgggacgt

SEQ ID NO: 26112 - DNA, 80 bp, synthetic construct
  misc_feature 1..80: note = Synthetic: >NC_009827.1-cand-5110-5189
  source 1..80: mol_type = other DNA
cgtggcctatcaggccacggtgtgtgccagagccaaagcccccccgccgtcatgggacgtgatgtggaaatgtctcacca

SEQ ID NO: 26113 - DNA, 80 bp, synthetic construct
  misc_feature 1..80: note = Synthetic: >NC_009827.1-cand-5150-5229
  source 1..80: mol_type = other DNA
cccccgccgtcatgggacgtgatgtggaaatgtctcaccagacttaagccgaccctcacaggtcctacccccctcctata

SEQ ID NO: 26114 - DNA, 80 bp, synthetic construct
  misc_feature 1..80: note = Synthetic: >NC_009827.1-cand-5270-5349
  source 1..80: mol_type = other DNA
ccaatcacaaagtacatcatgacctgcatgtctgcagacctggaagtcatcacaagtacgtgggtaatcgtaggtggagt

SEQ ID NO: 26115 - DNA, 80 bp, synthetic construct
  misc_feature 1..80: note = Synthetic: >NC_009827.1-cand-5350-5429
  source 1..80: mol_type = other DNA
ccttgccgcattagcagcctactgtttgacagtgggctgtgttgtcatctgtggcaggatcgtgacaagcggcaagcctg

SEQ ID NO: 26116 - DNA, 80 bp, synthetic construct
  misc_feature 1..80: note = Synthetic: >NC_009942.1-cand-1120-1199
  source 1..80: mol_type = other DNA
ggcagaggtccgcagttattgctatttggctaccgtcagcgatctctccaccaaagctgcgtgcccgaccatgggagaag

SEQ ID NO: 26117 - DNA, 80 bp, synthetic construct
  misc_feature 1..80: note = Synthetic: >NC_009942.1-cand-1180-1259
  source 1..80: mol_type = other DNA
gtgcccgaccatgggagaagctcacaatgacaaacgtgctgacccagcttttgtgtgcagacaaggagtggtggacaggg

SEQ ID NO: 26118 - DNA, 80 bp, synthetic construct
  misc_feature 1..80: note = Synthetic: >NC_009942.1-cand-1280-1359
  source 1..80: mol_type = other DNA
ctatttggcaaaggaagcattgacacatgcgccaaatttgcctgctctaccaaggcaataggaagaaccatcttgaaaga

SEQ ID NO: 26119 - DNA, 80 bp, synthetic construct
  misc_feature 1..80: note = Synthetic: >NC_009942.1-cand-1360-1439
  source 1..80: mol_type = other DNA
gaatatcaagtacgaagtggccatttttgtccatggaccaactactgtggagtcgcacggaaactactccacacaggttg

SEQ ID NO: 26120 - DNA, 80 bp, synthetic construct
  misc_feature 1..80: note = Synthetic: >NC_009942.1-cand-1440-1519
  source 1..80: mol_type = other DNA
gagccactcaggcagggagactcagcatcactcctgcggcgccttcatacacactaaagcttggagaatatggagaggtg

SEQ ID NO: 26121 - DNA, 80 bp, synthetic construct
  misc_feature 1..80: note = Synthetic: >NC_009942.1-cand-1520-1599
  source 1..80: mol_type = other DNA
acagtggactgtgaaccacggtcagggattgacaccaatgcatactacgtgatgactgttggaacaaagacgttcttggt

SEQ ID NO: 26122 - DNA, 80 bp, synthetic construct
  misc_feature 1..80: note = Synthetic: >NC_009942.1-cand-1610-1689
  source 1..80: mol_type = other DNA
tggttcatggacctcaacctcccttggagcagtgctggaagtactgtgtggaggaacagagagacgttaatggagtttga

SEQ ID NO: 26123 - DNA, 80 bp, synthetic construct
  misc_feature 1..80: note = Synthetic: >NC_009942.1-cand-1690-1769
  source 1..80: mol_type = other DNA
ggaaccacacgccacgaagcagtctgtgatagcattgggctcacaagagggagctctgcatcaagctttggctggagcca

SEQ ID NO: 26124 - DNA, 80 bp, synthetic construct
  misc_feature 1..80: note = Synthetic: >NC_009942.1-cand-1770-1849
  source 1..80: mol_type = other DNA
ttcctgtggaattttcaagcaacactgtcaagttgacgtcgggtcatttgaagtgtagagtgaagatggaaaaattgcag

SEQ ID NO: 26125 - DNA, 80 bp, synthetic construct
  misc_feature 1..80: note = Synthetic: >NC_009942.1-cand-1850-1929
  source 1..80: mol_type = other DNA
ttgaagggaacaacctatggcgtctgttcaaaggctttcaagtttcttgggactcccgcagacacaggtcacggcactgt

SEQ ID NO: 26126 - DNA, 80 bp, synthetic construct
  misc_feature 1..80: note = Synthetic: >NC_009942.1-cand-1930-2009
  source 1..80: mol_type = other DNA
ggtgttggaattgcagtacactggcacggatggaccttgcaaagttcctatctcgtcagtggcttcattgaacgacctaa

SEQ ID NO: 26127 - DNA, 80 bp, synthetic construct
  misc_feature 1..80: note = Synthetic: >NC_009942.1-cand-2020-2099
  source 1..80: mol_type = other DNA
cagattggtcactgtcaacccttttgtttcagtggccacggccaacgctaaggtcctgattgaattggaaccaccctttg

SEQ ID NO: 26128 - DNA, 80 bp, synthetic construct
  misc_feature 1..80: note = Synthetic: >NC_009942.1-cand-2100-2179
  source 1..80: mol_type = other DNA
gagactcatacatagtggtgggcagaggagaacaacagatcaatcaccattggcacaagtctggaagcagcattggcaaa

SEQ ID NO: 26129 - DNA, 80 bp, synthetic construct
  misc_feature 1..80: note = Synthetic: >NC_009942.1-cand-2180-2259
  source 1..80: mol_type = other DNA
gcctttacaaccaccctcaaaggagcgcagagactagccgctctaggagacacagcttgggactttggatcagttggagg

SEQ ID NO: 26130 - DNA, 80 bp, synthetic construct
  misc_feature 1..80: note = Synthetic: >NC_009942.1-cand-2260-2339
  source 1..80: mol_type = other DNA
ggtgttcacctcagttgggaaggctgtccatcaagtgttcggaggagcattccgctcactgttcggaggcatgtcctgga

SEQ ID NO: 26131 - DNA, 80 bp, synthetic construct
  misc_feature 1..80: note = Synthetic: >NC_009942.1-cand-2360-2439
  source 1..80: mol_type = other DNA
gctctcctgttgtggatgggcatcaatgctcgtgataggtccatagctctcacgtttctcgcagttggaggagttctgct

SEQ ID NO: 26132 - DNA, 80 bp, synthetic construct
  misc_feature 1..80: note = Synthetic: >NC_015150.1-cand-2760-2839
  source 1..80: mol_type = other DNA
acttttggagtaaaagaatcaacagggttgtaccataaaagtaacagcaagattgtgtaaccagagttaagaattctttt

SEQ ID NO: 26133 - DNA, 80 bp, synthetic construct
  misc_feature 1..80: note = Synthetic: >NC_015150.1-cand-2850-2929
  source 1..80: mol_type = other DNA
tcacttttttctaaactctgcttcaggtaggtcttacaatgaaaatggatgtgcaaagcaaatctaactcccactgtggg

SEQ ID NO: 26134 - DNA, 80 bp, synthetic construct
  misc_feature 1..80: note = Synthetic: >NC_015150.1-cand-2930-3009
  source 1..80: mol_type = other DNA
tgggagtaaatactcattcattgtcataattacaggaggaaatatctggcttcttttattcacatgttttttttccagat

SEQ ID NO: 26135 - DNA, 80 bp, synthetic construct
  misc_feature 1..80: note = Synthetic: >NC_015150.1-cand-3020-3099
  source 1..80: mol_type = other DNA
agtaccatctaagtgatctcttaaattatccaaattattaactccctgcccaggttgaagatgtttgtttaaagttatct

SEQ ID NO: 26136 - DNA, 80 bp, synthetic construct
  misc_feature 1..80: note = Synthetic: >NC_015150.1-cand-3100-3179
  source 1..80: mol_type = other DNA
ggcccttcacatcatcaagcaaaacacaaaattgatcaatagcacagcctaactcaaaagataatttttctgctgggcag

SEQ ID NO: 26137 - DNA, 80 bp, synthetic construct
  misc_feature 1..80: note = Synthetic: >NC_015150.1-cand-3190-3269
  source 1..80: mol_type = other DNA
aagctttaccatcaaaaaagtgcatgaaagcagaagctaaggtggttttgccactatttatagggcctttaaagagtatg

SEQ ID NO: 26138 - DNA, 80 bp, synthetic construct
  misc_feature 1..80: note = Synthetic: >NC_015150.1-cand-3270-3349
  source 1..80: mol_type = other DNA
ttcctcttttttggttggcttgtggttaccagctgcaaaattttttgaaaaacatcccatgagttgtcaagtaaaatggt

SEQ ID NO: 26139 - DNA, 80 bp, synthetic construct
  misc_feature 1..80: note = Synthetic: >NC_015150.1-cand-3350-3429
  source 1..80: mol_type = other DNA
gtaccaggccacacctgacatccatcttagaatttcaatttccccatgcaaaaagtcctccatttcatcaaaaagttgaa

SEQ ID NO: 26140 - DNA, 80 bp, synthetic construct
  misc_feature 1..80: note = Synthetic: >NC_015150.1-cand-3430-3509
  source 1..80: mol_type = other DNA
taaatctatcttctaaaagctccattctagtacactctacaagctttaatctcttagctgcaaggacctggtcaactgct

SEQ ID NO: 26141 - DNA, 80 bp, synthetic construct
  misc_feature 1..80: note = Synthetic: >NC_015150.1-cand-3510-3589
  source 1..80: mol_type = other DNA
tgttggcagatattcttttgggatttactctccaagaaaaggcaagcattggcatgatgcttactgtggtaattataatg

SEQ ID NO: 26142 - DNA, 80 bp, synthetic construct
  misc_feature 1..80: note = Synthetic: >NC_015150.1-cand-3590-3669
  source 1..80: mol_type = other DNA
gaatttatgactctttttttcacatttagagcaagtgccaggttccactgcaaaatctaggtagatgccaagcaacagta

SEQ ID NO: 26143 - DNA, 80 bp, synthetic construct
  misc_feature 1..80: note = Synthetic: >NC_015150.1-cand-3670-3749
  source 1..80: mol_type = other DNA
atacatcagtaatttttgcttcaaccgcataattacaaatctcctgccaatttacagcctgttctttttcctcctgaaag

SEQ ID NO: 26144 - DNA, 80 bp, synthetic construct
  misc_feature 1..80: note = Synthetic: >NC_015150.1-cand-3710-3789
  source 1..80: mol_type = other DNA
ctcctgccaatttacagcctgttctttttcctcctgaaagtcaaacatggatacaccaggcttgttttcttccaacaact

SEQ ID NO: 26145 - DNA, 80 bp, synthetic construct
  misc_feature 1..80: note = Synthetic: >NC_015150.1-cand-3840-3919
  source 1..80: mol_type = other DNA
gctttacaatgaatgaaactaaaagtacactgtgcaacacaaaaatgttttacagcagaaactctatgcttgcctaaggt

SEQ ID NO: 26146 - DNA, 80 bp, synthetic construct
  misc_feature 1..80: note = Synthetic: >NC_015150.1-cand-3920-3999
  source 1..80: mol_type = other DNA
aataaaatataacaggcctccttcaattccatcatctttatacaagaaaatagccttaaaatctactttaatttttgatt

SEQ ID NO: 26147 - DNA, 80 bp, synthetic construct
  misc_feature 1..80: note = Synthetic: >NC_015150.1-cand-4000-4079
  source 1..80: mol_type = other DNA
tttcaacagttctgtaaagctgcttacttttttcaactgtagtataaattaaaaagcaattcatagtcttattactatag

SEQ ID NO: 26148 - DNA, 80 bp, synthetic construct
  misc_feature 1..80: note = Synthetic: >NC_019843.3-cand-640-719
  source 1..80: mol_type = other DNA
ggcaagcctattggtatgttcttcccttatgacatcgaacttgtcacaggaaagcaaaatattctcctgcgcaagtatgg

SEQ ID NO: 26149 - DNA, 80 bp, synthetic construct
  misc_feature 1..80: note = Synthetic: >NC_019843.3-cand-720-799
  source 1..80: mol_type = other DNA
ccgtggtggttatcactacaccccattccactatgagcgagacaacacctcttgccctgagtggatggacgattttgagg

SEQ ID NO: 26150 - DNA, 80 bp, synthetic construct
  misc_feature 1..80: note = Synthetic: >NC_019843.3-cand-800-879
  source 1..80: mol_type = other DNA
cggatcctaaaggcaaatatgcccagaatctgcttaagaagttgattggcggtgatgtcactccagttgaccaatacatg

SEQ ID NO: 26151 - DNA, 80 bp, synthetic construct
  misc_feature 1..80: note = Synthetic: >NC_019843.3-cand-880-959
  source 1..80: mol_type = other DNA
tgtggcgttgatggaaaacccattagtgcctacgcatttttaatggccaaggatggaataaccaaactggctgatgttga

SEQ ID NO: 26152 - DNA, 80 bp, synthetic construct
  misc_feature 1..80: note = Synthetic: >NC_019843.3-cand-970-1049
  source 1..80: mol_type = other DNA
gcagcacgtgctgatgacgaaggcttcatcacattaaagaacaatctatatagattggtttggcatgttgagcgtaaaga

SEQ ID NO: 26153 - DNA, 80 bp, synthetic construct
  misc_feature 1..80: note = Synthetic: >NC_019843.3-cand-1050-1129
  source 1..80: mol_type = other DNA
cgttccatatcctaagcaatctatttttactattaatagtgtggtccaaaaggatggtgttgaaaacactcctcctcact

SEQ ID NO: 26154 - DNA, 80 bp, synthetic construct
  misc_feature 1..80: note = Synthetic: >NC_019843.3-cand-1130-1209
  source 1..80: mol_type = other DNA
attttactcttggatgcaaaattttaacgctcaccccacgcaacaagtggagtggcgtttctgacttgtccctcaaacaa

SEQ ID NO: 26155 - DNA, 80 bp, synthetic construct
  misc_feature 1..80: note = Synthetic: >NC_019843.3-cand-1210-1289
  source 1..80: mol_type = other DNA
aaactcctttacaccttctatggtaaggagtcacttgagaacccaacctacatttaccactccgcattcattgagtgtgg

SEQ ID NO: 26156 - DNA, 80 bp, synthetic construct
  misc_feature 1..80: note = Synthetic: >NC_019843.3-cand-1270-1349
  source 1..80: mol_type = other DNA
tccgcattcattgagtgtggaagttgtggtaatgattcctggcttacagggaatgctatccaagggtttgcctgtggatg

SEQ ID NO: 26157 - DNA, 80 bp, synthetic construct
  misc_feature 1..80: note = Synthetic: >NC_019843.3-cand-1370-1449
  source 1..80: mol_type = other DNA
atgatgtcgaagtccaatcatctggcatgattaagccaaatgctcttctttgtgctacttgcccctttgctaagggtgat

SEQ ID NO: 26158 - DNA, 80 bp, synthetic construct
  misc_feature 1..80: note = Synthetic: >NC_019843.3-cand-1450-1529
  source 1..80: mol_type = other DNA
agctgttcttctaattgcaaacattcagttgctcagttggttagttacctttctgaacgctgtaatgttattgctgattc

SEQ ID NO: 26159 - DNA, 80 bp, synthetic construct
  misc_feature 1..80: note = Synthetic: >NC_019843.3-cand-1530-1609
  source 1..80: mol_type = other DNA
taagtccttcacacttatctttggtggcgtagcttacgcctactttggatgtgaggaaggtactatgtactttgtgccta

SEQ ID NO: 26160 - DNA, 80 bp, synthetic construct
  misc_feature 1..80: note = Synthetic: >NC_019843.3-cand-1610-1689
  source 1..80: mol_type = other DNA
gagctaagtctgttgtctcaaggattggagactccatctttacaggctgtactggctcttggaacaaggtcactcaaatt

SEQ ID NO: 26161 - DNA, 80 bp, synthetic construct
  misc_feature 1..80: note = Synthetic: >NC_019843.3-cand-1690-1769
  source 1..80: mol_type = other DNA
gctaacatgttcttggaacagactcagcattcccttaactttgtgggagagttcgttgtcaacgatgttgtcctcgcaat

SEQ ID NO: 26162 - DNA, 80 bp, synthetic construct
  misc_feature 1..80: note = Synthetic: >NC_019843.3-cand-1770-1849
  source 1..80: mol_type = other DNA
tctctctggaaccacaactaatgttgacaaaatacgccagcttctcaaaggtgtcacccttgacaagttgcgtgattatt

SEQ ID NO: 26163 - DNA, 80 bp, synthetic construct
  misc_feature 1..80: note = Synthetic: >NC_019843.3-cand-1850-1929
  source 1..80: mol_type = other DNA
tagctgactatgacgtagcagtcactgccggcccattcatggataatgctattaatgttggtggtacaggattacagtat

SEQ ID NO: 26164 - DNA, 80 bp, synthetic construct
  misc_feature 1..80: note = Synthetic: >NC_019843.3-cand-8330-8409
  source 1..80: mol_type = other DNA
tttggaacgctgctgcatatatgaaactctcggatgcacttaaacgacagattcgcattgcatgccgtaagtgtaattta

SEQ ID NO: 26165 - DNA, 80 bp, synthetic construct
  misc_feature 1..80: note = Synthetic: >NC_019843.3-cand-8410-8489
  source 1..80: mol_type = other DNA
gctttccggttaaccacctcaaagctacgcgctaatgataatatcttatcagttagattcactgctaacaaaattgttgg

SEQ ID NO: 26166 - DNA, 80 bp, synthetic construct
  misc_feature 1..80: note = Synthetic: >NC_019843.3-cand-8490-8569
  source 1..80: mol_type = other DNA
tggtgctcctacatggtttaatgcgttgcgtgactttacgttaaagggttatgttcttgctaccattattgtgtttctgt

SEQ ID NO: 26167 - DNA, 80 bp, synthetic construct
  misc_feature 1..80: note = Synthetic: >NC_019843.3-cand-8570-8649
  source 1..80: mol_type = other DNA
gtgctgtactgatgtatttgtgtttacctacattttctatggcacctgttgaattttatgaagaccgcatcttggacttt

SEQ ID NO: 26168 - DNA, 80 bp, synthetic construct
  misc_feature 1..80: note = Synthetic: >NC_019843.3-cand-8650-8729
  source 1..80: mol_type = other DNA
aaagttcttgataatggtatcattagggatgtaaatcctgatgataagtgctttgctaataagcaccggtccttcacaca

SEQ ID NO: 26169 - DNA, 80 bp, synthetic construct
  misc_feature 1..80: note = Synthetic: >NC_019843.3-cand-8730-8809
  source 1..80: mol_type = other DNA
atggtatcatgagcatgttggtggtgtctatgacaactctatcacatgcccattgacagttgcagtaattgctggagttg

SEQ ID NO: 26170 - DNA, 80 bp, synthetic construct
  misc_feature 1..80: note = Synthetic: >NC_019843.3-cand-8810-8889
  source 1..80: mol_type = other DNA
ctggtgctcgcattccagacgtacctactacattggcttgggtgaacaatcagataattttctttgtttctcgagtcttt

SEQ ID NO: 26171 - DNA, 80 bp, synthetic construct
  misc_feature 1..80: note = Synthetic: >NC_019843.3-cand-8880-8959
  source 1..80: mol_type = other DNA
tcgagtctttgctaatacaggcagtgtttgctacactcctatagatgagataccctataagagtttctctgatagtggtt

SEQ ID NO: 26172 - DNA, 80 bp, synthetic construct
  misc_feature 1..80: note = Synthetic: >NC_019843.3-cand-8960-9039
  source 1..80: mol_type = other DNA
gcattcttccatctgagtgcactatgtttagggatgcagagggccgtatgacaccatactgccatgatcctactgttttg

SEQ ID NO: 26173 - DNA, 80 bp, synthetic construct
  misc_feature 1..80: note = Synthetic: >NC_019843.3-cand-9050-9129
  source 1..80: mol_type = other DNA
ttgcgtacagtcagatgaggcctcatgttcgttacgacttgtatgatggtaacatgtttattaaatttcctgaagtagta

SEQ ID NO: 26174 - DNA, 80 bp, synthetic construct
  misc_feature 1..80: note = Synthetic: >NC_019843.3-cand-9120-9199
  source 1..80: mol_type = other DNA
tgaagtagtatttgaaagtacacttaggattactagaactctgtcaactcagtactgccggttcggtagttgtgagtatg

SEQ ID NO: 26175 - DNA, 80 bp, synthetic construct
  misc_feature 1..80: note = Synthetic: >NC_019843.3-cand-9200-9279
  source 1..80: mol_type = other DNA
cacaagagggtgtttgtattaccacaaatggctcgtgggccatttttaatgaccaccatcttaatagacctggtgtctat

SEQ ID NO: 26176 - DNA, 80 bp, synthetic construct
  misc_feature 1..80: note = Synthetic: >NC_019843.3-cand-9280-9359
  source 1..80: mol_type = other DNA
tgtggctctgattttattgacattgtcaggcggttagcagtatcactgttccagcctattacttatttccaattgactac

SEQ ID NO: 26177 - DNA, 80 bp, synthetic construct
  misc_feature 1..80: note = Synthetic: >NC_019843.3-cand-9360-9439
  source 1..80: mol_type = other DNA
ctcattggtcttgggtataggtttgtgtgcgttcctgactttgctcttctattatattaataaagtaaaacgtgcttttg

SEQ ID NO: 26178 - DNA, 80 bp, synthetic construct
  misc_feature 1..80: note = Synthetic: >NC_019843.3-cand-9440-9519
  source 1..80: mol_type = other DNA
cagattacacccagtgtgctgtaattgctgttgttgctgctgttcttaatagcttgtgcatctgctttgttacctctata

SEQ ID NO: 26179 - DNA, 80 bp, synthetic construct
  misc_feature 1..80: note = Synthetic: >NC_019843.3-cand-9520-9599
  source 1..80: mol_type = other DNA
ccattgtgtatagtaccttacactgcattgtactattatgctacattctattttactaatgagcctgcatttattatgca

SEQ ID NO: 26180 - DNA, 80 bp, synthetic construct
  misc_feature 1..80: note = Synthetic: >NC_029647.1-cand-6040-6119
  source 1..80: mol_type = other DNA
attggcacccctgatttcaaggccgtgatagttggctttgcagccaggcccctcacatccggatcctacgcaaatgaagc

SEQ ID NO: 26181 - DNA, 80 bp, synthetic construct
  misc_feature 1..80: note = Synthetic: >NC_029647.1-cand-6120-6199
  source 1..80: mol_type = other DNA
gtatgttaacaccacagccagtgactacgccccagccactggtaatatgcgcttcacagtcaggaacggcgggaccgggc

SEQ ID NO: 26182 - DNA, 80 bp, synthetic construct
  misc_feature 1..80: note = Synthetic: >NC_029647.1-cand-6200-6279
  source 1..80: mol_type = other DNA
acatatctgcaaacaaatactgggagttcaaatcatttggtgttgaaggagaaaggcacactgacatccagtaccaggag

SEQ ID NO: 26183 - DNA, 80 bp, synthetic construct
  misc_feature 1..80: note = Synthetic: >NC_029647.1-cand-6280-6359
  source 1..80: mol_type = other DNA
tatgagcttcccgattattctggtcaagttgcttccaaccataatctggccccccctgtagccccacgcatgcctggtga

SEQ ID NO: 26184 - DNA, 80 bp, synthetic construct
  misc_feature 1..80: note = Synthetic: >NC_029647.1-cand-6360-6439
  source 1..80: mol_type = other DNA
gtcactattgcttttccaatcaaatatgcctgtgtgggatgatgggcatggagagtccacacccaagaagattcattgcc

SEQ ID NO: 26185 - DNA, 80 bp, synthetic construct
  misc_feature 1..80: note = Synthetic: >NC_029647.1-cand-6440-6519
  source 1..80: mol_type = other DNA
tcttgccacaggagtttattggccatttctttgacaggcaagccccctctctaggtgatgctgcactacttaggtatgtc

SEQ ID NO: 26186 - DNA, 80 bp, synthetic construct
  misc_feature 1..80: note = Synthetic: >NC_029647.1-cand-6520-6599
  source 1..80: mol_type = other DNA
aaccaggagacaaatagagtgttgtttgagtgtaaactttatagggatggctacatcacagttgcagcatcatcaggatt

SEQ ID NO: 26187 - DNA, 80 bp, synthetic construct
  misc_feature 1..80: note = Synthetic: >NC_029647.1-cand-6600-6679
  source 1..80: mol_type = other DNA
attagatttccccttggatggcttctttaggtttgattcttgggttagttctttttacattttatcccccgtgggaagcg

SEQ ID NO: 26188 - DNA, 80 bp, synthetic construct
  misc_feature 1..80: note = Synthetic: >NC_029647.1-cand-6700-6779
  source 1..80: mol_type = other DNA
gtgaggtttcaataatggcttctagcattatggcaggcatagcaggcgatgtgctaggctcagttgtgggtggattagtt

SEQ ID NO: 26189 - DNA, 80 bp, synthetic construct
  misc_feature 1..80: note = Synthetic: >NC_029647.1-cand-6770-6849
  source 1..80: mol_type = other DNA
tggattagttggagccggtgctaacgccataaaccaatctgttgaatttgggtacaaccaagcactgcaatctaatgctt

SEQ ID NO: 26190 - DNA, 80 bp, synthetic construct
  misc_feature 1..80: note = Synthetic: >NC_029647.1-cand-6850-6929
  source 1..80: mol_type = other DNA
tccaacatgataaagacatgcttgccttacaggtggccgcgacccgccagctacagtcggatttgatcaacttgcgcgag

SEQ ID NO: 26191 - DNA, 80 bp, synthetic construct
  misc_feature 1..80: note = Synthetic: >NC_029647.1-cand-6930-7009
  source 1..80: mol_type = other DNA
caggttcttcgcaagggtggtttctccgacactgatgcggcgcgtggagccattggtgcccccatgtcacgccttgtgga

SEQ ID NO: 26192 - DNA, 80 bp, synthetic construct
  misc_feature 1..80: note = Synthetic: >NC_029647.1-cand-7010-7089
  source 1..80: mol_type = other DNA
ttggaacggcacaaggttgtccgccccgggttccatgcacacaacatcatactcgggccggtttgttggcacaaccagac

SEQ ID NO: 26193 - DNA, 80 bp, synthetic construct
  misc_feature 1..80: note = Synthetic: >NC_029647.1-cand-7090-7169
  source 1..80: mol_type = other DNA
aacaaccccacttcacccctcctccgcaaactaatcatgttagaattgatgatgaagtttcttctgtctcttccttgccc

SEQ ID NO: 26194 - DNA, 80 bp, synthetic construct
  misc_feature 1..80: note = Synthetic: >NC_029647.1-cand-7160-7239
  source 1..80: mol_type = other DNA
ttccttgcccacagcggtgacctcagtccctagttctaggacagctgattgggttcatagtcaaagacagctatcctcct

SEQ ID NO: 26195 - DNA, 80 bp, synthetic construct
  misc_feature 1..80: note = Synthetic: >NC_029647.1-cand-7310-7389
  source 1..80: mol_type = other DNA
gtctactccgagttcctcctccagagcgtccactgtggatggttcagtcattgattcatggacccccgcttttaatttga

SEQ ID NO: 26196 - DNA, 80 bp, synthetic construct
  misc_feature 1..80: note = Synthetic: >NC_030791.1-cand-9260-9339
  source 1..80: mol_type = other DNA
tgcgccggcgaggcggacgtggatcacagcacgcccagagcccatcctcgcccattactcctgtgcctactcctacttgc

SEQ ID NO: 26197 - DNA, 80 bp, synthetic construct
  misc_feature 1..80: note = Synthetic: >NC_030791.1-cand-9350-9429
  source 1..80: mol_type = other DNA
ggcattttcctcctacccgctcggtaagcgggtaacactccaggcttttaagccataaattctgtttttttttttttttt

SEQ ID NO: 26198 - DNA, 80 bp, synthetic construct
  misc_feature 1..80: note = Synthetic: >NC_034516.1-cand-50-129
  source 1..80: mol_type = other DNA
tttactacttctagcagccataaccttcccttgtcagtcattgaaaaatgtgtatgacatgaagattgaatgccctcatt

SEQ ID NO: 26199 - DNA, 80 bp, synthetic construct
  misc_feature 1..80: note = Synthetic: >NC_034516.1-cand-80-159
  source 1..80: mol_type = other DNA
ttgtcagtcattgaaaaatgtgtatgacatgaagattgaatgccctcattcagtcaattttggtgagagcagtgtgatgg

SEQ ID NO: 26200 - DNA, 80 bp, synthetic construct
  misc_feature 1..80: note = Synthetic: >NC_034516.1-cand-160-239
  source 1..80: mol_type = other DNA
gaaaagtccagctgccatcactctcaatcactgaggcagagcaactcgtaccggaaagctcgtgtaacatggataaccat

SEQ ID NO: 26201 - DNA, 80 bp, synthetic construct
  misc_feature 1..80: note = Synthetic: >NC_034516.1-cand-240-319
  source 1..80: mol_type = other DNA
cagtctctttcagtgctccaaaaggcaacaaaaacaacttggagaaagaaagcagatcactcaaatgcaggaaaagattc

SEQ ID NO: 26202 - DNA, 80 bp, synthetic construct
  misc_feature 1..80: note = Synthetic: >NC_034516.1-cand-320-399
  source 1..80: mol_type = other DNA
gtatgagctaataacatcagaaattcaatttaaaggtgtctgctcgctcacacataagatgattgaggaatctcacaggt

SEQ ID NO: 26203 - DNA, 80 bp, synthetic construct
  misc_feature 1..80: note = Synthetic: >NC_034516.1-cand-400-479
  source 1..80: mol_type = other DNA
taagacgttcagttatctgttatgacttatcctgcaatactacacactgtaagccaacactatatatggttgtccctgtt

SEQ ID NO: 26204 - DNA, 80 bp, synthetic construct
  misc_feature 1..80: note = Synthetic: >NC_034516.1-cand-480-559
  source 1..80: mol_type = other DNA
cactcctgtaatatgatgaaaagttgtctaataggacttggtccatatagaatccaggtagtttatgaaagaacatattg

SEQ ID NO: 26205 - DNA, 80 bp, synthetic construct
  misc_feature 1..80: note = Synthetic: >NC_034516.1-cand-560-639
  source 1..80: mol_type = other DNA
cactgtgggtgtcttgaatgaagggaaatgttttgtacctgatcagagtgtagccaatattgtaaaaaatggtatttttg

SEQ ID NO: 26206 - DNA, 80 bp, synthetic construct
  misc_feature 1..80: note = Synthetic: >NC_034516.1-cand-600-679
  source 1..80: mol_type = other DNA
gatcagagtgtagccaatattgtaaaaaatggtatttttgacatcgtgagtgttcaaattatatgtttttttataagaat

SEQ ID NO: 26207 - DNA, 80 bp, synthetic construct
  misc_feature 1..80: note = Synthetic: >NC_034516.1-cand-720-799
  source 1..80: mol_type = other DNA
gcaatgaatggcaagtgcaatgggacagatgataaagtacaaggctattatatctgcttgctaggtgggaattcaggtcc

SEQ ID NO: 26208 - DNA, 80 bp, synthetic construct
  misc_feature 1..80: note = Synthetic: >NC_034516.1-cand-800-879
  source 1..80: mol_type = other DNA
tatatatgtaccatcaggaactgactttagggccatggaggctctagccaatatgctaagggctccacatggagaagacc

SEQ ID NO: 26209 - DNA, 80 bp, synthetic construct
  misc_feature 1..80: note = Synthetic: >NC_034516.1-cand-880-959
  source 1..80: mol_type = other DNA
atgacctacctggagaggagcttgcatcttactcaattgcaggcacaattgaaggaaagatccctcatacagcaagttca

SEQ ID NO: 26210 - DNA, 80 bp, synthetic construct
  misc_feature 1..80: note = Synthetic: >NC_034516.1-cand-960-1039
  source 1..80: mol_type = other DNA
caaaacttagaattcactgcgtattcaggtataccaagttattcatcattcagtgtccacacgttgacccaggatggaca

SEQ ID NO: 26211 - DNA, 80 bp, synthetic construct
  misc_feature 1..80: note = Synthetic: >NC_034516.1-cand-1040-1119
  source 1..80: mol_type = other DNA
gctgagctacagccctggtttatttcccaacctgaatcaatctgattgtaaaaagaatgcattacctttaatatgggaag

SEQ ID NO: 26212 - DNA, 80 bp, synthetic construct
  misc_feature 1..80: note = Synthetic: >NC_039477.1-cand-6330-6409
  source 1..80: mol_type = other DNA
tctggcccccgctgtagcccccacctttccgggtgagcaacttctcttcttcagatccaccatgcccggatgcagcgggt

SEQ ID NO: 26213 - DNA, 80 bp, synthetic construct
  misc_feature 1..80: note = Synthetic: >NC_039477.1-cand-6410-6489
  source 1..80: mol_type = other DNA
accccaacatggatttggactgtctgctcccccaggaatgggtgcagtacttctaccaagaggcagccccagcacaatct

SEQ ID NO: 26214 - DNA, 80 bp, synthetic construct
  misc_feature 1..80: note = Synthetic: >NC_039477.1-cand-6490-6569
  source 1..80: mol_type = other DNA
gatgtggctctgctaagatttgtgaatccagacacaggtagggttttgtttgagtgcaagcttcacaaatcaggctatgt

SEQ ID NO: 26215 - DNA, 80 bp, synthetic construct
  misc_feature 1..80: note = Synthetic: >NC_039477.1-cand-6580-6659
  source 1..80: mol_type = other DNA
cacactggccaacatgatttggttatcccccccaatggttactttaggtttgattcctgggtcaaccagttctacacgct

SEQ ID NO: 26216 - DNA, 80 bp, synthetic construct
  misc_feature 1..80: note = Synthetic: >NC_039477.1-cand-6690-6769
  source 1..80: mol_type = other DNA
acgtgtagtataatggctggagctttctttgctggattggcatctgatgtccttggctctggacttggttcccttatcaa

SEQ ID NO: 26217 - DNA, 80 bp, synthetic construct
  misc_feature 1..80: note = Synthetic: >NC_039477.1-cand-6790-6869
  source 1..80: mol_type = other DNA
accaaaaagttgagtttgaaaataacagaaaattgcaacaagcatccttccaatttagcagcaatctgcaacaggcttcc

SEQ ID NO: 26218 - DNA, 80 bp, synthetic construct
  misc_feature 1..80: note = Synthetic: >NC_039477.1-cand-6830-6909
  source 1..80: mol_type = other DNA
agcatccttccaatttagcagcaatctgcaacaggcttcctttcaacatgataaagagatgctccaagcacaaattgagg

SEQ ID NO: 26219 - DNA, 80 bp, synthetic construct
  misc_feature 1..80: note = Synthetic: >NC_039477.1-cand-6910-6989
  source 1..80: mol_type = other DNA
ccaccaaaaagctacaacaggaaatgatgaaagttaagcaggcaatgctcctagagggtgggttctctgagacagatgca

SEQ ID NO: 26220 - DNA, 80 bp, synthetic construct
  misc_feature 1..80: note = Synthetic: >NC_039477.1-cand-7000-7079
  source 1..80: mol_type = other DNA
caattaacgcccccatgacaaaagctttggactggagcgggacaaggtattgggctcccgatgctaggactacaacatac

SEQ ID NO: 26221 - DNA, 80 bp, synthetic construct
  misc_feature 1..80: note = Synthetic: >NC_039477.1-cand-7030-7109
  source 1..80: mol_type = other DNA
actggagcgggacaaggtattgggctcccgatgctaggactacaacatacaatgcaggccgcttttccacccctcaacca

SEQ ID NO: 26222 - DNA, 80 bp, synthetic construct
  misc_feature 1..80: note = Synthetic: >NC_039477.1-cand-7160-7239
  source 1..80: mol_type = other DNA
gggaccctccaataaatcttctaactcttctactgccacctctgtgtactcaaatcaaactatttcaacgagacttggtt

SEQ ID NO: 26223 - DNA, 80 bp, synthetic construct
  misc_feature 1..80: note = Synthetic: >NC_039477.1-cand-7230-7309
  source 1..80: mol_type = other DNA
agacttggttctacagctggttctggaaccagtgtctcgagcctcccgtcaactgcaaggactaggagctgggttgagga

SEQ ID NO: 26224 - DNA, 80 bp, synthetic construct
  misc_feature 1..80: note = Synthetic: >NC_039477.1-cand-7350-7429
  source 1..80: mol_type = other DNA
aacatatcatttgtcaccccaccatctagcagatcctctagccaaggcacagtctcaaccgtgcctaaagagattttgga

SEQ ID NO: 26225 - DNA, 80 bp, synthetic construct
  misc_feature 1..80: note = Synthetic: >NC_039477.1-cand-7390-7469
  source 1..80: mol_type = other DNA
gccaaggcacagtctcaaccgtgcctaaagagattttggactcctggactggcgctttcaacacgcgcaggcagcctctc

SEQ ID NO: 26226 - DNA, 80 bp, synthetic construct
  misc_feature 1..80: note = Synthetic: >NC_039477.1-cand-7410-7489
  source 1..80: mol_type = other DNA
gtgcctaaagagattttggactcctggactggcgctttcaacacgcgcaggcagcctctcttcgctcacattcgtaagcg

SEQ ID NO: 26227 - DNA, 80 bp, synthetic construct
  misc_feature 1..80: note = Synthetic: >NC_039897.1-cand-170-249
  source 1..80: mol_type = other DNA
tctgctacgccgatcacaaacaccttccccatcccggcaagagagcccccccaagagtcagagagaccgccccccccgga

SEQ ID NO: 26228 - DNA, 80 bp, synthetic construct
  misc_feature 1..80: note = Synthetic: >NC_040876.1-cand-260-339
  source 1..80: mol_type = other DNA
tgatgcgaagtcggaaactgtgcgtgggctaccagacttaacaacggtgcagaatgaacacgaaaacacaccatacactg

SEQ ID NO: 26229 - DNA, 80 bp, synthetic construct
  misc_feature 1..80: note = Synthetic: >NC_040876.1-cand-340-419
  source 1..80: mol_type = other DNA
tccctccattgagtgaaagggagcacagaccagccactgagccgcttcctggcacaatactggagatgtgggatggtgaa

SEQ ID NO: 26230 - DNA, 80 bp, synthetic construct
  misc_feature 1..80: note = Synthetic: >NC_040876.1-cand-380-459
  source 1..80: mol_type = other DNA
gccgcttcctggcacaatactggagatgtgggatggtgaattctaccattactccgtgtacgtcagcggtggcaaagccc

SEQ ID NO: 26231 - DNA, 80 bp, synthetic construct
  misc_feature 1..80: note = Synthetic: >NC_040876.1-cand-500-579
  source 1..80: mol_type = other DNA
gatagaactcacacccatatctctttattggaggcccgtttacacccccaactatctggtccacccagacacgttgaaag

SEQ ID NO: 26232 - DNA, 80 bp, synthetic construct
  misc_feature 1..80: note = Synthetic: >NC_040876.1-cand-590-669
  source 1..80: mol_type = other DNA
tgagaagttcccctacacggctttcagcaacaactgttacaacttctgttgctgggtgcttgagctcaatgacacgtggc

SEQ ID NO: 26233 - DNA, 80 bp, synthetic construct
  misc_feature 1..80: note = Synthetic: >NC_040876.1-cand-670-749
  source 1..80: mol_type = other DNA
ttagcaggaggagcatctccaggaccaccggcttcttcaaaccatatcagtcttggaataggaagccccttccaaccgtt

SEQ ID NO: 26234 - DNA, 80 bp, synthetic construct
  misc_feature 1..80: note = Synthetic: >NC_040876.1-cand-750-829
  source 1..80: mol_type = other DNA
gatgatggaaagatcaaaaaggtggccaacgcaatcctctgcgcacttgggtcactattttcaaaaccaatcaaggacct

SEQ ID NO: 26235 - DNA, 80 bp, synthetic construct
  misc_feature 1..80: note = Synthetic: >NC_040876.1-cand-830-909
  source 1..80: mol_type = other DNA
attgggtaaacttaaaccgttgaacttgctgcacttgctcgcatcatgtgactggacgtttgcgggcatagtagagacag

SEQ ID NO: 26236 - DNA, 80 bp, synthetic construct
  misc_feature 1..80: note = Synthetic: >NC_040876.1-cand-910-989
  source 1..80: mol_type = other DNA
ttatcctaatggcggaacttttcaacatcttttggacaccgccagatgtttccagcttcatagcctccctgataggtgat

SEQ ID NO: 26237 - DNA, 80 bp, synthetic construct
  misc_feature 1..80: note = Synthetic: >NC_040876.1-cand-1010-1089
  source 1..80: mol_type = other DNA
ggacctggctgtggagcttgtccccgtggtcatgggtggcataggtatggttctcggcttcactgctgagaagataggcc

SEQ ID NO: 26238 - DNA, 80 bp, synthetic construct
  misc_feature 1..80: note = Synthetic: >NC_040876.1-cand-1050-1129
  source 1..80: mol_type = other DNA
ataggtatggttctcggcttcactgctgagaagataggccgcatgttgtcgtccgccgcatcaacactgcgggcatgcaa

SEQ ID NO: 26239 - DNA, 80 bp, synthetic construct
  misc_feature 1..80: note = Synthetic: >NC_040876.1-cand-1150-1229
  source 1..80: mol_type = other DNA
ttgacatactgaaactggttatgaagtggttcttcccaaagaaagaagagaaagccgagatggagaccttaagggcgatc

SEQ ID NO: 26240 - DNA, 80 bp, synthetic construct
  misc_feature 1..80: note = Synthetic: >NC_040876.1-cand-1230-1309
  source 1..80: mol_type = other DNA
gaggacgccgtcctggacatggaagctataggaaataaccacctcacaaccctcctcaaggacaaggatagcctcacggc

SEQ ID NO: 26241 - DNA, 80 bp, synthetic construct
  misc_feature 1..80: note = Synthetic: >NC_040876.1-cand-1310-1389
  source 1..80: mol_type = other DNA
cttcatgaagactctggatttagaagaggagaaagcaaggaaactgtccaccaagtcatcctcgccagacatcgttggca

SEQ ID NO: 26242 - DNA, 80 bp, synthetic construct
  misc_feature 1..80: note = Synthetic: >NC_040876.1-cand-1390-1469
  source 1..80: mol_type = other DNA
ctattaatgccatactggccagaatagctgctgccaggtccctcttacataaggctaaggaagaaatgtttagcaggatc

SEQ ID NO: 26243 - DNA, 80 bp, synthetic construct
  misc_feature 1..80: note = Synthetic: >NC_040876.1-cand-1480-1559
  source 1..80: mol_type = other DNA
ttgttatgatctcgggtagacctggcattggtaaaacccacatggcaagacacttggctaagagtatcgccaacaccatg

SEQ ID NO: 26244 - DNA, 80 bp, synthetic construct
  misc_feature 1..80: note = Synthetic: >NC_044045.1-cand-6860-6939
  source 1..80: mol_type = other DNA
gcatttgcaatcagcttctttccaacatgataaggacatgctcagttcacaggtggaagccacaaaacacctgcagaggg

SEQ ID NO: 26245 - DNA, 80 bp, synthetic construct
  misc_feature 1..80: note = Synthetic: >NC_044045.1-cand-6920-6999
  source 1..80: mol_type = other DNA
cacaaaacacctgcagagggaaatgatggccatcaaggaaggcatgctgctcaagggcgggttttcccccactgatgcag

SEQ ID NO: 26246 - DNA, 80 bp, synthetic construct
  misc_feature 1..80: note = Synthetic: >NC_044045.1-cand-7020-7099
  source 1..80: mol_type = other DNA
cctatgacacaaatcttggactggaatggcaccagatattgggccccaggtgcaatgaaaaccacggcctactcaggtcg

SEQ ID NO: 26247 - DNA, 80 bp, synthetic construct
  misc_feature 1..80: note = Synthetic: >NC_044045.1-cand-7100-7179
  source 1..80: mol_type = other DNA
ttttgtcagccaatccactcacaggcccattcccaatgttgtgcacaagagtgagggatccacacaccaaactgggtcat

SEQ ID NO: 26248 - DNA, 80 bp, synthetic construct
  misc_feature 1..80: note = Synthetic: >NC_044045.1-cand-7180-7259
  source 1..80: mol_type = other DNA
ccaccggatctatctcttctctttccacatcatccacccgtgttccatcatccacatcctcatctagtagtacttctaga

SEQ ID NO: 26249 - DNA, 80 bp, synthetic construct
  misc_feature 1..80: note = Synthetic: >NC_044045.1-cand-7260-7339
  source 1..80: mol_type = other DNA
acaagagactgggtgtctgaacaacaaagactcagccctttcatgagaggttctcttcaaactgcttatgtaactcctcc

SEQ ID NO: 26250 - DNA, 80 bp, synthetic construct
  misc_feature 1..80: note = Synthetic: >NC_044045.1-cand-7340-7419
  source 1..80: mol_type = other DNA
ctcaagctctgcctcttcagtaagctctgtttctacagtcccacattatgttttagattcatggaccccttcttttaaca

SEQ ID NO: 26251 - DNA, 80 bp, synthetic construct
  misc_feature 1..80: note = Synthetic: >NC_044045.1-cand-7460-7539
  source 1..80: mol_type = other DNA
acaatctcaagtttaatctaccactcatggttttattgatttgttttgtaattagtgaaatgttgattcttttctaattc

SEQ ID NO: 26252 - DNA, 80 bp, synthetic construct
  misc_feature 1..80: note = Synthetic: >NC_044046.1-cand-0-79
  source 1..80: mol_type = other DNA
atgaagatggcgtctaatgacgctattgttgccgttgcaggcaaaaaccacaacgacaatgaaaatcaaaacaaagacgg

SEQ ID NO: 26253 - DNA, 80 bp, synthetic construct
  misc_feature 1..80: note = Synthetic: >NC_044046.1-cand-40-119
  source 1..80: mol_type = other DNA
gcaaaaaccacaacgacaatgaaaatcaaaacaaagacggcatattgtcaaacatggccgtcacttttaaaaaggctttg

SEQ ID NO: 26254 - DNA, 80 bp, synthetic construct
  misc_feature 1..80: note = Synthetic: >NC_044046.1-cand-160-239
  source 1..80: mol_type = other DNA
tgagaccaaccaccccagagctcgtggcacagataccgcctccaccgcccaacggagaggatgaaactactgttaagtat

SEQ ID NO: 26255 - DNA, 80 bp, synthetic construct
  misc_feature 1..80: note = Synthetic: >NC_044046.1-cand-240-319
  source 1..80: mol_type = other DNA
gaggtggacaaagggatcactgggctgccagagctgacaacagtaacacagccagcagagaataacacggcatttagtgt

SEQ ID NO: 26256 - DNA, 80 bp, synthetic construct
  misc_feature 1..80: note = Synthetic: >NC_044046.1-cand-310-389
  source 1..80: mol_type = other DNA
catttagtgtcccccccctcagtcagagggagaaaaacgatgccaaagaaccccttcctggtaccatactagagatgtgg

SEQ ID NO: 26257 - DNA, 80 bp, synthetic construct
  misc_feature 1..80: note = Synthetic: >NC_044046.1-cand-400-479
  source 1..80: mol_type = other DNA
tataccattatgggttgtatgttgagaaagggttggtccttggagttcacaaaccgcccgcagcaataagtatggccaag

SEQ ID NO: 26258 - DNA, 80 bp, synthetic construct
  misc_feature 1..80: note = Synthetic: >NC_044046.1-cand-480-559
  source 1..80: mol_type = other DNA
gtcgagctgaccccattgtctctgtattggaggccggtctacactccgcagtacttggtgtcacctgaaacactgcggaa

SEQ ID NO: 26259 - DNA, 80 bp, synthetic construct
  misc_feature 1..80: note = Synthetic: >NC_044046.1-cand-560-639
  source 1..80: mol_type = other DNA
gctgagtggagagtcattcccatatatagcttttgacaacaattgctacaccttttgctgttgggtgcttgatctaaatg

SEQ ID NO: 26260 - DNA, 80 bp, synthetic construct
  misc_feature 1..80: note = Synthetic: >NC_003310.1-cand-139290-139369
  source 1..80: mol_type = other DNA
tggagattttctattctcgtccattttaggatatgctttcataaagtccctaataacttcgtgaataatgtttctatgtt

SEQ ID NO: 26261 - DNA, 80 bp, synthetic construct
  misc_feature 1..80: note = Synthetic: >NC_003310.1-cand-67130-67209
  source 1..80: mol_type = other DNA
aacatagatggcataacgcacacgttgtaaaacataaaggaatatacaaagttagtacagaagcacgtggaaaaaaagta

SEQ ID NO: 26262 - DNA, 80 bp, synthetic construct
  misc_feature 1..80: note = Synthetic: >NC_001611.1-cand-85100-85179
  source 1..80: mol_type = other DNA
aacatagtttgggaaaagaaatcattagtgacggaaaatcgtcttcataaagcatgcttgttgagactatcaacagagga

SEQ ID NO: 26263 - DNA, 80 bp, synthetic construct
  misc_feature 1..80: note = Synthetic: >NC_007570.1-cand-900-979
  source 1..80: mol_type = other DNA
agaccagctgctatgactcaatacgttcaacgaatttttccacaaggtggaccttatcattttcaggctacatatatgtt

SEQ ID NO: 26264 - DNA, 80 bp, synthetic construct
  misc_feature 1..80: note = Synthetic: >NC_004296.1-cand-810-889
  source 1..80: mol_type = other DNA
ttgaatatctcaggttataattttagcttgggtgcagctgtgaaggcaggagcttgcatgctggatggtggcaatatgtt

SEQ ID NO: 26265 - DNA, 80 bp, synthetic construct
  misc_feature 1..80: note = Synthetic: >NC_001430.1-cand-5460-5539
  source 1..80: mol_type = other DNA
ccatgttgggcatctatgatagaattgcagttgtacccacccatgcatcagttgaggaagaaatttacattaatgatgtt

SEQ ID NO: 26266 - DNA, 80 bp, synthetic construct
  misc_feature 1..80: note = Synthetic: >NC_001611.1-cand-113860-113939
  source 1..80: mol_type = other DNA
catccattgcgttgaatgatgtagttgctgttgttctacgtctaggagcaccagaagtatttttagagctcttggatgtt

SEQ ID NO: 26267 - DNA, 80 bp, synthetic construct
  misc_feature 1..80: note = Synthetic: >NC_007571.1-cand-950-1029
  source 1..80: mol_type = other DNA
acaataattgattatattaatacaattgtacaagcaatgactcccagacatcgggcaatttatccagaagggtggatgtt

SEQ ID NO: 26268 - DNA, 80 bp, synthetic construct
  misc_feature 1..80: note = Synthetic: >NC_003310.1-cand-102930-103009
  source 1..80: mol_type = other DNA
aacatcgaagatgaatcaaatgtaactattcaatgtggagatttaatctgtaaactaagtagagattcgggtactgtatc

SEQ ID NO: 26269 - DNA, 80 bp, synthetic construct
  misc_feature 1..80: note = Synthetic: >NC_001611.1-cand-69900-69979
  source 1..80: mol_type = other DNA
aacatcggtacgggtattcatttatcacaaaaaaaacttctctaaatgagtctactgctagaaaacctcatcgaagaaga

SEQ ID NO: 26270 - DNA, 80 bp, synthetic construct
  misc_feature 1..80: note = Synthetic: >NC_003310.1-cand-33240-33319
  source 1..80: mol_type = other DNA
aacatctaaagaaaaatgattgtcttcttgagacataactcccattttttggtattcacccacacgtttttcgaaaaaat

SEQ ID NO: 26271 - DNA, 80 bp, synthetic construct
  misc_feature 1..80: note = Synthetic: >NC_001611.1-cand-130170-130249
  source 1..80: mol_type = other DNA
aacatgaatttatttctaattctcagagccatagttaattgaccgtgtaatatttgcttacatgcatacttgatacgatc

SEQ ID NO: 26272 - DNA, 80 bp, synthetic construct
  misc_feature 1..80: note = Synthetic: >HCV.B5-cand-4820-4899
  source 1..80: mol_type = other DNA
aacatgcccatgtcagtgaaaacgtgtgatgaagagtgttgcccagtcaacttcaagaaatgttgccccctagtgtgtgg

SEQ ID NO: 26273 - DNA, 80 bp, synthetic construct
  misc_feature 1..80: note = Synthetic: >AdVB3-cand-1970-2049
  source 1..80: mol_type = other DNA
aacatggaaggctcgcaggatgaggacaatcttagattactggccagtgcagcctctgggagtagcagggatactgagac

SEQ ID NO: 26274 - DNA, 80 bp, synthetic construct
  misc_feature 1..80: note = Synthetic: >AdVB3-cand-29300-29379
  source 1..80: mol_type = other DNA
aacatgtacactacaaggaccccaagaaggctatgtcacttggtggagaatatatgataatggagggttcgctagaccat

SEQ ID NO: 26275 - DNA, 80 bp, synthetic construct
  misc_feature 1..80: note = Synthetic: >NC_003310.1-cand-184800-184879
  source 1..80: mol_type = other DNA
acaaaaccatcgaggatagctgtgttctgcacacataactatgataaacgattcaaatcagatattatagttctaatgtt

SEQ ID NO: 26276 - DNA, 80 bp, synthetic construct
  misc_feature 1..80: note = Synthetic: >NC_001611.1-cand-71260-71339
  source 1..80: mol_type = other DNA
agacaattgacaaaattcacagactctcaagattttaaaaaactgtttaacaaggtccctattgttacagatggaagggt

SEQ ID NO: 26277 - DNA, 80 bp, synthetic construct
  misc_feature 1..80: note = Synthetic: >NC_009942.1-cand-3540-3619
  source 1..80: mol_type = other DNA
acccttttcagttgggccttctggtcgtgttcttggccacccaggaggtccttcgcaagaggtggacagccaagatcagc

SEQ ID NO: 26278 - DNA, 80 bp, synthetic construct
  misc_feature 1..80: note = Synthetic: >NC_007359.1-cand-730-809
  source 1..80: mol_type = other DNA
accgaacggctgcattgagggcaagctttctcaaatgtcgaaagaagtaaacgccagaattgagccatttctgaagacaa

SEQ ID NO: 26279 - DNA, 80 bp, synthetic construct
  misc_feature 1..80: note = Synthetic: >NC_001611.1-cand-120080-120159
  source 1..80: mol_type = other DNA
ccaatcagcatttgatttaagtagagaatgtttgggatatccagaagcggattttataacgttagttaataacatgcggt

SEQ ID NO: 26280 - DNA, 80 bp, synthetic construct
  misc_feature 1..80: note = Synthetic: >NC_035889.1-cand-10230-10309
  source 1..80: mol_type = other DNA
accgcgcaccacctgggctgagaacattaaaaacacagtcaacatggtgcgcaggatcataggtgatgaagaaaagtaca

SEQ ID NO: 26281 - DNA, 80 bp, synthetic construct
  misc_feature 1..80: note = Synthetic: >NC_009826.1-cand-100-179
  source 1..80: mol_type = other DNA
accggaattgccgggatgaccgggtcctttcttggataaacccgctcaatgcccggagatttgggcgtgcccccgcgaga

SEQ ID NO: 26282 - DNA, 80 bp, synthetic construct
  misc_feature 1..80: note = Synthetic: >NC_006573.1-cand-0-79
  source 1..80: mol_type = other DNA
accggggatcctaggcatttttggttgcgcaattcaagtgtcctatttaaaatgggacaaatagtgacattcttccagga

SEQ ID NO: 26283 - DNA, 80 bp, synthetic construct
  misc_feature 1..80: note = Synthetic: >AdVB7-cand-16400-16479
  source 1..80: mol_type = other DNA
gttgtgtcccagcggcaagtatgtccaagcgcaaatacaaggaagagatgctccaggtcatcgcgcctgaaatctacggt

SEQ ID NO: 26284 - DNA, 80 bp, synthetic construct
  misc_feature 1..80: note = Synthetic: >AdVB7-cand-22120-22199
  source 1..80: mol_type = other DNA
accgtatggatatgcaataagtcatgtaaaaccgtgttcaataaaaagcactttatttttacatgcactaaggctctcgt

SEQ ID NO: 26285 - DNA, 80 bp, synthetic construct
  misc_feature 1..80: note = Synthetic: >NC_001611.1-cand-88160-88239
  source 1..80: mol_type = other DNA
accgtattattgtaattcagtagctagacaaatggtcaatgatatgatttttaatcaagattcatttttaaaatatttat

SEQ ID NO: 26286 - DNA, 80 bp, synthetic construct
  misc_feature 1..80: note = Synthetic: >AdVB3-cand-11120-11199
  source 1..80: mol_type = other DNA
tgttcagggacaggagcggcgaggagccagaggagatgcgagcatctcgatttaacgcgggtcgcgagctgcgccacggt

SEQ ID NO: 26287 - DNA, 80 bp, synthetic construct
  misc_feature 1..80: note = Synthetic: >AdVB3-cand-26290-26369
  source 1..80: mol_type = other DNA
actaccgtcacctccacagcccctactgcagtcagcaagtcccggcaaccccaacagaaaaatacagcagcgacaacggt

SEQ ID NO: 26288 - DNA, 80 bp, synthetic construct
  misc_feature 1..80: note = Synthetic: >NC_001611.1-cand-117120-117199
  source 1..80: mol_type = other DNA
acctaagggattttactcctctccttccgtaaagacgagtttagtattcgagacattaacaacgaccgataataaaatta

SEQ ID NO: 26289 - DNA, 80 bp, synthetic construct
  misc_feature 1..80: note = Synthetic: >NC_003310.1-cand-68010-68089
  source 1..80: mol_type = other DNA
acctaatcccgcatttatacatattcctggagatacactgtttaaaattagcgaggtatttattcataataagataaatc

SEQ ID NO: 26290 - DNA, 80 bp, synthetic construct
  misc_feature 1..80: note = Synthetic: >NC_001430.1-cand-6090-6169
  source 1..80: mol_type = other DNA
caatattttccaaatacgttggtaacaaaaccatgctaatggatgagtacatggaggaggcagtggaccactatgtaggt

SEQ ID NO: 26291 - DNA, 80 bp, synthetic construct
  misc_feature 1..80: note = Synthetic: >NC_003310.1-cand-140810-140889
  source 1..80: mol_type = other DNA
acctgaactaaacgctataagctctattgtttgagaactctttaaacgatattcttgaaatacatgtaacaaagtttcct

SEQ ID NO: 26292 - DNA, 80 bp, synthetic construct
  misc_feature 1..80: note = Synthetic: >AF482714.1-cand-1210-1289
  source 1..80: mol_type = other DNA
agtaaatcactttcatcttggtgatgatatggatcctgagcttagacagcttgctcagtccttgattgacactaaggtga

SEQ ID NO: 26293 - DNA, 80 bp, synthetic construct
  misc_feature 1..80: note = Synthetic: >AF482714.1-cand-1290-1369
  source 1..80: mol_type = other DNA
aggagatttccaatcaggagccattaaagctgtaagagctagtaaatttaagagccatcactgccataagagccagaact

SEQ ID NO: 26294 - DNA, 80 bp, synthetic construct
  misc_feature 1..80: note = Synthetic: >AF482714.1-cand-1370-1449
  source 1..80: mol_type = other DNA
agtcaatatctgaagattatgttggttgggtggattttccgggcttgtgccacttatttaatcatctcaggattctctaa

SEQ ID NO: 26295 - DNA, 80 bp, synthetic construct
  misc_feature 1..80: note = Synthetic: >AF482714.1-cand-1450-1529
  source 1..80: mol_type = other DNA
tgtgattaatacgggttgatcataagggtggtaagtgggtttcaattactaactttgggtatgggaacactactatcctt

SEQ ID NO: 26296 - DNA, 80 bp, synthetic construct
  misc_feature 1..80: note = Synthetic: >AF482714.1-cand-1530-1609
  source 1..80: mol_type = other DNA
tgcactagggttaagggccactattatatatttgcactactgggattagggttaatgttaagtccatagtttcaagtagc

SEQ ID NO: 26297 - DNA, 80 bp, synthetic construct
  misc_feature 1..80: note = Synthetic: >AF482714.1-cand-1610-1689
  source 1..80: mol_type = other DNA
cgataagatagtgataagatagacataggaattgattaagtagatagatagccagatgaaatcactgattgattggctat

SEQ ID NO: 26298 - DNA, 80 bp, synthetic construct
  misc_feature 1..80: note = Synthetic: >AF482714.1-cand-1690-1769
  source 1..80: mol_type = other DNA
caatgttaatcattgtaggatatagttttaagttaaggttaatcattagcattcttagttttttaagatgaactaacaat

SEQ ID NO: 26299 - DNA, 80 bp, synthetic construct
  misc_feature 1..80: note = Synthetic: >AF482714.1-cand-1780-1859
  source 1..80: mol_type = other DNA
cactggatgtaaatttcgttcattgctttgctgctttctgctatattaactcacaacaacactacctcatccacaaaccc

SEQ ID NO: 26300 - DNA, 80 bp, synthetic construct
  misc_feature 1..80: note = Synthetic: >AF482714.1-cand-1840-1919
  source 1..80: mol_type = other DNA
actacctcatccacaaaccctccccttttctacctcaaataaaactacctcaattctgatttctcttgattgcttttcaa

SEQ ID NO: 26301 - DNA, 80 bp, synthetic construct
  misc_feature 1..80: note = Synthetic: >AF482716.1-cand-10-89
  source 1..80: mol_type = other DNA
ttgataagctactgctgtaaaagctggaatgagcaacctccaagaattgcaagagaatatcactgcacacgaacaacaac

SEQ ID NO: 26302 - DNA, 80 bp, synthetic construct
  misc_feature 1..80: note = Synthetic: >AF482716.1-cand-100-179
  source 1..80: mol_type = other DNA
caggcagaagctgaaagatgcagaaaaagccgtggacgtggacccagatgaggttaacaagagtacactacaaggtcgac

SEQ ID NO: 26303 - DNA, 80 bp, synthetic construct
  misc_feature 1..80: note = Synthetic: >AF482716.1-cand-190-269
  source 1..80: mol_type = other DNA
gtcaacattggagaccaaacttggagagctcaagagacagcttgctgacttggtggcagctcaaaaactggctacaaaac

SEQ ID NO: 26304 - DNA, 80 bp, synthetic construct
  misc_feature 1..80: note = Synthetic: >AF482716.1-cand-350-429
  source 1..80: mol_type = other DNA
aattctattgacctggaagaaccaagtggacaaaccgctgactggaaggctattggagcatacatactgggttttgcaat

SEQ ID NO: 26305 - DNA, 80 bp, synthetic construct
  misc_feature 1..80: note = Synthetic: >AF482716.1-cand-410-489
  source 1..80: mol_type = other DNA
tacatactgggttttgcaattccgatcatcctaaaggctttgtacatgctgtcaacccgtggaaggcagacggtcaagga

SEQ ID NO: 26306 - DNA, 80 bp, synthetic construct
  misc_feature 1..80: note = Synthetic: >AF482716.1-cand-510-589
  source 1..80: mol_type = other DNA
gattcaaggatgattcatcttttgaagaagtaaatgggattaggaagccaaagcatctctacatctccatgccgactgct

SEQ ID NO: 26307 - DNA, 80 bp, synthetic construct
  misc_feature 1..80: note = Synthetic: >AF482716.1-cand-590-669
  source 1..80: mol_type = other DNA
cagtccacaatgaaagctgaggagataacacctgggaggtttagaacgattgtatgtggattgtttcctgctcaagtgaa

SEQ ID NO: 26308 - DNA, 80 bp, synthetic construct
  misc_feature 1..80: note = Synthetic: >AiVC-cand-4640-4719
  source 1..80: mol_type = other DNA
gttacccctgaggaagcacacgcagcaacggttgaacaccaaggtgttcgcgactacaatgatgccgtcaacgcggtcaa

SEQ ID NO: 26309 - DNA, 80 bp, synthetic construct
  misc_feature 1..80: note = Synthetic: >AiVC-cand-4720-4799
  source 1..80: mol_type = other DNA
gaacaccgagtggctcatggacacgtgctggcgttgggctgagcgtgtactgacatggattcgtggcaaagcgaagactg

SEQ ID NO: 26310 - DNA, 80 bp, synthetic construct
  misc_feature 1..80: note = Synthetic: >AiVC-cand-4800-4879
  source 1..80: mol_type = other DNA
atccacaaacagtccttgctgacgcacatgatgaaattctcagacactactcagaatcaatcgctgcactctcctctgag

SEQ ID NO: 26311 - DNA, 80 bp, synthetic construct
  misc_feature 1..80: note = Synthetic: >AiVC-cand-4880-4959
  source 1..80: mol_type = other DNA
cgcactccggtgtccgcgatcacggacgccatcacgcgttgtcgcgagctcaccaaggtggctgccgacgctaagtctgc

SEQ ID NO: 26312 - DNA, 80 bp, synthetic construct
  misc_feature 1..80: note = Synthetic: >AiVC-cand-4960-5039
  source 1..80: mol_type = other DNA
tcctcattcctccttcctctctcaggccttgcggaactaccaacttgctctcaactctgcccgcatggcccaatctggtc

SEQ ID NO: 26313 - DNA, 80 bp, synthetic construct
  misc_feature 1..80: note = Synthetic: >AiVC-cand-5040-5119
  source 1..80: mol_type = other DNA
ctcgtccagaacctgttgtgatctacctctatggtccaccaggaactggcaaatctcttcttgcttctctccttgctaga

SEQ ID NO: 26314 - DNA, 80 bp, synthetic construct
  misc_feature 1..80: note = Synthetic: >AiVC-cand-5120-5199
  source 1..80: mol_type = other DNA
gttcttgctcagaagttgtctggtaacccagatgacgtctactctccctcttctgccagttgcgaatacttcgacggtta

SEQ ID NO: 26315 - DNA, 80 bp, synthetic construct
  misc_feature 1..80: note = Synthetic: >AiVC-cand-5210-5289
  source 1..80: mol_type = other DNA
gtcgtccacttcatcgatgatcttggtcaggaccccgagggtcgcgactgggcaaactttcctaatcttatctcttctgc

SEQ ID NO: 26316 - DNA, 80 bp, synthetic construct
  misc_feature 1..80: note = Synthetic: >AiVC-cand-5290-5369
  source 1..80: mol_type = other DNA
tcctttcatcgtgccaatggctaatctcgaggccaaaggcacacactacacctcccaggtagttgtggtcacttccaact

SEQ ID NO: 26317 - DNA, 80 bp, synthetic construct
  misc_feature 1..80: note = Synthetic: >AiVC-cand-5380-5459
  source 1..80: mol_type = other DNA
aaacgagcgggctgcgcgttccattggtgcactgcgcaggcgcatgcacctacggattaacgtggaccgcatcgacggca

SEQ ID NO: 26318 - DNA, 80 bp, synthetic construct
  misc_feature 1..80: note = Synthetic: >AiVC-cand-5460-5539
  source 1..80: mol_type = other DNA
aacccttcgatcctgtggaggccctcaaacctcttaaccaaccttctaaatacctaacttctcaaactgaactttctctc

SEQ ID NO: 26319 - DNA, 80 bp, synthetic construct
  misc_feature 1..80: note = Synthetic: >AiVC-cand-5540-5619
  source 1..80: mol_type = other DNA
ttcaaatctttcaaacttactgttgctgtagactctctatggcaaccttctttcacagacttcgactcattggttgatgc

SEQ ID NO: 26320 - DNA, 80 bp, synthetic construct
  misc_feature 1..80: note = Synthetic: >AiVC-cand-5650-5729
  source 1..80: mol_type = other DNA
ggtctctgacctcctggctagtctggtcaaacggcagggcttgaccattgaagcggagcctactgaactctcctatcagg

SEQ ID NO: 26321 - DNA, 80 bp, synthetic construct
  misc_feature 1..80: note = Synthetic: >AiVC-cand-5710-5789
  source 1..80: mol_type = other DNA
tactgaactctcctatcaggatgctcttgaaatgcttgctgaatctaaacctgtatctactactctttcctttgagcggg

SEQ ID NO: 26322 - DNA, 80 bp, synthetic construct
  misc_feature 1..80: note = Synthetic: >AiVC-cand-5790-5869
  source 1..80: mol_type = other DNA
ctgtttcacagaacgctcctctttcggtggttaaccagctctggaactaccgaaaacctatctttgcctgtactactttc

SEQ ID NO: 26323 - DNA, 80 bp, synthetic construct
  misc_feature 1..80: note = Synthetic: >AiVC-cand-5870-5949
  source 1..80: mol_type = other DNA
cttactgtgattggtttcgttcttaccatcattgccgtggcgcgaacgctctggaaggctaaagaggacgcacctgacaa

SEQ ID NO: 26324 - DNA, 80 bp, synthetic construct
  misc_feature 1..80: note = Synthetic: >EVA71-cand-5310-5389
  source 1..80: mol_type = other DNA
ctctttgcagggtttcagggtgcgtattctggtgctcccaagcaagtgcttaagaaacctgtccttcgcacagcaacagt

SEQ ID NO: 26325 - DNA, 80 bp, synthetic construct
  misc_feature 1..80: note = Synthetic: >EVA71-cand-5380-5459
  source 1..80: mol_type = other DNA
cagcaacagtacagggcccgagccttgactttgctctctccctactgagaaggaacatcaggcaagtccaaacagaccag

SEQ ID NO: 26326 - DNA, 80 bp, synthetic construct
  misc_feature 1..80: note = Synthetic: >EVA71-cand-5480-5559
  source 1..80: mol_type = other DNA
tgttagggatcgcttagcagtcctcccacgccactcacaacctgggaaaactatttgggttgagcacaaactcgtgaacg

SEQ ID NO: 26327 - DNA, 80 bp, synthetic construct
  misc_feature 1..80: note = Synthetic: >EVA71-cand-5560-5639
  source 1..80: mol_type = other DNA
tccttgatgcagttgagctggtggatgagcaaggagtcaacctggaactaaccctcgtcactcttgacaccaacgaaaaa

SEQ ID NO: 26328 - DNA, 80 bp, synthetic construct
  misc_feature 1..80: note = Synthetic: >EVA71-cand-5640-5719
  source 1..80: mol_type = other DNA
tttagggatatcaccaaattcatcccagaaaatattagcactgctagtgatgccaccctagtgatcaacacggagcacat

SEQ ID NO: 26329 - DNA, 80 bp, synthetic construct
  misc_feature 1..80: note = Synthetic: >EVA71-cand-5720-5799
  source 1..80: mol_type = other DNA
gccatcaatgtttgtcccggtgggtgacgttgtgcagtatggcttcttgaatctcagtggtaagcctacccatcgcacca

SEQ ID NO: 26330 - DNA, 80 bp, synthetic construct
  misc_feature 1..80: note = Synthetic: >EVA71-cand-5800-5879
  source 1..80: mol_type = other DNA
tgatgtacaactttcctactaaagcaggacagtgtggaggagtggtgacatctgttgggaaggttgttggtattcacatt

SEQ ID NO: 26331 - DNA, 80 bp, synthetic construct
  misc_feature 1..80: note = Synthetic: >EVA71-cand-5890-5969
  source 1..80: mol_type = other DNA
gcagacaaggtttttgcgcaggcctcaagaggagttactttgctagtgaacaaggagagatccaatgggtgaagcccaat

SEQ ID NO: 26332 - DNA, 80 bp, synthetic construct
  misc_feature 1..80: note = Synthetic: >EVA71-cand-5970-6049
  source 1..80: mol_type = other DNA
aaagaaactggaagactcaacatcaatggaccaacccgcaccaagttagaacctagtgtattccatgatgtcttcgaggg

SEQ ID NO: 26333 - DNA, 80 bp, synthetic construct
  misc_feature 1..80: note = Synthetic: >EVA71-cand-6050-6129
  source 1..80: mol_type = other DNA
aaataaagaaccagctgtcttgcacagtaaagacccccgacttgaggtagattttgaacaggccctgttctctaagtatg

SEQ ID NO: 26334 - DNA, 80 bp, synthetic construct
  misc_feature 1..80: note = Synthetic: >EVA71-cand-6130-6209
  source 1..80: mol_type = other DNA
tgggaaacacactacatgagcctgacgagtacatcaaagaggcagctcttcattatgcaaaccaattaaagcaattagaa

SEQ ID NO: 26335 - DNA, 80 bp, synthetic construct
  misc_feature 1..80: note = Synthetic: >EVA71-cand-6210-6289
  source 1..80: mol_type = other DNA
attaacacctctcaaatgagcatggaggaggcctgctacggtactgagaaccttgaggctattgatcttcacactagtgc

SEQ ID NO: 26336 - DNA, 80 bp, synthetic construct
  misc_feature 1..80: note = Synthetic: >EVA71-cand-6320-6399
  source 1..80: mol_type = other DNA
gaaaagagacatcttagaccctaccaccagggatgtgagtaaaatgaagttctacatggacaagtatggtcttgatcttc

SEQ ID NO: 26337 - DNA, 80 bp, synthetic construct
  misc_feature 1..80: note = Synthetic: >EVA71-cand-6370-6449
  source 1..80: mol_type = other DNA
tctacatggacaagtatggtcttgatcttccttactccacttatgtcaaggatgagctgcgctcgattgataaaatcaag

SEQ ID NO: 26338 - DNA, 80 bp, synthetic construct
  misc_feature 1..80: note = Synthetic: >EVA71-cand-6450-6529
  source 1..80: mol_type = other DNA
aaagggaagtcccgcctgatagaggctagtagtctaaatgattcagtgtacctcagaatggcttttgggcatctgtatga

SEQ ID NO: 26339 - DNA, 80 bp, synthetic construct
  misc_feature 1..80: note = Synthetic: >EVA71-cand-6580-6659
  source 1..80: mol_type = other DNA
accctgacgtattctggagcaagctgccaattttgctccctggttcactctttgcctttgactactcaggttatgatgct

SEQ ID NO: 26340 - DNA, 80 bp, synthetic construct
  misc_feature 1..80: note = Synthetic: >EVB101-cand-1080-1159
  source 1..80: mol_type = other DNA
gaggctacagcagaagatcaaccaacacagccagatgtggcgacttgccgcttctatactctagactccatacactggga

SEQ ID NO: 26341 - DNA, 80 bp, synthetic construct
  misc_feature 1..80: note = Synthetic: >EVB101-cand-1130-1209
  source 1..80: mol_type = other DNA
cttctatactctagactccatacactgggagaaagagtcacctgggtggtggtggaagtttccagacgcactgaaagaca

SEQ ID NO: 26342 - DNA, 80 bp, synthetic construct
  misc_feature 1..80: note = Synthetic: >EVB101-cand-1240-1319
  source 1..80: mol_type = other DNA
attacttgggcagagcaggatatactattcatgtgcaatgcaatgcatctaagttccatcaagggtgtttgctggttgtg

SEQ ID NO: 26343 - DNA, 80 bp, synthetic construct
  misc_feature 1..80: note = Synthetic: >EVB101-cand-1280-1359
  source 1..80: mol_type = other DNA
caatgcatctaagttccatcaagggtgtttgctggttgtgtgtgtcccggaagccgagatgggatgcgcggacgtacaag

SEQ ID NO: 26344 - DNA, 80 bp, synthetic construct
  misc_feature 1..80: note = Synthetic: >EVB101-cand-1400-1479
  source 1..80: mol_type = other DNA
atctgtgtttagcaataccaataccacaggccagggtaaagtacaaaatcaagtgtgcaacgctggcatgggagtcggag

SEQ ID NO: 26345 - DNA, 80 bp, synthetic construct
  misc_feature 1..80: note = Synthetic: >EVB101-cand-1490-1569
  source 1..80: mol_type = other DNA
gaccattttccctcaccaatggataaacctgagaaccaacaatagtgcgactattgtcatgccgtacatcaactctgtcc

SEQ ID NO: 26346 - DNA, 80 bp, synthetic construct
  misc_feature 1..80: note = Synthetic: >EVB101-cand-1560-1639
  source 1..80: mol_type = other DNA
aactctgtccctatggacaatatgtttaggcattacaacttcacactaatgatcattccgttcgcaaagcttgattacac

SEQ ID NO: 26347 - DNA, 80 bp, synthetic construct
  misc_feature 1..80: note = Synthetic: >EVB101-cand-1640-1719
  source 1..80: mol_type = other DNA
agcgactgcctcatacgtgccaattaccgttacggttgcacctatgtgtgctgagtacaacgggttgaggctgtccacac

SEQ ID NO: 26348 - DNA, 80 bp, synthetic construct
  misc_feature 1..80: note = Synthetic: >EVB101-cand-1730-1809
  source 1..80: mol_type = other DNA
gctccccgtgatgaccaccccaggaagcgcacagttcctaacgtccgatgacttccagtccccgtgtgccatgccacaat

SEQ ID NO: 26349 - DNA, 80 bp, synthetic construct
  misc_feature 1..80: note = Synthetic: >EVB101-cand-1800-1879
  source 1..80: mol_type = other DNA
atgccacaatttgactcgaccccagaaatgcatataccgggtgaggtgaagaacctgatggagattgcagaggttgattc

SEQ ID NO: 26350 - DNA, 80 bp, synthetic construct
  misc_feature 1..80: note = Synthetic: >EVB101-cand-1880-1959
  source 1..80: mol_type = other DNA
agtcgtgccggttaacaacacagcaaggaacatccatagtatggaggcatatcgcataccagtgcagtgcttcaacacac

SEQ ID NO: 26351 - DNA, 80 bp, synthetic construct
  misc_feature 1..80: note = Synthetic: >EVB101-cand-1970-2049
  source 1..80: mol_type = other DNA
ggtgttcggatttgaaatgcaaccaggaaaggaaaccgtattcaagcgcacattagttggagaaatcttgaactactacg

SEQ ID NO: 26352 - DNA, 80 bp, synthetic construct
  misc_feature 1..80: note = Synthetic: >EVB101-cand-2030-2109
  source 1..80: mol_type = other DNA
agaaatcttgaactactacgctcattggtcaggcagcctaaaattaaccctaaccttttgcggatctgctatggcgactg

SEQ ID NO: 26353 - DNA, 80 bp, synthetic construct
  misc_feature 1..80: note = Synthetic: >EVB101-cand-2110-2189
  source 1..80: mol_type = other DNA
gcaagttcctagtcgcatactcaccccctggagctaaccctccaaagaacagaaaggatgccatgttaggcactcatatc

SEQ ID NO: 26354 - DNA, 80 bp, synthetic construct
  misc_feature 1..80: note = Synthetic: >EVB101-cand-2210-2289
  source 1..80: mol_type = other DNA
gtcaagctgtgtactgtgtgtgccatggattagccaaacacattacaggctagtggatcaggatgcctacactgacgcag

SEQ ID NO: 26355 - DNA, 80 bp, synthetic construct
  misc_feature 1..80: note = Synthetic: >EVB101-cand-2230-2309
  source 1..80: mol_type = other DNA
tgccatggattagccaaacacattacaggctagtggatcaggatgcctacactgacgcagggaacgtcacatgttggtac

SEQ ID NO: 26356 - DNA, 80 bp, synthetic construct
  misc_feature 1..80: note = Synthetic: >EVB75-cand-4260-4339
  source 1..80: mol_type = other DNA
cagagtgcgccctcacaaagtgatcaagagcaattgttttccaacgttcagtattttgcacactattgcaggaaatatgc

SEQ ID NO: 26357 - DNA, 80 bp, synthetic construct
  misc_feature 1..80: note = Synthetic: >EVB75-cand-4340-4419
  source 1..80: mol_type = other DNA
ccccctgtacgctgcggaagctaagagagtgttcaccctggaaaagaaaatgagcaattatatacagttcaagtccaaat

SEQ ID NO: 26358 - DNA, 80 bp, synthetic construct
  misc_feature 1..80: note = Synthetic: >EVB75-cand-4420-4499
  source 1..80: mol_type = other DNA
gccgtattgaacctgtatgtcttctgctccacgggagccctggcgctggtaaatccgtggcaaccaacttgattgggcgt

SEQ ID NO: 26359 - DNA, 80 bp, synthetic construct
  misc_feature 1..80: note = Synthetic: >EVB75-cand-4500-4579
  source 1..80: mol_type = other DNA
tcactggcagaaaaacttaatagttcagtgtactccctaccaccagaccccgaccattttgacggttacaaacaacaagc

SEQ ID NO: 26360 - DNA, 80 bp, synthetic construct
  misc_feature 1..80: note = Synthetic: >EVB75-cand-4580-4659
  source 1..80: mol_type = other DNA
tgtcgtgatcatggatgacctgtgtcaaaatccagacggtaaggacgtatccttgttctgtcagatggtgtcaagtgttg

SEQ ID NO: 26361 - DNA, 80 bp, synthetic construct
  misc_feature 1..80: note = Synthetic: >EVB75-cand-4660-4739
  source 1..80: mol_type = other DNA
actttgtcccaccgatggcggcacttgaggagaagggcattcttttcacgtcaccatttgtcctcgcttcaaccaacgcc

SEQ ID NO: 26362 - DNA, 80 bp, synthetic construct
  misc_feature 1..80: note = Synthetic: >EVB75-cand-4740-4819
  source 1..80: mol_type = other DNA
ggttccattaatgctcccaccgtatcagacagtagagcgctcgcaagaaggttccactttgacatgaatattgaagttat

SEQ ID NO: 26363 - DNA, 80 bp, synthetic construct
  misc_feature 1..80: note = Synthetic: >EVB75-cand-4820-4899
  source 1..80: mol_type = other DNA
ctccatgtatagccagaatggtaagattaacatgccaatgtcagtgaaaacatgtgatgaggagtgttgcccggtcaact

SEQ ID NO: 26364 - DNA, 80 bp, synthetic construct
  misc_feature 1..80: note = Synthetic: >EVB75-cand-4900-4979
  source 1..80: mol_type = other DNA
ttaagaagtgttgcccactggtctgtggcaaggctatccaatttattgataggagaacacaaatgaggtactcactggac

SEQ ID NO: 26365 - DNA, 80 bp, synthetic construct
  misc_feature 1..80: note = Synthetic: >EVB75-cand-5060-5139
  source 1..80: mol_type = other DNA
accagtgtatagagagatcaaaattagcgtagcaccagagacccctccccccccagctatattggacttgctgaaatcag

SEQ ID NO: 26366 - DNA, 80 bp, synthetic construct
  misc_feature 1..80: note = Synthetic: >EVB75-cand-5140-5219
  source 1..80: mol_type = other DNA
tggatagcgaggcagttagggagtactgtaaagagaagggttggttggtgcctgaggtcaactccactctgcagattgag

SEQ ID NO: 26367 - DNA, 80 bp, synthetic construct
  misc_feature 1..80: note = Synthetic: >EVB75-cand-5220-5299
  source 1..80: mol_type = other DNA
aagcatgtgagtagggccttcatctgcctacaagcactcaccacatttgtttcagtggcaggcataatatacatcatcta

SEQ ID NO: 26368 - DNA, 80 bp, synthetic construct
  misc_feature 1..80: note = Synthetic: >EVB75-cand-5300-5379
  source 1..80: mol_type = other DNA
caaactgtttgctggtttccaaggagcatacactgggatgcctaaccaaaaacccagggtgccaacattgaggcaggcga

SEQ ID NO: 26369 - DNA, 80 bp, synthetic construct
  misc_feature 1..80: note = Synthetic: >EVB75-cand-5380-5459
  source 1..80: mol_type = other DNA
aagttcaaggacccgctttcgagtttgctgtggccatgatgaaaagaaatgctagtacagtgaaaactgaatatggtgaa

SEQ ID NO: 26370 - DNA, 80 bp, synthetic construct
  misc_feature 1..80: note = Synthetic: >EVB75-cand-5460-5539
  source 1..80: mol_type = other DNA
ttcacaatgctcggcatctacgacagatgggcagtgttaccccgacacgctaaacctggacctaccatcttaatgaatga

SEQ ID NO: 26371 - DNA, 80 bp, synthetic construct
  misc_feature 1..80: note = Synthetic: >EVB75-cand-5540-5619
  source 1..80: mol_type = other DNA
tcaggaagtgggcgtggtggatgccaaggaactagtggacaaagatggcaccaatttggaactgacactattaaaactta

SEQ ID NO: 26372 - DNA, 80 bp, synthetic construct
  misc_feature 1..80: note = Synthetic: >EVB84-cand-3750-3829
  source 1..80: mol_type = other DNA
atgcaatggaacagggtgtcaaagactacgtggagcaactaggcaacgcctttggttcaggattcaccaatcagatatgt

SEQ ID NO: 26373 - DNA, 80 bp, synthetic construct
  misc_feature 1..80: note = Synthetic: >EVB84-cand-3830-3909
  source 1..80: mol_type = other DNA
gagcaggttaacctcctcaaagagtccctagtaggccaggactccattctggaaaaatcactaaaagcactagtcaaaat

SEQ ID NO: 26374 - DNA, 80 bp, synthetic construct
  misc_feature 1..80: note = Synthetic: >EVB84-cand-3910-3989
  source 1..80: mol_type = other DNA
catatcagcactggtgattgtggtcagaaatcatgatgatctgatcacagtgactgccacactagctctcattggctgca

SEQ ID NO: 26375 - DNA, 80 bp, synthetic construct
  misc_feature 1..80: note = Synthetic: >EVB84-cand-3990-4069
  source 1..80: mol_type = other DNA
catcatcaccgtggcgatggcttaaacaaaaggtgtcacaatattatggaatacccatggctgaaaggcaaaacaatggt

SEQ ID NO: 26376 - DNA, 80 bp, synthetic construct
  misc_feature 1..80: note = Synthetic: >EVB84-cand-4070-4149
  source 1..80: mol_type = other DNA
tggttaaagaagttcacagaaatgaccaatgcctgtaagggcatggagtggattgcaatcaagatccaaaagtttataga

SEQ ID NO: 26377 - DNA, 80 bp, synthetic construct
  misc_feature 1..80: note = Synthetic: >EVB84-cand-4150-4229
  source 1..80: mol_type = other DNA
gtggcttaaagtcaaaatcctgccagaagtgaaggagaagcacgaattccttaacaggctaaagcagttaccactcctcg

SEQ ID NO: 26378 - DNA, 80 bp, synthetic construct
  misc_feature 1..80: note = Synthetic: >EVB84-cand-4230-4309
  source 1..80: mol_type = other DNA
aaagtcagattgctaccattgagcaaagtgcaccctcacaaagtgaccaggagcagctcttttcaaatgtccagtacttc

SEQ ID NO: 26379 - DNA, 80 bp, synthetic construct
  misc_feature 1..80: note = Synthetic: >EVB84-cand-4310-4389
  source 1..80: mol_type = other DNA
gcacattactgtaggaagtacgctcccttgtatgctgctgaggcaaaaagagtgttctcactagaaaagaagatgagcaa

SEQ ID NO: 26380 - DNA, 80 bp, synthetic construct
  misc_feature 1..80: note = Synthetic: >EVB84-cand-4470-4549
  source 1..80: mol_type = other DNA
tggccaccaatctaattggaagatcactagcagagaagctcaatagctctgtgtactccctaccaccggatccagaccac

SEQ ID NO: 26381 - DNA, 80 bp, synthetic construct
  misc_feature 1..80: note = Synthetic: >EVB84-cand-4550-4629
  source 1..80: mol_type = other DNA
tttgatgggtacaagcaacaagcagtggtgatcatggatgatctgtgccaaaaccctgatggaaaggacgtgtcactgtt

SEQ ID NO: 26382 - DNA, 80 bp, synthetic construct
  misc_feature 1..80: note = Synthetic: >EVB84-cand-4630-4709
  source 1..80: mol_type = other DNA
ttgccagatggtctcaagcgtagacttcgtaccacccatggcagcattggaagagaaaggaattcttttcacatcaccat

SEQ ID NO: 26383 - DNA, 80 bp, synthetic construct
  misc_feature 1..80: note = Synthetic: >EVB84-cand-4710-4789
  source 1..80: mol_type = other DNA
tcgtactggcatcaaccaatgcagggtcaataaacgcgcccacagtgtcagacagcagggcgcttgccagaagattccac

SEQ ID NO: 26384 - DNA, 80 bp, synthetic construct
  misc_feature 1..80: note = Synthetic: >EVB84-cand-4790-4869
  source 1..80: mol_type = other DNA
tttgacatgaacattgaagtcatctccatgtacagccagaatgggaagatcaatatgcccatgtcagtcaaaacatgtga

SEQ ID NO: 26385 - DNA, 80 bp, synthetic construct
  misc_feature 1..80: note = Synthetic: >EVB84-cand-4860-4939
  source 1..80: mol_type = other DNA
aaacatgtgatgaggaatgttgcccagtcaacttcaagagatgttgcccactggtgtgtggaaaggccatccagtttatt

SEQ ID NO: 26386 - DNA, 80 bp, synthetic construct
  misc_feature 1..80: note = Synthetic: >EVB84-cand-5020-5099
  source 1..80: mol_type = other DNA
gggtgccacccttgaagccctgttccaagggcctccagtctacagggagattaagatcagtgtcgccccagaaacacccc

SEQ ID NO: 26387 - DNA, 80 bp, synthetic construct
  misc_feature 1..80: note = Synthetic: >EVB84-cand-5100-5179
  source 1..80: mol_type = other DNA
caccaccagcaattgcagatcttctgaaatcagtagacagtgaggcagtcagggaatactgtaaagagagaggatggctt

SEQ ID NO: 26388 - DNA, 80 bp, synthetic construct
  misc_feature 1..80: note = Synthetic: >HCV.A10-cand-310-389
  source 1..80: mol_type = other DNA
ccgtgtagatcaggtcgatgagtcactgcttaccccacgggtgaccgtggcagtggctgcgttggcggcctgcctatggg

SEQ ID NO: 26389 - DNA, 80 bp, synthetic construct
  misc_feature 1..80: note = Synthetic: >HCV.A10-cand-560-639
  source 1..80: mol_type = other DNA
gtccgtgtttccttttattcttataatggctgcttatggtgacaattgaggaattgttaccatatagctattggattggc

SEQ ID NO: 26390 - DNA, 80 bp, synthetic construct
  misc_feature 1..80: note = Synthetic: >HCV.A10-cand-640-719
  source 1..80: mol_type = other DNA
catccggtgtgcaacagagctattatctacttgtttgttggatacattccattaacacctaaatccttcaatacattgca

SEQ ID NO: 26391 - DNA, 80 bp, synthetic construct
  misc_feature 1..80: note = Synthetic: >HCV.A10-cand-720-799
  source 1..80: mol_type = other DNA
ctatattctaacgttgaacgcaagaaaatgggagctcaagtctcgacgcaaaaatccggcagtcatgagactggtaatgt

SEQ ID NO: 26392 - DNA, 80 bp, synthetic construct
  misc_feature 1..80: note = Synthetic: >HCV.A10-cand-810-889
  source 1..80: mol_type = other DNA
ggatctacaataaacttcactaacatcaactattataaagattcttacgccgcgtcagctacccggcaagacttcacaca

SEQ ID NO: 26393 - DNA, 80 bp, synthetic construct
  misc_feature 1..80: note = Synthetic: >HCV.A10-cand-890-969
  source 1..80: mol_type = other DNA
agatccaaagaaattcacacaaccagtgttagactctattagagaactatcagcccctttgaactctccttctgtggaag

SEQ ID NO: 26394 - DNA, 80 bp, synthetic construct
  misc_feature 1..80: note = Synthetic: >HCV.A10-cand-980-1059
  source 1..80: mol_type = other DNA
tagtgatagggtcgcccagctcactgttgggaactcctccattactacccaagaggctgctaatattgtattagcttatg

SEQ ID NO: 26395 - DNA, 80 bp, synthetic construct
  misc_feature 1..80: note = Synthetic: >HCV.A10-cand-1060-1139
  source 1..80: mol_type = other DNA
gagagtggcctgagtactgccctgacacagacgcaactgccgtggataaaccaactcgcccggacgtgtctgtcaacagg

SEQ ID NO: 26396 - DNA, 80 bp, synthetic construct
  misc_feature 1..80: note = Synthetic: >HCV.A10-cand-1140-1219
  source 1..80: mol_type = other DNA
ttctacactttggactccaaaatgtggcaagaaaactcgactggttggtattggaagttccctgacgtgctgaacaaaac

SEQ ID NO: 26397 - DNA, 80 bp, synthetic construct
  misc_feature 1..80: note = Synthetic: >HCV.A10-cand-1230-1309
  source 1..80: mol_type = other DNA
ggacagaatgcccagtttcattacttgtaccggtcgggtttctgcttgcatgtacagtgtaatgctagtaaatttcacca

SEQ ID NO: 26398 - DNA, 80 bp, synthetic construct
  misc_feature 1..80: note = Synthetic: >HCV.A10-cand-1320-1399
  source 1..80: mol_type = other DNA
cttgtggctgtgataccagaatttgtgattgctggcagaggatctaacacaaaaccaaatgaagcgccccacccagggtt

SEQ ID NO: 26399 - DNA, 80 bp, synthetic construct
  misc_feature 1..80: note = Synthetic: >HCV.A10-cand-1380-1459
  source 1..80: mol_type = other DNA
gaagcgccccacccagggtttaccacaactttccctggcaccaccggtgctacatttcatgatccatacgttctggattc

SEQ ID NO: 26400 - DNA, 80 bp, synthetic construct
  misc_feature 1..80: note = Synthetic: >HCV.A10-cand-1470-1549
  source 1..80: mol_type = other DNA
ttgagtcaggctctaatatacccccatcaatggatcaatctccgcactaacaactgtgcaactgttatagttccatacat

SEQ ID NO: 26401 - DNA, 80 bp, synthetic construct
  misc_feature 1..80: note = Synthetic: >HCV.A10-cand-1550-1629
  source 1..80: mol_type = other DNA
caatgctgttccgtttgactcagccatcaaccatagcaattttgggctaatagtgataccagttagtccgctgaagtatt

SEQ ID NO: 26402 - DNA, 80 bp, synthetic construct
  misc_feature 1..80: note = Synthetic: >HCV.A10-cand-1640-1719
  source 1..80: mol_type = other DNA
aaccactgcaatcccaatcactatcactatagcccccctgaattcagagtttggaggattgcgacaagccgtcagtcaag

SEQ ID NO: 26403 - DNA, 80 bp, synthetic construct
  misc_feature 1..80: note = Synthetic: >HCV.A10-cand-1720-1799
  source 1..80: mol_type = other DNA
gcatcccagctgagctcaggcccgggactaatcagttcctgaccacagatgatgacactgcagcgcccatcctcccagga

SEQ ID NO: 26404 - DNA, 80 bp, synthetic construct
  misc_feature 1..80: note = Synthetic: >HCV.A11-cand-2400-2479
  source 1..80: mol_type = other DNA
gctttgtgtcagcatgcaacgacttcaccgtgcggttgttgagagacaccacccacatctcacaaacaacgaaaatcaac

SEQ ID NO: 26405 - DNA, 80 bp, synthetic construct
  misc_feature 1..80: note = Synthetic: >HCV.A11-cand-2480-2559
  source 1..80: mol_type = other DNA
actcaagggccaatagaagaaatcatctcaactgttgccagtaacgcgttggcgctcagtcaacccaagccagtggacaa

SEQ ID NO: 26406 - DNA, 80 bp, synthetic construct
  misc_feature 1..80: note = Synthetic: >HCV.A11-cand-2550-2629
  source 1..80: mol_type = other DNA
cagtggacaactctgtacaaaacacccaacaaagtgctccagtgcatagccaggaggtgccagcattgacagcagtggag

SEQ ID NO: 26407 - DNA, 80 bp, synthetic construct
  misc_feature 1..80: note = Synthetic: >HCV.A11-cand-2640-2719
  source 1..80: mol_type = other DNA
caagtgatgtggttccatctgacctaattcaaactagacacgtattgaatgttaaatccaggtctgaatccaccatcgag

SEQ ID NO: 26408 - DNA, 80 bp, synthetic construct
  misc_feature 1..80: note = Synthetic: >HCV.A11-cand-2720-2799
  source 1..80: mol_type = other DNA
tcattttttgcaagagctgcatgtgtaaccattatgcaggtggacaatttcaacgcaaccactgtggaagacaaaagaaa

SEQ ID NO: 26409 - DNA, 80 bp, synthetic construct
  misc_feature 1..80: note = Synthetic: >HCV.A11-cand-2800-2879
  source 1..80: mol_type = other DNA
gttgtttgctaaatgggcaatcacctacactgataccgtccaactgagacggaaattagagtttttcacttattctagat

SEQ ID NO: 26410 - DNA, 80 bp, synthetic construct
  misc_feature 1..80: note = Synthetic: >HCV.A11-cand-2880-2959
  source 1..80: mol_type = other DNA
ttgacttagagatgacttttgtgctaactgagagatactacacccaaaactcagggcatgctagatctcaggtgtaccaa

SEQ ID NO: 26411 - DNA, 80 bp, synthetic construct
  misc_feature 1..80: note = Synthetic: >HCV.A11-cand-2980-3059
  source 1..80: mol_type = other DNA
ggcacccacgcctagtgcatgggacgactacacatggcaaacatcctccaacccatcaattttctttaccaccggcaatg

SEQ ID NO: 26412 - DNA, 80 bp, synthetic construct
  misc_feature 1..80: note = Synthetic: >HCV.A11-cand-3040-3119
  source 1..80: mol_type = other DNA
tttctttaccaccggcaatgcaccaccgcgcatttcaattccatttgttggaatcgccaatgcatactcacacttttatg

SEQ ID NO: 26413 - DNA, 80 bp, synthetic construct
  misc_feature 1..80: note = Synthetic: >HCV.A11-cand-3120-3199
  source 1..80: mol_type = other DNA
atggctttagtagagtacctttggagggagaaacaacagacacaggagacacttactacgggctcacttcaataaacgat

SEQ ID NO: 26414 - DNA, 80 bp, synthetic construct
  misc_feature 1..80: note = Synthetic: >HCV.A11-cand-3200-3279
  source 1..80: mol_type = other DNA
tttggtacacttgcagtcagagtagttaatgactacaacccagccagggtggagacaagaattagagtatacatgaaacc

SEQ ID NO: 26415 - DNA, 80 bp, synthetic construct
  misc_feature 1..80: note = Synthetic: >HCV.A11-cand-3280-3359
  source 1..80: mol_type = other DNA
caaacatgtgagagtctggtgcccgcgacctccaagagcggtaagctacagaggacctggagtcgacctcctatcaacat

SEQ ID NO: 26416 - DNA, 80 bp, synthetic construct
  misc_feature 1..80: note = Synthetic: >HCV.A11-cand-3360-3439
  source 1..80: mol_type = other DNA
cagtaacacctttatccaaacatgacctaacgacatacgggtttggccaccaaaacaaagcagtttacacagcagggtat

SEQ ID NO: 26417 - DNA, 80 bp, synthetic construct
  misc_feature 1..80: note = Synthetic: >HCV.A11-cand-3440-3519
  source 1..80: mol_type = other DNA
aagatttgcaactaccacctagctacccaggaagacatgcagaacgcagtgagcatcatgtggaatagagatctcttgat

SEQ ID NO: 26418 - DNA, 80 bp, synthetic construct
  misc_feature 1..80: note = Synthetic: >HCV.A11-cand-3520-3599
  source 1..80: mol_type = other DNA
cgccgagtcaaaggctcagggtattgactcaatagccaggtgtaattgcaatacaggtgtatattattgtgagtctagga

SEQ ID NO: 26419 - DNA, 80 bp, synthetic construct
  misc_feature 1..80: note = Synthetic: >HCV.A11-cand-3630-3709
  source 1..80: mol_type = other DNA
caaccttccaatacatggaggccaacgattactacccagcaaggtatcaatcacacatgctaatagggcacggttttgca

SEQ ID NO: 26420 - DNA, 80 bp, synthetic construct
  misc_feature 1..80: note = Synthetic: >HCV.A4-cand-3250-3329
  source 1..80: mol_type = other DNA
tgagatcacaaccatacatctacagaaattaccctacttatggcactaccattcaacacctggccaaggatagacgcaaa

SEQ ID NO: 26421 - DNA, 80 bp, synthetic construct
  misc_feature 1..80: note = Synthetic: >HCV.A4-cand-3330-3409
  source 1..80: mol_type = other DNA
atcactgaaactgactacaacgctgagcaacgcacgcacgggaaattcggtcaacaatctggagctgtttatgtaggaaa

SEQ ID NO: 26422 - DNA, 80 bp, synthetic construct
  misc_feature 1..80: note = Synthetic: >HCV.A4-cand-3410-3489
  source 1..80: mol_type = other DNA
ttttagagtggtgaatcgccatctagccacacataacgactgggccaacctggtatgggaagatagctcgagggatctcc

SEQ ID NO: 26423 - DNA, 80 bp, synthetic construct
  misc_feature 1..80: note = Synthetic: >HCV.A4-cand-3490-3569
  source 1..80: mol_type = other DNA
tcgtgtcatccacaacagcccaaggatgcgacaccattgcccgttgcaactgccagactggagtgtactattgcaactct

SEQ ID NO: 26424 - DNA, 80 bp, synthetic construct
  misc_feature 1..80: note = Synthetic: >HCV.A4-cand-3570-3649
  source 1..80: mol_type = other DNA
aaaagaaagcattacccagttagtttttcaaaacctagtttgatctatgtggaggccagtgagtactaccctgccaggta

SEQ ID NO: 26425 - DNA, 80 bp, synthetic construct
  misc_feature 1..80: note = Synthetic: >HCV.A4-cand-3610-3689
  source 1..80: mol_type = other DNA
tgatctatgtggaggccagtgagtactaccctgccaggtatcaatcacacctgatgcttgcggaaggccactctgaacca

SEQ ID NO: 26426 - DNA, 80 bp, synthetic construct
  misc_feature 1..80: note = Synthetic: >HCV.A4-cand-3730-3809
  source 1..80: mol_type = other DNA
ttggcatagtgtctactggtggcaacggactagtcggttttgcagacatcagagatcttttgtggttggatgaagaggct

SEQ ID NO: 26427 - DNA, 80 bp, synthetic construct
  misc_feature 1..80: note = Synthetic: >HCV.A4-cand-3820-3899
  source 1..80: mol_type = other DNA
gggtgtccgattacattaagggactcggtgacgcttttgggacaggtttcactgatgcagtctccagggaggttgaagct

SEQ ID NO: 26428 - DNA, 80 bp, synthetic construct
  misc_feature 1..80: note = Synthetic: >HCV.A4-cand-3890-3969
  source 1..80: mol_type = other DNA
ggttgaagctctcaagaatcaccttatagggtctgaaggagcagttgagaaaatcctgaagaacctaattaaactgatct

SEQ ID NO: 26429 - DNA, 80 bp, synthetic construct
  misc_feature 1..80: note = Synthetic: >HCV.A4-cand-3970-4049
  source 1..80: mol_type = other DNA
ctgcactagtcattgtaattaggagtgattatgacatggtcacccttacagcaaccctagctctaattggttgtcacggt

SEQ ID NO: 26430 - DNA, 80 bp, synthetic construct
  misc_feature 1..80: note = Synthetic: >HCV.A4-cand-4050-4129
  source 1..80: mol_type = other DNA
agtccttgggcttggatcaaagctaaaacagcatctattttaggcattcctattgctcaaaaacagagcgcatcttggct

SEQ ID NO: 26431 - DNA, 80 bp, synthetic construct
  misc_feature 1..80: note = Synthetic: >HCV.A4-cand-4170-4249
  source 1..80: mol_type = other DNA
gaatggatttctaacaaaattagtaaattcatcgattggctcaaagagaaaattataccagcagccaaggagaaggttga

SEQ ID NO: 26432 - DNA, 80 bp, synthetic construct
  misc_feature 1..80: note = Synthetic: >HCV.A4-cand-4210-4289
  source 1..80: mol_type = other DNA
tcaaagagaaaattataccagcagccaaggagaaggttgaattcctaaacaatttgaaacagttgccactactggagaac

SEQ ID NO: 26433 - DNA, 80 bp, synthetic construct
  misc_feature 1..80: note = Synthetic: >HCV.A4-cand-4290-4369
  source 1..80: mol_type = other DNA
caaatctcaaacctagagcaatctgctgcctcacaagaagatcttgaagccatgtttgggaatgtgtcgtaccttgccca

SEQ ID NO: 26434 - DNA, 80 bp, synthetic construct
  misc_feature 1..80: note = Synthetic: >HCV.A4-cand-4370-4449
  source 1..80: mol_type = other DNA
tttctgtcgcaaatttcagccactgtacgctacagaagctaagagagtttacgccctggagaagagaatgaacaattaca

SEQ ID NO: 26435 - DNA, 80 bp, synthetic construct
  misc_feature 1..80: note = Synthetic: >HCV.A4-cand-4530-4609
  source 1..80: mol_type = other DNA
acaggcatcattgcccgtgcgatagctgataagtaccactctagtgtgtactcactcccaccagatccagatcactttga

SEQ ID NO: 26436 - DNA, 80 bp, synthetic construct
  misc_feature 1..80: note = Synthetic: >HCV.A6-cand-1940-2019
  source 1..80: mol_type = other DNA
gaacaatgtggaccagttgtgtgcatcattccaagtagatcctgggcgcaatggcccgtggcaatccacaatggttggtc

SEQ ID NO: 26437 - DNA, 80 bp, synthetic construct
  misc_feature 1..80: note = Synthetic: >HCV.A6-cand-2020-2099
  source 1..80: mol_type = other DNA
agatctgtaggtattacactcaatggtctggttcccttaaggtaacctttatgttcacaggttcttttatggccacaggg

SEQ ID NO: 26438 - DNA, 80 bp, synthetic construct
  misc_feature 1..80: note = Synthetic: >HCV.A6-cand-2100-2179
  source 1..80: mol_type = other DNA
aaaatgctgatagcctacacaccacctggtagtgctcagcccgctacaagggaagcagcaatgcttgggacgcatatagt

SEQ ID NO: 26439 - DNA, 80 bp, synthetic construct
  misc_feature 1..80: note = Synthetic: >HCV.A6-cand-2180-2259
  source 1..80: mol_type = other DNA
gtgggattttggtttgcaatcatcggttaccctagttataccttggattagtaacacccattttagagcagttaagactg

SEQ ID NO: 26440 - DNA, 80 bp, synthetic construct
  misc_feature 1..80: note = Synthetic: >HCV.A6-cand-2270-2349
  source 1..80: mol_type = other DNA
cgactactacgcaaccgggatcgtcaccatttggtaccaaaccaacttcgtagtgccaccagacacccccactgaggcta

SEQ ID NO: 26441 - DNA, 80 bp, synthetic construct
  misc_feature 1..80: note = Synthetic: >HCV.A6-cand-2340-2419
  source 1..80: mol_type = other DNA
actgaggctaacattatagctcttggagcagcacagaaaaactttaccctaaagttgtgcaaggacactgacgagatcca

SEQ ID NO: 26442 - DNA, 80 bp, synthetic construct
  misc_feature 1..80: note = Synthetic: >HCV.A6-cand-2420-2499
  source 1..80: mol_type = other DNA
acaaacagcagagtaccaaaatgatcccattacaaatgcagtggaaagcgctgtgagcgcgcttgctgacaccacaatat

SEQ ID NO: 26443 - DNA, 80 bp, synthetic construct
  misc_feature 1..80: note = Synthetic: >HCV.A6-cand-2500-2579
  source 1..80: mol_type = other DNA
cccgggtgaccgcagccaacactgcagctagcacccactccctgggaacagggcgtgtaccagcattgcaagctgcagaa

SEQ ID NO: 26444 - DNA, 80 bp, synthetic construct
  misc_feature 1..80: note = Synthetic: >HCV.A6-cand-2560-2639
  source 1..80: mol_type = other DNA
cagcattgcaagctgcagaaacgggagcaagctctaatgctagtgatgagaaccttattgagactcgctgtgtgatgaat

SEQ ID NO: 26445 - DNA, 80 bp, synthetic construct
  misc_feature 1..80: note = Synthetic: >HCV.A6-cand-2660-2739
  source 1..80: mol_type = other DNA
gagtgtggaacacttttactctcgtgcagggctggtaggagttgtggaggtgaaggactcgggcactagcctggatgggt

SEQ ID NO: 26446 - DNA, 80 bp, synthetic construct
  misc_feature 1..80: note = Synthetic: >HCV.A6-cand-2740-2819
  source 1..80: mol_type = other DNA
acacagtttggcccatagatgtgatgggcttcgtgcaacagcggcgcaaactagagctgtcaacatacatgcgctttgat

SEQ ID NO: 26447 - DNA, 80 bp, synthetic construct
  misc_feature 1..80: note = Synthetic: >HCV.A6-cand-2820-2899
  source 1..80: mol_type = other DNA
gccgagttcacttttgtgtccaacctcaatgacagcacgacgcccgggatgctgctgcagtatatgtatgtaccaccagg

SEQ ID NO: 26448 - DNA, 80 bp, synthetic construct
  misc_feature 1..80: note = Synthetic: >HCV.A6-cand-2900-2979
  source 1..80: mol_type = other DNA
ggcccctaagccggatagcaggaaatcataccaatggcagactgctactaacccgtcggtattcgcaaaattgagtgatc

SEQ ID NO: 26449 - DNA, 80 bp, synthetic construct
  misc_feature 1..80: note = Synthetic: >HCV.A6-cand-2990-3069
  source 1..80: mol_type = other DNA
ggtgtctgtcccgttcatgtcgccagcaacagcttatcagtggttttatgatggttaccctacatttggtgagcacaaac

SEQ ID NO: 26450 - DNA, 80 bp, synthetic construct
  misc_feature 1..80: note = Synthetic: >HCV.A6-cand-3070-3149
  source 1..80: mol_type = other DNA
aagctaccaatttgcaatatgggcagtgtcctaacaacatgatgggccattttgccatccgaacagtcagtgaatctacc

SEQ ID NO: 26451 - DNA, 80 bp, synthetic construct
  misc_feature 1..80: note = Synthetic: >HCV.A6-cand-3150-3229
  source 1..80: mol_type = other DNA
accgggaaaaacgtccacgttcgggtgtacatgagaattaagcacgtgagagcttgggtacctagaccccttcgatccca

SEQ ID NO: 26452 - DNA, 80 bp, synthetic construct
  misc_feature 1..80: note = Synthetic: >HQ537729.1-cand-4020-4099
  source 1..80: mol_type = other DNA
gaatgattaacgctcatgcacaatatttggcagtacagtaattgtatacaaacattgtgtttggtactgtgtaacatgtg

SEQ ID NO: 26453 - DNA, 80 bp, synthetic construct
  misc_feature 1..80: note = Synthetic: >HQ537729.1-cand-4100-4179
  source 1..80: mol_type = other DNA
tgtatggtggttttattttttgctgttcattgtatattttgtttttttactgtttttaaacatttttatttctgtgtttt

SEQ ID NO: 26454 - DNA, 80 bp, synthetic construct
  misc_feature 1..80: note = Synthetic: >HQ537729.1-cand-4180-4259
  source 1..80: mol_type = other DNA
taataaattgatcacatggtataaccatgcgacacaaaaggtctacaaaacgtgttaaacgtgcatctgcaacacaacta

SEQ ID NO: 26455 - DNA, 80 bp, synthetic construct
  misc_feature 1..80: note = Synthetic: >HQ537729.1-cand-4260-4339
  source 1..80: mol_type = other DNA
tatcgtacttgcaaagctgcaggaacttgtccaccagatgttatacctaaggttgagggtaatactgttgctgatcaaat

SEQ ID NO: 26456 - DNA, 80 bp, synthetic construct
  misc_feature 1..80: note = Synthetic: >HQ537729.1-cand-4380-4459
  source 1..80: mol_type = other DNA
ggaattggttctggatctggcacaggtggaagatctggatatgttccactgggtacaacacctccaacggctgccacaaa

SEQ ID NO: 26457 - DNA, 80 bp, synthetic construct
  misc_feature 1..80: note = Synthetic: >HQ537729.1-cand-4420-4499
  source 1..80: mol_type = other DNA
atgttccactgggtacaacacctccaacggctgccacaaacattcctatacgaccccctgtaactgtggaaagtatacca

SEQ ID NO: 26458 - DNA, 80 bp, synthetic construct
  misc_feature 1..80: note = Synthetic: >HQ537729.1-cand-4500-4579
  source 1..80: mol_type = other DNA
ttagacacaattggccctttagattcttctatagtgtcattagtagaggaaactagttttattgagtctggtgcccctgt

SEQ ID NO: 26459 - DNA, 80 bp, synthetic construct
  misc_feature 1..80: note = Synthetic: >HQ537729.1-cand-4580-4659
  source 1..80: mol_type = other DNA
tgttacaccaagggtcccacctacaacaggttttacaattaccacatctacagataccacacctgctattttagatgtaa

SEQ ID NO: 26460 - DNA, 80 bp, synthetic construct
  misc_feature 1..80: note = Synthetic: >HQ537729.1-cand-4660-4739
  source 1..80: mol_type = other DNA
catccataagtacacatgataatcctactttcactgatccttctgttttacacccacccacgcctgcagaaacttcaggt

SEQ ID NO: 26461 - DNA, 80 bp, synthetic construct
  misc_feature 1..80: note = Synthetic: >HQ537729.1-cand-4740-4819
  source 1..80: mol_type = other DNA
cattttgtactttcatcatcttctattagtacacataattatgaagaaatccctatggatactttcattgtttccacaga

SEQ ID NO: 26462 - DNA, 80 bp, synthetic construct
  misc_feature 1..80: note = Synthetic: >HQ537729.1-cand-4820-4899
  source 1..80: mol_type = other DNA
cagcaataatataactaatagcacgcctattccagggtctcgccctacgacacgcctaggattatatagtaaaggtaccc

SEQ ID NO: 26463 - DNA, 80 bp, synthetic construct
  misc_feature 1..80: note = Synthetic: >HQ537729.1-cand-4900-4979
  source 1..80: mol_type = other DNA
agcaggttaaggttgttgaccctgcctttatgacttctcctgcaaaacttattacatatgataatcctgcatatgaaggc

SEQ ID NO: 26464 - DNA, 80 bp, synthetic construct
  misc_feature 1..80: note = Synthetic: >HQ537729.1-cand-4980-5059
  source 1..80: mol_type = other DNA
cttaaccctgatacaaccttacaatttgagcatgaggatattagcttagctccggatcctgactttatggacattatagc

SEQ ID NO: 26465 - DNA, 80 bp, synthetic construct
  misc_feature 1..80: note = Synthetic: >HQ537729.1-cand-5060-5139
  source 1..80: mol_type = other DNA
tttacataggcctgcactaacatctagaaaaggcaccattagatatagtagagtaggtaataaacgtactatgcatacac

SEQ ID NO: 26466 - DNA, 80 bp, synthetic construct
  misc_feature 1..80: note = Synthetic: >HQ537729.1-cand-5160-5239
  source 1..80: mol_type = other DNA
gcacgggtacattattatcaggatttaagtagtattactgaagatatagaattacaacccttacaacatgtaccatcctc

SEQ ID NO: 26467 - DNA, 80 bp, synthetic construct
  misc_feature 1..80: note = Synthetic: >HQ537729.1-cand-5220-5299
  source 1..80: mol_type = other DNA
ttacaacatgtaccatcctctttaccacataccactgttttaacatcattaaatgatggtatgtttgatatttatgctcc

SEQ ID NO: 26468 - DNA, 80 bp, synthetic construct
  misc_feature 1..80: note = Synthetic: >KC470236.1-cand-5010-5089
  source 1..80: mol_type = other DNA
tttgagcctgttgatactacattaacatatgaagctgctgacatagctccagatccggattttctggacattgttcgttt

SEQ ID NO: 26469 - DNA, 80 bp, synthetic construct
  misc_feature 1..80: note = Synthetic: >KC470236.1-cand-5090-5169
  source 1..80: mol_type = other DNA
acataggcctgccttaacctcacgtaaaggaacagtaaggtttagtaggcttggcaaaaaggctaccatggttacccggc

SEQ ID NO: 26470 - DNA, 80 bp, synthetic construct
  misc_feature 1..80: note = Synthetic: >KC470236.1-cand-5170-5249
  source 1..80: mol_type = other DNA
gtggcacacaaattggagcgcaagtacattattaccatgacattagtagtattgctcctgctgaaagcattgaattacag

SEQ ID NO: 26471 - DNA, 80 bp, synthetic construct
  misc_feature 1..80: note = Synthetic: >KC470236.1-cand-5250-5329
  source 1..80: mol_type = other DNA
cccctagttcacgctgagccctctgatgcttcagatgcattatttgatatatatgctgatgtggacaataacacatattt

SEQ ID NO: 26472 - DNA, 80 bp, synthetic construct
  misc_feature 1..80: note = Synthetic: >KC470236.1-cand-5330-5409
  source 1..80: mol_type = other DNA
agatactgcatttaataatacaagggattcgggcactacatataacacaggctcactaccttctgtggcttattcagcat

SEQ ID NO: 26473 - DNA, 80 bp, synthetic construct
  misc_feature 1..80: note = Synthetic: >KC470236.1-cand-5430-5509
  source 1..80: mol_type = other DNA
actattccttttagtacctcatggaatatgcctgtaaatactggtcctgatattgctttaccaagtactactccacagtt

SEQ ID NO: 26474 - DNA, 80 bp, synthetic construct
  misc_feature 1..80: note = Synthetic: >KC470236.1-cand-5510-5589
  source 1..80: mol_type = other DNA
gccattggtgccttctggaccaatagacacaacatatgcaataaccattcagggttccaattattatttgttgccattat

SEQ ID NO: 26475 - DNA, 80 bp, synthetic construct
  misc_feature 1..80: note = Synthetic: >KC470236.1-cand-5590-5669
  source 1..80: mol_type = other DNA
tgtattttttcctaaaaaaacgtaaacgtattccctattttttttcagatggctatgtggcggtctagtgacagcatggt

SEQ ID NO: 26476 - DNA, 80 bp, synthetic construct
  misc_feature 1..80: note = Synthetic: >KC470236.1-cand-5670-5749
  source 1..80: mol_type = other DNA
gtatttgcctccaccttctgtggcgaaggttgtcaatactgatgattatgttacacgcacaggcatatattattatgctg

SEQ ID NO: 26477 - DNA, 80 bp, synthetic construct
  misc_feature 1..80: note = Synthetic: >KC470236.1-cand-5750-5829
  source 1..80: mol_type = other DNA
gcagctctagattattaacagtaggacatccatattttaaagtgggtatgaatggtggtcgcaagcaggacattccaaag

SEQ ID NO: 26478 - DNA, 80 bp, synthetic construct
  misc_feature 1..80: note = Synthetic: >KC470236.1-cand-5830-5909
  source 1..80: mol_type = other DNA
gtgtctgcatatcaatatagggtatttcgcgtgacattgcccgatcctaataaattcagtattccagatgcatccttata

SEQ ID NO: 26479 - DNA, 80 bp, synthetic construct
  misc_feature 1..80: note = Synthetic: >KC470236.1-cand-5870-5949
  source 1..80: mol_type = other DNA
ccgatcctaataaattcagtattccagatgcatccttatataatccagaaacacaacgtttagtatgggcttgtgtaggg

SEQ ID NO: 26480 - DNA, 80 bp, synthetic construct
  misc_feature 1..80: note = Synthetic: >KC470236.1-cand-5990-6069
  source 1..80: mol_type = other DNA
gtggacacccattatataatagacaggatgatactgaaaactcaccattttcatcaaccaccaataaggacagtagggat

SEQ ID NO: 26481 - DNA, 80 bp, synthetic construct
  misc_feature 1..80: note = Synthetic: >KC470236.1-cand-6050-6129
  source 1..80: mol_type = other DNA
ccaataaggacagtagggataatgtgtctgtggattataaacagacacagttgtgcattataggctgtgttcccgccatt

SEQ ID NO: 26482 - DNA, 80 bp, synthetic construct
  misc_feature 1..80: note = Synthetic: >KC470236.1-cand-6190-6269
  source 1..80: mol_type = other DNA
cctcctttggaactagtaaacacccctattgaggatggtgatatgattgatactggctatggagctatggactttggtgc

SEQ ID NO: 26483 - DNA, 80 bp, synthetic construct
  misc_feature 1..80: note = Synthetic: >KC470236.1-cand-6240-6319
  source 1..80: mol_type = other DNA
tactggctatggagctatggactttggtgcattgcaggaaaccaaaagtgaggtgcctttagatatttgtcaatccattt

SEQ ID NO: 26484 - DNA, 80 bp, synthetic construct
  misc_feature 1..80: note = Synthetic: >NC_001477.1-cand-7890-7969
  source 1..80: mol_type = other DNA
cctggacatgaggaaccaatcccaatggcaacctatggatggaacctagtaaagctatactccgggaaagatgtattctt

SEQ ID NO: 26485 - DNA, 80 bp, synthetic construct
  misc_feature 1..80: note = Synthetic: >NC_001477.1-cand-7970-8049
  source 1..80: mol_type = other DNA
tacaccacctgagaaatgtgacaccctcttgtgtgatattggtgagtcctctccgaacccaactatagaagaaggaagaa

SEQ ID NO: 26486 - DNA, 80 bp, synthetic construct
  misc_feature 1..80: note = Synthetic: >NC_001477.1-cand-8050-8129
  source 1..80: mol_type = other DNA
cgttacgtgttctaaagatggtggaaccatggctcagaggaaaccaattttgcataaaaattctaaatccctatatgccg

SEQ ID NO: 26487 - DNA, 80 bp, synthetic construct
  misc_feature 1..80: note = Synthetic: >NC_001477.1-cand-8130-8209
  source 1..80: mol_type = other DNA
agtgtggtagaaactttggagcaaatgcaaagaaaacatggaggaatgctagtgcgaaatccactctcaagaaactccac

SEQ ID NO: 26488 - DNA, 80 bp, synthetic construct
  misc_feature 1..80: note = Synthetic: >NC_001477.1-cand-8210-8289
  source 1..80: mol_type = other DNA
tcatgaaatgtactgggtttcatgtggaacaggaaacattgtgtcagcagtaaacatgacatctagaatgctgctaaatc

SEQ ID NO: 26489 - DNA, 80 bp, synthetic construct
  misc_feature 1..80: note = Synthetic: >NC_001477.1-cand-8290-8369
  source 1..80: mol_type = other DNA
gattcacaatggctcacaggaagccaacatatgaaagagacgtggacttaggcgctggaacaagacatgtggcagtagaa

SEQ ID NO: 26490 - DNA, 80 bp, synthetic construct
  misc_feature 1..80: note = Synthetic: >NC_001477.1-cand-8370-8449
  source 1..80: mol_type = other DNA
ccagaggtggccaacctagatatcattggccagaggatagagaatataaaaaatgaacacaaatcaacatggcattatga

SEQ ID NO: 26491 - DNA, 80 bp, synthetic construct
  misc_feature 1..80: note = Synthetic: >NC_001477.1-cand-8450-8529
  source 1..80: mol_type = other DNA
tgaggacaatccatacaaaacatgggcctatcatggatcatatgaggtcaagccatcaggatcagcctcatccatggtca

SEQ ID NO: 26492 - DNA, 80 bp, synthetic construct
  misc_feature 1..80: note = Synthetic: >NC_001477.1-cand-8530-8609
  source 1..80: mol_type = other DNA
atggtgtggtgagactgctaaccaaaccatgggatgtcattcccatggtcacacaaatagccatgactgacaccacaccc

SEQ ID NO: 26493 - DNA, 80 bp, synthetic construct
  misc_feature 1..80: note = Synthetic: >NC_001477.1-cand-8610-8689
  source 1..80: mol_type = other DNA
tttggacaacagagggtgtttaaagagaaagttgacacgcgtacaccaaaagcgaaacgaggcacagcacaaattatgga

SEQ ID NO: 26494 - DNA, 80 bp, synthetic construct
  misc_feature 1..80: note = Synthetic: >NC_001477.1-cand-8720-8799
  source 1..80: mol_type = other DNA
ctctagaaacaaaaaacccagaatctgcacaagagaggagttcacaagaaaagtcaggtcaaacgcagctattggagcag

SEQ ID NO: 26495 - DNA, 80 bp, synthetic construct
  misc_feature 1..80: note = Synthetic: >NC_001477.1-cand-8770-8849
  source 1..80: mol_type = other DNA
aagtcaggtcaaacgcagctattggagcagtgttcgttgatgaaaatcaatggaactcagcaaaagaggcagtggaagat

SEQ ID NO: 26496 - DNA, 80 bp, synthetic construct
  misc_feature 1..80: note = Synthetic: >NC_001477.1-cand-8850-8929
  source 1..80: mol_type = other DNA
gaacggttctgggaccttgtgcacagagagagggagcttcataaacaaggaaaatgtgccacgtgtgtctacaacatgat

SEQ ID NO: 26497 - DNA, 80 bp, synthetic construct
  misc_feature 1..80: note = Synthetic: >NC_001477.1-cand-8930-9009
  source 1..80: mol_type = other DNA
gggaaagagagagaaaaaattaggagagttcggaaaggcaaaaggaagtcgcgcaatatggtacatgtggttgggagcgc

SEQ ID NO: 26498 - DNA, 80 bp, synthetic construct
  misc_feature 1..80: note = Synthetic: >NC_001477.1-cand-9010-9089
  source 1..80: mol_type = other DNA
gctttttagagtttgaagcccttggtttcatgaatgaagatcactggttcagcagagagaattcactcagtggagtggaa

SEQ ID NO: 26499 - DNA, 80 bp, synthetic construct
  misc_feature 1..80: note = Synthetic: >NC_001477.1-cand-9060-9139
  source 1..80: mol_type = other DNA
agcagagagaattcactcagtggagtggaaggagaaggactccacaaacttggatacatactcagagacatatcaaagat

SEQ ID NO: 26500 - DNA, 80 bp, synthetic construct
  misc_feature 1..80: note = Synthetic: >NC_001526.4-cand-1410-1489
  source 1..80: mol_type = other DNA
gcatattactatatggtgcagctaacacaggtaaatcattatttggtatgagtttaatgaaatttctgcaagggtctgta

SEQ ID NO: 26501 - DNA, 80 bp, synthetic construct
  misc_feature 1..80: note = Synthetic: >NC_001526.4-cand-1490-1569
  source 1..80: mol_type = other DNA
atatgttttgtaaattctaaaagccatttttggttacaaccattagcagatgccaaaataggtatgttagatgatgctac

SEQ ID NO: 26502 - DNA, 80 bp, synthetic construct
  misc_feature 1..80: note = Synthetic: >NC_001526.4-cand-1570-1649
  source 1..80: mol_type = other DNA
agtgccctgttggaactacatagatgacaatttaagaaatgcattggatggaaatttagtttctatggatgtaaagcata

SEQ ID NO: 26503 - DNA, 80 bp, synthetic construct
  misc_feature 1..80: note = Synthetic: >NC_001526.4-cand-1650-1729
  source 1..80: mol_type = other DNA
gaccattggtacaactaaaatgccctccattattaattacatctaacattaatgctggtacagattctaggtggccttat

SEQ ID NO: 26504 - DNA, 80 bp, synthetic construct
  misc_feature 1..80: note = Synthetic: >NC_001526.4-cand-1740-1819
  source 1..80: mol_type = other DNA
gattggtggtgtttacatttcctaatgagtttccatttgacgaaaacggaaatccagtgtatgagcttaatgataagaac

SEQ ID NO: 26505 - DNA, 80 bp, synthetic construct
  misc_feature 1..80: note = Synthetic: >NC_001526.4-cand-1820-1899
  source 1..80: mol_type = other DNA
tggaaatcctttttctcaaggacgtggtccagattaagtttgcacgaggacgaggacaaggaaaacgatggagactcttt

SEQ ID NO: 26506 - DNA, 80 bp, synthetic construct
  misc_feature 1..80: note = Synthetic: >NC_001526.4-cand-1900-1979
  source 1..80: mol_type = other DNA
gccaacgtttaaatgtgtgtcaggacaaaatactaacacattatgaaaatgatagtacagacctacgtgaccatatagac

SEQ ID NO: 26507 - DNA, 80 bp, synthetic construct
  misc_feature 1..80: note = Synthetic: >NC_001526.4-cand-1980-2059
  source 1..80: mol_type = other DNA
tattggaaacacatgcgcctagaatgtgctatttattacaaggccagagaaatgggatttaaacatattaaccaccaggt

SEQ ID NO: 26508 - DNA, 80 bp, synthetic construct
  misc_feature 1..80: note = Synthetic: >NC_001526.4-cand-2060-2139
  source 1..80: mol_type = other DNA
ggtgccaacactggctgtatcaaagaataaagcattacaagcaattgaactgcaactaacgttagaaacaatatataact

SEQ ID NO: 26509 - DNA, 80 bp, synthetic construct
  misc_feature 1..80: note = Synthetic: >NC_001526.4-cand-2140-2219
  source 1..80: mol_type = other DNA
cacaatatagtaatgaaaagtggacattacaagacgttagccttgaagtgtatttaactgcaccaacaggatgtataaaa

SEQ ID NO: 26510 - DNA, 80 bp, synthetic construct
  misc_feature 1..80: note = Synthetic: >NC_001526.4-cand-2220-2299
  source 1..80: mol_type = other DNA
aaacatggatatacagtggaagtgcagtttgatggagacatatgcaatacaatgcattatacaaactggacacatatata

SEQ ID NO: 26511 - DNA, 80 bp, synthetic construct
  misc_feature 1..80: note = Synthetic: >NC_001526.4-cand-2300-2379
  source 1..80: mol_type = other DNA
tatttgtgaagaagcatcagtaactgtggtagagggtcaagttgactattatggtttatattatgttcatgaaggaatac

SEQ ID NO: 26512 - DNA, 80 bp, synthetic construct
  misc_feature 1..80: note = Synthetic: >NC_001526.4-cand-2380-2459
  source 1..80: mol_type = other DNA
gaacatattttgtgcagtttaaagatgatgcagaaaaatatagtaaaaataaagtatgggaagttcatgcgggtggtcag

SEQ ID NO: 26513 - DNA, 80 bp, synthetic construct
  misc_feature 1..80: note = Synthetic: >NC_001526.4-cand-2460-2539
  source 1..80: mol_type = other DNA
gtaatattatgtcctacatctgtgtttagcagcaacgaagtatcctctcctgaaattattaggcagcacttggccaacca

SEQ ID NO: 26514 - DNA, 80 bp, synthetic construct
  misc_feature 1..80: note = Synthetic: >NC_001526.4-cand-2540-2619
  source 1..80: mol_type = other DNA
ccccgccgcgacccataccaaagccgtcgccttgggcaccgaagaaacacagacgactatccagcgaccaagatcagagc

SEQ ID NO: 26515 - DNA, 80 bp, synthetic construct
  misc_feature 1..80: note = Synthetic: >NC_001526.4-cand-2620-2699
  source 1..80: mol_type = other DNA
cagacaccggaaacccctgccacaccactaagttgttgcacagagactcagtggacagtgctccaatcctcactgcattt

SEQ ID NO: 26516 - DNA, 80 bp, synthetic construct
  misc_feature 1..80: note = Synthetic: >NC_001611.1-cand-152030-152109
  source 1..80: mol_type = other DNA
tgggaatatatttggatttgtggtgtcccataccactagatttcctcgtcctatggaacgagaaggtgttgattaccatt

SEQ ID NO: 26517 - DNA, 80 bp, synthetic construct
  misc_feature 1..80: note = Synthetic: >NC_001611.1-cand-152110-152189
  source 1..80: mol_type = other DNA
acgttaacagagaggcaatctggaagggaatagccaccggaaactttctagaacatactgagtttttaggaaatatttac

SEQ ID NO: 26518 - DNA, 80 bp, synthetic construct
  misc_feature 1..80: note = Synthetic: >NC_001611.1-cand-152190-152269
  source 1..80: mol_type = other DNA
ggaacttctaaaacagctgtgaatacagcggctattaataatcgtatttgtgtgatggatttaaacatcgacggtgttag

SEQ ID NO: 26519 - DNA, 80 bp, synthetic construct
  misc_feature 1..80: note = Synthetic: >NC_001611.1-cand-152270-152349
  source 1..80: mol_type = other DNA
aagtcttaaaaatacttacctaatgccttactcggtgtatataaaacctacctctcttaaaatggttgagaccaagcttc

SEQ ID NO: 26520 - DNA, 80 bp, synthetic construct
  misc_feature 1..80: note = Synthetic: >NC_001611.1-cand-152350-152429
  source 1..80: mol_type = other DNA
gtcgtagaaacactgaagcggacgataagattcatcgtcgcgcgatgttggcaaaaacggatatggatgaggccaacgaa

SEQ ID NO: 26521 - DNA, 80 bp, synthetic construct
  misc_feature 1..80: note = Synthetic: >NC_001611.1-cand-152430-152509
  source 1..80: mol_type = other DNA
gcaggtctattcaacactactattattgaagataatgtgaatttagcatatagtaagttaattcagatactacaggaccg

SEQ ID NO: 26522 - DNA, 80 bp, synthetic construct
  misc_feature 1..80: note = Synthetic: >NC_001611.1-cand-152510-152589
  source 1..80: mol_type = other DNA
tattagaatgtattttaacactaattaagatataatacttgactgacttaaaacttgataattaataatataattcgttt

SEQ ID NO: 26523 - DNA, 80 bp, synthetic construct
  misc_feature 1..80: note = Synthetic: >NC_001611.1-cand-152590-152669
  source 1..80: mol_type = other DNA
ttatatgtgactattttaacgtctaaatgtattagttaaatattaaacttaccacgtaaaacttaaaatttaaaatggta

SEQ ID NO: 26524 - DNA, 80 bp, synthetic construct
  misc_feature 1..80: note = Synthetic: >NC_001611.1-cand-152670-152749
  source 1..80: mol_type = other DNA
tttcattgacggatgatcatacattatgaactttcaaggacttgtcttaactgacaattgcaaaaatcaatgggtcgttg

SEQ ID NO: 26525 - DNA, 80 bp, synthetic construct
  misc_feature 1..80: note = Synthetic: >NC_001611.1-cand-152740-152819
  source 1..80: mol_type = other DNA
tgggtcgttggaccattaataggaaaaggtggattcggtagtatttatactactaatgacaataattatgtagtaaaaat

SEQ ID NO: 26526 - DNA, 80 bp, synthetic construct
  misc_feature 1..80: note = Synthetic: >NC_001611.1-cand-152820-152899
  source 1..80: mol_type = other DNA
agagcccaaagctaacggatcattatttactgaacaggcattttatactagagtacttaaaccatccgttatcgaagaat

SEQ ID NO: 26527 - DNA, 80 bp, synthetic construct
  misc_feature 1..80: note = Synthetic: >NC_001611.1-cand-152900-152979
  source 1..80: mol_type = other DNA
ggaaaaaatctcaccatataagccacgtaggagttatcacatgcaaggcatttggtctatacaaatccattaatacggaa

SEQ ID NO: 26528 - DNA, 80 bp, synthetic construct
  misc_feature 1..80: note = Synthetic: >NC_001611.1-cand-152980-153059
  source 1..80: mol_type = other DNA
tatagattcttggtaattaatagattgggtgtagatctagatgcggtgatcagggctaacaataatagactaccgaaaag

SEQ ID NO: 26529 - DNA, 80 bp, synthetic construct
  misc_feature 1..80: note = Synthetic: >NC_001611.1-cand-153060-153139
  source 1..80: mol_type = other DNA
atcggtgatgttagtaggaatagaaatcttgaataccatacaatttatgcacgagcaaggatattctcatggaaatatta

SEQ ID NO: 26530 - DNA, 80 bp, synthetic construct
  misc_feature 1..80: note = Synthetic: >NC_001611.1-cand-153140-153219
  source 1..80: mol_type = other DNA
aagcgagcaatatagttttggatcaaatggataagaataaattatatctagtggattacggattggtttctaaattcatg

SEQ ID NO: 26531 - DNA, 80 bp, synthetic construct
  misc_feature 1..80: note = Synthetic: >NC_001611.1-cand-153220-153299
  source 1..80: mol_type = other DNA
tctaacggcgaacatgttccatttataagaaatccaaataaaatggataatggtactctagaatttacacctatagattc

SEQ ID NO: 26532 - DNA, 80 bp, synthetic construct
  misc_feature 1..80: note = Synthetic: >NC_001612.1-cand-2790-2869
  source 1..80: mol_type = other DNA
ctcaaatgaggcgtaagtgtgagctattcacatacatgcgctttgatgcagagtttacatttgtagctgccaaaccaaac

SEQ ID NO: 26533 - DNA, 80 bp, synthetic construct
  misc_feature 1..80: note = Synthetic: >NC_001612.1-cand-2870-2949
  source 1..80: mol_type = other DNA
ggtgagctagtaccacaattgttgcagtacatgtatgtgcctcccggagctccaaaacctacgtcccgggattcctttgc

SEQ ID NO: 26534 - DNA, 80 bp, synthetic construct
  misc_feature 1..80: note = Synthetic: >NC_001612.1-cand-2950-3029
  source 1..80: mol_type = other DNA
ctggcagactgctaccaatccttccatcttcgtcaagttgactgaccccccggcacaagtgtcagtacccttcatgtctc

SEQ ID NO: 26535 - DNA, 80 bp, synthetic construct
  misc_feature 1..80: note = Synthetic: >NC_001612.1-cand-3040-3119
  source 1..80: mol_type = other DNA
ctaccagtggttttacgatggctatccaacgtttggagcccatccacaatcgaatgacgcagactatggccaatgtccaa

SEQ ID NO: 26536 - DNA, 80 bp, synthetic construct
  misc_feature 1..80: note = Synthetic: >NC_001612.1-cand-3120-3199
  source 1..80: mol_type = other DNA
acaacatgatgggcacctttagcatcagaactgtaggcactgagaaatccccccattctatcacccttcgggtgtatatg

SEQ ID NO: 26537 - DNA, 80 bp, synthetic construct
  misc_feature 1..80: note = Synthetic: >NC_001612.1-cand-3200-3279
  source 1..80: mol_type = other DNA
agaatcaagcatgtcagggcctggataccccggccactcagaaaccaaccgtacctttttaagacaaatccaaattataa

SEQ ID NO: 26538 - DNA, 80 bp, synthetic construct
  misc_feature 1..80: note = Synthetic: >NC_001612.1-cand-3280-3359
  source 1..80: mol_type = other DNA
aggcaacgacatcaaatgcaccagcacaagtagggacaaaataacaacactaggaaaatttggccagcaatctggtgcta

SEQ ID NO: 26539 - DNA, 80 bp, synthetic construct
  misc_feature 1..80: note = Synthetic: >NC_001612.1-cand-3360-3439
  source 1..80: mol_type = other DNA
tttacgtgggtaactatagagtggtcaatcgtcacttggccacgcacaatgactgggccaatttagtatgggaagacagc

SEQ ID NO: 26540 - DNA, 80 bp, synthetic construct
  misc_feature 1..80: note = Synthetic: >NC_001612.1-cand-3430-3509
  source 1..80: mol_type = other DNA
ggaagacagctcaagggatcttttagtctcctccaccactgcacagggatgtgacactattgctcgatgcgattgtcaaa

SEQ ID NO: 26541 - DNA, 80 bp, synthetic construct
  misc_feature 1..80: note = Synthetic: >NC_001612.1-cand-3520-3599
  source 1..80: mol_type = other DNA
ttattgcagctcaagaagaaagcactacccagtcagtttctcaaagcccagtctaatctttgtggaagctagtgagtact

SEQ ID NO: 26542 - DNA, 80 bp, synthetic construct
  misc_feature 1..80: note = Synthetic: >NC_001612.1-cand-3600-3679
  source 1..80: mol_type = other DNA
acccagccaggtaccaatcgcacctcatgctcgctgtagggcattccgagcctggagattgcggaggtattctcaggtgc

SEQ ID NO: 26543 - DNA, 80 bp, synthetic construct
  misc_feature 1..80: note = Synthetic: >NC_001612.1-cand-3680-3759
  source 1..80: mol_type = other DNA
cagcatggtgttgttggtatagtgtctacaggtggaaatgggcttgttggttttgctgatgttagagacctcctgtggct

SEQ ID NO: 26544 - DNA, 80 bp, synthetic construct
  misc_feature 1..80: note = Synthetic: >NC_001612.1-cand-3760-3839
  source 1..80: mol_type = other DNA
ggatgaagaggctatggaacaaggagtgtctgattacatcaaagggcttggtgatgcgtttgggacaggtttcactgacg

SEQ ID NO: 26545 - DNA, 80 bp, synthetic construct
  misc_feature 1..80: note = Synthetic: >NC_001612.1-cand-3840-3919
  source 1..80: mol_type = other DNA
ctgtttccagagaggttgaggctcttaaaaatcacctcataggatctgagggtgcagttgagaagattcttaaaaactta

SEQ ID NO: 26546 - DNA, 80 bp, synthetic construct
  misc_feature 1..80: note = Synthetic: >NC_001612.1-cand-3920-3999
  source 1..80: mol_type = other DNA
attaagctcatttctgcactagtgattgtgatcaggagtgattacgatatggtcactctcacagcaactctggctctaat

SEQ ID NO: 26547 - DNA, 80 bp, synthetic construct
  misc_feature 1..80: note = Synthetic: >NC_001612.1-cand-4000-4079
  source 1..80: mol_type = other DNA
tgggtgtcatggcagcccttgggcttggatcaaggctaagacagcatctattctgggcatccccattgctcagaaacaga

SEQ ID NO: 26548 - DNA, 80 bp, synthetic construct
  misc_feature 1..80: note = Synthetic: >NC_001612.1-cand-6600-6679
  source 1..80: mol_type = other DNA
taccaatcctgcttccaggttcactctttgcatttgattactcaggctatgatgctagtctcagtccagtctggtttaga

SEQ ID NO: 26549 - DNA, 80 bp, synthetic construct
  misc_feature 1..80: note = Synthetic: >NC_001612.1-cand-6660-6739
  source 1..80: mol_type = other DNA
tcagtccagtctggtttagagcactggagctggtcctcagggaggtgggctatagtgaggaggcagtctcccttatagag

SEQ ID NO: 26550 - DNA, 80 bp, synthetic construct
  misc_feature 1..80: note = Synthetic: >NC_001612.1-cand-6840-6919
  source 1..80: mol_type = other DNA
tcaacaacatcataattaggacattgctcataaaaacattcaagggcattgatttggacgagcttaacatggtcgcctac

SEQ ID NO: 26551 - DNA, 80 bp, synthetic construct
  misc_feature 1..80: note = Synthetic: >NC_001612.1-cand-6930-7009
  source 1..80: mol_type = other DNA
tgcttgctagttatcctttcccaatcgattgcctggaattggcaagaacaggcaaagagtatggtttgactatgactcct

SEQ ID NO: 26552 - DNA, 80 bp, synthetic construct
  misc_feature 1..80: note = Synthetic: >NC_001612.1-cand-6960-7039
  source 1..80: mol_type = other DNA
gcctggaattggcaagaacaggcaaagagtatggtttgactatgactcctgcagacaaatctccttgcttcaatgaggta

SEQ ID NO: 26553 - DNA, 80 bp, synthetic construct
  misc_feature 1..80: note = Synthetic: >NC_001612.1-cand-7080-7159
  source 1..80: mol_type = other DNA
ccgatgagcaattccctttcttgatccatcctaccatgccaatgaaggagattcacgaatctattcgatggaccaaggac

SEQ ID NO: 26554 - DNA, 80 bp, synthetic construct
  misc_feature 1..80: note = Synthetic: >NC_001612.1-cand-7160-7239
  source 1..80: mol_type = other DNA
gcacgaaacactcaagatcacgtacgatccctgtgtcttttggcgtggcacaatggtaagcaggagtatgaaaaatttgt

SEQ ID NO: 26555 - DNA, 80 bp, synthetic construct
  misc_feature 1..80: note = Synthetic: >NC_001612.1-cand-7300-7379
  source 1..80: mol_type = other DNA
gagacgcaattggctcgaattattttagaggtcagatatacctcaaccccaccagggatctggtcgtgaatatgactggt

SEQ ID NO: 26556 - DNA, 80 bp, synthetic construct
  misc_feature 1..80: note = Synthetic: >NC_001672.1-cand-0-79
  source 1..80: mol_type = other DNA
tttcttgcacgtgcatgcgtttgcttcggacagcattagcagcggttggtttgaaagagatattcttttgtttctaccag

SEQ ID NO: 26557 - DNA, 80 bp, synthetic construct
  misc_feature 1..80: note = Synthetic: >NC_001672.1-cand-40-119
  source 1..80: mol_type = other DNA
agcggttggtttgaaagagatattcttttgtttctaccagtcgtgaacgtgttgagaaaaagacagcttaggagaacaag

SEQ ID NO: 26558 - DNA, 80 bp, synthetic construct
  misc_feature 1..80: note = Synthetic: >NC_001672.1-cand-260-339
  source 1..80: mol_type = other DNA
atcttgtggcatgccgtagccggcaccgcgagaaaccccgtattgaaggcgttctggaactcagtccctctgaaacaggc

SEQ ID NO: 26559 - DNA, 80 bp, synthetic construct
  misc_feature 1..80: note = Synthetic: >NC_001672.1-cand-320-399
  source 1..80: mol_type = other DNA
tcagtccctctgaaacaggcaacagcagcactgcggaagatcaaaaggacggtgagtgccctaatggttggcttgcaaaa

SEQ ID NO: 26560 - DNA, 80 bp, synthetic construct
  misc_feature 1..80: note = Synthetic: >NC_001672.1-cand-380-459
  source 1..80: mol_type = other DNA
ctaatggttggcttgcaaaaacgtgggaaaaggaggtcagcgacggactggatgagctggttgctggtcatcactctgtt

SEQ ID NO: 26561 - DNA, 80 bp, synthetic construct
  misc_feature 1..80: note = Synthetic: >NC_001672.1-cand-480-559
  source 1..80: mol_type = other DNA
cggtgaggaaagaaagggatggctcaactgtgatcagagctgaaggaaaggatgcagcaactcaggtgcgtgtggagaat

SEQ ID NO: 26562 - DNA, 80 bp, synthetic construct
  misc_feature 1..80: note = Synthetic: >NC_001672.1-cand-590-669
  source 1..80: mol_type = other DNA
gggtcatggtgtgatgattcactgtcctatgagtgtgtgaccatagatcaaggagaagagcctgttgacgtggattgttt

SEQ ID NO: 26563 - DNA, 80 bp, synthetic construct
  misc_feature 1..80: note = Synthetic: >NC_001672.1-cand-640-719
  source 1..80: mol_type = other DNA
aggagaagagcctgttgacgtggattgtttttgccggaacgttgatggagtctatctggagtacggacgctgtgggaaac

SEQ ID NO: 26564 - DNA, 80 bp, synthetic construct
  misc_feature 1..80: note = Synthetic: >NC_001672.1-cand-4540-4619
  source 1..80: mol_type = other DNA
tcttggtgtgatgggactgtggacgctcacggaaatgctgaggtcatcccgaaggtctgacctggttttctctggacagg

SEQ ID NO: 26565 - DNA, 80 bp, synthetic construct
  misc_feature 1..80: note = Synthetic: >NC_001672.1-cand-4700-4779
  source 1..80: mol_type = other DNA
cagaaccaggtgggagttggctacggttccaagggtgtcttgcacacgatgtggcacgtgacgagaggagcggcgctgtc

SEQ ID NO: 26566 - DNA, 80 bp, synthetic construct
  misc_feature 1..80: note = Synthetic: >NC_001672.1-cand-4720-4799
  source 1..80: mol_type = other DNA
ctacggttccaagggtgtcttgcacacgatgtggcacgtgacgagaggagcggcgctgtctattgatgacgctgtggccg

SEQ ID NO: 26567 - DNA, 80 bp, synthetic construct
  misc_feature 1..80: note = Synthetic: >NC_001672.1-cand-4800-4879
  source 1..80: mol_type = other DNA
gtccctactgggctgatgtgagggaagatgtcgtgtgttacggaggagcctggagcctggaggaaaaatggaaaggtgaa

SEQ ID NO: 26568 - DNA, 80 bp, synthetic construct
  misc_feature 1..80: note = Synthetic: >NC_001672.1-cand-4820-4899
  source 1..80: mol_type = other DNA
agggaagatgtcgtgtgttacggaggagcctggagcctggaggaaaaatggaaaggtgaaacagtacaggtccatgcctt

SEQ ID NO: 26569 - DNA, 80 bp, synthetic construct
  misc_feature 1..80: note = Synthetic: >NC_001672.1-cand-4960-5039
  source 1..80: mol_type = other DNA
cggaagaaagcttggggcaataccaattgatttggtgaaaggaacatcaggcagccccattctcaacgcccagggagtgg

SEQ ID NO: 26570 - DNA, 80 bp, synthetic construct
  misc_feature 1..80: note = Synthetic: >NC_001672.1-cand-5110-5189
  source 1..80: mol_type = other DNA
ggagaagagtcgccccaacctcccacaggctgttgtgggtacgggctggacatcaaagggtcagatcacagtgctggaca

SEQ ID NO: 26571 - DNA, 80 bp, synthetic construct
  misc_feature 1..80: note = Synthetic: >NC_001672.1-cand-5120-5199
  source 1..80: mol_type = other DNA
cgccccaacctcccacaggctgttgtgggtacgggctggacatcaaagggtcagatcacagtgctggacatgcacccagg

SEQ ID NO: 26572 - DNA, 80 bp, synthetic construct
  misc_feature 1..80: note = Synthetic: >NC_001672.1-cand-5210-5289
  source 1..80: mol_type = other DNA
acccacagagtcctcccggagctcattcgccaatgcattgacaggcgcctgagaacgttggtgttggctccaactcgtgt

SEQ ID NO: 26573 - DNA, 80 bp, synthetic construct
  misc_feature 1..80: note = Synthetic: >NC_001672.1-cand-5280-5359
  source 1..80: mol_type = other DNA
caactcgtgtggtactcaaagaaatggagcgtgctttgaatgggaaacgggtcaggttccactcaccagcagtcagtgac

SEQ ID NO: 26574 - DNA, 80 bp, synthetic construct
  misc_feature 1..80: note = Synthetic: >NC_001672.1-cand-5380-5459
  source 1..80: mol_type = other DNA
tgtcgatgtgatgtgtcacgcaacctatgtcaacagaaggctactcccacagggaagacaaaattgggaggtggcaatca

SEQ ID NO: 26575 - DNA, 80 bp, synthetic construct
  misc_feature 1..80: note = Synthetic: >NC_001672.1-cand-5440-5519
  source 1..80: mol_type = other DNA
aaattgggaggtggcaatcatggatgaggcccactggacggacccccacagcatagctgccagaggtcatttgtatactc

SEQ ID NO: 26576 - DNA, 80 bp, synthetic construct
  misc_feature 1..80: note = Synthetic: >NC_001672.1-cand-5510-5589
  source 1..80: mol_type = other DNA
ttgtatactctggcaaaagaaaacaagtgtgcactggtcttgatgacagcgacacctcctggtaagagtgaaccctttcc

SEQ ID NO: 26577 - DNA, 80 bp, synthetic construct
  misc_feature 1..80: note = Synthetic: >NC_001672.1-cand-5550-5629
  source 1..80: mol_type = other DNA
tgatgacagcgacacctcctggtaagagtgaaccctttccggagtccaatggagccattactagtgaggaaagacagatt

SEQ ID NO: 26578 - DNA, 80 bp, synthetic construct
  misc_feature 1..80: note = Synthetic: >NC_001672.1-cand-5660-5739
  source 1..80: mol_type = other DNA
tggatcactgagtatgaagggcgcaccgcctggtttgtcccttcgattgcaaaaggtggtgctatagctcgcaccttgag

SEQ ID NO: 26579 - DNA, 80 bp, synthetic construct
  misc_feature 1..80: note = Synthetic: >NC_001672.1-cand-5750-5829
  source 1..80: mol_type = other DNA
aaaagtgtgatttgtttgaacagcaaaacctttgaaaaggactactccagagtgagggatgagaagcctgactttgtggt

SEQ ID NO: 26580 - DNA, 80 bp, synthetic construct
  misc_feature 1..80: note = Synthetic: >NC_001906.3-cand-17100-17179
  source 1..80: mol_type = other DNA
agtggtcccattatttaatggaaggcccgaaaccacgtggatagggaacttagattcatacgagtacataatcaacagaa

SEQ ID NO: 26581 - DNA, 80 bp, synthetic construct
  misc_feature 1..80: note = Synthetic: >NC_001906.3-cand-17180-17259
  source 1..80: mol_type = other DNA
cagccggtcgtaacatcggattggtacactcagatatggaatcaggcatagacaaacaagtggaagaaattatgatagag

SEQ ID NO: 26582 - DNA, 80 bp, synthetic construct
  misc_feature 1..80: note = Synthetic: >NC_001906.3-cand-17260-17339
  source 1..80: mol_type = other DNA
cattcacaccttatctcaatagcaatcaatgtaatgatagaagacggtgttcttgtatctaaaatagcatttgcaccagg

SEQ ID NO: 26583 - DNA, 80 bp, synthetic construct
  misc_feature 1..80: note = Synthetic: >NC_001906.3-cand-17340-17419
  source 1..80: mol_type = other DNA
gttccccatatccaggctactgaatatgtatcgttcctattttgggttagtattggtgtgtttcccagtgtatagtaatc

SEQ ID NO: 26584 - DNA, 80 bp, synthetic construct
  misc_feature 1..80: note = Synthetic: >NC_001906.3-cand-17420-17499
  source 1..80: mol_type = other DNA
cagagtccacagaagtgtatctcatctgcttgcagaaaacaattaagaccataattccacctcaaaaagttcttgatcat

SEQ ID NO: 26585 - DNA, 80 bp, synthetic construct
  misc_feature 1..80: note = Synthetic: >NC_001906.3-cand-17500-17579
  source 1..80: mol_type = other DNA
tcatatctcagtgatgaaatcaatgatcaaggtattacatctgttattttcaagatcaaaaacattcaatcaaaacaatt

SEQ ID NO: 26586 - DNA, 80 bp, synthetic construct
  misc_feature 1..80: note = Synthetic: >NC_001906.3-cand-17580-17659
  source 1..80: mol_type = other DNA
ccatgaagatctagtgaaacactatcaggtcgaacaaccgttttttgttcctagtcatatcacatgtgatgaaaagttgc

SEQ ID NO: 26587 - DNA, 80 bp, synthetic construct
  misc_feature 1..80: note = Synthetic: >NC_001906.3-cand-17660-17739
  source 1..80: mol_type = other DNA
ttatgcaggctggtttgaaaatgaacggaccagaaatcttgaagaatgaagtgggatatgatataggatcagatatcaat

SEQ ID NO: 26588 - DNA, 80 bp, synthetic construct
  misc_feature 1..80: note = Synthetic: >NC_001906.3-cand-17740-17819
  source 1..80: mol_type = other DNA
acactcaggagcactattattatcttacttaatgaagctatgaactattttgacgatgagaggagtccttctcatcatct

SEQ ID NO: 26589 - DNA, 80 bp, synthetic construct
  misc_feature 1..80: note = Synthetic: >NC_001906.3-cand-17780-17859
  source 1..80: mol_type = other DNA
tgaactattttgacgatgagaggagtccttctcatcatctagagccctttccagtcctagagaaaacgagagtcaaaact

SEQ ID NO: 26590 - DNA, 80 bp, synthetic construct
  misc_feature 1..80: note = Synthetic: >NC_001906.3-cand-17900-17979
  source 1..80: mol_type = other DNA
ttataaagttgaaggaaactaaaagcccggaactttataacatcaaaaattacataaggagaaaagttttgattctagac

SEQ ID NO: 26591 - DNA, 80 bp, synthetic construct
  misc_feature 1..80: note = Synthetic: >NC_001906.3-cand-17980-18059
  source 1..80: mol_type = other DNA
ttcagatcccatactatgattaaactgctacctaaaggaatgaaagagagaagagagaaaagcggattcaaagaaatttg

SEQ ID NO: 26592 - DNA, 80 bp, synthetic construct
  misc_feature 1..80: note = Synthetic: >NC_001906.3-cand-18060-18139
  source 1..80: mol_type = other DNA
gatatttgacttatctaatagggaagtcaaaatctggtggaagatcataggttacctctctttagtctgaatcgaactac

SEQ ID NO: 26593 - DNA, 80 bp, synthetic construct
  misc_feature 1..80: note = Synthetic: >NC_001906.3-cand-18140-18219
  source 1..80: mol_type = other DNA
cacacccatcaccaatgaagcccgaacaagtctacatagatcagttattaagaaaaacttaataacgatctctctttacc

SEQ ID NO: 26594 - DNA, 80 bp, synthetic construct
  misc_feature 1..80: note = Synthetic: >NC_001918.1-cand-10-89
  source 1..80: mol_type = other DNA
ggtggtctggtcccggaccaccgttactccattcagcttcttcggaacctgttcggaggaattaaacgggcacccatact

SEQ ID NO: 26595 - DNA, 80 bp, synthetic construct
  misc_feature 1..80: note = Synthetic: >NC_001918.1-cand-90-169
  source 1..80: mol_type = other DNA
ccccccacccccctttggtaactaagtatgtgtgctcgtgatcttggctcccacggagcggaccgatccgttggtgaaca

SEQ ID NO: 26596 - DNA, 80 bp, synthetic construct
  misc_feature 1..80: note = Synthetic: >NC_001918.1-cand-1450-1529
  source 1..80: mol_type = other DNA
ccgcccgcgcttcggaatccgccaccgactcggctatcgagggaatcgatgctgccgggaaggccgcctccaaggccatc

SEQ ID NO: 26597 - DNA, 80 bp, synthetic construct
  misc_feature 1..80: note = Synthetic: >NC_001918.1-cand-1530-1609
  source 1..80: mol_type = other DNA
acgcggaagctggaccgccccgccgccccctcctcaaccgccaatccccaaccatctctcatcgctctcaacccttctgc

SEQ ID NO: 26598 - DNA, 80 bp, synthetic construct
  misc_feature 1..80: note = Synthetic: >NC_001918.1-cand-1610-1689
  source 1..80: mol_type = other DNA
cacgcaatccggcaacgcttccatcttgaccggatcaactgctccctccctcctcgcctaccccaccgccacccctgttc

SEQ ID NO: 26599 - DNA, 80 bp, synthetic construct
  misc_feature 1..80: note = Synthetic: >NC_001918.1-cand-1690-1769
  source 1..80: mol_type = other DNA
cccttcccaaccccgatgaaccctcccaacccggaccatccggcgaccgcacctggttgttggatacagtcacctggtcc

SEQ ID NO: 26600 - DNA, 80 bp, synthetic construct
  misc_feature 1..80: note = Synthetic: >NC_001918.1-cand-1770-1849
  source 1..80: mol_type = other DNA
caggagttcacccgcggctggaacatcgcaggctccaatggcatgcaatggaccggcctggaatcccttatcttccctgt

SEQ ID NO: 26601 - DNA, 80 bp, synthetic construct
  misc_feature 1..80: note = Synthetic: >NC_001918.1-cand-1850-1929
  source 1..80: mol_type = other DNA
ctccactgacaccaattggacctccacctccagtcctaccgcatatcccctccctttctccttcgtgcgtgcttacccag

SEQ ID NO: 26602 - DNA, 80 bp, synthetic construct
  misc_feature 1..80: note = Synthetic: >NC_001918.1-cand-1930-2009
  source 1..80: mol_type = other DNA
actcctcctgggctgccatgtacaacacccactccatgtggaattgcggttggcgcgttcaagtgaccgtcaacggctca

SEQ ID NO: 26603 - DNA, 80 bp, synthetic construct
  misc_feature 1..80: note = Synthetic: >NC_001918.1-cand-2010-2089
  source 1..80: mol_type = other DNA
cagttccatgccggagcccttatcctctacatggtccctgaagccaccacccatgccatccaaacggctcgggacaacgc

SEQ ID NO: 26604 - DNA, 80 bp, synthetic construct
  misc_feature 1..80: note = Synthetic: >NC_001918.1-cand-2090-2169
  source 1..80: mol_type = other DNA
tggctttgtcttcccctatgtcatcctcaatctctatgaaagcaacaccgctaccatagaggtcccctacatctccccca

SEQ ID NO: 26605 - DNA, 80 bp, synthetic construct
  misc_feature 1..80: note = Synthetic: >NC_001918.1-cand-2170-2249
  source 1..80: mol_type = other DNA
cccccaatacctcgagtggactccacgccccgtggacgttctacctccaggtgctctcacccctcaatcctcccccttct

SEQ ID NO: 26606 - DNA, 80 bp, synthetic construct
  misc_feature 1..80: note = Synthetic: >NC_001918.1-cand-2250-2329
  source 1..80: mol_type = other DNA
ctccccacttccttatcctgctctatctatgtcacccccgttgactcctctttccacggtctccgctacctcgccccaca

SEQ ID NO: 26607 - DNA, 80 bp, synthetic construct
  misc_feature 1..80: note = Synthetic: >NC_001918.1-cand-2330-2409
  source 1..80: mol_type = other DNA
gcactggaagactcgcgccgtcccaggtgcgggcactttcggatctgccgtggctggccaggaactccctctctgtggag

SEQ ID NO: 26608 - DNA, 80 bp, synthetic construct
  misc_feature 1..80: note = Synthetic: >NC_001918.1-cand-2410-2489
  source 1..80: mol_type = other DNA
tccgtgcctactacccccccaatgcctacatccctgcccaggtacgcgactggcttgagttcgcccaccggcctggtctc

SEQ ID NO: 26609 - DNA, 80 bp, synthetic construct
  misc_feature 1..80: note = Synthetic: >NC_001918.1-cand-2490-2569
  source 1..80: mol_type = other DNA
atggccacagtgccgtggaccatggcggacgagccggccgagcgcctcggtatcttccccgtctctcccagtgctatcgc

SEQ ID NO: 26610 - DNA, 80 bp, synthetic construct
  misc_feature 1..80: note = Synthetic: >NC_001918.1-cand-2570-2649
  source 1..80: mol_type = other DNA
tgggactggcgcccccatctcctatgttatttctctcttctcccagtggcgcggtgaactcgccgcccacctcctcttca

SEQ ID NO: 26611 - DNA, 80 bp, synthetic construct
  misc_feature 1..80: note = Synthetic: >NC_001918.1-cand-2650-2729
  source 1..80: mol_type = other DNA
ctggctccgctcagcactacggccgcctggtcgtgtgctacactcctgctgccccccaacccccctccaccatgcaggaa

SEQ ID NO: 26612 - DNA, 80 bp, synthetic construct
  misc_feature 1..80: note = Synthetic: >NC_002031.1-cand-7130-7209
  source 1..80: mol_type = other DNA
gataccattcatgaagatgaatatctcggtcataatgctgctggtcagtggctggaattcaataacagtgatgcctctgc

SEQ ID NO: 26613 - DNA, 80 bp, synthetic construct
  misc_feature 1..80: note = Synthetic: >NC_002031.1-cand-7170-7249
  source 1..80: mol_type = other DNA
ctggtcagtggctggaattcaataacagtgatgcctctgctctgtggcatagggtgcgccatgctccactggtctctcat

SEQ ID NO: 26614 - DNA, 80 bp, synthetic construct
  misc_feature 1..80: note = Synthetic: >NC_002031.1-cand-7250-7329
  source 1..80: mol_type = other DNA
tttacctggaatcaaagcgcagcagtcaaagcttgcacagagaagggtgttccatggcgttgccgagaaccctgtggttg

SEQ ID NO: 26615 - DNA, 80 bp, synthetic construct
  misc_feature 1..80: note = Synthetic: >NC_002031.1-cand-7330-7409
  source 1..80: mol_type = other DNA
atgggaatccaacagttgacattgaggaagctcctgaaatgcctgccctttatgagaagaaactggctctatatctcctt

SEQ ID NO: 26616 - DNA, 80 bp, synthetic construct
  misc_feature 1..80: note = Synthetic: >NC_002031.1-cand-7410-7489
  source 1..80: mol_type = other DNA
cttgctctcagcctagcttctgttgccatgtgcagaacgcccttttcattggctgaaggcattgtcctagcatcagctgc

SEQ ID NO: 26617 - DNA, 80 bp, synthetic construct
  misc_feature 1..80: note = Synthetic: >NC_002031.1-cand-7490-7569
  source 1..80: mol_type = other DNA
cttagggccgctcatagagggaaacaccagccttctttggaatggacccatggctgtctccatgacaggagtcatgaggg

SEQ ID NO: 26618 - DNA, 80 bp, synthetic construct
  misc_feature 1..80: note = Synthetic: >NC_002031.1-cand-7640-7719
  source 1..80: mol_type = other DNA
gaatggaaaaactttgggtgaagtctggaagagggaactgaatctgttggacaagcgacagtttgagttgtataaaagga

SEQ ID NO: 26619 - DNA, 80 bp, synthetic construct
  misc_feature 1..80: note = Synthetic: >NC_002031.1-cand-7650-7729
  source 1..80: mol_type = other DNA
actttgggtgaagtctggaagagggaactgaatctgttggacaagcgacagtttgagttgtataaaaggaccgacattgt

SEQ ID NO: 26620 - DNA, 80 bp, synthetic construct
  misc_feature 1..80: note = Synthetic: >NC_002031.1-cand-7700-7779
  source 1..80: mol_type = other DNA
gtttgagttgtataaaaggaccgacattgtggaggtggatcgtgatacggcacgcaggcatttggccgaagggaaggtgg

SEQ ID NO: 26621 - DNA, 80 bp, synthetic construct
  misc_feature 1..80: note = Synthetic: >NC_002031.1-cand-7810-7889
  source 1..80: mol_type = other DNA
caaagttaaggtggttccatgagcgtggctatgtcaagctggaaggtagggtgattgacctggggtgtggccgcggaggc

SEQ ID NO: 26622 - DNA, 80 bp, synthetic construct
  misc_feature 1..80: note = Synthetic: >NC_002031.1-cand-7930-8009
  source 1..80: mol_type = other DNA
tcaaaggatttactcttggaagagacggccatgagaaacccatgaatgtgcaaagtctgggatggaacatcatcaccttc

SEQ ID NO: 26623 - DNA, 80 bp, synthetic construct
  misc_feature 1..80: note = Synthetic: >NC_002031.1-cand-7970-8049
  source 1..80: mol_type = other DNA
catgaatgtgcaaagtctgggatggaacatcatcaccttcaaggacaaaactgatatccaccgcctagaaccagtgaaat

SEQ ID NO: 26624 - DNA, 80 bp, synthetic construct
  misc_feature 1..80: note = Synthetic: >NC_002031.1-cand-8020-8099
  source 1..80: mol_type = other DNA
ctgatatccaccgcctagaaccagtgaaatgtgacacccttttgtgtgacattggagagtcatcatcgtcatcggtcaca

SEQ ID NO: 26625 - DNA, 80 bp, synthetic construct
  misc_feature 1..80: note = Synthetic: >NC_002031.1-cand-8160-8239
  source 1..80: mol_type = other DNA
gacaacttctgtgtgaaggtgttagctccatacatgccagatgttctcgagaaactggaattgctccaaaggaggtttgg

SEQ ID NO: 26626 - DNA, 80 bp, synthetic construct
  misc_feature 1..80: note = Synthetic: >NC_002031.1-cand-8220-8299
  source 1..80: mol_type = other DNA
ttgctccaaaggaggtttggcggaacagtgatcaggaaccctctctccaggaattccactcatgaaatgtactacgtgtc

SEQ ID NO: 26627 - DNA, 80 bp, synthetic construct
  misc_feature 1..80: note = Synthetic: >NC_002031.1-cand-8300-8379
  source 1..80: mol_type = other DNA
tggagcccgcagcaatgtcacatttactgtgaaccaaacatcccgcctcctgatgaggagaatgaggcgtccaactggaa

SEQ ID NO: 26628 - DNA, 80 bp, synthetic construct
  misc_feature 1..80: note = Synthetic: >NC_002058.3-cand-50-129
  source 1..80: mol_type = other DNA
tccggtattgcggtacccttgtacgcctgttttatactcccttcccgtaacttagacgcacaaaaccaagttcaatagaa

SEQ ID NO: 26629 - DNA, 80 bp, synthetic construct
  misc_feature 1..80: note = Synthetic: >NC_002058.3-cand-160-239
  source 1..80: mol_type = other DNA
gcacttctgtttccccggtgatgtcgtatagactgcttgcgtggttgaaagcgacggatccgttatccgcttatgtactt

SEQ ID NO: 26630 - DNA, 80 bp, synthetic construct
  misc_feature 1..80: note = Synthetic: >NC_002058.3-cand-320-399
  source 1..80: mol_type = other DNA
tctggacatccctcaccggtgacggtggtccaggctgcgttggcggcctacctatggctaacgccatgggacgctagttg

SEQ ID NO: 26631 - DNA, 80 bp, synthetic construct
  misc_feature 1..80: note = Synthetic: >NC_002058.3-cand-640-719
  source 1..80: mol_type = other DNA
gagactcattatctatctgtttgctggatccgctccattgagtgtgtttactctaagtacaatttcaacagttatttcaa

SEQ ID NO: 26632 - DNA, 80 bp, synthetic construct
  misc_feature 1..80: note = Synthetic: >NC_002058.3-cand-720-799
  source 1..80: mol_type = other DNA
tcagacaattgtatcataatgggtgctcaggtttcatcacagaaagtgggcgcacatgaaaactcaaatagagcgtatgg

SEQ ID NO: 26633 - DNA, 80 bp, synthetic construct
  misc_feature 1..80: note = Synthetic: >NC_002058.3-cand-800-879
  source 1..80: mol_type = other DNA
tggttctaccattaattacaccaccattaattattatagagattcagctagtaacgcggcttcgaaacaggacttctctc

SEQ ID NO: 26634 - DNA, 80 bp, synthetic construct
  misc_feature 1..80: note = Synthetic: >NC_002058.3-cand-880-959
  source 1..80: mol_type = other DNA
aagacccttccaagttcaccgagcccatcaaggatgtcctgataaaaacagccccaatgctaaactcgccaaacatagag

SEQ ID NO: 26635 - DNA, 80 bp, synthetic construct
  misc_feature 1..80: note = Synthetic: >NC_002058.3-cand-970-1049
  source 1..80: mol_type = other DNA
atagcgatagagtactgcaattaacactgggaaactccactataaccacacaggaggcggctaattcagtagtcgcttat

SEQ ID NO: 26636 - DNA, 80 bp, synthetic construct
  misc_feature 1..80: note = Synthetic: >NC_002058.3-cand-1050-1129
  source 1..80: mol_type = other DNA
gggcgttggcctgaatatctgagggacagcgaagccaatccagtggaccagccgacagaaccagacgtcgctgcatgcag

SEQ ID NO: 26637 - DNA, 80 bp, synthetic construct
  misc_feature 1..80: note = Synthetic: >NC_002058.3-cand-1130-1209
  source 1..80: mol_type = other DNA
gttttatacgctagacaccgtgtcttggacgaaagagtcgcgagggtggtggtggaagttgcctgatgcactgagggaca

SEQ ID NO: 26638 - DNA, 80 bp, synthetic construct
  misc_feature 1..80: note = Synthetic: >NC_002058.3-cand-1210-1289
  source 1..80: mol_type = other DNA
tgggactctttgggcaaaatatgtactaccactacctaggtaggtccgggtacaccgtgcatgtacagtgtaacgcctcc

SEQ ID NO: 26639 - DNA, 80 bp, synthetic construct
  misc_feature 1..80: note = Synthetic: >NC_002058.3-cand-1350-1429
  source 1..80: mol_type = other DNA
agcaacaccactaccatgcacaccagctatcaaaatgccaatcctggcgagaaaggaggcactttcacgggtacgttcac

SEQ ID NO: 26640 - DNA, 80 bp, synthetic construct
  misc_feature 1..80: note = Synthetic: >NC_002058.3-cand-1370-1449
  source 1..80: mol_type = other DNA
caccagctatcaaaatgccaatcctggcgagaaaggaggcactttcacgggtacgttcactcctgacaacaaccagacat

SEQ ID NO: 26641 - DNA, 80 bp, synthetic construct
  misc_feature 1..80: note = Synthetic: >NC_002058.3-cand-1420-1499
  source 1..80: mol_type = other DNA
gtacgttcactcctgacaacaaccagacatcacctgcccgcaggttctgcccggtggattacctccttggaaatggcacg

SEQ ID NO: 26642 - DNA, 80 bp, synthetic construct
  misc_feature 1..80: note = Synthetic: >NC_002058.3-cand-1530-1609
  source 1..80: mol_type = other DNA
cagataataaacctacggaccaacaactgtgctacactggtactcccttacgtgaactccctctcgatagatagtatggt

SEQ ID NO: 26643 - DNA, 80 bp, synthetic construct
  misc_feature 1..80: note = Synthetic: >NC_002058.3-cand-1630-1709
  source 1..80: mol_type = other DNA
ttgcaatattaccattggccccattaaattttgctagtgagtcctccccagagattccaatcaccttgaccatagcccct

SEQ ID NO: 26644 - DNA, 80 bp, synthetic construct
  misc_feature 1..80: note = Synthetic: >NC_003310.1-cand-20320-20399
  source 1..80: mol_type = other DNA
gccgtgtttcaaatattctgctatacccgttgaaatagaaaattctaatcctcctattacatataactttccatcgttaa

SEQ ID NO: 26645 - DNA, 80 bp, synthetic construct
  misc_feature 1..80: note = Synthetic: >NC_003310.1-cand-20400-20479
  source 1..80: mol_type = other DNA
cacaagtactaacttctgattttaacgacgacatattagtaaccgttttccattttttttgttttaagatctacccgcga

SEQ ID NO: 26646 - DNA, 80 bp, synthetic construct
  misc_feature 1..80: note = Synthetic: >NC_003310.1-cand-20470-20549
  source 1..80: mol_type = other DNA
ctacccgcgatacggaataaacatgtctattgttaatcatgccgccaataatgtatagacaattatgtaaaacatttgca

SEQ ID NO: 26647 - DNA, 80 bp, synthetic construct
  misc_feature 1..80: note = Synthetic: >NC_003310.1-cand-20550-20629
  source 1..80: mol_type = other DNA
tcatagaattgtctatctgtattaccgactatcgtccaatattctgttctaggagagtaatgggttattgtggatatata

SEQ ID NO: 26648 - DNA, 80 bp, synthetic construct
  misc_feature 1..80: note = Synthetic: >NC_003310.1-cand-20710-20789
  source 1..80: mol_type = other DNA
caacaatgctatagcattgcatatagcattagtcataaacttgggatgtaaaatgttgatgatatctacatcgtttggat

SEQ ID NO: 26649 - DNA, 80 bp, synthetic construct
  misc_feature 1..80: note = Synthetic: >NC_003310.1-cand-20790-20869
  source 1..80: mol_type = other DNA
ttttatgtatccactttaataatattatagcgtaacatcctcatgatttacgttaacgttttcgtgtgataagatagtgg

SEQ ID NO: 26650 - DNA, 80 bp, synthetic construct
  misc_feature 1..80: note = Synthetic: >NC_003310.1-cand-20950-21029
  source 1..80: mol_type = other DNA
gcattatatagttttttaattccatatcttttagaaaagttaaacatccttatacaatttgtggaattaatattatgaat

SEQ ID NO: 26651 - DNA, 80 bp, synthetic construct
  misc_feature 1..80: note = Synthetic: >NC_003310.1-cand-21030-21109
  source 1..80: mol_type = other DNA
catggtttttacacatagatctactacaggcggaacatcaattattatggcagcgactagtatcatttctacattgttta

SEQ ID NO: 26652 - DNA, 80 bp, synthetic construct
  misc_feature 1..80: note = Synthetic: >NC_003310.1-cand-21270-21349
  source 1..80: mol_type = other DNA
aatatcacgcgttccattctcttgaagtactataagtaattataatataatgtaaaggtttatatattcaatattttttt

SEQ ID NO: 26653 - DNA, 80 bp, synthetic construct
  misc_feature 1..80: note = Synthetic: >NC_003310.1-cand-21430-21509
  source 1..80: mol_type = other DNA
aaatgcttttacgtatcctatcgtaggcgatagaaccgctaaaaagcctatcgaatttctacaaaagaatctgttatatg

SEQ ID NO: 26654 - DNA, 80 bp, synthetic construct
  misc_feature 1..80: note = Synthetic: >NC_003310.1-cand-21670-21749
  source 1..80: mol_type = other DNA
atgtctgactagatccgttagtttaatatccgcagtcatcttgtctagaatggcaaatctaactgcgggtttaggtgtag

SEQ ID NO: 26655 - DNA, 80 bp, synthetic construct
  misc_feature 1..80: note = Synthetic: >NC_003310.1-cand-21750-21829
  source 1..80: mol_type = other DNA
gcgttagtttagtttctatatctacatctatgtctttatctaacaccaaaaatataatagctaatattttattacaatca

SEQ ID NO: 26656 - DNA, 80 bp, synthetic construct
  misc_feature 1..80: note = Synthetic: >NC_003310.1-cand-21910-21989
  source 1..80: mol_type = other DNA
atcagatgatcgatgaataatacatttaaattcatcatctgtaagatttttgagatgtctcattaaaatattattagtgt

SEQ ID NO: 26657 - DNA, 80 bp, synthetic construct
  misc_feature 1..80: note = Synthetic: >NC_003310.1-cand-21990-22069
  source 1..80: mol_type = other DNA
cagttctcattatcatatattgacagcagctattacacttattttatttttctgtattttattacttttcaccatataga

SEQ ID NO: 26658 - DNA, 80 bp, synthetic construct
  misc_feature 1..80: note = Synthetic: >NC_003310.1-cand-22070-22149
  source 1..80: mol_type = other DNA
tcagtcattagatcatcaaaatacttttcaatcatcctaaagagtatggtgaacgaatcttcccatctaatttctgaacg

SEQ ID NO: 26659 - DNA, 80 bp, synthetic construct
  misc_feature 1..80: note = Synthetic: >NC_003310.1-cand-22150-22229
  source 1..80: mol_type = other DNA
tctaccaatgtctctagccactttggcactaatagcgatcattcgcttaacatcttctacattattaactggttgattca

SEQ ID NO: 26660 - DNA, 80 bp, synthetic construct
  misc_feature 1..80: note = Synthetic: >NC_003310.1-cand-97290-97369
  source 1..80: mol_type = other DNA
acgattggtatttgtacaggtgcctccatcattaggagatgatagctatttaactaatccgttattgtctccgtattatc

SEQ ID NO: 26661 - DNA, 80 bp, synthetic construct
  misc_feature 1..80: note = Synthetic: >NC_003310.1-cand-97540-97619
  source 1..80: mol_type = other DNA
agagataagtttaaggcatttgtattcgcttggtttaacggcgtttcggaaaatgaaaaggtactagatacgtataaaaa

SEQ ID NO: 26662 - DNA, 80 bp, synthetic construct
  misc_feature 1..80: note = Synthetic: >NC_003310.1-cand-97780-97859
  source 1..80: mol_type = other DNA
agttctttatacaattgaaacagccgcttagaaataaacgagtatgtgtgtgtggtatagatccgtatccaaaagatgga

SEQ ID NO: 26663 - DNA, 80 bp, synthetic construct
  misc_feature 1..80: note = Synthetic: >NC_003310.1-cand-97860-97939
  source 1..80: mol_type = other DNA
actggtgtaccgttcgaatcaccaaattttacaaaaaaatcaattaaggagatagcttcatctatatctagattaaccgg

SEQ ID NO: 26664 - DNA, 80 bp, synthetic construct
  misc_feature 1..80: note = Synthetic: >NC_003310.1-cand-97900-97979
  source 1..80: mol_type = other DNA
caattaaggagatagcttcatctatatctagattaaccggagtaattgattataaaggttataaccttaatataatagac

SEQ ID NO: 26665 - DNA, 80 bp, synthetic construct
  misc_feature 1..80: note = Synthetic: >NC_003310.1-cand-98180-98259
  source 1..80: mol_type = other DNA
tccagcggccagagaccaccaattcgagaaagatcgatcatttgaaattatcaacgttttactggaattagacaacaaga

SEQ ID NO: 26666 - DNA, 80 bp, synthetic construct
  misc_feature 1..80: note = Synthetic: >NC_003310.1-cand-98740-98819
  source 1..80: mol_type = other DNA
gacacgtataccactatggatacattgatagctatgaaacgaacactattagaattaagtagatcatctgaaaatccact

SEQ ID NO: 26667 - DNA, 80 bp, synthetic construct
  misc_feature 1..80: note = Synthetic: >NC_003310.1-cand-99650-99729
  source 1..80: mol_type = other DNA
ccggatttaaatttgacgatacaaaattcgtcgaaaacagtccagaaatggaagagttaatgaatatcattaacgatatc

SEQ ID NO: 26668 - DNA, 80 bp, synthetic construct
  misc_feature 1..80: note = Synthetic: >NC_003310.1-cand-99810-99889
  source 1..80: mol_type = other DNA
aggatgtttaacattcttttttggagaaaccgcaactggaaagtcgacaaccaaacgtttgttaaagtctgctatcggtg

SEQ ID NO: 26669 - DNA, 80 bp, synthetic construct
  misc_feature 1..80: note = Synthetic: >NC_003310.1-cand-99890-99969
  source 1..80: mol_type = other DNA
acctgtttgtcgagacgggtcaaacaattttaacagatgtattggataaaggacctaatccatttatcgctaatatgcat

SEQ ID NO: 26670 - DNA, 80 bp, synthetic construct
  misc_feature 1..80: note = Synthetic: >NC_003310.1-cand-99970-100049
  source 1..80: mol_type = other DNA
ttaaaaagatctgtattctgtagcgaactacctgattttgcatgtagtggatcaaagaaaattagatctgataatattaa

SEQ ID NO: 26671 - DNA, 80 bp, synthetic construct
  misc_feature 1..80: note = Synthetic: >NC_003310.1-cand-100290-100369
  source 1..80: mol_type = other DNA
agatggtaaaatacagaataatagatatagattcgcatttctatacttgttggttaaatggtacaaaaaatatcatattc

SEQ ID NO: 26672 - DNA, 80 bp, synthetic construct
  misc_feature 1..80: note = Synthetic: >NC_003310.1-cand-100450-100529
  source 1..80: mol_type = other DNA
agctctgtaaagcatattccattaatgacagacctctccaaaaagggatatatattgtacgataatgtggttactcttcc

SEQ ID NO: 26673 - DNA, 80 bp, synthetic construct
  misc_feature 1..80: note = Synthetic: >NC_003310.1-cand-100850-100929
  source 1..80: mol_type = other DNA
tgttccatattatgggatcgggtaaaacaataatcgctttgttgttcgccttggtagcttccagatttaaaaaggtttac

SEQ ID NO: 26674 - DNA, 80 bp, synthetic construct
  misc_feature 1..80: note = Synthetic: >NC_003310.1-cand-100930-101009
  source 1..80: mol_type = other DNA
attttagtaccgaacatcaacatcttaaaaattttcaattataatatgggtgtagctatgaacttgtttaatgacgaatt

SEQ ID NO: 26675 - DNA, 80 bp, synthetic construct
  misc_feature 1..80: note = Synthetic: >NC_003310.1-cand-101090-101169
  source 1..80: mol_type = other DNA
gattaagtcgctacaataactctatttttatcgttgatgaggcacataatatttttgggaataatactggagaacttatg

SEQ ID NO: 26676 - DNA, 80 bp, synthetic construct
  misc_feature 1..80: note = Synthetic: >NC_003310.1-cand-104530-104609
  source 1..80: mol_type = other DNA
ataaagtatatataggttattgcatggcatgttttattaatcaatcgttggaggatttatcacatactagtatttacaat

SEQ ID NO: 26677 - DNA, 80 bp, synthetic construct
  misc_feature 1..80: note = Synthetic: >NC_003310.1-cand-104610-104689
  source 1..80: mol_type = other DNA
gtagaaattagaaagattaaatcgttaaatgattgtattaacgacgataaatacgaatatctgtcttatatttataatat

SEQ ID NO: 26678 - DNA, 80 bp, synthetic construct
  misc_feature 1..80: note = Synthetic: >NC_003310.1-cand-104930-105009
  source 1..80: mol_type = other DNA
attagaactagaaacatgtatagaaagaaacgattatttctgaattattccaattatttgaacaaacaggaaagaagtat

SEQ ID NO: 26679 - DNA, 80 bp, synthetic construct
  misc_feature 1..80: note = Synthetic: >NC_003310.1-cand-105100-105179
  source 1..80: mol_type = other DNA
gaacgttccagagtgtttatccagggaaatcaaagaagaagttaatatagacaattcttttgtattcatagacactcgtt

SEQ ID NO: 26680 - DNA, 80 bp, synthetic construct
  misc_feature 1..80: note = Synthetic: >NC_003310.1-cand-105490-105569
  source 1..80: mol_type = other DNA
taacgggattgtctggcatatcatgtagatagttaccgtctacatcgtatactctaccatctacgcctttaaatcctcta

SEQ ID NO: 26681 - DNA, 80 bp, synthetic construct
  misc_feature 1..80: note = Synthetic: >NC_003310.1-cand-105590-105669
  source 1..80: mol_type = other DNA
agaattggaataccaaatattagtaccctcaattagtttattggtaatattttttttagacgatagatcgatggctcttg

SEQ ID NO: 26682 - DNA, 80 bp, synthetic construct
  misc_feature 1..80: note = Synthetic: >NC_003310.1-cand-105670-105749
  source 1..80: mol_type = other DNA
aaaccaaggttttccaaccggactcattgtcgatcggtgagaagtctttttcattagcatgaatccattctaatgatgta

SEQ ID NO: 26683 - DNA, 80 bp, synthetic construct
  misc_feature 1..80: note = Synthetic: >NC_003310.1-cand-105750-105829
  source 1..80: mol_type = other DNA
tgtttaaacactctaaacaattgtacaaattcttttgatttgttttgaatgatttcaaataggtcttcgtctacagtagg

SEQ ID NO: 26684 - DNA, 80 bp, synthetic construct
  misc_feature 1..80: note = Synthetic: >NC_003310.1-cand-105830-105909
  source 1..80: mol_type = other DNA
cataccattagataatctagccattataaagtgcacgtttacatatctacgttctggaggagtaagaacgtgactattga

SEQ ID NO: 26685 - DNA, 80 bp, synthetic construct
  misc_feature 1..80: note = Synthetic: >NC_003310.1-cand-105910-105989
  source 1..80: mol_type = other DNA
gacgaatggctcttcctactatctgacgaagagacgcctcgttccatgtcatatctaaaatgaagatatcattgattgag

SEQ ID NO: 26686 - DNA, 80 bp, synthetic construct
  misc_feature 1..80: note = Synthetic: >NC_003310.1-cand-105990-106069
  source 1..80: mol_type = other DNA
aagaaactaataccctcgcctccgctagaagagaatacgcatgttttaatgtattctccgttagtgtttgattcttggtt

SEQ ID NO: 26687 - DNA, 80 bp, synthetic construct
  misc_feature 1..80: note = Synthetic: >NC_003310.1-cand-106070-106149
  source 1..80: mol_type = other DNA
aaactcagccacagccttgattctagtatcttttgttctagatgagaactctatattagagataccaaagactttgaaat

SEQ ID NO: 26688 - DNA, 80 bp, synthetic construct
  misc_feature 1..80: note = Synthetic: >NC_003310.1-cand-106150-106229
  source 1..80: mol_type = other DNA
atagtaataagatttctattcctgactgattaacaaatggttcaaagactagacatttaccatgggatgctaatattccc

SEQ ID NO: 26689 - DNA, 80 bp, synthetic construct
  misc_feature 1..80: note = Synthetic: >NC_003310.1-cand-106230-106309
  source 1..80: mol_type = other DNA
aaacatacatctataaatttgacgcttttctcttttaattcagtaaatagagagatatcagccgcaatagcatcccctcc

SEQ ID NO: 26690 - DNA, 80 bp, synthetic construct
  misc_feature 1..80: note = Synthetic: >NC_003310.1-cand-106310-106389
  source 1..80: mol_type = other DNA
caatagttctccctttttaaaggtgtctaatgcggatttagaaaattctctatctcttaatgaatttttaaaatcattat

SEQ ID NO: 26691 - DNA, 80 bp, synthetic construct
  misc_feature 1..80: note = Synthetic: >NC_003310.1-cand-106390-106469
  source 1..80: mol_type = other DNA
atagggttgctatctcttgtgtgtattctcccggatcacgattttgtctttcaggaaagctatcgaatgtaaacgtagta

SEQ ID NO: 26692 - DNA, 80 bp, synthetic construct
  misc_feature 1..80: note = Synthetic: >NC_003443.1-cand-14950-15029
  source 1..80: mol_type = other DNA
accaacttcttcgcaggagataatgggcttattctaagatgtggaggaactccaagctccagaaaatggttagagattga

SEQ ID NO: 26693 - DNA, 80 bp, synthetic construct
  misc_feature 1..80: note = Synthetic: >NC_003443.1-cand-15030-15109
  source 1..80: mol_type = other DNA
ccagttagcatcatttgatttggttcaagatgctctggttacacttatcactatacacctaaaggaaattatagaagtgc

SEQ ID NO: 26694 - DNA, 80 bp, synthetic construct
  misc_feature 1..80: note = Synthetic: >NC_003443.1-cand-15110-15189
  source 1..80: mol_type = other DNA
agtcatcacatacagaggattatacatctctcctcttcacaccttataatattggtgcagcagggaaagtcagaactatc

SEQ ID NO: 26695 - DNA, 80 bp, synthetic construct
  misc_feature 1..80: note = Synthetic: >NC_003443.1-cand-15190-15269
  source 1..80: mol_type = other DNA
atcaaattaattctagaacgatctttaatgtatacagtccgaaattggttagttttacccagttccatccgggattctgt

SEQ ID NO: 26696 - DNA, 80 bp, synthetic construct
  misc_feature 1..80: note = Synthetic: >NC_003443.1-cand-15270-15349
  source 1..80: mol_type = other DNA
acgacaagatttagaattagggtcatttagattaatgtctattttaagtgaacagacatttcttaaaaagacacccacaa

SEQ ID NO: 26697 - DNA, 80 bp, synthetic construct
  misc_feature 1..80: note = Synthetic: >NC_003443.1-cand-15350-15429
  source 1..80: mol_type = other DNA
aaaaatacttacttgatcagcttacaaggacatatatatcaaccttctttaactctcactcagtccttcccctccaccgt

SEQ ID NO: 26698 - DNA, 80 bp, synthetic construct
  misc_feature 1..80: note = Synthetic: >NC_003443.1-cand-15420-15499
  source 1..80: mol_type = other DNA
cctccaccgtccatatcaaaaacaaatatggaaagccttaggtagtgtaatatattgttcggagacagttgatatacctc

SEQ ID NO: 26699 - DNA, 80 bp, synthetic construct
  misc_feature 1..80: note = Synthetic: >NC_003443.1-cand-15470-15549
  source 1..80: mol_type = other DNA
tatattgttcggagacagttgatatacctctaattaaagacattcagatagaagatattaatgattttgaagatatcgag

SEQ ID NO: 26700 - DNA, 80 bp, synthetic construct
  misc_feature 1..80: note = Synthetic: >NC_003461.1-cand-50-129
  source 1..80: mol_type = other DNA
tagggttaaagtaatactttaaagggacaagtcacagacatttgatcttagtataaatttttataatggccgggctacta

SEQ ID NO: 26701 - DNA, 80 bp, synthetic construct
  misc_feature 1..80: note = Synthetic: >NC_003461.1-cand-130-209
  source 1..80: mol_type = other DNA
agtacttttgacacatttagttccaggagaagtgagagcatcaataagtctggcggaggagcaattatacctggtcaaag

SEQ ID NO: 26702 - DNA, 80 bp, synthetic construct
  misc_feature 1..80: note = Synthetic: >NC_003461.1-cand-210-289
  source 1..80: mol_type = other DNA
aagtaccgtttctgtcttcacattaggcccgagtgtgacagatgatgcagataaattattaatagcaaccactttcttag

SEQ ID NO: 26703 - DNA, 80 bp, synthetic construct
  misc_feature 1..80: note = Synthetic: >NC_003461.1-cand-290-369
  source 1..80: mol_type = other DNA
cccactcattggacacagataaacaacactctcaaagaggaggatttttagtatcactccttgcaatggcctacagtagt

SEQ ID NO: 26704 - DNA, 80 bp, synthetic construct
  misc_feature 1..80: note = Synthetic: >NC_003461.1-cand-370-449
  source 1..80: mol_type = other DNA
ccggagttatatctcactacaaacggtgtcaatgctgatgtcaagtatgtgatatacaatatagagagagatcctaaaag

SEQ ID NO: 26705 - DNA, 80 bp, synthetic construct
  misc_feature 1..80: note = Synthetic: >NC_003461.1-cand-450-529
  source 1..80: mol_type = other DNA
aacaaaaacagatgggttcattgtcaaaacaagagacatggagtatgaaagaacaacagagtggttgtttggacctatga

SEQ ID NO: 26706 - DNA, 80 bp, synthetic construct
  misc_feature 1..80: note = Synthetic: >NC_003461.1-cand-530-609
  source 1..80: mol_type = other DNA
tcaacaagaacccattgttccaagggcaaagagagaatgcggatctagaggcattgcttcagacatatggatatcctgca

SEQ ID NO: 26707 - DNA, 80 bp, synthetic construct
  misc_feature 1..80: note = Synthetic: >NC_003461.1-cand-610-689
  source 1..80: mol_type = other DNA
tgtctcggagctataatagttcaagtttggatagtgttggttaaagccataacaagtagtgctggtctaagaaaaggatt

SEQ ID NO: 26708 - DNA, 80 bp, synthetic construct
  misc_feature 1..80: note = Synthetic: >NC_004102.1-cand-660-739
  source 1..80: mol_type = other DNA
ccccacagacccccggcgtaggtcgcgcaatttgggtaaggtcatcgatacccttacgtgcggcttcgccgacctcatgg

SEQ ID NO: 26709 - DNA, 80 bp, synthetic construct
  misc_feature 1..80: note = Synthetic: >NC_004102.1-cand-740-819
  source 1..80: mol_type = other DNA
ggtacataccgctcgtcggcgcccctcttggaggcgctgccagggccctggcgcatggcgtccgggttctggaagacggc

SEQ ID NO: 26710 - DNA, 80 bp, synthetic construct
  misc_feature 1..80: note = Synthetic: >NC_004102.1-cand-810-889
  source 1..80: mol_type = other DNA
ggaagacggcgtgaactatgcaacagggaaccttcctggttgctctttctctatcttccttctggccctgctctcttgcc

SEQ ID NO: 26711 - DNA, 80 bp, synthetic construct
  misc_feature 1..80: note = Synthetic: >NC_004102.1-cand-850-929
  source 1..80: mol_type = other DNA
tgctctttctctatcttccttctggccctgctctcttgcctgactgtgcccgcttcagcctaccaagtgcgcaattcctc

SEQ ID NO: 26712 - DNA, 80 bp, synthetic construct
  misc_feature 1..80: note = Synthetic: >NC_004102.1-cand-1010-1089
  source 1..80: mol_type = other DNA
ggtgtgtcccttgcgttcgcgagggtaacgcctcgaggtgttgggtggcggtgacccccacggtggccaccagggacggc

SEQ ID NO: 26713 - DNA, 80 bp, synthetic construct
  misc_feature 1..80: note = Synthetic: >NC_004102.1-cand-1050-1129
  source 1..80: mol_type = other DNA
ttgggtggcggtgacccccacggtggccaccagggacggcaaactccccacaacgcagcttcgacgtcatatcgatctgc

SEQ ID NO: 26714 - DNA, 80 bp, synthetic construct
  misc_feature 1..80: note = Synthetic: >NC_004102.1-cand-1090-1169
  source 1..80: mol_type = other DNA
aaactccccacaacgcagcttcgacgtcatatcgatctgcttgtcgggagcgccaccctctgctcggccctctacgtggg

SEQ ID NO: 26715 - DNA, 80 bp, synthetic construct
  misc_feature 1..80: note = Synthetic: >NC_004102.1-cand-1210-1289
  source 1..80: mol_type = other DNA
accttctctcccaggcgccactggacgacgcaagactgcaattgttctatctatcccggccatataacgggtcatcgcat

SEQ ID NO: 26716 - DNA, 80 bp, synthetic construct
  misc_feature 1..80: note = Synthetic: >NC_004102.1-cand-1290-1369
  source 1..80: mol_type = other DNA
ggcatgggatatgatgatgaactggtcccctacggcagcgttggtggtagctcagctgctccggatcccacaagccatca

SEQ ID NO: 26717 - DNA, 80 bp, synthetic construct
  misc_feature 1..80: note = Synthetic: >NC_004102.1-cand-1310-1389
  source 1..80: mol_type = other DNA
actggtcccctacggcagcgttggtggtagctcagctgctccggatcccacaagccatcatggacatgatcgctggtgct

SEQ ID NO: 26718 - DNA, 80 bp, synthetic construct
  misc_feature 1..80: note = Synthetic: >NC_004102.1-cand-1510-1589
  source 1..80: mol_type = other DNA
gccggccgcaccacggctgggcttgttggtctccttacaccaggcgccaagcagaacatccaactgatcaacaccaacgg

SEQ ID NO: 26719 - DNA, 80 bp, synthetic construct
  misc_feature 1..80: note = Synthetic: >NC_004102.1-cand-1530-1609
  source 1..80: mol_type = other DNA
gcttgttggtctccttacaccaggcgccaagcagaacatccaactgatcaacaccaacggcagttggcacatcaatagca

SEQ ID NO: 26720 - DNA, 80 bp, synthetic construct
  misc_feature 1..80: note = Synthetic: >NC_004102.1-cand-1610-1689
  source 1..80: mol_type = other DNA
cggccttgaactgcaatgaaagccttaacaccggctggttagcagggctcttctatcagcacaaattcaactcttcaggc

SEQ ID NO: 26721 - DNA, 80 bp, synthetic construct
  misc_feature 1..80: note = Synthetic: >NC_004102.1-cand-1660-1739
  source 1..80: mol_type = other DNA
ttctatcagcacaaattcaactcttcaggctgtcctgagaggttggccagctgccgacgccttaccgattttgcccaggg

SEQ ID NO: 26722 - DNA, 80 bp, synthetic construct
  misc_feature 1..80: note = Synthetic: >NC_004102.1-cand-1770-1849
  source 1..80: mol_type = other DNA
cggcctcgacgaacgcccctactgctggcactaccctccaagaccttgtggcattgtgcccgcaaagagcgtgtgtggcc

SEQ ID NO: 26723 - DNA, 80 bp, synthetic construct
  misc_feature 1..80: note = Synthetic: >NC_004102.1-cand-1840-1919
  source 1..80: mol_type = other DNA
gtgtgtggcccggtatattgcttcactcccagccccgtggtggtgggaacgaccgacaggtcgggcgcgcctacctacag

SEQ ID NO: 26724 - DNA, 80 bp, synthetic construct
  misc_feature 1..80: note = Synthetic: >NC_005079.1-cand-950-1029
  source 1..80: mol_type = other DNA
ctcattaagaaattatcatttgagccagccagatttgactcgattaacattgcagccaaatcaaaactggcctgcccagt

SEQ ID NO: 26725 - DNA, 80 bp, synthetic construct
  misc_feature 1..80: note = Synthetic: >NC_005079.1-cand-1030-1109
  source 1..80: mol_type = other DNA
aaataatgggaggcttgcaacaaccgacacaccatccagcagcatatggtttcctcctgacccagacacagactgatcga

SEQ ID NO: 26726 - DNA, 80 bp, synthetic construct
  misc_feature 1..80: note = Synthetic: >NC_005079.1-cand-1110-1189
  source 1..80: mol_type = other DNA
ctgccaccaccttcaaaataacctctttgttctggatctctcctacatccattatgcattccaaagagaaactatacacc

SEQ ID NO: 26727 - DNA, 80 bp, synthetic construct
  misc_feature 1..80: note = Synthetic: >NC_005079.1-cand-1190-1269
  source 1..80: mol_type = other DNA
atttttctcttcaacttgaacttcgttgacattcttacatgatcgatctgcaccactaggcccacaatgacattctcagc

SEQ ID NO: 26728 - DNA, 80 bp, synthetic construct
  misc_feature 1..80: note = Synthetic: >NC_005079.1-cand-1270-1349
  source 1..80: mol_type = other DNA
cttcaatccaaacaattcacctatatcaggagccttctcctgaggcggcaattgaacaccatcaaccatcacgttgctta

SEQ ID NO: 26729 - DNA, 80 bp, synthetic construct
  misc_feature 1..80: note = Synthetic: >NC_005079.1-cand-1350-1429
  source 1..80: mol_type = other DNA
acgagattctaacaccctcgaagttagagacaacataccccattgcgatatcctccacaaacatagctctggaaacattt

SEQ ID NO: 26730 - DNA, 80 bp, synthetic construct
  misc_feature 1..80: note = Synthetic: >NC_005079.1-cand-1430-1509
  source 1..80: mol_type = other DNA
tgattcttaaccattaaggcaaagtcagtcaattctgctaactcaatttgactatcatcctctagctctaggacttcatt

SEQ ID NO: 26731 - DNA, 80 bp, synthetic construct
  misc_feature 1..80: note = Synthetic: >NC_005079.1-cand-1510-1589
  source 1..80: mol_type = other DNA
gaaccagaaaaatgacttcagacaagatgttgaaaggactaatgggtttaccattgaagataggaccagctgggtcttga

SEQ ID NO: 26732 - DNA, 80 bp, synthetic construct
  misc_feature 1..80: note = Synthetic: >NC_005079.1-cand-1590-1669
  source 1..80: mol_type = other DNA
agtttgtgcaaatctgctgcggactaagtcctaattcccaatctgtgtagcttgactgccttatgtgtgctaaggcacaa

SEQ ID NO: 26733 - DNA, 80 bp, synthetic construct
  misc_feature 1..80: note = Synthetic: >NC_005079.1-cand-1670-1749
  source 1..80: mol_type = other DNA
tcactttgtttaactatgtaaacactgttgtctctggtcttcaacaggtgactgatgataccaaggttttcattcatcat

SEQ ID NO: 26734 - DNA, 80 bp, synthetic construct
  misc_feature 1..80: note = Synthetic: >NC_005079.1-cand-1750-1829
  source 1..80: mol_type = other DNA
gtctaaagcaatgcagacatccagaaattttagcctcccgctatccattgttctgctgacctgaagatcattcataaatg

SEQ ID NO: 26735 - DNA, 80 bp, synthetic construct
  misc_feature 1..80: note = Synthetic: >NC_005079.1-cand-1830-1909
  source 1..80: mol_type = other DNA
gagtcaagtgttcgtcaaaaagaactggataatttctccttatagattgcagaacatggttcattcccagttggtcttca

SEQ ID NO: 26736 - DNA, 80 bp, synthetic construct
  misc_feature 1..80: note = Synthetic: >NC_005079.1-cand-1900-1979
  source 1..80: mol_type = other DNA
ttggtcttcaatttgtctcaccactttaggcttcacagcccaaaaaaagttttggttgttcaacaccaatggcttttggg

SEQ ID NO: 26737 - DNA, 80 bp, synthetic construct
  misc_feature 1..80: note = Synthetic: >NC_005079.1-cand-1990-2069
  source 1..80: mol_type = other DNA
tgtggaaaacacccactctccaagttcacatgcatttgttaggactaatgaaaaataatcccacaaaataggttttgaaa

SEQ ID NO: 26738 - DNA, 80 bp, synthetic construct
  misc_feature 1..80: note = Synthetic: >NC_005079.1-cand-2070-2149
  source 1..80: mol_type = other DNA
actgactcactttgttaagtgagttgttgcaatatatgatcttgggctttaacgcacatatttcacatgtacaagcactt

SEQ ID NO: 26739 - DNA, 80 bp, synthetic construct
  misc_feature 1..80: note = Synthetic: >NC_005079.1-cand-2150-2229
  source 1..80: mol_type = other DNA
acacctgaatacacttcttttatgtataagaatccccctttcccatctctaacgcacttgctacccatgcttttgcagaa

SEQ ID NO: 26740 - DNA, 80 bp, synthetic construct
  misc_feature 1..80: note = Synthetic: >NC_005225.1-cand-3750-3829
  source 1..80: mol_type = other DNA
atggcactgccccgggtatggtaaataaccctactgcatacttaaaagtggatagaaacttaatacctattcctttaggt

SEQ ID NO: 26741 - DNA, 80 bp, synthetic construct
  misc_feature 1..80: note = Synthetic: >NC_005225.1-cand-3830-3909
  source 1..80: mol_type = other DNA
ggtgatggttctatgtcaatcatggagttagcaacagctgggataggaatggcagataagaacatcttaaaaaatgcatt

SEQ ID NO: 26742 - DNA, 80 bp, synthetic construct
  misc_feature 1..80: note = Synthetic: >NC_005225.1-cand-3910-3989
  source 1..80: mol_type = other DNA
tataacttataagcatgctaagaaggataacgatagatacgttctgggtttatttaagtttttaatgtcactatctgatg

SEQ ID NO: 26743 - DNA, 80 bp, synthetic construct
  misc_feature 1..80: note = Synthetic: >NC_005225.1-cand-3990-4069
  source 1..80: mol_type = other DNA
atatttttcaacatgatcgtttaggagagttcagctttgttgggaaagttcaatggaaagtgtttacccctaaaagtgag

SEQ ID NO: 26744 - DNA, 80 bp, synthetic construct
  misc_feature 1..80: note = Synthetic: >NC_005225.1-cand-4080-4159
  source 1..80: mol_type = other DNA
atgatcaatattctagaaaatatctagagctttggagtgaacagcacccagtttatgactatatcataccaagaggtaga

SEQ ID NO: 26745 - DNA, 80 bp, synthetic construct
  misc_feature 1..80: note = Synthetic: >NC_005225.1-cand-4160-4239
  source 1..80: mol_type = other DNA
gataaccttttagtgtacctggtaagaaaattgaatgatcccagcatagttactgcaatgacaatgcaatcaccattgca

SEQ ID NO: 26746 - DNA, 80 bp, synthetic construct
  misc_feature 1..80: note = Synthetic: >NC_005225.1-cand-4240-4319
  source 1..80: mol_type = other DNA
attaaggttcagaatgcaggcgaaacagcatatgaaggtatgtaaactaggtggtgaatgggtgacatttagagaggttc

SEQ ID NO: 26747 - DNA, 80 bp, synthetic construct
  misc_feature 1..80: note = Synthetic: >NC_005225.1-cand-4320-4399
  source 1..80: mol_type = other DNA
ttgctgctgcagatgcatttgcgtctgaatatcggcctacattacaagatatggagctatttcaaacattagttaattgt

SEQ ID NO: 26748 - DNA, 80 bp, synthetic construct
  misc_feature 1..80: note = Synthetic: >NC_005225.1-cand-4400-4479
  source 1..80: mol_type = other DNA
acattttctaaagaatacgcatggagagactttttaaatgaagtacagtgtgatgtactaacaacaagacaaatccatag

SEQ ID NO: 26749 - DNA, 80 bp, synthetic construct
  misc_feature 1..80: note = Synthetic: >NC_005225.1-cand-4480-4559
  source 1..80: mol_type = other DNA
accaaaagttgctcgtacattcacagtgaaagaacgggatcaaacaattcagaatcctattacagctgtaataggttata

SEQ ID NO: 26750 - DNA, 80 bp, synthetic construct
  misc_feature 1..80: note = Synthetic: >NC_005225.1-cand-4560-4639
  source 1..80: mol_type = other DNA
aatatgcaagtaaagtagatgagataagtgatgtattggatagtgccttacatccagactccttatccactgatttgcaa

SEQ ID NO: 26751 - DNA, 80 bp, synthetic construct
  misc_feature 1..80: note = Synthetic: >NC_005225.1-cand-4640-4719
  source 1..80: mol_type = other DNA
ctcatgagagaaggtgtatatagagaattgggacttgacattagtcaaccaaatgttttaaagaaagttgcacctctatt

SEQ ID NO: 26752 - DNA, 80 bp, synthetic construct
  misc_feature 1..80: note = Synthetic: >NC_005225.1-cand-4730-4809
  source 1..80: mol_type = other DNA
gggaaatctaggatagtgatagtgcaaggaaatgttgagggtacagctgagtcaatctgtagttattggctgaaaactat

SEQ ID NO: 26753 - DNA, 80 bp, synthetic construct
  misc_feature 1..80: note = Synthetic: >NC_005225.1-cand-4810-4889
  source 1..80: mol_type = other DNA
gtctcttgttaaaactattaaagtgaagcctaaaaaggaggtattaaaggctgtatcactttatggtaagaaagagaagg

SEQ ID NO: 26754 - DNA, 80 bp, synthetic construct
  misc_feature 1..80: note = Synthetic: >NC_005225.1-cand-4890-4969
  source 1..80: mol_type = other DNA
tgggtgatctgacacatttagctgcaatgagactatgtatcgaggtttggagatggtgtaaagcaaatgaacaagattca

SEQ ID NO: 26755 - DNA, 80 bp, synthetic construct
  misc_feature 1..80: note = Synthetic: >NC_005225.1-cand-4960-5039
  source 1..80: mol_type = other DNA
acaagattcagtaacatggttgaaatacttggtgtttgagaataaaacactagagcagtgggtagacttattttgttcaa

SEQ ID NO: 26756 - DNA, 80 bp, synthetic construct
  misc_feature 1..80: note = Synthetic: >NC_005831.2-cand-7380-7459
  source 1..80: mol_type = other DNA
tttaataatttttttatttcttatgctaaacctgaagataagttgtccgtttatgacattgcttgttgtatgcgtgccgg

SEQ ID NO: 26757 - DNA, 80 bp, synthetic construct
  misc_feature 1..80: note = Synthetic: >NC_005831.2-cand-7430-7509
  source 1..80: mol_type = other DNA
ttatgacattgcttgttgtatgcgtgccggttctaaggttgttaaccataatgttttaattaaagagtcaatacctattg

SEQ ID NO: 26758 - DNA, 80 bp, synthetic construct
  misc_feature 1..80: note = Synthetic: >NC_005831.2-cand-7530-7609
  source 1..80: mol_type = other DNA
aatactctttctcaagaaggtaagaagtaccttgttaaaacaactaaagcaaagggtttgacttttttattaacttttaa

SEQ ID NO: 26759 - DNA, 80 bp, synthetic construct
  misc_feature 1..80: note = Synthetic: >NC_005831.2-cand-7610-7689
  source 1..80: mol_type = other DNA
tgataaccaagcaattacacaagttcctgctactagtatagttgcaaaacagggtgctggttttaaacgtacttataatt

SEQ ID NO: 26760 - DNA, 80 bp, synthetic construct
  misc_feature 1..80: note = Synthetic: >NC_005831.2-cand-7690-7769
  source 1..80: mol_type = other DNA
ttctgtggtatgtatgtttatttgttgttgcattgtttattggtgtctcatttattgattatacaaccactgtaactagc

SEQ ID NO: 26761 - DNA, 80 bp, synthetic construct
  misc_feature 1..80: note = Synthetic: >NC_005831.2-cand-7770-7849
  source 1..80: mol_type = other DNA
tttcatggttatgattttaagtacattgagaatggtcagttgaaggtgtttgaagcacctttacactgtgttcgtaatgt

SEQ ID NO: 26762 - DNA, 80 bp, synthetic construct
  misc_feature 1..80: note = Synthetic: >NC_005831.2-cand-7860-7939
  source 1..80: mol_type = other DNA
tttaatcaatggcatgaggctaagtttggtgttgttactactaatagtgataaatgtcctatagttgttggtgtttcaga

SEQ ID NO: 26763 - DNA, 80 bp, synthetic construct
  misc_feature 1..80: note = Synthetic: >NC_005831.2-cand-7940-8019
  source 1..80: mol_type = other DNA
gcgtattaatgttgttcctggtgttccaacaaatgtatatttggtaggaaagactcttgtttttacattacaggctgctt

SEQ ID NO: 26764 - DNA, 80 bp, synthetic construct
  misc_feature 1..80: note = Synthetic: >NC_005831.2-cand-8020-8099
  source 1..80: mol_type = other DNA
ttggaaacacaggtgtttgttatgactttgatggtgttaccactagtgataagtgtatttttaattctgcttgtactagg

SEQ ID NO: 26765 - DNA, 80 bp, synthetic construct
  misc_feature 1..80: note = Synthetic: >NC_005831.2-cand-8100-8179
  source 1..80: mol_type = other DNA
ttggaaggtttgggtggtgacaatgtttattgttacaacactgatcttattgaaggttctaaaccttatagtactttaca

SEQ ID NO: 26766 - DNA, 80 bp, synthetic construct
  misc_feature 1..80: note = Synthetic: >NC_005831.2-cand-8180-8259
  source 1..80: mol_type = other DNA
gcccaatgcgtattataagtatgatgctaaaaattatgtacgttttccagaaattttagctagaggttttggcttacgta

SEQ ID NO: 26767 - DNA, 80 bp, synthetic construct
  misc_feature 1..80: note = Synthetic: >NC_005831.2-cand-8260-8339
  source 1..80: mol_type = other DNA
ctattagaactttggctacacgttattgtagagttggtgaatgccgtgactcacataaaggtgtttgttttggttttgat

SEQ ID NO: 26768 - DNA, 80 bp, synthetic construct
  misc_feature 1..80: note = Synthetic: >NC_005831.2-cand-8340-8419
  source 1..80: mol_type = other DNA
aaatggtatgttaatgatggacgtgttgatgacggttacatttgtggtgatggtcttatagaccttcttgttaatgtact

SEQ ID NO: 26769 - DNA, 80 bp, synthetic construct
  misc_feature 1..80: note = Synthetic: >NC_005831.2-cand-8420-8499
  source 1..80: mol_type = other DNA
ctcaatctttagttcatcttttagcgttgtggctatgtctggacatatgttgtttaattttctttttgcagcatttatta

SEQ ID NO: 26770 - DNA, 80 bp, synthetic construct
  misc_feature 1..80: note = Synthetic: >NC_005831.2-cand-8500-8579
  source 1..80: mol_type = other DNA
catttttgtgctttttagttactaaatttaaacgtgtttttggtgatctttcttatggtgtttttactgttgtttgtgca

SEQ ID NO: 26771 - DNA, 80 bp, synthetic construct
  misc_feature 1..80: note = Synthetic: >NC_005831.2-cand-8580-8659
  source 1..80: mol_type = other DNA
actttgattaataacatttcttatgttgttactcaaaatttattttttatgttgctttatgctattttgtattttgtttt

SEQ ID NO: 26772 - DNA, 80 bp, synthetic construct
  misc_feature 1..80: note = Synthetic: >NC_006213.1-cand-22130-22209
  source 1..80: mol_type = other DNA
ttgtttagatgtggtacgtaaagagctagaagaaggcgatcttcccgagaatgatgatgatgcttggtttaagctatcgt

SEQ ID NO: 26773 - DNA, 80 bp, synthetic construct
  misc_feature 1..80: note = Synthetic: >NC_006213.1-cand-22210-22289
  source 1..80: mol_type = other DNA
accattatgaaaacaattcttggttcttccgacatgtctacaggaaaagttttcatttccgtaaggcttgtcaaaattta

SEQ ID NO: 26774 - DNA, 80 bp, synthetic construct
  misc_feature 1..80: note = Synthetic: >NC_006213.1-cand-22310-22389
  source 1..80: mol_type = other DNA
ttatgaatcttcagttgaagaatattaaactcagtgaaaatgtttttgcttcctagatttattctagttagctgcataat

SEQ ID NO: 26775 - DNA, 80 bp, synthetic construct
  misc_feature 1..80: note = Synthetic: >NC_006213.1-cand-22370-22449
  source 1..80: mol_type = other DNA
attctagttagctgcataattggtagcttaggtttttacaaccctcctaccaatgttgtttcgcatgtaaatggagattg

SEQ ID NO: 26776 - DNA, 80 bp, synthetic construct
  misc_feature 1..80: note = Synthetic: >NC_006213.1-cand-22450-22529
  source 1..80: mol_type = other DNA
gtttttatttggtgacagtcgttcagattgtaatcatattgttaatatcaacccccataattattcttatatggacctta

SEQ ID NO: 26777 - DNA, 80 bp, synthetic construct
  misc_feature 1..80: note = Synthetic: >NC_006213.1-cand-22530-22609
  source 1..80: mol_type = other DNA
atcctgttctgtgtgattctggtaaaatatcatctaaagctggcaactccatttttaggagttttcactttaccgatttt

SEQ ID NO: 26778 - DNA, 80 bp, synthetic construct
  misc_feature 1..80: note = Synthetic: >NC_006213.1-cand-22610-22689
  source 1..80: mol_type = other DNA
tataattacacaggcgaaggtcaacaaattattttttatgagggtgttaattttacgccttatcatgcctttaaatgcaa

SEQ ID NO: 26779 - DNA, 80 bp, synthetic construct
  misc_feature 1..80: note = Synthetic: >NC_006213.1-cand-22690-22769
  source 1..80: mol_type = other DNA
ccgttctggtagtaatgatatttggatgcagaataaaggcttgttttatactcaggtttataagaatatggctgtgtatc

SEQ ID NO: 26780 - DNA, 80 bp, synthetic construct
  misc_feature 1..80: note = Synthetic: >NC_006213.1-cand-22770-22849
  source 1..80: mol_type = other DNA
gcagccttacttttgttaatgtaccatatgtttataatggctccgcacaagctacagctctttgtaaatctggtagttta

SEQ ID NO: 26781 - DNA, 80 bp, synthetic construct
  misc_feature 1..80: note = Synthetic: >NC_006213.1-cand-22810-22889
  source 1..80: mol_type = other DNA
ctccgcacaagctacagctctttgtaaatctggtagtttagtccttaataaccctgcatatatagctcctcaagctaact

SEQ ID NO: 26782 - DNA, 80 bp, synthetic construct
  misc_feature 1..80: note = Synthetic: >NC_006213.1-cand-22930-23009
  source 1..80: mol_type = other DNA
gtcaggttgtgacgagtatatcgtaccactttgtatttttaacggcaagtttttgtcgaatacaaagtattatgatgata

SEQ ID NO: 26783 - DNA, 80 bp, synthetic construct
  misc_feature 1..80: note = Synthetic: >NC_006213.1-cand-23010-23089
  source 1..80: mol_type = other DNA
gtcaatattattttaataaagacactggtgttatttatggtctcaattctacagaaaccattaccactggttttgatctt

SEQ ID NO: 26784 - DNA, 80 bp, synthetic construct
  misc_feature 1..80: note = Synthetic: >NC_006213.1-cand-23090-23169
  source 1..80: mol_type = other DNA
aattgttattatttagttttaccctctggtaattatttagccatttcaaatgagctattgttaactgttcctacgaaagc

SEQ ID NO: 26785 - DNA, 80 bp, synthetic construct
  misc_feature 1..80: note = Synthetic: >NC_006213.1-cand-23170-23249
  source 1..80: mol_type = other DNA
aatctgtcttaataagcgtaaggattttacgcctgtacaggttgttgattcgcggtggaacaatgccaggcagtctgata

SEQ ID NO: 26786 - DNA, 80 bp, synthetic construct
  misc_feature 1..80: note = Synthetic: >NC_006213.1-cand-23250-23329
  source 1..80: mol_type = other DNA
acatgacggcggttgcttgtcaacctccgtactgttattttcgtaattctactaccaactatgttggtgtttatgatatt

SEQ ID NO: 26787 - DNA, 80 bp, synthetic construct
  misc_feature 1..80: note = Synthetic: >NC_006213.1-cand-23330-23409
  source 1..80: mol_type = other DNA
aatcatggagatgctggttttactagcatacttagtggtttgttatataattcaccttgtttttcgcagcaaggcgtttt

SEQ ID NO: 26788 - DNA, 80 bp, synthetic construct
  misc_feature 1..80: note = Synthetic: >NC_007377.1-cand-760-839
  source 1..80: mol_type = other DNA
agatgcaacgattcaagtgacccccttgttgttgctgcgagtatcattgggatcttgcactttatattgtggattcttga

SEQ ID NO: 26789 - DNA, 80 bp, synthetic construct
  misc_feature 1..80: note = Synthetic: >NC_007377.1-cand-840-919
  source 1..80: mol_type = other DNA
tcgtctttttttcaaatgcatttatcgcttctttaaacacggtctgaaaagagggccttctacggaaggagtacctgagt

SEQ ID NO: 26790 - DNA, 80 bp, synthetic construct
  misc_feature 1..80: note = Synthetic: >NC_007378.1-cand-70-149
  source 1..80: mol_type = other DNA
tcgcgagatactaacaaaaaccacagtggaccatatggccataattaagaagtacacatcagggagacaggaaaagaacc

SEQ ID NO: 26791 - DNA, 80 bp, synthetic construct
  misc_feature 1..80: note = Synthetic: >NC_007378.1-cand-150-229
  source 1..80: mol_type = other DNA
cgtcacttaggatgaaatggatgatggcaatgaaatatccaattacagctgacaagaggataacagaaatggttcctgag

SEQ ID NO: 26792 - DNA, 80 bp, synthetic construct
  misc_feature 1..80: note = Synthetic: >NC_007378.1-cand-310-389
  source 1..80: mol_type = other DNA
gacatggtggaatagaaatggaccaatgacaagtacggttcattatccaaaaatctacaagacttattttgagaaagtcg

SEQ ID NO: 26793 - DNA, 80 bp, synthetic construct
  misc_feature 1..80: note = Synthetic: >NC_007378.1-cand-450-529
  source 1..80: mol_type = other DNA
gaagagttgacataaaccctggtcatgcagacctcagtgccaaggaggcacaagacgtaatcatggaagttgttttcccc

SEQ ID NO: 26794 - DNA, 80 bp, synthetic construct
  misc_feature 1..80: note = Synthetic: >NC_007378.1-cand-540-619
  source 1..80: mol_type = other DNA
gggccaggatactaacgtcggaatcacaattaacaataaccaaagagaaaaaagaagaactccaagattgcaaaatttct

SEQ ID NO: 26795 - DNA, 80 bp, synthetic construct
  misc_feature 1..80: note = Synthetic: >NC_007378.1-cand-690-769
  source 1..80: mol_type = other DNA
gaacaagcagtgtgtacattgaagtgttacacttgactcaaggaacatgttgggaacagatgtacaccccaggtggagaa

SEQ ID NO: 26796 - DNA, 80 bp, synthetic construct
  misc_feature 1..80: note = Synthetic: >NC_007378.1-cand-770-849
  source 1..80: mol_type = other DNA
gtgaggaatgatgatgttgatcaaagtctaattattgcagccaggaacatagtgagaagagcagcagtatcagcagatcc

SEQ ID NO: 26797 - DNA, 80 bp, synthetic construct
  misc_feature 1..80: note = Synthetic: >NC_007378.1-cand-1010-1089
  source 1..80: mol_type = other DNA
tttaagagaacaagcgggtcatcaatcaagagagaggaagaagtgcttacgggcaatctccaaacattgaaaataagggt

SEQ ID NO: 26798 - DNA, 80 bp, synthetic construct
  misc_feature 1..80: note = Synthetic: >NC_007378.1-cand-1130-1209
  source 1..80: mol_type = other DNA
gcaacagctatactcagaaaagcaaccaggagattggttcagctgatagtgagtggaagagacgaacagtcaatagccga

SEQ ID NO: 26799 - DNA, 80 bp, synthetic construct
  misc_feature 1..80: note = Synthetic: >NC_007378.1-cand-1260-1339
  source 1..80: mol_type = other DNA
cagttagaggtgacctgaatttcgttaatagggcaaatcagcgattgaatcccatgcatcaacttttaagacattttcag

SEQ ID NO: 26800 - DNA, 80 bp, synthetic construct
  misc_feature 1..80: note = Synthetic: >NC_007378.1-cand-1290-1369
  source 1..80: mol_type = other DNA
gggcaaatcagcgattgaatcccatgcatcaacttttaagacattttcagaaagatgcaaaagtgctctttcaaaattgg

SEQ ID NO: 26801 - DNA, 80 bp, synthetic construct
  misc_feature 1..80: note = Synthetic: >NC_007378.1-cand-1410-1489
  source 1..80: mol_type = other DNA
tattaccagacatgactccaagcacagagatgtcaatgagagggataagagtcagcaaaatgggcgtggatgaatactcc

SEQ ID NO: 26802 - DNA, 80 bp, synthetic construct
  misc_feature 1..80: note = Synthetic: >NC_007378.1-cand-1490-1569
  source 1..80: mol_type = other DNA
agcacagagagggtagtggtaagcattgaccggtttttgagagttcgagaccaacgaggaaatgtactactatctcctga

SEQ ID NO: 26803 - DNA, 80 bp, synthetic construct
  misc_feature 1..80: note = Synthetic: >NC_007378.1-cand-1590-1669
  source 1..80: mol_type = other DNA
ggacagagaaactgacaataacttactcatcgtcaatgatgtgggagattaatggccctgagtcagtgttggtcaatacc

SEQ ID NO: 26804 - DNA, 80 bp, synthetic construct
  misc_feature 1..80: note = Synthetic: >NC_009823.1-cand-2410-2489
  source 1..80: mol_type = other DNA
gtcttctccacctccaccaaaacatcgtggacgtacaattcatgtatggcctatcacctgccctcacaaaatacatcgtc

SEQ ID NO: 26805 - DNA, 80 bp, synthetic construct
  misc_feature 1..80: note = Synthetic: >NC_009823.1-cand-2490-2569
  source 1..80: mol_type = other DNA
cgatgggagtgggtaatactcttattcctgctcttagcggacgccagggtttgcgcctgcttatggatgctcatcttgtt

SEQ ID NO: 26806 - DNA, 80 bp, synthetic construct
  misc_feature 1..80: note = Synthetic: >NC_009823.1-cand-2570-2649
  source 1..80: mol_type = other DNA
gggccaggccgaagcagcactagagaagctggtcatcttgcacgctgcgagcgcagctagctgcaatggcttcctatatt

SEQ ID NO: 26807 - DNA, 80 bp, synthetic construct
  misc_feature 1..80: note = Synthetic: >NC_009823.1-cand-2640-2719
  source 1..80: mol_type = other DNA
ttcctatattttgtcatctttttcgtggctgcttggtacatcaagggtcgggtagtccccttagctacctattccctcac

SEQ ID NO: 26808 - DNA, 80 bp, synthetic construct
  misc_feature 1..80: note = Synthetic: >NC_009823.1-cand-2720-2799
  source 1..80: mol_type = other DNA
tggcctgtggtcctttagcctactgctcctagcattgccccaacaggcttatgcttatgacgcatctgtgcatggccaga

SEQ ID NO: 26809 - DNA, 80 bp, synthetic construct
  misc_feature 1..80: note = Synthetic: >NC_009823.1-cand-2800-2879
  source 1..80: mol_type = other DNA
taggagcggctctgctggtaatgatcactctctttactctcacccccgggtataagacccttctcagccggtttttgtgg

SEQ ID NO: 26810 - DNA, 80 bp, synthetic construct
  misc_feature 1..80: note = Synthetic: >NC_009823.1-cand-2910-2989
  source 1..80: mol_type = other DNA
gctatggtccaggagtgggcaccacctatgcaggtgcgcggtggccgtgatggcatcatatgggccgtcgccatattcta

SEQ ID NO: 26811 - DNA, 80 bp, synthetic construct
  misc_feature 1..80: note = Synthetic: >NC_009823.1-cand-2960-3039
  source 1..80: mol_type = other DNA
tggcatcatatgggccgtcgccatattctacccaggtgtggtgtttgacataaccaagtggctcttggcggtgcttgggc

SEQ ID NO: 26812 - DNA, 80 bp, synthetic construct
  misc_feature 1..80: note = Synthetic: >NC_009823.1-cand-3040-3119
  source 1..80: mol_type = other DNA
ctgcttacctcctaaaaggtgctttgacgcgcgtgccgtacttcgtcagggctcacgctctactgaggatgtgcaccatg

SEQ ID NO: 26813 - DNA, 80 bp, synthetic construct
  misc_feature 1..80: note = Synthetic: >NC_009823.1-cand-3140-3219
  source 1..80: mol_type = other DNA
caggtacgtccagatggcgctactagcccttggcaggtggactggcacttacatctatgaccacctcacccctatgtcgg

SEQ ID NO: 26814 - DNA, 80 bp, synthetic construct
  misc_feature 1..80: note = Synthetic: >NC_009823.1-cand-3190-3269
  source 1..80: mol_type = other DNA
acatctatgaccacctcacccctatgtcggattgggctgctagtggcctgcgggacctggcggtcgccgttgagcctatc

SEQ ID NO: 26815 - DNA, 80 bp, synthetic construct
  misc_feature 1..80: note = Synthetic: >NC_009823.1-cand-3220-3299
  source 1..80: mol_type = other DNA
attgggctgctagtggcctgcgggacctggcggtcgccgttgagcctatcatcttcagtccgatggagaagaaagtcatt

SEQ ID NO: 26816 - DNA, 80 bp, synthetic construct
  misc_feature 1..80: note = Synthetic: >NC_009823.1-cand-3330-3409
  source 1..80: mol_type = other DNA
gacattttacacggacttcccgtgtccgcccgacttggtcgggaggtcctccttggcccagctgatggctatacctccaa

SEQ ID NO: 26817 - DNA, 80 bp, synthetic construct
  misc_feature 1..80: note = Synthetic: >NC_009823.1-cand-3430-3509
  source 1..80: mol_type = other DNA
ccatcactgcttacgcccagcagacacgtggccttttgggcaccatagtggtgagcatgacggggcgcgacaagacagaa

SEQ ID NO: 26818 - DNA, 80 bp, synthetic construct
  misc_feature 1..80: note = Synthetic: >NC_009823.1-cand-3510-3589
  source 1..80: mol_type = other DNA
caggctggggaaattcaggtcctgtccacagtcactcagtccttcctcggaacatccatctcgggggttttgtggactgt

SEQ ID NO: 26819 - DNA, 80 bp, synthetic construct
  misc_feature 1..80: note = Synthetic: >NC_009823.1-cand-3590-3669
  source 1..80: mol_type = other DNA
ctaccatggagctggcaacaagactctggccggctcacggggtccggtcacgcagatgtactccagtgctgagggggact

SEQ ID NO: 26820 - DNA, 80 bp, synthetic construct
  misc_feature 1..80: note = Synthetic: >NC_009823.1-cand-7590-7669
  source 1..80: mol_type = other DNA
gtggcagctcccggctcggactcggggtcctggtctacttgctccgaggaggacgactccgtcgtgtgctgctccatgtc

SEQ ID NO: 26821 - DNA, 80 bp, synthetic construct
  misc_feature 1..80: note = Synthetic: >NC_009823.1-cand-7690-7769
  source 1..80: mol_type = other DNA
taataactccttgtagtcccgaagaggagaagttaccgattaaccccttgagcaactccctgttgcgatatcacaacaag

SEQ ID NO: 26822 - DNA, 80 bp, synthetic construct
  misc_feature 1..80: note = Synthetic: >NC_009823.1-cand-7750-7829
  source 1..80: mol_type = other DNA
tgttgcgatatcacaacaaggtgtactgtaccacaacaaagagcgcctcactaagggctaaaaaggtaacttttgatagg

SEQ ID NO: 26823 - DNA, 80 bp, synthetic construct
  misc_feature 1..80: note = Synthetic: >NC_009823.1-cand-7810-7889
  source 1..80: mol_type = other DNA
aaaaggtaacttttgataggatgcaagtgctcgactcctactacgactcagtcttaaaggacattaagctagcggcctcc

SEQ ID NO: 26824 - DNA, 80 bp, synthetic construct
  misc_feature 1..80: note = Synthetic: >NC_009823.1-cand-7890-7969
  source 1..80: mol_type = other DNA
aaggtcaccgcaaggctcctcaccatggaggaggcttgccagttaaccccaccccattctgcaagatctaaatatgggtt

SEQ ID NO: 26825 - DNA, 80 bp, synthetic construct
  misc_feature 1..80: note = Synthetic: >NC_009823.1-cand-7980-8059
  source 1..80: mol_type = other DNA
gaggtccgcagcttgtccgggagggccgttaaccacatcaagtccgtgtggaaggacctcctggaggactcagaaacacc

SEQ ID NO: 26826 - DNA, 80 bp, synthetic construct
  misc_feature 1..80: note = Synthetic: >NC_009823.1-cand-8030-8109
  source 1..80: mol_type = other DNA
gaaggacctcctggaggactcagaaacaccaattcccacaaccattatggccaaaaatgaggtgttctgcgtggacccca

SEQ ID NO: 26827 - DNA, 80 bp, synthetic construct
  misc_feature 1..80: note = Synthetic: >NC_009823.1-cand-8130-8209
  source 1..80: mol_type = other DNA
gctcgccttatcgtttaccctgacctcggcgtcagggtctgcgagaagatggccctttatgacattacacaaaaacttcc

SEQ ID NO: 26828 - DNA, 80 bp, synthetic construct
  misc_feature 1..80: note = Synthetic: >NC_009823.1-cand-8230-8309
  source 1..80: mol_type = other DNA
cttatggattccagtattcccccgctcagcgggtagagtttctcttgaaagcatgggcggaaaagaaggaccctatgggt

SEQ ID NO: 26829 - DNA, 80 bp, synthetic construct
  misc_feature 1..80: note = Synthetic: >NC_009823.1-cand-8290-8369
  source 1..80: mol_type = other DNA
aaaagaaggaccctatgggtttttcgtatgatacccgatgctttgactcaaccgtcactgagagagacatcaggactgag

SEQ ID NO: 26830 - DNA, 80 bp, synthetic construct
  misc_feature 1..80: note = Synthetic: >NC_009823.1-cand-8370-8449
  source 1..80: mol_type = other DNA
gagtccatatatcgggcctgctccttgcccgaggaggcccacactgccatacactcgctaactgagagactttacgtggg

SEQ ID NO: 26831 - DNA, 80 bp, synthetic construct
  misc_feature 1..80: note = Synthetic: >NC_009823.1-cand-8430-8509
  source 1..80: mol_type = other DNA
actgagagactttacgtgggagggcctatgttcaacagcaagggccaaacctgcgggtacaggcgttgccgcgccagcgg

SEQ ID NO: 26832 - DNA, 80 bp, synthetic construct
  misc_feature 1..80: note = Synthetic: >NC_009823.1-cand-8530-8609
  source 1..80: mol_type = other DNA
ggaacaccatcacatgctacgtgaaagccttagcggcttgtaaagctgcagggataatcgcgcccacaatgctggtatgc

SEQ ID NO: 26833 - DNA, 80 bp, synthetic construct
  misc_feature 1..80: note = Synthetic: >NC_009823.1-cand-8650-8729
  source 1..80: mol_type = other DNA
aggaggacgagcggaacctgagagccttcacggaggctatgaccaggtattctgcccctcctggtgacccccccagaccg

SEQ ID NO: 26834 - DNA, 80 bp, synthetic construct
  misc_feature 1..80: note = Synthetic: >NC_009823.1-cand-8690-8769
  source 1..80: mol_type = other DNA
gaccaggtattctgcccctcctggtgacccccccagaccggagtatgatctggagctgataacatcttgctcctcaaatg

SEQ ID NO: 26835 - DNA, 80 bp, synthetic construct
  misc_feature 1..80: note = Synthetic: >NC_009824.1-cand-3310-3389
  source 1..80: mol_type = other DNA
gggtgcggatacagcggcttgcggagatattctttgcgggctgcccgtctctgcacgattaggccgtgaggtgttgttgg

SEQ ID NO: 26836 - DNA, 80 bp, synthetic construct
  misc_feature 1..80: note = Synthetic: >NC_009824.1-cand-3370-3449
  source 1..80: mol_type = other DNA
aggccgtgaggtgttgttgggacctgctgatgactatcgggagatgggctggcgtctgttggccccgattacagcatacg

SEQ ID NO: 26837 - DNA, 80 bp, synthetic construct
  misc_feature 1..80: note = Synthetic: >NC_009824.1-cand-3470-3549
  source 1..80: mol_type = other DNA
cttgggactattgtgactagcttgactggcagagacaagaacgtggtgaccggtgaagtgcaggtgctttctacggctac

SEQ ID NO: 26838 - DNA, 80 bp, synthetic construct
  misc_feature 1..80: note = Synthetic: >NC_009824.1-cand-3490-3569
  source 1..80: mol_type = other DNA
cttgactggcagagacaagaacgtggtgaccggtgaagtgcaggtgctttctacggctacccagaccttcctaggtacaa

SEQ ID NO: 26839 - DNA, 80 bp, synthetic construct
  misc_feature 1..80: note = Synthetic: >NC_009824.1-cand-3610-3689
  source 1..80: mol_type = other DNA
ttcgagaacgctcgcgggcgccaaacatcccgcgctccaaatgtacacaaatgtagatcaggacctcgttgggtggccag

SEQ ID NO: 26840 - DNA, 80 bp, synthetic construct
  misc_feature 1..80: note = Synthetic: >NC_009824.1-cand-3700-3779
  source 1..80: mol_type = other DNA
ggccaagtctcttgaaccgtgcgcctgcgggtcttcagacttatacttggttacccgcgatgccgatgtcatccctgctc

SEQ ID NO: 26841 - DNA, 80 bp, synthetic construct
  misc_feature 1..80: note = Synthetic: >NC_009824.1-cand-3790-3869
  source 1..80: mol_type = other DNA
ggactccacagcgagcttgctcagtcctaggcctctcgcctgtctcaagggttcctctggaggtcccgttatgtgccctt

SEQ ID NO: 26842 - DNA, 80 bp, synthetic construct
  misc_feature 1..80: note = Synthetic: >NC_009824.1-cand-3890-3969
  source 1..80: mol_type = other DNA
tttagggctgctgtgtgcaccagaggtgtagcaaaatccctacagttcataccagtggaaacccttagcacgcaggctag

SEQ ID NO: 26843 - DNA, 80 bp, synthetic construct
  misc_feature 1..80: note = Synthetic: >NC_009824.1-cand-3930-4009
  source 1..80: mol_type = other DNA
tacagttcataccagtggaaacccttagcacgcaggctaggtctccatctttctctgacaattcaactcctcctgctgtt

SEQ ID NO: 26844 - DNA, 80 bp, synthetic construct
  misc_feature 1..80: note = Synthetic: >NC_009824.1-cand-4010-4089
  source 1..80: mol_type = other DNA
ccacagagctatcaagtaggatacctccatgccccgaccggcagcggtaagagcacaaaggtcccggccgcttatgtagc

SEQ ID NO: 26845 - DNA, 80 bp, synthetic construct
  misc_feature 1..80: note = Synthetic: >NC_009824.1-cand-4090-4169
  source 1..80: mol_type = other DNA
acaaggatataatgtcctcgtactaaatccatcggtggcggccacattaggcttcggctccttcatgtcgcgtgcctatg

SEQ ID NO: 26846 - DNA, 80 bp, synthetic construct
  misc_feature 1..80: note = Synthetic: >NC_009824.1-cand-4170-4249
  source 1..80: mol_type = other DNA
ggatcgaccccaacatccgcactgggaaccgcaccgttacaactggtgctaaactgacctattccacctacggtaagttt

SEQ ID NO: 26847 - DNA, 80 bp, synthetic construct
  misc_feature 1..80: note = Synthetic: >NC_009824.1-cand-4280-4359
  source 1..80: mol_type = other DNA
tatgatgtgattatctgtgatgaatgtcatgcccaagacgctactagcatattgggtataggcacggtcttagatcaggc

SEQ ID NO: 26848 - DNA, 80 bp, synthetic construct
  misc_feature 1..80: note = Synthetic: >NC_009824.1-cand-4380-4459
  source 1..80: mol_type = other DNA
tgacggttttagcgacagcaactcccccaggcagcatcactgtgccgcattctaacatcgaagaagtggccctgggctct

SEQ ID NO: 26849 - DNA, 80 bp, synthetic construct
  misc_feature 1..80: note = Synthetic: >NC_009824.1-cand-4430-4509
  source 1..80: mol_type = other DNA
tctaacatcgaagaagtggccctgggctctgaaggtgagatccctttctacggtaaggctataccgatagccctgctcaa

SEQ ID NO: 26850 - DNA, 80 bp, synthetic construct
  misc_feature 1..80: note = Synthetic: >NC_009824.1-cand-4520-4599
  source 1..80: mol_type = other DNA
caccttatcttttgccattccaagaaaaaatgtgatgagatagcgtccaaactaagaggcatggggctcaacgctgtagc

SEQ ID NO: 26851 - DNA, 80 bp, synthetic construct
  misc_feature 1..80: note = Synthetic: >NC_009824.1-cand-8440-8519
  source 1..80: mol_type = other DNA
ccagtgtggttatcgccgttgccgtgccagtggagttctgcctaccagcttcggcaacacaatcacttgttacatcaagg

SEQ ID NO: 26852 - DNA, 80 bp, synthetic construct
  misc_feature 1..80: note = Synthetic: >NC_009824.1-cand-8480-8559
  source 1..80: mol_type = other DNA
cctaccagcttcggcaacacaatcacttgttacatcaaggccacagcggctgcaaaggccgcaaacctccggaacccgga

SEQ ID NO: 26853 - DNA, 80 bp, synthetic construct
  misc_feature 1..80: note = Synthetic: >NC_009824.1-cand-8560-8639
  source 1..80: mol_type = other DNA
ctttcttgtctgcggagatgatttggtcgtggtggctgagagtgatggcgtcgatgaggatagagcagccctgagagcct

SEQ ID NO: 26854 - DNA, 80 bp, synthetic construct
  misc_feature 1..80: note = Synthetic: >NC_009824.1-cand-8640-8719
  source 1..80: mol_type = other DNA
tcacggaggctatgaccaggtattctgctccacccggagatgctccacaggccacttacgaccttgagcttatcacatct

SEQ ID NO: 26855 - DNA, 80 bp, synthetic construct
  misc_feature 1..80: note = Synthetic: >NC_009824.1-cand-8760-8839
  source 1..80: mol_type = other DNA
ggaggtactattacctcacccgtgatgccactactcccctagcccgtgcggcttgggaaacagctcgtcacactccagtt

SEQ ID NO: 26856 - DNA, 80 bp, synthetic construct
  misc_feature 1..80: note = Synthetic: >NC_009824.1-cand-8800-8879
  source 1..80: mol_type = other DNA
agcccgtgcggcttgggaaacagctcgtcacactccagttaactcctggttaggcaacatcatcatgtacgcgcctacca

SEQ ID NO: 26857 - DNA, 80 bp, synthetic construct
  misc_feature 1..80: note = Synthetic: >NC_009824.1-cand-8880-8959
  source 1..80: mol_type = other DNA
tctgggtgcgcatggtgatgatgacacactttttctccatactccaatcccaggagatacttgatcgcccccttgacttt

SEQ ID NO: 26858 - DNA, 80 bp, synthetic construct
  misc_feature 1..80: note = Synthetic: >NC_009824.1-cand-8970-9049
  source 1..80: mol_type = other DNA
gggccacttattctgtcactccgctggatttaccagcaatcattgaaagactccatggtctaagcgcgttcacgctccac

SEQ ID NO: 26859 - DNA, 80 bp, synthetic construct
  misc_feature 1..80: note = Synthetic: >NC_009824.1-cand-9000-9079
  source 1..80: mol_type = other DNA
taccagcaatcattgaaagactccatggtctaagcgcgttcacgctccacagttactctccagtagagctcaatagggtc

SEQ ID NO: 26860 - DNA, 80 bp, synthetic construct
  misc_feature 1..80: note = Synthetic: >NC_009824.1-cand-9120-9199
  source 1..80: mol_type = other DNA
cttggagacatcgggcacgagcagtgcgcgccaagcttatcgcccagggaggaaaggctaaaatatgcggcctttatctc

SEQ ID NO: 26861 - DNA, 80 bp, synthetic construct
  misc_feature 1..80: note = Synthetic: >NC_009824.1-cand-9200-9279
  source 1..80: mol_type = other DNA
tttaattgggcggtacgcaccaagaccaacctcactccattgccagccgctggccagttggatttgtccagctggtttac

SEQ ID NO: 26862 - DNA, 80 bp, synthetic construct
  misc_feature 1..80: note = Synthetic: >NC_009824.1-cand-9280-9359
  source 1..80: mol_type = other DNA
ggttggtgtcggcgggaacgacatttatcacagcgtgtcgcgtgcccgaacccgccatttgctgctttgcctactcctac

SEQ ID NO: 26863 - DNA, 80 bp, synthetic construct
  misc_feature 1..80: note = Synthetic: >NC_009824.1-cand-9290-9369
  source 1..80: mol_type = other DNA
ggcgggaacgacatttatcacagcgtgtcgcgtgcccgaacccgccatttgctgctttgcctactcctactaacagtagg

SEQ ID NO: 26864 - DNA, 80 bp, synthetic construct
  misc_feature 1..80: note = Synthetic: >NC_009825.1-cand-30-109
  source 1..80: mol_type = other DNA
tgagtgttgtacagcctccaggaccccccctcccgggagagccatagtggtcttcggaaccggtgagtacaccggaatcg

SEQ ID NO: 26865 - DNA, 80 bp, synthetic construct
  misc_feature 1..80: note = Synthetic: >NC_009825.1-cand-310-389
  source 1..80: mol_type = other DNA
acgtaacaccaaccgccgcccaatggacgttaagttcccgggtggtggccagatcgttggcggagtttacttgttgccgc

SEQ ID NO: 26866 - DNA, 80 bp, synthetic construct
  misc_feature 1..80: note = Synthetic: >NC_009825.1-cand-430-509
  source 1..80: mol_type = other DNA
ttcggagcggtcgcaacctcgtggaagacgccaacctatccccaaggcgcgtcgacccgagggaaggtcctgggcacaac

SEQ ID NO: 26867 - DNA, 80 bp, synthetic construct
  misc_feature 1..80: note = Synthetic: >NC_009825.1-cand-4300-4379
  source 1..80: mol_type = other DNA
cctcaccgtgctcgcgactgctactccgccagggtcagtgactacacctcattccaacatagaggaggtcgccctgccaa

SEQ ID NO: 26868 - DNA, 80 bp, synthetic construct
  misc_feature 1..80: note = Synthetic: >NC_009825.1-cand-4440-4519
  source 1..80: mol_type = other DNA
gacatctcatcttctgccattcaaagaaaaagtgcgatgaactggccagacaactgacatctcttggtctgaatgccgta

SEQ ID NO: 26869 - DNA, 80 bp, synthetic construct
  misc_feature 1..80: note = Synthetic: >NC_009825.1-cand-4480-4559
  source 1..80: mol_type = other DNA
actggccagacaactgacatctcttggtctgaatgccgtagcctactacagaggcttagacgtttcggtgattcccacgt

SEQ ID NO: 26870 - DNA, 80 bp, synthetic construct
  misc_feature 1..80: note = Synthetic: >NC_009825.1-cand-4590-4669
  source 1..80: mol_type = other DNA
ccctcatgacgggtttcaccggcgactttgactcagtgatagactgcaatacatctgtgatacagactgttgacttcagc

SEQ ID NO: 26871 - DNA, 80 bp, synthetic construct
  misc_feature 1..80: note = Synthetic: >NC_009825.1-cand-4670-4749
  source 1..80: mol_type = other DNA
ttggaccccaccttctccatagagattacaaccgttccccaggacgcggtatcccgcagccagcggagaggccgcactgg

SEQ ID NO: 26872 - DNA, 80 bp, synthetic construct
  misc_feature 1..80: note = Synthetic: >NC_009825.1-cand-4760-4839
  source 1..80: mol_type = other DNA
ttgggcacataccggtatgtcaccccgggagagagaccatcaggcatgtttgacactgcagagctttgcgagtgctacga

SEQ ID NO: 26873 - DNA, 80 bp, synthetic construct
  misc_feature 1..80: note = Synthetic: >NC_009825.1-cand-4830-4909
  source 1..80: mol_type = other DNA
agtgctacgatgccgggtgcgcctggtacgagctgacacctgctgaaaccacaacaaggctgaaagcttacttcgacaca

SEQ ID NO: 26874 - DNA, 80 bp, synthetic construct
  misc_feature 1..80: note = Synthetic: >NC_009825.1-cand-4910-4989
  source 1..80: mol_type = other DNA
ccaggccttcctgtgtgccaagaccatctggaattctgggagagcgtctttacagggttaacccacatagacggtcattt

SEQ ID NO: 26875 - DNA, 80 bp, synthetic construct
  misc_feature 1..80: note = Synthetic: >NC_009825.1-cand-4990-5069
  source 1..80: mol_type = other DNA
cctatcccagaccaagcaatcgggtgagaatttcccgtatcttgttgcttaccaagcgacggtgtcggccaaggtctggc

SEQ ID NO: 26876 - DNA, 80 bp, synthetic construct
  misc_feature 1..80: note = Synthetic: >NC_009825.1-cand-5070-5149
  source 1..80: mol_type = other DNA
tcgctccaccaagctgggacaccatgtggaagtgcctaattcgccttaagcccaccctgcacgggcccacgcccctcctc

SEQ ID NO: 26877 - DNA, 80 bp, synthetic construct
  misc_feature 1..80: note = Synthetic: >NC_009825.1-cand-5160-5239
  source 1..80: mol_type = other DNA
ggtctgtgcagaatgaagtggtgctcacccatcccatcaccaaatacatcatggcttgcatgtcagctgatctcgaggta

SEQ ID NO: 26878 - DNA, 80 bp, synthetic construct
  misc_feature 1..80: note = Synthetic: >NC_009825.1-cand-5230-5309
  source 1..80: mol_type = other DNA
tctcgaggtagtgacaagtacgtgggtcttggtgggcggcgtcctggcagctctggctgcttactgtctttcagtgggca

SEQ ID NO: 26879 - DNA, 80 bp, synthetic construct
  misc_feature 1..80: note = Synthetic: >NC_009825.1-cand-5310-5389
  source 1..80: mol_type = other DNA
gcgtagtgattgttgggagagtcgtcctgtcgggccaacctgctgtcattcctgatcgcgaagtgctctaccaacagttc

SEQ ID NO: 26880 - DNA, 80 bp, synthetic construct
  misc_feature 1..80: note = Synthetic: >NC_009825.1-cand-5390-5469
  source 1..80: mol_type = other DNA
gacgaaatggaggagtgttccaaacacctcccactagtcgagcacgggttacaactggctgagcagttcaagcagaaggc

SEQ ID NO: 26881 - DNA, 80 bp, synthetic construct
  misc_feature 1..80: note = Synthetic: >NC_009825.1-cand-5470-5549
  source 1..80: mol_type = other DNA
cttaggtctcctaaatttcgctggcaagcaagcccaagaggcaacaccagtgatccagtctaacttcgctaaacttgagc

SEQ ID NO: 26882 - DNA, 80 bp, synthetic construct
  misc_feature 1..80: note = Synthetic: >NC_009825.1-cand-5550-5629
  source 1..80: mol_type = other DNA
agttttgggcgaacgacatgtggaatttcatcagcggcattcaatatctcgctggactgtctactttgccaggcaatcct

SEQ ID NO: 26883 - DNA, 80 bp, synthetic construct
  misc_feature 1..80: note = Synthetic: >NC_009942.1-cand-6350-6429
  source 1..80: mol_type = other DNA
gtcatcacgaagcttggtgaaaggaagattctgaggccgcgctggattgatgccagggtgtactcggatcaccaggcact

SEQ ID NO: 26884 - DNA, 80 bp, synthetic construct
  misc_feature 1..80: note = Synthetic: >NC_009942.1-cand-6430-6509
  source 1..80: mol_type = other DNA
aaaggcgttcaaggacttcgcctcgggaaaacgttctcagatagggctcattgaggttctgggaaagatgcctgagcact

SEQ ID NO: 26885 - DNA, 80 bp, synthetic construct
  misc_feature 1..80: note = Synthetic: >NC_009942.1-cand-6520-6599
  source 1..80: mol_type = other DNA
gacatgggaagcacttgacaccatgtacgttgtggccactgcagagaaaggaggaagagctcacagaatggccctggagg

SEQ ID NO: 26886 - DNA, 80 bp, synthetic construct
  misc_feature 1..80: note = Synthetic: >NC_009942.1-cand-6590-6669
  source 1..80: mol_type = other DNA
gccctggaggaactgccagatgctcttcagacaattgccttgattgccttattgagtgtgatgaccatgggagtattctt

SEQ ID NO: 26887 - DNA, 80 bp, synthetic construct
  misc_feature 1..80: note = Synthetic: >NC_009942.1-cand-6670-6749
  source 1..80: mol_type = other DNA
cctcctcatgcagcggaagggcattggaaagataggtttgggaggcgctgtcttgggagtcgcgacctttttctgttgga

SEQ ID NO: 26888 - DNA, 80 bp, synthetic construct
  misc_feature 1..80: note = Synthetic: >NC_009942.1-cand-6750-6829
  source 1..80: mol_type = other DNA
tggctgaagttccaggaacgaagatcgccggaatgttgctgctctcccttctcttgatgattgtgctaattcctgagcca

SEQ ID NO: 26889 - DNA, 80 bp, synthetic construct
  misc_feature 1..80: note = Synthetic: >NC_009942.1-cand-6830-6909
  source 1..80: mol_type = other DNA
gagaagcaacgttcgcagacagacaaccagctagccgtgttcctgatttgtgtcatgacccttgtgagcgcagtggcagc

SEQ ID NO: 26890 - DNA, 80 bp, synthetic construct
  misc_feature 1..80: note = Synthetic: >NC_009942.1-cand-6910-6989
  source 1..80: mol_type = other DNA
caacgagatgggttggctagataagaccaagagtgacataagcagtttgtttgggcaaagaattgaggtcaaggagaatt

SEQ ID NO: 26891 - DNA, 80 bp, synthetic construct
  misc_feature 1..80: note = Synthetic: >NC_009942.1-cand-6990-7069
  source 1..80: mol_type = other DNA
tcagcatgggagagtttcttctggacttgaggccggcaacagcctggtcactgtacgctgtgacaacagcggtcctcact

SEQ ID NO: 26892 - DNA, 80 bp, synthetic construct
  misc_feature 1..80: note = Synthetic: >NC_009942.1-cand-7070-7149
  source 1..80: mol_type = other DNA
ccactgctaaagcatttgatcacgtcagattacatcaacacctcattgacctcaataaacgttcaggcaagtgcactatt

SEQ ID NO: 26893 - DNA, 80 bp, synthetic construct
  misc_feature 1..80: note = Synthetic: >NC_009942.1-cand-7140-7219
  source 1..80: mol_type = other DNA
gtgcactattcacactcgcgcgaggcttccccttcgtcgatgttggagtgtcggctctcctgctagcagccggatgctgg

SEQ ID NO: 26894 - DNA, 80 bp, synthetic construct
  misc_feature 1..80: note = Synthetic: >NC_009942.1-cand-7230-7309
  source 1..80: mol_type = other DNA
ccctcaccgttacggtaacagcggcaacactccttttttgccactatgcctacatggttcccggttggcaagctgaggca

SEQ ID NO: 26895 - DNA, 80 bp, synthetic construct
  misc_feature 1..80: note = Synthetic: >NC_009942.1-cand-7310-7389
  source 1..80: mol_type = other DNA
atgcgctcagcccagcggcggacagcggccggaatcatgaagaacgctgtagtggatggcatcgtggccacggacgtccc

SEQ ID NO: 26896 - DNA, 80 bp, synthetic construct
  misc_feature 1..80: note = Synthetic: >NC_009942.1-cand-7390-7469
  source 1..80: mol_type = other DNA
agaattagagcgcaccacacccatcatgcagaagaaagttggacagatcatgctgatcttggtgtctctagctgcagtag

SEQ ID NO: 26897 - DNA, 80 bp, synthetic construct
  misc_feature 1..80: note = Synthetic: >NC_009942.1-cand-7470-7549
  source 1..80: mol_type = other DNA
tagtgaacccgtctgtgaagacagtacgagaagccggaattttgatcacggccgcagcggtgacgctttgggagaatgga

SEQ ID NO: 26898 - DNA, 80 bp, synthetic construct
  misc_feature 1..80: note = Synthetic: >NC_009942.1-cand-7520-7599
  source 1..80: mol_type = other DNA
gccgcagcggtgacgctttgggagaatggagcaagctctgtttggaacgcaacaactgccatcggactctgccacatcat

SEQ ID NO: 26899 - DNA, 80 bp, synthetic construct
  misc_feature 1..80: note = Synthetic: >NC_014406.1-cand-4760-4839
  source 1..80: mol_type = other DNA
gcgttgcattttttcaggatcccctcctttatcaggatgatattttttacaagctagtcttatcttctgttgcataaggg

SEQ ID NO: 26900 - DNA, 80 bp, synthetic construct
  misc_feature 1..80: note = Synthetic: >NC_014407.1-cand-0-79
  source 1..80: mol_type = other DNA
cctttctctctgtaatttctgaagagaaagtggtggcaggtgcagctgacaccctttaaatagtcttctctctgcaatag

SEQ ID NO: 26901 - DNA, 80 bp, synthetic construct
  misc_feature 1..80: note = Synthetic: >NC_014407.1-cand-110-189
  source 1..80: mol_type = other DNA
ctacattaggaaaaaaaaggtggaggaggaaatgtctgggttactgggtcagacaggatatgattagcataatattagcc

SEQ ID NO: 26902 - DNA, 80 bp, synthetic construct
  misc_feature 1..80: note = Synthetic: >NC_014407.1-cand-190-269
  source 1..80: mol_type = other DNA
cgccaaaagctgtggtttttatgcagatgaggtgtgacctttggtggaggacctatctctctatctgtaagtaagaattt

SEQ ID NO: 26903 - DNA, 80 bp, synthetic construct
  misc_feature 1..80: note = Synthetic: >NC_014407.1-cand-280-359
  source 1..80: mol_type = other DNA
aacaaattttaacctcttagtaactgtagtgttctctctcctcagaaagtccttgatattgttggccatttgggtgctgt

SEQ ID NO: 26904 - DNA, 80 bp, synthetic construct
  misc_feature 1..80: note = Synthetic: >NC_014407.1-cand-350-429
  source 1..80: mol_type = other DNA
tgggtgctgtgtcaaggacttaggtaagagaatgggtattttgttaagtattcctgagatcattgcagctactgctattg

SEQ ID NO: 26905 - DNA, 80 bp, synthetic construct
  misc_feature 1..80: note = Synthetic: >NC_014407.1-cand-440-519
  source 1..80: mol_type = other DNA
ggccttggaaattgctggaagtgtaggagctttggtgtctggagagggattggccaccttggaagcccttcaaagtgctg

SEQ ID NO: 26906 - DNA, 80 bp, synthetic construct
  misc_feature 1..80: note = Synthetic: >NC_014407.1-cand-520-599
  source 1..80: mol_type = other DNA
ctgctctatctactgaggccacagctgctctggcagtgtccaatgaagctgctatagtattatctactattcctgaatta

SEQ ID NO: 26907 - DNA, 80 bp, synthetic construct
  misc_feature 1..80: note = Synthetic: >NC_014407.1-cand-600-679
  source 1..80: mol_type = other DNA
tcccagaccttgtttggagtccaaaccttactatcttctgtggcaggtgttggtggtgtagtatacaacctaaatcctgg

SEQ ID NO: 26908 - DNA, 80 bp, synthetic construct
  misc_feature 1..80: note = Synthetic: >NC_014407.1-cand-690-769
  source 1..80: mol_type = other DNA
caggcgcccgagggaccaggtggactcggcccaagaattggaagcacaaccatggcacttcaattgtggttgccacaagc

SEQ ID NO: 26909 - DNA, 80 bp, synthetic construct
  misc_feature 1..80: note = Synthetic: >NC_014407.1-cand-780-859
  source 1..80: mol_type = other DNA
ggaggcgcagctggaggtgtccccgattggctccttgaggtgcttcgtgaagtgcctactccctcagagatcctctataa

SEQ ID NO: 26910 - DNA, 80 bp, synthetic construct
  misc_feature 1..80: note = Synthetic: >NC_014407.1-cand-850-929
  source 1..80: mol_type = other DNA
tcctctataacattgccagaggaatctggacttcctactacagaacaggaagagagttaatacaaagaactgctactagg

SEQ ID NO: 26911 - DNA, 80 bp, synthetic construct
  misc_feature 1..80: note = Synthetic: >NC_014407.1-cand-890-969
  source 1..80: mol_type = other DNA
cagaacaggaagagagttaatacaaagaactgctactagggaattggcaagcctgttgagtagactaaggcagaatatta

SEQ ID NO: 26912 - DNA, 80 bp, synthetic construct
  misc_feature 1..80: note = Synthetic: >NC_014407.1-cand-1000-1079
  source 1..80: mol_type = other DNA
ctccagaccctgtacaaggccttctaaatctaataaatcaggccattgcctacaatagggactgggaaactagggctctc

SEQ ID NO: 26913 - DNA, 80 bp, synthetic construct
  misc_feature 1..80: note = Synthetic: >NC_014407.1-cand-1090-1169
  source 1..80: mol_type = other DNA
ggccattgtttgaaccagggggtgttgtcatgtatgacacacaaaatctgccactcagtggaaataatgaccagagggga

SEQ ID NO: 26914 - DNA, 80 bp, synthetic construct
  misc_feature 1..80: note = Synthetic: >NC_014407.1-cand-1210-1289
  source 1..80: mol_type = other DNA
aggaaggaaacactccccagtatactatacctcaatggatgctttttgttcttgaggagctacaaaaagaagtgaataag

SEQ ID NO: 26915 - DNA, 80 bp, synthetic construct
  misc_feature 1..80: note = Synthetic: >NC_019843.3-cand-19810-19889
  source 1..80: mol_type = other DNA
acaagttcgtcctttgggattatgaacgtagcaatatttatggtactgctactattggtgtatgtaagtacactgatatt

SEQ ID NO: 26916 - DNA, 80 bp, synthetic construct
  misc_feature 1..80: note = Synthetic: >NC_019843.3-cand-19890-19969
  source 1..80: mol_type = other DNA
gatgttaattcagctttgaatatatgttttgacatacgcgataattgttcattggagaagttcatgtctactcccaatgc

SEQ ID NO: 26917 - DNA, 80 bp, synthetic construct
  misc_feature 1..80: note = Synthetic: >NC_019843.3-cand-19970-20049
  source 1..80: mol_type = other DNA
catctttatttctgatagaaaaatcaagaaatacccttgtatggtaggtcctgattatgcttacttcaatggtgctatca

SEQ ID NO: 26918 - DNA, 80 bp, synthetic construct
  misc_feature 1..80: note = Synthetic: >NC_019843.3-cand-20050-20129
  source 1..80: mol_type = other DNA
tccgtgatagtgatgttgttaaacaaccagtgaagttctacttgtataagaaagtcaataatgagtttattgatcctact

SEQ ID NO: 26919 - DNA, 80 bp, synthetic construct
  misc_feature 1..80: note = Synthetic: >NC_019843.3-cand-20130-20209
  source 1..80: mol_type = other DNA
gagtgtatttacactcagagtcgctcttgtagtgacttcctacccctttctgacatggagaaagactttctatcttttga

SEQ ID NO: 26920 - DNA, 80 bp, synthetic construct
  misc_feature 1..80: note = Synthetic: >NC_019843.3-cand-20210-20289
  source 1..80: mol_type = other DNA
tagtgatgttttcattaagaagtatggcttggaaaactatgcttttgagcacgtagtctatggagacttctctcatacta

SEQ ID NO: 26921 - DNA, 80 bp, synthetic construct
  misc_feature 1..80: note = Synthetic: >NC_019843.3-cand-20290-20369
  source 1..80: mol_type = other DNA
cgttaggcggtcttcacttgcttattggtttatacaagaagcaacaggaaggtcatattattatggaagaaatgctaaaa

SEQ ID NO: 26922 - DNA, 80 bp, synthetic construct
  misc_feature 1..80: note = Synthetic: >NC_019843.3-cand-20370-20449
  source 1..80: mol_type = other DNA
ggtagctcaactattcataactattttattactgagactaacacagcggcttttaaggcggtgtgttctgttatagattt

SEQ ID NO: 26923 - DNA, 80 bp, synthetic construct
  misc_feature 1..80: note = Synthetic: >NC_019843.3-cand-20450-20529
  source 1..80: mol_type = other DNA
aaagcttgacgactttgttatgattttaaagagtcaagaccttggcgtagtatccaaggttgtcaaggttcctattgact

SEQ ID NO: 26924 - DNA, 80 bp, synthetic construct
  misc_feature 1..80: note = Synthetic: >NC_019843.3-cand-20530-20609
  source 1..80: mol_type = other DNA
taacaatgattgagtttatgttatggtgtaaggatggacaggttcaaaccttctaccctcgactccaggcttctgcagat

SEQ ID NO: 26925 - DNA, 80 bp, synthetic construct
  misc_feature 1..80: note = Synthetic: >NC_019843.3-cand-20610-20689
  source 1..80: mol_type = other DNA
tggaaacctggtcatgcaatgccatccctctttaaagttcaaaatgtaaaccttgaacgttgtgagcttgctaattacaa

SEQ ID NO: 26926 - DNA, 80 bp, synthetic construct
  misc_feature 1..80: note = Synthetic: >NC_019843.3-cand-20690-20769
  source 1..80: mol_type = other DNA
gcaatctattcctatgcctcgcggtgtgcacatgaacatcgctaaatatatgcaattgtgccagtatttaaatacttgca

SEQ ID NO: 26927 - DNA, 80 bp, synthetic construct
  misc_feature 1..80: note = Synthetic: >NC_019843.3-cand-20750-20829
  source 1..80: mol_type = other DNA
ccagtatttaaatacttgcacattagccgtgcctgccaatatgcgtgttatacattttggcgctggttctgataaaggta

SEQ ID NO: 26928 - DNA, 80 bp, synthetic construct
  misc_feature 1..80: note = Synthetic: >NC_019843.3-cand-20830-20909
  source 1..80: mol_type = other DNA
tcgctcctggtacctcagttttacgacagtggcttcctacagatgccattattatagataatgatttaaatgagttcgtg

SEQ ID NO: 26929 - DNA, 80 bp, synthetic construct
  misc_feature 1..80: note = Synthetic: >NC_019843.3-cand-20910-20989
  source 1..80: mol_type = other DNA
tcagatgctgacataactttatttggagattgtgtaactgtacgtgtcggccaacaagtggatcttgttatttccgacat

SEQ ID NO: 26930 - DNA, 80 bp, synthetic construct
  misc_feature 1..80: note = Synthetic: >NC_019843.3-cand-20990-21069
  source 1..80: mol_type = other DNA
gtatgatcctactactaagaatgtaacaggtagtaatgagtcaaaggctttattctttacttacctgtgtaacctcatta

SEQ ID NO: 26931 - DNA, 80 bp, synthetic construct
  misc_feature 1..80: note = Synthetic: >NC_029646.1-cand-4530-4609
  source 1..80: mol_type = other DNA
tctgaggttacaaacctgtcccctgacattatccaggctaattccctcttttccttctacggtgatgatgaaattgtgag

SEQ ID NO: 26932 - DNA, 80 bp, synthetic construct
  misc_feature 1..80: note = Synthetic: >NC_029646.1-cand-4610-4689
  source 1..80: mol_type = other DNA
cacagacataaaattggacccagagaagttgacagcaaaacttaaggaatacgggttgaaaccgacccgccctgacaaga

SEQ ID NO: 26933 - DNA, 80 bp, synthetic construct
  misc_feature 1..80: note = Synthetic: >NC_029646.1-cand-4700-4779
  source 1..80: mol_type = other DNA
ccttgttatctctgaggacctggatggcctaaccttcctgcggaggactgtgacccgcgacccagctggctggtttggaa

SEQ ID NO: 26934 - DNA, 80 bp, synthetic construct
  misc_feature 1..80: note = Synthetic: >NC_029646.1-cand-4740-4819
  source 1..80: mol_type = other DNA
cggaggactgtgacccgcgacccagctggctggtttggaaagctggaacagagctcaatacttaggcaaatgtattggac

SEQ ID NO: 26935 - DNA, 80 bp, synthetic construct
  misc_feature 1..80: note = Synthetic: >NC_029646.1-cand-4870-4949
  source 1..80: mol_type = other DNA
aaagacccatacaattgatgtctttgctgggcgaggctgcactccacggcccagcattctacagcaaaatcagcaagctg

SEQ ID NO: 26936 - DNA, 80 bp, synthetic construct
  misc_feature 1..80: note = Synthetic: >NC_029646.1-cand-4950-5029
  source 1..80: mol_type = other DNA
gtcattgcagagctgaaggaaggtggcatggatttttacgtgcccagacaagagccaatgttcagatggatgaggttttc

SEQ ID NO: 26937 - DNA, 80 bp, synthetic construct
  misc_feature 1..80: note = Synthetic: >NC_029646.1-cand-5030-5109
  source 1..80: mol_type = other DNA
agatctgagcacgtgggagggcgatcgcaatctggctcccagttttgtgaatgaagatggcgtcgagtgacgccgctcca

SEQ ID NO: 26938 - DNA, 80 bp, synthetic construct
  misc_feature 1..80: note = Synthetic: >NC_029646.1-cand-5100-5179
  source 1..80: mol_type = other DNA
cgccgctccatctaatgatggtgcagccggtcttgtaccagaggctaacaatgagaccatggcacttgaaccggtggctg

SEQ ID NO: 26939 - DNA, 80 bp, synthetic construct
  misc_feature 1..80: note = Synthetic: >NC_029646.1-cand-5210-5289
  source 1..80: mol_type = other DNA
aaaacaatattatagacccctggattagattaaattttgtgcaggctcccaatggagagttcacggtttcaccccgcaac

SEQ ID NO: 26940 - DNA, 80 bp, synthetic construct
  misc_feature 1..80: note = Synthetic: >NC_029646.1-cand-5300-5379
  source 1..80: mol_type = other DNA
aagtcctattaaatttggaattaggccccgaactaaatccatacctagcacacctctctagaatgtataatggttatgcg

SEQ ID NO: 26941 - DNA, 80 bp, synthetic construct
  misc_feature 1..80: note = Synthetic: >NC_029646.1-cand-5390-5469
  source 1..80: mol_type = other DNA
aggtgcaagtactactggctgggaatgcgttcacagctggaaaactggtgtttgccgcagttccccctcattttccatta

SEQ ID NO: 26942 - DNA, 80 bp, synthetic construct
  misc_feature 1..80: note = Synthetic: >NC_029646.1-cand-5450-5529
  source 1..80: mol_type = other DNA
ttccccctcattttccattagaaaatataagccctggccagataactatgttccctcatgtaattattgatgttaggact

SEQ ID NO: 26943 - DNA, 80 bp, synthetic construct
  misc_feature 1..80: note = Synthetic: >NC_029646.1-cand-5530-5609
  source 1..80: mol_type = other DNA
ttagaaccagttttgttgccccttcctgatgttaggaataatttctttcattataatcagcagaatgaaccgaggatgag

SEQ ID NO: 26944 - DNA, 80 bp, synthetic construct
  misc_feature 1..80: note = Synthetic: >NC_029646.1-cand-5610-5689
  source 1..80: mol_type = other DNA
acttgtagcaatgctttatactcctcttagatctaatggttctggtgatgatgtattcactgtctcctgcagggtgctta

SEQ ID NO: 26945 - DNA, 80 bp, synthetic construct
  misc_feature 1..80: note = Synthetic: >NC_029646.1-cand-5690-5769
  source 1..80: mol_type = other DNA
cccgaccttcccctgattttgattttaattatttggtcccccctactgttgaatctaaaaccaaacccttcacactccct

SEQ ID NO: 26946 - DNA, 80 bp, synthetic construct
  misc_feature 1..80: note = Synthetic: >NC_029646.1-cand-5790-5869
  source 1..80: mol_type = other DNA
aaccaactccaggttccctgtacctatagatgagctctacaccagtcccaatgagagtctggtggtgcaaccccagaacg

SEQ ID NO: 26947 - DNA, 80 bp, synthetic construct
  misc_feature 1..80: note = Synthetic: >NC_034556.1-cand-400-479
  source 1..80: mol_type = other DNA
aaaacgtttaaagtatgaattaggcttcaactatttggagttggaactccataaatattatttaaaaggtgagctcccac

SEQ ID NO: 26948 - DNA, 80 bp, synthetic construct
  misc_feature 1..80: note = Synthetic: >NC_034556.1-cand-480-559
  source 1..80: mol_type = other DNA
agccttacaaaattaggtttcaagtggtagctgtcaggacagatggttctaatatatcaacccaatggcctagtccaagg

SEQ ID NO: 26949 - DNA, 80 bp, synthetic construct
  misc_feature 1..80: note = Synthetic: >NC_034556.1-cand-570-649
  source 1..80: mol_type = other DNA
ttgttcagtatatgaggctagtgcaggcagaaataagttatgttcgagagcacttaataaaaaatgaagaaagggcagca

SEQ ID NO: 26950 - DNA, 80 bp, synthetic construct
  misc_feature 1..80: note = Synthetic: >NC_034556.1-cand-640-719
  source 1..80: mol_type = other DNA
aagggcagcattggaagcaatgttcaatttaaaatttaatattagtaatgtgaaaaatcaaccttattatataccagagt

SEQ ID NO: 26951 - DNA, 80 bp, synthetic construct
  misc_feature 1..80: note = Synthetic: >NC_034556.1-cand-720-799
  source 1..80: mol_type = other DNA
atcgtggtatagatctaatatttccttcaattgatgatctggttgcatattcacaggactggctctcaaaagcacgaaac

SEQ ID NO: 26952 - DNA, 80 bp, synthetic construct
  misc_feature 1..80: note = Synthetic: >NC_034556.1-cand-800-879
  source 1..80: mol_type = other DNA
ttctctttttttgaagtgaaaggctcagctgtgtttgactgctttactgaaaatgaacaatcccatatgcaaacttaccc

SEQ ID NO: 26953 - DNA, 80 bp, synthetic construct
  misc_feature 1..80: note = Synthetic: >NC_034556.1-cand-880-959
  source 1..80: mol_type = other DNA
catgtctaggcaccctagaaattttctccttattcaatgttcccttcttaacgcttataagccatcaactgttttatctg

SEQ ID NO: 26954 - DNA, 80 bp, synthetic construct
  misc_feature 1..80: note = Synthetic: >NC_034556.1-cand-960-1039
  source 1..80: mol_type = other DNA
atcagatagatagtaggcgagcctgtatccaggtcttgaacttacttcctgaaaccccaacatcgtgtcttgttcatgac

SEQ ID NO: 26955 - DNA, 80 bp, synthetic construct
  misc_feature 1..80: note = Synthetic: >NC_034556.1-cand-1040-1119
  source 1..80: mol_type = other DNA
atggcacacaggtatttgaatttaactagagaagatatgatctcattctattcacctagaattcaatttgtccctactca

SEQ ID NO: 26956 - DNA, 80 bp, synthetic construct
  misc_feature 1..80: note = Synthetic: >NC_034556.1-cand-1120-1199
  source 1..80: mol_type = other DNA
gaatgtaaaagagccagggaccttcaagctcacagcaaacatgatgaggcctgagtcgaaaattgcattagatatgatta

SEQ ID NO: 26957 - DNA, 80 bp, synthetic construct
  misc_feature 1..80: note = Synthetic: >NC_034556.1-cand-1200-1279
  source 1..80: mol_type = other DNA
gtagtcatgaacctggagcaaataaaggacaattgattgagagtcttaatataagcagtcacattgttcaatctgatgca

SEQ ID NO: 26958 - DNA, 80 bp, synthetic construct
  misc_feature 1..80: note = Synthetic: >NC_034556.1-cand-1280-1359
  source 1..80: mol_type = other DNA
gttggcttaattagtaggatcctatcagatttggaactcaacataagtgaaccttctggcagtgaacctatcattgctaa

SEQ ID NO: 26959 - DNA, 80 bp, synthetic construct
  misc_feature 1..80: note = Synthetic: >NC_034556.1-cand-1380-1459
  source 1..80: mol_type = other DNA
ttttagataagttctttcagaatgagacacagaagtatttgattgatatcttgaagaaaacaactggttggcatattggg

SEQ ID NO: 26960 - DNA, 80 bp, synthetic construct
  misc_feature 1..80: note = Synthetic: >NC_034556.1-cand-1440-1519
  source 1..80: mol_type = other DNA
caactggttggcatattgggcatttaataagagacattactgaaagcttgattgcccattcaggattaaggaggtcaaaa

SEQ ID NO: 26961 - DNA, 80 bp, synthetic construct
  misc_feature 1..80: note = Synthetic: >NC_034556.1-cand-1520-1599
  source 1..80: mol_type = other DNA
ttctggtcattgcacgcatataataatggtagtattattttgttcatattaccttctaaatctttagaggaggcaggttc

SEQ ID NO: 26962 - DNA, 80 bp, synthetic construct
  misc_feature 1..80: note = Synthetic: >NC_034556.1-cand-1590-1669
  source 1..80: mol_type = other DNA
aggcaggttcatttattaggtttgttacagcattcaaggttggacctggtttagttgataaagataaccttgatgctgtt

SEQ ID NO: 26963 - DNA, 80 bp, synthetic construct
  misc_feature 1..80: note = Synthetic: >NC_039475.1-cand-2550-2629
  source 1..80: mol_type = other DNA
gatgagcctgaagacagaggaggatgccccaagcccagggatgaagatgacctcactattgactctagagacattaaagt

SEQ ID NO: 26964 - DNA, 80 bp, synthetic construct
  misc_feature 1..80: note = Synthetic: >NC_039475.1-cand-2670-2749
  source 1..80: mol_type = other DNA
aaacacacagccttctcttccaagggcctcagtgatgaagagtacgatgagtacaagagaatcagagaggagaggaatgg

SEQ ID NO: 26965 - DNA, 80 bp, synthetic construct
  misc_feature 1..80: note = Synthetic: >NC_039475.1-cand-2710-2789
  source 1..80: mol_type = other DNA
agtacgatgagtacaagagaatcagagaggagaggaatggcaaatactcaatagaggaatacctccaagatagggacaga

SEQ ID NO: 26966 - DNA, 80 bp, synthetic construct
  misc_feature 1..80: note = Synthetic: >NC_039475.1-cand-2790-2869
  source 1..80: mol_type = other DNA
tactatgaagagcttgccattgctaaggccactgaggaggacttctgtgaggaggaggagatcaaaatccgccagagaat

SEQ ID NO: 26967 - DNA, 80 bp, synthetic construct
  misc_feature 1..80: note = Synthetic: >NC_039475.1-cand-2880-2959
  source 1..80: mol_type = other DNA
accaggaagcagcggaaagaggaaagggccacgcttgggcttgtcacaggatcggaaatcagaaagaggaatccagatga

SEQ ID NO: 26968 - DNA, 80 bp, synthetic construct
  misc_feature 1..80: note = Synthetic: >NC_039475.1-cand-2960-3039
  source 1..80: mol_type = other DNA
ctttaaaccaaaaggaaaattgtgggctgatgacaacaggagcgtggattacaatgagaggatagattttgaggctcccc

SEQ ID NO: 26969 - DNA, 80 bp, synthetic construct
  misc_feature 1..80: note = Synthetic: >NC_039475.1-cand-3080-3159
  source 1..80: mol_type = other DNA
gggattctgggtttctccaagtctctttataacttcaacacacgtcataccaaaaggaatcactgaggcctttggagtgc

SEQ ID NO: 26970 - DNA, 80 bp, synthetic construct
  misc_feature 1..80: note = Synthetic: >NC_039475.1-cand-3120-3199
  source 1..80: mol_type = other DNA
cacgtcataccaaaaggaatcactgaggcctttggagtgcccataaaccaaatccaaattcacaaatctggagaattttg

SEQ ID NO: 26971 - DNA, 80 bp, synthetic construct
  misc_feature 1..80: note = Synthetic: >NC_039475.1-cand-3200-3279
  source 1..80: mol_type = other DNA
ccgcttgcggtttccaaagccaattagaccagacgtgagtgggatgatcttggaagagggcgcccctgaaggcactgttg

SEQ ID NO: 26972 - DNA, 80 bp, synthetic construct
  misc_feature 1..80: note = Synthetic: >NC_039475.1-cand-3220-3299
  source 1..80: mol_type = other DNA
caattagaccagacgtgagtgggatgatcttggaagagggcgcccctgaaggcactgttgtgtctattctcatcaaaagg

SEQ ID NO: 26973 - DNA, 80 bp, synthetic construct
  misc_feature 1..80: note = Synthetic: >NC_039475.1-cand-3350-3429
  source 1..80: mol_type = other DNA
aatgaaaatccaaggtagaacggtgggtggtcagatgggtatgcttctcactggctcaaatgctaaaagcatggatctag

SEQ ID NO: 26974 - DNA, 80 bp, synthetic construct
  misc_feature 1..80: note = Synthetic: >NC_039475.1-cand-3390-3469
  source 1..80: mol_type = other DNA
atgcttctcactggctcaaatgctaaaagcatggatctaggcacaacgccaggtgactgcggatgtccatacatatacaa

SEQ ID NO: 26975 - DNA, 80 bp, synthetic construct
  misc_feature 1..80: note = Synthetic: >NC_039475.1-cand-3510-3589
  source 1..80: mol_type = other DNA
gcagctcgtggaggcaacacggtcatatgtgccacacagggaagtgaaggtgaagccactcttgaaggaagtgacaacaa

SEQ ID NO: 26976 - DNA, 80 bp, synthetic construct
  misc_feature 1..80: note = Synthetic: >NC_039475.1-cand-3590-3669
  source 1..80: mol_type = other DNA
gggtacctattgtggagcccccattttgggacctggcaatgcaccaaaattgagcacaaagacaaaattctggagatcct

SEQ ID NO: 26977 - DNA, 80 bp, synthetic construct
  misc_feature 1..80: note = Synthetic: >NC_039475.1-cand-3670-3749
  source 1..80: mol_type = other DNA
ctaacgcaccgcttcccccaggtacttatgaaccagcataccttggtgggagagacccgcgcgtgaagggaggcccatct

SEQ ID NO: 26978 - DNA, 80 bp, synthetic construct
  misc_feature 1..80: note = Synthetic: >NC_039475.1-cand-3750-3829
  source 1..80: mol_type = other DNA
ctgcaacaagttatgagagaccaacttaaaccttttacagagcccagagggaagccaccaaacccaaatgtcttagagtc

SEQ ID NO: 26979 - DNA, 80 bp, synthetic construct
  misc_feature 1..80: note = Synthetic: >NC_044045.1-cand-5570-5649
  source 1..80: mol_type = other DNA
tgatgtttcacttctgtcaagagaacaaggagccgcgtatgagaattgtggcaatattgtacacccctctccgtgccaac

SEQ ID NO: 26980 - DNA, 80 bp, synthetic construct
  misc_feature 1..80: note = Synthetic: >NC_044045.1-cand-5650-5729
  source 1..80: mol_type = other DNA
ggagctggtgatgatgttttcaccgtctcatgtcgtgtgctaacaagaccctcaccagattttgattttattttcttggt

SEQ ID NO: 26981 - DNA, 80 bp, synthetic construct
  misc_feature 1..80: note = Synthetic: >NC_044045.1-cand-5740-5819
  source 1..80: mol_type = other DNA
gtagagagtaagttgaaacagtttaccctcccaaacctgcagccaaatgagatgaccaattcaagatttcccacaggtat

SEQ ID NO: 26982 - DNA, 80 bp, synthetic construct
  misc_feature 1..80: note = Synthetic: >NC_044045.1-cand-5820-5899
  source 1..80: mol_type = other DNA
cacacagctttataccagtccaaacaccaatttggttgtccagttccaaaatggcaggtgcctacttgatggtacacttc

SEQ ID NO: 26983 - DNA, 80 bp, synthetic construct
  misc_feature 1..80: note = Synthetic: >NC_044045.1-cand-5860-5939
  source 1..80: mol_type = other DNA
cagttccaaaatggcaggtgcctacttgatggtacacttcttggtactacccctgtcagagctgctgacatctgcagttt

SEQ ID NO: 26984 - DNA, 80 bp, synthetic construct
  misc_feature 1..80: note = Synthetic: >NC_044045.1-cand-5980-6059
  source 1..80: mol_type = other DNA
cccagggtggcagggtcacatagaattatggtacagcttagggagccagatggagaggagttttcacccacaggtcccaa

SEQ ID NO: 26985 - DNA, 80 bp, synthetic construct
  misc_feature 1..80: note = Synthetic: >NC_044045.1-cand-6060-6139
  source 1..80: mol_type = other DNA
ccctgcccctgttggcaccccagactttcaagcagccatatttggcaccctcagtcaaagaaacactggtggagctgggc

SEQ ID NO: 26986 - DNA, 80 bp, synthetic construct
  misc_feature 1..80: note = Synthetic: >NC_044045.1-cand-6140-6219
  source 1..80: mol_type = other DNA
agaattctaacagagcccacttcgcatatttctacacaagaaaccccacctttgcaccaggcatagggactgttgtattt

SEQ ID NO: 26987 - DNA, 80 bp, synthetic construct
  misc_feature 1..80: note = Synthetic: >NC_044045.1-cand-6220-6299
  source 1..80: mol_type = other DNA
tcttttgacaccactgattttcaaaatcgtcaacctaccaaattttccccttctggtgtgtttgatgatgattcttctga

SEQ ID NO: 26988 - DNA, 80 bp, synthetic construct
  misc_feature 1..80: note = Synthetic: >NC_044045.1-cand-6300-6379
  source 1..80: mol_type = other DNA
acctttcaatcagttttccctgccatattataatggatcactcggtgcagtggacgctggaaaactggctccacctgtgg

SEQ ID NO: 26989 - DNA, 80 bp, synthetic construct
  misc_feature 1..80: note = Synthetic: >NC_044045.1-cand-6380-6459
  source 1..80: mol_type = other DNA
cacccaattatccaggtgagcagattctttatttcagagggagtgtacctttcaaaggtggttatggagaaggtgagatt

SEQ ID NO: 26990 - DNA, 80 bp, synthetic construct
  misc_feature 1..80: note = Synthetic: >NC_044045.1-cand-6460-6539
  source 1..80: mol_type = other DNA
gacagtttgcttccccaggaatggattacccatttctatgcagagcaggcccccacacaaggtgacgcagccctgctgcg

SEQ ID NO: 26991 - DNA, 80 bp, synthetic construct
  misc_feature 1..80: note = Synthetic: >NC_044045.1-cand-6540-6619
  source 1..80: mol_type = other DNA
ctactacaaccctgacactggtagagtcctctttgagtgcaaactccatcgtgaaggattcatcacaatcaactacacgg

SEQ ID NO: 26992 - DNA, 80 bp, synthetic construct
  misc_feature 1..80: note = Synthetic: >NC_044045.1-cand-6620-6699
  source 1..80: mol_type = other DNA
gatccaatgctcttgctgtgccggtcaatggagtcttcaggtttgagggctgggttaacaaattctacacactgaccccc

SEQ ID NO: 26993 - DNA, 80 bp, synthetic construct
  misc_feature 1..80: note = Synthetic: >NC_044045.1-cand-6730-6809
  source 1..80: mol_type = other DNA
agaagggagttataatggctggagctttctttgcaggtcttgcttctgatgttcttggcagcggtttatcttctcttatt

SEQ ID NO: 26994 - DNA, 80 bp, synthetic construct
  misc_feature 1..80: note = Synthetic: >NC_044045.1-cand-6780-6859
  source 1..80: mol_type = other DNA
gttcttggcagcggtttatcttctcttattggtgccggtgccaatgctataaaccagaaagttgaatatgattacaatag

SEQ ID NO: 26995 - DNA, 80 bp, synthetic construct
  misc_feature 1..80: note = Synthetic: >NC_003310.1-cand-149390-149469
  source 1..80: mol_type = other DNA
aatttgtattttgataggatctataataatgtagtaaatataaaatatattcctgagcatattccatatagatataattt

SEQ ID NO: 26996 - DNA, 80 bp, synthetic construct
  misc_feature 1..80: note = Synthetic: >NC_001611.1-cand-55990-56069
  source 1..80: mol_type = other DNA
aaattatcgacataggtatagaatccggaacattgaacgtattaatacttaattctttttcagtggtaagtaccgatagg

SEQ ID NO: 26997 - DNA, 80 bp, synthetic construct
  misc_feature 1..80: note = Synthetic: >NC_003310.1-cand-182110-182189
  source 1..80: mol_type = other DNA
ctctgacaaatattatacgcaatagtgtttcgacaactaacagcagaaaaagacgagatctgaatggtgagtttgaattt

SEQ ID NO: 26998 - DNA, 80 bp, synthetic construct
  misc_feature 1..80: note = Synthetic: >NC_003310.1-cand-60000-60079
  source 1..80: mol_type = other DNA
aaattctgcaatatcttcgtaaaaagattcttgaaactttttagaatatctatcgactctagatgaaatagcgttcgtca

SEQ ID NO: 26999 - DNA, 80 bp, synthetic construct
  misc_feature 1..80: note = Synthetic: >EVD70-cand-2610-2689
  source 1..80: mol_type = other DNA
ggcagatctgcacttgtgtgtatgcgatcatttgagtacaagaatcactcaacaagtacctcatccattcaaaagaattt

SEQ ID NO: 27000 - DNA, 80 bp, synthetic construct
  misc_feature 1..80: note = Synthetic: >NC_039476.1-cand-2040-2119
  source 1..80: mol_type = other DNA
attgcccgtgcatcaggcctactgcatgagaggatggatgaatttgaactccaaggtcccacaatcaccaccttcaattt

SEQ ID NO: 27001 - DNA, 80 bp, synthetic construct
  misc_feature 1..80: note = Synthetic: >NC_003310.1-cand-93270-93349
  source 1..80: mol_type = other DNA
tcctcttccatcaccaaaaaagttgatagcgttaactatcaaacaaactgctgaagtggtaggtcatactccatcaattt

SEQ ID NO: 27002 - DNA, 80 bp, synthetic construct
  misc_feature 1..80: note = Synthetic: >NC_003310.1-cand-62160-62239
  source 1..80: mol_type = other DNA
atggatattcatagattgactttgatcgatgaaggctcccctgtctgcagccatttttatgatcgtcttttgtgcaattt

SEQ ID NO: 27003 - DNA, 80 bp, synthetic construct
  misc_feature 1..80: note = Synthetic: >NC_001611.1-cand-7240-7319
  source 1..80: mol_type = other DNA
ctttgtaggtttatttaacttgtacatcactgtaagcatgtccgtaccatttattttaatttgacacatatcagcaattt

SEQ ID NO: 27004 - DNA, 80 bp, synthetic construct
  misc_feature 1..80: note = Synthetic: >NC_001430.1-cand-1320-1399
  source 1..80: mol_type = other DNA
aaattggaaagaaaggaacaggtacgtcagcaagctttgctgaagtcatgaaaggggctgaaggtggagtatttgaacaa

SEQ ID NO: 27005 - DNA, 80 bp, synthetic construct
  misc_feature 1..80: note = Synthetic: >NC_004296.1-cand-3230-3309
  source 1..80: mol_type = other DNA
aaattgtacagacctttcagcactgctagtacagacagtgcaatgagaacaatgttcatcacctcttctattacatgagg

SEQ ID NO: 27006 - DNA, 80 bp, synthetic construct
  misc_feature 1..80: note = Synthetic: >HCV.A10-cand-5730-5809
  source 1..80: mol_type = other DNA
gtcccggtaggagatgttgttcaatatgggttcctaaatcttagtggtaaaccaacccacaggaccatgatgtacaattt

SEQ ID NO: 27007 - DNA, 80 bp, synthetic construct
  misc_feature 1..80: note = Synthetic: >NC_001611.1-cand-73260-73339
  source 1..80: mol_type = other DNA
ccggtcgatgatgattacggagaaccaatcattataacatcgtatcttcaaaaaggtcataacaagtttcctgtaaattt

SEQ ID NO: 27008 - DNA, 80 bp, synthetic construct
  misc_feature 1..80: note = Synthetic: >NC_001611.1-cand-32500-32579
  source 1..80: mol_type = other DNA
aaatttatatccgggcagtgactttgtagctctcccagatttcttttccctcgttcatctagcaaaactattattttaat

SEQ ID NO: 27009 - DNA, 80 bp, synthetic construct
  misc_feature 1..80: note = Synthetic: >NC_003310.1-cand-162350-162429
  source 1..80: mol_type = other DNA
aaatttggtaattctattaatgttaaacatacatctgtttcagctaagcaactaagaacacgtatacggcagcagcttcc

SEQ ID NO: 27010 - DNA, 80 bp, synthetic construct
  misc_feature 1..80: note = Synthetic: >NC_001611.1-cand-67950-68029
  source 1..80: mol_type = other DNA
aaatttttatatccgacaaaaccatggatgtaacctcactgttaaaaatatgtgctctgcagatgcggatgctcagttgg

SEQ ID NO: 27011 - DNA, 80 bp, synthetic construct
  misc_feature 1..80: note = Synthetic: >AdVB7-cand-21400-21479
  source 1..80: mol_type = other DNA
accagccacaccgcggcgtcatcgaggccgtctacctgcgcacaccgttctcggccggcaacgccaccacataagaagcc

SEQ ID NO: 27012 - DNA, 80 bp, synthetic construct
  misc_feature 1..80: note = Synthetic: >NC_001611.1-cand-67630-67709
  source 1..80: mol_type = other DNA
accagcgtgaacaacttacagatggataaaacttcctcattaagattgtcatgtggattaagcaatagtgatagattttc

SEQ ID NO: 27013 - DNA, 80 bp, synthetic construct
  misc_feature 1..80: note = Synthetic: >AdVB7-cand-18290-18369
  source 1..80: mol_type = other DNA
accaggcctgtagctcacatggctaccggggtaatgaaaccttctcagacacatcgacccgccaccttggacttgcctcc

SEQ ID NO: 27014 - DNA, 80 bp, synthetic construct
  misc_feature 1..80: note = Synthetic: >NC_002020.1-cand-380-459
  source 1..80: mol_type = other DNA
accaggcgatcatggataaaaacatcatactgaaagcgaacttcagtgtgatttttgaccggctggagactctaatattg

SEQ ID NO: 27015 - DNA, 80 bp, synthetic construct
  misc_feature 1..80: note = Synthetic: >NC_001430.1-cand-6260-6339
  source 1..80: mol_type = other DNA
accagtgctggctacccatacttgttgcaggggaagaagaaaagagacatcttcaacagacaaactagagatacaacaga

SEQ ID NO: 27016 - DNA, 80 bp, synthetic construct
  misc_feature 1..80: note = Synthetic: >AdVB7-cand-33050-33129
  source 1..80: mol_type = other DNA
accataattaaaagcgctccagccaaaactcatatcagatataatcgcccctgcatgaccatcataccaaattttaatat

SEQ ID NO: 27017 - DNA, 80 bp, synthetic construct
  misc_feature 1..80: note = Synthetic: >NC_003310.1-cand-110140-110219
  source 1..80: mol_type = other DNA
accatagacgccaacgaatccctacatattttagaacagaaatacccaacttcaccacccttgaatgtctcaatactaat

SEQ ID NO: 27018 - DNA, 80 bp, synthetic construct
  misc_feature 1..80: note = Synthetic: >NC_001611.1-cand-28800-28879
  source 1..80: mol_type = other DNA
ttcaatagggtagtgatatttgtatgagtgatattgatatctttttgaattgtttcttttagaagtgattctttgatggt

SEQ ID NO: 27019 - DNA, 80 bp, synthetic construct
  misc_feature 1..80: note = Synthetic: >NC_007360.1-cand-1310-1389
  source 1..80: mol_type = other DNA
accattatggcggcattcacagggaatacagagggcagaacatctgacatgaggactgaaatcataaggatgatggaaag

SEQ ID NO: 27020 - DNA, 80 bp, synthetic construct
  misc_feature 1..80: note = Synthetic: >AdVB3-cand-5510-5589
  source 1..80: mol_type = other DNA
gggtcaaaaacaagttttccgccatgttttttgatgcgtttcttacctttggtttccatgagttcgtgtccccgctgggt

SEQ ID NO: 27021 - DNA, 80 bp, synthetic construct
  misc_feature 1..80: note = Synthetic: >AdVB7-cand-9290-9369
  source 1..80: mol_type = other DNA
gacggtcgatgaatctttcaatgacctctccgcggcggcggcgcatggtctcggtgacggcacgaccgttctccctgggt

SEQ ID NO: 27022 - DNA, 80 bp, synthetic construct
  misc_feature 1..80: note = Synthetic: >AdVB7-cand-16240-16319
  source 1..80: mol_type = other DNA
tcccgcaggcgcgcggccacggcggcagcagcggccattgccaacatggcccaaccgcgaagaggcaatgtgtactgggt

SEQ ID NO: 27023 - DNA, 80 bp, synthetic construct
  misc_feature 1..80: note = Synthetic: >NC_004909.1-cand-120-199
  source 1..80: mol_type = other DNA
acccatcgaacaatcaagcagtgccatgtgaaccaatcataatagaaaggaacataacagagatagtgcatttgaataat

SEQ ID NO: 27024 - DNA, 80 bp, synthetic construct
  misc_feature 1..80: note = Synthetic: >NC_035889.1-cand-10550-10629
  source 1..80: mol_type = other DNA
accccatgcgcttggaggcgcaggatgggaaaagaaggtggcgaccttccccacccttcaatctggggcctgaactggag

SEQ ID NO: 27025 - DNA, 80 bp, synthetic construct
  misc_feature 1..80: note = Synthetic: >AdVB3-cand-6310-6389
  source 1..80: mol_type = other DNA
ggtggccacctcgcctcggaggggctcattggtccagcagagtcgacctccttttcttgaacagaaaggggggagggggt

SEQ ID NO: 27026 - DNA, 80 bp, synthetic construct
  misc_feature 1..80: note = Synthetic: >AdVB3-cand-27960-28039
  source 1..80: mol_type = other DNA
ccggaggtgagctccgcggtcttcctactgacgacccctgggtggtagcgggttttgtaacgttaggagtagttgcgggt

SEQ ID NO: 27027 - DNA, 80 bp, synthetic construct
  misc_feature 1..80: note = Synthetic: >NC_001608.3-cand-50-129
  source 1..80: mol_type = other DNA
tattaacattgacattgagacttgtcagtctgttaatattcttgaagagatggatttacacagtttgttggagttgggta

SEQ ID NO: 27028 - DNA, 80 bp, synthetic construct
  misc_feature 1..80: note = Synthetic: >NC_001608.3-cand-130-209
  source 1..80: mol_type = other DNA
caaaacccactgcccctcatgttcgtaataagaaagtgatattatttgacacaaatcatcaggttagtatctgtaatcag

SEQ ID NO: 27029 - DNA, 80 bp, synthetic construct
  misc_feature 1..80: note = Synthetic: >NC_001608.3-cand-180-259
  source 1..80: mol_type = other DNA
acaaatcatcaggttagtatctgtaatcagataatagatgcaataaactcagggattgatcttggagatctcctagaagg

SEQ ID NO: 27030 - DNA, 80 bp, synthetic construct
  misc_feature 1..80: note = Synthetic: >NC_001608.3-cand-290-369
  source 1..80: mol_type = other DNA
ctataattctgataaggataaattcaacacaagtcctatcgcgaagtacttacgtgatgcgggctatgaatttgatgtca

SEQ ID NO: 27031 - DNA, 80 bp, synthetic construct
  misc_feature 1..80: note = Synthetic: >NC_001608.3-cand-370-449
  source 1..80: mol_type = other DNA
tcaagaatgcagatgcaacccgctttctggatgtgattcctaatgaacctcattacagccctttaattctagcccttaag

SEQ ID NO: 27032 - DNA, 80 bp, synthetic construct
  misc_feature 1..80: note = Synthetic: >NC_001608.3-cand-480-559
  source 1..80: mol_type = other DNA
agaattgggctctttttatcattttgcagtcttttcctcccaaaacttgtcgtcggagaccgagctagtatcgaaaaggc

SEQ ID NO: 27033 - DNA, 80 bp, synthetic construct
  misc_feature 1..80: note = Synthetic: >NC_001608.3-cand-510-589
  source 1..80: mol_type = other DNA
cttttcctcccaaaacttgtcgtcggagaccgagctagtatcgaaaaggctttaagacaagtaacagtgcatcaagaaca

SEQ ID NO: 27034 - DNA, 80 bp, synthetic construct
  misc_feature 1..80: note = Synthetic: >NC_001608.3-cand-610-689
  source 1..80: mol_type = other DNA
atcattggcttaccacaggccacatgaaagtaattttcgggattttgaggtccagcttcattttaaagtttgtgttgatt

SEQ ID NO: 27035 - DNA, 80 bp, synthetic construct
  misc_feature 1..80: note = Synthetic: >NC_001608.3-cand-690-769
  source 1..80: mol_type = other DNA
catcaaggagtaaatttggtgacaggtcatgatgcctatgacagtatcattagtaattcagtaggtcaaactagattctc

SEQ ID NO: 27036 - DNA, 80 bp, synthetic construct
  misc_feature 1..80: note = Synthetic: >NC_001608.3-cand-740-819
  source 1..80: mol_type = other DNA
tagtaattcagtaggtcaaactagattctcaggacttcttatcgtgaaaacagttctcgagttcatcttgcaaaaaactg

SEQ ID NO: 27037 - DNA, 80 bp, synthetic construct
  misc_feature 1..80: note = Synthetic: >NC_001608.3-cand-830-909
  source 1..80: mol_type = other DNA
gacactacatcctttggtgcggacctccaaagtaaaaaatgaagttgctagtttcaagcaggcgttgagcaacctagccc

SEQ ID NO: 27038 - DNA, 80 bp, synthetic construct
  misc_feature 1..80: note = Synthetic: >NC_001608.3-cand-930-1009
  source 1..80: mol_type = other DNA
tttgcacgggttctgaatttatcagggattaacaacctcgaacatggactctatcctcagctttcagcaattgcgctggg

SEQ ID NO: 27039 - DNA, 80 bp, synthetic construct
  misc_feature 1..80: note = Synthetic: >NC_001608.3-cand-1010-1089
  source 1..80: mol_type = other DNA
tgtggcaacagcacacggcagtacattggctggtgtcaatgttggcgaacaatatcaacaactacgagaggcggcacatg

SEQ ID NO: 27040 - DNA, 80 bp, synthetic construct
  misc_feature 1..80: note = Synthetic: >NC_001608.3-cand-1090-1169
  source 1..80: mol_type = other DNA
atgcggaagtaaaactacaaaggcgacatgaacatcaggaaattcaagctattgccgaggatgacgaggaaaggaagata

SEQ ID NO: 27041 - DNA, 80 bp, synthetic construct
  misc_feature 1..80: note = Synthetic: >NC_001608.3-cand-1170-1249
  source 1..80: mol_type = other DNA
ttagaacaattccaccttcagaaaactgaaatcacacacagtcagacactagccgtcctcagccagaaacgagaaaaatt

SEQ ID NO: 27042 - DNA, 80 bp, synthetic construct
  misc_feature 1..80: note = Synthetic: >NC_001608.3-cand-1250-1329
  source 1..80: mol_type = other DNA
agctcgtctcgctgcagaaattgaaaacaatattgtggaagatcagggatttaagcaatcacagaatcgggtgtcacagt

SEQ ID NO: 27043 - DNA, 80 bp, synthetic construct
  misc_feature 1..80: note = Synthetic: >NC_001608.3-cand-1330-1409
  source 1..80: mol_type = other DNA
cgtttttgaatgaccctacacctgtggaagtaacggttcaagccaggcccatgaatcgaccaactgctctgcctccccca

SEQ ID NO: 27044 - DNA, 80 bp, synthetic construct
  misc_feature 1..80: note = Synthetic: >NC_001608.3-cand-1410-1489
  source 1..80: mol_type = other DNA
gttgacgacaagattgagcatgaatctacagaagatagctcttcttcaagtagctttgttgacttgaatgatccatttgc

SEQ ID NO: 27045 - DNA, 80 bp, synthetic construct
  misc_feature 1..80: note = Synthetic: >NC_001608.3-cand-1490-1569
  source 1..80: mol_type = other DNA
actgctgaatgaggacgaggatactcttgatgacagtgtcatgatcccgggcacaacatcgagagaatttcaagggattc

SEQ ID NO: 27046 - DNA, 80 bp, synthetic construct
  misc_feature 1..80: note = Synthetic: >NC_001608.3-cand-1570-1649
  source 1..80: mol_type = other DNA
ctgaaccgccaagacaatcccaagacctcaataacagccaaggaaagcaggaagatgaatccacaaatccgattaagaaa

SEQ ID NO: 27047 - DNA, 80 bp, synthetic construct
  misc_feature 1..80: note = Synthetic: >NC_001608.3-cand-1650-1729
  source 1..80: mol_type = other DNA
cagtttctgagatatcaagaattgcctcctgttcaagaggatgatgaatcggaatacacaactgactctcaagaaagcat

SEQ ID NO: 27048 - DNA, 80 bp, synthetic construct
  misc_feature 1..80: note = Synthetic: >NC_001608.3-cand-1730-1809
  source 1..80: mol_type = other DNA
cgaccaaccaggatccgacaatgaacaaggagttgatcttccacctcctccgttgtacgctcaggaaaaaagacaggacc

SEQ ID NO: 27049 - DNA, 80 bp, synthetic construct
  misc_feature 1..80: note = Synthetic: >NC_001608.3-cand-1810-1889
  source 1..80: mol_type = other DNA
caatacagcacccagcagcaaaccctcaggatcccttcggcagtattggtgatgtaaatggtgatatcttagaacctata

SEQ ID NO: 27050 - DNA, 80 bp, synthetic construct
  misc_feature 1..80: note = Synthetic: >NC_001608.3-cand-1890-1969
  source 1..80: mol_type = other DNA
agatcaccttcttcaccatctgctcctcaggaagacacaaggatgagggaagcctatgaattgtcgcctgatttcacaaa

SEQ ID NO: 27051 - DNA, 80 bp, synthetic construct
  misc_feature 1..80: note = Synthetic: >NC_001608.3-cand-1970-2049
  source 1..80: mol_type = other DNA
tgatgaggataatcagcagaattggccacaaagagtggtgacaaagaagggtagaactttcctttatcctaatgatcttc

SEQ ID NO: 27052 - DNA, 80 bp, synthetic construct
  misc_feature 1..80: note = Synthetic: >NC_001608.3-cand-2040-2119
  source 1..80: mol_type = other DNA
aatgatcttctgcaaacaaatcctccagagtcacttataacagccctcgttgaggaataccaaaatcctgtctcagctaa

SEQ ID NO: 27053 - DNA, 80 bp, synthetic construct
  misc_feature 1..80: note = Synthetic: >NC_001608.3-cand-2120-2199
  source 1..80: mol_type = other DNA
ggagcttcaagcagattggcccgacatgtcatttgatgaaaggagacatgttgcgatgaacttgtagtccagataacaca

SEQ ID NO: 27054 - DNA, 80 bp, synthetic construct
  misc_feature 1..80: note = Synthetic: >NC_001608.3-cand-2200-2279
  source 1..80: mol_type = other DNA
gcacggttactcacttatctattttgatatgactcatcctcagatcacagcaatcaaatttatttgaatatttgaaccac

SEQ ID NO: 27055 - DNA, 80 bp, synthetic construct
  misc_feature 1..80: note = Synthetic: >NC_001608.3-cand-2280-2359
  source 1..80: mol_type = other DNA
cttttagtatcctattacttgttactattgtgtgagacaacataagccatcaaataacaatcacgggcaaggactgggca

SEQ ID NO: 27056 - DNA, 80 bp, synthetic construct
  misc_feature 1..80: note = Synthetic: >NC_001608.3-cand-2350-2429
  source 1..80: mol_type = other DNA
ggactgggcatactatggtggtcttagagcattgtccagtgctacaaattcttttttcaattgctataattatacaacta

SEQ ID NO: 27057 - DNA, 80 bp, synthetic construct
  misc_feature 1..80: note = Synthetic: >NC_001608.3-cand-2430-2509
  source 1..80: mol_type = other DNA
caaacctccatacatttgccgcaacactgtaatcaacactgctgtatctcttcttcaagccatctgatttaacttaataa

SEQ ID NO: 27058 - DNA, 80 bp, synthetic construct
  misc_feature 1..80: note = Synthetic: >NC_001608.3-cand-2510-2589
  source 1..80: mol_type = other DNA
acatgacttgattcaaagaatatactgacaatgttactgtttgaatttctcaagtggtgcactatcctactgttttgctc

SEQ ID NO: 27059 - DNA, 80 bp, synthetic construct
  misc_feature 1..80: note = Synthetic: >NC_001608.3-cand-2590-2669
  source 1..80: mol_type = other DNA
agcttagtatattgtaatatgtaagtggactctccccttctcctctcgtgtattctttataaatcacttacttgatagaa

SEQ ID NO: 27060 - DNA, 80 bp, synthetic construct
  misc_feature 1..80: note = Synthetic: >NC_001608.3-cand-2670-2749
  source 1..80: mol_type = other DNA
tgtcgagtctactggtttggagtttccttactctaatggatgtaataattaactgttggcctagatgataacagatatga

SEQ ID NO: 27061 - DNA, 80 bp, synthetic construct
  misc_feature 1..80: note = Synthetic: >NC_001608.3-cand-2750-2829
  source 1..80: mol_type = other DNA
ggttatataattactcatagtgtaaagtataattcttacctctgtttcttctgttttccctttcttttataatatgccaa

SEQ ID NO: 27062 - DNA, 80 bp, synthetic construct
  misc_feature 1..80: note = Synthetic: >NC_001608.3-cand-2830-2909
  source 1..80: mol_type = other DNA
ttaagaaaaactaaaaatcgaagaatattaaagattttctttaatattcagaaaaggctttttattctattctttctttt

SEQ ID NO: 27063 - DNA, 80 bp, synthetic construct
  misc_feature 1..80: note = Synthetic: >NC_001608.3-cand-2910-2989
  source 1..80: mol_type = other DNA
tacaaacgtattgaaatagtaattctcacaatgtgggactcatcatacatgcagcaagtcagcgaagggttgatgactgg

SEQ ID NO: 27064 - DNA, 80 bp, synthetic construct
  misc_feature 1..80: note = Synthetic: >NC_001608.3-cand-2990-3069
  source 1..80: mol_type = other DNA
aaaagtacccatagatcaagtgtttggtgccaatcccttagagaagttatacaagagaagaaaaccaaaaggcacagttg

SEQ ID NO: 27065 - DNA, 80 bp, synthetic construct
  misc_feature 1..80: note = Synthetic: >NC_001608.3-cand-3070-3149
  source 1..80: mol_type = other DNA
gactacaatgtagcccttgtctaatgtcaaaggcgacaagtactgatgatattatttgggaccaactgatcgtgaagaga

SEQ ID NO: 27066 - DNA, 80 bp, synthetic construct
  misc_feature 1..80: note = Synthetic: >NC_001608.3-cand-3150-3229
  source 1..80: mol_type = other DNA
acactagctgatctacttataccgataaataggcagatatcagacattcaaagcactctaagcgaagtaacaacaagagt

SEQ ID NO: 27067 - DNA, 80 bp, synthetic construct
  misc_feature 1..80: note = Synthetic: >NC_001608.3-cand-3220-3299
  source 1..80: mol_type = other DNA
caacaagagtccatgaaattgagcggcaattacatgagattaccccagttttaaaaatgggaaggacactggaagcaatt

SEQ ID NO: 27068 - DNA, 80 bp, synthetic construct
  misc_feature 1..80: note = Synthetic: >NC_001608.3-cand-3310-3389
  source 1..80: mol_type = other DNA
tgtcagaaatgttagccaaatacgaccaccttgtaatttcaactggaagaaccactgcaccagctgctgcctttgatgcc

SEQ ID NO: 27069 - DNA, 80 bp, synthetic construct
  misc_feature 1..80: note = Synthetic: >NC_001608.3-cand-3400-3479
  source 1..80: mol_type = other DNA
agcatggtgtccctccccctcaacccgcgattttcaaagatcttggggttgcccaacaagcttgtagtaaggggaccatg

SEQ ID NO: 27070 - DNA, 80 bp, synthetic construct
  misc_feature 1..80: note = Synthetic: >NC_001608.3-cand-3480-3559
  source 1..80: mol_type = other DNA
gttaaaaatgcaacaacagatgcagccgacaagatgtcgaaggttcttgaactcagtgaggaaacgttctccaagccaaa

SEQ ID NO: 27071 - DNA, 80 bp, synthetic construct
  misc_feature 1..80: note = Synthetic: >NC_001608.3-cand-3550-3629
  source 1..80: mol_type = other DNA
ccaagccaaacctttcagctaaggatttagcccttttattgtttacccatctacccggcaacaacactccattccatatc

SEQ ID NO: 27072 - DNA, 80 bp, synthetic construct
  misc_feature 1..80: note = Synthetic: >NC_001608.3-cand-3630-3709
  source 1..80: mol_type = other DNA
ctagctcaggtcctttcaaaaattgcttacaagtcaggaaaatccggagcattcttggatgcatttcaccagattctaag

SEQ ID NO: 27073 - DNA, 80 bp, synthetic construct
  misc_feature 1..80: note = Synthetic: >NC_001608.3-cand-3710-3789
  source 1..80: mol_type = other DNA
tgaaggagagaatgctcaggcggcattaactcgactaagcagaacatttgacgctttccttggagtggttcctccagtga

SEQ ID NO: 27074 - DNA, 80 bp, synthetic construct
  misc_feature 1..80: note = Synthetic: >NC_001608.3-cand-3790-3869
  source 1..80: mol_type = other DNA
taagagtcaaaaacttccaaacagtccctcgtccatgtcaaaaaagtcttcgggctgtccctccaaatccaacaattgac

SEQ ID NO: 27075 - DNA, 80 bp, synthetic construct
  misc_feature 1..80: note = Synthetic: >NC_001608.3-cand-3870-3949
  source 1..80: mol_type = other DNA
aaaggatgggtctgtgtttattcatctgagcaaggtgaaacacgggcccttaaaatctaattctcattgttcatagttgc

SEQ ID NO: 27076 - DNA, 80 bp, synthetic construct
  misc_feature 1..80: note = Synthetic: >NC_001608.3-cand-3950-4029
  source 1..80: mol_type = other DNA
aagggaagtgatctttccgagttgatacaaagacactaaacatttcaaaagcatgtatgtggacaaaacataattagacc

SEQ ID NO: 27077 - DNA, 80 bp, synthetic construct
  misc_feature 1..80: note = Synthetic: >NC_001608.3-cand-4030-4109
  source 1..80: mol_type = other DNA
atcttaattggagtagtaatttatttctgtcttaaatgtgattttcactttaaaagcgttaaatggtgatagattaatcc

SEQ ID NO: 27078 - DNA, 80 bp, synthetic construct
  misc_feature 1..80: note = Synthetic: >NC_001608.3-cand-4080-4159
  source 1..80: mol_type = other DNA
taaaagcgttaaatggtgatagattaatccttgaagttactcttctatatattatagagaaaccaatgttactaacaaaa

SEQ ID NO: 27079 - DNA, 80 bp, synthetic construct
  misc_feature 1..80: note = Synthetic: >NC_001608.3-cand-4240-4319
  source 1..80: mol_type = other DNA
actaacaacatagaaaagacatttatccttatgtaatcctcggcttagttgaaattaacttttgttggacctcaagacgc

SEQ ID NO: 27080 - DNA, 80 bp, synthetic construct
  misc_feature 1..80: note = Synthetic: >NC_001608.3-cand-4320-4399
  source 1..80: mol_type = other DNA
ttattcatagtatattatatgattttttataagtttaagatatcttaaattatacccacaaaagatactgttttaattaa

SEQ ID NO: 27081 - DNA, 80 bp, synthetic construct
  misc_feature 1..80: note = Synthetic: >NC_001608.3-cand-4400-4479
  source 1..80: mol_type = other DNA
gaaaaactatgaagaacattaagaagatctttctttcgtagtgttcttttactggaaggagtattccaatttcagcttgt

SEQ ID NO: 27082 - DNA, 80 bp, synthetic construct
  misc_feature 1..80: note = Synthetic: >NC_001608.3-cand-4470-4549
  source 1..80: mol_type = other DNA
ttcagcttgttggattaattgttacttaaattgtcctttttgaaattaattcacacaaggtagtttaaatttatatccaa

SEQ ID NO: 27083 - DNA, 80 bp, synthetic construct
  misc_feature 1..80: note = Synthetic: >NC_001608.3-cand-4550-4629
  source 1..80: mol_type = other DNA
aataaattttgatatggccagttccagcaattacaacacatacatgcaatacttgaacccccctccttatgctgatcacg

SEQ ID NO: 27084 - DNA, 80 bp, synthetic construct
  misc_feature 1..80: note = Synthetic: >NC_001608.3-cand-4630-4709
  source 1..80: mol_type = other DNA
gtgcaaaccagttgatcccggcggatcagctatcaaatcagcagggtataactccaaattacgtgggtgatttaaaccta

SEQ ID NO: 27085 - DNA, 80 bp, synthetic construct
  misc_feature 1..80: note = Synthetic: >NC_001608.3-cand-4710-4789
  source 1..80: mol_type = other DNA
gatgatcagttcaaagggaatgtctgccatgctttcactttagaggcaataattgacatatctgcatataacgagcgaac

SEQ ID NO: 27086 - DNA, 80 bp, synthetic construct
  misc_feature 1..80: note = Synthetic: >NC_001608.3-cand-4790-4869
  source 1..80: mol_type = other DNA
agtcaaaggcgttccggcatggctgcctcttgggattatgagcaattttgaatatcctttagctcatactgtggccgcgt

SEQ ID NO: 27087 - DNA, 80 bp, synthetic construct
  misc_feature 1..80: note = Synthetic: >NC_001608.3-cand-4870-4949
  source 1..80: mol_type = other DNA
tgctcacaggcagctatacaatcacccaatttactcacaacgggcaaaaattcgtccgtgttaatcgacttggtacagga

SEQ ID NO: 27088 - DNA, 80 bp, synthetic construct
  misc_feature 1..80: note = Synthetic: >NC_001608.3-cand-4950-5029
  source 1..80: mol_type = other DNA
atcccagcacacccactcagaatgttgcgtgaaggaaatcaagcttttattcagaatatggtgatccccaggaatttttc

SEQ ID NO: 27089 - DNA, 80 bp, synthetic construct
  misc_feature 1..80: note = Synthetic: >NC_001608.3-cand-5030-5109
  source 1..80: mol_type = other DNA
aactaatcaattcacctacaatctcactaatttagtattgagtgtgcaaaaacttcctgatgatgcctggcgcccatcca

SEQ ID NO: 27090 - DNA, 80 bp, synthetic construct
  misc_feature 1..80: note = Synthetic: >NC_001608.3-cand-5110-5189
  source 1..80: mol_type = other DNA
aggacaaattaattgggaacactatgcatcccgcagtctccatccacccgaatctgccgcctattgttctaccaacagtc

SEQ ID NO: 27091 - DNA, 80 bp, synthetic construct
  misc_feature 1..80: note = Synthetic: >NC_001608.3-cand-5190-5269
  source 1..80: mol_type = other DNA
aagaagcaggcttatcgtcagcacaaaaatcccaacaatggaccattgctggccatatctggcatcctccatcaactgag

SEQ ID NO: 27092 - DNA, 80 bp, synthetic construct
  misc_feature 1..80: note = Synthetic: >NC_001608.3-cand-5270-5349
  source 1..80: mol_type = other DNA
ggtcgaaaaagtcccagagaagacgagcctgtttaggatctcgcttcctgccgacatgttctcagtaaaagagggtatga

SEQ ID NO: 27093 - DNA, 80 bp, synthetic construct
  misc_feature 1..80: note = Synthetic: >NC_001608.3-cand-5360-5439
  source 1..80: mol_type = other DNA
gggagaaaattcccccgtggtttattttcaagcacctgagaacttccctttgaatggcttcaataacagacaagttgtgc

SEQ ID NO: 27094 - DNA, 80 bp, synthetic construct
  misc_feature 1..80: note = Synthetic: >NC_001608.3-cand-5430-5509
  source 1..80: mol_type = other DNA
caagttgtgctagcgtatgcgaatccaacgctcagtgccgtttgaaatgatgctcaaatgagacaggagtccatctgtat

SEQ ID NO: 27095 - DNA, 80 bp, synthetic construct
  misc_feature 1..80: note = Synthetic: >NC_001608.3-cand-5510-5589
  source 1..80: mol_type = other DNA
aagaagtatggcttaaatggatatttgtcaaattcttacaagattagtttgtattgatttcaacaatgctttaaccttac

SEQ ID NO: 27096 - DNA, 80 bp, synthetic construct
  misc_feature 1..80: note = Synthetic: >NC_001608.3-cand-5590-5669
  source 1..80: mol_type = other DNA
attgctgctttaaatagttgattaagctgatcagcttgtaatatgtaatctcttctgggccatcagatccataatgggtt

SEQ ID NO: 27097 - DNA, 80 bp, synthetic construct
  misc_feature 1..80: note = Synthetic: >NC_001608.3-cand-5670-5749
  source 1..80: mol_type = other DNA
tactagactatataagagaaatagtaatattttataaacaattcttgctcagttttactgtgatttaataacatatgtca

SEQ ID NO: 27098 - DNA, 80 bp, synthetic construct
  misc_feature 1..80: note = Synthetic: >NC_001608.3-cand-5750-5829
  source 1..80: mol_type = other DNA
ttgtgccctccattgctaagtcaactcaactgacgataatactccttctgaaatagtaagaaaaactaatgaagaacatt

SEQ ID NO: 27099 - DNA, 80 bp, synthetic construct
  misc_feature 1..80: note = Synthetic: >NC_001608.3-cand-5830-5909
  source 1..80: mol_type = other DNA
aattgctgggtaaaagtgattaatttctttaaatttgaccagaataatattttgtcagtgaatatattctcatatcactt

SEQ ID NO: 27100 - DNA, 80 bp, synthetic construct
  misc_feature 1..80: note = Synthetic: >NC_001608.3-cand-5910-5989
  source 1..80: mol_type = other DNA
gattaaaaacagaaaattaccctaacatgaagaccacatgtttccttatcagtcttatcttaattcaagggacaaaaaat

SEQ ID NO: 27101 - DNA, 80 bp, synthetic construct
  misc_feature 1..80: note = Synthetic: >NC_001608.3-cand-5990-6069
  source 1..80: mol_type = other DNA
ctccccattttagagatagctagtaataatcaaccccaaaatgtggattcggtatgctccggaactctccagaagacaga

SEQ ID NO: 27102 - DNA, 80 bp, synthetic construct
  misc_feature 1..80: note = Synthetic: >NC_001608.3-cand-6070-6149
  source 1..80: mol_type = other DNA
agacgtccatctgatgggattcacactgagtgggcaaaaagttgctgattcccctttggaggcatccaagcgatgggctt

SEQ ID NO: 27103 - DNA, 80 bp, synthetic construct
  misc_feature 1..80: note = Synthetic: >NC_001608.3-cand-6110-6189
  source 1..80: mol_type = other DNA
gttgctgattcccctttggaggcatccaagcgatgggctttcaggacaggtgtacctcccaagaatgttgagtacacaga

SEQ ID NO: 27104 - DNA, 80 bp, synthetic construct
  misc_feature 1..80: note = Synthetic: >NC_001608.3-cand-6230-6309
  source 1..80: mol_type = other DNA
gatccctctggaaaatccttgctgttagatcctcctaccaacatccgtgactatcctaaatgcaaaactatccatcatat

SEQ ID NO: 27105 - DNA, 80 bp, synthetic construct
  misc_feature 1..80: note = Synthetic: >NC_001608.3-cand-6300-6379
  source 1..80: mol_type = other DNA
tccatcatattcaaggtcaaaaccctcatgcacaggggatcgcccttcatttatggggagcattttttctgtatgatcgc

SEQ ID NO: 27106 - DNA, 80 bp, synthetic construct
  misc_feature 1..80: note = Synthetic: >NC_001608.3-cand-6390-6469
  source 1..80: mol_type = other DNA
caacaatgtaccgaggcaaagtcttcactgaagggaacatagcagctatgattgtcaataagacagtgcacaaaatgatt

SEQ ID NO: 27107 - DNA, 80 bp, synthetic construct
  misc_feature 1..80: note = Synthetic: >NC_001608.3-cand-6470-6549
  source 1..80: mol_type = other DNA
ttctcgcggcaaggacaagggtaccgtcatatgaatctgacttctactaataaatattggacaagtagtaacggaacgca

SEQ ID NO: 27108 - DNA, 80 bp, synthetic construct
  misc_feature 1..80: note = Synthetic: >NC_001608.3-cand-6550-6629
  source 1..80: mol_type = other DNA
aacgaatgacactggatgtttcggcgctcttcaagaatacaattctacaaagaaccaaacatgtgctccgtccaaaatac

SEQ ID NO: 27109 - DNA, 80 bp, synthetic construct
  misc_feature 1..80: note = Synthetic: >NC_001608.3-cand-6630-6709
  source 1..80: mol_type = other DNA
ctccaccactgcccacagcccgtccggagatcaaactcacaagcaccccaactgatgccaccaaactcaataccacggac

SEQ ID NO: 27110 - DNA, 80 bp, synthetic construct
  misc_feature 1..80: note = Synthetic: >NC_001608.3-cand-6710-6789
  source 1..80: mol_type = other DNA
ccaagcagtgatgatgaggacctcgcaacatccggctcagggtccggagaacgagaaccccacacaacttctgatgcggt

SEQ ID NO: 27111 - DNA, 80 bp, synthetic construct
  misc_feature 1..80: note = Synthetic: >NC_001608.3-cand-6790-6869
  source 1..80: mol_type = other DNA
caccaagcaagggctttcatcaacaatgccacccactccctcaccacaaccaagcacgccacagcaaggaggaaacaaca

SEQ ID NO: 27112 - DNA, 80 bp, synthetic construct
  misc_feature 1..80: note = Synthetic: >NC_001608.3-cand-6870-6949
  source 1..80: mol_type = other DNA
caaaccattcccaagatgctgtgactgaactagacaaaaataacacaactgcacaaccgtccatgccccctcataacact

SEQ ID NO: 27113 - DNA, 80 bp, synthetic construct
  misc_feature 1..80: note = Synthetic: >NC_001608.3-cand-6950-7029
  source 1..80: mol_type = other DNA
accacaatctctactaacaacacctccaaacacaacttcagcactctctctgcaccattacaaaacaccaccaatgacaa

SEQ ID NO: 27114 - DNA, 80 bp, synthetic construct
  misc_feature 1..80: note = Synthetic: >NC_001608.3-cand-7030-7109
  source 1..80: mol_type = other DNA
cacacagagcacaatcactgaaaatgagcaaaccagtgccccctcgataacaaccctgcctccaacgggaaatcccacca

SEQ ID NO: 27115 - DNA, 80 bp, synthetic construct
  misc_feature 1..80: note = Synthetic: >NC_001608.3-cand-7110-7189
  source 1..80: mol_type = other DNA
cagcaaagagcaccagcagcaaaaaaggccccgccacaacggcaccaaacacgacaaatgagcatttcaccagtcctccc

SEQ ID NO: 27116 - DNA, 80 bp, synthetic construct
  misc_feature 1..80: note = Synthetic: >NC_001608.3-cand-7190-7269
  source 1..80: mol_type = other DNA
cccacccccagctcgactgcacaacatcttgtatatttcagaagaaagcgaagtatcctctggagggaaggcgacatgtt

SEQ ID NO: 27117 - DNA, 80 bp, synthetic construct
  misc_feature 1..80: note = Synthetic: >NC_001608.3-cand-7270-7349
  source 1..80: mol_type = other DNA
cccttttctggatgggttaataaatgctccaattgattttgacccagttccaaatacaaaaacaatctttgatgaatcct

SEQ ID NO: 27118 - DNA, 80 bp, synthetic construct
  misc_feature 1..80: note = Synthetic: >NC_001608.3-cand-7350-7429
  source 1..80: mol_type = other DNA
ctagttctggtgcctcggctgaggaagatcaacatgcctcccccaatattagtttaactttatcttattttcctaatata

SEQ ID NO: 27119 - DNA, 80 bp, synthetic construct
  misc_feature 1..80: note = Synthetic: >NC_001608.3-cand-7430-7509
  source 1..80: mol_type = other DNA
aatgagaacactgcctactctggagaaaatgagaatgattgtgatgcagagttaagaatttggagcgttcaggaggatga

SEQ ID NO: 27120 - DNA, 80 bp, synthetic construct
  misc_feature 1..80: note = Synthetic: >NC_001608.3-cand-7510-7589
  source 1..80: mol_type = other DNA
cctggccgcagggctcagttggataccgttttttggccctggaattgaaggactttacactgctgttttaattaaaaatc

SEQ ID NO: 27121 - DNA, 80 bp, synthetic construct
  misc_feature 1..80: note = Synthetic: >NC_001608.3-cand-7590-7669
  source 1..80: mol_type = other DNA
aaaacaatttggtctgcaggttgaggcgtctagccaatcaaactgccaaatccttggaactcttattgagagtcacaact

SEQ ID NO: 27122 - DNA, 80 bp, synthetic construct
  misc_feature 1..80: note = Synthetic: >NC_001608.3-cand-7650-7729
  source 1..80: mol_type = other DNA
tcttattgagagtcacaactgaggaaagaacattctccttaatcaatagacatgctattgactttctactcacaagatgg

SEQ ID NO: 27123 - DNA, 80 bp, synthetic construct
  misc_feature 1..80: note = Synthetic: >NC_001608.3-cand-7750-7829
  source 1..80: mol_type = other DNA
tggacctgattgttgcatcgggatagaagacttgtccaaaaatatttcagagcaaattgaccaaattaaaaaggacgaac

SEQ ID NO: 27124 - DNA, 80 bp, synthetic construct
  misc_feature 1..80: note = Synthetic: >NC_001608.3-cand-7830-7909
  source 1..80: mol_type = other DNA
aaaaagaggggactggttggggtctgggtggtaaatggtggacatccgactggggtgttcttactaacttgggcattttg

SEQ ID NO: 27125 - DNA, 80 bp, synthetic construct
  misc_feature 1..80: note = Synthetic: >NC_001608.3-cand-7920-7999
  source 1..80: mol_type = other DNA
ccatagctgtcttgattgctctatcctgtatttgtcgtatctttactaaatatatcggataacgttaaatgtgtaatgat

SEQ ID NO: 27126 - DNA, 80 bp, synthetic construct
  misc_feature 1..80: note = Synthetic: >NC_001608.3-cand-8000-8079
  source 1..80: mol_type = other DNA
taggactttaggacaattgctactgagccctttttctaatctactgaaatcaacttgggagatttttaagaagctgataa

SEQ ID NO: 27127 - DNA, 80 bp, synthetic construct
  misc_feature 1..80: note = Synthetic: >NC_001608.3-cand-8080-8159
  source 1..80: mol_type = other DNA
cttaatgtgaatcaatagtttatgtattatcgattattatggtttgatattcaattgttattattgtcaggagtgacctt

SEQ ID NO: 27128 - DNA, 80 bp, synthetic construct
  misc_feature 1..80: note = Synthetic: >NC_001608.3-cand-8150-8229
  source 1..80: mol_type = other DNA
gagtgaccttttctatttgatgcattaatgttttaaactacctcttaagcctttgagggcggtcccaatatgtgcgtagg

SEQ ID NO: 27129 - DNA, 80 bp, synthetic construct
  misc_feature 1..80: note = Synthetic: >NC_001608.3-cand-8240-8319
  source 1..80: mol_type = other DNA
aagggatttcttattgtacagttttctgtattacttatttgggcttgaagacatagttaagatttgccgaaaatgctctc

SEQ ID NO: 27130 - DNA, 80 bp, synthetic construct
  misc_feature 1..80: note = Synthetic: >NC_001608.3-cand-8320-8399
  source 1..80: mol_type = other DNA
cagtcaattccatcccctctcagaaaagacgtgctgttcaaagagtcttaatttataaccaactattgcaagaattaatt

SEQ ID NO: 27131 - DNA, 80 bp, synthetic construct
  misc_feature 1..80: note = Synthetic: >NC_001608.3-cand-8400-8479
  source 1..80: mol_type = other DNA
tactttttccgttatacttagttacattaatcttttgactgttcagcattattaacgacttgtcttaattcaatcgttcg

SEQ ID NO: 27132 - DNA, 80 bp, synthetic construct
  misc_feature 1..80: note = Synthetic: >NC_001608.3-cand-8480-8559
  source 1..80: mol_type = other DNA
gatgaaattcataaggaaaaatgagcctccttccccctattctgggctgagaaaatttctcttatccgcctaaaatctga

SEQ ID NO: 27133 - DNA, 80 bp, synthetic construct
  misc_feature 1..80: note = Synthetic: >NC_001608.3-cand-8560-8639
  source 1..80: mol_type = other DNA
tctgttaggtcatgggtccttcataatctgtttgagcatgaatattgatcaaatgaccaaatgatagtgcatttgtatag

SEQ ID NO: 27134 - DNA, 80 bp, synthetic construct
  misc_feature 1..80: note = Synthetic: >NC_001608.3-cand-8640-8719
  source 1..80: mol_type = other DNA
actcaattatcctttattaagaaaaagataaatagaacacaaagaattgacaaaattttactttgattgattttgcaagg

SEQ ID NO: 27135 - DNA, 80 bp, synthetic construct
  misc_feature 1..80: note = Synthetic: >NC_001608.3-cand-8750-8829
  source 1..80: mol_type = other DNA
ataaagtagagtcgaagaacattaaatgttctttgttagaattattcatctaagttgtttttgagtatattcgcttcaat

SEQ ID NO: 27136 - DNA, 80 bp, synthetic construct
  misc_feature 1..80: note = Synthetic: >NC_001608.3-cand-8830-8909
  source 1..80: mol_type = other DNA
acaactcctctttatatttgatttaagttttaaaatgcaacaacctcgcggaagaagtcgaacccgcaaccaccaagtca

SEQ ID NO: 27137 - DNA, 80 bp, synthetic construct
  misc_feature 1..80: note = Synthetic: >NC_001608.3-cand-8910-8989
  source 1..80: mol_type = other DNA
caccgactatatatcatgaaactcaattgccctccaaacctcattataccaattatcatccacgtgcaagatcgatgagc

SEQ ID NO: 27138 - DNA, 80 bp, synthetic construct
  misc_feature 1..80: note = Synthetic: >NC_001608.3-cand-8990-9069
  source 1..80: mol_type = other DNA
tcaacccgtagtagtgcagaaagtagtcccaccaatcatattccccgtgctcgaccaccctcaacattcaacttatcgaa

SEQ ID NO: 27139 - DNA, 80 bp, synthetic construct
  misc_feature 1..80: note = Synthetic: >NC_001608.3-cand-9070-9149
  source 1..80: mol_type = other DNA
accccctcctcctccaaaagacatgtgcaggaacatgaaaattggattgccgtgcgctgatcccacttgtaatagagatc

SEQ ID NO: 27140 - DNA, 80 bp, synthetic construct
  misc_feature 1..80: note = Synthetic: >NC_001608.3-cand-9150-9229
  source 1..80: mol_type = other DNA
atgaccttgataatctaacaaatcgtgaacttttgctattgatggcccgaaaaatgctccccaatacagacaagaccttt

SEQ ID NO: 27141 - DNA, 80 bp, synthetic construct
  misc_feature 1..80: note = Synthetic: >NC_001608.3-cand-9230-9309
  source 1..80: mol_type = other DNA
agaagtccgcaggactgtggatcaccgtctctttctaaaggtctctcaaaagataaacaggagcaaacgaaagatgtgtt

SEQ ID NO: 27142 - DNA, 80 bp, synthetic construct
  misc_feature 1..80: note = Synthetic: >NC_001608.3-cand-9310-9389
  source 1..80: mol_type = other DNA
gaccttggaaaatctaggacacattctgagctatctccacagatcagaaattgggaaattggatgagacatcacttcgtg

SEQ ID NO: 27143 - DNA, 80 bp, synthetic construct
  misc_feature 1..80: note = Synthetic: >NC_001608.3-cand-9390-9469
  source 1..80: mol_type = other DNA
cagcattaagtctgacgtgtgctggaattcgaaagacgaatagatccttgatcaacaccatgacagaattacacatgaac

SEQ ID NO: 27144 - DNA, 80 bp, synthetic construct
  misc_feature 1..80: note = Synthetic: >NC_001608.3-cand-9470-9549
  source 1..80: mol_type = other DNA
catgaaaatctcccgcaagaccaaaacggtgttatcaagcagacctatacaggtattcaccttgacaaaggaggtcaatt

SEQ ID NO: 27145 - DNA, 80 bp, synthetic construct
  misc_feature 1..80: note = Synthetic: >NC_001608.3-cand-9550-9629
  source 1..80: mol_type = other DNA
cgaagccgccttatggcaaggttgggataagagatcgatatctctattcgtacaagcagctttatatgtaatgaacaata

SEQ ID NO: 27146 - DNA, 80 bp, synthetic construct
  misc_feature 1..80: note = Synthetic: >NC_001608.3-cand-9630-9709
  source 1..80: mol_type = other DNA
tcccctgtgaatcatcaatcagtgtgcaagcctcatacgatcattttattcttcctcaaagtcaaggtaaaggacagtga

SEQ ID NO: 27147 - DNA, 80 bp, synthetic construct
  misc_feature 1..80: note = Synthetic: >NC_001608.3-cand-9710-9789
  source 1..80: mol_type = other DNA
ttattgttcgaaagttgacaatttgatcactttcagttttcagtttcaacccttatcgcgagacttgaatacaatcctac

SEQ ID NO: 27148 - DNA, 80 bp, synthetic construct
  misc_feature 1..80: note = Synthetic: >NC_001608.3-cand-9790-9869
  source 1..80: mol_type = other DNA
taacttcaataagtgaccccaaattcaagtttgctgaaagctaagatgacaatgatcactagttcattgtaaattactcg

SEQ ID NO: 27149 - DNA, 80 bp, synthetic construct
  misc_feature 1..80: note = Synthetic: >NC_001608.3-cand-9870-9949
  source 1..80: mol_type = other DNA
atcaaaatgttcttaagctatcttaagcttactgatgcggctctgcttcacttttcttttgattttaaagccatagctat

SEQ ID NO: 27150 - DNA, 80 bp, synthetic construct
  misc_feature 1..80: note = Synthetic: >NC_001608.3-cand-9950-10029
  source 1..80: mol_type = other DNA
atctaagtgtctaattaacaacttgtacctctaaggaaaaacatgaagaacattaagaaaaaggatgttcttattctttg

SEQ ID NO: 27151 - DNA, 80 bp, synthetic construct
  misc_feature 1..80: note = Synthetic: >NC_001608.3-cand-10030-10109
  source 1..80: mol_type = other DNA
actaaacctgcatattctttgttgataccctcgagagacaacttttgacaccagatcacggatcaagcacacttcaatca

SEQ ID NO: 27152 - DNA, 80 bp, synthetic construct
  misc_feature 1..80: note = Synthetic: >NC_001608.3-cand-10110-10189
  source 1..80: mol_type = other DNA
agcaccctaaattttcaatcatacacataataaccattttagtagcgttgcctttcagtacagtctaggtgattgttgaa

SEQ ID NO: 27153 - DNA, 80 bp, synthetic construct
  misc_feature 1..80: note = Synthetic: >NC_001608.3-cand-10190-10269
  source 1..80: mol_type = other DNA
agacttccaagcatggcagaattatcaacgcgttacaacttgcctgcaaatgttacggaaaatagtataaatcttgacct

SEQ ID NO: 27154 - DNA, 80 bp, synthetic construct
  misc_feature 1..80: note = Synthetic: >NC_001608.3-cand-10260-10339
  source 1..80: mol_type = other DNA
atcttgaccttaattccacagcacgatggataaaagaacccagtgttgggggctggacagtgaagtggggaaactttgtt

SEQ ID NO: 27155 - DNA, 80 bp, synthetic construct
  misc_feature 1..80: note = Synthetic: >NC_001608.3-cand-10350-10429
  source 1..80: mol_type = other DNA
caaatactggaatgacattgttgcatcatttaaagtctaacttcgttgttccagagtggcaacaaacaaggaatctattc

SEQ ID NO: 27156 - DNA, 80 bp, synthetic construct
  misc_feature 1..80: note = Synthetic: >NC_001608.3-cand-10430-10509
  source 1..80: mol_type = other DNA
tcccacctctttaaaaacccaaaatcaacaattatagaaccgtttttggccctgaggattttgcttggagttgctttgaa

SEQ ID NO: 27157 - DNA, 80 bp, synthetic construct
  misc_feature 1..80: note = Synthetic: >NC_001608.3-cand-10510-10589
  source 1..80: mol_type = other DNA
ggatcaagaattacagcaatcattgattcctggatttagatctattgttcatatgctatcagaatggctgctcctggagg

SEQ ID NO: 27158 - DNA, 80 bp, synthetic construct
  misc_feature 1..80: note = Synthetic: >NC_001608.3-cand-10590-10669
  source 1..80: mol_type = other DNA
tcacgtcggcaatccatattagccctaatctgttgggaatctatttgacttcagacatgtttaaaattctgatggcaggt

SEQ ID NO: 27159 - DNA, 80 bp, synthetic construct
  misc_feature 1..80: note = Synthetic: >NC_001608.3-cand-10670-10749
  source 1..80: mol_type = other DNA
gtgaaaaatttcttcaataagatgttcactcttcatgttgtaaatgaccacggaaaacccagcagtattgaaataaagtt

SEQ ID NO: 27160 - DNA, 80 bp, synthetic construct
  misc_feature 1..80: note = Synthetic: >NC_001608.3-cand-10790-10869
  source 1..80: mol_type = other DNA
tttctagtggaagtcaggaggattgatattgaaccttgctgtggtgagacagtcctctcagaatcagttgtttttggact

SEQ ID NO: 27161 - DNA, 80 bp, synthetic construct
  misc_feature 1..80: note = Synthetic: >NC_001608.3-cand-10830-10909
  source 1..80: mol_type = other DNA
gtggtgagacagtcctctcagaatcagttgtttttggactagtggctgaggcagttctaagagaacacagtcaaatggag

SEQ ID NO: 27162 - DNA, 80 bp, synthetic construct
  misc_feature 1..80: note = Synthetic: >NC_001608.3-cand-10910-10989
  source 1..80: mol_type = other DNA
aagggccaacctctcaatctgacacaatacatgaacagcaaaattgctatataagtggcttaaattagcatgggtattcc

SEQ ID NO: 27163 - DNA, 80 bp, synthetic construct
  misc_feature 1..80: note = Synthetic: >NC_001608.3-cand-10990-11069
  source 1..80: mol_type = other DNA
tagttcgaccacataataatgttggaggcacagtacattatagttaattgtcttgtatactaagggatatacctaacctg

SEQ ID NO: 27164 - DNA, 80 bp, synthetic construct
  misc_feature 1..80: note = Synthetic: >NC_001608.3-cand-11080-11159
  source 1..80: mol_type = other DNA
actggtataaaatagtagcatcatcttattgaatagttatcatacaataggctgttcctataatctgattgtgagattat

SEQ ID NO: 27165 - DNA, 80 bp, synthetic construct
  misc_feature 1..80: note = Synthetic: >NC_001608.3-cand-11160-11239
  source 1..80: mol_type = other DNA
aaacttgtagaattaccgtgggtcacaactgttgcatatcctccaaaatatatcttttgcaagtgatgtgtgcttgaata

SEQ ID NO: 27166 - DNA, 80 bp, synthetic construct
  misc_feature 1..80: note = Synthetic: >NC_001608.3-cand-11240-11319
  source 1..80: mol_type = other DNA
cttcgatataatacatactaataacgattgattaagaaaaatcaatgatggatattaaatgtccatcaagcaagtgttgt

SEQ ID NO: 27167 - DNA, 80 bp, synthetic construct
  misc_feature 1..80: note = Synthetic: >NC_001608.3-cand-11330-11409
  source 1..80: mol_type = other DNA
gggtttcacaggctgctaaacttactaaattttacataggattatataattcttttcgatacacgttatatctttagcaa

SEQ ID NO: 27168 - DNA, 80 bp, synthetic construct
  misc_feature 1..80: note = Synthetic: >NC_001608.3-cand-11400-11479
  source 1..80: mol_type = other DNA
tctttagcaaagtgaggaaaacagctttatcatgttagatgccagttatccattttaagtgaatcctttcctcaacatgc

SEQ ID NO: 27169 - DNA, 80 bp, synthetic construct
  misc_feature 1..80: note = Synthetic: >NC_001608.3-cand-11480-11559
  source 1..80: mol_type = other DNA
agcatccaactcaatatcctgatgcaaggttgtcctctcctataatcctagaccagtgtgacttattagccagaagttta

SEQ ID NO: 27170 - DNA, 80 bp, synthetic construct
  misc_feature 1..80: note = Synthetic: >NC_001608.3-cand-11560-11639
  source 1..80: mol_type = other DNA
gggttgtatagtcattattcacataatccgaaattgcgtaattgtaggattccacatcacatttaccgtttaaggaattc

SEQ ID NO: 27171 - DNA, 80 bp, synthetic construct
  misc_feature 1..80: note = Synthetic: >NC_001608.3-cand-11640-11719
  source 1..80: mol_type = other DNA
gacagcattaaagacatttcttcagaattgttcgatactcaccgttccttttcattcaatttgggatcatattttaactt

SEQ ID NO: 27172 - DNA, 80 bp, synthetic construct
  misc_feature 1..80: note = Synthetic: >NC_001608.3-cand-11720-11799
  source 1..80: mol_type = other DNA
ccattcaatatgatgcaattaatcatgttgatgattttaaatacctattgccatctgagctagtcaagtatgcgaattgg

SEQ ID NO: 27173 - DNA, 80 bp, synthetic construct
  misc_feature 1..80: note = Synthetic: >NC_001608.3-cand-11800-11879
  source 1..80: mol_type = other DNA
gacaacgagttcttaaaagcatatcttaataagatcttaggacttgaccatgttttttcagcttctgcaaggtcacagtg

SEQ ID NO: 27174 - DNA, 80 bp, synthetic construct
  misc_feature 1..80: note = Synthetic: >NC_001608.3-cand-11920-11999
  source 1..80: mol_type = other DNA
atgttattactcgtgcatctatctcaacttgccaggaggataaaaggacaaagagggtcattaagaagtaactggaaatt

SEQ ID NO: 27175 - DNA, 80 bp, synthetic construct
  misc_feature 1..80: note = Synthetic: >NC_001608.3-cand-11950-12029
  source 1..80: mol_type = other DNA
gccaggaggataaaaggacaaagagggtcattaagaagtaactggaaatttataggaacagatttggagctgtttggaat

SEQ ID NO: 27176 - DNA, 80 bp, synthetic construct
  misc_feature 1..80: note = Synthetic: >NC_001608.3-cand-12030-12109
  source 1..80: mol_type = other DNA
agcagattttgttatttttaaggttccagtaaaaacaataatccgaaatgctgtaagcttacaagcttcaaaaccgggat

SEQ ID NO: 27177 - DNA, 80 bp, synthetic construct
  misc_feature 1..80: note = Synthetic: >NC_001608.3-cand-12110-12189
  source 1..80: mol_type = other DNA
taagaatatggtaccgtgaccaaaacttgaccccttatctatgcgacgatgagtttattgtaagcgtcgctagttatgaa

SEQ ID NO: 27178 - DNA, 80 bp, synthetic construct
  misc_feature 1..80: note = Synthetic: >NC_001608.3-cand-12180-12259
  source 1..80: mol_type = other DNA
tagttatgaatgttttatcatgattaaagacgtcttcattgagaggtataacacatgggaaatctgtgcccgcgcttggc

SEQ ID NO: 27179 - DNA, 80 bp, synthetic construct
  misc_feature 1..80: note = Synthetic: >NC_001608.3-cand-12260-12339
  source 1..80: mol_type = other DNA
tcgaagacagtgatggagctgattatcctcctcttgatgtgttaggtgaattatacaaccagggagaccaaattattgcc

SEQ ID NO: 27180 - DNA, 80 bp, synthetic construct
  misc_feature 1..80: note = Synthetic: >NC_001608.3-cand-12340-12419
  source 1..80: mol_type = other DNA
atgtacctggaggacggtttcaaattgattaaacacttagaacccttgtgtgtcagctgtatacaaacacatggcatctt

SEQ ID NO: 27181 - DNA, 80 bp, synthetic construct
  misc_feature 1..80: note = Synthetic: >NC_001608.3-cand-12420-12499
  source 1..80: mol_type = other DNA
tacaccaagaaaatactggttccaatcacagatgattaagtcatattatgatgaactccatgatctcaatttgaaacttc

SEQ ID NO: 27182 - DNA, 80 bp, synthetic construct
  misc_feature 1..80: note = Synthetic: >NC_001608.3-cand-12500-12579
  source 1..80: mol_type = other DNA
aaatttcagacaataaggctgagtgtgcccaaaactttattaaaactatagttcaggcgaaattgactcctcaacaatac

SEQ ID NO: 27183 - DNA, 80 bp, synthetic construct
  misc_feature 1..80: note = Synthetic: >NC_001608.3-cand-12610-12689
  source 1..80: mol_type = other DNA
ggtcatcccgttttatacaatgatgttgcactagataaggttaaaaaacatgcgcaatcgacaaaaatcttaaaacctaa

SEQ ID NO: 27184 - DNA, 80 bp, synthetic construct
  misc_feature 1..80: note = Synthetic: >NC_001608.3-cand-12660-12739
  source 1..80: mol_type = other DNA
tgcgcaatcgacaaaaatcttaaaacctaaagtcatgtttgaaactttttgtgttttcaaatttatagtagcaaagaatc

SEQ ID NO: 27185 - DNA, 80 bp, synthetic construct
  misc_feature 1..80: note = Synthetic: >NC_001608.3-cand-12740-12819
  source 1..80: mol_type = other DNA
attatcattctcaaggatcatggtataaaaccacacatgatttgcatttgactccatatcttagacaacatattgtgtca

SEQ ID NO: 27186 - DNA, 80 bp, synthetic construct
  misc_feature 1..80: note = Synthetic: >NC_001608.3-cand-12820-12899
  source 1..80: mol_type = other DNA
aattcatttccatcacaagccgaaatttatcagcatctttgggagtggtatttcgtggagcatgaacctcttttctcaac

SEQ ID NO: 27187 - DNA, 80 bp, synthetic construct
  misc_feature 1..80: note = Synthetic: >NC_001608.3-cand-12900-12979
  source 1..80: mol_type = other DNA
taaaataataagtgatttaagtatctttataaaagacagggctaccgctgtgaaccaggagtgttgggacagtgtcttcg

SEQ ID NO: 27188 - DNA, 80 bp, synthetic construct
  misc_feature 1..80: note = Synthetic: >NC_001608.3-cand-12980-13059
  source 1..80: mol_type = other DNA
atagaagtgtattaggatataaccctcctgttagatttcaatcaaagagagtgccagagcaatttttgggtcaagcagac

SEQ ID NO: 27189 - DNA, 80 bp, synthetic construct
  misc_feature 1..80: note = Synthetic: >NC_001608.3-cand-13060-13139
  source 1..80: mol_type = other DNA
ttttccttgaatcaaatattagagtttgctgaaaagttagagtatttggctccttcttataggaatttttccttctcatt

SEQ ID NO: 27190 - DNA, 80 bp, synthetic construct
  misc_feature 1..80: note = Synthetic: >NC_001608.3-cand-13140-13219
  source 1..80: mol_type = other DNA
aaaagaaaaagagttgaatataggaagaacttttgggaagttaccgtatcgtgtcagaaatgtccaaacactcgcagaag

SEQ ID NO: 27191 - DNA, 80 bp, synthetic construct
  misc_feature 1..80: note = Synthetic: >NC_001608.3-cand-13230-13309
  source 1..80: mol_type = other DNA
agatggactggcaaaagcattccctagtaacatgatggttgtcactgagagggaacagaaagaagcattattacatcagg

SEQ ID NO: 27192 - DNA, 80 bp, synthetic construct
  misc_feature 1..80: note = Synthetic: >NC_001608.3-cand-13300-13379
  source 1..80: mol_type = other DNA
ttacatcaggcttcttggcaccacaattcagcaagcataggggagaacgctatagtgaggggtgcaagttttgttactga

SEQ ID NO: 27193 - DNA, 80 bp, synthetic construct
  misc_feature 1..80: note = Synthetic: >NC_001608.3-cand-13390-13469
  source 1..80: mol_type = other DNA
tacaacctcgccttccgatatgaatttacacggcatttcatagactactgtaatcgatgttatggtgtgaagaatttatt

SEQ ID NO: 27194 - DNA, 80 bp, synthetic construct
  misc_feature 1..80: note = Synthetic: >NC_001608.3-cand-13470-13549
  source 1..80: mol_type = other DNA
tgattggatgcattttttaataccactatgttatatgcatgtcagtgacttttatagcccaccacattgtgtgacagaag

SEQ ID NO: 27195 - DNA, 80 bp, synthetic construct
  misc_feature 1..80: note = Synthetic: >NC_001608.3-cand-13550-13629
  source 1..80: mol_type = other DNA
ataatcgaaataacccacctgattgtgctaatgcttatcattatcacttaggaggtatagagggacttcagcagaaattg

SEQ ID NO: 27196 - DNA, 80 bp, synthetic construct
  misc_feature 1..80: note = Synthetic: >NC_001608.3-cand-13630-13709
  source 1..80: mol_type = other DNA
tggacatgcatatcatgtgcccaaatcacccttgtggagttaaaaactaaattaaaattgaagtccagcgtcatgggtga

SEQ ID NO: 27197 - DNA, 80 bp, synthetic construct
  misc_feature 1..80: note = Synthetic: >NC_001608.3-cand-13710-13789
  source 1..80: mol_type = other DNA
taatcaatgtataacaactctaagtctttttccaattgatgctcccaacgattatcaagagaacgaggctgaattgaatg

SEQ ID NO: 27198 - DNA, 80 bp, synthetic construct
  misc_feature 1..80: note = Synthetic: >NC_001608.3-cand-13790-13869
  source 1..80: mol_type = other DNA
cggcacgagttgctgtcgaattagctattactacaggttatagtggtatatttttaaagcctgaggaaacatttgtccat

SEQ ID NO: 27199 - DNA, 80 bp, synthetic construct
  misc_feature 1..80: note = Synthetic: >NC_001608.3-cand-13870-13949
  source 1..80: mol_type = other DNA
tcagggttcatttattttggtaaaaagcaatatctcaacggtgttcaactgccgcaatcattgaaaacaatggcaaggtg

SEQ ID NO: 27200 - DNA, 80 bp, synthetic construct
  misc_feature 1..80: note = Synthetic: >NC_001608.3-cand-13950-14029
  source 1..80: mol_type = other DNA
tggacccttatctgactctattttcgatgatcttcaaggttctctggccagtattggtacatcctttgagagaggaacaa

SEQ ID NO: 27201 - DNA, 80 bp, synthetic construct
  misc_feature 1..80: note = Synthetic: >NC_001608.3-cand-14030-14109
  source 1..80: mol_type = other DNA
gcgagacacggcacatttttccgagccgttggatagcttcattccattcaatgttagcaataaatttattaaatcagaat

SEQ ID NO: 27202 - DNA, 80 bp, synthetic construct
  misc_feature 1..80: note = Synthetic: >NC_001608.3-cand-14110-14189
  source 1..80: mol_type = other DNA
caccttgggtttcctctagggttcaatattgatatttcttgtttcaaaaagcctcttaccttctcggaaaaattaattgc

SEQ ID NO: 27203 - DNA, 80 bp, synthetic construct
  misc_feature 1..80: note = Synthetic: >NC_001608.3-cand-14190-14269
  source 1..80: mol_type = other DNA
tctcataacgccccaagttttaggagggttatcatttttaaatccagaaaaattgttctaccggaacataagtgatcctc

SEQ ID NO: 27204 - DNA, 80 bp, synthetic construct
  misc_feature 1..80: note = Synthetic: >NC_001608.3-cand-14250-14329
  source 1..80: mol_type = other DNA
ccggaacataagtgatcctctcacttcaggtctatttcaactcaagaatgcattggaatttcttgaaaaggaagaattat

SEQ ID NO: 27205 - DNA, 80 bp, synthetic construct
  misc_feature 1..80: note = Synthetic: >NC_001608.3-cand-14330-14409
  source 1..80: mol_type = other DNA
tctatatcttgatttctaaaaaacctggtttagcagatgcctcagattttgtcatgaatccattaggcttaaatgtacca

SEQ ID NO: 27206 - DNA, 80 bp, synthetic construct
  misc_feature 1..80: note = Synthetic: >NC_001608.3-cand-14410-14489
  source 1..80: mol_type = other DNA
ggatcaaaggaaataataacgttccttagacaaacagttcgcgaaaatatcacgatcacgtcacaaaatagaataataaa

SEQ ID NO: 27207 - DNA, 80 bp, synthetic construct
  misc_feature 1..80: note = Synthetic: >NC_001608.3-cand-14490-14569
  source 1..80: mol_type = other DNA
ttctcttttccacataggttctgatttagaggaccaaagagtgtgtgagtggcttttatcatcaaaccctgtaatgagcc

SEQ ID NO: 27208 - DNA, 80 bp, synthetic construct
  misc_feature 1..80: note = Synthetic: >NC_001608.3-cand-14570-14649
  source 1..80: mol_type = other DNA
gatttgctgctgacatcttttcaagaacacctagtggaaaacggcttcaagtcttaggctatctagaaggaacaagaaca

SEQ ID NO: 27209 - DNA, 80 bp, synthetic construct
  misc_feature 1..80: note = Synthetic: >NC_001608.3-cand-14650-14729
  source 1..80: mol_type = other DNA
ttactagcttctcggacaatcagtttaactacagaaggaacaatgttgatgaaattaagagaattaacgagaaaccgatg

SEQ ID NO: 27210 - DNA, 80 bp, synthetic construct
  misc_feature 1..80: note = Synthetic: >NC_001608.3-cand-14720-14799
  source 1..80: mol_type = other DNA
gaaaccgatggaaaagttggttttcttatattgatgcactggacgatgatttatctgagtccttggaaaagttcacatgt

SEQ ID NO: 27211 - DNA, 80 bp, synthetic construct
  misc_feature 1..80: note = Synthetic: >NC_001608.3-cand-14790-14869
  source 1..80: mol_type = other DNA
gttcacatgtactgttgatgtggctaatttcttgagggcatattcatggtctgacgtcttaaaagggaaaaggctaattg

SEQ ID NO: 27212 - DNA, 80 bp, synthetic construct
  misc_feature 1..80: note = Synthetic: >NC_001608.3-cand-14870-14949
  source 1..80: mol_type = other DNA
gtgccacactgccatgtttactagagcaatttgaggtaaagtggattaatttatctgaggatttaagggaacaatttaat

SEQ ID NO: 27213 - DNA, 80 bp, synthetic construct
  misc_feature 1..80: note = Synthetic: >NC_001608.3-cand-14950-15029
  source 1..80: mol_type = other DNA
ctatcttcagactcaaaatcaactataaacttgttgccgtatgactgtaaggaactgcgacttgaaggaagcaatgacac

SEQ ID NO: 27214 - DNA, 80 bp, synthetic construct
  misc_feature 1..80: note = Synthetic: >NC_001608.3-cand-15030-15109
  source 1..80: mol_type = other DNA
agagttaaattatgtcagttgtgctcttgaccggaaagttgtccagaaacatccctctgttaatcgtctagcttggacga

SEQ ID NO: 27215 - DNA, 80 bp, synthetic construct
  misc_feature 1..80: note = Synthetic: >NC_001608.3-cand-15110-15189
  source 1..80: mol_type = other DNA
taggaaatcgagcaccgtatattggctcacggacagaagataagatcggttatcctcccttaagagtaaattgcccatca

SEQ ID NO: 27216 - DNA, 80 bp, synthetic construct
  misc_feature 1..80: note = Synthetic: >NC_001608.3-cand-15190-15269
  source 1..80: mol_type = other DNA
gcagcacttaaagaagctattgagatggtttctagattgttatgggtgactcaaggcactgcagaccgagaaaaattgct

SEQ ID NO: 27217 - DNA, 80 bp, synthetic construct
  misc_feature 1..80: note = Synthetic: >NC_001608.3-cand-15270-15349
  source 1..80: mol_type = other DNA
tattcctcttctcaattcaagagtaaatctggactatcagacggtgcttaactttttacctacacactactcaggcaaca

SEQ ID NO: 27218 - DNA, 80 bp, synthetic construct
  misc_feature 1..80: note = Synthetic: >NC_001608.3-cand-15350-15429
  source 1..80: mol_type = other DNA
tagttcatagatataatgatcaatatggacaacattcctttatggcaaacaggatgagtaatacatctacacgtgcaatt

SEQ ID NO: 27219 - DNA, 80 bp, synthetic construct
  misc_feature 1..80: note = Synthetic: >NC_001608.3-cand-15470-15549
  source 1..80: mol_type = other DNA
aagctgctattgatagtaatataatctttcaaaatactattaatttaggagttgcagttttagatattgcattgtctctt

SEQ ID NO: 27220 - DNA, 80 bp, synthetic construct
  misc_feature 1..80: note = Synthetic: >NC_001608.3-cand-15510-15589
  source 1..80: mol_type = other DNA
taatttaggagttgcagttttagatattgcattgtctcttgctaaattgtcgtcagcatcaaatgtcactttccgtttaa

SEQ ID NO: 27221 - DNA, 80 bp, synthetic construct
  misc_feature 1..80: note = Synthetic: >NC_001608.3-cand-15590-15669
  source 1..80: mol_type = other DNA
tgttaaataagtgctgcacgcggcatgtaccgtccgaatacctatattttgataaacctttagatgtggatttgaacaag

SEQ ID NO: 27222 - DNA, 80 bp, synthetic construct
  misc_feature 1..80: note = Synthetic: >NC_001608.3-cand-15670-15749
  source 1..80: mol_type = other DNA
tatatggacaatgagttggtttatgacaatgaccctctttgcagtgggattaaagggagattaggcagagtatctcgatc

SEQ ID NO: 27223 - DNA, 80 bp, synthetic construct
  misc_feature 1..80: note = Synthetic: >NC_001608.3-cand-15750-15829
  source 1..80: mol_type = other DNA
aacactcacattgagtttgaatgtcagtgacattggttcttatgactttccaactattgctgcatggacactaggagaaa

SEQ ID NO: 27224 - DNA, 80 bp, synthetic construct
  misc_feature 1..80: note = Synthetic: >NC_001608.3-cand-15830-15909
  source 1..80: mol_type = other DNA
ctatagtcggaagcattttttctgatgaatcttctcaaagtacggatccaataagctcaggttgcacaaaaactttcgtc

SEQ ID NO: 27225 - DNA, 80 bp, synthetic construct
  misc_feature 1..80: note = Synthetic: >NC_001608.3-cand-15910-15989
  source 1..80: mol_type = other DNA
acacatttccttgtgtatccagttgagagtatattttatgcattcggagctaacttaatagttgaaagtttaagtctaag

SEQ ID NO: 27226 - DNA, 80 bp, synthetic construct
  misc_feature 1..80: note = Synthetic: >NC_001608.3-cand-15990-16069
  source 1..80: mol_type = other DNA
taggatcaaatcaattaagaacctctcagatttgacattccttatatcatccacaatcaggaatttatcacatagatcac

SEQ ID NO: 27227 - DNA, 80 bp, synthetic construct
  misc_feature 1..80: note = Synthetic: >NC_001608.3-cand-16070-16149
  source 1..80: mol_type = other DNA
ttcggattcttcaatctactttccgacatgaattggtgctcacccgactagcccaccacataccgttaatttctttaatg

SEQ ID NO: 27228 - DNA, 80 bp, synthetic construct
  misc_feature 1..80: note = Synthetic: >NC_001608.3-cand-16160-16239
  source 1..80: mol_type = other DNA
ctgcaggagagaagagttcatcagatgctgttcggctatttcttacagcaagttatcagaattttatcaataatttcagt

SEQ ID NO: 27229 - DNA, 80 bp, synthetic construct
  misc_feature 1..80: note = Synthetic: >NC_001608.3-cand-16230-16309
  source 1..80: mol_type = other DNA
taatttcagttgtctgatgaagaagggtcagtcatcgctaccggtttggctttactttcctagtgaagggcaacaattaa

SEQ ID NO: 27230 - DNA, 80 bp, synthetic construct
  misc_feature 1..80: note = Synthetic: >NC_001608.3-cand-16310-16389
  source 1..80: mol_type = other DNA
agcctatattaaaaatcttacagagattatcagacttgttatcacctgacaaaattcaaaagcgtaaaattttggctgac

SEQ ID NO: 27231 - DNA, 80 bp, synthetic construct
  misc_feature 1..80: note = Synthetic: >NC_001608.3-cand-16390-16469
  source 1..80: mol_type = other DNA
acctgttgtccaattggcagcttttgggtctatccaagcaagtccacaaggactaaccattattatgcaagccttaatta

SEQ ID NO: 27232 - DNA, 80 bp, synthetic construct
  misc_feature 1..80: note = Synthetic: >NC_001608.3-cand-16460-16539
  source 1..80: mol_type = other DNA
gccttaattattggagagacaaagctaataaggttaagaatactcctttttcacacttgataaattgttcatttcctgaa

SEQ ID NO: 27233 - DNA, 80 bp, synthetic construct
  misc_feature 1..80: note = Synthetic: >NC_001608.3-cand-16540-16619
  source 1..80: mol_type = other DNA
ttttcttcacataccagttcagtctcctctaatcaacaagtgaccaattcgaagtatattgtttatccagaaaatatcac

SEQ ID NO: 27234 - DNA, 80 bp, synthetic construct
  misc_feature 1..80: note = Synthetic: >NC_001608.3-cand-16590-16669
  source 1..80: mol_type = other DNA
gaagtatattgtttatccagaaaatatcactgaaataaatgcaagaaccagattaataaattatggatcaacagctctac

SEQ ID NO: 27235 - DNA, 80 bp, synthetic construct
  misc_feature 1..80: note = Synthetic: >NC_001608.3-cand-16700-16779
  source 1..80: mol_type = other DNA
agcaaaatctagtcgaaaattgtcgaccatcagagggcatcagattcaaggacaatcaaaaaataacaaaacatgaccag

SEQ ID NO: 27236 - DNA, 80 bp, synthetic construct
  misc_feature 1..80: note = Synthetic: >NC_001608.3-cand-16780-16859
  source 1..80: mol_type = other DNA
agatgtgagagggaggaatcttcaccgcaacagatgttccctgaagataacatgcagactcctgcgcacatacatagttc

SEQ ID NO: 27237 - DNA, 80 bp, synthetic construct
  misc_feature 1..80: note = Synthetic: >NC_001608.3-cand-16860-16939
  source 1..80: mol_type = other DNA
ctccccatttcaaatccttataaaatcactagatgcacatgaggactttgatgcctcgaagataatcttaaattctgaaa

SEQ ID NO: 27238 - DNA, 80 bp, synthetic construct
  misc_feature 1..80: note = Synthetic: >NC_001608.3-cand-16940-17019
  source 1..80: mol_type = other DNA
taaataatcttaaccttacggagtatactcttaatacaaagttattgacaactcctaccaggacagaaattttagataca

SEQ ID NO: 27239 - DNA, 80 bp, synthetic construct
  misc_feature 1..80: note = Synthetic: >NC_001608.3-cand-17020-17099
  source 1..80: mol_type = other DNA
agtccgttacaatcctctagatattcatcaacttccagggaacggtctctactatccagagaacaagcttcatatttgta

SEQ ID NO: 27240 - DNA, 80 bp, synthetic construct
  misc_feature 1..80: note = Synthetic: >NC_001608.3-cand-17100-17179
  source 1..80: mol_type = other DNA
cgttgattgcagtaatattccttctatctctctagacccaggttttcggagtatgtctgatcagaatcaagttcaaatgt
